United States Patent Application Publication US 2007/0059710 A1 - sequence listing, part 8

SEQ ID NO: 22209 - DNA, 201 bp, Homo sapiens
gacggcacgcaaacactgaatttcgcaaacattagtgtcatttcctacttgtccctagaaatagtaatgagcatacatcttgaatcctcttattttggatyatatacaagaaagtaaaagttttcaaatattctgaagtctgggcatgttaggataatatgacatggaactaattatgtaagggtacattctgggtcattt

SEQ ID NO: 22210 - DNA, 201 bp, Homo sapiens
ccttggtcccataaggccagtctgtttttgcattcctcagttctgatttcttttggcaggaggactacatgtggttgacagattatatctgaaaagggctytggtaattgctcgttctcttcagtgactgtgttgctgacagatgggcacagtgaatattgaaagtgttctggacctccgcttactccttcagctcatgag

SEQ ID NO: 22211 - DNA, 201 bp, Homo sapiens
ggcaggagagtctctggtaccaggaagcagaggctgcagtgagccaaaatcgcgcctctgcactacaacctggggacagagggagactctgtcacacacamaaaaaataaataaaaataaataaataaaatgccctaaaacagctggataaagtttatcttgactgtatttatcaggtacctcacataacttttgaactgt

SEQ ID NO: 22212 - DNA, 201 bp, Homo sapiens
gtactctgttaatcttgactatattaatacgagattagggaagtttggggggctacagctacatttgagaatctgatgacagctgtggactgtggactaamacttgtgtgcccagacccaggcagtttactcatggcgtcgggcagttcacagaccccacggtgaggatcttgatttgggggatctgccaccattctgttt

SEQ ID NO: 22213 - DNA, 201 bp, Homo sapiens
cacttctgtcactttcttaaagcaagtcacagggctagcccagatttaatgtaggagaggactaaatagaggcatgaatgacgggaggcatgtttcattargagttatctttggaatttagtcaccactatacttaaacttcagcctccagttatgtgcacccaacgcagtgcctcatacagtagacattccatctatttg

SEQ ID NO: 22214 - DNA, 201 bp, Homo sapiens
ggatgctttatttttcccttcctggtttcatttagataattatattattcaccctggaatataattgccgttatactgtgggggatgtgggagtgaagtarggtgggagctgcctgctgctggcatctgcaggttgtaaaatgtctgttacactctagcctctaatttttttgccatcccaccttttaaagatttaattat

SEQ ID NO: 22215 - DNA, 201 bp, Homo sapiens
ttagcagcagctgtggtggtatcttcacaaaactatctttgaagagtgattctggagagattttggccacaatcccagctgctgtctagctttgtttattyctgctccctttccaagtctcattctccagccttcctggctcatcttggagttgcccagtaccctttcaataattccttctctgcaactttgaaccctgat

SEQ ID NO: 22216 - DNA, 201 bp, Homo sapiens
atctgggtgttttaaaattccagagcctgtgttcctttaatgtgtatgtggatggctcttgtttgatatagttgatgaggtagtaagagactttcttggtrtattcctaatggtagtattctagatttgggtttttctttttgcatccttttattccacttgagtgatgaatcacttttggtgactgaccttattttcaca

SEQ ID NO: 22217 - DNA, 201 bp, Homo sapiens
gcccctactcatcttctctacctcttaattggagtatctcagggctcagttttagacctctcctttcctctattccatcagatccactccctagtcttacrgctttaaataacagctgtacaagaatagcatctaaacttttattgcagtgccaatctctcctctcaactctcagttcatatatctactgcccatttcatg

SEQ ID NO: 22218 - DNA, 201 bp, Homo sapiens
cagaatggcctccacctgttgcaaggaaagcatgttgattcaaactaaggaaatacctgaagagaaattattcatttctcctgagtcagattctgaacacrgagttctggaaacagtccattgaagtggataccatctcatgctttatatatctcccagagtacaaattattcattccttaaacatgaggagacagacgga

SEQ ID NO: 22219 - DNA, 201 bp, Homo sapiens
acagtccctcacagtccctcacagcttctgttgggtagggggagagaattccttgtgcttcctgggtgaggcaacatcccatcttgctttggctcgccctyggtgggctgcacccactgtccaaccagtcccagtgaggtgaaccgggtacctcagttggaaatgcagaaatcccccttcttctgcgtcgatctcactggg

SEQ ID NO: 22220 - DNA, 201 bp, Homo sapiens
cacacaggcaaattgtgttcttggaagtgctggtggtggtttcttctatatttttggttacttttagctatatattattgcctgtcagtgtaccttccaayttataaatgaaactactctttgggtgatattgtgccccttaccccacaagcacttctttctacctgctctattaatacaggttctttcagggtctctcat

SEQ ID NO: 22221 - DNA, 201 bp, Homo sapiens
ggttccgaggagaccctagcaggagaggcccagggcaaggggaaagatgaacagttgacacacctgcctcttggtaaagtctcttgcgcagtacagaatgkgggcccatctctgctttctccaccagagagcaactggatagccttggatggagtcagaaatcagcctgtagatctgtgaaatgcctaatagttgtccctg

SEQ ID NO: 22222 - DNA, 201 bp, Homo sapiens
ttggctgtaatgttttcaggaatcaaggttataatttggtgggtatattaccctgattttgtctcctgcgcttttcaaattcctttgagacatcctccatygggtaagactatactttctgcttgggctcttcccttgctccatgaaaaccgggaggcgccttctgggagaaagccagaggaattcgcctactgtgctccg

SEQ ID NO: 22223 - DNA, 201 bp, Homo sapiens
gatagcttcttctctagtttgctcactgttagctagtgaaaacatgccagcttataacttggcaagattactctgagctactcagggcacggtcctcagtmcagcgacctgtctgctcactattacccgtccttgatgaaataagtacagaaatcgagatgaagccattagaaactcctagtgatttggaaaacgtaactt

SEQ ID NO: 22224 - DNA, 201 bp, Homo sapiens
tcccaccattgcatgccagactgggcgacaagagtgaaactcagtctcaaaaaagtgtgtgtgtgtgtatatatgtatgtgtatatatatgtgtgtatatrtgtgtgtgtatgtatatgtgtgtgtgcacatatgtgtgtgtgtgtgtatgtgtatacacacacaaaggggacttcaaaaggtcatggataaaaggaatta

SEQ ID NO: 22225 - DNA, 201 bp, Homo sapiens
ggggttttgctttcttgcccagtctgatcttgaactcctgtcctcaagtgatcctcctgttttggcctcccaaagtactgggattacaggcatgagccacygtgccaggcctctaatttcttgaaatgtatcttttcctcactttttcttttccctgtttactcattctcaaatgagaggaaatctacctagaccttgtgt

SEQ ID NO: 22226 - DNA, 201 bp, Homo sapiens
ggattgtgaatacttgtatgtaattaatctcttcgggggtgtcttgccttaagaaaagacagtatttgagatagattcactctgagttgattatccatttytactaaaaggatttataataggagtctcttatatagcaagctgttctataatggagcatttaaggcaatatttcacttttgcacacattttcagggtcac

SEQ ID NO: 22227 - DNA, 201 bp, Homo sapiens
tttgcatggaaaaatgattggaaagaactaggttaaaatattatatattattgcatcagatgagtgacaatatgatgatatttttcttttgtaattttctrtgtttttcaagttttcttggttgagtaggtattatttttgtaatttgggagaaatgccaagcttaagaaaaaaataccattctaggcctgactttttttt

SEQ ID NO: 22228 - DNA, 201 bp, Homo sapiens
cccacttcagcctcctgagtacctgggaccacaggcagacacaatcactctcagctaattttttaaaatttttgaagagacagggtctcaccatgttgccyaggctggtcttaaactcctattctcaagcagtcctccagtgtcagcctcccaaagggttgggattacaggcatgagccaccatgcctggctggtggccct

SEQ ID NO: 22229 - DNA, 201 bp, Homo sapiens
gatctcctggacatcaggtgatcttcctgccttagcctcccaagtagctaggaacacaggtgtgcaccaccgcatgcaccatcacacctggccaattttarcttttttattgagacaaggtctcacttttttgctgaggctggtctcaagctcctggcctcaaacagtcctcctgcctcagcttcccaaagcactggggtt

SEQ ID NO: 22230 - DNA, 201 bp, Homo sapiens
ggataaggctacgtgatgggccagtggtttaccaaattatttttcattttctggatctcagtgtcactgaaagttaatgcatcctctttctctgctagagwcctgagttaaaatccattttagggcataagtataaatgaatttgttgttgttttttcctccttggggacactgtggtcattttgtgaggctgcctttcca

SEQ ID NO: 22231 - DNA, 201 bp, Homo sapiens
cttatatacaattttaacaaagggtactaaattgttgagaattgactagacaaagagggtttgggtttctaggggcaaaaaaaatattgtgggaagatgasatatatgggggaaactaatgacaggtaagggttatttcgtaagggttgattatgcaaactcatttcagtgttctctctgtctctggtgataaggattgtt

SEQ ID NO: 22232 - DNA, 201 bp, Homo sapiens
tgtgattcatttcagttccgtgttttttttttgttcgtttgtttgcttgttttttgagacggggtctcactctgtcagcaggctggagtgcagtggtgcartcttggctcactgcaacctctgcctcctgggctcaagcaattctcctgcctcagcctcccgagtagctgggactacaggcacgtgccaccacgcccggct

SEQ ID NO: 22233 - DNA, 201 bp, Homo sapiens
atctttgttttcaactgaatcataattgtgtgtgcagattttgaaaaaaccaggatggcatacggcacagagtagtatggaaaagagaaaattctttgttsgaagagagggttttttttccctccagttgaagagcattttaaatgcacaaaatctgtctcagaaatatccctttgaaagatctttgcatacacaagattt

SEQ ID NO: 22234 - DNA, 201 bp, Homo sapiens
atttcctgaaggctttgaggcctgtagtattgatggtggtggtatggtcaggttttttcaagccattatttgtacatagatgtggtcacagcctgtggtgwgaattgctgtggttgtgtgttgtagttgaaacttgctgtattacctgtgtaaccttggaacagttacttaaaaccaccgcgtcttagtttcctcatttgg

SEQ ID NO: 22235 - DNA, 201 bp, Homo sapiens
tatttgggtctttaattaaacctgctggatattgttcatatttccattagctcctttctagttagtctattatttttctaattgacatctgttctgagtcwcatgtccttgaatttcaggtggcccattttgtagctttggtttatttaggttttctctctttcataaattacctaaggatttagttaatacaccctcaag

SEQ ID NO: 22236 - DNA, 201 bp, Homo sapiens
attgtattctcttcagattgttgtcactgtcagttggttttcgggaagaggctttcaaattatctcctatggccttttatatgttgattcattcaaatacygagtgaccatataatattttaagtcaaccaggacatgtgaaagtgctcagagtgagagaatatatgagtactccgtgtatcaccagcttaattttctata

SEQ ID NO: 22237 - DNA, 201 bp, Homo sapiens
tggtgacctttagtgaatttgtctttctggcctatattcaccccagagataaatattaatggccatgatgaacgtggccatttttcttcaaaaccatttgrtctgcagtggcacgaactctaaattttactacacaaataatttaggacggttggaatatggctagtaaagaggttaaaagggaaaggacagcccttctat

SEQ ID NO: 22238 - DNA, 201 bp, Homo sapiens
ccttaagaaaagtgattggttggcttgtttctttcattttaatctgttgtctccgtcacagtcaaattagcattatgtagtatattactacacttaaaaarttatttaacccatttatagagggcatctgtcggttgcatttgatttatttaaaacgttttcttacatggccaatttagtaacagcaagcaaaaccaaaat

SEQ ID NO: 22239 - DNA, 201 bp, Homo sapiens
taaactctttagcatgcatttcccaagaagaaagacattctcttatgtacccatatcattaccatatgtattagttttatgttgcggccttgtaaccaatwaccactgttgtcaatagtcttggccatttgagtctgtcctgacctttcccctgctctgttctttattacaggggaactgactttgcaggcagcatttcct

SEQ ID NO: 22240 - DNA, 201 bp, Homo sapiens
ttaccttactattattatccctcatttttaaacagataaggagactatcttaaaatttttaacacaatttgcttaagttgacacaagtaaatgggaaaacrgagctttgaactcaggatgtcgagctgcagaacctgctttcttatccagaggggttgaagaaggatcacattaatggttgcttttattttttgttcagtt

SEQ ID NO: 22241 - DNA, 201 bp, Homo sapiens
tggccaagttgtctaacttatctttagtttcaccagctgtgaaacacaaataatgtgtacttccagacctgccgcataatcagtgataacacaaaaaaagyttttattatgtcagaaccaatctcttctaattttaattattactttgtggcttctaattttaataatcatttctgtgtaatcctagcctatgtgaatcgt

SEQ ID NO: 22242 - DNA, 201 bp, Homo sapiens
ctgacatgagtaaataatttgcttactcttataattcatcatttcttttgataagaaaatattctcttcttgtatagactaaaacagggacacagtatgtrtatcttttggtgttgaaatactctaatgtttttaagcactagtatttatctttatcatgtagttagagtttcatttagttgcttcaattgacttttagac

SEQ ID NO: 22243 - DNA, 201 bp, Homo sapiens
ataaaagagactgctttgcggggttgttaaaatcagtttttcaaacataattaatcaaataaaatttacctaatgacatttcagtagtccttatggggtcwcaattgctctatttttttttttattttaaataaggtgaagtgtaaatgaaagtttttcgtaatgttgtttacatgtgcaaaatgattagataccttgcca

SEQ ID NO: 22244 - DNA, 201 bp, Homo sapiens
tgtaaaatggacataggaataatatgtacctcatagaattacagtgagcgtcagtggggaagccactccaaagccttcagtaagactccaagcaaccttaygttgccttctgattgcttttatccttaggtgtccctaggtcattgctttcatcccagagcatgcctggagcttgtaagtgcctcctaagggacataagaa

SEQ ID NO: 22245 - DNA, 201 bp, Homo sapiens
ttagaaaaaaaaaaaagtagctgtcagtatggagcttatgttctagaagaggagataaatgataagaaatacatacttttctttttctgagacagattttygttctgtcacccaggctggagtgcagtggtgcgatctcagctcactgtaacctctgcctcccaggttcaagtgattcttctgcctctgcctcccttttag

SEQ ID NO: 22246 - DNA, 201 bp, Homo sapiens
ttctgaaatagagtttttaatactttttaagtcatggaccccttttgacctgtcaggataatgctgtttactgtgttaatgaatgcaaagagtacaaaagraaacccactatattgaaatacaggtacaataaataagaagatctagtgtcaagtctaataatactataatttcaaagtagttatgagtataggtgtaatt

SEQ ID NO: 22247 - DNA, 201 bp, Homo sapiens
gccccagcccctgcacctgctgacctgtgtgctccccttcctgtgaggggttgagggctgtgggctgagtaaagaagccaccctcttccggagtcccacaraagggccaagggaactatcctatttcaattgcagcatctcccgagttgctgagagtataggcatgtaccaccacacctggctaatttttaaaattttttt

SEQ ID NO: 22248 - DNA, 201 bp, Homo sapiens
cctcaagttatctgcccaccttggcctcccaacatcctgggattacaggcatgagccaccgtgcctggcctaaattggtagatattaaagcttatactttsaaaattaggcaagtcttttgttttggtgtcagtatttcttgtcattcttgatttttttgtgaaagattggagagcaaaagtggtatgaacagttgtcaat

SEQ ID NO: 22249 - DNA, 201 bp, Homo sapiens
attatttctgatgtgcttattttgttttgtgtgtttgtatgtcagaaaaacattttttagttctttctatgtgtcaggcattgtgctgagcactttatgtkcatgatctcatttaatccttgttatagccttatgagctataactccccttatccccattttactgatatggaaaatagtgatcagagaggtttagaaatc

SEQ ID NO: 22250 - DNA, 201 bp, Homo sapiens
tactttttgcaccaccctaatggagacaaaaggcttataccagctatcatgtcaggaatattctaagaagctaccacgtaacacttctgcttatgtctcayaggacaaaagccttacctaactacaagggagggccagaagtgtagtcttaattctgagaaaaaatcaggggagaataattattggccacagctaacagtt

SEQ ID NO: 22251 - DNA, 201 bp, Homo sapiens
ggataatcattagtgatattaaacccctcaaaaaattacattcttccctgggtctaggaagcatcttctgagttaatctacactagcagttttaaaactgygtatgttccctagaacagttagaggtctggaaaggtataagaaattgggtgatcagaattctcagttccctcttgaaagcttcatccagggatgcttaat

SEQ ID NO: 22252 - DNA, 201 bp, Homo sapiens
accatcctggctattagaagacttacggtttaagtatctcatattaaatgtttcctcctaatcatccaggcaaacaaagtcagaatgtattagtccactamtgtatgttcagcatctgctatgctcagagtattgtgctagaattgtagaaaacataaggaagttgaaccagtttctgaattcaaatcacttatacttcag

SEQ ID NO: 22253 - DNA, 201 bp, Homo sapiens
acccaggaggcggagcttgcagtgagctgacattgcaccattgcactccagtctgggcaacaagagtgaaactcctcaaaaaaaaaaaaaaaaaaaaaaawatggagagtcttaagtcaggttgaagttgtgaacctgagtgattgggagttggggtcaggaagatggtgctttgtgcatgttgaattgaaggtctgtgta

SEQ ID NO: 22254 - DNA, 201 bp, Homo sapiens
tattaaatagggaatcctttcctcattgcttgtttttctcaggtttgtcaaagatcagatagttgtagatatgtggtgttatttctgagggctctgttctkttccattgatctatatctctgttttggtaccagcaccatacctttcagttcttactatatctttcaacagtgagctcttccttagtactttgagtgtatc

SEQ ID NO: 22255 - DNA, 201 bp, Homo sapiens
tgacctttattcaactgtttgcctcttctcctccatctaactgaaggccatgtaagatccaacagtgatgatttcaccatcctggctattagaagacttayggtttaagtatctcatattaaatgtttcctcctaatcatccaggcaaacaaagtcagaatgtattagtccactactgtatgttcagcatctgctatgctc

SEQ ID NO: 22256 - DNA, 201 bp, Homo sapiens
tgataaatgatatcatttcatataagggcattttaatctgatgcattagactaaggatagtctgaacttttttgttgctaccaccacttcagtctttatcrttaatgagaagctcagattgataaagtaatattaaactattattcttaatatattaatgtcaaaataacaattttttagagcacttttttgtatacatct

SEQ ID NO: 22257 - DNA, 201 bp, Homo sapiens
atatattaaaaaccagtgtaactccaactgattaccccatcatagttcttattacttcagaaaactattaaaagaacactaataagttttccatgcatggkttcatttttataaccaattgctaaattgctaagttgcctttttattcactttcaaatttacaaacaatttccaagtctgtgctttcatttactaatgcaa

SEQ ID NO: 22258 - DNA, 201 bp, Homo sapiens
atattacgaaacaggtgtcaaagagttttccagaccagcatctgttccagaaatgtgaggaaagctctcaaagcatgttcagtacctgagaagtttggaaytccagatcaagagaagcatttttcctcaggcttaaggccacatagaaggtctgcactttgtgtcactttacattttactgacctttattcaactgtttgc

SEQ ID NO: 22259 - DNA, 201 bp, Homo sapiens
tctatcgccttctccacaacagctcagtaaaagagtgaagtttttgagtttcatttatgcctttccctgttttgctataaaaatcaaccaaggatgctttyagatagcaccagtatgatgagggaaataagctttcattgcaggatgattactgttggtgatgatgtataaaataaagggagggatgttatgtggaatgtt

SEQ ID NO: 22260 - DNA, 201 bp, Homo sapiens
tcttcagcgttgatgacaaacctgttacaaacaaatttttggatgggatattgtaatacaaatgaaactgtttgtgaaacagatgacctgattgtttcatwtgcgtttatattatctgtattggtgatgtgctccacaggatcagataattatgataatacacacgtgttgaaaagagatgcattcaattcacagctatgg

SEQ ID NO: 22261 - DNA, 201 bp, Homo sapiens
ccaggatggtcttgatctcctgacctcatgatccacctgccttggcctcccaaagtgctgggatcacaggcgtgagccactgtgtctggccagaaatggayacatgttttatttccttggtttcactttagaaactttgaaaaatattcttacttcatacttcaacttctttccagtataccaactatatcaataaagggt

SEQ ID NO: 22262 - DNA, 201 bp, Homo sapiens
gtgttcctatttctccacatcctctccagcacctgttgtttcctgactttttaatgattgccattctaactggtatgagatggtatctcattgtggttttkatttgcatttctctgatggccagtgatgatgagcattttttcatgtgttttttggctgcataaatgtcttcttttgagaagtgtctgttcatatcctttg

SEQ ID NO: 22263 - DNA, 201 bp, Homo sapiens
accatgcttgtttttgcataatagaaggagaaaaggattaaattctttgttctaattaataggaatgaaaatagaattgcaatccgtggtatggcaaaatragagaaaataaggcttgtaagtaattttcatggttgtttaggaataattgtttcattattgagttaatagtttttacaaacagcttccatttccatatca

SEQ ID NO: 22264 - DNA, 201 bp, Homo sapiens
gagaatcgcttgaacccaggagctggaggttgtagtgagccaagatcccaccattgcatgccagactgggcgacaagagtgaaactcagtctcaaaaaagwgtgtgtgtgtgtatatatgtatgtgtatatatatgtgtgtatatgtgtgtgtgtatgtatatgtgtgtgtgcacatatgtgtgtgtgtgtgtatgtgtat

SEQ ID NO: 22265 - DNA, 201 bp, Homo sapiens
gaggcggagctcaggtggtaatgctcgcccagctggctgctcaccacctgctgtgcggtctggttcctaacaggccacagacccgtactggttcatcgccyggtgtgggggtagggggacccctgatgtaaaggtttcggtgggaaatatgtactcttcggggatgtgctttttaatttcacaataatttgtgttttttgt

SEQ ID NO: 22266 - DNA, 201 bp, Homo sapiens
agtggcgtgatctcgactcactgcagcctccgcctcccaggttcaagtgattcttgtgcctcagcctcctgggtagttgggattacaggcacccccccccmcaccacacctgactaatttttttgtatttttagtagacatggggtttccccatattggccaacctggtcttgaactcctgacctcaagtcatctgcctgc

SEQ ID NO: 22267 - DNA, 201 bp, Homo sapiens
tatggatttgcctgttttggacactaagtataatggaaccatgaaatgtgtggcctttattctggtttccgccacttagcataatgtttttaaggcttatycatggtatagcatgagtcagtactttgtttttcctgaagtaaggatgaccattgaaggagcaagctggggattgcaggtgggtcagagtttgtttttgga

SEQ ID NO: 22268 - DNA, 201 bp, Homo sapiens
cattttctcaatttaaaaataaattgaggtctgaaagagttgtttattgctctgctcgccaaccttaatctagtgctggggcagtatctgtacctatctgmctgatctgtgtttcaaaatgctactaaattgatgccttttctttgacaaaatcaccatgaatcagaatggcaatcacagggcccccttgagttttaggtt

SEQ ID NO: 22269 - DNA, 201 bp, Homo sapiens
ggcctttattctggtttccgccacttagcataatgtttttaaggcttatccatggtatagcatgagtcagtactttgtttttcctgaagtaaggatgaccrttgaaggagcaagctggggattgcaggtgggtcagagtttgtttttggacatactaagttagagtcatgcttaatggaattctagtgaagatgttgagaa

SEQ ID NO: 22270 - DNA, 201 bp, Homo sapiens
atttactgaattcagtgaaggacggaggtcagtacttcaaacatagaacacttaaccttttttctattggttggtgtcattattttgattgtagatatgtrggagtgctgtatgtccttttgttatcaatatagtactccatcagagcaaaaatttaaagtgtattctaccttggagatctgggaaatagtctgagtctgg

SEQ ID NO: 22271 - DNA, 201 bp, Homo sapiens
tcctacatccctgccaaattcatgactcccacactgtccaaaaagaaatagtaaagcaccaactttaatcaaatataccatgtcagattttggaagaaacmaaaatggggtaccgcggtaaggatgggatctagtttcagtgtgtatgataaacatttctgcttagttgctagagacctacacagggaatgttacgatagg

SEQ ID NO: 22272 - DNA, 201 bp, Homo sapiens
agttttatggaaagatcactcacttcatagaaatttttttattttacctactcagtagcaggttgtattagtccgttctcacattgttgtaaagtaatacmtgagactgtgtgatttataaagaaaaagagatttaattggctcacggttctgcaggctgtatgggaagcatagcagcttctgcttctgggaaggcctcag

SEQ ID NO: 22273 - DNA, 201 bp, Homo sapiens
gttgtaagataatttaacttgatcaaattcaaatattaggcttagaatgagctcaggagttcaaggtcagccagagtaacatagcaagaccctgtctgtaycaagaaaaaaaaaatataatgtattcttacctggtgtaataaatagaaaagaccaggtaagcagtatgagaataaaaatatagatacgtatgttaatgaa

SEQ ID NO: 22274 - DNA, 201 bp, Homo sapiens
ctcctttaacctacttcctagagcagttagaattaaacacaatctccctcttgagaaactgcttcctttgctgctgtttattattattattattattattwttttttttttttgaggtggagtctcactctcttgcccaggccggagtgcagtggtgcattctcggctcactgaaatctctgcctcccaggttcaagcaat

SEQ ID NO: 22275 - DNA, 201 bp, Homo sapiens
ccattttcagaaccatggcaaaatggattgaggttcaggggaactgtaacctaattaggagccaagggaggagctaattcccaaggattggacatgtgtgrtgggctcgatagggaagaccataggcttagtttgctctccgaagcatgctgaatcctgagcttaaccgcctccactcttagttttctcatctgtgaaatg

SEQ ID NO: 22276 - DNA, 201 bp, Homo sapiens
gacaagttacttaacatcgccgtgcctcatctttaaaatggggaaaatgggagtattttgaagattggtaatataatgtatatagcaattcatataatgcytgatatatggtagcattaatacgttattttttaaggaaccatttacaacttatatctgctactgtgaatataagcctttgcatcccttgaaaactttact

SEQ ID NO: 22277 - DNA, 201 bp, Homo sapiens
gccggagtgcagtggtgcattctcggctcactgaaatctctgcctcccaggttcaagcaattctccttcctcagcctcctgagtagctaggattataggtrtgcaccatcacacctggctaattttttgtatttttagtaggggctgggttttaccatgttggccaggctagtctcgaactcccgacctcaggtgatctgc

SEQ ID NO: 22278 - DNA, 201 bp, Homo sapiens
agtttgaatttatatttctcttgtgagattgcacgttttcatatattgaagaactttttatatttccttttctgcaacctgtctcctcgtattattttgartaattttcagttgcctcttttttcccccttactgatttctaggatttttttttttaatctgggaatacagcaatttgagatatgagcttccaattttttt

SEQ ID NO: 22279 - DNA, 201 bp, Homo sapiens
gtgcagtggcacgatctcggctcactgcaacctccgcctcccgggttcaagcgattctcctgcctcagcctccctagtagctgtggctgtaggtgcatgcyggcacgcctggctaattttttgtattttagtagagacggggtttcactgttgttgcccaggctggtctcgaactcctgagctcaggcaatccacctgcct

SEQ ID NO: 22280 - DNA, 201 bp, Homo sapiens
ggttcctttagatgtttaataacctttatgagtgaaaatgctgcctaatatttggaaatcaaacatttatagctctaaataaaacttacctctacagttayttctcacttttattcttatgtctaaagggtgtggaaacatcattgaacattgtttttcacacgcagatgagactctgttgaagggagttttgtggtttag

SEQ ID NO: 22281 - DNA, 201 bp, Homo sapiens
tggtgcattctcggctcactgaaatctctgcctcccaggttcaagcaattctccttcctcagcctcctgagtagctaggattataggtgtgcaccatcacrcctggctaattttttgtatttttagtaggggctgggttttaccatgttggccaggctagtctcgaactcccgacctcaggtgatctgcccaccttagcct

SEQ ID NO: 22282 - DNA, 201 bp, Homo sapiens
ttgtgagattgcacgttttcatatattgaagaactttttatatttccttttctgcaacctgtctcctcgtattattttgaataattttcagttgcctcttytttcccccttactgatttctaggatttttttttttaatctgggaatacagcaatttgagatatgagcttccaatttttttcccatttatactttggcttt

SEQ ID NO: 22283 - DNA, 201 bp, Homo sapiens
gtaagagtttacactttttttttttttttttttgagacagagtttcgcccttcgcccaggctgtagcgtagtggtgcaatctcagcccactgcaactgccrccttctggtttcaagagattctcctgcctcagcctcccaagtagctgggattacaggcacccaccacaacgcctggctgatttttgtatttttagtagag

SEQ ID NO: 22284 - DNA, 201 bp, Homo sapiens
tcagcctcctgagtagctaggattataggtgtgcaccatcacacctggctaattttttgtatttttagtaggggctgggttttaccatgttggccaggctrgtctcgaactcccgacctcaggtgatctgcccaccttagcctcccaaagtgctaggattataggtgtgagccactgtgcctggccctttgctactgtttt

SEQ ID NO: 22285 - DNA, 201 bp, Homo sapiens
ccagctgaggttataaatgaggaattttatcataattttaaaataacttttatagtttgttttacatttaaattttcaatttgtttggcaattatctaggyataggttatgaggaaatcattcgacttctgccttgcgtttgttttatttatgacttcactatttcaaccagttttcattgagtatcatttatgtaccagg

SEQ ID NO: 22286 - DNA, 201 bp, Homo sapiens
catgcttacagattctctctctctctctctctctctctctctcggatctaagtttctacatgttttcctgcattcatcacaatttcaaccttgtaataaargcacaaataatgctggctctttgtaatgcctgctgtttgtaagatccctaaataaagactccaaaattgttatcattaagaaaattctcagaacaatata

SEQ ID NO: 22287 - DNA, 201 bp, Homo sapiens
tttttagtaggggctgggttttaccatgttggccaggctagtctcgaactcccgacctcaggtgatctgcccaccttagcctcccaaagtgctaggattayaggtgtgagccactgtgcctggccctttgctactgttttaaatggtggctcgtctccagcacattggtgtgataggtgtcttccttgtctcttacaaatc

SEQ ID NO: 22288 - DNA, 201 bp, Homo sapiens
ggttttaccatgttggccaggctagtctcgaactcccgacctcaggtgatctgcccaccttagcctcccaaagtgctaggattataggtgtgagccactgygcctggccctttgctactgttttaaatggtggctcgtctccagcacattggtgtgataggtgtcttccttgtctcttacaaatcgctttctttctcttct

SEQ ID NO: 22289 - DNA, 201 bp, Homo sapiens
tatgtgggtaggtgagtgagagtgagaaagataatatgcccggggttggatgtctgttttcatttattattaagtagaagaagatgctcacatacttgtargtacagaagcttcaacatagcagtctttcacagtgtgagttatgatagacgcaatctaagagtaaattataaaagtgatagggccggaacagacttttat

SEQ ID NO: 22290 - DNA, 201 bp, Homo sapiens
ttataggtgtgagccactgtgcctggccctttgctactgttttaaatggtggctcgtctccagcacattggtgtgataggtgtcttccttgtctcttacaratcgctttctttctcttctccctaaaaattcccatactttcggattattccatctgttattatttcttgtactcatttatagaccctaggattgtcccta

SEQ ID NO: 22291 - DNA, 201 bp, Homo sapiens
tcacttcagaggattatcgattaatttgcataaatgtatttatgcttgagagttaaagtaatgcactattagttttataaaacagttggcatagctgtcaragttcttaatgttctttgcagtgttacagctagaatttcccagggcattgaaagaaaaagcaaagaaagaaatctttagtagtgttacattctgcttgtt

SEQ ID NO: 22292 - DNA, 201 bp, Homo sapiens
tcatcaactactgaacactattagagatttaggcgttatactgaaataggattaaaaaaagaatgtggtattcaaacttgctgcaacagtgtttaggagtrcattgtactaaagaccctagtggatgtggggaaaattaataaatggttgttatctgaagtaaatatgctgtatttctttttttttttttttttttttttg

SEQ ID NO: 22293 - DNA, 201 bp, Homo sapiens
taaaaacccagcatctctccttctactagatttccttttttttttttttttttttttttgagacggagtttcgctcttattgcccaggctggagtgcaatkgcgcaatttggctcacccaacctttgcctgccgggttcaagcgattcttctgcctcagcctcccgagtagctgggattacaggcatgcaccacgacgccc

SEQ ID NO: 22294 - DNA, 201 bp, Homo sapiens
taattttttcatctcttttagtgtttgcctaaatgtttctctatctcctttacacataaaagggtctcctggttgtatctagctcctgaccacaccaaagktaccactcttgcatttcccctaccacacagtacacagttccctgttccttctcctctggtattctcccctcagtctttctgacactgtttctgcttaaga

SEQ ID NO: 22295 - DNA, 201 bp, Homo sapiens
aacaaagtaagacctttgtttctacaaaaaataaaaataaaaaaataaaaaactcaatcaggtgaggtagcatgtgtctgtacccctagatagccgggagrctgagggaggagaattatttgaccccaggagttagaggctgcagtgagctgtgatcctgccactgcactgcagcttgggctacagagcaagaccctgtgt

SEQ ID NO: 22296 - DNA, 201 bp, Homo sapiens
catattattggcaaatttgcataccatcagatgacttattttgcaatttggttatttgattatttgattcatttagtgatttttagaaatgttcaagtcarccaatataaaataaccatggtttccctttccgcctgtttcaggcttggctactgctatagtgacccttttccagtcattgtgcttttctcacaattctca

SEQ ID NO: 22297 - DNA, 201 bp, Homo sapiens
tatagttgccctgctgtataatagaacacctgaacatattcctcttaactttctgattctttcataatgacatttagcttaaaacacaaacacattgtacrgtggtacaaaaatattttcttttttatatccttatagatgtttttctgttttggaaattttttatttttttactttttaaaatttttgttaaaaactaag

SEQ ID NO: 22298 - DNA, 201 bp, Homo sapiens
ttggctccataaacttaccctgatgtgatgttggccagattatgtaacctcttgctccccgagtttgctcatctgtaaaataacttcatgaggttgttggragaagtaaatgagttaatacacaagtttttgaatagcacttagtaaatgttagcagctgttgttactgtcatataggattgcttgcatttttaatctttt

SEQ ID NO: 22299 - DNA, 201 bp, Homo sapiens
agaatacctgaataaattagggaggatatatttctttaatatgattgttttaagttgtagatggcactcatggtaatgttttagtaatctaaatgtactcrtgtatgtaattaaagtttggataatcattagtgatattaaacccctcaaaaaattacattcttccctgggtctaggaagcatcttctgagttaatctaca

SEQ ID NO: 22300 - DNA, 201 bp, Homo sapiens
ttctcctcatggtggaagtccactacagagctgctgagagcagagcctttagcctgatgttccaggagctcttgctactgccccatccatccgtccgtccrtccatccatccatccatccatccatccatccatccatccatccatgaatgattgctgctctatcatgcctcatagctggccctggggagtggttttagct

SEQ ID NO: 22301 - DNA, 201 bp, Homo sapiens
aacttccacctcctgggttcaagcgattgtcctgcctctcaagtagctgagattacaggcctgtgccactacaccagctatttttttttttttttttttgkatttttagtaaagatggagtttcaccatgttagccaggctggtctcaaactcctgacctcaggttatcagcccacctcgggctcccaaagtgttgggatt

SEQ ID NO: 22302 - DNA, 201 bp, Homo sapiens
tttgtggcttttcatgtcttttaacttttatatggcttcttgctattaatatttttcctttagtaagttacatttaaaaaattaactcatattgcttaggytaaggaaaagaatgaagaggtgtgtgtgtgtgtgtgtgtgtgtgtgtgtgtgtagactgtagagcagggaatcatattgggccctttgagcaggaaaata

SEQ ID NO: 22303 - DNA, 201 bp, Homo sapiens
attagccaggtgtggccccatttgtacaaaaaaaaatttttttttaattagctgggcatggtcatgtacacatgtggtcccagctactagggaggctaagrtgggaggaacgcttgagcctgggatgtcaaggctgcggtgaggtgtgattgcaccactgcactccagcccagcaacagagaaagaccctgtctcaaaaag

SEQ ID NO: 22304 - DNA, 201 bp, Homo sapiens
gcccttagttgatggcatgaagaaaaagttttatacagtagatgaaatgcatgtttatttttgatgtggtttggtttcctttcttgggacaacttatgcaygtaatatattatattcctcatacccccatccttctgctcttaaagaataggaatcattagtttaaaaacgtctgttttaactatctttccattttcaatg

SEQ ID NO: 22305 - DNA, 201 bp, Homo sapiens
tgttttagaactctgggcttttctccatgagggatgggaacgaatacttttactgtctttgatgcgttgggctcacttagcattttgcagtgactggcctstgtaattaaatatttagtctttaagactcataattctgtaccaaaacactatgaagtaaccactcaacctttcttgatttaaagactattgccttgtcat

SEQ ID NO: 22306 - DNA, 201 bp, Homo sapiens
atacttgggtctctaggcttacaaataagcaagtatccctccttggttttataaagttcttggattatttcacatcacacaaatgtacccatccttggggmcttgagggcattaacattaatcaaagtgaggcaaaattcaattagaaattatcgatgctccctgcatgttgattttactaggcaaggagtctcttttgca

SEQ ID NO: 22307 - DNA, 201 bp, Homo sapiens
agctggtttgtccacactgaggtgccattaaaagaacagtgggcctggattttgtagacctgagtttggaatctggctccgccacttactagttgtgtttycttgaagatatcagttagtctctgggtttgtttctttgtttgcagagtgcaagaattggaatggcagtgaatgcacagaccctgtacaatcctaaaactt

SEQ ID NO: 22308 - DNA, 201 bp, Homo sapiens
aacactcaccacgaaggttggcagctccattctttaagtcagcgagactgtgtacccaccggaaggaacaaactcgggacacaccctgatggtgtgctggmgataaaagcagtgtgttctggggagttggaagagcaggggttagatgctggagggattttgcttgacaagtcatattatcaaaaaactagtggtcactaa

SEQ ID NO: 22309 - DNA, 201 bp, Homo sapiens
acaatgtgcagggcactacagagtgctgggcatgtagcaatgaaaagttgacatgggactctgtctttaagtggctttcactgtgttggagaaaacaaatkgaaaaatgtaagggcttgttatagagctgaaatacttgtatatgggagcgagtcttgggtgaatgcaacctatgtatacagataaggatttagaaaaatg

SEQ ID NO: 22310 - DNA, 201 bp, Homo sapiens
gaagaccagaagagagactggaggatcacttgagcccaggagttcgagaccagcctaggcaacatacggagactctctctacagataataaaaaattagcygggcttggcgtgtgcctgcagtctcagctactgggaaggttgaggcgggaggatggcttgggcccaggaggtggaggttgcagtgagccgtgatcacacc

SEQ ID NO: 22311 - DNA, 201 bp, Homo sapiens
tagttttataaaacagttggcatagctgtcaaagttcttaatgttctttgcagtgttacagctagaatttcccagggcattgaaagaaaaagcaaagaaasaaatctttagtagtgttacattctgcttgttctcctgggcttgtattgaagcacaggtgttaaggtggtgttgaaattagtctggaatcatgaaaaaata

SEQ ID NO: 22312 - DNA, 201 bp, Homo sapiens
aaacagttggcatagctgtcaaagttcttaatgttctttgcagtgttacagctagaatttcccagggcattgaaagaaaaagcaaagaaagaaatctttartagtgttacattctgcttgttctcctgggcttgtattgaagcacaggtgttaaggtggtgttgaaattagtctggaatcatgaaaaaataaaatacaact

SEQ ID NO: 22313 - DNA, 201 bp, Homo sapiens
gatggaatcttgctctgttgccaggcaagagtgcagtggcaatcttggcttactgcagcctcttactccctggttcaagcgattctcctgccccagctccygagtagctgggattacaggcacgtgccaccacgcccagctaatttttctatttttagtagagacagggttttaccatgttggccaggatggtctcgatct

SEQ ID NO: 22314 - DNA, 201 bp, Homo sapiens
cctaaacagcaactataggtttgctggtaaagttatttaaagccacctgtgcctcagtaatccagatgcttctaatgagtcatgaaataatgctgtttctstttagatgccagctctgattatctttatcagtaagctaaatggcaccatgttttgcaacctgtattttgactctgattttgtatttacagagcactcgat

SEQ ID NO: 22315 - DNA, 201 bp, Homo sapiens
gccatgaaaaccaccaaacccaaagtgaattcttgttggagaaaactgtgttcagatattgtgcatggcttttgaggatttacaagagagccgatcaaacragtcatgaaagaattgtacatatggcaaaaaaaaaaaaaaaaaaaaaaaaaaagatggtggttgtgaagggtttcaagatagagatcttggagaaattca

SEQ ID NO: 22316 - DNA, 201 bp, Homo sapiens
aagtgagttgtaggataatgtcacaaaggtaggaatgctcctcagtggttgtcaattaaaactcccttgtgccttgttgatcaaccatttaaaaatatgcrtggagtcactgtgtatcctttggtaattggctcatatcttacattttgctcttcctagaacatgccattttcagactccattatagaaacattgggcact

SEQ ID NO: 22317 - DNA, 201 bp, Homo sapiens
acaaaatatgtgtttatttttctgtttatgttatcagtaaggctgctggtcaacagtaggctattaacagttaagtttttaggaagtgaaaagttacataragatttttgactggaatgggagaagcaaccctatcctgctttgttcaaggattagctatatttgaatttaatctgtctgcagtctttttgttttaatttc

SEQ ID NO: 22318 - DNA, 201 bp, Homo sapiens
cttttaatttattgtaaggagataattgagaaaggtactttttttctcttgttttgttttctaaaccaagagactacctcaaaataaatagtagattattrtagaattcattgttatttaggagctagaatgtactcagttgttgaactacaaaaaaaaatatgatttttatttctttatgagaattattttatggtcatt

SEQ ID NO: 22319 - DNA, 201 bp, Homo sapiens
ttgaaaagcaatctggcagtttctgaagatgtttaacacagagttaccatatgacttagcaatttcagttctagatatactgaggagaattgaaacatacwtccacacaaaacttgtacctggatgtttctagcagcattatttaatccaaacagtagagatgcccaaatgttcatctgctgataaatggataaattaaat

SEQ ID NO: 22320 - DNA, 201 bp, Homo sapiens
agcagttatcaggtggccttggtgcctgttgccagctgcctgggacagcgtgtcaaatcatcgtccttgtaatactattgtcagtttcccttgcattccasccatccatcatcattcgacattttctctggtgcctatcacctggcctctcacagctgcaattagactataaatataatgaagggaaggagtgctctgacc

SEQ ID NO: 22321 - DNA, 201 bp, Homo sapiens
ttggtaatgaaactggaagagtatatgaggttcctgtaggtggaattctgtttaggtgttggggtagggaggagagtctcttttttcatatttctgcccgwactttactttttatttagcttaactgcactatgtgaatcagtagtcatccttctgtagctagcaggggtttagaactaatgaaagtattatttagtatct

SEQ ID NO: 22322 - DNA, 201 bp, Homo sapiens
tgtcactactttggggaaaaataattttagctgagtatttcaggagtaagagaaagtttatattcctaagatttagttattttctaggtttttatcctttyataaatatacaaaactactcaaaacagacttggttaatactctgaaccagcttggaatacattcttttgtttgatcatttttcctctatttttcagtttg

SEQ ID NO: 22323 - DNA, 201 bp, Homo sapiens
ttgtagcttatcttttgttgtttttgttctctgtaatatggtcatcaacaaacgtttattaagcacacctactccctatacagctttgaggatacagggaratttgcttacctgtattagtttttgacagttgcttacattgattcgggttttgacagtttacatttattaggctttcacacatactgtctcatctaattg

SEQ ID NO: 22324 - DNA, 201 bp, Homo sapiens
gtttgtacattagaagatggcttgtggctgattgtgatgtatgtgacatcctgcgacctttgtgtagcagattgttttttccttcaaactatacatgacamagaagaggtttttcaggtttgttttgttttttaattaccatgtttttgtaggccagaggctatcttcacagcctccatgatttatggaatatgccattca

SEQ ID NO: 22325 - DNA, 201 bp, Homo sapiens
aggttgatggtaaatgtaatgttatgtatttttttaccacaatttttaaaatgcaccttttgggatccagatatctaatatatcaattgtgtgttttctcygtaaagaaccagagtatatatttgtggcattttcgcataatagagcagaaactcctggatttactaaatgttaggtacttcagaatatcaccttaccttt

SEQ ID NO: 22326 - DNA, 201 bp, Homo sapiens
agcattttcaatccatctccatcactcttctgcagagactctatgctgcagctaaactgggctgcttgctgttccctagcctttaaacttttttttttttkgacatttcttttctagtataaatgttcttttttcttatgaagcttattaattttttttctgacccccttaggcaggaaaatttttgccttgttctaggct

SEQ ID NO: 22327 - DNA, 201 bp, Homo sapiens
gtatatacttgtctgaactttacttttgatggtttaggaattaagttatgattttgggacttgaaatgagagtaattcagaagagcatttcaaataacaartggcacttaggggaacaaaagctcatttatctaatttaacatatgctgtgaagatgtggagacagccaaggagaatatcagaagtggcacatattatctc

SEQ ID NO: 22328 - DNA, 201 bp, Homo sapiens
tagcctaatgggagaggcagtgcagaagaatgaaagctggaaaaatgtacaggattgcaaatttcaaatgaaaaacatgacaaataatcttggttcaggamtaggctccttcactttagttttactcaatgcttgttactagactctgattatgccatgtcctggggaaagaaaaaaataagatcatatccttacctgcaa

SEQ ID NO: 22329 - DNA, 201 bp, Homo sapiens
tgattttgggacttgaaatgagagtaattcagaagagcatttcaaataacaaatggcacttaggggaacaaaagctcatttatctaatttaacatatgctrtgaagatgtggagacagccaaggagaatatcagaagtggcacatattatctcttgtctttttgttcttagtctggaaaggtaaaatggcatttcctctag

SEQ ID NO: 22330 - DNA, 201 bp, Homo sapiens
ataatcttggttcaggaataggctccttcactttagttttactcaatgcttgttactagactctgattatgccatgtcctggggaaagaaaaaaataagaycatatccttacctgcaagctcctctcttggtagctgcatgggttgcaaaaatgaagaagcctgaaaacaccacatattggcgaggacatggatcagtggg

SEQ ID NO: 22331 - DNA, 201 bp, Homo sapiens
atctaatttaacatatgctgtgaagatgtggagacagccaaggagaatatcagaagtggcacatattatctcttgtctttttgttcttagtctggaaaggkaaaatggcatttcctctaggaattgaggcatgactaagaaaaacaagttttgctaaatgcatggtgacagttgctggtcccttcgggtttcatattaaat

SEQ ID NO: 22332 - DNA, 201 bp, Homo sapiens
ctgcctcctgggtttaagcaattctcgtgcctcagcctcccagatagctggggttacaggcatgcgccaccatgcccggctaatatgttttagtagagacrgggattcgccatgttggccaggctggtctagaactcctaacaggtgatccgcccgcctcggcctcccaaaatgctgagattacaggtgtgagccactatg

SEQ ID NO: 22333 - DNA, 201 bp, Homo sapiens
gcccccagtagtttttaaccttttaatacttcggttaccttacctataaaatagagatgatttctttacactttagggtggttgtagataaaatgaaactrcaagtaaaatgcccagtacaaatagaagggggagattagtgattatttattcattcttattcttcctattgtaatgtgtaagaggattctagcacttagt

SEQ ID NO: 22334 - DNA, 201 bp, Homo sapiens
gtgtttgcaggatagtatgtaaatgtttatcttcacccagcaaaagtaagaatgtagctgagagaaaatagaaggtgagagacagaaatatggtttggggkaaagaaggagataaaaagggtttttttcttttttcttttctttactttttttttttttttttgagacagagtctcactctgttggccaggctggagtgca

SEQ ID NO: 22335 - DNA, 201 bp, Homo sapiens
ttccagttgaaaattttgaaactgtcaaatgaaatctaaagttcacatggatgaatacatgcgtaagaattgtttaaaagaattgtgaagggaggttatgrggggggcatttcttatgtgatatcaaagcatattgtaaagctgttttagtcaaaacagtacagacatgcaaaaataaatttttttaaagaaaacagtgca

SEQ ID NO: 22336 - DNA, 201 bp, Homo sapiens
actgcaagagaaaacaaaggaaatcacatgaaggcacttacgtataaagaagaccagatgtttttgaagtagaagataggcagtagaattgacaaatgaargaaaggtacatgctcacatacaaaaaataataaaaattttacttggaggaaatgaaacaaataaatggtgagactgtccttgttcttagctcatgaagat

SEQ ID NO: 22337 - DNA, 201 bp, Homo sapiens
ctagaagcaccccctttgagaggcctcaaggctgtgatatagttaggctttgtgtccccacccaaatctcatcttgaattgtaatccccataatctgtacrtgtcaagggagagaccaggtggaggtaattgaatcacgggggcagtttcccccatgtttttctcgtgatagtgagttctcatgaaatctgatggttttat

SEQ ID NO: 22338 - DNA, 201 bp, Homo sapiens
gaaggtccagaatagggaaatctatagaaacagaagtagattagtgttcactttagggctggatggagaatagcggggaaggggatgagcactaaaggatrtagggtttctttttggtggtctattgattgattgattgattgattgcttttattttatttattgcttcatgaatgacaaggttttactctgtcacccagg

SEQ ID NO: 22339 - DNA, 201 bp, Homo sapiens
cataaaaatctttttttttttttttttttttgagacagagtttccctctgttgcccaggctggcgtgcagtgtgcagtggaacgatcttggctcactgcarcctccgccttctaggttcaagcaattctcatgcctcagcctcccaagcagctgggattacaggcacacaccaccacggtccggctaacttttgcattttt

SEQ ID NO: 22340 - DNA, 201 bp, Homo sapiens
gatgaatacatgcgtaagaattgtttaaaagaattgtgaagggaggttatgaggggggcatttcttatgtgatatcaaagcatattgtaaagctgttttastcaaaacagtacagacatgcaaaaataaatttttttaaagaaaacagtgcagacatgaagtagaaaatcagatgggtgagacaaaatagagttgagaaat

SEQ ID NO: 22341 - DNA, 201 bp, Homo sapiens
tgctcaataatgtcataaagaattaatattttgcctcttccttattttattgtcctttcccataattttccagcctatcttctgtatattattccatttawcttttctgtttgtgatttttttcctctgttccctctgagcatttgtacttgccattcctgtactgcagatacacctttgttttcttctctctccatttat

SEQ ID NO: 22342 - DNA, 201 bp, Homo sapiens
tgttttcctagcacattgtggctggctggctcagggcgctatatcatgcttattaatttatgtatgtaatgtgatacttagcatttattgtttgttatacycagacattgttctaggtgctttacatgtattaatggtattgataatattttatttctattgtgtaatcaatttgattaatttagttctaatatccatctt

SEQ ID NO: 22343 - DNA, 201 bp, Homo sapiens
tggaaaggtaaaatggcatttcctctaggaattgaggcatgactaagaaaaacaagttttgctaaatgcatggtgacagttgctggtcccttcgggtttcrtattaaattaatgatgtgaatgaagttcagcaaatgagaagcatggacatcagtttctttccattcctagttaatattcaacccaggaagggatggtcat

SEQ ID NO: 22344 - DNA, 201 bp, Homo sapiens
tattttactaaagagggtcattatacttttagtataaactgtaattctaagcagaaatgatcttcagtttcccaaggacagcattttgtaagtggtgtgcrtgctttttgagtttcttctcatctaaccagagttgtactgttatgttagaaatcagtgtggatcctaccttggttgagtgtgggctcagcattgggagat

SEQ ID NO: 22345 - DNA, 201 bp, Homo sapiens
atgaacaaaaccgtattaaaacaaaggtttctagccatgcccggatagattctgaaatactttccctaaaatacagactctgaaaatgatataactgatgsctttttttcttccattgacatgtttcctgtctttcagctctctctagaagactttaagacgaatgaattcattcttataaatggaatttatgttatgggc

SEQ ID NO: 22346 - DNA, 201 bp, Homo sapiens
cagtcagaagaatattaaacctttgagtgaaatttacagctttccttatctttttaaaaaaattattcttcacttttttgcctcctattacttgttagggwgacccaatggtagttttattccttggggatacatagtaaatacttcattaaagtcgagtacagaatttgatgaaaagtgtggatgtgtgggatgtactgc

SEQ ID NO: 22347 - DNA, 201 bp, Homo sapiens
tggaatttgagtgacattatttctcttcttttgtgtagttctgacatggatttaggtttctttccaaaaataattatttttgaataattacatcatggtarttattaaccatgatctgcatataaaggaacctttggcaatgaagtacattttattgcagtatcaaccacaatttaaatcagagtgacactttttgttaca

SEQ ID NO: 22348 - DNA, 201 bp, Homo sapiens
aaaaaaattattcttcacttttttgcctcctattacttgttagggtgacccaatggtagttttattccttggggatacatagtaaatacttcattaaagtygagtacagaatttgatgaaaagtgtggatgtgtgggatgtactgccgccttcagaagtccacacactgcctggagggagagaactgctgtttattcactg

SEQ ID NO: 22349 - DNA, 201 bp, Homo sapiens
gttttgtgattctgtgactgggcagtgcttttataatatttagggaatctgaaggcctggcattttgaaatttaaaagtttatgcaaaaagtgagttttayagtatgttggagaattgctgcttatttgcttcaactggcttttaaaaggcatttggctctttagggtaatgaacacttggcatgcatgaagtaatatgtt

SEQ ID NO: 22350 - DNA, 201 bp, Homo sapiens
aatttgatgaaaagtgtggatgtgtgggatgtactgccgccttcagaagtccacacactgcctggagggagagaactgctgtttattcactgattaagcayttgctgtgtaccaactacttttcatgtcttatcttaattctcataacagtcatttgatattttaaaaaaccccagaaatctgagaaagagataaagtggt

SEQ ID NO: 22351 - DNA, 201 bp, Homo sapiens
ttgttgcacttgaaataattgctggaatgtttgatgtttttatgttgtttttattagttgtgaaagaatagtaattttgacaattgctatttttaaactcratgagcattcttcaaagtccatttctgtaaaataccacattgtaaatacatgagaaagtattcaataatgtcaagaagaaaaaaaaactaacactaacaa

SEQ ID NO: 22352 - DNA, 201 bp, Homo sapiens
ggttttcactgtgttagccaggatggtctctatctcctgacctcgtgatcaacctgcctcgacctcccagagtgctaggattacaggcatgagccaccacrcctggctctctatcacctctcttattcctcctcttctctcagtggtccctttccttttcctctgtgcccttgtgggacctagcaggttatttcctgagta

SEQ ID NO: 22353 - DNA, 201 bp, Homo sapiens
tttttgattggctttgcataactagaacttgaatgatttttagcacacactagattctcagtaaatatttggtgatttttatttggtaatgtgattttttkatggaaattaaggtcatatagttctctgtcagaaccaggatatcaagaacagggttgttaggaattcacacagttcatcgttcaggttttgtgctcctgt

SEQ ID NO: 22354 - DNA, 201 bp, Homo sapiens
ccctcttctctcctgcctttaagggttatgctaatggggatggaaacattcaaaatcttactttaatgcagtttataagcaactagaaccattactgtcakctttttggtagctggttggctttgactattgcttgataaaacattgagacatggacattcatccatttattcactcaacctttgctcagtgcttaatgta

SEQ ID NO: 22355 - DNA, 201 bp, Homo sapiens
attcctaagatttagttattttctaggtttttatccttttataaatatacaaaactactcaaaacagacttggttaatactctgaaccagcttggaatacrttcttttgtttgatcatttttcctctatttttcagtttggtaatttaattttacggtcatatgtatgtaccctggtctggagagttctctcacatggcat

SEQ ID NO: 22356 - DNA, 201 bp, Homo sapiens
tgaagacagtaattgtgagaggatctagcatgtacaaagtggaagggagggtgttatgtttctgtgatttattactttcccaaaagatgttttatcagctrccaccctatccttttttccccaaggcattcttttctctctctaattaagtaaataaattaattaataggatatctatgtggtatctaactgtgtataccc

SEQ ID NO: 22357 - DNA, 201 bp, Homo sapiens
tgtagctgtgatttggcgggggatggggtgttaggaagttcattttcttttcaaaattgaagtttttaatgaacttggtagatttcctgaaggttagttcyttcaacttttggtattacaaagtcatgattagttttaatggtgaacattaagattgcaaataactgctgtggcgagggtgtttctttgtgaatttgaagt

SEQ ID NO: 22358 - DNA, 201 bp, Homo sapiens
ttttttgagatggagtcttgctctgtcgcccaagctagagtgcagtggcatgatctcgactcactgcaacctctgcctcccaggttcaagggattctcacrcctcagcctcccaaataactgggattacaggcatgcacgaccacacctggctaatttttgtatttttagtagagatggggttttaccatgttggccaggc

SEQ ID NO: 22359 - DNA, 201 bp, Homo sapiens
aatttatttctctagaatcaatggtaatgtaacttccatttatgaatttagtcatttgagtcgtctctatttttttcttagttcacctggctaaagatttrttatttttgatgatgttttcaaagaaccaactttgatttaatcagtttttggtattgtttttctattctctattttatctctgctctaatctttatattt

SEQ ID NO: 22360 - DNA, 201 bp, Homo sapiens
aagtgtacaggacctctctttactatttttgcactattttgtgtttgcacacaaatgcagcagtacatttatctctcagaaatttcagttctctctggcargttgatagggtaaataccctctctaatctttttttctctgggtcttcagctctgcaaatatcccctcattccttgtaaactgtccaaagctcagcaaata

SEQ ID NO: 22361 - DNA, 201 bp, Homo sapiens
cattctgttactactcatttttcttgttccttatatctgtgttgtaccagctcataatactaaacaaatattgtaattgacaaagaacatgcatcctcatkcctattgttaaagccactcacagtcctgtaggaagtgttggtacagcactgtatgaggaagagcagatgctagggttgtatggtgccctattcttaagac

SEQ ID NO: 22362 - DNA, 201 bp, Homo sapiens
atgactaatattcagttagggatatggagaagaccttttctgtcagaaagtacagcatgtgccaaggcggtaagaaaagagagagagcgagagagatcccwatacatccgtgaggactgtttgagtctaagatctaccagattatgccagtatgaacttgtttctccattagctcttgcactttctcacctatggtttgaa

SEQ ID NO: 22363 - DNA, 201 bp, Homo sapiens
tttgctgcagaacagacaagattccctgccgttgtagaggttaaattctgatgagagagaagtgtccattttgttgtgagcactgtgatgggttcttcccrttcattctctcatttaagtcctgcagcaacttatggcattatcattatttcccatttaaagatgaccaaactgagtctcagtaagttgctgaagattaca

SEQ ID NO: 22364 - DNA, 201 bp, Homo sapiens
attcagttagggatatggagaagaccttttctgtcagaaagtacagcatgtgccaaggcggtaagaaaagagagagagcgagagagatcccaatacatccrtgaggactgtttgagtctaagatctaccagattatgccagtatgaacttgtttctccattagctcttgcactttctcacctatggtttgaaaatgcaacc

SEQ ID NO: 22365 - DNA, 201 bp, Homo sapiens
aagtgtaaaagttagccaggcatggtggtacgtgcctgtagtcccagctactcaggaggctgtggcaggagactcacttgaacccaggaagtgaaagttgsagtgagccgagatcacaccactgcattccagcctgggtgacagaacaagactccatctcaaaaaacaaacaaacaaaaaaggctatgtagtcaaggagta

SEQ ID NO: 22366 - DNA, 201 bp, Homo sapiens
cctttggtgctttaataaaagcttaagcaatttgaagatgatagatgataaatatgttatcttcatgctctattgccgtttatacctgagtggattattcygtaaactcccttattttccaaagcctttatggctaggaagtcctttgtttttaataatgcccaatgtttctgcctgagatttagtatttctgtggtcttt

SEQ ID NO: 22367 - DNA, 201 bp, Homo sapiens
ttttactaagaacttaacaccaatatatttgttcttttttactttttttttttttttaagacaggatctcactctgtcacccaggttgccgtgcagtgacrtgattagggctcactgcagctgtgatctcctgggctcaagtagtcctcccacctcagcctcccaaggagctgggatcacaggcatgcaccacgattcctg

SEQ ID NO: 22368 - DNA, 201 bp, Homo sapiens
ctgttgcccaggctggggagcagtggtgcactcatggttcactgcaaccttgcactcctggactcaagctatcttcctgcctcagcctcccaagtacctgraactacagttgcacctcaccatgctggcctaattttttaattttgtgtagagatagggtcttgttacattgcccaggctggtctgtaactcctggcctca

SEQ ID NO: 22369 - DNA, 201 bp, Homo sapiens
ccttaaaagtattaccctatagttcatggtaaagtatcaaagaagaagaaaaaatttctcatattacatgttcacttgttttgttttgtttttagaagtgkccattccaactcacagcctttatttattttaactttttgatgtttttcttgttagcttttaatcagtctgagaaaatcctaggtatatttaattttcccc

SEQ ID NO: 22370 - DNA, 201 bp, Homo sapiens
ctactgtaaaaccaaagttagctgttttataaatgtgttgtactgactgcatatgtgttctgttttaaaaacagaagaaaatgaatgagttatttcattawaaaatgtaaataatttatgaaaaaaaaattatgttgatttatgtgtgtgaccttggttgtgttgtgttttgtttacccctgctctctgtatcagtgcctt

SEQ ID NO: 22371 - DNA, 201 bp, Homo sapiens
gatgcccagagaccattaagatagataataaatcaagggagatttagctgtgtttggtaacatacaaagaactatactcagaaagaaaatgtttaatttaraagaaggaaaccaaatgttgcgagtgtagattgctagggttttgaggaagcccactaaatagtagccatctttcctgctggggttttgaaactattgaga

SEQ ID NO: 22372 - DNA, 201 bp, Homo sapiens
atcccaaagtgctgggattacaggcatgagccacttcgcctggcatcgtttataatttttaaaaggtctgtagaataataacagtaacacctaattccatstgctgaatgcctagcacactaggttctgtgcgcataggtatagtacatgtctcctctcatccacagaactatgtgctcaaccaccctgagcctcttaaac

SEQ ID NO: 22373 - DNA, 201 bp, Homo sapiens
tggtggaacttaatgtattacagttcttgacagctacttgttaagtctttataaatgctgctttgctagatagttgtttcaaggcttggtaatactcccastggttttactcacttacttggtttctaccttcattcagaattttaacttactagtgattaaaaccggaaaaagtttgttccctgatgtagtttatcattc

SEQ ID NO: 22374 - DNA, 201 bp, Homo sapiens
tacttttatattttcaaaatgtatgacatatggctaaacaccgattgcaactaactgggcggttttatactactgaataaaatggagagccagtcaaggtwtcaacccatgtatctacgcacatttcagcagtttctaaagaggtgaggcatcccaatctagttagcacaaaagaataggcggtttctcatgagaaacagt

SEQ ID NO: 22375 - DNA, 201 bp, Homo sapiens
gaatattggcaaaacaagtttgctttcttttctgcaagatgactatcatgtttcctgttcaccttctcttctttagattgactcttcctagcttattcaaytcttcctcatatgaggaagtttctagaattctcaacatcctggttactttcccctggaaaatgtccagtgtccctctcaaaataagataactagaattaa

SEQ ID NO: 22376 - DNA, 201 bp, Homo sapiens
ggctgaagtgcagtggtgtgatcttggctcactgcaagctccgcctcctgggttcacaccattctcctgcctcagcctcccaagtaactgggactacaggygcctgccaccacgcccggctaattttttgtattttttgtagagacggggtttcaccgtgttagccaggatggtctccatctcctgaccttgtgatctgcc

SEQ ID NO: 22377 - DNA, 201 bp, Homo sapiens
aggccccaatccaaaccgactcttattattttcctatggctgcctacaaattaccacaaacgtaatgatttaaaatagcacccacttattatctcacagtytctgtgggacaggagtctgggacgctgagatggttcctctgcttcagggtctctcaccatgctgcagtcaaggtgttagccagctctgggttcacctgag

SEQ ID NO: 22378 - DNA, 201 bp, Homo sapiens
ttaatctcctttcccttatgtaaagtctccttttgtcctccctctgccagtctgtaagttttatcatgacatttatacatggaatggattgttaccttttytgggaggagaataaaccataaatatgaacgaggcattaaaagagcttaacataaatcactaagaaaaatccgtagactgtgagaatataaaaatcgctgt

SEQ ID NO: 22379 - DNA, 201 bp, Homo sapiens
acccaggagctggaggttgtagtgagccaagatcccaccattgcatgccagactgggcgacaagagtgaaactcagtctcaaaaaagtgtgtgtgtgtgtrtatatgtatgtgtatatatatgtgtgtatatgtgtgtgtgtatgtatatgtgtgtgtgcacatatgtgtgtgtgtgtgtatgtgtatacacacacaaagg

SEQ ID NO: 22380 - DNA, 201 bp, Homo sapiens
tgacagggtagcatcacacctgagaggggtaaaggatgggaacctaccttccatggccgctgcttggcagtctcttgctgcatgctagcagagccactgtwtatgtgccgaggctctgagaattaactgcttaaagaactgccttctggagggagaagagcacaagatcacaattaaccatatacacatcttactgtgcga

SEQ ID NO: 22381 - DNA, 201 bp, Homo sapiens
ttagtcttggggatataaatgtgagtaagatagatatcatctagaattaaggttctgtttgaatagaaagaccaaaaaataagtaaacaaacacaagaaargtatttgatatggttaggctttgtgtccctacccacatctcctcttggattgtaatcctcataatcaccatgtgtcaagggagagaccaggtggaggtaa

SEQ ID NO: 22382 - DNA, 201 bp, Homo sapiens
atttttcctgggattgtagtgaggattaaataaaatagccatgtaacacatggtgaatgtttagtaaacattagctgaaaaggaaggatcctctgagaaarcgagtggtgagaacatttttatgggcatagccatgctcagggatagtgggtggacccactttcccagtcttgttagggaaagggctcattctagggagaa

SEQ ID NO: 22383 - DNA, 201 bp, Homo sapiens
cttggctgtatgatatagggttggttgtttaatctatcttcatctttctaatgtggatagtagtagtggcagcaccaccagcagctatttcatagagttgytgaagattatttaagtatccgataagtggtaactatggtgacagttgtctgcctgtgtttgctaatgatgaacgtattcattccctcactcattgattca

SEQ ID NO: 22384 - DNA, 201 bp, Homo sapiens
caagagacttatttaatgaatgttgcgtataaaccttcataattatgagattgcaaggcataaccaccggtaaggaaataacctctttacccaaggaaacyataatgcacaaaacagtcgaccataggatcttattttgggggtattttattttctattcatgttaaagcaaataaaatagtcccttttggaatatatcaa

SEQ ID NO: 22385 - DNA, 201 bp, Homo sapiens
gggaattgttgaggcataaatagctgtctgcttgtgtttgctgcaggagttttaaaacagaataagcaggagaaaagaatggtggcgaaggtgcctacccstctaaggtattacttcggccacattgtgtggaagacttcttgataacaggagtatagcacaacgtgtcttgtttttgttttgggctgatctctataagcc

SEQ ID NO: 22386 - DNA, 201 bp, Homo sapiens
gcccccctccttttgtctctgtatggaggagcttcgtccttctgcctttttctttacctgttaaattctccactccttaaaactaaaaaaaaaaaaaaaamacaaaaaaacaagaattttgatcacagtcagactctgtattttaaaatacattgtaactagtgagctgggtgtccagcaggagtttgatatggcaccatg

SEQ ID NO: 22387 - DNA, 201 bp, Homo sapiens
gcagtgagcagagattgcaccactgcactccagcctggacgacagagcgaaactccgtctcaaaaaaaaaaaaaaagaagaagaattcagccctgctccartagaacctgcattggaggagggggaagcagatacttgtttatgtactaaatgcttctacattcttactctgtctagccactgctcttaatcatttaagcc

SEQ ID NO: 22388 - DNA, 201 bp, Homo sapiens
ctccttttgtctctgtatggaggagcttcgtccttctgcctttttctttacctgttaaattctccactccttaaaactaaaaaaaaaaaaaaaaaacaaamaaacaagaattttgatcacagtcagactctgtattttaaaatacattgtaactagtgagctgggtgtccagcaggagtttgatatggcaccatgctttat

SEQ ID NO: 22389 - DNA, 201 bp, Homo sapiens
attaaacgtgaaattaagaaaggctggagctaggaatttgtatttgggagccataataatagccagcatttttaatatgcttaatatgtgccaatctctgkgttgagccttttatgtggatgagctcattaaatcttcacaaaaactccacgaaggtagtattaaaacccacattttacagatgaggaggctggcgcagaa

SEQ ID NO: 22390 - DNA, 201 bp, Homo sapiens
tggctaatctttatgagaaagaagaaactttacagcacattttgagtaacttagtgcatgggctcagtgggccacctgctgggacaccaccttctaatggrttccacaattaaggcattgctgggtcttgcctttgcacagccaaaaccagatgatgacgctgttgtcctcttcacagacacagccccctatttgcttgtt

SEQ ID NO: 22391 - DNA, 201 bp, Homo sapiens
aaagttcacgtgagttttatgctaaacatgaaacttcaaaagatttactgatctggcactggggtctcacacccctggaagtggagttttatctccccgtytaccaagtatttctgtctatattcagggtcaccctggaccagtgattgctatgtgtctggttctgtgatgccaaaatgaacactcgtttaaaaccactat

SEQ ID NO: 22392 - DNA, 201 bp, Homo sapiens
tttaacaacaacaacaacaacaaaatagcgcatgtgacacttcctttacttctttgtcccattcctcctcttttctaaaataaataaatatgtgtataaamcaagaaaaaaaaagtgtgggatagtatctgctttactgagaacagcagaagtagctatttttctctattttgcctaggaagtattttgctaagaagcagt

SEQ ID NO: 22393 - DNA, 201 bp, Homo sapiens
gtatgttgtagggtccagtcccttcagtgcagccatcataacctccctctccaacccagtcacctgctcactatcactaggagcacaacctccagatgccrtggagcgcactgcggtcgcccactgggactgcgggcctgcgtagtcaatgctgcagctccggaaagtaacctcgaagtcgtcacacccacaacaagcagc

SEQ ID NO: 22394 - DNA, 201 bp, Homo sapiens
agaaaaaaaaagtgtgggatagtatctgctttactgagaacagcagaagtagctatttttctctattttgcctaggaagtattttgctaagaagcagtagrtagaagatggcagtaggtaacggtaaatgtgttagtggactctcttgaaagtggaatttcctatactttttactaaggtactcaaaacatctcacagacc

SEQ ID NO: 22395 - DNA, 201 bp, Homo sapiens
cattctccacatgaatcccagaacttaaaattaaacagcaacagaaaaaaggctgaattttaaacagattcctgaactagtggttcacacccatcagctcmttcaacttcagcacctgtcttgtctctagtagcttttccagaaccactaccttcaccatgaagccccatgccctttcccaattcaaacttgggcttagca

SEQ ID NO: 22396 - DNA, 201 bp, Homo sapiens
caaacgtccaagaaacttgctcccttaatacctttacggcttttctcaaacgttaccttcctagtgaagcctacctaggccatcctgttgaaaactgtgakatcttcttccagcatgccctactttttaatttttttctgttgcccttattaccatgcacatattttatctgttatctggaaatagaatataagttccaaa

SEQ ID NO: 22397 - DNA, 201 bp, Homo sapiens
ttttgcactgagtatgccaacttgggaggtagaaccagggatgagaaaactccctggcctcttgtctatgaaaatttatgaaaagctcttaaagagaagtsagaaaagcactaatactcaaagataaaaagatatcaacaattcatttatacatacacgcatacctacatacattaaaaacaaataagtagatgaaaaatt

SEQ ID NO: 22398 - DNA, 201 bp, Homo sapiens
tttttgcttttcccaactgccctctggtggcaaaggcacaacagacagcaaagacgtttaacaaagattcttgctgtgtaggtgctgctggtggttcttamgaggctcttaaaccaaagtctgtactgtacatgtgtgcttctgaaaaagaagaacagaatattgggtctcataattacattttacttcccagcggcatct

SEQ ID NO: 22399 - DNA, 201 bp, Homo sapiens
tagcctttacaatcaaatagacaaaaaatagactgtgcaaccaaaaactttttgctgttttcccacaaaattatctgaatttgtttgacttgagatttttstttgtaattttctcatctgctgcctatcctaagatttaggatgtttttaccttaatagccatatcatgttttaggccttagtgggcctctctccttcatg

SEQ ID NO: 22400 - DNA, 201 bp, Homo sapiens
ttcttacgaggctcttaaaccaaagtctgtactgtacatgtgtgcttctgaaaaagaagaacagaatattgggtctcataattacattttacttcccagcrgcatctgttcttatcatagtagcaccaggctctactagctcagtcaatacttgtatattaacaagagacaatcgatagaaaaattaaaaggaaaagtcaa

SEQ ID NO: 22401 - DNA, 201 bp, Homo sapiens
taacagtggaggggagaagtggtcacattctggatgaagtgtgaagatttgccagtgggtttaatgtgcatgtaagaaaaagaggagtcaagcatatcgcraaggtttttcacttaagtaacagcacaatggaaatgtaatttcagaagaccataggaagactacaggaagaagctagctggagagtaagatcgtgagttt

SEQ ID NO: 22402 - DNA, 201 bp, Homo sapiens
tgtggacaatgcttggagaaggatgtggggctgcaaaagaagtagaaaaagaggtagagttgggtgaagtaagagtagggggtagattttaagttgacttygtcaaccttgggctcagttttatgccttagtggggtgattttacttaatattagataatgacctttgttgcctaagagatttatagcttttggtccccag

SEQ ID NO: 22403 - DNA, 201 bp, Homo sapiens
ccttaaagcagacctaccatcatttccctcttggcccactttcacgtacgggaggacccgtgcacactcaccttgctttcaaaactcactgccctccctgygcaaactcctcacttcatggaaatgatagccccaagtagcagttggcaacaacttttggctcctcctttctggagtgggtgttgtattgtctgtagtttt

SEQ ID NO: 22404 - DNA, 201 bp, Homo sapiens
gttctgcttagaataataggcttggaaaacttatttcttaacttgtttctttagtgcttatattcttaactatctcttttcctcttcagtttgtactttcrctctattcatacttaggacaggcttttgtttccctgatgacataataggtatatggtactgtcagccatttctcagattggccctttagtattttaaagg

SEQ ID NO: 22405 - DNA, 201 bp, Homo sapiens
aaaatatttaactgtataaatagtctatttagcttttttatatgttattttttaagtgagccatctataatataggtatacatgtaagtagctgtaggctrtgtaatcaaggatatatagacgtaaactatactttttttttttttttgtgaggcagagttttgctctcttgcccaggctagagtgcagtggtgcgatctt

SEQ ID NO: 22406 - DNA, 201 bp, Homo sapiens
ttgtgctaagtgaaaaagccaaactcaaaaggctacatactgtatgattccatttatatggcatcctggaaaagacaactgtaggggcagaaaaatagatsagtggttgccaaaggtttgggagttgagtagggattgactgcagagggacacagggaattttggaggagatgtttgtgttctgtaatttggttctggtgg

SEQ ID NO: 22407 - DNA, 201 bp, Homo sapiens
aatgtatgacatatggctaaacaccgattgcaactaactgggcggttttatactactgaataaaatggagagccagtcaaggtatcaacccatgtatctaygcacatttcagcagtttctaaagaggtgaggcatcccaatctagttagcacaaaagaataggcggtttctcatgagaaacagtagggaaaacgggaaatg

SEQ ID NO: 22408 - DNA, 201 bp, Homo sapiens
ttttgctgtttttcctgcatcctgtaaattgtatttcatatgttgtgttttcattttcattaatctctaagtaattttctaatttcctttgaggtttcttmtttgatacattggtttttaaagagtgtgttaattgacataagtttgtgtattttccctttttaactttgttattgatttctaactttatccctatttagt

SEQ ID NO: 22409 - DNA, 201 bp, Homo sapiens
ggtatggacccaattgagagaccctaacatagttgtagtgagttgggaatttacttttattgattgtaaatcacatccttctggtccctaacaggcagtcrctaaaaatgttttgagtaaatgagcaaatgaattgaaggtaaaagtgatgggggcagttttaaatgtataaggcaaattggatggatattgaatattctt

SEQ ID NO: 22410 - DNA, 201 bp, Homo sapiens
cagactttttgatgtaggtgttcaatgctatgaaatttgctcttagcaccacttttgctatattgcagaagttttgataggttgtatcactgtcactgttsagttcaaagaattttcagatttccatcttgatttccttgttgatgcaaagaccattcaggagcaggttatttaatttccatgtatttgtagtgttttgag

SEQ ID NO: 22411 - DNA, 201 bp, Homo sapiens
gacaagatacccatactgtaattttccctaaaagtttcatcatcttattaaatatattctggttgtgatgcattgcaggcttgttttcatttgtctttatrtaaagagaattaatgttgtgtgctattttgctagaaatgtagaaggaaacaaactagtgaattctttcttgcttttaattcctacagagccaggatactt

SEQ ID NO: 22412 - DNA, 201 bp, Homo sapiens
attgaagtcttcaactgttgtagaactgcgtatttctgccttcaattctgtcagtttttgcttcatatattttgatagtcattaggtgtataaatgtttakaatggttatatcttcttactgtgttgagcctttattaatatataatgtccttctttgtctcttgtaatctttttttgatttaaagtctattttttctgct

SEQ ID NO: 22413 - DNA, 201 bp, Homo sapiens
tggtggctgccagtatcgctgtcacctgcaatgctttgccaaccacctgaagctctcttactctgtccagtgtgctgaaggtgctggcatccatcaatatmttttttgcatattctatttagttttgctttttgcatctgtgaaaaatagtagaacatcttctcaatgtaagagtggaaataagaatagtaaagaaaattg

SEQ ID NO: 22414 - DNA, 201 bp, Homo sapiens
tcttggctcactgcaacctctgcctaccggttcaagcgattctgctgtctcagtctcctgagtagctgggattacaagtgcacactgccacgtctggctawttttttgtgttttagtagagacggggtatcaccatgttgcccaggctggtctcgaactcctaagctcaggcaatccacccgcctcagcctcccaaagtgc

SEQ ID NO: 22415 - DNA, 201 bp, Homo sapiens
aagttcatgctctcaaccatcaccgctgactttcaacctcagtcagaccacatacacattttcaaacatttagccagtgcttctgaagttgtggtattggraaaaaaaaaaaaagaaattgttggaaatgaacaaattggcttaaataattattacacattttttattattgggcagtaatgaaacttatcacagacacag

SEQ ID NO: 22416 - DNA, 201 bp, Homo sapiens
taccaatttttcatgtaatggataatgtttgagagttcctatatccccttgccaacagattgtattatcaaatacttttatccttgccaatctgagaggtraaaaatggtatttttggatttgcatttttattgtaaggttacacttcttttcgtttgtataaaagtaacttgtcatgatatctgggttatatatggatgt

SEQ ID NO: 22417 - DNA, 201 bp, Homo sapiens
aacttaagtcaaattaaaaagacccttttgaaagcctagcgtgaagtgaggggaacagaataaggacaatgagaatagaaagaggtggttattagacagtmgaaaggatgaattacagaatgattggtgggataatttattcatttattaaacatttattgaaatttattacactgtggagatttaaagctgaaaaagttg

SEQ ID NO: 22418 - DNA, 201 bp, Homo sapiens
tgcctgtgaccaactacttctgtttcctctttaacactgtagcacttaggaattatcttatttcccctggagaagatcaaacctaatagaattatgcatgygctgtaagagatcatcaaccttacaccttttcccttggacctagagcaatttgaaaagagacatttccatcaaaggacataaaacctgtagctacagtca

SEQ ID NO: 22419 - DNA, 201 bp, Homo sapiens
attccttgttgtagaatagaaggcctgactttctgactttatgcacactgatctcaggcccccttgtacacttcaaagccacgaatccttcctttttccargtctgtcatgctattttcaaaatttttttctttctaccaaaaatgcatctaccaacactgacctttgacctccttcattatctgaaagacattttatcct

SEQ ID NO: 22420 - DNA, 201 bp, Homo sapiens
ttacagaaaagtcattcaagagcagctttgaagcaaggtcaggcattttccttgtggcttcttatagccattcccaggcaccgcatgtagcacctggacaygcttggaatcaggaagggcctccgtgtaatttagatgagtagttaattcgaatcaaagcaagcgggaagcaagtaaatttaacttcagtgattatgattc

SEQ ID NO: 22421 - DNA, 201 bp, Homo sapiens
gttggctatgtgcaaagaattgttttaagcaccttaatagctacaaagataagtaagagcttatctctactttctcctaccccaaggccacccaaacctgytaatcaatcttaaatccttctctttctgctaaatatcattagaaggcatcactttgagggctttttttttgtattagttgtaactgagggatttttaaaa

SEQ ID NO: 22422 - DNA, 201 bp, Homo sapiens
ctcttatgtggcctactattttatgcattcattcagcatttactgagagcctgttgtgtgctgggcactgaagaatgttggtctagctggaggacagttaygtaaagaagtaatggtggcaccccagggactgaaatgctgttcaggatgctctgggaacatagaagggcacttgagaggtgcaggcaagattttgcagga

SEQ ID NO: 22423 - DNA, 201 bp, Homo sapiens
aaaagagaacacaggtgttatttgatgtattagtcagggttctctagaacctcacacaatcacaaggtcccacaataggctgagggacccacaatagcctkcaggctggggagcaagaagagccagtccaagttccaaaactgaagagcttagagtccaacgtttgagggcaggaagtatctagcatgggagaagatgtag

SEQ ID NO: 22424 - DNA, 201 bp, Homo sapiens
gctgaatttgtgctaatggcttcttgccataggtacattttgtgaatgtgactatttatatagcttctttcatatatggcccagtcctcattcccttgtarccaccctccttccccaaatgtgttgctttatgttgaatagtttggaaaagaaacacaatctggaaactatgctgtggtctcttaggtagaataaccaaca

SEQ ID NO: 22425 - DNA, 201 bp, Homo sapiens
cagtttgcaattacaagcttgtgtcttaaagtttgttttgctccgatttttaatttggctttttctttctttatacatttcagcttccttctttctctagkttaatttcgcaaatatttcttaaatgttggctatgtgcaaagaattgttttaagcaccttaatagctacaaagataagtaagagcttatctctactttct

SEQ ID NO: 22426 - DNA, 201 bp, Homo sapiens
tatctcaatatgccattcattttgaagctttggattagtttattccatgattatcctcacctatcacgtatggctagtttaagagcgttatttaatctagrgtaacagttctgaatgttttttaacaacaacaacaacaacaaaatagcgcatgtgacacttcctttacttctttgtcccattcctcctcttttctaaaat

SEQ ID NO: 22427 - DNA, 201 bp, Homo sapiens
aagatgtaggctggaaggctaggtcagtctctcttttcacatttttctgcctgctttattctagccgcactagcagctgattagaatgtgcccacccaaawtaagggtgggtctgcctttcccagcccactgactcaaatgttaatctttggtaacaccctcacagacacacgcacaatccgtactttgtatctttcaatc

SEQ ID NO: 22428 - DNA, 201 bp, Homo sapiens
cttggggttcctggagtcaccataaaaaataaattggctttctgtaggctataaaatctaaagctggtttgtccacactgaggtgccattaaaagaacagygggcctggattttgtagacctgagtttggaatctggctccgccacttactagttgtgttttcttgaagatatcagttagtctctgggtttgtttctttgt

SEQ ID NO: 22429 - DNA, 201 bp, Homo sapiens
tactctcacactgggggtttgagtttcaacatacgaatttgtgaggatggggagacccagttcaatccatagcacttgtaaaggttaaataacttattcamggtcacacaggtagcaacctagatacttcttccctgtgcatatatttatatatatatatatatatatatatatatatatatatatatatatatggaattt

SEQ ID NO: 22430 - DNA, 201 bp, Homo sapiens
gtctactgctcccttctttgcgtcaatgtgtatctcattttgcccctgccaaggttcacatctctctcttccttcctcctaaaaccccctcccctgctcaytcctcatcccttctcttctctattccaagagaagagaaaccttacctgacacctccttgcttttgcctgaggtcaattgtttaatgtctctgctctgaac

SEQ ID NO: 22431 - DNA, 201 bp, Homo sapiens
ttagaatgtgcccacccaaattaagggtgggtctgcctttcccagcccactgactcaaatgttaatctttggtaacaccctcacagacacacgcacaatcmgtactttgtatctttcaatccagtcaagttgacactcagtattaaccatcccaagtccaccccttgtcaacttgaacccatacacatctcctgagatcat

SEQ ID NO: 22432 - DNA, 201 bp, Homo sapiens
ctcatttctttttattcttttttctctaaccttcccttctcgcttcatttcattcatttcatcttccattgctgataccctttcttccagttgatcgcatyggctcctgaggcttctgcattcttcacgtagttctcgagccttggttttcagctccatcagctcctttaagcacttctctgtattggttattctagttat

SEQ ID NO: 22433 - DNA, 201 bp, Homo sapiens
gctgtgattaattagccaatgccagagctctacagaagtcagactattctgattgctgctctgcccttgctgtccattacggtagctatgcctactttgcrtttgatggttgagtgccatcacttgacccctgccatcttgggatgcagttattcccattgtatttaaattttgtagttgaatgactgtggttcccatggt

SEQ ID NO: 22434 - DNA, 201 bp, Homo sapiens
aggtcaggatttcgagaccagcctggccaacatggtaaaaccccgtctctactaaatatacaaaaattagctgggcatggtggcaggttcctgtaatcccwtctactcaggaggctgaggcaggagaatcgcttgaacctgggaggcagaggttgcagtgaggactcagtctggaaagaaagagagagaagaaggaggaag

SEQ ID NO: 22435 - DNA, 201 bp, Homo sapiens
ttggataaagaaaatgtggtccatatataccatggtagaccatgcagccataaagaagaacaagatcatgtcttttgatggaacatggatggatctgcagrccattatctttagcaaagtaatgcaggaacagaaaaccaaataccacacgttcttacttatgagtgggagctaaatgatgagacctcatggacacagaag

SEQ ID NO: 22436 - DNA, 201 bp, Homo sapiens
atggagttgccagctattgtgacggaggatgctgcaggtctaggcaagcagatcagtgcttaaatttggagtgtctcttagccatgtgggggagggagttrgacatatgcatcaaaacaagagaggtctggcctggagatagatatttggcagccatcaacatataaatagtatagctaaatggaatttaaaactatggga

SEQ ID NO: 22437 - DNA, 201 bp, Homo sapiens
agagtccaccctgctggatgctgtggatccttctctgagaaaggagactggatatgccacccaaaaactatccatgttggtggatccagggttaaagcacrgcccagaacgtaacttagaatattacgaaacaggtgtcaaagagttttccagaccagcatctgttccagaaatgtgaggaaagctctcaaagcatgttca

SEQ ID NO: 22438 - DNA, 201 bp, Homo sapiens
tctttatcatcatctcttactaggcaatggcgaagtagaaatgcttgtaatagtgcataacagttattgaactcttgtgattaagacttcaagagttcatkaagaggacagaaaaatgcacctttgatatcttaatctgatcactctaattgagaaaatacaccttaataattattcagtaggtatattgacctgatcatt

SEQ ID NO: 22439 - DNA, 201 bp, Homo sapiens
ctcatgaactcgtttgccctcaaaatttgactgttttctccattctggacattggtccatgtgttgtaggagagatgtgtttacaaagaaccataaaatarggattctgcctacactttctggcccaggaggccatgcatacctgttttgtcacttctctcagttcattgtaatagtttgtttggagggactgtagaatca

SEQ ID NO: 22440 - DNA, 201 bp, Homo sapiens
tgaaaccatgaaattagtcaaaaccccccccatggttgccattgtgggccatacttgggccattgttctttatggacataattgctagagatcactgtccrtttagtgaggcttaatcaacaagccacacacattgtgtgaaggagtctaatctttggttttgagctacttgggtgttttcgtgccctgatgctgtgaaat

SEQ ID NO: 22441 - DNA, 201 bp, Homo sapiens
tactgtgagtccatgttcttactcagagtaaaagtgctgttttttgttttgttttgtttgtttgtttgtttgtttgtttgtttgttttgagacggagtctygctctgtcacccaggctttagtgcagtggcgcaatcttggttcactgcagcctgcacctcccaggttcaagcaattctcctgcctcaacctcccaagtag

SEQ ID NO: 22442 - DNA, 201 bp, Homo sapiens
gaatgcggtgaaagttttgaatcctcctccatttaaaattgccactctgcacaaacacatataatgtttcatgcaataccatctggggatcaagaatcttytgccctaagcacaggaaagaaaaatttatggaaatgacatagaattcagaaagtattccccacctaacaggtgggagaaattatgtggcttattttactc

SEQ ID NO: 22443 - DNA, 201 bp, Homo sapiens
tggattggagatagcctcagtatttcttatttcagcagttgaggttaaagagccaaacatctgcttagctctggactttctctttctcccttactttgctmttctttggttccttaaaggagtacttaaagggagttagtttctagatggggaagctagcatctgtatgtatacttggactgtggtaactggtaggaagtt

SEQ ID NO: 22444 - DNA, 201 bp, Homo sapiens
aggataaatagctaagcatgcggggcttaatacctaggtgatgggttataggtgcagcaaactgatgggttgataggtgcagcaaaccaccatggcacacrtttacctatgtaaccaacctgcacattctccacatgaatcccagaacttaaaattaaacagcaacagaaaaaaggctgaattttaaacagattcctgaac

SEQ ID NO: 22445 - DNA, 201 bp, Homo sapiens
tgtcctttaatataaatgtttaaatgtttaaatgtcattgggtacttggttataggaggaggcagagctctgagtggaatccatgatggtcctgagaccaragatatgtatttttttcttttcatgtatgtatgtcttatatccccaattgagaattctatcactgtgagtgatacagcttcagaatcctgaaggctaagc

SEQ ID NO: 22446 - DNA, 201 bp, Homo sapiens
cctgtaatcccagcactttgggaggcccaggcaggtggatcacaaggtcaagagatcgagatcatcctggctaacatggcaaaaccctgtctctaccaaaratacaaaaaaattagccgggcatggtggcgggcgcctgtagtcccagctactcgggaggctgaggcaggagaatggcgtgaacctgggaggcggagcttg

SEQ ID NO: 22447 - DNA, 201 bp, Homo sapiens
ttgttaaaaagcatcattataattgtactctaaaacttgcaatttttaatgtcttcattgcctcctgcatttgttgaaatcaataataaccttttaaaaartatgaactttatgatatgtaaattatatcgcagtaaagctgctatataaaaaagaataacctaaagtatctaaattatattattgggtgttaaaacacaa

SEQ ID NO: 22448 - DNA, 201 bp, Homo sapiens
agccagcagtttatacatatttggtctaatacattcctcaccttacataaatctccagaaaagctataggaaggaaacacattcccctgacacgacaggaygtaaaatggatataaaccaattactttttgcagttcccagagtctcaggaatactgacccttctgacttcattttcaagcaagaactctccacccccatc

SEQ ID NO: 22449 - DNA, 201 bp, Homo sapiens
ttcgaataagtagcgaagcaaagcaaattccttagtcactgggcccagcttacattcaatgttgttagtatgtggacttcagtcttcctaccatagtttaragaaaactttttgaaggactttgtaacaccatgattcaattacctcctcctgggtcccccctacaacatgtgggaattctgggagatacaattcaagttc

SEQ ID NO: 22450 - DNA, 201 bp, Homo sapiens
ggaattagcaaggtgccaggcacacagctgattcagtttcaatgttaattcattttatttttcctccccactttgccttctgctcatcctgcagcccacaytcccgtcattttcaaacgtacagaagtgaaaactgtgttgtcactaggattggcaaactttttcaagaagtgctgtaaaagttcacagtctaataatttt

SEQ ID NO: 22451 - DNA, 201 bp, Homo sapiens
aagtttccattctcaaccattttggtatgaaattcttcacccatagtaatttgaaaagtatatgttatgtgctattctcgtgatagtgaataagtctcacragatctgatgggtttatcaggggtttctgcttttgcttctttctcccttttatcttgctgccgccattatcacctcccaccatgattctgaggcctcccc

SEQ ID NO: 22452 - DNA, 201 bp, Homo sapiens
tttttctttcctcagtgttaaataagaatacatattttaaactttacctgtgaatcatattcctgtctctttggtaatttatttccctactctctcttttkgtactcaaagtagtatatgacttctagatgacttgctttcctttcgaaggacagattacttactactaggagctcatgtaaaatcagtcttttaaaaata

SEQ ID NO: 22453 - DNA, 201 bp, Homo sapiens
ttgattcctggcaaggttgagtgctaaaatatgtggtaaatttccagtacaaaggagttagaaatgttgggtaaaatgcaataaacttctttttaaaaaaktattgttgaccttctttaaagagtaagcggtctcctgggcatgcaaataaagaggaaactaaaaaccagaacagtaaatggacactgatattgcagctgc

SEQ ID NO: 22454 - DNA, 201 bp, Homo sapiens
cagagaaatctactgtgtctacaacagcaactggttctctaggaacctaaaaatagtcaaaacttcttttcaagttcaaactgtcaccaagattagttaaygaaccttaattggcaaaatgaaaatgctgcgttattttttgagaaggattcttagttatcatatgaaatttgtatctggttcatagtaaagtgttattta

SEQ ID NO: 22455 - DNA, 201 bp, Homo sapiens
agtgctaaaatatgtggtaaatttccagtacaaaggagttagaaatgttgggtaaaatgcaataaacttctttttaaaaaattattgttgaccttctttaragagtaagcggtctcctgggcatgcaaataaagaggaaactaaaaaccagaacagtaaatggacactgatattgcagctgccttggggcatttgtcagcc

SEQ ID NO: 22456 - DNA, 201 bp, Homo sapiens
gacagagggaaggatgtcctatgtgccgttaacgtgcaaatcacatacgcttggatgtctgatacttgggccggttaacttctctgaacatgactttccayatcttcattgagtgtttatcacaaaacattgtgagaattgcacgtgcaaatgcaggtaaagaggctactcaatcctggtgcatagtcatttacaaataag

SEQ ID NO: 22457 - DNA, 201 bp, Homo sapiens
taaatatttaaaaatttctataaatttaaggtgtacaagtgcatttttgttgcatagacatattgcgtagtggtgcagtctggtcttttagtatagtgatmacccaaataatgtacatcatacctattaatttctcatccctcacctgcctctcacctttccaagtctccagtttctattattgctcactccatgtccatg

SEQ ID NO: 22458 - DNA, 201 bp, Homo sapiens
cactttacctgtacaatagttctctcaggtagatgctagagtgttatccaggttattgtgaggaagctaaggcacaagaaattaagcaacttgcccattakcctacagctaacagtcctggattcatacccaggcctgtgtgattccagagcccatgctcttaaatgctaggctacacctccttctttttatccttctgtg

SEQ ID NO: 22459 - DNA, 201 bp, Homo sapiens
cttttgatccagcaatcccactactgggtatctgcccagaggaaaaaaagtcattatacgaaaaagatacttgcacatgcatgtttgtagcagcacaattygcaattgcaaaaatacagaaaccagcccaaatgcctatcaatcaatgaggggataaagaattttgtgtgtgtgtgtgtgtgtgtgtgtgtgtgtgtgtgt

SEQ ID NO: 22460 - DNA, 201 bp, Homo sapiens
caggctctgacatgtgttttataatgacagttaattagatactgtctgcagcaatcataggctgtcatttctaatacatttctgggaagttgaaggacagragaagtcaccccctcctcatattcccccttcccgtaactgaaatcggttgccaaaattaactgtgaatatatgaggcacgagttcaacaattatacagcc

SEQ ID NO: 22461 - DNA, 201 bp, Homo sapiens
acaacatgactgcattacttggtttagagcactgaattcccagatcaaatccagtgttgttcagatataactgcaaagtttgtacaaacgaatttgaatcrccacaatactggctcattgcattacaaagaaagacagagctgagtatgggaattttatttaattcatatttgtgtactcaagactcaaatgagtcagcga

SEQ ID NO: 22462 - DNA, 201 bp, Homo sapiens
aagatacttgcacatgcatgtttgtagcagcacaattcgcaattgcaaaaatacagaaaccagcccaaatgcctatcaatcaatgaggggataaagaattktgtgtgtgtgtgtgtgtgtgtgtgtgtgtgtgtgtgtgtgtgtgtctgtgtgtgtgtgtgatggaatactactcagccataaaaaggaacgaattaatgg

SEQ ID NO: 22463 - DNA, 201 bp, Homo sapiens
tctcttctttagacccagtagtcatttctttacctccttaatttatgcatgaagccaaaagaaaaattacttcatattcttaataaaaatggcataaggtktagataattttttactatatgcagtaaaaatgcaaatgtgtgtggcttatttgcaaatgtagacattaataactgatatttaaacagtccagattagcaa

SEQ ID NO: 22464 - DNA, 201 bp, Homo sapiens
taaatgatgacactgatatggggatagtagggatggtttcaattagcttgacatttccagaagtcaaattcagccaaactagaatactagataagttcttractcatcttttgggtgatttttcttctccagagagaaacacttggagactcaacattttgtgcataattctgaccaaaaggaagaattcatgggaaagta

SEQ ID NO: 22465 - DNA, 201 bp, Homo sapiens
ggaatgtagaggcccaatcatcatggctcactgtagccttgaccccccctgggctcaagagatcctcctgctttagcctcctgagtagttgggactacagktatatgacacgatgcctagctatttaaagtattttttttttttttttaagagatagtgtctcacagtgattgcccaggctggccttgaactcccggtctc

SEQ ID NO: 22466 - DNA, 201 bp, Homo sapiens
ccagtcttctctgagatttaaagtgccatagttcaaaaatgtctcaggagtagaaggttacattcattcatcaaggctcagttgggagaacagaagccatyttaggtatttcaagcaagaaggaatttaatgtagggaatacgatgttttagaaattgctgaaagggcttagacagccgttggaaggatacaaaaagcaag

SEQ ID NO: 22467 - DNA, 201 bp, Homo sapiens
gatgtagagaacatgaagaagtagatttggggaagaatatgatgagttccatttaagtcatattaagttagcggtctacagctcaggggagtaatctggcyaagggatatgtgtgtgagttgatagcaggtagataattgaagattaggggcaaatgagctcagctagagagagtatgagggggttgagaagagtttaccg

SEQ ID NO: 22468 - DNA, 201 bp, Homo sapiens
tccagtcttctctgagatttaaagtgccatagttcaaaaatgtctcaggagtagaaggttacattcattcatcaaggctcagttgggagaacagaagccawtttaggtatttcaagcaagaaggaatttaatgtagggaatacgatgttttagaaattgctgaaagggcttagacagccgttggaaggatacaaaaagcaa

SEQ ID NO: 22469 - DNA, 201 bp, Homo sapiens
actgtgttagccaggatggtctctatctcctgacctcgtgatcaacctgcctcgacctcccagagtgctaggattacaggcatgagccaccacgcctggcyctctatcacctctcttattcctcctcttctctcagtggtccctttccttttcctctgtgcccttgtgggacctagcaggttatttcctgagtatttgttc

SEQ ID NO: 22470 - DNA, 201 bp, Homo sapiens
gtcaaaaatttcatgtccttatattttttcttctttccagaagaaaaaccattacagatgtaaatgttagagaaattttgtcatacactttggagcttctscaagaagtatttttcatagcttggaaaagaggaaggaggcctctgctgacacatttgcaatctttccagtagtttgtgtgaactttatagtttactaccc

SEQ ID NO: 22471 - DNA, 201 bp, Homo sapiens
gccatgacatagcctcaggtccttacgaaatgtgcccaaggtggtcagggcacagctagttttttaattttaattttaatttttatatttttattttatayattttagggaggcatgagacatcaaccagtatgtgtaaaatatacattggtttcgtccggaaaggtggggcaagtcaagcgaggaggggcttctgggtca

SEQ ID NO: 22472 - DNA, 201 bp, Homo sapiens
ctggtccagtcttctctgagatttaaagtgccatagttcaaaaatgtctcaggagtagaaggttacattcattcatcaaggctcagttgggagaacagaarccattttaggtatttcaagcaagaaggaatttaatgtagggaatacgatgttttagaaattgctgaaagggcttagacagccgttggaaggatacaaaaa

SEQ ID NO: 22473 - DNA, 201 bp, Homo sapiens
tatatctcattttctttttttttcttgctttctctgaaaatgaaagtgtaagctttttcaaatggccttgatatttctaaaatttctgtttatttttcctyttactttcttctcagtcttctagatgctttccaccaaacccacttctgggaattatccacatgtgtacttacttgggagtttgatgaaatatatgtatgt

SEQ ID NO: 22474 - DNA, 201 bp, Homo sapiens
tctaaagctagataaaaaataattagaaatagggacttctgtttctcatcttgatgaagttaccctttgctgtaagcaacttaggtagtcagcacagtcarctgagaaaaaagaacacactaggtgagctttaccttcatccctgcatcttcctcgtgaatactttccaaactattagccctttggtcagatatgaagctg

SEQ ID NO: 22475 - DNA, 201 bp, Homo sapiens
gctttccaccaaacccacttctgggaattatccacatgtgtacttacttgggagtttgatgaaatatatgtatgtgtggtatgcatatttctgatattatyttatttgatggatgttgaataactactaagagagaaaccagttgctcttcaaaatataattagcaacaccaggcctggagaagtttacatttggttgtga

SEQ ID NO: 22476 - DNA, 201 bp, Homo sapiens
ctctcctacaggtaataatacactttgaacttactatttttatcagcaattttcattgacttggcaagtgtcataaatttaaaaaagaagaattaccatckgtttccatattcatcagggacaaaacaaaagaaaataaataggcactagggaaatttagatttaatgtagttggataatggaagttccttaagatcttta

SEQ ID NO: 22477 - DNA, 201 bp, Homo sapiens
ttatttctactgctgcctgatagtggcttgaagtggttatttagagggagagggtggcttggtaggaatgtacttcattcagtatttttgttgatgctgtyattggaatgaacctcagtgaatgattttaagagcatagttcttagaagttatgatgataaatgactgaatgagaacctatttaatattatgtcactactt

SEQ ID NO: 22478 - DNA, 201 bp, Homo sapiens
accctggtctggagagttctctcacatggcatgattagcaattgtgtgtgaaatgattatgtggcaacattactagtgaattacagctagtctaaatactktgtgttttcacttgagaacattggctctggaatgtatatctggcaccgagaaggaaaaaggaaaaaaggcttgacgataaaatgcagccagagtgtaaat

SEQ ID NO: 22479 - DNA, 201 bp, Homo sapiens
atttaaaaaattactttgaggacttttatctgatattagagttgcccagaaggaccacaccttgtaactcaaactgtattttttaaatatattttttgagwtggagtcttgctctgtcgcccaagctagagtgcagtggcatgatctcgactcactgcaacctctgcctcccaggttcaagggattctcacgcctcagcct

SEQ ID NO: 22480 - DNA, 201 bp, Homo sapiens
gaaaaaatatgaattgttattactttcacatgcagcctagacatatagtatctttgaatgaatgtaagtgggagttggaggagagattttaatttgaaagygaaatactggtaaaatacagtttgttgttgttattgttcttaaagaaatataagctatttaattgtctttagcataatgtagagattatagtgctttatt

SEQ ID NO: 22481 - DNA, 201 bp, Homo sapiens
attctgaaatttgtacctttgattttgtattttggtttcatgaaaaatgaatgatgtgctctcatgattagactcaagttgcgcatttttagcaagagtarcagaaaacaatactgtgttcttctttatatcatatcagaaggcacatgatgtccattttgtcccattattagtgatgctggccgtcgaattttaaaagct

SEQ ID NO: 22482 - DNA, 201 bp, Homo sapiens
tcttaaaggagccctgtttgctgggggcgccttctttctgcagactgagttgtttccagccttttgcatggcctcacttgggtttgattcccaaagcccawttgtcatctgagtatagctaacgggtcatagttctttgtacaaggatgggcccatgtctgggggtggattttattatgagttgtaggttgattttttttt

SEQ ID NO: 22483 - DNA, 201 bp, Homo sapiens
agcttcttgcatgagtagcaaggctgaagaaaaagtgaaagatgatttttaagcttgagcttaggtaactggaatgatgatgacacaaaaatagagaacayaggaggagagaattgaaatgataatgggagtgcagcagcaaagagctccatgttggacatagtttgagttatcaggaggacatcatttgaaagtatctat

SEQ ID NO: 22484 - DNA, 201 bp, Homo sapiens
gtgaactgataatataaatttttggatgcactggcacttctttccttgcacttatgtactcattcatgcacaaagctatccagcacccactgtcaccaccygggctacaacccttctaatctaaatggattatatagtagatagctgctattgtctgtgaagataagcctgctgtctgctaccagtagaagacatgtttga

SEQ ID NO: 22485 - DNA, 201 bp, Homo sapiens
gtggttttaatcccctcatacccaccatccaaataatatggctggttttgtattaggccgttctttcttacatctggtttcctcataatcaaagatacagrttttcaaaacacgtagctgggattaaggatatggtgtgtggtactggttattctctgtgcaaaataaactgggatcagaaagcatattaagccataaaac

SEQ ID NO: 22486 - DNA, 201 bp, Homo sapiens
aattgcaaaaatacagaaaccagcccaaatgcctatcaatcaatgaggggataaagaattttgtgtgtgtgtgtgtgtgtgtgtgtgtgtgtgtgtgtgtstgtgtctgtgtgtgtgtgtgatggaatactactcagccataaaaaggaacgaattaatggcatttgcagcaaccttcatgaaacttgagactattattgt

SEQ ID NO: 22487 - DNA, 201 bp, Homo sapiens
tagaaaacagcagtttaaacaatctacttttttcaagcctaacttcttaccctatttgtgcatattatagtatatggtccttaacttatggacattagttmtgaattcatatttccattgggtttagtgcattggatgttttaggtgaactaaatgggctgtatgaagctcatctctggagtaatttcaagaatcactgag

SEQ ID NO: 22488 - DNA, 201 bp, Homo sapiens
aaaaatacagaaaccagcccaaatgcctatcaatcaatgaggggataaagaattttgtgtgtgtgtgtgtgtgtgtgtgtgtgtgtgtgtgtgtgtgtgtstgtgtgtgtgtgtgatggaatactactcagccataaaaaggaacgaattaatggcatttgcagcaaccttcatgaaacttgagactattattgtaagtga

SEQ ID NO: 22489 - DNA, 201 bp, Homo sapiens
ataaagaattttgtgtgtgtgtgtgtgtgtgtgtgtgtgtgtgtgtgtgtgtgtgtctgtgtgtgtgtgtgatggaatactactcagccataaaaaggaaygaattaatggcatttgcagcaaccttcatgaaacttgagactattattgtaagtgaagtaactcaggaatggaaaaccaaacattgtgtgaagttcttac

SEQ ID NO: 22490 - DNA, 201 bp, Homo sapiens
acttaccttccccaaatggataagtgacttaaaagggaaactgtggattgacactataagcaaaaatgaacatgagaaaatggcagaactggcattgtcaytgttcctggtggggatcttcatcagtcacattataattatctaagcagtaataatctatcagatgactggaaactggcaaaagaacttgtcaaggatatt

SEQ ID NO: 22491 - DNA, 201 bp, Homo sapiens
ctcagttagacgagtgtacatggatcatttgtagcttgtagcatggagaaatgacgtcaagccacctgtgaagccattcatttaagcagtcagtttgacartctcacagggtgatctgcgaacacgtgaccttcttaatctgggtacacaatgtagctctgtttatatattcttgtcttttagtttattgtctttaataaa

SEQ ID NO: 22492 - DNA, 201 bp, Homo sapiens
aatcaccatcagagaacttactcatgtaaccaaataccacctgttccctaaaaacctatggaaataacaaattaaaatattatatttaaaattaaagaaawaaaaactgaaactcaccagatcactaaatccagacaataagatgctggacccctcattcaccataattgcttccttgcccatccctagttcccgttttct

SEQ ID NO: 22493 - DNA, 201 bp, Homo sapiens
ctgggtacacaatgtagctctgtttatatattcttgtcttttagtttattgtctttaataaagttagcaagaggataaattagttttatctgccaaatatrtaacaggtgcatcagcaggcatgtctataactatactaaggctatctgggatgtattctccctatagtttttctttgtattaagtacagagggagaactg

SEQ ID NO: 22494 - DNA, 201 bp, Homo sapiens
agcttaaagatcttaattgacctttatttgcaattttagaatcaagcaatgcctcattccataaagtagaatgagtgttttgatgagctgagcagatgagrttggctttacagactaaaaatggctgtggaaaacaaaaacagactgcaaaaattggattggtcatttcaaagctctttttttaatgaaagttaaagcaca

SEQ ID NO: 22495 - DNA, 201 bp, Homo sapiens
acgagtctattttctaattccacccgggttctatgaatacaaatggtgttgtctttatgttgttgcaaaataaagcaacaatgcagcatcctccttaaagkctactctctctccttttctgatcctgccaactgagatgacatggtttgtatgttagtttcggttccatattaatttattcagtcatttttcaggagttaa

SEQ ID NO: 22496 - DNA, 201 bp, Homo sapiens
agtgtcttttctgtaagaggaaggggaagcaggataggaagacacaactaaggtctcagatgaggcttcagaaaagagattatttatgacataagcttcastgggtatggccaggttgtgtaggggtgttcaaggctgaagagataatgcttaccagggagtctcacagagtaacccctggatgaacatctcttaagattg

SEQ ID NO: 22497 - DNA, 201 bp, Homo sapiens
actgcttttatggacaatgaatttaatatgattcctagtggcagagggccagaatgttcatatcccttgccatgcagaattactcatccatctatattttmttgaactctgttacatttaggtagtgtaagaaagtgtgtattcggtgaactgtgtggagagttagtgtatgggatcattgcttgttggtagttttaaaaa

SEQ ID NO: 22498 - DNA, 201 bp, Homo sapiens
aaatggaggcacaggaatgtctgtctgagttcaagcattaaactacttgaacactattcatagcatgtgctaagtgggtgatagctcctggggcataattstttcactgggggtgccttagacctggaacactaacatagtgcctacctttcagcataaggagtaataaatagtgaaggggtaaacaagtagataaatgta

SEQ ID NO: 22499 - DNA, 201 bp, Homo sapiens
tacataattaaaagtaaaatgtcctagacttgagaaattttttattatccaaatagctcttacatgcccccaaaagatctccacagagtgcaagagacttyataattcagcattaatctgaattggaactgagttgaagcataatattgccttaaatattttaatgaaggagaatattaacctgattaaacaagatcaaca

SEQ ID NO: 22500 - DNA, 201 bp, Homo sapiens
tctgcagtgatgagcttattttgtacttttacacagaaaatctttatatacaaaaggcacagatagtagttacactcagcatgaacaattacagcttgttrggagagaacctcttcctgatgtgccaatggcttactcccatgaattaagaggcaaacgtgctccaaagtgcattaacctttatggattttttttcggttt

SEQ ID NO: 22501 - DNA, 201 bp, Homo sapiens
cttgtccctctgaagtggcatctgggcagtacagacacttggattattagaggcatttccatgggtgccaacatgtgttctcagtgatttcactttctagkcacaggttccataggagggaaggaaggaagtcagtaggaaggaagagatgacaatcagcattttatacctaaaacactgtgcaagtgttagcccaagctg

SEQ ID NO: 22502 - DNA, 201 bp, Homo sapiens
ttttttttttttttttgagacagtatctccctctgtcacccaggctggagtacagtgtggtgatcttggctcactgcagcctcgacctcccacactcaagygatcatcatttctgactctgaatgtataagctactgattagcaatcattttcttacgcttattcacacataaatacttaatagcaaaatatataacatac

SEQ ID NO: 22503 - DNA, 201 bp, Homo sapiens
ccttggctcacagctagagagtggagtgcagtaggaacttgtttgctgtgaccaaatctttccttttcaaagatagtggtttgcgagcagctggttttttstttgctttgggttggtttgttttgttgttgtggtttatttgtttgtttttgtgtgtgtggttttttgtttgagttggttttgttgtttgttttgtgtgtg

SEQ ID NO: 22504 - DNA, 201 bp, Homo sapiens
ctaagcagcacagcagcatcaccagaacacccgcatcagctgctgaaccacagccagctttgtcgccaccaacgatgctggtttgttcattctcttctctyctcttcccttcccatcttgacaaggtctcacgctgttgcccaagctgcagtgcagtgatgtgatcacatttcactacaaccttgaaatcatgggctcaag

SEQ ID NO: 22505 - DNA, 201 bp, Homo sapiens
tatcagtgacatctcatcagaaacaatgcaagccagaaatcaatgtatgtcaatctaagaatgctgaaaagaaacaaaaattgtcaatctagaattttgtrttaccgaaaatattctttaaaatgaagctgaaatagagacattttcaaatgaactaaaacttaaagaatttgtcaccactagactttcacttaaagaaat

SEQ ID NO: 22506 - DNA, 201 bp, Homo sapiens
cttctttgcaagggcatcttgtgtgtgttattgagaataagagcaattcataatgtgttcagtattcactaaatccaaaaaaaaagatactagagtttatrtagcaaaaataatgaagagaaaggagaaagcaaatcacttgcttccaaataaatattatttatatagattgtcctcccactcgtcctcagcctataggaa

SEQ ID NO: 22507 - DNA, 201 bp, Homo sapiens
ttttctgatagtggcacttttgaaaaatatgtatctctccccttttaatacaagtttgtcattttgggtttaaaagatacactttaaacataaaattaaaygtatgagaatggaaagagataaccatgaaatactaataaaaatagctagtattacacaaatacatcagacatttttagaatatataaatgtaattatttg

SEQ ID NO: 22508 - DNA, 201 bp, Homo sapiens
aactgtccaaagctcagcaaatacctttccctatatagctgagtattctttcccatgttgctccattttcctcccttttgacagataagaaaaggtaagcmtgactttatgaacctttttctgagttgtcactctctaaacaactttcctatttctgaactgcccagcagaatttggagtgagcaaattagagatattgag

SEQ ID NO: 22509 - DNA, 201 bp, Homo sapiens
ttccctattgctcaggcgtcattcataataaaatatagtcacacatcacttaaccatggggatgtgttctgagaaatgcgccattaggtgatttcatcatyatgcaaacactagatgttataacctactacacgcctaggctgtatggtatagcccattgctcctaggctacaaacctcaacagcaggttaccgttctgaa

SEQ ID NO: 22510 - DNA, 201 bp, Homo sapiens
ttaaaagccaagtgtccgtcagactcatgctgctaccgctcctttaagtgtgctcatcaagatttggtgcacctgggccaaggcaagaatgttgctaggawccaagaggccataataagttgtggtgattaatagcatgaagtgaaatagtgtgatgtagaaagtgtcattctgtgatttgagtgaaattaaagctactgg

SEQ ID NO: 22511 - DNA, 201 bp, Homo sapiens
tagtcacacatcacttaaccatggggatgtgttctgagaaatgcgccattaggtgatttcatcattatgcaaacactagatgttataacctactacacgcytaggctgtatggtatagcccattgctcctaggctacaaacctcaacagcaggttaccgttctgaacattataggcagttgcaacacaatggtaagtactt

SEQ ID NO: 22512 - DNA, 201 bp, Homo sapiens
ttgattcattttgaaagatatgtcatgtttaggagagtgtttgtgttctgcaacatatagtaaatgaagatagaattatgaaacttcataaatatgggaargtgctttaatgtacattactataaagggaaaagaaaaactagacatcggtgctctaactgatctccatttacagattttggtcagttttatttagagtag

SEQ ID NO: 22513 - DNA, 201 bp, Homo sapiens
atctacttacatctgccctgtgcccaaataaggaggtccacatctgttactgtgtctgtccctgccgaatatcctctgtatggccaggctgctatggggcwcatgttgcccatgccccaaaagtacatgattgcacctagcctgtgggctgctgtctcttcacagcctgtgctaactgaaatcatgagattggctatgtct

SEQ ID NO: 22514 - DNA, 201 bp, Homo sapiens
cctgagtgattgggagttggggtcaggaagatggtgctttgtgcatgttgaattgaaggtctgtgtattggtagactatccttgcagaattgtgttatagraagtgtattagtctgttttcacactgctgataaagacatactccaaactgggcaatttacaaagaaagaggtttaattggaatcacagttccatgtggct

SEQ ID NO: 22515 - DNA, 201 bp, Homo sapiens
atttccagagcacaatcattgtggagaagacagttcaagacctcctgaacctgatgcatgacttgagtgcatattcagatcaattcctcaacatggtgtgygtaaagctccaggagtacaaggacacctgcactgcagcttacaggtagagcttctgttaggggctaagcaaagtaacgtttgagcctgatggtggttcca

SEQ ID NO: 22516 - DNA, 201 bp, Homo sapiens
tgcccatgccccaaaagtacatgattgcacctagcctgtgggctgctgtctcttcacagcctgtgctaactgaaatcatgagattggctatgtctttgggstaacgctgcagtttacagtcacctcttctacagatttattatgatagtgaagtaagttgtaagcacaacggaaaattccgacaggaaaggatgtgtgggg

SEQ ID NO: 22517 - DNA, 201 bp, Homo sapiens
catgccccaaaagtacatgattgcacctagcctgtgggctgctgtctcttcacagcctgtgctaactgaaatcatgagattggctatgtctttggggtaaygctgcagtttacagtcacctcttctacagatttattatgatagtgaagtaagttgtaagcacaacggaaaattccgacaggaaaggatgtgtggggtgga

SEQ ID NO: 22518 - DNA, 201 bp, Homo sapiens
gagattggctatgtctttggggtaacgctgcagtttacagtcacctcttctacagatttattatgatagtgaagtaagttgtaagcacaacggaaaattcygacaggaaaggatgtgtggggtggatgtgtgatcaactgaagaggtttcctaggaaggtagaaatcaaatgagatcttgagtaaaggtaacagaaaggaa

SEQ ID NO: 22519 - DNA, 201 bp, Homo sapiens
ttcaggtaaaacaaaaacaaaagaagtaaccttagccaatcattgatttggtgaagacttcagagaagcttttttttttttttttttttttttttttttgkggttcatataaatgggaaaaggggctggtttctccaagacagaagtagctgtggtatctcctctcaggtaaaatgccctcaaagcattagtcattgacca

SEQ ID NO: 22520 - DNA, 201 bp, Homo sapiens
agtttacaacctgttagggtcacattgtctccccgatttcccatttggtgctacactaaggaaaggctaacagtcactttcctcttctttccattacatayacagattttctacaactgtgaatcctgacaaaccctctttgctttactttgggtggagaaactgagcaatttgcttcttaagcaggcttcatttacgtgg

SEQ ID NO: 22521 - DNA, 201 bp, Homo sapiens
gtagagacggagtttcaccatgttggccaggcttgtcttaaactcctggcctcaagtggtctgctcggctctgcctctcaaaaagtgttgggattacaggygtgagccatcacacttggcccaaaaatcttattttctttaaaagccattaaaattatgatttccagaagctatatgttatttcctcatttgaatgttaca

SEQ ID NO: 22522 - DNA, 201 bp, Homo sapiens
ccacttcgttgtggactttgtaagtttgcctttatagacccaccagtcagacactggcatgaagtcattgtctttgggtttgtgtcacaagatagaggccrgtatttcattgtctactgctcttaatttgttagagaatatttacgtgattaccggattcagcaacatttcaccagtttgatcacattaaagaccattcaa

SEQ ID NO: 22523 - DNA, 201 bp, Homo sapiens
tgtattgctttagggtacacactgggcctgtgaagactgggcctatgtttcctgctgcttttgatacaggatcagaaaatgtttggaccccccaactgttytctgatttattaacactggctcagaattatggaagtttgaagttggctggaagctatgagatgattcactgagaaccttatttgacagctgaagagactg

SEQ ID NO: 22524 - DNA, 201 bp, Homo sapiens
ttatttttattttttaacatttcaaacctttagtcagacaggaactgacttgtgtgaagtgtctatcttgttttctcagcttctatagcagtatcaactaygtatagattatgctaagaaagtatgtaattaaatactgtcaatgtacatttgaaagcaagtttgcagtgaatcacctatccagggaataatcctgggttg

SEQ ID NO: 22525 - DNA, 201 bp, Homo sapiens
tcttatattgaatgtagctgctttcacatcacactagtcggtcttagaaaatgtatctaccggctgggcatggtggcttttgtctgtaatcccaacacttygggaagccgaggcaggcagatcacaaggtcaggagatcaagaccatcctggccaacatggtgaaaccccgtctctactaaaaatacaaaattaactgggc

SEQ ID NO: 22526 - DNA, 201 bp, Homo sapiens
tccttgaagaaaggctattgtgaaaatgataaattttcaaaactcctctttagctgatttgccacaatttagaaaatgcaagggaacagtagaaatagacsacatgatcattataagaaaaggcatgaacttaaaaaaatacagagagtacatggaactcaaagtttgctaatgagtagaagtagaaataatgttagactt

SEQ ID NO: 22527 - DNA, 201 bp, Homo sapiens
cagtaacttcttctggtttcccgaggaagtgtggccagcagcagtagcgtattgttttcatcatatcacattatgttcatatgaagaatgttgcatttgartggcatttgcatcacagccagttgttgcccttccactctggtagagaatagattcagcttttattagtgtaaatagattagtcccatttaaggtctgctg

SEQ ID NO: 22528 - DNA, 201 bp, Homo sapiens
tggaagatgcctgtgttcttgtctttgtttagattgtccagcactcacctgttcacttccaagataccagagcaaattaaattttttattgctaatagagrcttttgggatctgataacattcgtccatgttttcagatcatttttatcaagttgtgttacttatgtattgttaattctattacttatttagtacatttta

SEQ ID NO: 22529 - DNA, 201 bp, Homo sapiens
tagtcacagtgttctaggtgttggcaacagcatatgtagcattatttatgctaaactccttttgaatatcttccacaaccacaccaatgttcattgctacrttgctgctagcatgttgttcaagaatacatttttatattcactctacattgatgtaaggataccttcgtcacatggatgaattaataaattcacatttag

SEQ ID NO: 22530 - DNA, 201 bp, Homo sapiens
ttgaatgcattttcttcctgctaagtcctccatgcccaaaacagggtgtctttggaggcagaaggtaacaatctctgagtaactgaaagttatcaaagcarcaaaactttctctttcagattattgcctgacatcttcttagctcgtgaagctgtttttccagtgaggattctaattctaacgtggttttcacaagcctaa

SEQ ID NO: 22531 - DNA, 201 bp, Homo sapiens
ttttcaaagtggtatgtggtttcagtgtcgtcgtgaagactctgtggctttttagccaaatcatcttaatgccaatctcttactacttgtgaaaccttggrtaaatgacttaatctcttgtctcagtttcctcctctataaaatggggatagcaatagaacctacttgatagcatttttgtgagtaaagcactttgaagag

SEQ ID NO: 22532 - DNA, 201 bp, Homo sapiens
ccagaagtgtgttgctagttgatttcatagttgtgcaaacatcatagagtgcacttacacaaacccagatggcatagcctactacacacctaggctacatkgtttggccttttgctcctagagcacacacctgtacagcatgttattgtactgaatagggtatttgtaacatagtgatatttgtgtatataaacatagaaa

SEQ ID NO: 22533 - DNA, 201 bp, Homo sapiens
ttgatatacagattatttcatcacccacataataagcatagtacccaataggtagtttctcagtcctcaccctcttcccacccaccaccctcaagtaggtsccggtgtctgtttttcccttctttgtgttcatatgtgctccatgtttagctctcacttataagtgagaacatgcagttttgattttctgtttctgaatga

SEQ ID NO: 22534 - DNA, 201 bp, Homo sapiens
agcagaagcagcaatggtgatagtctgggcttctatcacagggtgggacagaccttggagatatgctgtctcctctgtacttgatctttcatgtgccatcyggagtcttccctcttgctcaaaggcctgggtcagtgcatccttagtggctcagtttgaatggggatttcactcagtgatgagatgatgtggacacagaaa

SEQ ID NO: 22535 - DNA, 201 bp, Homo sapiens
acattaatgcaggcagtgctaacacatttgtttcttttgtcttttatgacagtctgagttttaaaactttgcttctattctgagtttagtagtttttgttyagaaatgaaactttgaggcagcagcatcaggtaatgggaagagtgtaggcttttgagacaaagacctgaatttggattcttgctgctccacttactagct

SEQ ID NO: 22536 - DNA, 201 bp, Homo sapiens
ttccacggtgtatatgtaccacattttctttatccagtttaccattgatggacatttaggttgattccatgtctttgctattgtgaacagtgctgcaatgmacatatgtttgcatgtgtctttatgttagaatgatttatattcctttgggtatatactcagtaacgggactgctgggtcaaatggtaattctgttttaag

SEQ ID NO: 22537 - DNA, 201 bp, Homo sapiens
ggggatttcactcagtgatgagatgatgtggacacagaaactagttgtgataaaagttggtagttgcggccgggcgcggtggctcacgcctgtaatcccarcactttgggaggccgaggcgggcggatcacgaggtcaggagatcgagaccatcctggctaaaacagtgaaaccccgtctctactaaaaatacaaaaaatt

SEQ ID NO: 22538 - DNA, 201 bp, Homo sapiens
cttgtttgataaaaaacatttttttctaagggaaaggaatagcaacatttgctgccacttaaaatccatccttaaaattcacacaaagcacatttattgcktactttcacaatgatctagggaccaaagagtaacaaaaaacaaaacaataaataaatgcacaatcgggcatctctgctgtcaagtattccttgaaggcct

SEQ ID NO: 22539 - DNA, 201 bp, Homo sapiens
ggaggctgaggcaggagaatggcgtgaacccgggaggcggagcttgcagtgagccgagatcccgccactgcactccagcctgggcgacagagtgagactcygtctcaaaaaaaaaaaaaaaaaaagttggtagttgcagatacaaaatgctactgcatgagatctgtccagtagcctcaactatttttagtatgcagtcag

SEQ ID NO: 22540 - DNA, 201 bp, Homo sapiens
ttattaagaatgcccttggacccatccaaagatatccaaatactactgactcagctgccacctccttaacaaaacaacctcatcagctgaaagtaactaarcagtcctcaagtcaaaaagggaagagaggcatgtgaagagaagattccttcaatgctgacctgtgctttcacagtcagcactaagtcatagaagagaacc

SEQ ID NO: 22541 - DNA, 201 bp, Homo sapiens
gaggcaggagaatggcgtgaacccgggaggcggagcttgcagtgagccgagatcccgccactgcactccagcctgggcgacagagtgagactccgtctcaraaaaaaaaaaaaaaaaagttggtagttgcagatacaaaatgctactgcatgagatctgtccagtagcctcaactatttttagtatgcagtcagagagaca

SEQ ID NO: 22542 - DNA, 201 bp, Homo sapiens
acatgaggatggttggcatgttctcactgagcctccctttttccaaatgaaaatccctgattaccaatttatattttggggtttccagtgccttgacattygggttactatttcctgctgcttcagttggtttaacttgctcttggattggaatggattctagtctagatatgatttaaccaatccagaggagagtgagat

SEQ ID NO: 22543 - DNA, 201 bp, Homo sapiens
tacaggaagcatgtctgggaggcctcaggaaacttacaaccatgacagaaggcgaaggggaagcaggcacatcttaccattgcagagcaggagagagagarcaaagagggaagtgctaccacttttaaacaaccagatcttgtgagaactcactaactatcacgagaacatcaagggggaaatccacctgcatgatccaat

SEQ ID NO: 22544 - DNA, 201 bp, Homo sapiens
gaagccaccagtgctgaggagaactgatttgggaggaaagtgttcacctacccaagccagcccattgtccaggcaacactgggtcagctctggggtcactrtcagataatcctgcttcttgcactaccgaggttaagaatttgcaccctagaagacttcaattcaaatccctgcttccccactcactggctatgtaacctg

SEQ ID NO: 22545 - DNA, 201 bp, Homo sapiens
gttagctcttcttgttgcattaatccctttaaccattatgtaatgtccttctttgtctttcttgaattttgttggtttaaagtctgttttatctgagactrtgattgcaaccactgcttttttttctctttttttgctttccatttgcttggtaaatattcctccatccctctattttgagcctatgtgtgtctttgcatg

SEQ ID NO: 22546 - DNA, 201 bp, Homo sapiens
actcagggtcatgatgaacggcactcatatatacctcctgtgggcagctgaattcctgtgtatgcatcttttctgtcctcttcaagaagactcaaactagrtcaaccagattgcatttgctctcatgccaatgccttgcctgataattcttgaaatacattgcaacgtggtataatagaaagagcaggccttggggtagga

SEQ ID NO: 22547 - DNA, 201 bp, Homo sapiens
ttgaggcttagcattgcaaaaaagagttaagaagtaatcaagattattttaataaggcatagtgacaaaaacaacataaatggcatttctctgaagtgagwtttggtgatttctcattaaattgaattggcagaaactcagaaacaatactttctcatttcaagaaatagtaattgtttttaatgtagcgagccagagttc

SEQ ID NO: 22548 - DNA, 201 bp, Homo sapiens
cagcatcttcaccagagtagattccatctcaagaaaccactttctttgcttgactataaggactctttgtccgttcaaattttgtcatgagattgcagcawtttagtccatctttcggctccacttctatttatagagaacaagcagagtagatttagcataattcttgggggccctaggatttttagaatggtaaatgag

SEQ ID NO: 22549 - DNA, 201 bp, Homo sapiens
aatagaacactatttaaaacaagagaaatggtatatccccctctggcagagaacacaggtaagacattacctcttgtacttgatgggagaacatctttttytttctttctttcttttttgtttgtttgtttgtttgggacaaagtctcactctgttgcccaggctggagtgcaatggcgtgatcttggctcactgcaacct

SEQ ID NO: 22550 - DNA, 201 bp, Homo sapiens
gactgtgttaggcatggggcattcatcactgaccattagatatggtgtcactttggggattacaacctaatggggccattatctacataagacatgagttraattaatgcagaggcttctgttttatttttaacgtggttacctaggaaatacagacaattatggagaaaagaagaaaggagtagttcatcttgaaaggat

SEQ ID NO: 22551 - DNA, 201 bp, Homo sapiens
gttcaattgattctcatgcgtcagcctcctgagtagctgagattacaggcatgcatcaccagtttggttttttttagtagagacgggtttcactgtgttgytaggctggtcttgaacccctgccctcaagtgatctgcccgccttggcctcccaaagtgctgggattacaggcatgagcaaccacgcccgtcctctagctt

SEQ ID NO: 22552 - DNA, 201 bp, Homo sapiens
tcactgcaacctctgcctcccaggttcaagcaattctcatgcctcagcctcccgagaagctgggactacaggcgcacgccactgcacctggctaatttttktatttttagtaaagacgcggttttgccatgttggccaggctggtcttgaactcctgacctcaggtgatccaccgcctgccttggtctcccaaagtgctgg

SEQ ID NO: 22553 - DNA, 201 bp, Homo sapiens
taaattaccatttcaatctcactgcttgttatttaacatacacaagtcaataaatgtgatacaccacataaacagaattaaaaaccaaaatcacatgatcrtctcaataaatgcagaaaaagcatttgacaaaatccagcatccctttatgcatccctggtgtgaaacccacttgatcatggcgggttatctttctgatat

SEQ ID NO: 22554 - DNA, 201 bp, Homo sapiens
ttaatcagagcatgcatttcactggaggggcagctcagtgagtgatgtgaaggtgtttcctctgagaaacggaaacagttatgaagtgttttgtggtcctytgggagttgaggtgctatagaaatgtaaggcttttattacaactcctgacctactatacagaaccatgctaacatcattgatgattcttttgcataatca

SEQ ID NO: 22555 - DNA, 201 bp, Homo sapiens
taccactgattttctgttgctattgattttgtattctgcaactttgctgaatattttattagctctaatagttttttgtgtgtattctctaggatattctrtatataagatcatatcatccaaaaatagatattgttttatttcttcctttccaatctggatgacttattcatgttcttgcctcattgctctggctataac

SEQ ID NO: 22556 - DNA, 201 bp, Homo sapiens
tggtctgcgagtacgatttttctactgatctccaaactacagtctcaagacaacagttttccacctctgaacagaggtgcctctgaatacccagatctttwtgtctgtgaacaagcactgcctattagagccaaacaagagaaacacatattaccatctccaattctttagaatccttttggcccagaatgacttcaaaat

SEQ ID NO: 22557 - DNA, 201 bp, Homo sapiens
ggggagagaattccttgtgcttcctgggtgaggcaacatcccatcttgctttggctcgccctcggtgggctgcacccactgtccaaccagtcccagtgagrtgaaccgggtacctcagttggaaatgcagaaatcccccttcttctgcgtcgatctcactgggagctgcaaaccggagctgttcctattcggccatcttgc

SEQ ID NO: 22558 - DNA, 201 bp, Homo sapiens
aagtggatagataaataagttatggacactgctgggaagcattagctaatgtttattgagcccgtgtggagtgtaatactttcctaagccctgtgcagtgyattttgtttctagttttccactttgtacttgagggaagtattccatggatcttcttgttttgaatttactcttttgtcttcatagaaggttattgttttg

SEQ ID NO: 22559 - DNA, 201 bp, Homo sapiens
ctctggtggatgcagcctttacagtggtgagaggaggagccgcgggatgtaaggaaaaggagctcctatggcctggctggagtgtgcagtggatgaggctrcctcaatgcagggcgagatccacacatcacatggtgggggaagccattgctgaggtggggagggtaaacaatgctagctttttggccaggccagggcacc

SEQ ID NO: 22560 - DNA, 201 bp, Homo sapiens
agggagctaaaagcagaacaagacatttgagtttgtattgttctgctttattttcataagttccacattctcaactgaatttctagggacgaaagagaacycgattacttttagttcctttcagtgccactctaacttagtgacttgacttccatttctctaagtggaaatatttacatgtatttcaaaggatgctctctg

SEQ ID NO: 22561 - DNA, 201 bp, Homo sapiens
ctagaggactgaaacttcatcttttcttggttattctacatataatctaatgcaataagaacctgaatgatgagtacttagttggcagatatttatcagtygcctactctatatacatctctttgttagatttgatgggctgctcactctgtccctctgcccacctgatgttagttaatctgggggacaaccatgtaataa

SEQ ID NO: 22562 - DNA, 201 bp, Homo sapiens
tatagtacaaaagacaaatacacacacattccccacccagtgggctttactataaaacaagccaattaagacaaaatgcacagtaattaggaacatcttargtggggtcagggttgctggatttttttatacattcatacacttaatttattttaaattttatcacgataattacattgttttaaggtttgaatttttgca

SEQ ID NO: 22563 - DNA, 201 bp, Homo sapiens
gtgacattattcagtgttgcgtgtcacacttatgaacctgtttttttttataatttcttatagcagctacctaccctgtgagactgtcttgttgctgtctrcattaatccaactgtgtctctttaatttctgttaatctttcatcagtgtgttatttaaaatgtactctgtagtcattacatttggaaaagtgcagtaatt

SEQ ID NO: 22564 - DNA, 201 bp, Homo sapiens
tgaagatgtccatattctgcaactcagccattctgcctttatgtgttagcctaggaaattgtcacacatagaaataaaagagacatgtacaagggtgttcrttgtagcactgtctacttcaaatagaaagaaagcagaggaatgcataaatgtagggtgatgtttcctccatacagtagagcagttaaaataaactagttg

SEQ ID NO: 22565 - DNA, 201 bp, Homo sapiens
tgaatgttagtgctgtttgaagtgtgaatcccagatcccaggccccaatccaaaccgactcttattattttcctatggctgcctacaaattaccacaaacktaatgatttaaaatagcacccacttattatctcacagtttctgtgggacaggagtctgggacgctgagatggttcctctgcttcagggtctctcaccatg

SEQ ID NO: 22566 - DNA, 201 bp, Homo sapiens
agctcaagtggtaagtatttaattcttcagccactaagctttttagtatgtcttagttcctaggtagatatctggaggagctttttgggggctgagctagkttgggctgggctaggtgggcctgagctaggtgtgttggaacctgtgatgagccctttgcaaccttcagagcaaataagatgtacagtgatttattgggct

SEQ ID NO: 22567 - DNA, 201 bp, Homo sapiens
gttttgatttgctgatagtttgccttaaaaattcctcattgatatgtttaacatagtacatgcatccttaacttcacaactttctttttttcctttcaccrtctttcttccttatcttgcttagccagccgtatttctttcctaaaacatagccttaaaataatctgtatattgtatccgctttaagaaggactagccttt

SEQ ID NO: 22568 - DNA, 201 bp, Homo sapiens
agaaacatcagaagcagttgagggaccaagaagtggatcacctagggatgaggaagcattgtgctaggtggcttttaaaaatgcttccagcagagtcatcygtggctccataacaatttttgtcttagaagtctttctttaattttataaactgccatgttctgttatgaatgtgcactgctctagtccttcagtaagctc

SEQ ID NO: 22569 - DNA, 201 bp, Homo sapiens
ctggaaaaagaatttggtagaagttcttcattagacttactctatttgtatccagctgtaccacatcaactatggcaggaaagtagaatcccttctctaawctggaatcatgtggcaggaagttcttatcacttaaggggcacgagggaacagaaacacagtgttcaataaaactgaaagggcctcagtctcagtgttggc

SEQ ID NO: 22570 - DNA, 201 bp, Homo sapiens
tttaaaacaagagaaatggtatatccccctctggcagagaacacaggtaagacattacctcttgtacttgatgggagaacatctttttttttctttctttyttttttgtttgtttgtttgtttgggacaaagtctcactctgttgcccaggctggagtgcaatggcgtgatcttggctcactgcaacctctgccttctggg

SEQ ID NO: 22571 - DNA, 201 bp, Homo sapiens
tccagctgtaccacatcaactatggcaggaaagtagaatcccttctctaaactggaatcatgtggcaggaagttcttatcacttaaggggcacgagggaayagaaacacagtgttcaataaaactgaaagggcctcagtctcagtgttggcttcaccaaagccaacctgaggctttcagctgtgccttctctttccaatta

SEQ ID NO: 22572 - DNA, 201 bp, Homo sapiens
caagagaaatggtatatccccctctggcagagaacacaggtaagacattacctcttgtacttgatgggagaacatctttttttttctttctttcttttttktttgtttgtttgtttgggacaaagtctcactctgttgcccaggctggagtgcaatggcgtgatcttggctcactgcaacctctgccttctgggttcagcg

SEQ ID NO: 22573 - DNA, 201 bp, Homo sapiens
ttgggaagccggaggagagagagagagatgagggaatgatggccagtgagtggggcagtcagaaggcacacatgcattgattaagtttgcagtcttgtatragtgtggttcgtggtgccccaaaccattacaatagtaacatcaaagatcaccaggatagatataataataatgaaaaagtttgaaatgttgcaagaatta

SEQ ID NO: 22574 - DNA, 201 bp, Homo sapiens
cacttgggatctggaagctagctgattttttgatccaaggtgctctgctaggtagggttgccagttgtaattatatgttcaaatgtcaattagcagaacakcctattatttggcagtttggagtaatgagatggatcttgcgctaatctttcaattcagcaagtgtttgataagtactttataagtaaaattctatactgt

SEQ ID NO: 22575 - DNA, 201 bp, Homo sapiens
aaagaaaccagaaagtgatgttttagcagccaagtacaagtgtgtcaagtaagacttcatcagtacttatcaaatgctgcctggtacgtaataggcacacrtatgtgtgctgagtcaatgaataactgggtacgtgctattctatactgacttctgttgagttctaatgtacaacacccccttaccccattcagaggcctt

SEQ ID NO: 22576 - DNA, 201 bp, Homo sapiens
ggtgcaaagtacaaaacactgtattttcctgataataacaaatcatattttttcacacttaaatgtttgccattaaggtgtattttacccattaatgtgtrtttttactgttgtttttggcctcctcttaaatttttattaaatatttgaataaaatgagtttggtgcattaataaaggaaggaggaggacttacctttgt

SEQ ID NO: 22577 - DNA, 201 bp, Homo sapiens
taactgctacacatgaccagctcatccttcatccccagccttcacttacaccttttcccttgcctgaataccttgcctctgcctctctaagtatccaaacytccccgtcctccagatcccagttcaggctcccccacctttttattcctgttcccttaccttgtcttttatactcacttccctcttctcttggactatcac

SEQ ID NO: 22578 - DNA, 201 bp, Homo sapiens
taaattttttcaatttaaataatttatttttaatagattgtcaatctgtttttgttattgatctaagcactatacagtgattatatactttaagtaagtgratgtcaagctagtgttaacagatagctattgccagcataagaatattccctgcctacccaaaaatatcggaaagaaataagaccagccacttataagaga

SEQ ID NO: 22579 - DNA, 201 bp, Homo sapiens
caaatgtacgtattcttcaaatgtctttttattttttttaattttaaacatatagattttatttttcttttgttagtttttttccgtaggctgtgactatrcttactgaaaggatatgacatagatataaactgttttccatggagtcccgatcatcttaagatatcagagttaacacttcaaatcatttaatacactttc

SEQ ID NO: 22580 - DNA, 201 bp, Homo sapiens
tgatgttttcccaagtagattaccatcacccctgaaaagaaaagcccatgctttttaccaagaacattgctaggccagtatctgctaatgtcattgttatrtttctatatcttctctaacatgtagcatcttctatttagctgaataacagccttaaggtgcttttgaagtgtgcatgggtatgtgttgggaaaggagggt

SEQ ID NO: 22581 - DNA, 201 bp, Homo sapiens
accttaaaatcttatgttagaaatttatggtagtgcatcaggtggagagagaaagttccatgggaagctaaacctctgcttaaaggctttgtgaaacttgrctagtaagaagcatagttgctgtttcatgaaagtaactatttgctagggagccatcttgaaaggattatttctgtgacactatgtactggggaaattttt

SEQ ID NO: 22582 - DNA, 201 bp, Homo sapiens
atttattcttcacaatgaaatgtagaatcagcatgtcacgttccagtatacatcccatgttttttgatgggaatatattgaatttatagctttctaagtgraaatttgccttcttattttgagattttattttattttatttatttatttttttagacagagtctccgtctgtggcccaggctagagtgcagtggcgcaac

SEQ ID NO: 22583 - DNA, 201 bp, Homo sapiens
cccctgaaaagaaaagcccatgctttttaccaagaacattgctaggccagtatctgctaatgtcattgttatatttctatatcttctctaacatgtagcaycttctatttagctgaataacagccttaaggtgcttttgaagtgtgcatgggtatgtgttgggaaaggagggtgttggggatatttcttataaatgctaat

SEQ ID NO: 22584 - DNA, 201 bp, Homo sapiens
aacctctcagaggaagataaagtaatcgacctttagaaattaaatgttatagcattcggataaataatcattggctattgttattacttttcttggatttmggtgaaggaaataaaagatgcaggcttttgaccaaattagagcatggctttaatttcctgttattccagcattgctactctttctaataaccacaaatca

SEQ ID NO: 22585 - DNA, 201 bp, Homo sapiens
agatcttggttagtctatcttgtggttaaaaagatccttaaagtagagcaatttgaaactcttaataatctttaatagtgtttccttttaattaaaaatayattcttcctgatatttaatttgtagcattcctactgtcacaaaagaacagttacccctgttttcagcatcagtagcaatgaaaaaccattgttatgaact

SEQ ID NO: 22586 - DNA, 201 bp, Homo sapiens
tgtaatggtttagaggaggagagaaaagtttcagaactgtgttgcaataagcccctttgatggggcttaacttgaaagggagcccttgtctgatcaaatgwcatcagacagaagggagccagtgagtgtggaaattactaataaaaatgaagaaacgtgtcttcacccttttgtgccaatttctcaaaataccacagattg

SEQ ID NO: 22587 - DNA, 201 bp, Homo sapiens
aggagccactgagtgggtgttaagcatggagtgccacgtgcacacctgtgctttagggaaatttttctgagttttgtgtaagatggatttgaaaagcaagrgtatagagatagaggggagagagacattaagtgcctgaatcaggggacagggaaggaaaatggagaggaaggaacagattaagagatagtaaagaggtaa

SEQ ID NO: 22588 - DNA, 201 bp, Homo sapiens
accatttagcttaaatggttgcttctaggcaagttgctaacctctcttagttgcctcagctatagaatgggtataataaaagcttgttttttcagcctcaygttcatgttgtgaggaccagaaatttaattatatcaaagtattctgaaaattagaactcacatttcaaaaaaaaatttaaacaaatcagactatgggaat

SEQ ID NO: 22589 - DNA, 201 bp, Homo sapiens
taacacttgtgtgcccagacccaggcagtttactcatggcgtcgggcagttcacagaccccacggtgaggatcttgatttgggggatctgccaccattctstttggctcttttggtttgtatgttcctttcagacttgatgagctttcacatttgtttcaactcagattaaacagctcacactgtttcatcattttaaatg

SEQ ID NO: 22590 - DNA, 201 bp, Homo sapiens
agatagtaaagaggtaaacttgataagactttggccactgattggctatagaagaagaaatacagattgaaattagtattatcttttctatgctgtatttrtggtgatttttgtaaaacacaaattcaggatctcacatttacccattaaatttaatgttatttatttatttagagagattctcactctgttgcccaggct

SEQ ID NO: 22591 - DNA, 201 bp, Homo sapiens
gatatttaaataaaatccttagaatcaaaaaagtgcctaagttaacaactttttaaaagggctattttaccaactccataattgacattctgtcactgctyagactttatttcattcctgctcaactcaatatatggatttttatacaaaccatttaccaaccactagacaatagcgcctctggcagatcaaatttgtaca

SEQ ID NO: 22592 - DNA, 201 bp, Homo sapiens
tctatgcatttccttataaaaagtgtattttccacgtgataataccattgatttttttttttgtcaatgtgagaactatatagagaggctaaaatgtgcamctgaaatgatgcatcttttcagtgttcctcagtggcattctcaaaatgatcgttatattcatggcttaaaattaactaaattaagttttcaatgcaagtg

SEQ ID NO: 22593 - DNA, 201 bp, Homo sapiens
tggctatagaagaagaaatacagattgaaattagtattatcttttctatgctgtatttgtggtgatttttgtaaaacacaaattcaggatctcacatttayccattaaatttaatgttatttatttatttagagagattctcactctgttgcccaggctggagtgcagtggcacgatctcagctcactgcagcctccgcct

SEQ ID NO: 22594 - DNA, 201 bp, Homo sapiens
gaagcacatgtagaggggtttgtgtgtgtgtgtgtgtgtgtgtgtgtgtgtgtgtgtgtgtataaaaagagatttgtttcaggaacttgacctcgtttaawtgtgggatctggctaaacagtctctgtaagatttttgtcttctcaactcatgctggagcttgaagttcacaaggcaggccatcagaagacagagggatca

SEQ ID NO: 22595 - DNA, 201 bp, Homo sapiens
aaatgctgggattacaggtatgaaccactgcgcctggcctctttcatgcttttatggtctatcatttattaatttttattgaatatttatctcagacaaayatttattgtctgagacattgtatttctggtctcatattgcagaaaagaaaacagaacttggaaataaatgttcaccgcctaccattgcttggcatcatgc

SEQ ID NO: 22596 - DNA, 201 bp, Homo sapiens
agctcgtggtcagcatgaccattgcttctcagaaatgtaaattttctcactcttgtgaatatcatacttacacctcatgctggctactctcctcttcttcycttcatgatttttctcattataactttgtccgttgcacccagatacatccgaaaagttgtcacctgcagagatgctatttggtgaagatttgaaacctct

SEQ ID NO: 22597 - DNA, 201 bp, Homo sapiens
aacaagagacaatcgatagaaaaattaaaaggaaaagtcaaggtaattaggctaaagctgctgcttatgggttttcaataattactttagcttcctcttgktttcccatctccagaaaaatagggcctgattgaaggccctgattgaagggcctgggtcgtgtttgactgaggacatgtcaaaattatacaaagccaagca

SEQ ID NO: 22598 - DNA, 201 bp, Homo sapiens
agatgggcacagtgaatattgaaagtgttctggacctccgcttactccttcagctcatgagtgctgagcactgccagcacttttcttattatctattagcraatttaaaaagaattgcttggatctttacatctttttggacctataactaaatcacatgtatggctaggttctttcccacctcttctacccccaaccccc

SEQ ID NO: 22599 - DNA, 201 bp, Homo sapiens
ttcattaaaaaatgcattctttttctcttggtgttttgttttatatagtttgtgttgctatgctggttcactagtcttttctgctattcctaatctcttgytaatcctatctaatattatttttatcttagattatacttttcaatctaagatacagaagcttatcttctttatctggaagtttgctttgggtctttttca

SEQ ID NO: 22600 - DNA, 201 bp, Homo sapiens
gtctcagggcagctccaagaaggcaaagactgaagctagaatagctaaggcccagattctgaaactcacataacagaacttcagccatatcctatcagtcrgtgtaagctataaagccaatcaagatttaagaggtgaggaaaagactctatttcttaatggggaaaagctgcaaagaattgtgatcatacttattccacc

SEQ ID NO: 22601 - DNA, 201 bp, Homo sapiens
atttagaaagctacgggatcacatttgctgttttaaatatttattgttctgccatagcatacactgcttatccaaattatttagacacctctactttaacraactataactcgtagatcctacttagcatagatataaggaacttgagtgagaactggtcatattgctcagaaaagatgtctcaggatgtagtatcattct

SEQ ID NO: 22602 - DNA, 201 bp, Homo sapiens
agctctacccctaaaaataaaacaagaaaagcaaggaaaaagaaaaaattcctaccccacatagcacattgtctcttttttccaatttcggggcactcatrtgagattgtaggcattcttcaaccacgaagcaactttaccaactctgttaaaattgccacttttaacatggggaaaaacaagataatatttattaacatc

SEQ ID NO: 22603 - DNA, 201 bp, Homo sapiens
agggataggtttatagaccggacccgtaatgaagttgagaatcattgtgcaaaagctgcagactacaggtagacattgagagcctttgaatgtggagagcrtatatttcacttccttttgacaaagactttattttataaggctttatgggaaacagtgtgttcaattacctcagttaaaactcattccagggagcagact

SEQ ID NO: 22604 - DNA, 201 bp, Homo sapiens
tttatacatggaatggattgttaccttttctgggaggagaataaaccataaatatgaacgaggcattaaaagagcttaacataaatcactaagaaaaatcygtagactgtgagaatataaaaatcgctgtgaattataaataatacagcaaggttatataaatcattttatgtaaaggcagacatatatttctacttctca

SEQ ID NO: 22605 - DNA, 201 bp, Homo sapiens
tccagtttggtggcattcagtacattcacattattgagtagccatcaccatcatccatctgcagaacttttttcatcttctcaaactaaaactccatattycttaaacaataatccctcatttctccttccctccagcccttggcaacctccattctacttcctatctctatgaatttgactactctaggtggcccatata

SEQ ID NO: 22606 - DNA, 201 bp, Homo sapiens
ttctgcttttattcatggaggctattttgtaaagataagtacatttttatcagttgaaggtaaatgcaaaggaggtgaaagcacctctattccagccattrtcattatccattatcattaatgatcctaatttcttcttgcaagttactgtgactgaatcctagaatcactgtatttatagggatcaccagattctagaga

SEQ ID NO: 22607 - DNA, 201 bp, Homo sapiens
aatctcaactactcaggaggctgaggcaggagaattgctggaacccaggaggtggaggttgcagtgagccaagattgtgccattgcactccagcccgagcygacaacagtgagactgtgtctcagaaaaaaaaaaagaaaaaaaaagaagctgttgaattgtggcttcagtaaaaactataacaaaaatggcagaccagct

SEQ ID NO: 22608 - DNA, 201 bp, Homo sapiens
aactaactacacattttgatcccaggtgatcagaagaatgatgacattaaggagctcccccgctttggtgcccttcctccctttgaggagaggtggtaatrgagagtttacctggtcagtctgagtttgttggacccatgttttagcatttcctaaacatctgctgcattgttttgacctgcttactgtgatatggatgtg

SEQ ID NO: 22609 - DNA, 201 bp, Homo sapiens
ttatgatgaaacatactagtcttaaaacagagtaaaattgtgttagttaattagttaattacagaattaattaacacaaccagtagctgaagttttttttktttgtttgtttggtttgttttttttttttttttttttttttttttggagttagggtctcactctgtcacccagactggagtgcagtagtgcagtcatagc

SEQ ID NO: 22610 - DNA, 201 bp, Homo sapiens
gaaacatactagtcttaaaacagagtaaaattgtgttagttaattagttaattacagaattaattaacacaaccagtagctgaagttttttttgtttgttkgtttggtttgttttttttttttttttttttttttttttggagttagggtctcactctgtcacccagactggagtgcagtagtgcagtcatagctcactgt

SEQ ID NO: 22611 - DNA, 201 bp, Homo sapiens
catactagtcttaaaacagagtaaaattgtgttagttaattagttaattacagaattaattaacacaaccagtagctgaagttttttttgtttgtttgttkggtttgttttttttttttttttttttttttttttggagttagggtctcactctgtcacccagactggagtgcagtagtgcagtcatagctcactgtagtc

SEQ ID NO: 22612 - DNA, 201 bp, Homo sapiens
tagtcttaaaacagagtaaaattgtgttagttaattagttaattacagaattaattaacacaaccagtagctgaagttttttttgtttgtttgtttggttkgttttttttttttttttttttttttttttggagttagggtctcactctgtcacccagactggagtgcagtagtgcagtcatagctcactgtagtctcgaa

SEQ ID NO: 22613 - DNA, 201 bp, Homo sapiens
atgctgtatttgtggtgatttttgtaaaacacaaattcaggatctcacatttacccattaaatttaatgttatttatttatttagagagattctcactctsttgcccaggctggagtgcagtggcacgatctcagctcactgcagcctccgcctcccagattcacatgattctcctgcctcagcctcccaaatagctggga

SEQ ID NO: 22614 - DNA, 201 bp, Homo sapiens
tatttaataacaaaaacttattaaattatgtctgtaaggtatgtgtaatgatacagaaaatgttcatgagagaactttaagaaacaggatataaagtgacrtgatcacagctattaaaacaagcatttaaacatttttgaaaagactggaataaaatagaacaaaatattaattatggtttattttagaactattgcctcc

SEQ ID NO: 22615 - DNA, 201 bp, Homo sapiens
ttttgtaaaacacaaattcaggatctcacatttacccattaaatttaatgttatttatttatttagagagattctcactctgttgcccaggctggagtgcrgtggcacgatctcagctcactgcagcctccgcctcccagattcacatgattctcctgcctcagcctcccaaatagctgggattacaggtgcccaccaaca

SEQ ID NO: 22616 - DNA, 201 bp, Homo sapiens
ttacaggcatgagccaccaggcctggcctgttttgagcttgttcaatctatgtcataagtaaacctaatcttgttaaacttcaaaggaataatattgtgtytaaaatttcaattcaagcactgagcatgatatgaactagtatcttaacatcaaaccaatggtcaattatttttctaagctaaattgcttctccttttaca

SEQ ID NO: 22617 - DNA, 201 bp, Homo sapiens
tcactctgttgcccaggctggagtgcagtggcacgatctcagctcactgcagcctccgcctcccagattcacatgattctcctgcctcagcctcccaaatrgctgggattacaggtgcccaccaacacacctggctaattttggtagttttagtagagatggggtttcaccatgttggccaggctggtctcaaactcctga

SEQ ID NO: 22618 - DNA, 201 bp, Homo sapiens
gctagaggccaggagtttgagaccagcctgcacaacatagtgagactatctctctaccaaataaataaataaataaataaataaataaataaataaataawttatctgggcactgtggtatgcctatagtcctagctacttgggagaaaaaggcaggaggatctcaggagcccaggagtttgcaggtacagtgagctatga

SEQ ID NO: 22619 - DNA, 201 bp, Homo sapiens
ctcactgcagcctccgcctcccagattcacatgattctcctgcctcagcctcccaaatagctgggattacaggtgcccaccaacacacctggctaattttkgtagttttagtagagatggggtttcaccatgttggccaggctggtctcaaactcctgacctcaggtgatccacccacctcggcctcccaaagtcctggga

SEQ ID NO: 22620 - DNA, 201 bp, Homo sapiens
tttaccagttttatttctgcaagacttacttgaagttatataaattcttcacactatgaaacagttagtaaaccatttgtttatatatgtgtgtgtgtgtwtatatatataatatatataatatatatattatatatatattatatatattatatatattatatacatattatatatattatatatatattatatatatat

SEQ ID NO: 22621 - DNA, 201 bp, Homo sapiens
gtactatccatatgtttttcaaccttatagcaccagcagtgcctaagtcattgtgcctggcaagtcataggtgttcaatataggtatgatacatgaatacwcatgtccagtctgggaggaacttttcaggaagtaactaacataggcctctttccttccgagtgctgtataagcagtctcatgctggtgttgctttgagca

SEQ ID NO: 22622 - DNA, 201 bp, Homo sapiens
ctgggattacaggcatgagccaccatgcctggccaaatttaatgttatttttaagtcaccatttcagcctattgagatatttttgaatcttcattctgtcrtcaaaaaatcttagctattcctgtaagttccttgtcttccttgattacataagcaatcttttttttatgcatgtcattgaaaaaatgtccaacagcatag

SEQ ID NO: 22623 - DNA, 201 bp, Homo sapiens
gttatattggaacctcaaatttaaaatatccaaaactgagataccaatattccacactctatgttcaacaccttctttcccttagtctttgcatttcaatktgtgggatgccatccttccagttgcccagaccagaatcccaggagtatcccttttctcacacaccttagaagcaacccatcagcatgtcctgttggcttt

SEQ ID NO: 22624 - DNA, 201 bp, Homo sapiens
tgaagttatataaattcttcacactatgaaacagttagtaaaccatttgtttatatatgtgtgtgtgtgtatatatatataatatatataatatatatatwatatatatattatatatattatatatattatatacatattatatatattatatatatattatatatatataatatatatatacacatctctttttttttt

SEQ ID NO: 22625 - DNA, 201 bp, Homo sapiens
tttcaggaagtaactaacataggcctctttccttccgagtgctgtataagcagtctcatgctggtgttgctttgagcatgcattttccgtgttgtataatrtattgctttagggtacacactgggcctgtgaagactgggcctatgtttcctgctgcttttgatacaggatcagaaaatgtttggaccccccaactgttct

SEQ ID NO: 22626 - DNA, 201 bp, Homo sapiens
acatgaggaaatacaccatcatgagaaaagaaggcaaatgcaacaaacaggacacttgacatctacaagaactaccaaagaatataaagccacttcatagraggaacttaaaaattgtggatttctaaaacattcaaggagataaagaaaagaacagattccatgatacaagagcaggacagtttggaagggaaaagccag

SEQ ID NO: 22627 - DNA, 201 bp, Homo sapiens
gaggggtacacctgcaacagtctcttatctgaggtggtaccatgctataagattgcacctagcaatgcaagtataagattgtaaaagttagattgttggawtagtccataaatattacagaaaagatgcaaggaaataacaaaagagggaatagaaaatagtagtaagaaagtaatatgagagattggagggaagaagttt

SEQ ID NO: 22628 - DNA, 201 bp, Homo sapiens
taaattcttcacactatgaaacagttagtaaaccatttgtttatatatgtgtgtgtgtgtatatatatataatatatataatatatatattatatatatawtatatatattatatatattatatacatattatatatattatatatatattatatatatataatatatatatacacatctcttttttttttttggcggggg

SEQ ID NO: 22629 - DNA, 201 bp, Homo sapiens
acacaatatggccttttgtgtctggcttttttctgttagcatgatttcaagatttatcaatattgtagcatatatcagtacttttttcatttttatgtgtsaataatattacattgtatggatatagcacattttgtttataccacactgatacagtcatattgttgcagttcattcattgttaaacatttggactgcttc

SEQ ID NO: 22630 - DNA, 201 bp, Homo sapiens
ttacaatgacgggactgaaaatggcaattctgcacaggaaagggactgtgggactcttccaagacatttaggacatccaagtttctttgaaggttggcacrtcagtctttattcttccacaggtaaagaacagccagtgacacactcagtgggtggtcaatggctacctcacaacctatatgcatttgggacacagtgaag

SEQ ID NO: 22631 - DNA, 201 bp, Homo sapiens
gtctctgaccatggttactatgagaaaacatttgcttatagtgaattagaagaattctagaatctgttttcctcctgcctcacctcatttcccatgcaagwgtgccttgagctcaaaactttagaagaataagagagcaaataaatagctctcttatttattctagtttattttaaaagaaccagggtaatattgttccct

SEQ ID NO: 22632 - DNA, 201 bp, Homo sapiens
acactatgaaacagttagtaaaccatttgtttatatatgtgtgtgtgtgtatatatatataatatatataatatatatattatatatatattatatatatkatatatattatatacatattatatatattatatatatattatatatatataatatatatatacacatctcttttttttttttggcggggggacagagtct

SEQ ID NO: 22633 - DNA, 201 bp, Homo sapiens
ctttaaagatttttcaagattacctggacatttttctgctaaaagtttggctaactttctcaaaactctgtcataataagcagatggtatcgttctttggmcctctagaaagctgatgaggagaatgccctgagcatctcaaaaaactgttgctatgacctgtgctcttcacctgtccatttttgcttttactgaacccct

SEQ ID NO: 22634 - DNA, 201 bp, Homo sapiens
tatggctggcttgccacagtgaaacattttcacctctgtcacttatagagctgtgtaaagtagaaaaacaatggtggtaatactttgtcacatcaaagttrggattaatattatcttcttttgcctaagtgaatgaataagtggtaaaaataaaataaaagcattttaaagaaacaaagactagaagaggaataaaaggaa

SEQ ID NO: 22635 - DNA, 201 bp, Homo sapiens
ttcttgtttaaaatttccattgaaagctctgctcttgtctgcagcagatcggagcacaacagttttgccatgcagagtagaaagtttgctcaactttaatyttccagtcaggagtgtaggtaagctgaaccagatgggatgtctacgatgttggctattgtgtgtgctgttcattgtcggccctctttaattagggcatga

SEQ ID NO: 22636 - DNA, 201 bp, Homo sapiens
agtttgttttgtttttgtccttagtaggtctttatacctcttcaattttttcatccaattcagattaaacaattctaagagatgcagaaatctagcagagycaggaatgtgtttagatgtggaaattagatgaataaagtagagcataaatgattttcagaaaagttcctgttggaaatttgaaaggttctcaacgtaata

SEQ ID NO: 22637 - DNA, 201 bp, Homo sapiens
gtggaggtttccttaattcaactgtacaatatcataaaggactcagccctttccatctctctgcattgccatcctcaacacattagtaatgttttctattrcgatcacgaggtgtatccatcagttccagtccagtaaagacagtgtgggcaagaaaattgcatgtgattcttctccctgtgaatctctctctttaaaaaa

SEQ ID NO: 22638 - DNA, 201 bp, Homo sapiens
tttgacatctggaaggtggtgggaaggagcaaattcaaaatacaaagactggttttaagccccagttgtgccacttattagttaggtgatcccaaacaagwtacttaacctctgcaatctcaattaccacatcattaaatacagatatgaatcgctaggtaactacagttgtgaccatcagctaagttaaaatgtgagaaa

SEQ ID NO: 22639 - DNA, 201 bp, Homo sapiens
tcatgctgttgactaagaaaattaatttaccattggtattgtattttgttcatgagcttcccaccccctgcctgactctaaatatattttggccttatctmattaacattacttgtacttctgttgagcctttctctcttttaaaaataatgtccaaatatatttccatgttgtgctcaatgtctcaactaatgttttgta

SEQ ID NO: 22640 - DNA, 201 bp, Homo sapiens
tgaaccagatgggatgtctacgatgttggctattgtgtgtgctgttcattgtcggccctctttaattagggcatgaacaagattgagtttttcctcacaartggatggggatggtctgctgccgtaggcatcatcctcaagattgtcttttcccttctgaaaacaagtcatctatttataaactgctgatttctttgggac

SEQ ID NO: 22641 - DNA, 201 bp, Homo sapiens
aaaacctgaattaaaatgtactaggattctgagactgttatgtctggtatataatatacttctctaatttattctttgtagaacctcatctctataaacgyttgtgttgaaatgctttttggtcttaagtgatggaatgacagcctgtgccaggacattgtagcttgtggatgcctactcttttcaagtgactcatcggta

SEQ ID NO: 22642 - DNA, 201 bp, Homo sapiens
acatagaggtagataggacctctagtcctctatagaggtaggctgttgctgctatctttatgttatactgtttatgaaaataagttttcttttctgtaaartaagcatacctttattccttagggagggtttacactttcattgaactggatattgcatctaatgaggattgctgtttttttctccttgatttcaggattt

SEQ ID NO: 22643 - DNA, 201 bp, Homo sapiens
cccaggctccactggcagaggagcagggcagagtggcagagaaggagagaagagaagaagcaaccatatgtcggggagaagcagcttgacttcagagggayggcttgatggcgggacttcggggaagagtttggctggggatggccgaacctctggggaagaccacctttccactgcatcctctttccagctctccatccc

SEQ ID NO: 22644 - DNA, 201 bp, Homo sapiens
attcatataagtgaaataatacagtgtttgccttttcgtgactggcttatttcacttagcataatgttctcaaagtttatccatgtgacactatgtgtcaraattcccttactttttaaggctgcataatattccaaagtatgtatacatcgcattttgtttattcattcttctattgatggacatataccttaaatgtgt

SEQ ID NO: 22645 - DNA, 201 bp, Homo sapiens
actttttgttacaattaatatataatgtagtcttttcaggaaatttgaaagtactttgtagctgttatttgtgggatttgtggggagaaggagtgagaatktatttttctctttgtgttttcattcatttcttattctttattctctccaagtctaaaaacagataatttattgtgccttagatttgttagtacagttctt

SEQ ID NO: 22646 - DNA, 201 bp, Homo sapiens
agataaaatatgatgcttggtgtatgacacagtaagtttttgaatctttgtggtcaaccagaagcaccagttctttttcatgacttcctaataaatcaggygtctcttttcatgtagtcatgggttaggtttacatggtaagaaggaatttgttgggagacaatgctccatggatcgcttgtgtccatgtgtcatgaacag

SEQ ID NO: 22647 - DNA, 201 bp, Homo sapiens
ttttaccaccacatagagtttgaggctctcagtcaaaatgactcaaatgccgcacctgctcggtcccagagcacattgttattttctcaagtaccgatacrtgcttttgaaggaaaggaggtagtgcagacatggcaaagggatgtatggatttaccctcttgtgctgaacaccatgaaatgcttttctttaaacaagttg

SEQ ID NO: 22648 - DNA, 201 bp, Homo sapiens
tgtggtggtgggcaggatgcctgtgatcaagcctgggtaggttgcaggcagaagtgttcctgagacaagggcaagcggtgagacgctctagtagcactgcsgaaagcccgtgcctgctgtaatcttggccccactctgtctctgctgatgcctgttctctgctgcaagctgaaattccctgccagcgggtgaaggaccatt

SEQ ID NO: 22649 - DNA, 201 bp, Homo sapiens
atattagtatatactcatcaatccataggtatcttagtgaaggaacaaatactcatttaagctattataaggaagatatattagatactataaagacataytgcaaactcatagggtagaaaatctttgaccttatcagcaactggatgtgagacctataacactatggaaaacatttaaagtttgcagtgttcaagtctg

SEQ ID NO: 22650 - DNA, 201 bp, Homo sapiens
cttagtgaaggaacaaatactcatttaagctattataaggaagatatattagatactataaagacatattgcaaactcatagggtagaaaatctttgaccytatcagcaactggatgtgagacctataacactatggaaaacatttaaagtttgcagtgttcaagtctgtctcctctgggtttcctatttctctctctggc

SEQ ID NO: 22651 - DNA, 201 bp, Homo sapiens
tttactattgttgtattctcttgcagtattgacccctttattaatgaccttttttgtctttttgtacagtttttgacttaaagtctattttgtctggtatyggtatagcaaatcctactctgttgtgttttccatttgtatggaatatctttttccatatctttacttttagtcagtgtgtctttataggcgaagtgagtt

SEQ ID NO: 22652 - DNA, 201 bp, Homo sapiens
catgagccactgtgcctagctagtagttgattttttaaaaagcagctgcttttcttgtgttgaagctctcaatatgagtagtggctatggaaattctttgyaggtcaggacttcgtagcttcctgtggcctttctatatctctttttgcaggtttgttttagtatttatccactatgtgtaatagtgagtggtaacagcat

SEQ ID NO: 22653 - DNA, 201 bp, Homo sapiens
atctctttttgcaggtttgttttagtatttatccactatgtgtaatagtgagtggtaacagcatgcactccctagtacactagggatcactttacaggtcktgaacctctgtaagccccatttctttatctataatctgtgaatttatctgataaaattttgtgctttaaaagagataatacattttacatggattagcat

SEQ ID NO: 22654 - DNA, 201 bp, Homo sapiens
ttgaattttaaatgctttgtaaatgtgttgaactttgtagatttaaaaatcatgtagcagaagactcataaagctacgaaggtttgctatattcccaggakaccagttcctcctgctttctcctagaccagcctgcacttaaatcatccctatatgaagagtttctgttggccaggcagattgttagctcaggtttccaga

SEQ ID NO: 22655 - DNA, 201 bp, Homo sapiens
ctccagtccactgagttagctctcctccaagtcaccagtgacctctgcttggtagacttaatattagctttttctgacattcatttcacttgatctttccrctgtttttcttttcttatcctcatgttctttctgagtcttgtcaaaagcctgttggagtatctcatgatttggtcctgggatttcttctgtgctgacttt

SEQ ID NO: 22656 - DNA, 201 bp, Homo sapiens
tctaatacatttctgggaagttgaaggacaggagaagtcaccccctcctcatattcccccttcccgtaactgaaatcggttgccaaaattaactgtgaatrtatgaggcacgagttcaacaattatacagccgttctgcacatttatgtttcctacttagtatgtactctgcattccaggctggtctgggcatgcattttg

SEQ ID NO: 22657 - DNA, 201 bp, Homo sapiens
tctgcctctctccaggaagcggagcatgggtcactgacagacagatggctgccacaagcgccaccagcggccagaaactcctcccaccagctcccattccygcaaaacaaatgaggaggggtgcttttcttgaatgctgtgcctggactttctctcccttgacccagccctacccatggaataccaaggcaacctcaacat

SEQ ID NO: 22658 - DNA, 201 bp, Homo sapiens
ctgtaacaagaaggtccatttagccttctgaaaagtaacaaaaatgaaaacaaaaaggagcaggagctttaaatttgttctaaatacaggaccatttgagrgccaagagaattaatttatatttttaaacattattttataaatatattttgttgttgattttttatatttagtctgctaagattatagatttaaaatagt

SEQ ID NO: 22659 - DNA, 201 bp, Homo sapiens
ctgggtttgtttctttgtttgcagagtgcaagaattggaatggcagtgaatgcacagaccctgtacaatcctaaaacttagtaattctgtcagtgtcaggrctaagtaattctagatgattgcagtcctcgaagcccagctgcccacgtacttaaagctcgtgggagagattgatatgtccccggagagtctgccttgcac

SEQ ID NO: 22660 - DNA, 201 bp, Homo sapiens
ttgcatgagaccaaggccatgagtttagtttccatagggctaacttctctaagttaaatcaccagttaatatatccccagccttacttacccgtcttccarattactgcctcatagcaaaaggcgtctggagaaaggaacttctatttatcagcccaagtgcccctgccattggaataatacctgacaattatgttcttcg

SEQ ID NO: 22661 - DNA, 201 bp, Homo sapiens
gctgttttcctgctcaaatggtttgtaaacatttacaccccccagcctgagaaaacatttgcagaaacatttgggtcacaaaccaatgtttgcttcaccascacatttgaaatatttctctttgaaaacattagaaatgtttgtcagtaaaacagattctcaacagaagtataaatctggaaagggagggacacccacagc

SEQ ID NO: 22662 - DNA, 201 bp, Homo sapiens
aatagcatctaaacttttattgcagtgccaatctctcctctcaactctcagttcatatatctactgcccatttcatgtctccacttagatgtctaatcagyatcttaaactccactttccaaaacaaaactcatgaattttttttttcccaaaactactcctcctattgtcttggtcatctcagtaaatgcttcaccctcc

SEQ ID NO: 22663 - DNA, 201 bp, Homo sapiens
ctaggaatcagcatgtattttctttgacatctgtatctgctgagatcacaggccatcctggtcaccaccttgctgtctagaacagcgtcaactcaactgarcagtcatccattaccacgcataaagatctgaaggtccactctgtgaaagagcagacaattgcaaggcatctcctccttcgctttaatgtagcacacgtta

SEQ ID NO: 22664 - DNA, 201 bp, Homo sapiens
gagaccatcctggccaacatggtgaaaccccatctctacaaaaaatataaaaattagctgggcgtggtggcatgcacctgtagtcccagatactctggagrctgaggcaggagaatcacttgaacctgagaggcggaggttgcagtgagccgagatcgcgccactgcattccagcctagtgacagagcaagactccatttc

SEQ ID NO: 22665 - DNA, 201 bp, Homo sapiens
acacttatattcacatagcactttacaatcgacatagggctttcacaaatatgatttcagtgagtctcttgatgagtcaacatttttgtctccccaagcaytttctgatttgaactattttctcacagcctaactcagcagttttcctggaatgatgtgtgggaggtagggtatgatagtgtattgctatgtagtcaaact

SEQ ID NO: 22666 - DNA, 201 bp, Homo sapiens
gatcaagtgtgtgaatacaggaaaacaaaaatagaaaagtttaagggacaagactaatatcataactgtctttgcctgtctgtgactcatatcattagtgrctacttttttcttagggcactgtgcattcagaacactttgccagttaatcaagtgatagtaaacttaagagtgtgataagaaataatcataaactaagtt

SEQ ID NO: 22667 - DNA, 201 bp, Homo sapiens
cttgcaatattttaatttgtggaaataattcaacagaagcaaaatgaagatgttccctagtagctgtttggttaataaaactgttcattagcttggtagartgaatctgtaatattctgtcaaagaacagaatacaaagtagtgtgaacagccatattgcacaaaatataaaacagtgtgggatgtggataagaatgagag

SEQ ID NO: 22668 - DNA, 201 bp, Homo sapiens
tggctatattaggttaaatgaaaatattaatgcaactaatttcacttgtttcattttacctttttaatgtggctactggaaaataaagaattacatatgtkacccacgttatagttccattggttggcactgttataaagcctcatctcttaatagaggacatgactctgtgtacaaatgaaaaggcttcttagtatctcc

SEQ ID NO: 22669 - DNA, 201 bp, Homo sapiens
cttgtttcattttacctttttaatgtggctactggaaaataaagaattacatatgtgacccacgttatagttccattggttggcactgttataaagcctcwtctcttaatagaggacatgactctgtgtacaaatgaaaaggcttcttagtatctcctgatttcagaagaaacaaatttccaagatgaatacagctgggca

SEQ ID NO: 22670 - DNA, 201 bp, Homo sapiens
aggcggagctcaggtggtaatgctcgcccagctggctgctcaccacctgctgtgcggtctggttcctaacaggccacagacccgtactggttcatcgcccrgtgtgggggtagggggacccctgatgtaaaggtttcggtgggaaatatgtactcttcggggatgtgctttttaatttcacaataatttgtgttttttgtt

SEQ ID NO: 22671 - DNA, 201 bp, Homo sapiens
gctgggaactgtcctccatgacctctctagatcctgcatcgcactgctgctcattacttagcttttactaagcacttaatgtaccaggcactgtaagaatrtagagaaaaggtctgatctcagttcagaaataaatatcctcaggaactttagaaagggataggctttaggggatttgggctaacaatgttgtgattcata

SEQ ID NO: 22672 - DNA, 201 bp, Homo sapiens
ggcgggtattcttattgtcttacctgttttacaaagaaaaaaacagacccagaaaagttaagtcacttaccaaaggtcaagcaacttgaaagttgcagagstccgtttgaatctgggtgttttaaaattccagagcctgtgttcctttaatgtgtatgtggatggctcttgtttgatatagttgatgaggtagtaagagac

SEQ ID NO: 22673 - DNA, 201 bp, Homo sapiens
atcaatagctgtcagcatgctttttggaggtcagtggcttcttttctgcacttgactggcaggtggcatgtttgaagtactgcacactttgccttctttcyggctgttagtaccctcttagttcttggcagggtgcagagaggggatcaagtaacccaagtgtttccctcacagactgacattcatctcagtattcatgtt

SEQ ID NO: 22674 - DNA, 201 bp, Homo sapiens
acttgactggcaggtggcatgtttgaagtactgcacactttgccttctttccggctgttagtaccctcttagttcttggcagggtgcagagaggggatcamgtaacccaagtgtttccctcacagactgacattcatctcagtattcatgttccttgtcaaggaaaggataaagaaggcataattaagaaaatgatggtgt

SEQ ID NO: 22675 - DNA, 201 bp, Homo sapiens
acttagtgacagaatgaatgaggacagttaggatctaaaataggatagagagcaccatggagaggcaggaagggcctgaaaggaaccactttcagctttayagttttccattagtctttaagttgaaggcaaagtagagggtatacatatatggttttgtcctctgcagttataagctttattaaatagaaatattgccct

SEQ ID NO: 22676 - DNA, 201 bp, Homo sapiens
tctagccagtagacaaaccatgcatagctgaaccatatggaagagcctggaatttatggtaaaatggatcttgagaatacaaaataaccatcacaaagccsattactcagtgaagcctaagaacctcgctcttgagatatgatacttggtcatcacacagaaccagttgatgacatctaaccttatttctaaaaatattct

SEQ ID NO: 22677 - DNA, 201 bp, Homo sapiens
atctttaatagtgatcgactaatgtatgtttatatgattatatctgaatagatatttattaaatatatattattgatatttctgccggggtaactgtgttrttattgagtctctgggactcttttccacttcccatctgaatacttgctttaataagaatatcctactctagcagaagtagtgtaggtacaaagaaccccg

SEQ ID NO: 22678 - DNA, 201 bp, Homo sapiens
agtgaatgaatttagtcctgtgtgaaatcctccctcccctcccttcccattccttcccaccacttcacgcttaaccacagtgcagcattcttactttttgrggtgacatattctggttcccttaagtataatcattgtagagcaaatgcaggcacagtacctgtgatgtaaatatttagtgaatgttagtcctgtgtgaaa

SEQ ID NO: 22679 - DNA, 201 bp, Homo sapiens
tcctgccagcagttatcaatttgcatgttatggaacaatgtattgacctgatagactttgccagttttacttgcaaagctaatagcttcccattatatagyagagaaaggctttgttacatagacacagttattaattctctatttactgctcatcagaaaactaaaaaaaattttgttttgaaatttggaatcttgatgt

SEQ ID NO: 22680 - DNA, 201 bp, Homo sapiens
catgatttctccttaaatagttgcctcataaataactactttcaggcatgaatcatccaccaaggtatatttgtttttatgttatgttacgttacattackttatttattttttgagagagcatctcactttgttgcccaggctggagtacactggtgtgatcatggctcactgcagcctcaacctcctgggcacaaatga

SEQ ID NO: 22681 - DNA, 201 bp, Homo sapiens
aagaagcctgtatccgtcacattgaaatcagagacttgattaatattgtagcctgtagctttgtgatatgtacggtttaaattagacctttgcagtcattrtgctgggttgatgcaagcacattaatgacataatttctggttgcagcatcacatttctgcagtctgtcctttgtattccactcacattaattgaagtaat

SEQ ID NO: 22682 - DNA, 201 bp, Homo sapiens
cacttacacaagttctgatttatcatcccatagaagtcaattcataattgcattcaatcagtggaaaccaagccagtgcaaatagttttgaagcactttakctgacagtcacaaggcttgtgactaaaataatttcatttctaagccttcctgagattgtagagattttgaatgtctcttaatcattttgtctgtctttat

SEQ ID NO: 22683 - DNA, 201 bp, Homo sapiens
tgtttagtctttcatctgctatgttttatcctgtaattttaatatatatttgtgacattattcagtgttgcgtgtcacacttatgaacctgtttttttttrtaatttcttatagcagctacctaccctgtgagactgtcttgttgctgtctgcattaatccaactgtgtctctttaatttctgttaatctttcatcagtgt

SEQ ID NO: 22684 - DNA, 201 bp, Homo sapiens
aaacaagttgtttttcacgtgtcctattttgaggtagagttgtgggtgactttttttttttaaattatactttaagttctgtggtacatgtgcagaatgtmtagttttgttacataggtatacacgtgccatggtttgctgcacccataaacacatcatctatattaggtatttctcctaatgctatccctcccctagccc

SEQ ID NO: 22685 - DNA, 201 bp, Homo sapiens
tttttttcttgatttctttggtggattgattgctgttcgcatctagaaatgctactggatttttgttttgttttgttttgtttttttgatacagggtctgrcgctgttgcctaggctggaatgcagtgatgcaatctcagctcactgcaacttctgcctcccaggctcaagtgatcctcccgcctcagcctcctgagtagc

SEQ ID NO: 22686 - DNA, 201 bp, Homo sapiens
ttgactcttcatccaatttgtcagtctgtttcttttcattggagcatttagcccatttacattcaagggtgatattgttatgtgtgaatttggtcctgtcrttatgatgttagctggttattttgcttgttagttgatgcagttgcttcctagcattgatggtctttacagtttggcatgtttttgcagcagctggtactg

SEQ ID NO: 22687 - DNA, 201 bp, Homo sapiens
ggcgatcaaacaacatgattaatgctaacgttagagaggagatgcaatgtcatgcatctaggctccagcagatcaagttagtaaacatctaggatgatacyaaggctggcaataatttaaaatctacattgctacattcccttcctcctcacccatcagttcccttgaactacattctttttttttatgtttgccatgtta

SEQ ID NO: 22688 - DNA, 201 bp, Homo sapiens
tctccctgtcactttcaggtacaccaatcaaatgtagatttggtcttttcacatggttccatatttcttggaggctttgttcatttcttttcactcttttycctccaatcttgtcttcttgctttatttcattaatttgatcttcaatcactgatatcatttcttccacttgatcaaatcagctattgaagcttgtgtatg

SEQ ID NO: 22689 - DNA, 201 bp, Homo sapiens
tgagtaattataattactgttatataatgatctcagcacatgacatgaactttagtaaatgctttacctacattggttcactgaatgtccctgaaactctmtatttagctattgctgcaaaaagatgagaaaactaaagcttaacgaagttaagtaaattcctagtttacataagaagagaggccagattcaaacttaggt

SEQ ID NO: 22690 - DNA, 201 bp, Homo sapiens
tcaaactcattctccatccagttttgttcccttgctgctgaggagttgtgatccttaggagaagaggcattctagtttttggaattttcagccattttgcrttggtttcaccccatcttcgtggatttatctacctttggtctttgaagtcggtgaccttcagatggggtctctgagtggccatcctttttgttgatgttg

SEQ ID NO: 22691 - DNA, 201 bp, Homo sapiens
caatctcagactgctgctatgctggcaccgagaatttcaaaccactagatcttaagttacctatgctccgtgggggtgggacccactgagccagaacttcrctccctggcttcagcacccctttccaggggagtgaacggttctgtcttgctggtgttccaagcatccctggggtttggaaataaaaactgcagctagctc

SEQ ID NO: 22692 - DNA, 201 bp, Homo sapiens
gtacccactagttattttttctgattctctccctcctcccaccctccaccctccactctccaccctccaatgggccccagtgtgcattgttcccctctatrtgtccatgtgttctcatcatttagttcctactcattagttgagaacatgtgttgtttgattttctgttcctgcgttagtttgctatggataatggcctcc

SEQ ID NO: 22693 - DNA, 201 bp, Homo sapiens
aaccttggaacagttacttaaaaccaccgcgtcttagtttcctcatttggaaagtgggctaatacaatctgtgtttttttggaacatcacatgagatgagrgtatataaaagtgcctagcacagtttggcacacggtaggcactcatatgttcatttcctcctttctaggatctgtagcctcttctgttaagaagattctt

SEQ ID NO: 22694 - DNA, 201 bp, Homo sapiens
ttcctcaagtcatgaacagattgcattatttcaaatcatttaggaaataaaaatattcttatgccaagattgttatcaagtgtactactttttagccttarttgatgtagacatttatttaaaaatattctttagttatggatttactttatataagttggatttgttttctgaataaatctgatccatgcagtattttgt

SEQ ID NO: 22695 - DNA, 201 bp, Homo sapiens
cacctaggtaataaatatagtacctgataggtggtttgatgatcttcaccttcctcctttcctccaccctcaagcaggccctggtgtctgttgttcccttscttgtctccatgtgtgcttagtgtttagctcccatttacaagtgaggtcatgcagtattcggttttctgttcctgtgttagtttacttaggataatgtcc

SEQ ID NO: 22696 - DNA, 201 bp, Homo sapiens
catatttaaagcccaatacgcgtgggctcttctgatatgaagggtaatactatagataaatatacaacaatgtagcctttaaagggtatgtacaaggttttgtgtgtgtgtgtgtgtgtgtgtgtgtgtttctagtaatctcataccttaactgtaacctcccaagcagattgtgttagcattgcttttttatagattttc

SEQ ID NO: 22697 - DNA, 201 bp, Homo sapiens
cagcctcccaaaggctgggattacaggcatgagccctcatgcctggcctttatttgttcatttaatgagagaattgtgagagagattatagactggtaatkgttagattgttactccccaagaaaataagccagtgaaataggaatgagaagtgtgatgggctttggtgtagtggcagaggttttgtcactttagcgtggt

SEQ ID NO: 22698 - DNA, 201 bp, Homo sapiens
atatttaaagcccaatacgcgtgggctcttctgatatgaagggtaatactatagataaatatacaacaatgtagcctttaaagggtatgtacaaggttttktgtgtgtgtgtgtgtgtgtgtgtgtgtttctagtaatctcataccttaactgtaacctcccaagcagattgtgttagcattgcttttttatagattttca

SEQ ID NO: 22699 - DNA, 201 bp, Homo sapiens
aatggcttctctattcctaaggctatatatatatctaaatatatatatatctaaatatatctaaatatatctaaatatatctaaatatatataaatatatmtataaatatatataaatatatatatataaatatatatatatataaatatatatataaatatatatattttttttatcagcaaagagaagtggacagttgt

SEQ ID NO: 22700 - DNA, 201 bp, Homo sapiens
gcgcctacagtggtgacagcaatatgaaacactgtaatctcgtgagaaaatgcactgtgggcagcagaactccggtctggctctgaggcagaatggtatasttagaggagcaaagcctggagctccttctttatttatttcatctttctaagcttgtttcctcatctttaaactggggatgattataggatacacctgata

SEQ ID NO: 22701 - DNA, 201 bp, Homo sapiens
gtgaacatggctcactatagccttgaattcctaggctcaagggatcctccgaggagctgggactaaaggcgaacaccaccatgcctggctaatttttatatttttttatagagacagggtctcactatgttgcctaggctggtcttgaactcctggcctcacgcaatcctccttcctcagcctccaaaagcactggaatta

SEQ ID NO: 22702 - DNA, 201 bp, Homo sapiens
gaccacagagcaggtggctgtgccttgggaacaactatttacaggaactcaaataccatcaggtttcattctctttcttttttcctttgtcttcatttctyatttctttttcatatatcggcttcattgttctttctcactgtacactttttctgagtggttcctgagtgtttcatctactcagaaatcacttttttggtt

SEQ ID NO: 22703 - DNA, 201 bp, Homo sapiens
catcaaaaagtgcacaagagaggtattggtttgtaatttttagaacactaactttaaaatagtcccccacccagttaaaaaataattgtggacctataacrtatacaatactgctttagatggtgaaaacatttaatatatttattgaattgaaatagtttgttgatttaaaaattctgctatgatggtaggatagggtaa

SEQ ID NO: 22704 - DNA, 201 bp, Homo sapiens
ttatcttgtctctctcttttcatgcacaccttccctctaactaatctctaaatgagggtagatcttgggtgagcaaaggaaccagacaacttgtaacattwccagaagtacagagagcctctgtcctctatggtaatgatcatttaagctctcttacggttttaacccccctgttaattttcagagtcaaaaagatacttt

SEQ ID NO: 22705 - DNA, 201 bp, Homo sapiens
tattattaagtagaagaagatgctcacatacttgtaggtacagaagcttcaacatagcagtctttcacagtgtgagttatgatagacgcaatctaagagtraattataaaagtgatagggccggaacagacttttattaaattttgggtaatattgtagattagaaaagtaaaatgtgttacctctacttatctttaaaca

SEQ ID NO: 22706 - DNA, 201 bp, Homo sapiens
actctcatcatcatcatcagttttacttacaaatagagaaatgaaaatagctttaatgcttttgtggcaatatcctaaaagtttacagaccacgtgctatrttaaagtagaccccttttggacttaaaatatcagcctgctttttcttgtttgaaagagtaaaaatctttaggacataggaattgtaggaatttaaaacta

SEQ ID NO: 22707 - DNA, 201 bp, Homo sapiens
cttaatgctacaaaattttgagtgtagttcccagatggctaattatttatttggtgactaaaaatatagcttcttgttctccagtcacatatgtgattttkggatcttaagataaatttttatatctcatatgagtgatcgtagaatttccagccattatatttcttatcactatggctagcttgaatataataacatgat

SEQ ID NO: 22708 - DNA, 201 bp, Homo sapiens
aagaaccagttgtatttagaggaaagcaaccagttcattcagtggcatgtctaggagaaaaaaaagtgagaggtgcagctgaagggagagatggggaaagkcctgatttttgaaaggccttgaatgccatactaaggaatatcaccattatcctgaaggcagagatagactgaaagattttaagtggaggaagaaatgata

SEQ ID NO: 22709 - DNA, 201 bp, Homo sapiens
ctcactatatagatctctggtcttcctctcacaaatgctaaggcagttttattcaaagccccacttagcttttctcacccctttatcttttccaaaagagrgctgcaaaaatttcaacttctctgccgtctgtatcatctcacatttctattcacagtagcctcttgggccctgttttctttcttttctctttttctaata

SEQ ID NO: 22710 - DNA, 201 bp, Homo sapiens
acagctcccctgtgctctcaccagccacagtagcagtggttgcacctgctgtatcttaaggtgtgaattgtggcctttgccatttcaccaggatgttgccyaaaaatagagctactggtggagttaagtcaagccacatggcttcctgaacatcggggctgtgtgtgtgttgccagcttggcactgaaaatgctctatccc

SEQ ID NO: 22711 - DNA, 201 bp, Homo sapiens
ttgtgtgtgctcttttttataccctttttatacatcataatgtgaacttcatgaggtcatggattatggctgttgcttatgtttatttcaccatgaacccmctgctagtcacaaagatgctgattatagattactaagtatgggttattgaatgaaatgaaataattgtgtttccctattaaagcaattctgaaggaaata

SEQ ID NO: 22712 - DNA, 201 bp, Homo sapiens
ctatatagaatttatttctttgtaagatattgatttaatttttcctgatgtaaaaaagggtctcagtatcttttgttggtcagttctgtccattcccagtratttgaaatgcactgtgtttcccaattccaaatgcgtaattagaatttcttgatttcagttgtaaaggactcagcttaatgagcataaacaaagttgggt

SEQ ID NO: 22713 - DNA, 201 bp, Homo sapiens
actagttgccgtgtgtcagaaaacttatttaacaagaagttgcaaagtgcttgtagttttcttaccttctcagccttcctggccagtggaaaatataacayctttctgtaataaagaaatgaaggatctggagggattccattgatgttgattcttctactcatagtattgttatcttgtctctctcttttcatgcacacc

SEQ ID NO: 22714 - DNA, 201 bp, Homo sapiens
atatgaactagtactaatcatttccagtggcctaagctcttttgtggaccctttcacagacaaaacaagattgataggctcaacatgttttcagtttgagktttattcacatcagaaatctactgcccaactggcaagccgtcatcagaggattctcagctagccaaccatacgctttaggtcagcaatgagatgggctca

SEQ ID NO: 22715 - DNA, 201 bp, Homo sapiens
actgcaacctccgcctcccgggttcaagcaattctccagcctcagcctccagagtagctgggactacaggcacacgccaccatgcctagctaatttttgtrttttttagtagagacggggtttcactatgttgggcaggattgtcttgatctcctgacctcgtgatccaccctcctcagcctcccaaagtgttgggattac

SEQ ID NO: 22716 - DNA, 201 bp, Homo sapiens
tttggggctggcagaggctgaagccggcttcctctgctcgtggggaggtgtggagggagaggcgcgggtaggggccagcgctgcgcgcaggccttgtggcyggcacgggatctgggtgggcacgagctcggagggcccgcacttggcacagccagctggcgcctgctggacttgatagggggacgagctccctctgggctg

SEQ ID NO: 22717 - DNA, 201 bp, Homo sapiens
cggagcttgcagtgagccgagattgcgccactgcagtccgcagtccgacctgggcgacagagcgagactccgtctcaaaaaaaaaaaaaaaaaaaaaaaawttttatttcattagtttttggggaacaggtggtatttgattacatgtataaattttttagtggtgatttctgagattttggtgcacccacaggagcagtg

SEQ ID NO: 22718 - DNA, 201 bp, Homo sapiens
ccaaacagatttccttctttttaaatgctgaatggtattccattgtgcttataccacattttctttatccattcgtctgttgatggacacttacgctgcaktgatcatgggagtgcagatatctttttgacatattgacttcaattccttttgatatagaccctgtagtgagattgttggatcatatggtagttctatttt

SEQ ID NO: 22719 - DNA, 201 bp, Homo sapiens
tgtatggttagtaggactgaaaaaatgtcaaggaagaggaggaaaggagactcatggtatggaacagattaaggacttatttacagatgcagtgaaggaasacgtttgaaatgctccaattcttcaagttggtattcatgattaaaataattaagaagtcagttttgagaactaacagtaaaggaattgaccacctgactg

SEQ ID NO: 22720 - DNA, 201 bp, Homo sapiens
agtgagaacatatgatgtttggttttccattcttgtgttacttcacttagaataatggatcccaactccatccaggttgctgtgaatgccattattttgtkcctttttatggctgattagtattccatggttttgtgtgtgtgtgtgttgttgaatagggtgtcctttctctgctttatgtttttgtttgctttgtcaaag

SEQ ID NO: 22721 - DNA, 201 bp, Homo sapiens
caatcttggagaatcccagactcgacactttttttgttgctgtggcacattagtgcccagaaatttagtattgattactgtagtttctcttgcctcatctraatgtgaaaggaatggcaaagtggcttcattcataatgttggccagttagctctttttgcttactgaggttgtacattggttttggagaatacggaataa

SEQ ID NO: 22722 - DNA, 201 bp, Homo sapiens
cttttttttgttggcaattttttaattaccatttcagtctcactgcttgttattggtttgttgtgagttttcatttctttctggtttaatctaggagggtkgtatatttccaggaacttatccatctcctgtaggttttctagttaatgctcataaaggtgttcatagccttgaatgatcttttgtatttctttggtattg

SEQ ID NO: 22723 - DNA, 201 bp, Homo sapiens
tcaggattttatatttgagcagtgaaaagatggatggagttgccagctattgtgacggaggatgctgcaggtctaggcaagcagatcagtgcttaaatttrgagtgtctcttagccatgtgggggagggagttagacatatgcatcaaaacaagagaggtctggcctggagatagatatttggcagccatcaacatataaa

SEQ ID NO: 22724 - DNA, 201 bp, Homo sapiens
aacatgttttgagaatgactttttttctttaacagattctcagcagcaaaagcaattcaagtaatcaagtctacgattgggtatagaggttaaggtctctrtggcctaaaggtaaaagaaggggatatcagccatattcaaatatgtaatgtttaaataagctatgaaggatagcaaccttgggtaagataagatgtgtgt

SEQ ID NO: 22725 - DNA, 201 bp, Homo sapiens
taccttggtttttttttttcattgtgttattgttttataggccctgtgaaatttatgatttaaggaggttctgttttgttgtattttcagtatttgttccmagatttagagctcctgttagcagttcttgtggtggcttagtagtggcgaattctcttagcatttgtttgtctggaaaagactgtatctttccttcattta

SEQ ID NO: 22726 - DNA, 201 bp, Homo sapiens
gctgaagcaggagaatggcgtgaacccaggaggcagagcttgcagtgagccgagattgcaccactgcactccagcctgggcgacagagcaagactgtctcaaaaaaaaaaaaaatatgaagggtttgattagaggatcaactatagggtctcttgcagattggacttgcctagagttccatgacataaagccagagagcgg

SEQ ID NO: 22727 - DNA, 201 bp, Homo sapiens
cagctaattttttaaaatttttgaagagacagggtctcaccatgttgcccaggctggtcttaaactcctattctcaagcagtcctccagtgtcagcctccmaaagggttgggattacaggcatgagccaccatgcctggctggtggcccttttaaagtagccttttcttaggctcttacatatctttggaaccatccacta

SEQ ID NO: 22728 - DNA, 201 bp, Homo sapiens
ttaggttagtttaataagaatccccctactcttaatgtgtttcctcttagtacttttccatccaccatcctcttactttgcttcttggctataaatcccamatgtcttagcttaatatgaagttgagcccagcttctctcccctattggaatatctccattgttgtggtctcgaataaaatcttccttaccatttttaaca

SEQ ID NO: 22729 - DNA, 201 bp, Homo sapiens
atctcctgttaatctgataggttacctgatgcttttgcctcacagctgttaagattctttcctttgtcttgactttagataacctaatgactatatgcccmagcggtgatctctttgctatgaatttactgtgtgttctttgagcttcttttatttggatgtctagatctctagcaaggccagggaaattttccttgatta

SEQ ID NO: 22730 - DNA, 201 bp, Homo sapiens
ggaaataaagctttatcaaccacatttgccagtgtgctcaatgctcttgtcaaaagcactttttcttcattgcagattgagtgacacagagcatgctaggaaaaaaaaaaaaaggaaagtgaaaggacacatgacaaatatgggccatctacgactgggcacactgtcgattatgacagaggcctgaggaagccagggaac

SEQ ID NO: 22731 - DNA, 201 bp, Homo sapiens
tctctcagttgtggttattttaataagcagtgagtttgtaaagtcctggtttaaaatactaaatgtctgatctccctattaaccccaagcatctgagattrtaaatcatgactctttgttgccacctgatgacaacaaagagtacagcccttctggaaatactagcctttctagaaacaaattaatttcttgaaagctgaa

SEQ ID NO: 22732 - DNA, 201 bp, Homo sapiens
tcaaaaaatattgatataattttttattttctgaatatgatttttatttgtctttggtagcaaatgtaccacattaaggtggtatttggattataatttakggctagtaaacaggaaggaattgccttaatccaaatatacagtagtcttcccttatttgtggggataatttccaggctcctcagtggatgccagaaactg

SEQ ID NO: 22733 - DNA, 201 bp, Homo sapiens
tagataacctaatgactatatgcccaagcggtgatctctttgctatgaatttactgtgtgttctttgagcttcttttatttggatgtctagatctctagcmaggccagggaaattttccttgattattccctcaagtaagttttccaaacttttagatttttcttcttcctcaggaacaccaattaattttaggtttggtt

SEQ ID NO: 22734 - DNA, 201 bp, Homo sapiens
gttaaataactttcccaagttcacaaaactagtaagtaaataccctagtaaccttttttattgtatcatcagctcaaaaagaatattaagagttttttttwaaaaaagatatgattctacaggataaatgttaagtgggttacccatgcagtaagtgacagagaagaaataaattgctcaggatagcttcatagagggtag

SEQ ID NO: 22735 - DNA, 201 bp, Homo sapiens
aattcagccctgctccagtagaacctgcattggaggagggggaagcagatacttgtttatgtactaaatgcttctacattcttactctgtctagccactgytcttaatcatttaagccttggaacaaccctatgttactatttccttttctcagatgaagagaataaggcacagagagattaataacttgaccaaagttgt

SEQ ID NO: 22736 - DNA, 201 bp, Homo sapiens
tccactccaggcggagaacccggagtggtgacagtgatggcagcagagccagggtgagactgagagtgctcagactaattttcttggaagtagtggaaagytccgctaaaaaagaaacatgagtttggattgagcagaatgtcaagagccctgagaaccaaccaaaaaatggcagatgagctgtttcaggggcaacattta

SEQ ID NO: 22737 - DNA, 201 bp, Homo sapiens
tccttgattattccctcaagtaagttttccaaacttttagatttttcttcttcctcaggaacaccaattaattttaggtttggttgtttaacgtaattccmaatctcttggaagctttgttcattttttttttgattctttgtctttgtcagattgggttaatttgaaagccttgtctttgagctctgaagttctttcttc

SEQ ID NO: 22738 - DNA, 201 bp, Homo sapiens
tctactaaaaatacagaaaaattagctgggcatggtggtgggcacctgtagtcccagctactcaggaggctggggcaggagaatggcatgaacccgggagrtagagcttgcagtgagccgagatcacgccactgcactccagcctgggcaatagagcacgactccatctcaataaaaaagaaagaaaaaaaaaatgtggct

SEQ ID NO: 22739 - DNA, 201 bp, Homo sapiens
tgaaagcattgggaggggtgaggatcaaaggcatagggttaatcttacaaaaagaaaaaaagaaaagaaacccctcttcttctgagtcaagagggaaggaytgattttttttttttaatgtatgtcagcatggaggatgtgatacctcatacaattgtgagacccatagagataatatatacatgaacaatggccaataca

SEQ ID NO: 22740 - DNA, 201 bp, Homo sapiens
cctgaagtatttcattgacttgtacctttgctgtttgtcacaacaataatcatgattctttcatctcaagccttgatttgaaacagcctggagctggtccrgacaaagcccatctagtcattgtatctaggcctgtcgatatcctcttgtttgtttttgtttcatttggttttcttttcttttctttttttttttgagacg

SEQ ID NO: 22741 - DNA, 201 bp, Homo sapiens
acttgaccaaagttgtacaaataggaagaggcagaattgggtttaaatcccaggcaactggctcccgagtccatgatcttaaccattgtatatgctgatgraagtatatctgattttatatatatatatttaaatatataattttaaatatattttggaaatatattttttagttggagatgaatgctaaaaagaaaatta

SEQ ID NO: 22742 - DNA, 201 bp, Homo sapiens
atgaaccaagggacataagtatgccataaccataatgagattgatactaatttggacaatgagagtaaatgagtccttcacagagcaaaaggaattctatwcatttatttaaaagacaaatatttgatttgtaaaaataatattaagacagttggaagacatgtttgaaactgcatgggagggagtgtgattaatagaaag

SEQ ID NO: 22743 - DNA, 201 bp, Homo sapiens
ctgaataccttctctgatatgctccagtcctctgtcttacctatgaagcatccattgatcatttcccttcaagaactcattgcatttcttgtttttaccaytcatttgacatatctaatagttatatttttcttcctctactgaatccacatctttcctttttaatcagattaaaaaggctctcttgaggaccatttctta

SEQ ID NO: 22744 - DNA, 201 bp, Homo sapiens
agcttgatgaggatggagcaagtaacatttaaaataaggtggtcagggaaaacctcacttactgataagcagacatttgagcaaaaattgaccagaatctcctttaatcttctattttcctccaacctcctgtccctttaatcccatctgatcctcttttctgattttctttcagttggcttacagtataaagcaaaagaa

SEQ ID NO: 22745 - DNA, 201 bp, Homo sapiens
gcaatgccacagtataaccatccttgcatgcatgtgctaatatgtctgtaagataaatttctggcagtggcgtttgcaggccaaaccgttatattccaggktttgtgcatttgtagttttgatggatactgccttagttcattttttgctgctataacagaatatcatagactggataatttataaagaacaaaagcatat

SEQ ID NO: 22746 - DNA, 201 bp, Homo sapiens
ttcagttggcttacagtataaagcaaaagaagaactatgaagtacaacaaagacaaattaatgtcacttccttgctctatagctggtactttttattttamtttattttattttttaattattttttctaagatggagtcttggtctgttacccaggctggagtgcaatgccatgatcttggctcactgcaacctccacct

SEQ ID NO: 22747 - DNA, 201 bp, Homo sapiens
agctgagggaatataagcaatatgttttctaaagaccattattcacttctagcgtgtcctgatcagaacaaaaacctatacaatccgttgtgagaagtgtaaaaaaaaaaacaaaaaactgtcctgatacagaatatatacctaattgtgccactaactgtctgaaaattatttagcttttctccaccttagttttctcat

SEQ ID NO: 22748 - DNA, 201 bp, Homo sapiens
gtcctgatcagaacaaaaacctatacaatccgttgtgagaagtgtaaaaaaaaaaacaaaaaactgtcctgatacagaatatatacctaattgtgccactaactgtctgaaaattatttagcttttctccaccttagttttctcattcctaaaatggaaataacttcagctcattttaaattagaattttcaatcatgttt

SEQ ID NO: 22749 - DNA, 201 bp, Homo sapiens
tacctcaaaataaatagtagattattgtagaattcattgttatttaggagctagaatgtactcagttgttgaactacaaaaaaaaatatgatttttatttstttatgagaattattttatggtcattagccaaaaatctaggagagagtcttacttgaagcaaaactccgattagttatttccattctagcagtctactga

SEQ ID NO: 22750 - DNA, 201 bp, Homo sapiens
tatttgctataaaagaattcaccttcactgtggttcttttctacgtggaaaggccaatttaaaaatcaggacacattaaaaatgtcagatggggcatgccrcttcctatggctcaaaaagtcatgatcattttatgctattttcattggagcacttagtacaagatggttataatttcaacatctatacatttaatattga

SEQ ID NO: 22751 - DNA, 201 bp, Homo sapiens
cccaggaggcggagcttgcagtgagctgacattgcaccattgcactccagtctgggcaacaagagtgaaactcctcaaaaaaaaaaaaaaaaaaaaaaaartggagagtcttaagtcaggttgaagttgtgaacctgagtgattgggagttggggtcaggaagatggtgctttgtgcatgttgaattgaaggtctgtgtat

SEQ ID NO: 22752 - DNA, 201 bp, Homo sapiens
aggaggctggggacatggggatgatgatgccattcaaattgcaaagtgttactgatgctggttctgttgaacactgctggaatattgaatatctgggctaygagcatttttcactagtaattattcacacctcattaagatcagacatcagttaatgtctttctaggtagagcaaaaagtgaaatatttattggtcagtga

SEQ ID NO: 22753 - DNA, 201 bp, Homo sapiens
cgctgataaaggcatacctgtgactgggcaatttacaaaacaaagaggtttaatggagtcatagttccacatggctggggaggcctcacaatcatggctgmaggtgaaaggcacatctcacatggccacagatgagagaagagagcttgtgcagggaaactaccctttataaaaccatcagatcttgcgagacttattcac

SEQ ID NO: 22754 - DNA, 201 bp, Homo sapiens
cgttaggggctgtatatttgtaaaataaaagaattttgggagttccatctctcggctttggagcccccctccttttgtctctgtatggaggagcttcgtcyttctgcctttttctttacctgttaaattctccactccttaaaactaaaaaaaaaaaaaaaaaacaaaaaaacaagaattttgatcacagtcagactctgt

SEQ ID NO: 22755 - DNA, 201 bp, Homo sapiens
ctcctctccttgtctaagtctcgaatttccgatgtctccactccattttcccagtgcacatgcaggcccctggtccgttgtgggcatgctcaggcaagacyttgtgcaggttcctttctctgcctcctgtatctatcaatttcaccactcttccacccaagcttcactatattttttttctattttttaaattaattagta

SEQ ID NO: 22756 - DNA, 201 bp, Homo sapiens
cttgacattattactccaaaatatcacactacatgttaactatggagcaagtattagaaattgaacagatctctgattttttttttttttttttttttttkggagacagggtctcactcctgtctcccaggctggagtacagtggtacagtcatggctcactgcatcctaaacctccttggctcaggtaatcctcccacct

SEQ ID NO: 22757 - DNA, 201 bp, Homo sapiens
atggggagacccagttcaatccatagcacttgtaaaggttaaataacttattcaaggtcacacaggtagcaacctagatacttcttccctgtgcatatatwtatatatatatatatatatatatatatatatatatatatatatatatggaattttctagaggaaagggagcttgaataaggttcatatagcttctaaaca

SEQ ID NO: 22758 - DNA, 201 bp, Homo sapiens
catggtcaacagaggggatgttaaagcttatttagtccaccttcctttgttttgagaatgagaacatcacctccaacattcccgagttatggttccaaggrcctgggccagaggtgcctttctggagagagccaggtggtgaggggcagcctccaggggtcactggtataagaggcaggatgtggcctgggtcagatgaca

SEQ ID NO: 22759 - DNA, 201 bp, Homo sapiens
ttttccaacttggttccattctccgcatcactttcaggtacaccaatcagacgtagatttggtcttttcacatagtcccatatttcttggaggctttgctyatttctttttattcttttttctctaaccttcccttctcgcttcatttcattcatttcatcttccattgctgataccctttcttccagttgatcgcattgg

SEQ ID NO: 22760 - DNA, 201 bp, Homo sapiens
ttacctttctcttccccattaccactaccagcacaccaatacagattttccccctcgctcagggaggccatgactggagggaggggtaaggagccaaatcragctgtctctggtggatgcagcctttacagtggtgagaggaggagccgcgggatgtaaggaaaaggagctcctatggcctggctggagtgtgcagtggat

SEQ ID NO: 22761 - DNA, 201 bp, Homo sapiens
taagtgatattggtttgtagttttattatactgcttttatctggctttggtatcagggcaatgctggcctcatagaataacttaggaagttttattccttyttctagaattttttggaaaagtttggttttctttaaatgtttggtagaattgaccagtgaagccatcaggtctagtgcttttctttgttggaagatttta

SEQ ID NO: 22762 - DNA, 201 bp, Homo sapiens
tagagaaaattaatcataaacatataactttatgtaagtttgcataagcttatgcataccttttaagcatgtattaaagagagtgttctttttactaaagktatcgtctcttggttaattacttctgttttaataaacagattattctttgctgaagaaagttttccttataatatgtaactcttacacagttcagaatta

SEQ ID NO: 22763 - DNA, 201 bp, Homo sapiens
acagtggctcatgcctataatcccagcactttgggaggctgaggtgggcagattgcttgaggtcaggagttcgagagcagcctggccaacatagtgaaackccaactctactaaaaatacaaaaattagctgggcatggtggtgcatgcctgtagtcccagctacttgggagtctgaggcacaagaattgcttgaaccggg

SEQ ID NO: 22764 - DNA, 201 bp, Homo sapiens
tgggtctccttttgcccttgggctgtggagtgtgccccactgcactcagtctagttagataactaatactggagctgggaaaccccaccagtcctatataytgtgacttccttatgctttgaattctaatttttactcattcttcatatgtcttttttttttgagacatggtcttgctctgtcacccagactggaatacag

SEQ ID NO: 22765 - DNA, 201 bp, Homo sapiens
tgttagaagatcaaagattaaattttggggctgggattccaaaggactgataattttgagctagtctctagtggttatgtgctgtcaaatgctttaaaactttcaaggaattaattctcttgaattaagcagagtcattcaaaaatgatcagcattgttgcttctagaggattggaattttagaagcaatattgtcaaatt

SEQ ID NO: 22766 - DNA, 201 bp, Homo sapiens
ctagttgtatgtccttagtggtacaaagggcagtgaatacacaaagatagtatctttaattatggaaggagcctattaaaattccattttatcttaagaartaaacatgtaaaggaatctggaggaggccaaacacctctttaaaataatgattgtcttgggctaattcctttactgtgccttcagcatcattagatgcca

SEQ ID NO: 22767 - DNA, 201 bp, Homo sapiens
tctgcctcccgggttcaagtgattctcctgcctcagcctcctgaatagctgggattacaagtgcacgccaccatgcctggctaattttttttgtatttttrgtagagacaggatttcatcatattggccaggctggtctcaaactcctgacctcgagtggtccacctgcctcggcctccagaagtgctgggattacagcag

SEQ ID NO: 22768 - DNA, 201 bp, Homo sapiens
agaagatcaaagattaaattttggggctgggattccaaaggactgataattttgagctagtctctagtggttatgtgctgtcaaatgctttaaaactttcmaggaattaattctcttgaattaagcagagtcattcaaaaatgatcagcattgttgcttctagaggattggaattttagaagcaatattgtcaaattatca

SEQ ID NO: 22769 - DNA, 201 bp, Homo sapiens
gctttccatgtagcatcaagaactttattgttcaatggcacctattttaatgccagttttgtctctggttactggcaaaactgttcaggattgaaagctcrctttaaagaaatgcttacaattcagatgggaagaagagtgctggttgaccctggctatctccacaaacctgtctgtacttggaagttgtttctaggaaaa

SEQ ID NO: 22770 - DNA, 201 bp, Homo sapiens
gcattttgtaagtggtgtgcgtgctttttgagtttcttctcatctaaccagagttgtactgttatgttagaaatcagtgtggatcctaccttggttgagtktgggctcagcattgggagataattgagttggttacgaaggctgtgtggagaaacttggaactgggagatacaggttctctgtgcatcttgtaatggtatg

SEQ ID NO: 22771 - DNA, 201 bp, Homo sapiens
tgaacaatgagaacacttgttcacaggaaggggaacatcacacaccagagcctgttgtggggtggggggatgggggagggatagcattaggagatataccyaatgtaaatgacgagttaatgggtgcagcacaccaacatgtcacatgtatacatatgtaacaaacctgcacgttgtgcacatgtaccctagaacttaaag

SEQ ID NO: 22772 - DNA, 201 bp, Homo sapiens
tcctgatcagaacaaaaacctatacaatccgttgtgagaagtgtaaaaaaaaaaacaaaaaactgtcctgatacagaatatatacctaattgtgccactaactgtctgaaaattatttagcttttctccaccttagttttctcattcctaaaatggaaataacttcagctcattttaaattagaattttcaatcatgtttg

SEQ ID NO: 22773 - DNA, 201 bp, Homo sapiens
acatacttagatgatgagatcttgttattccataagcggtaggataccagatgtggtaaacaaataacctctagcagcctgaatggaaggatgtggtaggytggattattgttcagcaaatattcattccctaacctaccccactcccaatagccccccacccaacctatgagagcagtctgtttcgtcatccaattgcta

SEQ ID NO: 22774 - DNA, 201 bp, Homo sapiens
gggaaaacttacaaagacccatttttggagaagataaagtttcctgaaatacaagaatcacaccacttggacagacgttgtttgtatttcacgcccacacwagtgtgttagtgtggagaaggaccattttggaagaaagtactttttcctctgaactggtttcctgaatccttttgagtttcatgttttatggaagaccat

SEQ ID NO: 22775 - DNA, 201 bp, Homo sapiens
ctttctgttgttacagtttgtcgtattgctccccattttagagatggagaaactgtgatgggttttaaatcatgttttttagcaccaaagagtcaaatatggaagtcggcttgccctagctttcttttgcaatttttaagtcattgatttaaaagcctactttggcttatactttggcatcttgacattttacttgagaat

SEQ ID NO: 22776 - DNA, 201 bp, Homo sapiens
cctgatcagaacaaaaacctatacaatccgttgtgagaagtgtaaaaaaaaaaacaaaaaactgtcctgatacagaatatatacctaattgtgccactaactgtctgaaaattatttagcttttctccaccttagttttctcattcctaaaatggaaataacttcagctcattttaaattagaattttcaatcatgtttgt

SEQ ID NO: 22777 - DNA, 201 bp, Homo sapiens
attttgaagttcaggaattctttttggaaagttactgttataattatgcactgtatcatgcatgttatacagtgactcctggcagaaaaactgcatacctrcagaagtcctagcgcctaaagaaaaaacatgaacctaattgtttatacctagtgttgcttgacaatatctatgaagcaaagttagtggccaagcttattt

SEQ ID NO: 22778 - DNA, 201 bp, Homo sapiens
ttaaaataccaaatattttgataaaggcactgagattggtctaagcctttgcattaccctatacagtcaagaaaggtgaggctatgtcttttttgtttttkgtagtggcttcagattagatcaactgaatgttctgaatattttgctaattacggctattccagtggtcactgggcctcccaccattcctctccagagctg

SEQ ID NO: 22779 - DNA, 201 bp, Homo sapiens
ctgatcagaacaaaaacctatacaatccgttgtgagaagtgtaaaaaaaaaaacaaaaaactgtcctgatacagaatatatacctaattgtgccactaactgtctgaaaattatttagcttttctccaccttagttttctcattcctaaaatggaaataacttcagctcattttaaattagaattttcaatcatgtttgta

SEQ ID NO: 22780 - DNA, 201 bp, Homo sapiens
aaaatggccagaggagttgatttgcttttgtttccatgagtattttcgctattacctttagagatcactaactcagagcagttcatatgactttctgctgycatcatcctgacccctgcctaaacttttcttactgtggaaaatattaacaattgaccttattcagacatttggcaggctgtggtcattattaattccttc

SEQ ID NO: 22781 - DNA, 201 bp, Homo sapiens
aaatgcatgtgcagggaaattcccatttttaaaaccatcaggtctcatgagacttatcactatcatgagaacagcacaggaaagacctgctcctatgattyagtcacctcccactgggtccttcccacaacacgtgggaattcaagatgagatctgggtggggacacagcgaagccatatcaggcagctagattgatcatg

SEQ ID NO: 22782 - DNA, 201 bp, Homo sapiens
tgaattcccagatcaaatccagtgttgttcagatataactgcaaagtttgtacaaacgaatttgaatcgccacaatactggctcattgcattacaaagaaagacagagctgagtatgggaattttatttaattcatatttgtgtactcaagactcaaatgagtcagcgataaaaatattcttttcagttagttcttttgct

SEQ ID NO: 22783 - DNA, 201 bp, Homo sapiens
gaattcccagatcaaatccagtgttgttcagatataactgcaaagtttgtacaaacgaatttgaatcgccacaatactggctcattgcattacaaagaaagacagagctgagtatgggaattttatttaattcatatttgtgtactcaagactcaaatgagtcagcgataaaaatattcttttcagttagttcttttgctt

SEQ ID NO: 22784 - DNA, 201 bp, Homo sapiens
aattcccagatcaaatccagtgttgttcagatataactgcaaagtttgtacaaacgaatttgaatcgccacaatactggctcattgcattacaaagaaagacagagctgagtatgggaattttatttaattcatatttgtgtactcaagactcaaatgagtcagcgataaaaatattcttttcagttagttcttttgcttt

SEQ ID NO: 22785 - DNA, 201 bp, Homo sapiens
cagaaactactgaaagaatctctttcaagttagccttcgttggaataaattccttgaaaaagaggtagttcatcagctaggacccaactctatatatatayacacacacacacacacacacacacacacacacacacacaggcaaattgtgttcttggaagtgctggtggtggtttcttctatatttttggttacttttag

SEQ ID NO: 22786 - DNA, 201 bp, Homo sapiens
caagtcctgcttccaggctctgaaagacaagtttattttttagtatgtccagatcagctcaagtttagtggtaagaccaggcctgagctgctacagcccayactcttgaaacccatcctcttgaaactcttgacaccacactggaaaccttgtgaaaagcctctgcttttcatgacctttcctccttgtttctgacctact

SEQ ID NO: 22787 - DNA, 201 bp, Homo sapiens
taaactaatttattcttctgacacacaggattaccatccattttattattggtcggaaagtccatttgagctgagattacacttgttcagagtgttttcamgtcaattgctactgcgtcttgtctaccattgcttgaagaaaaacaacatcagctaattctgatgggagccccatgattttgaaggaccaagcaggggacg

SEQ ID NO: 22788 - DNA, 201 bp, Homo sapiens
tatgttttctaaagaccattattcacttctagcgtgtcctgatcagaacaaaaacctatacaatccgttgtgagaagtgtaaaaaaaaaaacaaaaaactrtcctgatacagaatatatacctaattgtgccactaactgtctgaaaattatttagcttttctccaccttagttttctcattcctaaaatggaaataactt

SEQ ID NO: 22789 - DNA, 201 bp, Homo sapiens
tatatataaaaaacaggtaggtagatgaccgatcaaagaagaccgagcaagccttaaagaacagactcccaggctatctttacctcttgaatgattttctkctgccaccagctgagggaatataagcaatatgttttctaaagaccattattcacttctagcgtgtcctgatcagaacaaaaacctatacaatccgttgtg

SEQ ID NO: 22790 - DNA, 201 bp, Homo sapiens
tggtaactgccatttaaggatagtgccattgacaaagggtaggtgcgtgcatgtgtcactatatataaaaaacaggtaggtagatgaccgatcaaagaagmccgagcaagccttaaagaacagactcccaggctatctttacctcttgaatgattttctgctgccaccagctgagggaatataagcaatatgttttctaaa

SEQ ID NO: 22791 - DNA, 201 bp, Homo sapiens
caggggattgcttcaaaatctcttctctgtcaattccatttggagttttcaaggcgaccccagctgtcagctatccataaatgcaatatctacaagccagracgtctgtgtggcatttggtcagtagggccattctgttttatggttgaagtccagaaagagtcaatatatgagtgttcaaaactctttctagatgaatgt

SEQ ID NO: 22792 - DNA, 201 bp, Homo sapiens
tagcccctcactacatctccagataacggcgtaggagtgaggaactgtataccgtatccctctaaagagaggcttcaaaaagcacaatcttgatttgggtrgttgggaattgttcctttgttggacagctttaattattaaattgagatgaaatatgccagcttatgatttttaatactaatttattcaacctcaaaattc

SEQ ID NO: 22793 - DNA, 201 bp, Homo sapiens
taaggcccatcacatatttataatttaggtccttgccttggtgtgttttcctcagtgctcccaaccatagaaaagcaggacaagtttacagttgctattcrtctaagtctgatgcttctttcccataagttgttttgggaattaagcatcttgctgaaagtgaatgtgccattttgaaaatcttagcaaattacattttca

SEQ ID NO: 22794 - DNA, 201 bp, Homo sapiens
ttcttaaatacccttgaagttaagtagatgccggaattgctgagatggctgccaagccaatgttggagaatttatttttttgtacagattatatatatatmtttgattttcttcttctcctctctgtttattttgtattttttattcatataggaatgtgcacacattgtatatttttcacaaaatttcatgaactaaacc

SEQ ID NO: 22795 - DNA, 201 bp, Homo sapiens
cttgggagtataaagtggaaggattgcttgaacacaggaggttaaggctgcagtgagctatgttgctgccactgcactccagcctgggtgaccctgtcttaaaaaaaaaaaaagaaaaaaaagataaatcatcactctgaatcttttcattgagaattttttttaatagcctaagatgctaagtagtctatacagtgattt

SEQ ID NO: 22796 - DNA, 201 bp, Homo sapiens
tgcaagctccgcttcccggtttcacgccattcttctgcctcagcctcccgagtagctgggactacaggcgcccgccactacgcccggctaatttttttttkgtatttttagtagagacggggtttcactgtgttagctaggatggtctcgatctcctgacctcgtgatccacccgcctcagcctcccaaagtgctgggatt

SEQ ID NO: 22797 - DNA, 201 bp, Homo sapiens
attttttgaaatttcttcggattctttctgccttttgcaatttccttgctatcttgatgaaatacaaagggtgaaattcttatagctagaaggaactttaragaaagaaatatattattggaattacagcacataaataaaatacagttctcataattcacctcggtttaaattattctttgtatctgcttctgcagaaag

SEQ ID NO: 22798 - DNA, 201 bp, Homo sapiens
tttagagaaagaaatatattattggaattacagcacataaataaaatacagttctcataattcacctcggtttaaattattctttgtatctgcttctgcaraaagttttcatttaggcaacagtcattgatattgacagtgtcagttgataaaaatgaatgtaactgtggtttattaaatgcaatgtgatgtatgaatgta

SEQ ID NO: 22799 - DNA, 201 bp, Homo sapiens
tctccccctccttctcctccttctcctcctccttctccttcttcctcctccctcttctcctccttctccgcctcttctccccctacttctccttcctcctycctcctcttctcctcctccttctcctgctcctcctccttctccttcctcctccatcctcttctcctccttcttctcctttcttctttcttcttctttgag

SEQ ID NO: 22800 - DNA, 201 bp, Homo sapiens
aaaaaaaatctgtagttagaattttagagaagtatgtgaaagttttatcttactacagaaattatgggaaatgcttactttttaaaaggagaaagggaaasaatctcatgttgaaaattgtcattaggtaaagtaatagaattaatggagcaatccaaaatgagctaaataagtttctttgtgagaattcttctagagatt

SEQ ID NO: 22801 - DNA, 201 bp, Homo sapiens
ctcttctcctcctccttctcctgctcctcctccttctccttcctcctccatcctcttctcctccttcttctcctttcttctttcttcttctttgagacaargtctcactctgttgccccggctggagtgcattggcaccatttcagctcactgcaacctctgcctcctgggttcaagcgattctcacacctctgcctctcg

SEQ ID NO: 22802 - DNA, 201 bp, Homo sapiens
atgtggggcatggcgggccagggtggttttggaaaaagcaacatttgagcgggaaaacgggataactcttctcatttagggctgtggtttccaggcttgcrggtggggcctttgctggggaactgccctcttctatctaatatttccctgcttctggtccatatcaataatattccattatatggacattttgtttatcca

SEQ ID NO: 22803 - DNA, 201 bp, Homo sapiens
gtccctgggaacctaagaacgcaatgacttgtaaaagccacatgcatactattaagatgtatgtgaccgcttatgtgtgtacaaataactggaaaaaaaawaataaggaagttaggtgttttcgggtgagtgcagttcccattttccttgatctcatttagaaaggtgacctcagattcctgctgactttgcaatagatac

SEQ ID NO: 22804 - DNA, 201 bp, Homo sapiens
tttagaagatttgtgttcaaattctggctctacatctaattagttatataactttattaactttaccaaggctcactttactcatttgtaaaatgtggatrataataataaattcctaccttacaacacagctttgtatttggtgagctaatgtatgggacatatagtaggcatttaatagctgatagtgaaatctgaacc

SEQ ID NO: 22805 - DNA, 201 bp, Homo sapiens
gtgctaagaaataatgaagcattctttctcagctccaaggtagaatgatttcaacctagaattagacatccaaacagtgtatcggccaattttgagggtgsaataagggcatcttcagatttataaagacttggaaagttgacttttcatgctcttctttctagggaactttttgagaatgcatttaagcaaagcgagtaa

SEQ ID NO: 22806 - DNA, 201 bp, Homo sapiens
cctgggaacctaagaacgcaatgacttgtaaaagccacatgcatactattaagatgtatgtgaccgcttatgtgtgtacaaataactggaaaaaaaaaaataaggaagttaggtgttttcgggtgagtgcagttcccattttccttgatctcatttagaaaggtgacctcagattcctgctgactttgcaatagatactct

SEQ ID NO: 22807 - DNA, 201 bp, Homo sapiens
tttcttttattttttgtgattaaatatttggttagtttcttttttcctcttaatttgttcttacttgtcctttattccttagagccacataaggaagggcagggggaaagaatttgaattatctcagtgttttttttttttttgtttttttaaaggagatagaatttgctcttgctatttatttcaagaaattggtgatct

SEQ ID NO: 22808 - DNA, 201 bp, Homo sapiens
gttattctagttagcaattcctctaacctttttcaaggttcttagcttccttgcattgggttagaacatgctactttaccttggaggagtttgttattacmcaccttctgaagcctacttctgtcaattcgccaaactcattctccatccagttttgttcccttgctgatgatgagttgtgatcctttggaagagaagagg

SEQ ID NO: 22809 - DNA, 201 bp, Homo sapiens
aaggacagagcttatggttgtcctgttctttattctgttggtggggcctagaacactgcctgctgatcaatcgttatgaagtaagtagaggaatcaatgtrtagacagcgtatttgtcccctcgagacgacgttaccagtggggagccagtgagcagtgttctctcttgctttctcaggcagtactacgagatgctttaca

SEQ ID NO: 22810 - DNA, 201 bp, Homo sapiens
tgtactgctcctcattaggaatcaggcacttggcccatgagttgcctacttccaagcagagtgcttccctccccttgcctgtcctctgtcctgagatccawccagcagctcatgtgtcccaaaataataatttaaagattggaaatcgcagttttcggaagtttctctctgttccaatttactatcagttcattaatcaat

SEQ ID NO: 22811 - DNA, 201 bp, Homo sapiens
tttgctgccagcaaatgactgacttaaatagaaagccatatacaattcaagtgatccaaaatggtataacactggggaaggaggaagggagcaggaagacrttgcactctgattttctcccatgtgatcctcagcagatatccttcagagaaatcatcaaatctagaaactcacaatgccctctgctgagggttggcttgt

SEQ ID NO: 22812 - DNA, 201 bp, Homo sapiens
gacggccaaatcctgattacagtgaggggaaaaacaggaaatgttctagttttgctgccagcaaatgactgacttaaatagaaagccatatacaattcaartgatccaaaatggtataacactggggaaggaggaagggagcaggaagacattgcactctgattttctcccatgtgatcctcagcagatatccttcagaga

SEQ ID NO: 22813 - DNA, 201 bp, Homo sapiens
ggttagtttcttttttcctcttaatttgttcttacttgtcctttattccttagagccacataaggaagggcagggggaaagaatttgaattatctcagtgttttttttttttttgtttttttaaaggagatagaatttgctcttgctatttatttcaagaaattggtgatcttgcatcagccggcttgtttttgaaagatg

SEQ ID NO: 22814 - DNA, 201 bp, Homo sapiens
caaaggcacaacacatgcccccacggtgctgttgctgctggttaatcagcgtattcaggtttctggagaaagtgttttcttattgtatgactctgaagatkcaaagtgtccttacttcctctcttcccatttattgccctcccccagattggcacctgctgaggactaattagggcagtcctaatttggacggccaaatcc

SEQ ID NO: 22815 - DNA, 201 bp, Homo sapiens
gataattactttagagtaacttatgatcttttcccatgagcttagtgtcaatttcctggaggcatataattttatataaatttacctgtttgccctgtctrtaaattgaggatgaactgataaaaaaaaaatacatctgagtgactatggatgggtttgtgtgggagtgtgtgaggatgggagaaacttccatgattcatt

SEQ ID NO: 22816 - DNA, 201 bp, Homo sapiens
ggttgttatacaacaatgcacactcaaaggcacaacacatgcccccacggtgctgttgctgctggttaatcagcgtattcaggtttctggagaaagtgttktcttattgtatgactctgaagattcaaagtgtccttacttcctctcttcccatttattgccctcccccagattggcacctgctgaggactaattagggca

SEQ ID NO: 22817 - DNA, 201 bp, Homo sapiens
gattctgagacctcctttgccaactcttaaaaagagagttgttctgtaactttttcttgtcccagagtaacaaataacatgacatggtgagtgactttagsacgcttgttaaaagagaatggcttttctagtggtctcttctattggattttgtagtagaaacctaggttttaatgctctcttacagagcactgatgggaa

SEQ ID NO: 22818 - DNA, 201 bp, Homo sapiens
tggccccatgttagattcatcttgggaagttacaaaataaaataaaacaaaaagcccagcaattgtgcttccacctcagaggcctggacagttactacaamcaaacaaacaaacaaacaaacaaacaaataaatcaacctctcctggtaattctaatgtgcagcagtagctgtgagtctctgccctattccacattgcctt

SEQ ID NO: 22819 - DNA, 201 bp, Homo sapiens
gcggtggaggaggggtgtgcaactggagtgattggtttaggcgggaacatggatagttttgcctgcgctgtctgtccgttctataggaattgtgttatttytctgtcattcatattttaccgctttgtccaaacagcaaactctatctctcttggactactactctggaacatggccattgctttggtttttgacatattc

SEQ ID NO: 22820 - DNA, 201 bp, Homo sapiens
tctttctttaagtctcaagcagagtccttcctctttcttgtgactgtttctctttctggttgtgagtttgcaggtatcccacattctttctctggtatcaktattctctgtgcttgtacatgagaccagtgaagctggactaacccctttatttccacagcctaatttaattacaaccaaaacctctcaataaaactgttt

SEQ ID NO: 22821 - DNA, 201 bp, Homo sapiens
cttttgcactgagttttgcagcaaaggcgaacagagaaatggcatagtggctggagaaatgaggtcacaggaaggtttttttgttttatgtgttttttaartcgaagaaataagtacatatttgtatttgaagaaaaggacttgggaagaatgaaaatttggtgatgtaagaaagaaaggggaaaatccctgaaattatgt

SEQ ID NO: 22822 - DNA, 201 bp, Homo sapiens
tttgcagcctgatttagggctgggcacatacgaaatgcctacaagtttatttttatggagatgtggtctcactctgtcgctgaggctggaatgtagaggcycaatcatcatggctcactgtagccttgaccccccctgggctcaagagatcctcctgctttagcctcctgagtagttgggactacaggtatatgacacgat

SEQ ID NO: 22823 - DNA, 201 bp, Homo sapiens
tgcggtaaactcttttgtcttactcatggtgtttttttctgtaaagcaagaaaatacatttgtgtgtgtgtgtgtgtgtgtgtgtgtgtgtgtgtgtacatctctttttacaaacattatttctgtaatacttggattgaatccctgttctgaaatttttatgtctatcatctctcctccagcttttcaatctttattatt

SEQ ID NO: 22824 - DNA, 201 bp, Homo sapiens
gaggaaaatctagaaaatacagtgttgtagtgttgccagcattagaactcagcacggactgagtgataaatgtagcacggactgagtgataaatgtaaatrtttttgtggagtagtagggatgaaaactggatgggtgtggccttaaaaaagagactgggagtagaggaagggtaaatagaggcaaaacttttgcactgag

SEQ ID NO: 22825 - DNA, 201 bp, Homo sapiens
ggttttgtactcagaacattgatggggtaaaaaaatctcatttataattaagagcagaataaatgtagtgactataagaaaccaggctaggttagaatacwtgtagtgactataagaatcaaggttaggttctgcttgtacacagaatggagccaaggatctaagacaattggggaacatctatgccatagtttacgtcct

SEQ ID NO: 22826 - DNA, 201 bp, Homo sapiens
gcggtaaactcttttgtcttactcatggtgtttttttctgtaaagcaagaaaatacatttgtgtgtgtgtgtgtgtgtgtgtgtgtgtgtgtgtgtacatctctttttacaaacattatttctgtaatacttggattgaatccctgttctgaaatttttatgtctatcatctctcctccagcttttcaatctttattattg

SEQ ID NO: 22827 - DNA, 201 bp, Homo sapiens
ggaggaaaatctagaaaatacagtgttgtagtgttgccagcattagaactcagcacggactgagtgataaatgtagcacggactgagtgataaatgtaaaygtttttgtggagtagtagggatgaaaactggatgggtgtggccttaaaaaagagactgggagtagaggaagggtaaatagaggcaaaacttttgcactga

SEQ ID NO: 22828 - DNA, 201 bp, Homo sapiens
acattagcagcaaatctgaacttgctgattagtaaagaggatggaaatcacagctctgtgtgtgtccaaatagctactcatcagcaaagcttgtgatgggrcctgatggtttaatgcaggccttaatcaagggctaggaaatgttttctctgcagtttaacctagtagtattgaattacattaacatgtatatacactcgc

SEQ ID NO: 22829 - DNA, 201 bp, Homo sapiens
tccatgtgaaaagggccttataatggcatcaccagttgttcattaatctcctttcccttatgtaaagtctccttttgtcctccctctgccagtctgtaagttttatcatgacatttatacatggaatggattgttaccttttctgggaggagaataaaccataaatatgaacgaggcattaaaagagcttaacataaatca

SEQ ID NO: 22830 - DNA, 201 bp, Homo sapiens
taccagttcccatgacactattccacatatttcataatctgccctataaaagattgatcaggtttcttgctggtgtcttcccagcctgattcttttaatgyagccaacccttcctcatgttggcatgcaggcctgttatggacaatactagatatttgttcaagaatcctcccatccctttactgttaggacccacttctc

SEQ ID NO: 22831 - DNA, 201 bp, Homo sapiens; identical to SEQ ID NO: 2914

SEQ ID NO: 22832 - DNA, 201 bp, Homo sapiens
gctttacagtatagtttgaaatcaggtaatgtaatgcctccagatttgttctttttgtatagtattgctttggctacgtgggttccatttttggtgccacrtgaattttaagattgttttttctagttctgtgaagaatgatggtggtattttgatgggaattgcattgaatttgtagatcacttttgccatatggtcatt

SEQ ID NO: 22833 - DNA, 201 bp, Homo sapiens
ctgccttctcagaatagatctatatttgttatgatcatcaactactgaacactattagagatttaggcgttatactgaaataggattaaaaaaagaatgtrgtattcaaacttgctgcaacagtgtttaggagtacattgtactaaagaccctagtggatgtggggaaaattaataaatggttgttatctgaagtaaatat

SEQ ID NO: 22834 - DNA, 201 bp, Homo sapiens
ttttctgtcccaatttgccaaactctttttctaattgattacaataattattctatatttataacttagctcatattaaaaaataagtttggctgggcacsgtggctcacatctgtaatcccaacaccttgggaagccgaggtgggtggatcacctgaggtcaggagtttgagaccagcctggccgacatggtgaaaccct

SEQ ID NO: 22835 - DNA, 201 bp, Homo sapiens
tttttttttttttttttttttggagatggaatcttgctctgttgccaggcaagagtgcagtggcaatcttggcttactgcagcctcttactccctggttcmagcgattctcctgccccagctcccgagtagctgggattacaggcacgtgccaccacgcccagctaatttttctatttttagtagagacagggttttacca

SEQ ID NO: 22836 - DNA, 201 bp, Homo sapiens
ccagctgctttatttagagttgattccatggaaaatattttgtgtgtcaaactccatcacaatatcagggttcagtactccgttttagacttttcctgcaktactgtgatctggatccttttattcaacctgcgaattccttggaaacataaaatgatactaagcacattgtaggatatatagttgaaaaaactgttcttg

SEQ ID NO: 22837 - DNA, 201 bp, Homo sapiens
tcctacctagggtggtaccacagtgactgatgaaagtgtcttaaaatagctcttaaaaagttagtggccagatacggtggctcttgcctgtaatcccagcrctttgggaggccgaggcaggcagatcacgaagtcaggagatcgagaccatcctggctaacgcggtgaaaccccgtctctactaaaaaatacaaaaaatta

SEQ ID NO: 22838 - DNA, 201 bp, Homo sapiens
tcatgttatttttcttgtgttctttattcagcaaatattccccagaagcctaatatgtgctccatgctaccacacacaagggcaaatggatagatgaagargacacccttattatctaagagtgtgggaactggactggagccaaaaatcccaacagctcaaactcagggctgggtcagaatcaggtcaggcagtggggct

SEQ ID NO: 22839 - DNA, 201 bp, Homo sapiens
tttgtcttcaatggctatctttgttctgatagagaccgattgctttattgtaagtaaactcctaactattgtgtgatattctctttaaaaagaagactggygatgcctaatttatttagcaccatctaggaatctgattttcagtgtggcttaattttccagaaaatagtctctccccttttagcattaaagattgtattt

SEQ ID NO: 22840 - DNA, 201 bp, Homo sapiens
tgtcacctagttgctcttcagtgttaattgacttattatctgtgtatctgcgaattgaaccattgctcaatggcagtgctttaaaatactggaagactatygatgcatcactattgaaattacagtctctaaggtggataatatgacagtcttagcaactgtgtcaccactacaaggttttggggacttttttgttttgtt

SEQ ID NO: 22841 - DNA, 201 bp, Homo sapiens
tacattgcccaggctggtctcaaactcctggcctcaagcgattctcctgccttggcctcccaaagtgctgggattccaggggtgagccagagttcctgacyggcactgatttttttaatcaaatcaagtttttacagaagtaaaaacagatgcttcactatagccagtttctaaagaattcaccaacaacatctcttctta

SEQ ID NO: 22842 - DNA, 201 bp, Homo sapiens
aagatcaatgcgcacaagaaattgaaagaaggtagcgtagtgagggagagcttagctcaaaaccaaaccaaaccaaacaaaaacaaactggagagttaacygagcttaggtcattctgcgctgtggttaagcgtggtgttagtcatctgatttttggcaagttactccttctacgcctcagtctgttacattaaggttgat

SEQ ID NO: 22843 - DNA, 201 bp, Homo sapiens
aactcatttcagtgttctctctgtctctggtgataaggattgttcttcatttgctggcacgggagtaggagcgggccttcacaagagagaattaatgcccrcttttaggcagatgggggagggcagagagctattcctgtttctgttttttctcagttgccttcagctcaaaatcatccttattccaatgtggcatatttt

SEQ ID NO: 22844 - DNA, 201 bp, Homo sapiens
tctttgttaatgaggggtgtctctttaaaacctacgaggtgttttcacaggtgactttgtaagttcattgtaaattattccacatgtatcactggatcccygtcatcttacatcttttctttcttcttcttttcacctagtgaaatagtgtgtcttttggagtcaggtacacctgttttatttttaacaagtttattgagg

SEQ ID NO: 22845 - DNA, 201 bp, Homo sapiens
gctttactgttaacttttttgtttattttaataaggaggaatacactctcaaataatgataaaagccgagtatggtaaatacgtaaaccagtgacattgtygtttgttattcgtatctggtattatcaactttacataattgtatatactgtacttctgtaagactggcagtacagtaggtttgttgacagcagcatcagc

SEQ ID NO: 22846 - DNA, 201 bp, Homo sapiens
gcttgatgaggatggagcaagtaacatttaaaataaggtggtcagggaaaacctcacttactgataagcagacatttgagcaaaaattgaccagaatctcytttaatcttctattttcctccaacctcctgtccctttaatcccatctgatcctcttttctgattttctttcagttggcttacagtataaagcaaaagaag

SEQ ID NO: 22847 - DNA, 201 bp, Homo sapiens
aggacaaagcttgatgaggatggagcaagtaacatttaaaataaggtggtcagggaaaacctcacttactgataagcagacatttgagcaaaaattgaccwgaatctcctttaatcttctattttcctccaacctcctgtccctttaatcccatctgatcctcttttctgattttctttcagttggcttacagtataaagc

SEQ ID NO: 22848 - DNA, 201 bp, Homo sapiens
cagccctgctctagagaatggcgtgaacccgggaggcggagcttgcagtgagcagagattgcaccactgcactccagcctggacgacagagcgaaactccrtctcaaaaaaaaaaaaaaagaagaagaattcagccctgctccagtagaacctgcattggaggagggggaagcagatacttgtttatgtactaaatgcttc

SEQ ID NO: 22849 - DNA, 201 bp, Homo sapiens
gtaaagctccaggagtacaaggacacctgcactgcagcttacaggtagagcttctgttaggggctaagcaaagtaacgtttgagcctgatggtggttccarttggtgaaattgcttcaatagcctaatttccaaaaggatcatctctgagtttgtcaagagatgagaacatgcatcatggaaatagcctcctagacctttg

SEQ ID NO: 22850 - DNA, 201 bp, Homo sapiens
tcgcttgaacctggaaggtggaggttgcagtgagccgagatcgcgccactgtactccaacctgggagacacagcgagactccgtctcaaaaaaaaaaaaawaaataaataaataaataaataaataattaaataaatgagtcagtaataaataaataaaaatttaaaaagtatcatcatggagttaagggtgctgcatcta

SEQ ID NO: 22851 - DNA, 201 bp, Homo sapiens
tcagctccctcgtgaaagatgcttctgttcctctgattgatgttacaaacctccctactcctcgaaaattccttgatacctctcactattctactgctggragctcaagtggtaagtatttaattcttcagccactaagctttttagtatgtcttagttcctaggtagatatctggaggagctttttgggggctgagctag

SEQ ID NO: 22852 - DNA, 201 bp, Homo sapiens
tgacctcaggtaatctgcccacctcagcctcccaaagtgctgggattacaggtgtgagccaccgcgcccagcctgacctcatctcttataaaaaaaaaaargagtagggggaatgatggctaacactatctaatgtttttataaattaaaaaaaagtaaaaattaagactagagaaagttctttctgtcctgctaagtgtt

SEQ ID NO: 22853 - DNA, 201 bp, Homo sapiens
tccagagcacaatcattgtggagaagacagttcaagacctcctgaacctgatgcatgacttgagtgcatattcagatcaattcctcaacatggtgtgcgtraagctccaggagtacaaggacacctgcactgcagcttacaggtagagcttctgttaggggctaagcaaagtaacgtttgagcctgatggtggttccagtt

SEQ ID NO: 22854 - DNA, 201 bp, Homo sapiens
ttgaacctggaaggtggaggttgcagtgagccgagatcgcgccactgtactccaacctgggagacacagcgagactccgtctcaaaaaaaaaaaaataaataaataaataaataaataaataattaaataaatgagtcagtaataaataaataaaaatttaaaaagtatcatcatggagttaagggtgctgcatctacttc

SEQ ID NO: 22855 - DNA, 201 bp, Homo sapiens
atagaaaatgtcagacagataatgtcaaaacactgataaaaggaattacttgtgagaaatggaaatgtgaggtggggaatagggaggtagaaattcttttmtttcctgtgtacatcatgagcatgttttttaaaaataataatacaattactgatgatccttttgaagatttttaaaaatgaaatgggaaaatgtttagat

SEQ ID NO: 22856 - DNA, 201 bp, Homo sapiens
aggtaaaacaaaaacaaaagaagtaaccttagccaatcattgatttggtgaagacttcagagaagcttttttttttttttttttttttttttttttgtggktcatataaatgggaaaaggggctggtttctccaagacagaagtagctgtggtatctcctctcaggtaaaatgccctcaaagcattagtcattgaccatcc

SEQ ID NO: 22857 - DNA, 201 bp, Homo sapiens
gtggaggttgcagtgagccgagatcgcgccactgtactccaacctgggagacacagcgagactccgtctcaaaaaaaaaaaaataaataaataaataaatraataaataattaaataaatgagtcagtaataaataaataaaaatttaaaaagtatcatcatggagttaagggtgctgcatctacttcgttacttcccatt

SEQ ID NO: 22858 - DNA, 201 bp, Homo sapiens
gaggaagatagcgaatggatttctccccaaaacatcaggatatgtttggaaactagatgccatcctttatgaaaccatgaaattagtcaaaaccccccccmtggttgccattgtgggccatacttgggccattgttctttatggacataattgctagagatcactgtccgtttagtgaggcttaatcaacaagccacacac

SEQ ID NO: 22859 - DNA, 201 bp, Homo sapiens
aggctgggaaacggagattgcagtgagctgagatcacgccattgcactccagcctgggtgacaagagcgaaactgtctccaataaaaaaaaaaaaattgtrcgtaacactggagttttagatgcctgtacactgaatcttttctgttctttctccccttttttaaccttagtttatttattaatattattattacacttta

SEQ ID NO: 22860 - DNA, 201 bp, Homo sapiens
caaaccaatggtcaattatttttctaagctaaattgcttctccttttacagtaccttgaggttcagtagaagacgaaccctaacacttgtttaagatattytgctctcccttattgggcttcctaaaggtggttggcagtttttttttttttttttttttttttttttaaccagtggattttggtgccatgaactctaagc

SEQ ID NO: 22861 - DNA, 201 bp, Homo sapiens
ttagaatcaacctcaaatcctttttctcttgtgagaattcatctagacctcttattatatgtcatgtcttttagaataacttgtgtctacctccatgaagyttttaaatacagagaaaatacatgtaactattttacaagtcaactggaaagccatacatgtatgtatatgttcgtgtgtgtatggcatatatgtatatat

SEQ ID NO: 22862 - DNA, 201 bp, Homo sapiens
tagaggccaggagtttgagaccagcctgcacaacatagtgagactatctctctaccaaataaataaataaataaataaataaataaataaataaataaatwatctgggcactgtggtatgcctatagtcctagctacttgggagaaaaaggcaggaggatctcaggagcccaggagtttgcaggtacagtgagctatgatc

SEQ ID NO: 22863 - DNA, 201 bp, Homo sapiens
agtcatagttcactgccatgtttttccaaagtatgttcacaggtgtttggaatacgtatgatctaatctgaaaattaagagtatatatacctttcagttcttttttttttttttaattatactttaagttttagggtacatgtgcacattgtgcaggttagttacatacgtatacatgtgccatgctggtgcgctgcaccc

SEQ ID NO: 22864 - DNA, 201 bp, Homo sapiens
gatcctcccacctcagcctcccaagtagctggcaccacaagcgtgcaccaccacaataggctaatttgtgtgtgtgtgtgtgtgtgtgtgtgtgtgtgtgwgatgaggtctccctatattgcccaggctgtgtcaagtgtcaaagcactttttatgggttaaatcatttaatccctcaacatataggtggtagtgctttat

SEQ ID NO: 22865 - DNA, 201 bp, Homo sapiens
aaagtaaattcaacaacacaggtattgcatatgtacatacatttagagggcctttagttgagaatctgaaaaggaaagcttcaattaaatatttataaatrttagaatttagacgataagatccatgctttattttattttattttattttattttattttattttattttattttattttattttttagatggagtcttg

SEQ ID NO: 22866 - DNA, 201 bp, Homo sapiens
cggggtaatattgggactaattttttgggaaagaagttttccccaggcactgtaccctgtgtcatgagtgaggggtgggtgtccagtgaggaattccagcrgaggctgaagtcccatttgtggtggtcatacacttttgctttccggtagattcaaggttccagggctcttgttaggaatctttttttaggacacagtgta

SEQ ID NO: 22867 - DNA, 201 bp, Homo sapiens
tgtacatacatttagagggcctttagttgagaatctgaaaaggaaagcttcaattaaatatttataaatattagaatttagacgataagatccatgctttrttttattttattttattttattttattttattttattttattttattttattttttagatggagtcttgctgtgttgcccaggctggagtgcagtggcac

SEQ ID NO: 22868 - DNA, 201 bp, Homo sapiens
ctagcctttaatattttagtggcttcttctagatcttctttagaaaagagtggtgtgagattataaaacgaacctgctgctagaagtgtgcttgtcacttytctatagccgtcaaattctttgagatcctcaaactgaagcatccatgggaacatttattatttgttcaaatatggccataaaaatcgactttgcaatcat

SEQ ID NO: 22869 - DNA, 201 bp, Homo sapiens
gtacatacatttagagggcctttagttgagaatctgaaaaggaaagcttcaattaaatatttataaatattagaatttagacgataagatccatgctttaytttattttattttattttattttattttattttattttattttattttattttttagatggagtcttgctgtgttgcccaggctggagtgcagtggcaca

SEQ ID NO: 22870 - DNA, 201 bp, Homo sapiens
ttttcttatttcttcctacactcatagtcataaaatcagttagattttacattcaaattttaaaaaattttcctttctgtatttattacagattctccagttcacattctctttatcattcacttgaaccattttcaatattaaagagtcttagaagcaatctagtttgactactgtcccaatagttgaattctgtctgca

SEQ ID NO: 22871 - DNA, 201 bp, Homo sapiens
gggcatagctttcttgtctagcaatggttggcccagtatgtggcccaacatatatttcctgtagaaggaatgagaatcactcctatgttgatgaccatagstgaacatgactggaagaattttagcatgaccagttgactttttttcctatcaccactggctagttctgaagtataaagtgttaagttataaactgcagcg

SEQ ID NO: 22872 - DNA, 201 bp, Homo sapiens
agtctgtaccatgtgtcaactagttaattctctgttttttacttctaacatgcttcagaggagcccccaccaattacacagctactcatggtgatgatctrtgtacttggtggcagggtcagcttcttcttccagataaatcagttgtccagatgttatccacatggcagtcagagtggccatggcttctaagattctgcc

SEQ ID NO: 22873 - DNA, 201 bp, Homo sapiens
tggctaaaaataatgttgggagctacagtcaatactaacttttattcagctcaatttttctccctctcaaatttgtatttcagaagtcagattcagcacakaattcacttgttgacattaatactagagctttatcttgggaaggactacaagagaaagtctttacaatgaaaataattatctcccttccccaaaaaagta

SEQ ID NO: 22874 - DNA, 201 bp, Homo sapiens
aacttttggaaagaaaggttacttcatccattaccaacttgaaggggcaaaaagggaagaaataaaaagaggtgacaaaatgaaaaagccaaaaactcttkcttgtaaactcccaaattaagtgttaaatttacaacatgactgcattacttggtttagagcactgaattcccagatcaaatccagtgttgttcagatata

SEQ ID NO: 22875 - DNA, 201 bp, Homo sapiens
attcactgatcccatccaggcagccccagcaaagtgtcatcaaatggaaaatgtgttgccctggaagccacggctgctattttaatgctcgatgatgaagrccaagctttcaatttcctggggcctcaataagtgctgataaattatttatccctattgggtgacatgatttcatttcagtctgacagtgtttatcatgga

SEQ ID NO: 22876 - DNA, 201 bp, Homo sapiens
atatgcattttctgtcttaaaagccagagttatcttgtgagtgtcaagaattccatgatagcgacttgaaaatccctattctgtgtccttccagagaaaamacttgctcaggtcttgggaagaccagcgctgtgtaagatacttatttggttgttgttttgagttcatatttcttttttttttttcagagtccacagagct

SEQ ID NO: 22877 - DNA, 201 bp, Homo sapiens
taccccagtgtatttctgcttcttttgaaagaggcatgaactaatggtttaaacaactcagtcttttcttaataaaaaatttagaatttgttgactatgcrtctttttcagatataacactgatttgctgcacagtgctgtcggcatctagctttaagatgggcttatttttcctttcagatagtttttttaattcagttt

SEQ ID NO: 22878 - DNA, 201 bp, Homo sapiens
atagcctatgtaattttatataaatacaaaatcaacaaaccagttattgaccgaaggattccaagctgctcagcctgtgattaatatttaccccagtgtawttctgcttcttttgaaagaggcatgaactaatggtttaaacaactcagtcttttcttaataaaaaatttagaatttgttgactatgcgtctttttcagat

SEQ ID NO: 22879 - DNA, 201 bp, Homo sapiens
agatactgcttctctgaattttttgcccaatccttagagtgacttttttataaatacactatttggcccaaatttgtcagagttaaagaaaaacttgcctrataactgttctttcttaattggccagcatcttctctcattatttaaacttatgttcccactgatttgacagtcttctttacatgtgactcacggtgcaac

SEQ ID NO: 22880 - DNA, 201 bp, Homo sapiens
ttcttatttcttcctacactcatagtcataaaatcagttagattttacattcaaattttaaaaaattttcctttctgtatttattacagattctccagttcacattctctttatcattcacttgaaccattttcaatattaaagagtcttagaagcaatctagtttgactactgtcccaatagttgaattctgtctgcatc

SEQ ID NO: 22881 - DNA, 201 bp, Homo sapiens
gcaaagttcacgtgagttttatgctaaacatgaaacttcaaaagatttactgatctggcactggggtctcacacccctggaagtggagttttatctccccktctaccaagtatttctgtctatattcagggtcaccctggaccagtgattgctatgtgtctggttctgtgatgccaaaatgaacactcgtttaaaaccact

SEQ ID NO: 22882 - DNA, 201 bp, Homo sapiens
ttttattttttaagatcagatttattgatatatagtttacatacagcaaaatttcaccctttttataatagctggaaaacttttttttttttttttttttyccgagatggagtcttgctctgtcacccaggctggagtgcagtggcacgatcttggtcactgcagcctctgcctcctgggttcaagtgattctcctgcctc

SEQ ID NO: 22883 - DNA, 201 bp, Homo sapiens
gaggaggaagaggaggaggaagaggaggagaaggagagagaaagaaggaggggaaggagggagggagggagaaatcactgctctgaactcttagcttccasaagttattatgtcattttccacacacctgtctgcagtatcttgcatggtgtctctgtataggccttgcactcttgttttttgatcaagtgaatcccttca

SEQ ID NO: 22884 - DNA, 201 bp, Homo sapiens
catggtgaatcctttccaaaaggttttcaatttactttgcccggatccatcagaagaatcactatttatagcagctatagtcttatgaaatgtgttttttaaaataataggacttaagaatccaaatgactccttgatgcacgggctgtagaacagatgctgtattagcagacatgaaaacaatctcgtttttatgtcaac

SEQ ID NO: 22885 - DNA, 201 bp, Homo sapiens
ccttggctcttataagaaatgtggggaaaatgtgtatatatatatatatatatatatatatatagagagagagagagagagagagagagagagagagagaraaagagagagagaatatgtattctatgtaagaatatgtattgtgtattcttatgagaatatgtgaatatatatacacatatatacataaatatatttttt

SEQ ID NO: 22886 - DNA, 201 bp, Homo sapiens
gctcaccctgttcacagtggtactcctcatgtgtccttaagcatgtcattgggcctcgttagtataaccagagaactagggaaagttcccaaaccatgaarcactgtccagtagatgtgaaaagatgggctatgaacaatggtttcattactttgatagttaagggaagactgaatactgcattggcctctttaagactca

SEQ ID NO: 22887 - DNA, 201 bp, Homo sapiens
cacgttccagtatacatcccatgttttttgatgggaatatattgaatttatagctttctaagtggaaatttgccttcttattttgagattttattttattktatttatttatttttttagacagagtctccgtctgtggcccaggctagagtgcagtggcgcaaccttggctcactgcaacctccacctcctggattcaat

SEQ ID NO: 22888 - DNA, 201 bp, Homo sapiens
tttaatagagaaaaaaacttttaaaaagagagagagaagcctagagaggggtaggcaggaggcagaactgaagaggcttggtgctcaggaaggggctaagwaggaaggatcgagaagtaagaggcctgttcaagctcaccctgttcacagtggtactcctcatgtgtccttaagcatgtcattgggcctcgttagtataac

SEQ ID NO: 22889 - DNA, 201 bp, Homo sapiens
ggtgcgtgcgcgtgccccaagatggaatggtgtcctgttcagggctagtgcccgctttgcgccctgaactgccgaaataggctcctgccacccgccacccwgagctggattaagcaggtaaatatcttacttggtgtcatttatctcaaatgtatgcatagctcacatttatttcagtatttaatattagtgtttttgtct

SEQ ID NO: 22890 - DNA, 201 bp, Homo sapiens
gcatagctcacatttatttcagtatttaatattagtgtttttgtcttcatttagaggtttggtgatgtttttgcaaccagaaatatgccataacaactcakctcttgtttatgtcagttagccagtggggaaattggttttgtggtacatcattttgcttaaagttgaagtttctaagaacctatagaggacgttaagtga

SEQ ID NO: 22891 - DNA, 201 bp, Homo sapiens
tattcgtgaacttattttcttatcttgctagtatctaagattgttggagggcaagaatcttatctggctttgtatctcctgaagttagtctagtgtttggyatagagaaggtacttacttatttatctatttaatcaattagctgagttccctgctgtttccccaaacaacttcctatcctctccagaacagttttcatct

SEQ ID NO: 22892 - DNA, 201 bp, Homo sapiens
acaactcagctcttgtttatgtcagttagccagtggggaaattggttttgtggtacatcattttgcttaaagttgaagtttctaagaacctatagaggacrttaagtgaagaacttgttgcatttctgcttatttatttgcttttactgtgaagaaatagctgaacttctgtgaagggtgcagttgcttttagtccactgt

SEQ ID NO: 22893 - DNA, 201 bp, Homo sapiens
ggaaaaaaacttgtaaaagcttattcaatataaaaaaaataaatcaagaataataaatatccaagttgcttctataatcgttttactttgaacaatataawttttttttaaaaaaattgatagtcttcctgtgtgtacaggaaagatttctagcatttgaaaggttacagcagaataaaggaagtacaagcaaaaaaatac

SEQ ID NO: 22894 - DNA, 201 bp, Homo sapiens
ctttgtgtgtgtataagccagtcactttgtctagaggattgctgagctgcaaccactgatagctgccttgaccctgaagtatctgttctttacacgaatgaagaatgaagctcgtggtcagcatgaccattgcttctcagaaatgtaaattttctcactcttgtgaatatcatacttacacctcatgctggctactctcct

SEQ ID NO: 22895 - DNA, 201 bp, Homo sapiens
tgtgtgtgtataagccagtcactttgtctagaggattgctgagctgcaaccactgatagctgccttgaccctgaagtatctgttctttacacgaatgaagaatgaagctcgtggtcagcatgaccattgcttctcagaaatgtaaattttctcactcttgtgaatatcatacttacacctcatgctggctactctcctctt

SEQ ID NO: 22896 - DNA, 201 bp, Homo sapiens
gagaatatgtattctatgtaagaatatgtattgtgtattcttatgagaatatgtgaatatatatacacatatatacataaatatattttttcttatagaakattgtcttacctcttattttttattaaatagatttttctatcaagaggtgaattttcttaaggcaggatgtttgcagaaactaatggaaaacaaaccttt

SEQ ID NO: 22897 - DNA, 201 bp, Homo sapiens
cctggtagagaacacagactcagcccttctctagacttgccttctcaaactctttcacacttgacctctttcgccattcttcaagttagagtgggtattcrgtttttcataagctctgtcatttttgttttccctctttctgcatttatttcctagccatggtaaatttgggatgttgtgaagatcaagtctcagttcact

SEQ ID NO: 22898 - DNA, 201 bp, Homo sapiens
tgcctaagcacctggagcacactgcctgggcctgatccctgacactgccatttactaacattgtggtgtcacattttttgtaattgcctgtttacttctcycactcacaagtctgaattccttgagtatggagagattgtcttctcactgtgtgtgcagctcctagtggagtatccaacatgtagtagagagagaaaatgt

SEQ ID NO: 22899 - DNA, 201 bp, Homo sapiens
cctgtgcagtaccttttagatctgccctttcttattttttcccacttgtgtcactatttttcaggcctttgttttttacgtatttcagttttttttttttktttttttttttgagacagagtctcgctctgttgcccaggctggagtgcagtggtgtgatcttagcttaccgaagcctctgcctcccgggttcaagtgact

SEQ ID NO: 22900 - DNA, 201 bp, Homo sapiens
cgagaatcgcttgaacccaggagctggaggttgtagtgagccaagatcccaccattgcatgccagactgggcgacaagagtgaaactcagtctcaaaaaaktgtgtgtgtgtgtatatatgtatgtgtatatatatgtgtgtatatgtgtgtgtgtatgtatatgtgtgtgtgcacatatgtgtgtgtgtgtgtatgtgta

SEQ ID NO: 22901 - DNA, 201 bp, Homo sapiens
cccacagaagggccaagggaactatcctatttcaattgcagcatctcccgagttgctgagagtataggcatgtaccaccacacctggctaatttttaaaatttttttggagatggaatctcactattttccccatgctggcctcaaactcctggactcaaactgtcttcccgcttcagcctcccaaagtgctgctgattac

SEQ ID NO: 22902 - DNA, 201 bp, Homo sapiens
gctatagcaagcttattttgatacaaaaatgtttgaaacccatgcatagttttttcatatgcattttctgtgaactttttaaagatctggtgtgtgtgtgygtgtgtatgtgtgtgtgtgtgtgtgtattttctagcaacactgtctcttttctttcattttgcactctgtatattttttgtaaagaatacatctttggat

SEQ ID NO: 22903 - DNA, 201 bp, Homo sapiens
aagcttattttgatacaaaaatgtttgaaacccatgcatagttttttcatatgcattttctgtgaactttttaaagatctggtgtgtgtgtgtgtgtgtatgtgtgtgtgtgtgtgtgtattttctagcaacactgtctcttttctttcattttgcactctgtatattttttgtaaagaatacatctttggatctaagtgg

SEQ ID NO: 22904 - DNA, 201 bp, Homo sapiens
agcttattttgatacaaaaatgtttgaaacccatgcatagttttttcatatgcattttctgtgaactttttaaagatctggtgtgtgtgtgtgtgtgtatgtgtgtgtgtgtgtgtgtattttctagcaacactgtctcttttctttcattttgcactctgtatattttttgtaaagaatacatctttggatctaagtggc

SEQ ID NO: 22905 - DNA, 201 bp, Homo sapiens
gaggcaggagaatcgcttgaacccaggaggcggagattgcggtgagctgagatcgcaccattgcactccagcctgggcaagaagagcgaaactctgtttcaaaaaaaaaaaaaaaaaaacccaaaaaaaaagccccgaatccttggaaagttaggcttcttctagatcattcttcggctatacagtggtccaaaatggtgg

SEQ ID NO: 22906 - DNA, 201 bp, Homo sapiens
aggcaggagaatcgcttgaacccaggaggcggagattgcggtgagctgagatcgcaccattgcactccagcctgggcaagaagagcgaaactctgtttcaaaaaaaaaaaaaaaaaaacccaaaaaaaaagccccgaatccttggaaagttaggcttcttctagatcattcttcggctatacagtggtccaaaatggtggc

SEQ ID NO: 22907 - DNA, 201 bp, Homo sapiens
tacttgacggtgagaggagggagaggatcagaaaaaataactactgggtattaggcctatgcctgggtgacaagataatctgtacaacaaacccccatgaygcaaatttacctatataacaaacttacacaggtacccctcagcctaaaataaaggtttaaattaaaaagatacgggccgggtgtggtggctcacgcctgt

SEQ ID NO: 22908 - DNA, 201 bp, Homo sapiens
ggagattgcggtgagctgagatcgcaccattgcactccagcctgggcaagaagagcgaaactctgtttcaaaaaaaaaaaaaaaaaaacccaaaaaaaaarccccgaatccttggaaagttaggcttcttctagatcattcttcggctatacagtggtccaaaatggtggccgttgcagctactgaatggagaaaggaaca

SEQ ID NO: 22909 - DNA, 201 bp, Homo sapiens
tttatgaaaattaaaatttgaacccataggtgtgtgcttagaatatatacaatttggaaggtgcagtacattatccaccatgatgtggaatcatcaataamttatatagttatattttaatactaggcatctgatgtttgtgtcaagactgtgtagtagaagatttagcccaattcaaataaatttcaggtatcctagaaa

SEQ ID NO: 22910 - DNA, 201 bp, Homo sapiens
ttccgttgcagggtagcggcgaagaaatccaccagaaagacaatcaaagtaacattaaaaagctcaaattttacaaaagttaagttcctgccaacattttmaatttatcatacaattagaaatgtgactcagtctaacaacacccaagaggataaaaggattaaaaaaatgagatttctttggtgttatcaatgcatctca

SEQ ID NO: 22911 - DNA, 201 bp, Homo sapiens
atctcgatgtgtttaaggatcattgacctgaaacacttttcagggtatccattgaactccatttccttaataggtcttacactcttttggttttatatggwgttccctaatcggagattcagagcaccattggtagctcactttcttctgtaatgaatatatatgtaaagcagaatgcctgtggtgcttcatgctgtgagg

SEQ ID NO: 22912 - DNA, 201 bp, Homo sapiens
acttgagtccaggagttcgagatcagcctgagcaatgtagtgagacctcgtctctaccaaaaattgaaaaattagtcgagtggtgtggcacgcacctgtaracccagctactcagaaagctgaagtgggaggattgcttgagcccggaaggttgaggctgcagtgagctgagatcacaccactgcactccagcctgggtaa

SEQ ID NO: 22913 - DNA, 201 bp, Homo sapiens
aaaaatctcagaagatagaactgaagaaatatccatgaaggtgggaaaaaaagacaaaaaagaaaaaggaccctaggaagcagcaggatattccataactraattataggtctacagagaaaaaaaggagagaaaatagagagggccataaaaaaaattaagaaaaattcccaaaatggaaaacaggaattctcaaaatga

SEQ ID NO: 22914 - DNA, 201 bp, Homo sapiens
agtggccagatacggtggctcttgcctgtaatcccagcactttgggaggccgaggcaggcagatcacgaagtcaggagatcgagaccatcctggctaacgyggtgaaaccccgtctctactaaaaaatacaaaaaattagctgggtgtggtggcaggcgcctgtagtctcagctactcaggaggctgaggcaggagaatgg

SEQ ID NO: 22915 - DNA, 201 bp, Homo sapiens
aattgcttgaacccactaggcacaggttgcagtgagccaagatcgcgccactgcattccagcctgggcgacagagtgagactccatctccaataactaaawtaattaattaattaattaaaataaaataaaatgcaaactggatttcaaagactttagtatgaataaaatatctcagttttaaaatgtgactacctgtttg

SEQ ID NO: 22916 - DNA, 201 bp, Homo sapiens
ccggcccacaatattactttctatgaactggactccattgattcatataagtgaaataatacagtgtttgccttttcgtgactggcttatttcacttagcrtaatgttctcaaagtttatccatgtgacactatgtgtcagaattcccttactttttaaggctgcataatattccaaagtatgtatacatcgcattttgtt

SEQ ID NO: 22917 - DNA, 201 bp, Homo sapiens
aggttgcagtgagccaagatcgcgccactgcattccagcctgggcgacagagtgagactccatctccaataactaaattaattaattaattaattaaaatwaaataaaatgcaaactggatttcaaagactttagtatgaataaaatatctcagttttaaaatgtgactacctgtttgcatgatattttggctatattagg

SEQ ID NO: 22918 - DNA, 201 bp, Homo sapiens
ctattagcgatgtctcttgataacttgctctgactttgtgcaagtcacttaaccagttttctcagttgtaaaaggaagaaggtaaatgatttttttttttkgaatctcatttatctccaaagctctaggttcttggattatcagtcacttgcccactatatgttcctcacagcagagtctggggactagttagaggttcgg

SEQ ID NO: 22919 - DNA, 201 bp, Homo sapiens
attaatttggaataaaagaactttcagaatcctgtgatcctaaaaactgttcacaatttaaacttcttctaaacagctttccaagaaatcttttgatttcytatcttgtggggccaaggaggttctcagggcagtaagagatcttgcggtggagcagtgtccagcagagcagtgagccagcatagctggaagccacattct

SEQ ID NO: 22920 - DNA, 201 bp, Homo sapiens
atactcctttaacctacttcctagagcagttagaattaaacacaatctccctcttgagaaactgcttcctttgctgctgtttattattattattattattdttattttttttttttgaggtggagtctcactctcttgcccaggccggagtgcagtggtgcattctcggctcactgaaatctctgcctcccaggttcaagc

SEQ ID NO: 22921 - DNA, 201 bp, Homo sapiens
agtgtgtctgagaatgggcctgcactggagggcctacaggtgctcatctgagaagccagggttgaatttgaaaaaggcaccttttgttcttcaaaactacraaaacaaggctcagctattgttgaaaaacatgccaaacccaaccacaattccctctgtcaatcagctggtcgttagtagagttcattgtcctgtgctgat

SEQ ID NO: 22922 - DNA, 201 bp, Homo sapiens
aaacacacaagtgtttccatgttacagtaactagcatttataatgtcctttataaaaattttactaagaacttaacaccaatatatttgttcttttttactttttttttttttttaagacaggatctcactctgtcacccaggttgccgtgcagtgacgtgattagggctcactgcagctgtgatctcctgggctcaagta

SEQ ID NO: 22923 - DNA, 201 bp, Homo sapiens
ttttgttttctaaaccaagagactacctcaaaataaatagtagattattgtagaattcattgttatttaggagctagaatgtactcagttgttgaactacaaaaaaaaatatgatttttatttctttatgagaattattttatggtcattagccaaaaatctaggagagagtcttacttgaagcaaaactccgattagtta

SEQ ID NO: 22924 - DNA, 201 bp, Homo sapiens
aaaccaagagactacctcaaaataaatagtagattattgtagaattcattgttatttaggagctagaatgtactcagttgttgaactacaaaaaaaaataygatttttatttctttatgagaattattttatggtcattagccaaaaatctaggagagagtcttacttgaagcaaaactccgattagttatttccattcta

SEQ ID NO: 22925 - DNA, 201 bp, Homo sapiens
aacatattgagaccctgtttctacaaaaaataaaagatgaaccaggtatggtggtgtgcacctctagtcttagctgctcaggagcttgaggtgggaggatcccttgagcctggaaggttgaggctacagtgagctgtgatcacaccactgcactccagcctaggcaacagagcaagactgcatctctctctctcttttttt

SEQ ID NO: 22926 - DNA, 201 bp, Homo sapiens
tagaggtgcgcatgcatagagcgcaactatacatgaaggttttcatttgactggagccaggttagtcaggtctgaatttaattaatgagtacctaatatcrtagcacttaagaatatttagaaaccattggaaatcatctagtctatctcgtaaaggttatcaaaagacatgttcatattgagtcgattattacattattt

SEQ ID NO: 22927 - DNA, 201 bp, Homo sapiens
taatatcatagcacttaagaatatttagaaaccattggaaatcatctagtctatctcgtaaaggttatcaaaagacatgttcatattgagtcgattattayattatttttatgtagacttatttatctgttcctgaagtgtggaatatatcctagtttcttctatacacatctctttcatgaatcaattctgactagattt

SEQ ID NO: 22928 - DNA, 201 bp, Homo sapiens
tttcctatggctgcctacaaattaccacaaacgtaatgatttaaaatagcacccacttattatctcacagtttctgtgggacaggagtctgggacgctgaratggttcctctgcttcagggtctctcaccatgctgcagtcaaggtgttagccagctctgggttcacctgagaggctcaactgaggaagagtctgcttctt

SEQ ID NO: 22929 - DNA, 201 bp, Homo sapiens
atccctctgatttccttccttaggttcaaaaaaatctctctgggcttgtggaaaagatcatagcaattctctaagaaagctaataatgggagcaaattatratctggttcacaagacatgaaacaattagggaagaaaagaatgtataataaaatactaaattatatgtgatatataatgaaggatagataggtaaagtgc

SEQ ID NO: 22930 - DNA, 201 bp, Homo sapiens
aacactgattctttgcaagggatgattatgtccaatcatctcaatgaatttagaatttaaactctaatctcccagattctaaagccgttgttgctgatttycaggcatttttaaagcagcagaaacttttttttttaatgtgatattttgcagaataccagcatgtcagtcattaagagaggcagtgctctcctcttcttt

SEQ ID NO: 22931 - DNA, 201 bp, Homo sapiens
gctactcgggaggctgaggcaggagggttggatcacttaagctcaggagtttcaggttgcagtgagcaatgatcatgccactgcactgcagcctgaatgayagagtgagactctgtctctaaaaataaataaataaataaataggtattctgttaaggcagtaggcccaggatggtctaaattctagatgtcaacaaggtt

SEQ ID NO: 22932 - DNA, 201 bp, Homo sapiens
gtgagaacatgcagtgtttggttttatgttgctgtgttagtttgctgaggatgatggtttccagcttcatcgatgtccctgcaaaggacatgaactcattmttttttatggctgcatagtattccgtggcatatatgcaccatgcctatcggggggaggagggcaaggggagggagagcattaagacaagtacctaatgcg

SEQ ID NO: 22933 - DNA, 201 bp, Homo sapiens
tctgttggccaggctggagtgcagtggcatgatctgggctcactgcagcctccacctcctgggttcaagccattctcctgcctcagcctctggagtagctsggattacaggcatgcgccaccatgcctggctaattttgtatttttagtagagacagggtttctgtctgttggtcaggctggtcttgaactcctgacctca

SEQ ID NO: 22934 - DNA, 201 bp, Homo sapiens
tatgaaaggaactttcagaaaacaagaactcttagaaataaaaaataaagtgaaataaaaatctcagaagatagaactgaagaaatatccatgaaggtggraaaaaaagacaaaaaagaaaaaggaccctaggaagcagcaggatattccataactaaattataggtctacagagaaaaaaaggagagaaaatagagaggg

SEQ ID NO: 22935 - DNA, 201 bp, Homo sapiens
gtctctgtgtagagaaggacaggctgaggcttacttgattcttcctcatcttttccctcattccccaacacagcctctacagctccaacacagttgtgctwattggaagtggggcctttaaaataaccttggtttgtagccctggcctgatcggtgatggagcatggtctaggaactggatcagcagtttggagtccaggc

SEQ ID NO: 22936 - DNA, 201 bp, Homo sapiens
aatctgataagcaccaggatggtgcaggtggaggcgggagatagacactaacatcagtggttctccaataaaagagaccagccagatcacctacaaagacractacaatgcatcagccttacctccagacacaaaactccagtcagccccacttaaatatgagcagacagccaagaagagtaatgtttgaggaaaccttat

SEQ ID NO: 22937 - DNA, 201 bp, Homo sapiens
attctgttggtggggcctagaacactgcctgctgatcaatcgttatgaagtaagtagaggaatcaatgtatagacagcgtatttgtcccctcgagacgacrttaccagtggggagccagtgagcagtgttctctcttgctttctcaggcagtactacgagatgctttacaacacagctgacgagctcctgaacctggtggt

SEQ ID NO: 22938 - DNA, 201 bp, Homo sapiens
gttctttttcctattggctggcatccaggaatataacttcagacaaaagactagaaagtcttttctgaaaaatctgataagcaccaggatggtgcaggtgkaggcgggagatagacactaacatcagtggttctccaataaaagagaccagccagatcacctacaaagacgactacaatgcatcagccttacctccagaca

SEQ ID NO: 22939 - DNA, 201 bp, Homo sapiens
agtctcactctgttgccccggctggagtgcattggcaccatttcagctcactgcaacctctgcctcctgggttcaagcgattctcacacctctgcctctcragtagctggaactacagaccatgcccagataatttttgtatttttagtacagatgggatttcaccatgttggccaggctggtctcaaacccctggggctc

SEQ ID NO: 22940 - DNA, 201 bp, Homo sapiens
tggaccagtgattgctatgtgtctggttctgtgatgccaaaatgaacactcgtttaaaaccactatagaaaattagccccctgtacacaaggatgctgacygatttgcttgcaggagagcttcattaacttaccaatctacaaagagcactttccatttctgccactatttagagtatattcacaaaagattattctctcc

SEQ ID NO: 22941 - DNA, 201 bp, Homo sapiens
actgggcctgtgaagactgggcctatgtttcctgctgcttttgatacaggatcagaaaatgtttggaccccccaactgttctctgatttattaacactggytcagaattatggaagtttgaagttggctggaagctatgagatgattcactgagaaccttatttgacagctgaagagactgacatagtcaaagacttctac

SEQ ID NO: 22942 - DNA, 201 bp, Homo sapiens
gatgtctccactccattttcccagtgcacatgcaggcccctggtccgttgtgggcatgctcaggcaagaccttgtgcaggttcctttctctgcctcctgtrtctatcaatttcaccactcttccacccaagcttcactatattttttttctattttttaaattaattagtatttttattttagaggtagggtctcaccttg

SEQ ID NO: 22943 - DNA, 201 bp, Homo sapiens
aatgcctatgattaagagatgcttaaagttaggaggacaggaagtaactaaatccaaacctggaggagtgaaaggctccaaaggtgattatgctattaacyagtaatttctgtttccaaaagtgacatttcaaagtaaaagacaattgtgattaacatttttattttatactttttgttttaataattatagtacttataa

SEQ ID NO: 22944 - DNA, 201 bp, Homo sapiens
tggatattgaatattctttcagtatgtctacagtacctttcattgtaattcttgaatattaaaagatactttttaaatctctacactgtcctgagcacacwtatatatatagatacacacacatacatatacgtacatacaaacacacacactcattgccttcactttagctagttgattattagaatatattctgtacag

SEQ ID NO: 22945 - DNA, 201 bp, Homo sapiens
tattctttcagtatgtctacagtacctttcattgtaattcttgaatattaaaagatactttttaaatctctacactgtcctgagcacacatatatatatasatacacacacatacatatacgtacatacaaacacacacactcattgccttcactttagctagttgattattagaatatattctgtacagtcacatttgtt

SEQ ID NO: 22946 - DNA, 201 bp, Homo sapiens
gaagtctgggcatgttaggataatatgacatggaactaattatgtaagggtacattctgggtcatttgaaatttgcgtatgtattgcaaaggtcacaatcmactcaaataaataataataagagctaaaatgattgagccctagtgatgagctcagctatgttatcaacactttgcatgtagtatctaatttagtattcct

SEQ ID NO: 22947 - DNA, 201 bp, Homo sapiens
aaactcagaactgaagcaggaacttttcattcaaacttgaataaatctaaaggaaaaggatgttatatcttcaaaaaattaaaaaccaaaacaaaataagaaaaaaaacacaacacctatagtatccttagcactacagattctgtatttgttttgaattgaacattttctgaaaaacatcatgattcattagtatgaaaa

SEQ ID NO: 22948 - DNA, 201 bp, Homo sapiens
aactcagaactgaagcaggaacttttcattcaaacttgaataaatctaaaggaaaaggatgttatatcttcaaaaaattaaaaaccaaaacaaaataagaaaaaaaacacaacacctatagtatccttagcactacagattctgtatttgttttgaattgaacattttctgaaaaacatcatgattcattagtatgaaaaa

SEQ ID NO: 22949 - DNA, 201 bp, Homo sapiens
actcagaactgaagcaggaacttttcattcaaacttgaataaatctaaaggaaaaggatgttatatcttcaaaaaattaaaaaccaaaacaaaataagaaaaaaaacacaacacctatagtatccttagcactacagattctgtatttgttttgaattgaacattttctgaaaaacatcatgattcattagtatgaaaaat

SEQ ID NO: 22950 - DNA, 201 bp, Homo sapiens
ctcagaactgaagcaggaacttttcattcaaacttgaataaatctaaaggaaaaggatgttatatcttcaaaaaattaaaaaccaaaacaaaataagaaaaaaaacacaacacctatagtatccttagcactacagattctgtatttgttttgaattgaacattttctgaaaaacatcatgattcattagtatgaaaaatt

SEQ ID NO: 22951 - DNA, 201 bp, Homo sapiens
aactgaagcaggaacttttcattcaaacttgaataaatctaaaggaaaaggatgttatatcttcaaaaaattaaaaaccaaaacaaaataagaaaaaaaacacaacacctatagtatccttagcactacagattctgtatttgttttgaattgaacattttctgaaaaacatcatgattcattagtatgaaaaattatcac

SEQ ID NO: 22952 - DNA, 201 bp, Homo sapiens
cagtttgttgttgttattgttcttaaagaaatataagctatttaattgtctttagcataatgtagagattatagtgctttatttactaaacacagcaatattttttttttaaaaaaaaacaaccaaacctcagttccataaaagccacttagcagagggaaggagtaaagagtggagtttcccccttgcccagtggcaaag

SEQ ID NO: 22953 - DNA, 201 bp, Homo sapiens
tgtgctctctcccttccctgagagggtcatatagagcacagtcttccccaacagacaaaaatgcagcatttgcgagagattcagtgcctaagataagggasttgtcacctggtcacgtcagcaactctctcactagcataaaccaaaatttcagacttccagaaggaaatcaggtatttggcataaaccatgttatttgca

SEQ ID NO: 22954 - DNA, 201 bp, Homo sapiens
agtaaattaattcttggaagagagaatactttttgatcttttaatgacttcagcagtttttttccactgcaacttgggctttccctggcagccagaacccwtcctttagttggaaggctcatttgtctcagcgtgtttttgtctggagacagacagtgaggagacaaggctatagctatcatagtaacggggtgttatagt

SEQ ID NO: 22955 - DNA, 201 bp, Homo sapiens
aacgctacccctggcaaccatacatctactttctgtctctgtgggtttgcctcttctggatagatcatagaagtgaaattacacaatatttagtcttttgyggctagcttgtttcaattagcataatattttcaagatttataaaattagcacttgtcttaataacagggtatgagacagttaaaaatatactcaggtaca

SEQ ID NO: 22956 - DNA, 201 bp, Homo sapiens
cttaacccagccactattgccagatcagttagcactacgattccttttcctcagcaatgcttcatattatgacttagatcataaaccagagcaccaggtaraaatcacagccaatctgagtgtgctgcatggggcctcgtgatacttcctgttaatttagatgttgacagggccagtatcagtaatgaaattagttcaggg

SEQ ID NO: 22957 - DNA, 201 bp, Homo sapiens
tttttctctttttttgctttccatttgcttggtaaatattcctccatccctctattttgagcctatgtgtgtctttgcatgtgagatgggtctcctgaatwcagcacaccaatgggtcttgactctatccaatttgccagtctgtgtcttttaaatggggcatttagcccagttacatttaaagttaacattgttatgtgt

SEQ ID NO: 22958 - DNA, 201 bp, Homo sapiens
ggtatatctcccaatgctatccctccccccttcccccaccccacaacagtccccagagtgtgatgttccccttcctgtgtacgtgtgatctcattgttcarttcccacctatgagtgagaatatgtggtatttggttttttgttcttgcgatagtttactgagaatgatgatttccaatttcatccatgtccctacaaagg

SEQ ID NO: 22959 - DNA, 201 bp, Homo sapiens
atgcatcccagtaatatactcagaaggcctaggaaacaagaatagtgaaaatagctattagctcaaattcattaggggttaattagccatgttgcagtctmcttaattttctactttccacactgaattagtcatgtgtattacttaacccagccactattgccagatcagttagcactacgattccttttcctcagcaat

SEQ ID NO: 22960 - DNA, 201 bp, Homo sapiens
ctgtctggattgatttagagctgcttctttgtgctctacaaaaaataatttttaaactcaaatgcatcttcatgcagatacctaaatacaatcatttctcrctcaaagatgggggtatcttttgagaaatgcatcattaggtgatttcatcattttatgcacatcatagagtgtacttccacaaacatggatggtatagcc

SEQ ID NO: 22961 - DNA, 201 bp, Homo sapiens
agaaatgcatcccagtaatatactcagaaggcctaggaaacaagaatagtgaaaatagctattagctcaaattcattaggggttaattagccatgttgcartctacttaattttctactttccacactgaattagtcatgtgtattacttaacccagccactattgccagatcagttagcactacgattccttttcctcag

SEQ ID NO: 22962 - DNA, 201 bp, Homo sapiens
cattggcagagtcaaggagtatagttgacttctgtgtcgcttcagcattgactttcttctttggaacacaaagagactcatggaggggttgttagacgaaygccacccctccctaccatatagttgcttctgtcctctttctttttttcttctctgcttttgtttttgtatttttctttttccttttcatgtccagtaact

SEQ ID NO: 22963 - DNA, 201 bp, Homo sapiens
cataataaatatatgagaatgtgcacatatcaaagtcacaactgtgccaatttttacactgttcacttttgtaaacaatactcagatcaagaaacagaacwttagcaataagaacatagcaacaaagtgccttctcgtcctccttctttctagttactgcctgcctcttcaaaagttacccttgctgacttgtaactacta

SEQ ID NO: 22964 - DNA, 201 bp, Homo sapiens
tctgctgacctcgtgatccgcctgcctcggtctcccaaagtgctgggattacaggtgtgagccaccatgcccggccccatttcagttctgttttatgtatrtgtttgtaactttaacaatataataataatggtgtggattcagtttttttttttaaactggatttgagtagtttatgactcctgtttattaaatcaaaat

SEQ ID NO: 22965 - DNA, 201 bp, Homo sapiens
tgctgggaaggtaggcacagggattttctttgttagtgagttactgggtgaaaatatacagtggtgtatacaaaatatacaatgactgtaatgaaagtgtrgtagtgtttgtgaataaagaatttaagtgtcaataggtatcaaagaaaggaggcaattatttggatggtcatacttgtgcttagaggttctttactgcac

SEQ ID NO: 22966 - DNA, 201 bp, Homo sapiens
atacatccattggaatattattcttccataaaaggaaatgaagtactgattcctgctacaccactgatgaaccttgaaaacattatgcttagtgaaaaaaraatgaaatgtaattagaagtagggttccccagctcacacacatgagaatctctgagctagatatactcaaatagccactaaaacatatttaatagattca

SEQ ID NO: 22967 - DNA, 201 bp, Homo sapiens
atcacttcccctggagtgggtaaaaggtggagagaggtcagagattacattagttgaacttcattatagtggcaagaaacataagtgggggtagagtgttyttcccaacatccaaagtgatacatcttttcacattctaaactctctgaaattaggatgtatctgaaatcagtggctgcctactggaaaccagtcatggtg

SEQ ID NO: 22968 - DNA, 201 bp, Homo sapiens
ctagagtggacagtgtggttgggtagaaatgggcaggaaaggagaaatttcttgtattaggtaaaagagtgctttcataggtcttggtaagaaggagtacrtgatcaaagtggtgttttatgatctcactggccccactgtgctaaatagcacagactagacactaggaactctggtggcttctgaagcccttcaggtttc

SEQ ID NO: 22969 - DNA, 201 bp, Homo sapiens
gcttcagcagaaccatttgaaacatctaaacagttgagaaatgcatcccagtaatatactcagaaggcctaggaaacaagaatagtgaaaatagctattarctcaaattcattaggggttaattagccatgttgcagtctacttaattttctactttccacactgaattagtcatgtgtattacttaacccagccactatt

SEQ ID NO: 22970 - DNA, 201 bp, Homo sapiens
ggcaggctgtgcttggcttggcttggcttgtgctaccggcctggatcccatgcctgtcaagggcaagtggagcagcaagaggggtgtgagcaagtgagcaygggctccagccactgctcacagccagatacactggctgcagtgggatggacaactccagggaccagcataggcaccagctgtctgtgaggctgcagctaa

SEQ ID NO: 22971 - DNA, 201 bp, Homo sapiens
cagcagtcagcacagagatgcacatagatatacctcatttgattccttgggtctatcatataaaataaaccatttgctcagaagaattatctgttcctggraatgggatagcttctagagattctcttgaagataatactttgtaatgtaatgcgtatatttttaacaatgaagtaaatgcagtacaacagagtaaataaa

SEQ ID NO: 22972 - DNA, 201 bp, Homo sapiens
ctactttctttaattcaatgcttggggactgctgaattagaataacagaagacagattaacaggataaaagttacacagtttttattaatatttacatacrtgggagttcacagaagagaaaatcaaaaaagtagtctcagggtcttgtatcattcaaacataggacagggcggattgggcttcaaggggtcataaattgt

SEQ ID NO: 22973 - DNA, 201 bp, Homo sapiens
ctggttaactaattttaaaagcgaaaaaattccattttctccatcctttaatgtcatagctgtcctgccaatgacctgatactgagatatattaggttccyctgacatatgttacaggaagtagtgacctgaccttttaaaaattttattaacatttataaatttgttttagtgtattatgttggaagcagtgatttttct

SEQ ID NO: 22974 - DNA, 201 bp, Homo sapiens
cctgtgacctcatggagctcacatctggatgggaaaacagtgctattggtttcaccactaaaattttccgtaatatttctttgttaccattttaagatcgrtaggatattttattatctaatcttttttccacttcacatcttttatttccccgtttttctgtgatgtttccatactgattgtaaatgactccacaagtgt

SEQ ID NO: 22975 - DNA, 201 bp, Homo sapiens
aggtgagaaaaactctcccctagccacattatactctacgaagtcttttatatgctgataaagttctcgtaagctcccttttgttagtatctttttaagamgtctttcttatttataatattgccaggttattaagttgtacttaattgtctttcatttttttctcttttcaggtgtcagcagttgagtctttggagggcc

SEQ ID NO: 22976 - DNA, 201 bp, Homo sapiens
tcactgtagttttcgtaccacttagaatggttcctgacatacagtaggccctcaattaatgtttgttgaatgaatgaatgaagtttcagagcctaaaataragtggttgagtcagggtatgtcagtgtatgttggtctgcgagtacgatttttctactgatctccaaactacagtctcaagacaacagttttccacctctg

SEQ ID NO: 22977 - DNA, 201 bp, Homo sapiens
agcatcagcacaatacatgagtaatgcattgtgctgtgaccttagcatggctatgatatcactaggagataggagtttctcagttccattggaatcgtatyggaccaccatggtatatataagcaatccatccttgaccgaaacgtcatcctgtggtgcgtgactgtaataggatatattgcctcaccacagtatttgtag

SEQ ID NO: 22978 - DNA, 201 bp, Homo sapiens
tcctcttaactttctgattctttcataatgacatttagcttaaaacacaaacacattgtacggtggtacaaaaatattttcttttttatatccttatagaygtttttctgttttggaaattttttatttttttactttttaaaatttttgttaaaaactaagatacaaacccacacattagcgtaggcttacacagggtca

SEQ ID NO: 22979 - DNA, 201 bp, Homo sapiens
ttaatgtattacagttcttgacagctacttgttaagtctttataaatgctgctttgctagatagttgtttcaaggcttggtaatactcccactggttttaytcacttacttggtttctaccttcattcagaattttaacttactagtgattaaaaccggaaaaagtttgttccctgatgtagtttatcattcattctttct

SEQ ID NO: 22980 - DNA, 201 bp, Homo sapiens
tcgatgagcattcttcaaagtccatttctgtaaaataccacattgtaaatacatgagaaagtattcaataatgtcaagaagaaaaaaaaactaacactaayaagtttctagggtatcactctttagtgaaggaatatggaagtatgttacttaattggactctgtaaattcagaatctctaaattttaaaaatcttttaaa

SEQ ID NO: 22981 - DNA, 201 bp, Homo sapiens
gccattgtaataattaatggtaagagatggtaacagtggaggggagaagtggtcacattctggatgaagtgtgaagatttgccagtgggtttaatgtgcakgtaagaaaaagaggagtcaagcatatcgcaaaggtttttcacttaagtaacagcacaatggaaatgtaatttcagaagaccataggaagactacaggaag

SEQ ID NO: 22982 - DNA, 201 bp, Homo sapiens
ccctgcaaattagaggctaaaaatctttgttttacatctggagaacaaatggatgttcctgcttcattctcagacaagcaagtgattgatagctttgataycagattctgaaatgaaataaattttgtctcaatttgagagaaaatagtgataatacaggtcctttctgccaaccaactcaggcatatgggccttttattt

SEQ ID NO: 22983 - DNA, 201 bp, Homo sapiens
ttcatcattatgcaaacactagatgttataacctactacacgcctaggctgtatggtatagcccattgctcctaggctacaaacctcaacagcaggttacygttctgaacattataggcagttgcaacacaatggtaagtacttgtgtgtttaaacatctaaatatagaaaaggcagagcaaaaataccatacaaaatgta

SEQ ID NO: 22984 - DNA, 201 bp, Homo sapiens
tattaatttattcagtcatttttcaggagttaattgaacatcttgtctcttgttccagacatttggcacgtgttgccccaagcccaattcctttatgtggraaaagggtctgccaaagaaggctaatttacctccttgtgaatgaaggactccagaatgtgaatgatggattgggatccattgtcagtgtggacacgagtc

SEQ ID NO: 22985 - DNA, 201 bp, Homo sapiens
catctactcaggaggctgaggcaggagaatcgcttgaacctgggaggcagaggttgcagtgaggactcagtctggaaagaaagagagagaagaaggaggargaggaggaagaggaggaggaagaggaggagaaggagagagaaagaaggaggggaaggagggagggagggagaaatcactgctctgaactcttagcttcca

SEQ ID NO: 22986 - DNA, 201 bp, Homo sapiens
ggattcagaccgtatcagcaagatcgcttcttttcttcctccaactcctgcttctatttgcatctgcttgtctttataactacatagcctgtctccccacsatggcaaagtagtagcccagacttatactcatagctggaaatcttagggaaagggaaatctctcttccagaatccacggaaggactcttgatgggctctg

SEQ ID NO: 22987 - DNA, 201 bp, Homo sapiens
aggagttcacaagccaactttctagtagagctctgggcataatttttcatgttgctttaataaaatgttatctttttgccatagattatggtcaagtgaartgtacagtgtgctgttacctgaaactactttttacctcactcattctaagttttacctcagcagctaatcttgccatagacttactcaacttagatattt

SEQ ID NO: 22988 - DNA, 201 bp, Homo sapiens
tcattagagaaaggcttcttggctgaataggccagagatgttactcaatattacatttcttaaacctttgtgttttatgtggcaaagttaaaaaaaaaaamaaaaaaaacctactctcgatttctcttgttttacatattatagtaggttcaaattaaagatctgaccagtcaaagaaatagagacaatctgtttcatgga

SEQ ID NO: 22989 - DNA, 201 bp, Homo sapiens
gatgatgatgatgatgatgatgatgatgatgacatattccaagtataatatgagtaattataattactgttatataatgatctcagcacatgacatgaackttagtaaatgctttacctacattggttcactgaatgtccctgaaactctatatttagctattgctgcaaaaagatgagaaaactaaagcttaacgaagtt

SEQ ID NO: 22990 - DNA, 201 bp, Homo sapiens
taaactgtgtacataaagtatatgcagtataaagtttttgaaatgttatttataatcgataaattttactgatattgtaggaaatgatatgatgattgctyccatgttataatctcaaaaactgcctttgaggtggacttcttttgagctagtaaaagttgaagtagggttggattaagcagttttgattccttttcttct

SEQ ID NO: 22991 - DNA, 201 bp, Homo sapiens
atcgtgcttaaagcatttgctcaccacacgtacaggagagtaaaacagatctagacgctggctactgcttttgcatgacctataaaggtcttataaggctytgaacagtaattcaaaatgtaaacgtgtaggtactcaaaaacataaatgtcacatctgctttagctcttcatctccattgctgtgctgtagttttccaat

SEQ ID NO: 22992 - DNA, 201 bp, Homo sapiens
cattacataagtttttcatctttttcgttaattcctgattattctttttaatgtaaactgaattatttttataatttccttttgagattgttcactgttartgtatagaaatgcaatggacttgatcatagtgtatagtcctataagtatgctgctgaattcagtttgttagtgttttgttgaggatttttacatctgtgt

SEQ ID NO: 22993 - DNA, 201 bp, Homo sapiens
ttcctgctaaattttaagctcattgaaagtaagaaccatgtgattagcttattattattatgtaccctgtacctagtgctgttcttggacataatagtgaraggtgacaacgtgctagcagccctcggtcgctctctgtgcctcctcagccttggcatccgctctgggccctctttggggctggcagaggctgaagccggc

SEQ ID NO: 22994 - DNA, 201 bp, Homo sapiens
tcagccctgctctagagaatggcgtgaacccgggaggcggagcttgcagtgagcagagattgcaccactgcactccagcctggacgacagagcgaaactcsgtctcaaaaaaaaaaaaaaagaagaagaattcagccctgctccagtagaacctgcattggaggagggggaagcagatacttgtttatgtactaaatgctt

SEQ ID NO: 22995 - DNA, 201 bp, Homo sapiens
ctaacccctccccagggccccagcaattccccctccaccttttttttctggggttagctatagagagaggagccccgcctcagtcttttctttaggggcarcaccttctattacagtctcgggaccccaaagcacgctatttgggtttggtagagaaaaccaggtgtaaaggtgtgtttattgattcctaaaatgcttgtt

SEQ ID NO: 22996 - DNA, 201 bp, Homo sapiens
cccagcaattccccctccaccttttttttctggggttagctatagagagaggagccccgcctcagtcttttctttaggggcagcaccttctattacagtcycgggaccccaaagcacgctatttgggtttggtagagaaaaccaggtgtaaaggtgtgtttattgattcctaaaatgcttgtttattgtttgcctgtagca

SEQ ID NO: 22997 - DNA, 201 bp, Homo sapiens
aacatgttgaacaattataacaatatgctgttaataatttcacagatttgttcttaccttagatcttagtaacctcagcatatgattttattttctttccrtaagttaagaacttttaccttttcacttagcagaaaagccgggtagatactatactttttaaaaattaagagagaggcaggcacggtggctcatgcctgt

SEQ ID NO: 22998 - DNA, 201 bp, Homo sapiens
cttggataatttttggactatatttttaaaaatggaatgtagttttaggctatattattagaaagatagtgttcatgttgtgggatataaaacctctttcygtttggaagtatgttgtattcacttctcagcacatctgagaggcaggttagtgaagccattaagagccatatggcccaggtttgaggtcagactctgctc

SEQ ID NO: 22999 - DNA, 201 bp, Homo sapiens
atggttttagacagggtagtccctgcacaagctctattctcttgtctgctgccacgtgagatgtgcctttcaccttctgccatgattatgaggcctccccmgccatgtggaattgtaagtccagtaaacctctttcttttgtaaattgcccagtcttgggtatgtttttatcggcagcatgaaaatggattaatacaggta

SEQ ID NO: 23000 - DNA, 201 bp, Homo sapiens
tggttttagacagggtagtccctgcacaagctctattctcttgtctgctgccacgtgagatgtgcctttcaccttctgccatgattatgaggcctccccasccatgtggaattgtaagtccagtaaacctctttcttttgtaaattgcccagtcttgggtatgtttttatcggcagcatgaaaatggattaatacaggtac

SEQ ID NO: 23001 - DNA, 201 bp, Homo sapiens
gcattcttcaaccacgaagcaactttaccaactctgttaaaattgccacttttaacatggggaaaaacaagataatatttattaacatcaaaatataacargctggtaaatatctttactatagatctaaatgcacaaaatatagggctgcaaaataaaagacctagaaaatataattttttcttttttcaaaattaagca

SEQ ID NO: 23002 - DNA, 201 bp, Homo sapiens
ttgcagcttggagaggagccatggtagtggctaatggtccttaacaaagtgattcaaaatgccacttttcaggagttctgcaggtgtctggaaaggctggytgggaaagatcacagaaggcatcctcggctgatttctcccctcccctgtgtcttatccttggttctgccattatttctcactgcagtgtggaatgagaca

SEQ ID NO: 23003 - DNA, 201 bp, Homo sapiens
tttttcttttttaagagatgggatcttgccctgttgcccaggcttgtctcaaactcttggactcaactgatccaggcaccttgtcctcccaaagtgctgcrattacaggagtaatccaccatgcccaggcagctattatctttattacctaaatagatttacttgattttatgacttttatattatcatttaccaaagttg

SEQ ID NO: 23004 - DNA, 201 bp, Homo sapiens
atcggtataatgggagaaatgattgtaatgctttgagcacaggaataacatgatgtggctaacatcttttttttactattattatactttaagttttaggktacatgtgcacaacgtgcaggtttgttacatatgtatacatgtgccatgttggtgtgctgcacccattaactcgtcatttagcattaggtatatatccta

SEQ ID NO: 23005 - DNA, 201 bp, Homo sapiens
agaaatgattgtaatgctttgagcacaggaataacatgatgtggctaacatcttttttttactattattatactttaagttttagggtacatgtgcacaaygtgcaggtttgttacatatgtatacatgtgccatgttggtgtgctgcacccattaactcgtcatttagcattaggtatatatcctaatgctatccctccc

SEQ ID NO: 23006 - DNA, 201 bp, Homo sapiens
tacagtgttgtctcctttatttttttcttaggattctttttgcttttcttttttacaacagcctactgtgtcgcatcactgaatctagtttatagtttttygtttctctacattccatcattttagaaacaaaagccacatctctttgaagaagtacttttgactttttctcccaattttagcacttgtccgtaacaacta

SEQ ID NO: 23007 - DNA, 201 bp, Homo sapiens
taaaaatgttttagtttgaatttatatttctcttgtgagattgcacgttttcatatattgaagaactttttatatttccttttctgcaacctgtctcctcrtattattttgaataattttcagttgcctcttttttcccccttactgatttctaggatttttttttttaatctgggaatacagcaatttgagatatgagct

SEQ ID NO: 23008 - DNA, 201 bp, Homo sapiens
cgaactgctggcctcaagtgatccaccctcctcagcctcccaaagtggtgggaccacagctgtgagccaccgtgcccagctagagtgaaaattctaatctrttgtttattcaagtgaggaagaccagatgaagtcattcaaaataatttcgtacataccgaaggttactgtttgcaaagatggtcctaattatgacagtat

SEQ ID NO: 23009 - DNA, 201 bp, Homo sapiens
agtgtgaatcccagatcccaggccccaatccaaaccgactcttattattttcctatggctgcctacaaattaccacaaacgtaatgatttaaaatagcacmcacttattatctcacagtttctgtgggacaggagtctgggacgctgagatggttcctctgcttcagggtctctcaccatgctgcagtcaaggtgttagcc

SEQ ID NO: 23010 - DNA, 201 bp, Homo sapiens
ttgttattgttcttaaagaaatataagctatttaattgtctttagcataatgtagagattatagtgctttatttactaaacacagcaatattttttttttwaaaaaaaacaaccaaacctcagttccataaaagccacttagcagagggaaggagtaaagagtggagtttcccccttgcccagtggcaaagggaagccata

SEQ ID NO: 23011 - DNA, 201 bp, Homo sapiens
ataatgacatttagcttaaaacacaaacacattgtacggtggtacaaaaatattttcttttttatatccttatagatgtttttctgttttggaaatttttwatttttttactttttaaaatttttgttaaaaactaagatacaaacccacacattagcgtaggcttacacagggtcagtgtcatcaatatcactatcttcc

SEQ ID NO: 23012 - DNA, 201 bp, Homo sapiens
aatgtgttcaacttataataagtgattattggttattttactcctatcacctggtaatctattttgaagttcaggaattctttttggaaagttactgttayaattatgcactgtatcatgcatgttatacagtgactcctggcagaaaaactgcatacctacagaagtcctagcgcctaaagaaaaaacatgaacctaatt

SEQ ID NO: 23013 - DNA, 201 bp, Homo sapiens
gagggagttccccgactccttgcgcttcctggttgagatgatgtcccaccctgcttctgctcaccctccgtgggctgcatccagtgtctaaccggtcccartgagatgagctggttacctcagttggaaatgcagaaatcacccaccttctgcgttgatctcgctgggagctaccaacccgagctgttcctattcagccat

SEQ ID NO: 23014 - DNA, 201 bp, Homo sapiens
agaaatcagtggagcataatagaaaatcaaaaccagaccaacctctggctatcaacactgccattgcagggctatgggggaagggtagtccttccatactrgtgctggatcacctagatatccaaatgaattttaaaaatttggaaagataaaataggagaatatctttatgacttgcaattaggcaaagatacaatggaa

SEQ ID NO: 23015 - DNA, 201 bp, Homo sapiens
taatttatgtatgtaatgtgatacttagcatttattgtttgttatacccagacattgttctaggtgctttacatgtattaatggtattgataatattttayttctattgtgtaatcaatttgattaatttagttctaatatccatcttattggaacatcgttttttgtttttttttttcttttgagacaggagtctcgctc

SEQ ID NO: 23016 - DNA, 201 bp, Homo sapiens
acgccattctcctgcctcagcctcccaagtagctgggactaccggtgcccaccaccacgcccggctaatttttttatttttagtagagacggggtttcacmgtgttagccaggatggtctcgatatcctgacctaatgatccacctgcctcggcctcccaaagtgctgggattacaggcatgagccaccacacccggccta

SEQ ID NO: 23017 - DNA, 201 bp, Homo sapiens
ttgtatcagtctcacttggggtggggtgtgtgtgtgtgtaccttttagatcttggtattttcagggacaaacacaaagtctagtccagaaggcattttgtwaatgtctgagtatgaacaaattggattctggggctattattttactgaggtctgaaatgctgacaaatgcatttgttaatcgatgaagcagatttgagaa

SEQ ID NO: 23018 - DNA, 201 bp, Homo sapiens
ctgcactatgtgaatcagtagtcatccttctgtagctagcaggggtttagaactaatgaaagtattatttagtatctaatctcataccctgtcaatgtgcrtatattttcacagccaaatcttcctctcactgacatttctagtgactctgacgttttatttttggtattgtagcttatcttttgttgtttttgttctctg

SEQ ID NO: 23019 - DNA, 201 bp, Homo sapiens
tgatacaatctcagctcactgcaacttccacctcctgggttcaagcaattctcttgcctcagcctcctgagtagctgggactacaggcgcacgccaccacrcctggctaatttttgtatttttagtagagacggagttttgccatgttgggcaggctggtcttgaactcctgacctcccaaaatgctgggattatgggcat

SEQ ID NO: 23020 - DNA, 201 bp, Homo sapiens
tgcagtggtgcgatctcggcccactgcaacctcctccttctgggctcatgcgattctcctgcctcagcctcccaagtagctgggattacaggcgtgcaccmccacacccagctaatttttgtagaaacagggtttcactatgtcagctgggctggtctcaaactcctgacctcaggtaattgtccgccttggcctcccaaa

SEQ ID NO: 23021 - DNA, 201 bp, Homo sapiens
atgttcatgagagaactttaagaaacaggatataaagtgacatgatcacagctattaaaacaagcatttaaacatttttgaaaagactggaataaaatagracaaaatattaattatggtttattttagaactattgcctcctgttactctttttttttttttttttttcctgtttgggttacttatcacaatccacagtt

SEQ ID NO: 23022 - DNA, 201 bp, Homo sapiens
ttttccataatttttaattttttaaaattaaaagcattgcgatataattcacatataagtcaccattttaaagaatataactcaataggttttagtatatycacagggttttgcaactatcaccactgtctaattccagaacatgttcgtcactccaggaagaaaactggcctttagcaatcactcaccattagcagtcac

SEQ ID NO: 23023 - DNA, 201 bp, Homo sapiens
aggatgtggagattttattgagtgatggaagtggctgtcagcgggatggggagctggaaaggagatggagtggaaagaggatcttccctcatctccaaccrtccccagctgaactcctttcgacattcagttgcttcttctcttttctccttctctgctgcaatgctctgttcctctgccaatggagtttggggtttttgt

SEQ ID NO: 23024 - DNA, 201 bp, Homo sapiens
ggggttgtttgtttttttcttgtaaatttgtttgagttcattgtagattctggatattagccctttgtcagatgagtaggtggtgaaaattttctcccatkctgtaggttgcctgttcactctgatggtagtttcttttgctgtgcagaagctctttagtttaattagatcccatttgtcaattttggcttttgttgccat

SEQ ID NO: 23025 - DNA, 201 bp, Homo sapiens
atagttgctggtcagtgaatgcgtattgatgatgttcttttccctacttaaaacaaaaatcttgccagaaatgttgaccctacattttttccaacataccyttctctatcaacttagtctatttaaaatataatgaaaagctgagaaacaggctaaagaccaacagaaaataagtgctaacaaatccttcatttaccagtt

SEQ ID NO: 23026 - DNA, 201 bp, Homo sapiens
aggcagacctggactttgcaaggtaggagggaaaactgggtttagtttcttatgccaaagctaagacctcgttgcctgtgaagtcatttttaaaaatagaytcttggtgcagaaaaagcttagtttaaaaaaagaaagaagcacagatagatgtttttaggtcctatagagaaaataattccacagaattctattgaattt

SEQ ID NO: 23027 - DNA, 201 bp, Homo sapiens
gttataaagagatgtgttctgttggggtatatctctcaaagactttagccaaaaagtgtaagtgattgaagggttagctggcagttaaccccatggcactrtgagtttggtggcatctgtaatattctgcagctttcagctgcagtgcctacctgagaattcacttttctgttattacaccgagtttcctctgtgctcttg

SEQ ID NO: 23028 - DNA, 201 bp, Homo sapiens
gcctctgattagaggcaatttttaggaaggacgtgtccataaatgcctccaaggggcaggcaaggaagggtgtgagagacaggaagtgccatctaaagacrttacccttcacaatttggaaaaaatgtgatggcacccaaataatttttcatggtgaatttcacccagaggatccctgttaggactccacattatgttccc

SEQ ID NO: 23029 - DNA, 201 bp, Homo sapiens
ttcaggtcagcgtactttgtgtgtgtataagccagtcactttgtctagaggattgctgagctgcaaccactgatagctgccttgaccctgaagtatctgtwctttacacgaatgaagaatgaagctcgtggtcagcatgaccattgcttctcagaaatgtaaattttctcactcttgtgaatatcatacttacacctcatg

SEQ ID NO: 23030 - DNA, 201 bp, Homo sapiens
taagttttagggtacatgtgcacaacgtgcaggtttgttacatatgtatacatgtgccatgttggtgtgctgcacccattaactcgtcatttagcattagktatatatcctaatgctatccctccccactccccccaccccacaacagtccccagtgtgtgatgttccccttcctgtgtccatgtgttctcattgttcaat

SEQ ID NO: 23031 - DNA, 201 bp, Homo sapiens
ttagggtacatgtgcacaacgtgcaggtttgttacatatgtatacatgtgccatgttggtgtgctgcacccattaactcgtcatttagcattaggtatatmtcctaatgctatccctccccactccccccaccccacaacagtccccagtgtgtgatgttccccttcctgtgtccatgtgttctcattgttcaattcccac

SEQ ID NO: 23032 - DNA, 201 bp, Homo sapiens
acatgtgccatgttggtgtgctgcacccattaactcgtcatttagcattaggtatatatcctaatgctatccctccccactccccccaccccacaacagtscccagtgtgtgatgttccccttcctgtgtccatgtgttctcattgttcaattcccacctatgagtgagaacatgtggtgtttggttttttgtccttgcga

SEQ ID NO: 23033 - DNA, 201 bp, Homo sapiens
tgatgttccccttcctgtgtccatgtgttctcattgttcaattcccacctatgagtgagaacatgtggtgtttggttttttgtccttgcgatagtttgctragaatgatggtttccagcttcatccatgtccctacaaaggacatgaactcatcattttttatggctgcatagtattccctggtatagatgtgccacattt

SEQ ID NO: 23034 - DNA, 201 bp, Homo sapiens
tatgagtgagaacatgtggtgtttggttttttgtccttgcgatagtttgctgagaatgatggtttccagcttcatccatgtccctacaaaggacatgaacycatcattttttatggctgcatagtattccctggtatagatgtgccacattttcttaatccagactatcattgttgggcatttgggttggttccaagtctt

SEQ ID NO: 23035 - DNA, 201 bp, Homo sapiens
ttgtccttgcgatagtttgctgagaatgatggtttccagcttcatccatgtccctacaaaggacatgaactcatcattttttatggctgcatagtattccmtggtatagatgtgccacattttcttaatccagactatcattgttgggcatttgggttggttccaagtctttgctattgtgaatagtgccgcaataaacat

SEQ ID NO: 23036 - DNA, 201 bp, Homo sapiens
tcatgcctctctgcagtctcaacctcctgggctccagtaatcctactgactcagcctcttgaatagttgggactacaggcatgtgccactatacccggctrattttttaatttatggtggagacagtgtctccctgtgttgccaaggttggtcttgaactcctgagctccagcagccctccaccttggcctcccaaagtac

SEQ ID NO: 23037 - DNA, 201 bp, Homo sapiens
ggattgcaggaaggagtagaaataattggaatcatcttcatcagatttacaaagaggtctatgaccccccaaattaataatcagtctattatatatatatrtgtatatttttttttgagacggagtcttgctctgtcgcccaggctggagtgcagtggcacgatctcggctcactgcaagctctgcctcccaggttcatgc

SEQ ID NO: 23038 - DNA, 201 bp, Homo sapiens
caggaaggagtagaaataattggaatcatcttcatcagatttacaaagaggtctatgaccccccaaattaataatcagtctattatatatatatatgtatwtttttttttgagacggagtcttgctctgtcgcccaggctggagtgcagtggcacgatctcggctcactgcaagctctgcctcccaggttcatgccattct

SEQ ID NO: 23039 - DNA, 201 bp, Homo sapiens
aggtgtggcaggcagtattccagctatataattgaattttcctgctgattgataccttaatttatctgtactttaaaagtaattcctccactttgttctaraaatatttaaatatttagacaatgtattatatttttcctgtcatttaaagttgaagttttttttactctgtagcagtaccataaacctgtgtcttttttt

SEQ ID NO: 23040 - DNA, 201 bp, Homo sapiens
catattgaaagaagagttcaaaaataccaacattgaatatcaaactatttgaaattatgtgctatattggttttatttttcaattttgtatggattaactygcaataacagataaacacaagtatggtgcactttggtaattttttggtgaatgctgtggaagacaggcctttagtaaggttaaatattctactttcctct

SEQ ID NO: 23041 - DNA, 201 bp, Homo sapiens
tttttgtatttttagtagagacagggtttcaccatattggccaggctagtctcgaaccttgtgatccgcccacctcggcctcccttatagtgttgtatgaragttctagttgccccatatctcaccagcacttatttttttattttagccagcccagtaggtttgtaagggtatctctttatcatttaatatgcatttatc

SEQ ID NO: 23042 - DNA, 201 bp, Homo sapiens
agtctggttccacagaggagaacttagccttacatgttagaagcctggattgtctatccaggcccttttctggacttagcaaagtttaagaatggatatartgctgaaaggtcataagtgtagacactacacactacagcaagatgttggctctctaccctataaggtgaatgaccttctgagttagtgatgcctcaccaa

SEQ ID NO: 23043 - DNA, 201 bp, Homo sapiens
ctatcggggggaggagggcaaggggagggagagcattaagacaagtacctaatgcgtgcgaggcttaaaatctagatgatgggctgataggtgcagcaaaycacaatggcgcctgaataactgtgaaacaaacctgcacgttcagcacatgtatcccagaacttaaagtaagctaaaataaaaataaaagatggcatgctt

SEQ ID NO: 23044 - DNA, 201 bp, Homo sapiens
tgaaattaaaatccagaacgttttagtggcaacaatctatacatttttgtctttttaaattaatatattatagctgtacgtattttgggggtacatgtgayattttgataaatgtatacaatgtataatgatcaaatcagggtaactgggatatccatcacctcaaacatttatcttttctttatgttgagaacatcacaa

SEQ ID NO: 23045 - DNA, 201 bp, Homo sapiens
gttttgaataaaaaggtgagggcagagtcagattgtggcacactgaagagttaataggaggtgggactggagaaagtcagtgttgagattcttttgaagtstttgttgaggactaacagggagcaggtaggacaaagggcctgaggagaacagcgcgaatttggaaaaattgctgagaaagggaaggaggtagccaagcac

SEQ ID NO: 23046 - DNA, 201 bp, Homo sapiens
gagaacagatgctaaagaaagataatgagtttagttttgaacacattgcatttgagatgcctatgggatatacaggtagcagtatcttgcaaatcattaawcaaataaggtttaggagccatcatttcatggataatagtgtaaacaatgaaaagggatgagctcactcagaacatattggcaagtaaggaataccactag

SEQ ID NO: 23047 - DNA, 201 bp, Homo sapiens
tgtaatggagtgagcaagggagagaatggaactggaagtaactgttggttcgccaaaaaggcagtgtctgctccaaagaccaatgttcagcttcctttcgkggaacaatgtttatgtagtacagaaagccacaatcatcctgccacaaacagctaactaggtgacttaaagatgcatgctttatgatgttcccctccctgt

SEQ ID NO: 23048 - DNA, 201 bp, Homo sapiens
ctttctaatgagtatgctccattttgtctttgttccttttaaagtaaggtagatacaactagcagaatacaccacataaggctcggatagtgaatgtagaygcacttactctatcctggtcacgttaacaattttttttcagtttgcacagtgatgatacaaaatgaaaaagacagatttcatgccactctagtataataa

SEQ ID NO: 23049 - DNA, 201 bp, Homo sapiens
atatgctcaacatcattagtcattaggaaaatgcaaattaaaaccacagtgagatactgctctacatctattaggatgaccaaaaatttttatttaaaackgacaacaccaagtactgatgaggatgtggaacaactggaacttttgtatacttccagtaagtaagcaaaatggtacagctcctttggaaagcaatttggt

SEQ ID NO: 23050 - DNA, 201 bp, Homo sapiens
ggagtggtgacagtgatggcagcagagccagggtgagactgagagtgctcagactaattttcttggaagtagtggaaagttccgctaaaaaagaaacatgrgtttggattgagcagaatgtcaagagccctgagaaccaaccaaaaaatggcagatgagctgtttcaggggcaacatttaggaaagtgaaatctctgcttt

SEQ ID NO: 23051 - DNA, 201 bp, Homo sapiens
agtaagctaataattacctttttttccatctcggagtgaggttctgaaactagtgaactcttcagcatttgttgagagtttatgcttagtttttgccttaygataatgtgtttgaatattttgtaactaaatcaggataaccccttctctatctagtactctttccattatgtagtttaagaaatttcactggggccaaga

SEQ ID NO: 23052 - DNA, 201 bp, Homo sapiens
ttcataagcagattccagaatacaccaaaaatgaatggaagagaccatacgtcatttatataatcagagattgttgctatggcatttttctctctaaagcscctctggtttaggaacatgatccattgatctagcctatcattcttgcaatcctactatggattctcagctttatttgtcagtcttgcttaatcctccttc

SEQ ID NO: 23053 - DNA, 201 bp, Homo sapiens
tgggtttgggtttggtttgttcttgattcactgcttccttaaggtgtgaccttagattgtctatttgtgctctttcagactttttgatgtaggtgttcaaygctatgaaatttgctcttagcaccacttttgctatattgcagaagttttgataggttgtatcactgtcactgttcagttcaaagaattttcagatttcca

SEQ ID NO: 23054 - DNA, 201 bp, Homo sapiens
tcattttaattgttgtgattgtccacgtcatgaaatttatgagtctcttttaaagaaaactgaatgtagtaaacttccggcatatgtcaaaaactatagcytgaaaaacacaagtaaacactagttaaacctttattcagtatcatggcatgttgtcatttgatctttctttgttgataaattaatatttaatacagatac

SEQ ID NO: 23055 - DNA, 201 bp, Homo sapiens
ttggtaaaattgcctgcagtaagtatcatcatttttcttaaatttttttcttttgtgttttgtttttccctttttctctgatcagaagttaccttatgaaygttatacatatgtgtagattagaaaattcttataatgagtcagaagttgactataggaggattgtggaaatattgatgccttggaaaggctgaagttgca

SEQ ID NO: 23056 - DNA, 201 bp, Homo sapiens
tgtttatgtcagttagccagtggggaaattggttttgtggtacatcattttgcttaaagttgaagtttctaagaacctatagaggacgttaagtgaagaasttgttgcatttctgcttatttatttgcttttactgtgaagaaatagctgaacttctgtgaagggtgcagttgcttttagtccactgtgtgctgctctagg

SEQ ID NO: 23057 - DNA, 201 bp, Homo sapiens
tgaatacagcacactgatgggtcttgactcttcatccaatttgtcagtctgtttcttttcattggagcatttagcccatttacattcaagggtgatattgktatgtgtgaatttggtcctgtcattatgatgttagctggttattttgcttgttagttgatgcagttgcttcctagcattgatggtctttacagtttggca

SEQ ID NO: 23058 - DNA, 201 bp, Homo sapiens
caaattataatcagtatgatcttctttttactgtcacttccaggacattttttaggcaagtataatgcccaagaggaataattagctctttttaagtaacktctacttttctatctgttttagatggtttctgtttagttattagccatatttgttgcattttacactttgaaatttgtagttcctataatacttttagaa

SEQ ID NO: 23059 - DNA, 201 bp, Homo sapiens
ttagtttggctggatatgaaattctgggctgaaaattcttttctttaagaatgttgtatattggcccccactctcttctggcttgtagagtttctgccgaragatccgctgttagtctgatgggcttccctttgtgggtaacccgacctttctctctggctgcccttaatattttttcccttcattccaactttggtgaat

SEQ ID NO: 23060 - DNA, 201 bp, Homo sapiens
tcctggaccagagtcaccgcatcatcccggacttctgcatgagagatgagtaaactctgacttgttaattcactagtgttttgattcatgttacatgcagycctacttatatcccagttaattcagcaggaacacaagtgatcacagctctgtgatacacactatcacggagttgtgtgtatgtatatagacaactgggat

SEQ ID NO: 23061 - DNA, 201 bp, Homo sapiens
cttcattccaactttggtgaatctgacaattatttgccttggagttgctcttcttgaggattatctttgtggcattctctgtatttcctgaatttgaatgygggcctgccttgctaggttggggaagttctcctgtataatttcctgcagagtgttttccaacttggttccattctccctgtcgctttcaggtacaccaat

SEQ ID NO: 23062 - DNA, 201 bp, Homo sapiens
tataggtttattgtatgtttacttgtgctggatacttcactaggccctcaggataaaataatgaacaggactgcctttgaaggccaaaagaaaagaaaggsaccataaatgtgtcacttatatggtcacctgcctcccagcatttgttctccctttcctccaaattcatagagtccctgatatttcgctagtcacagggcc

SEQ ID NO: 23063 - DNA, 201 bp, Homo sapiens
gtattagggtgggagtgtcctgattttccaggtgccatccatcactgcttcctttggctaggaaagggaattctctgaccccttgtgcttcccgagtgagrcgatgcttcgccctgcttcagctcatgcttggtgggctgcgcacccactgtcctgcccccactgtccgacaagccccagtgagatgaacccagtacctca

SEQ ID NO: 23064 - DNA, 201 bp, Homo sapiens
tgtcatagtgtcaagtggaacatgcttgtttatttggtactcacgcagtgttgtttatactgaaatacttgaatgtatgtgctcacctgctgtttttcttytgccttttaaaagtcttggagtacatcattataacaaagcaatttttttttgattttgcattgcaagtttttgtttctctctaataatgcagtttacttc

SEQ ID NO: 23065 - DNA, 201 bp, Homo sapiens
tccaggtgccatccatcactgcttcctttggctaggaaagggaattctctgaccccttgtgcttcccgagtgagacgatgcttcgccctgcttcagctcaygcttggtgggctgcgcacccactgtcctgcccccactgtccgacaagccccagtgagatgaacccagtacctcagttggaaatgcagaaatcacccgtct

SEQ ID NO: 23066 - DNA, 201 bp, Homo sapiens
gcgatccatcgccttggcctcccaaagtgctgggattacaggcacaagccaccacacccggcttgatattatttttatcattaaaagttttacctgttttytaggaaaagcattctaagatattttacacatttttctgtctttttgaacataatattttaaacatgatacaccttttattgataacttcaggttgtcatt

SEQ ID NO: 23067 - DNA, 201 bp, Homo sapiens
caaggacacctgcactgcagcttacaggtagagcttctgttaggggctaagcaaagtaacgtttgagcctgatggtggttccagttggtgaaattgcttcmatagcctaatttccaaaaggatcatctctgagtttgtcaagagatgagaacatgcatcatggaaatagcctcctagacctttgtgtagtcagaccaacag

SEQ ID NO: 23068 - DNA, 201 bp, Homo sapiens
acctcagttggaaatgcagaaatcacccgtcttctgcgtcactcatgctgtgggctgtagactggagctgttcttgttcggctatcttggaaccacccctrttttgttaaacttttccaaaaaccagctcctggattcattgattttttttgaagggtttttttgtgcctgtatctccttcatttctgctctgatcttagt

SEQ ID NO: 23069 - DNA, 201 bp, Homo sapiens
ttgttagacgaacgccacccctccctaccatatagttgcttctgtcctctttctttttttcttctctgcttttgtttttgtatttttctttttccttttcrtgtccagtaactggtacgtacgagtataacttaactcttccagtgactgttaaaggaaaaagaaaactagctttcttctgttgtaaaagctaatgtggga

SEQ ID NO: 23070 - DNA, 201 bp, Homo sapiens
ttaaacttttccaaaaaccagctcctggattcattgattttttttgaagggtttttttgtgcctgtatctccttcatttctgctctgatcttagttatttsttgtcttctgctagcttttgaatttgtttgctcttgcttctcttgttctttcaattgtgatgttagagtgtcagttttagatctttcctgctttctcttg

SEQ ID NO: 23071 - DNA, 201 bp, Homo sapiens
catgagctgacagttttgaagaggaacatgagacagtcagatctgttagtgcaactcagtcaagcaggtggtcgcaaaattcgtggcgtgagaattgcagycattcattcattcattcaaaaaatatttattgagtgcccgttatgtaccaggcactgttctagatactagatggtactcatcctctatatcttccttgta

SEQ ID NO: 23072 - DNA, 201 bp, Homo sapiens
ttttttaaataatagtttataagttatagtttgcaaaatatatcatttaaatgatgcaacaggcctatgacgtagttagggcaggtactatgtgattactrttacaattattatatttagatcattaaatttaagtgcgatcagatataaaacatttacttataaaatgcaaagtcaaggcacaggttggcaaaagcaaga

SEQ ID NO: 23073 - DNA, 201 bp, Homo sapiens
taaagagggtctcactgaaggactttagagaaagcaaaaacaggagatgagagaaagagagaaggaaataacttgaggaaagtcagaggttcagactggtrtttattgactgggtaatactagtagtacaactacacctggggaatgttaggaattaggtccagacaaaaggtatgttgtttgaagcagcacttagaaaaa

SEQ ID NO: 23074 - DNA, 201 bp, Homo sapiens
atagtagttactccttggaatgaggaagtgaatcttatattaagactttacactaataatcctggccgacttcgtattgaagcccaaatctggaggagtgrtctcatcataagatgtaatcagcaacctaccctgctggatattcactgtttggatactaactgtacaataactgcaatggaagaaatacaaagcagaagt

SEQ ID NO: 23075 - DNA, 201 bp, Homo sapiens
ctttgttgttcttttatttctgtcaaaaccacagcttcatatatagctctttttgtcacatgagtttttacgttgtcttaaaactgtgaaacagttacatytagttttcctttttatcttgattcaagagcccttgaaactatccttttacatactattttttttcacttggaacggctactctattatattctctgaatt

SEQ ID NO: 23076 - DNA, 201 bp, Homo sapiens
gttattaaaataagaattttaataaatctatactcatctctgagacttgacaatcattaacattctgttatgtattctttaagggtttttaatagaggaartagatcattgcaagtaaggttgaagttctcctttgtcctccaactcccatcccattccctttcttaacctctgaactcacatatcatcatgaattttaga

SEQ ID NO: 23077 - DNA, 201 bp, Homo sapiens
agtaacttcaatttgttcatattaaaccacacaaatcagggctgcctgtatagaaaattaaaaagaatttaataataaatttattttgttattaaaataaraattttaataaatctatactcatctctgagacttgacaatcattaacattctgttatgtattctttaagggtttttaatagaggaaatagatcattgcaa

SEQ ID NO: 23078 - DNA, 201 bp, Homo sapiens
tccctgtccatgaagtgaataacaaatgcacagtgaccagttgctaatagacattggaagaagggatgtgattggtcactaatcatgatgaacacacatcrgttatttacacagggatttcagaggagctaccaacaaagtttatactttagttacttaagtttaatgtactgtggtgactacactgtggtattgaggtat

SEQ ID NO: 23079 - DNA, 201 bp, Homo sapiens
gctctttctcctgtaactccgtttacattcagttcaaatttcacttccagtgttatcactttgcggtacttttatctttgttggccaattccctctttcawtgatccatttttataaaatgccacatggatttatcagtgggggacagggaggcaccacagctgcttgctttgctccctgtccatgaagtgaataacaaat

SEQ ID NO: 23080 - DNA, 201 bp, Homo sapiens
tgtatttagtacactgtaacattagaaacattgacaaagtgttttattttttgttaaaatcttatcaagagtagtatagcagtgcttgccgctgtcttatdtgctttgcaatatacagcaagcatcttttctgggtgaactatcatacttctgagtttggctcggttgccagcattttatcctttattttttctgtgttgt

SEQ ID NO: 23081 - DNA, 201 bp, Homo sapiens
atactgctctacatctattaggatgaccaaaaatttttatttaaaacggacaacaccaagtactgatgaggatgtggaacaactggaacttttgtatactkccagtaagtaagcaaaatggtacagctcctttggaaagcaatttggtaatttcttacaaaagtaaacatacacttaccataagtgagatctagcaatctc

SEQ ID NO: 23082 - DNA, 201 bp, Homo sapiens
ttattccgtaaactcccttattttccaaagcctttatggctaggaagtcctttgtttttaataatgcccaatgtttctgcctgagatttagtatttctgtrgtcttttcacttgatttttttgattctttgagaagtgcaggaaaatttgaaacaatttatggagatgatgaaatattatattacttcaacaattgtaaag

SEQ ID NO: 23083 - DNA, 201 bp, Homo sapiens
gtagaagagactagtctgctgccaaaaaaattctttttttaatgatgatgccccttaaaatgctgttaaatctcttaaatttaatagtgataaaaagctarccctgattttcctaggggccagagtaaattgggaaatgcgatggtttacatggcttccactgccagatagaaagaaatataccagttgataaaattcagt

SEQ ID NO: 23084 - DNA, 201 bp, Homo sapiens
acaacttctataatttgatataactggaatcatacaatagacaattttgtgatcagcttctttcactccacataatgatgttgacattcatccgcagtgtygcattcttcagtagttgttcctttcactgctgagtaggactctgttgtatggagatactgcttattgcttatccctgcagttgttgatatacatttgggt

SEQ ID NO: 23085 - DNA, 201 bp, Homo sapiens
gtaagttttcatttgttgctgaatctctctcagttgtggttattttaataagcagtgagtttgtaaagtcctggtttaaaatactaaatgtctgatctccytattaaccccaagcatctgagattgtaaatcatgactctttgttgccacctgatgacaacaaagagtacagcccttctggaaatactagcctttctagaa

SEQ ID NO: 23086 - DNA, 201 bp, Homo sapiens
aaattaaggtttcattttaaattgactttatggcctttgaaaaactttagtttttgtgtggtccaaagctataggttagcattagcatttaaatagaggcrttaaacttgcctgaagaccttcctctcataatgtagccctttctgagaggttttttcaaatcagatactttttcgtcctaaaaaatgaatgcaaatgctc

SEQ ID NO: 23087 - DNA, 201 bp, Homo sapiens
tccactgagtgcagggtctgcaaagtatcttaagcactgatcttaggtttaacaatagtgatgttatccccgggagcaatttggggaggttcagaattttrcagcctccagctgcatgactcctaagccataattttgaatcttgtaggtaattttttagtcctgcaaagacagtctagtccccaggtaggaaggggtttg

SEQ ID NO: 23088 - DNA, 201 bp, Homo sapiens
agctcccataatcccacgtgtcaggggagggacctggtaggaggttaatgaatcatgggggtgagtttttccagtgctgttcacatgatagtgaattagtstcacagcatccaatggttttataaagggcagttctcccacacatttctccttgcctactgccatgtaagacgtgactttgctcctccttcacctttcgcc

SEQ ID NO: 23089 - DNA, 201 bp, Homo sapiens
tacccagtgtcaggtatttcttcatagcagtatgaaaatggactaatataggggctgtatcttgcccatccttaggtactattacttctattacattactrctaatctggtgggatcctcttccagcagttactgccctctgcagagtaaccccattccaagaagccccaccctctctccaagactttattcttgtctgaa

SEQ ID NO: 23090 - DNA, 201 bp, Homo sapiens
gcgcaatttggctcacccaacctttgcctgccgggttcaagcgattcttctgcctcagcctcccgagtagctgggattacaggcatgcaccacgacgcccrgctaattttgtacttttagtagagatggggtttctccatgttggtcaggctcccgacctcaggtgatccgccacctcggcctcccgaagtgctgggatta

SEQ ID NO: 23091 - DNA, 201 bp, Homo sapiens
caacaatgaaaaggagaaaagacacgaggggagagatggagtggacatgggatgacataaagggtttggggtttgtttcttgatttgtttttccaaaatgkgagaaggaggatgtttgaagcagacatgaaagaaccagtgaaaagggaagatactggatacaagagttaaaaataaaacaaaaacccagcagagtcttga

SEQ ID NO: 23092 - DNA, 201 bp, Homo sapiens
gaggatgtgatacctcatacaattgtgagacccatagagataatatatacatgaacaatggccaatacagactacagaggaggatgcaaacaaagttagcwgttagttttatcatttgtattatatcacatagcaggtgttctatcatatcatttgattaatcttcaaacctaatgtgatgtaatattatttatcccatgc

SEQ ID NO: 23093 - DNA, 201 bp, Homo sapiens
gggaagaagggactgaagcagtgggcttcagagggagatcatagaatctgcaccagaaatctccttaaaatattactgcatatttatacttttattcttaygtcttttattgaaaatactacttatttttgagacagtcttgctgtattacccaggctagtcttgaacttctggctttaggtggtcctcccatttcagcct

SEQ ID NO: 23094 - DNA, 201 bp, Homo sapiens
ggagctcttctggaagctgctgcaagcttctgatttgccagctgcctgagcatctttctgccactgtaagaagagaatcctgccttccctttctttttgcyttacacagcttttgggagtacatctcaatggcagaatccaaacccaaaacccctactggcaagaagttgtagatgttcctatgcttccaggaaagtggct

SEQ ID NO: 23095 - DNA, 201 bp, Homo sapiens
tgtatatctggcaccgagaaggaaaaaggaaaaaaggcttgacgataaaatgcagccagagtgtaaattgtgaaatggagctctaggctcaattgatcctmcactgctagcaacttgagattgtgcatttcctttctagaatgaaaattatgcccttttaagaatacttagtcaatttttaatcttcaaattggtgggttt

SEQ ID NO: 23096 - DNA, 201 bp, Homo sapiens
cctgcactgcagcttacaggtagagcttctgttaggggctaagcaaagtaacgtttgagcctgatggtggttccagttggtgaaattgcttcaatagcctratttccaaaaggatcatctctgagtttgtcaagagatgagaacatgcatcatggaaatagcctcctagacctttgtgtagtcagaccaacagagagaatg

SEQ ID NO: 23097 - DNA, 201 bp, Homo sapiens
tgaacttttaggttattcccagtcttttgcctaaaaacaatgctgtaatgatctatatactctgtatgtagatgatcacatccatatttagatatagctcycagaagaatttcccaggagtgagatttctgggcgataaagaaattcatctggctttttgaataatagtgccaacctgccttccataagggttgtactatt

SEQ ID NO: 23098 - DNA, 201 bp, Homo sapiens
agaggttagtgtagtaaatactgctaaccgtagattgatctgagcttgctttttttccttgtaacaatatatcctggaggtcttttcacattagtacatcmaaagtttccacatttgggggtagagggagctgtacagtattccaaaatgtaaatatcccacagtttatttattccctaattgatgaacttttaggttatt

SEQ ID NO: 23099 - DNA, 201 bp, Homo sapiens
acttttttcattgtgataatcctatatatacaccatcttcatccccccaccacacatacaccccaggggttaatagagcgtttaactggtaatatgtaagrttaactgcaatgtattggtttagtaagtaaagaaaactctttactaggttaaacagctaaacttaaggaactattatacagcaatttattaaatatagtc

SEQ ID NO: 23100 - DNA, 201 bp, Homo sapiens
caaattgtggccatgcttaaccatctacttttatttcatttttccctgccttctttcactcaccctctctttaaagatccattatattttggttttggtcstattttatttttctttcacattgataacatcagttaagaagcctcaatgctctttcttgtgccttctcaatttcatctttctttgaaggaaagctacttt

SEQ ID NO: 23101 - DNA, 201 bp, Homo sapiens
tcatgtgagatggatgtgtatgctttaaggaaaaaatgatttgaatttgaaagaaatcactcagccaaaagcgatgggggcccctttgtctgtgctgctcrgcacagttcatattttaggtacacgaaaggcaaatatgggactagaaagaaagaaaatgaggctaatttagagtcttctgcccatctgtttatgagcaga

SEQ ID NO: 23102 - DNA, 201 bp, Homo sapiens
aactctgctctcttagtgatttctagtatccacacattgttactaactatagtcaccatgccgtgtattagatctcttgatctcttgaatttacccctccyggaaattttgtaacctttgaccaacatctcctcccctcccccatcccttagcccccgttctatccatttttcactgaggtaaagaaacactaagggactg

SEQ ID NO: 23103 - DNA, 201 bp, Homo sapiens
ttaataagcgtgtgaccagatgtgaaatacagcagaggtttttcctgaaatggagggtgtaatgaacttgcgcagctggaagtagttgtcctaatttggcrcaggcggaaggcctgcctggaattttgaagaggtgtagtaagatgcacaccacaggtttacacctgaaaacaactaatcctattccatctgggctggggt

SEQ ID NO: 23104 - DNA, 201 bp, Homo sapiens
atttggcgcaggcggaaggcctgcctggaattttgaagaggtgtagtaagatgcacaccacaggtttacacctgaaaacaactaatcctattccatctggrctggggtgtaatgagatagagctacttatcaagagtataatgagatgcaaaagccattggaactgagctggaaatttatttaaaagtgaactaagacgca

SEQ ID NO: 23105 - DNA, 201 bp, Homo sapiens; identical to SEQ ID NO: 2916

SEQ ID NO: 23106 - DNA, 201 bp, Homo sapiens
gagtgggtgtgccccctttctctggaacttttgagactaagtcctttcataaaacagcaggagaaaaactaaagtcatttccagagttacttgcctttggrttagtgctcaccaaggagaaaattgaagcttaagggaaaattttagagagagagatgagtgtatgaaaatagttttgcagtaaattgactttctaaaagt

SEQ ID NO: 23107 - DNA, 201 bp, Homo sapiens
tctcaatgtaagagtggaaataagaatagtaaagaaaattgtacaaaaataggccactaaattcattctttagcatgaaattagaaatgctgaacaggttygatagaggtgcatcaatgctcagaaatgcatctaagtgaatctacagctctttcttactttgaagcttttaagaaaattgatacgaggatttcactgaag

SEQ ID NO: 23108 - DNA, 201 bp, Homo sapiens
gagaggctaagtaacctgctcgagactgtgcattccaggtccaaactctggaagccctactgtaagtgttcctctcttgaccactctccttctctaagtcmctcccctctgcagagtgacactgagtgaggttcatctcctggatggctaggaaggctcattttctgtgtccttcctgcccatgaagggtaggttgcccat

SEQ ID NO: 23109 - DNA, 201 bp, Homo sapiens
gcagttagcaatttacactttgcgcctggccacgtggggttttttgctcattcctacatccatttattagtgaaatattccaagtattaacctaatggtcwgaattgtcaactagggatgattagatatgaaaataagggagcaaagtgaaaagtgaaaaaaaaaatcatacaatatttcacactttcctctaatctccag

SEQ ID NO: 23110 - DNA, 201 bp, Homo sapiens
tcagcagttagcaatttacactttgcgcctggccacgtggggttttttgctcattcctacatccatttattagtgaaatattccaagtattaacctaatgktctgaattgtcaactagggatgattagatatgaaaataagggagcaaagtgaaaagtgaaaaaaaaaatcatacaatatttcacactttcctctaatctc

SEQ ID NO: 23111 - DNA, 201 bp, Homo sapiens
ctatatctagtgaaggttgcaggaagagctggaggtaaaagattgttaagtgtgcatccctttatgagctcatgaattttcaaatatcttaagcaataaaraaaaaggcagcaggttttccattaaaaacatttttttctcacacacatctccctacctccatttgtactcaagtgacaaaaatttttaaaatagttacct

SEQ ID NO: 23112 - DNA, 201 bp, Homo sapiens
tataatgaatcttttcttagatccccaacttggaaaatgaatgaccaggttaatatactcctgaatgttggttttagaattagatttgcatggttttaaartagtttttcttaattgcacattaaaaatgtgtatattaacattaactgatttatctggttgtacagatgctattaactgagtacttggatatgaaaaata

SEQ ID NO: 23113 - DNA, 201 bp, Homo sapiens
ttctaaaatgttttcaatgagaaaatctcatgggatcattcttcactgtctttttctatcttctagaaagtttgaattcacagtgttaacctttcctttcstgccgagataaccatctttcccttttcaatttctcacttgcctgacagctgataccagtctaagctaatattgtaacaattttagataatattgcagatg

SEQ ID NO: 23114 - DNA, 201 bp, Homo sapiens
atctcccatttggtcctcacaacaactccctaagttgtgtatttgaggaaaacgagacttagagttgttaagaaatttgttctagaggtaataaaaagtgsaagaataaattatattcctctgggaagcagcaggagaaagtatggtttcatagagatgaaaacgtctcttaagcagcagagtttggtttttactcttttt

SEQ ID NO: 23115 - DNA, 201 bp, Homo sapiens
ttattctccagacatacctactagaagcagcaacatggactcacttgaatggcattttgttcgtgccctgtatttgtcccattcgggagatagagtgaaasaagagttctgttttggggttaacaggcagaattataagcagctaagcaacctaaaatagttcaaaacacaaaggcaaggaaggtgattctcaccctaagc

SEQ ID NO: 23116 - DNA, 201 bp, Homo sapiens
ataccgattatttccctgcaccacattaagtgtttcagttggtatgtttagacacatgtttctgtattttgtatgtatctttgctaatatttgagtagttyttcagtaacacagatgagaaagaagaattattttagatatatgtgagtataaatatgaatttgacctttaaggattaaaaagaatcatcaatcaaaaggt

SEQ ID NO: 23117 - DNA, 201 bp, Homo sapiens
tttttattttcttccctatctcataacatgcataaatttgatatgcattttagctgatcctccatgttattggggataaaaggccaaagataagagccaasgaggaaaaacccacaaaaattccttatttgacactagacaacattatcgaaggtgacatttattcattaatcattctcttttgatattgtgctttaatcc

SEQ ID NO: 23118 - DNA, 201 bp, Homo sapiens
gtgatgtgagggcagtttagttccatgatttcttggctgtatgatatagggttggttgtttaatctatcttcatctttctaatgtggatagtagtagtggyagcaccaccagcagctatttcatagagttgctgaagattatttaagtatccgataagtggtaactatggtgacagttgtctgcctgtgtttgctaatgat

SEQ ID NO: 23119 - DNA, 201 bp, Homo sapiens
tttatcccatgcttaaatgaaaaaactgaagttgagacaggttcagaaatttccagtcatgcatcttaggtaaaagatgtgggattcatgcctaaatctgycagagaatgaaaagctgagaaggattacagatcactagtgaaaacacggatctctgttgtctcccccttttccattagcgaccattatcctgaccatctc

SEQ ID NO: 23120 - DNA, 201 bp, Homo sapiens
acacacacacacacacaggcaaattgtgttcttggaagtgctggtggtggtttcttctatatttttggttacttttagctatatattattgcctgtcagtrtaccttccaacttataaatgaaactactctttgggtgatattgtgccccttaccccacaagcacttctttctacctgctctattaatacaggttctttca

SEQ ID NO: 23121 - DNA, 201 bp, Homo sapiens
gggttttgttcttctttgtatgttatggttttctctttggaggtgtctaagttggataaggtaaaacttcctaactcaaaaacttagaaaacttaaggatmttgaatgtaaatacagtagagcaggctttgcaactttaagaggaaatgctgttcatctctgtcagacccttacagcgctggataaagtaaaccccaaatg

SEQ ID NO: 23122 - DNA, 201 bp, Homo sapiens
tgtgtttaactttttgaggaactgccaaactgttttccaaattagctgtaccattttatattccaccacgcatattgggcatattatttgaaatgtaactsatttactaagaaaaaatagttttaccctttctatcttgccttttggacatcatctatactggaatgagttactgtctgatactttgaaaggccataaaat

SEQ ID NO: 23123 - DNA, 201 bp, Homo sapiens
tcagtttcatgtgagatcaagctgatttttctctgatgattacacataaaagtcatgagacaacctacttggtcagcagttgctgtgtacctagctttggragcattcccataaagccgtaagatttatatcagcactggctcatatggttcatgtctttagttttctttctttttttttttttttaattttatgtgcttc

SEQ ID NO: 23124 - DNA, 201 bp, Homo sapiens
tgaggaagaccagatgaagtcattcaaaataatttcgtacataccgaaggttactgtttgcaaagatggtcctaattatgacagtataggactcatctagrtatgcttggtttgtttatttataaaagtttcaatgagctaagtctgttttttttctttcttctgaaagggggtcctgatgacaacttaattgaaggtgga

SEQ ID NO: 23125 - DNA, 201 bp, Homo sapiens
tacaattatgaacaaaatagtattgttgttattaataataatgacacactacctaagagttgagtgcaataggtaattctttccttgaaggggcttgttgyctggattttcttcctgtgtccagcagcagctcacccttgggtaatacagtaccatcactaattctgatttacttgactttgctgtcatagtaaatcattt

SEQ ID NO: 23126 - DNA, 201 bp, Homo sapiens
atgattttttaaaaattttgtattgaaatctgtagtccaaactcttaggagaagggcattacatgccagatagattatgtcctagtttcaggaactatggrttatgatcaaaggaccttttaattattttatccaatattttattcaataaatatttcctacaagtctactgtgtgccagtcatagagtagcactactagg

SEQ ID NO: 23127 - DNA, 201 bp, Homo sapiens
tgtaaaagtacttcacgagattaaataatactcttttgacagggctccatctgtgttctaacttaactttgaagtgaagtattttcttttctaatgagatwcttttcactgttaaaaattcaatgttttcatacttccatagagctaatgaggagcattgttgggaaaattgggctttttgattattctcttctataccct

SEQ ID NO: 23128 - DNA, 201 bp, Homo sapiens
cttcatcttgaattttgtccaccctaacatactgttagtaatacagaactctccaccttttgaggaaacccattccatctctcaatgaaattagctattaraaagccttcctttaatgcaaaacgcagtctcctcccaggaggattatttctgtgacagtatatactgggggaaatttccattgcacttctagcctttggg

SEQ ID NO: 23129 - DNA, 201 bp, Homo sapiens
ccttttctttactctcatagtctctttttccatatacacagatatacctgtatgttgtgtttccctgctcatcatttacaggggataggaaacccctggtrtaaaagtacttcacgagattaaataatactcttttgacagggctccatctgtgttctaacttaactttgaagtgaagtattttcttttctaatgagatac

SEQ ID NO: 23130 - DNA, 201 bp, Homo sapiens
agagaatgatatggggcccagaccatctctcagcggtaatggttcttttatgaaagaaagaaaacaaaatacctagccatctgagttaaagtagttttcayatgtcctgtagtctctaggggtataaattgatgctgtttaatagaaatctctccccttcatctgcaatattaatgtgttccctaatttgtaatccacttc

SEQ ID NO: 23131 - DNA, 201 bp, Homo sapiens
gcctgccttggcctctcaaagtgctgggattacaggtatgagccaccgcgcccggccagatccatgctttaaacatttgaaagcaatgagagtcagttgcrtactcgcattttttgtttttttgtttctcctactttacaaccttaagtttaggaggctgatctgaataagggtcctcaaaatcctgtgatgagacgctcc

SEQ ID NO: 23132 - DNA, 201 bp, Homo sapiens
cctaggtacttgggaggctgaggccaggcatgagaaccacttgaacccaggagtcagcggttgcagtgagccaagatggcaccactgcatgccagcctggrtgacagagtgagactttgcctcaaagcaaaaaaaaaaaaaaaaagattaattttctcactgttccagaggctggaaagtctgagaccaaggtgctgacag

SEQ ID NO: 23133 - DNA, 201 bp, Homo sapiens
gagacagggttttaccatgttagccaggatggtctcgatctcctgacctcgtggtctgcctgccttggcctctcaaagtgctgggattacaggtatgagcyaccgcgcccggccagatccatgctttaaacatttgaaagcaatgagagtcagttgcatactcgcattttttgtttttttgtttctcctactttacaacct

SEQ ID NO: 23134 - DNA, 201 bp, Homo sapiens
gacttgcttatattgacagtcaatccctttccctgagagataaccattattgtgaattctatccctacagatagattggttttgcctatggtttaacttcwtataaatggaatcatatagtatgtcctctttggtgcctgacatttgtgtgacatgatgtctatgttggtcatccatagactaacaatgatttctttatgt

SEQ ID NO: 23135 - DNA, 201 bp, Homo sapiens
atataaaacttagttataaaaaataagcctttccatatttctgctccttgggaaattttctagaatctttgaacctgtggaccatgtattttacattcctytggatttacaggcattgtgggctttgccatttttaggatgtggtatagaagaaagcatggtggactaattaggaaccagatctggcttcaagatacagtc

SEQ ID NO: 23136 - DNA, 201 bp, Homo sapiens
gatcagtgatggggaaagcatctcagaaggtgccatttgagctgttcctgaataatacagaggagccagggagtgaatgaagatctgtgggcagcacattmcagccagagggagtggtgcatggcaggctctatggtgaacatgagtcttgtcaaaagaaagagaggtcatgtggaaagtagagcaagagaagaggagagt

SEQ ID NO: 23137 - DNA, 201 bp, Homo sapiens
tagctgggcatggtggcaggttcctgtaatcccatctactcaggaggctgaggcaggagaatcgcttgaacctgggaggcagaggttgcagtgaggactcrgtctggaaagaaagagagagaagaaggaggaagaggaggaagaggaggaggaagaggaggagaaggagagagaaagaaggaggggaaggagggagggagg

SEQ ID NO: 23138 - DNA, 201 bp, Homo sapiens
agctaaacagtttttgaatttttttccactcagtactctaaaattcacctcctgggattattctttggctaaagaaaagtatgccaacatgtgacaaaatytgcacttgagttctttgcaggcatttcttttcttttttcttgtttttttgagacagagtctttgctctcttgcccagactggagtgcagtgacatgatca

SEQ ID NO: 23139 - DNA, 201 bp, Homo sapiens
aggagtaaagatgtggtgtttaataatcctgtttaatctcaatgcatagtttatggagagactagtgtacctggaacagtggctgcatgttgatattgttrcaaatgatattgcataggaaagaaatgatcttttggtttagtttcaggtaaaacaaaaacaaaagaagtaaccttagccaatcattgatttggtgaagac

SEQ ID NO: 23140 - DNA, 201 bp, Homo sapiens
tattttgtgacttttggatggttactgtgcaaatataatttaattgaaaaatcctctttaattctttaagagagtaatcaaggcagtgatttcgtttattmgactgctctgttttggggtttttgagtggagtctgtatctattattgttattatttaatttttcagtgagggagataaatctgcaggacatcaaggaaga

SEQ ID NO: 23141 - DNA, 201 bp, Homo sapiens
acagttattatctaaaacctatagattccgtcctatacactgcttcttaatttgctattcttttagtattcctctagtcattaatcatattctggctgcayatgtacaattataataacctagtagctggtctttactatgtaccacacactgctgtcatattttcaggcacagccccaatcttttcactgtcttttaatg

SEQ ID NO: 23142 - DNA, 201 bp, Homo sapiens
caagcttattttgatacaaaaatgtttgaaacccatgcatagttttttcatatgcattttctgtgaactttttaaagatctggtgtgtgtgtgtgtgtgtrtgtgtgtgtgtgtgtgtgtattttctagcaacactgtctcttttctttcattttgcactctgtatattttttgtaaagaatacatctttggatctaagtg

SEQ ID NO: 23143 - DNA, 201 bp, Homo sapiens
gtgctttcataggtcttggtaagaaggagtacgtgatcaaagtggtgttttatgatctcactggccccactgtgctaaatagcacagactagacactaggractctggtggcttctgaagcccttcaggtttcctgtgtagccagaggccagggtcctataggaatgagactctccttgagctggccttggagcttttgcc

SEQ ID NO: 23144 - DNA, 201 bp, Homo sapiens
tgtcgtctgtattataaatccctcataggttatttggaggctaaggtcaactaacgtatacacaacacctggtacaatgcctgcaaacagtgatcacgtgwtaaatagtagtttcttctgctccttcttttttaagctcttttcctcattcttagtcttcctgagactattttatttcttgctttctcatttagctaccaa

SEQ ID NO: 23145 - DNA, 201 bp, Homo sapiens
gatatagtttatgatatgcctgctgctttacaaacctgtacaacatgttactgtactacatgcacaacgtgtaggcaattgtaacaaaacgggtatttgtstatctaaacatatgtaaacatagaaaagctacagtaaaaatacagtttaaaggtgaaaatggtccatctgtatggggcctttaccctttgaatagagctg

SEQ ID NO: 23146 - DNA, 201 bp, Homo sapiens
gaatatgcaaagagaggatcatttacatatctttatattgaaataaagcaatgcttagataaatattgcaaatacaaaaccccagaaattttcactgtctrcattagagaattttttggtaattttgtgtgttgtgggttttttgagttatagagcatgaggaagtgctgaaagtggtctcacttggaaaaggaaatttgg

SEQ ID NO: 23147 - DNA, 201 bp, Homo sapiens
tcaaatgcatcttcatgcagatacctaaatacaatcatttctcgctcaaagatgggggtatcttttgagaaatgcatcattaggtgatttcatcattttatgcacatcatagagtgtacttccacaaacatggatggtatagcctaccatacacctaggttatatggtatagcctgtcgctcctgatatagtttatgatat

SEQ ID NO: 23148 - DNA, 201 bp, Homo sapiens
gtaccaccacacctggctaatttttaaaatttttttggagatggaatctcactattttccccatgctggcctcaaactcctggactcaaactgtcttcccdcttcagcctcccaaagtgctgctgattacagggtgagccttggcaccccagccttcaccataattttgatgttcgttcttgcctcaattttaacagaatt

SEQ ID NO: 23149 - DNA, 201 bp, Homo sapiens
taagagatgcagaaatctagcagagtcaggaatgtgtttagatgtggaaattagatgaataaagtagagcataaatgattttcagaaaagttcctgttggraatttgaaaggttctcaacgtaatataagcaacagctgttaaaagtttccagctaactatagctattgaagaatcttcagataagtttgaaggagtaaat

SEQ ID NO: 23150 - DNA, 201 bp, Homo sapiens
agttattagccatatttgttgcattttacactttgaaatttgtagttcctataatacttttagaagtaataataatatacattatattaaaaaaattgggygtggcatggtggctcacgcctgtaatcccagcacagtgggaggccgagctgggcagatcacgtgagatcaggagttcgagaccaacctggccaacatggt

SEQ ID NO: 23151 - DNA, 201 bp, Homo sapiens
tctccagttctgaaattaaaatggcagagacagtttgcggggattctgattgctttcgtaatattgcttaagtttgtaattggtgcattaacttcttatcrtacatgttatattttgtgtaaaaccttcatttccagaaacagcacgctgggaagaaacttaaagagcactgtcaaggggtctatgtggaagtgattccca

SEQ ID NO: 23152 - DNA, 201 bp, Homo sapiens
ggttgtagtgagccaagatcccaccattgcatgccagactgggcgacaagagtgaaactcagtctcaaaaaagtgtgtgtgtgtgtatatatgtatgtgtrtatatatgtgtgtatatgtgtgtgtgtatgtatatgtgtgtgtgcacatatgtgtgtgtgtgtgtatgtgtatacacacacaaaggggacttcaaaaggt

SEQ ID NO: 23153 - DNA, 201 bp, Homo sapiens
attgcatttagcagctactaacagaaacttgaaatagcagtggcttaaagaagtagggtttcatttttctctgctatgacatgaagctcaaaagcattttkattgtctgggactgcactattgctccatgatggcatcagtgcaccattgccccaccatctttgggctccattatgctcagcactggcttccatactcaag

SEQ ID NO: 23154 - DNA, 201 bp, Homo sapiens
caccatattgaccaggctggtctcgaactgctggcctcaagtgatccaccctcctcagcctcccaaagtggtgggaccacagctgtgagccaccgtgcccrgctagagtgaaaattctaatctattgtttattcaagtgaggaagaccagatgaagtcattcaaaataatttcgtacataccgaaggttactgtttgcaaa

SEQ ID NO: 23155 - DNA, 201 bp, Homo sapiens
ggattacaagtgtgcaccaccacacctggtctcaaactcctgggctcaagcgatccacctgcctcggcctcccaaagtgctgggattacaggcgtgagcarccacgtccagaccaaaagacagatttagatgtgtgaatggagagatagaaacaggatagaaaaagcaaaagaaacagcaggaaggataaggaagcaaaat

SEQ ID NO: 23156 - DNA, 201 bp, Homo sapiens
gactttcctaaactttaggtttcttatgtgtaaactagaccatgtgtaggttaaattaataaaatgaagtgtatagcacatggttactttttctgatctcrgtcccttttgtgcactctcattcatgtatttattcatttaagaagtatttactttggcattactctgggcagtggtgatacagcagtgaacaaaatgaac

SEQ ID NO: 23157 - DNA, 201 bp, Homo sapiens
gattacaagtgtgcaccaccacacctggtctcaaactcctgggctcaagcgatccacctgcctcggcctcccaaagtgctgggattacaggcgtgagcaascacgtccagaccaaaagacagatttagatgtgtgaatggagagatagaaacaggatagaaaaagcaaaagaaacagcaggaaggataaggaagcaaaatc

SEQ ID NO: 23158 - DNA, 201 bp, Homo sapiens
ttttcttggaaatttttctgacagctttatcttctgaaaaaaaaataaagaaagaaagaagagggtatttaccgtaagataaattgaaaggataaaaccaraattccagacctcttggaaaagcaggattattattttgttctctgagttttatgtcagcatcccttatttatttatgcaatctttggtttaaaaagattg

SEQ ID NO: 23159 - DNA, 201 bp, Homo sapiens
agagttctgtgaaaaaaaagtttgaaagtattcgtttataaaaatacagatcctggcattcaaggctctttggagtctctccctatctaatttattttttygaatgtaaatctcagcataaatcttaggcttctgtcattctgtgatattcaattttcctgaatttttatgtctgccttttaaaatgctgtttccattact

SEQ ID NO: 23160 - DNA, 201 bp, Homo sapiens
atatgaggaaattaaggtctcagggtggttatatcacctgtctgtgccaaactgagatggagcaggtcttcagaatcccagtttaattttctttctactaygtcagttagagccactaattggaccgttcatgccgtattcctattaaaccattccagcagggttggcatattttgttttaatggaagcactttaatgctt

SEQ ID NO: 23161 - DNA, 201 bp, Homo sapiens
ctggagataatatttgttgtatttttagagaaataattcagtctttgatatattcaaatgcttatatttagtaatattatggtcctctccatccacacaakgtcccagtacctcagcacacactttagggttttcagcatggacttaagtctattgattgtcatccccttgcctgcccacctctggagttctaaccttacg

SEQ ID NO: 23162 - DNA, 201 bp, Homo sapiens
gctatagtgacccttttccagtcattgtgcttttctcacaattctcaaagattctagctgcaattttataacacaccccaattcatgcaataatgtcaatrtatccatggtgggggtcctgggattgatttatgataaaaattttgttgtataatatttttagatttagtgtaaagttgcaaagatattacagataatctc

SEQ ID NO: 23163 - DNA, 201 bp, Homo sapiens
ggtgctcatctgagaagccagggttgaatttgaaaaaggcaccttttgttcttcaaaactacaaaaacaaggctcagctattgttgaaaaacatgccaaayccaaccacaattccctctgtcaatcagctggtcgttagtagagttcattgtcctgtgctgattagaaagcagtaccccacccccctccgtaaggaggtga

SEQ ID NO: 23164 - DNA, 201 bp, Homo sapiens
ttcccaacatttattaaatagggaatcctttccccattgcttgtttttgtcaggttggtcaaagatcagatggttgtagatgtgtggtgttatttctgagkgctctgttctgttccgttggtctatatctctgttttggtatcggtaccatgctgttttggttactgtagccttgtagtatagtttgaagtcaggtagcat

SEQ ID NO: 23165 - DNA, 201 bp, Homo sapiens
tcccaacatttattaaatagggaatcctttccccattgcttgtttttgtcaggttggtcaaagatcagatggttgtagatgtgtggtgttatttctgaggsctctgttctgttccgttggtctatatctctgttttggtatcggtaccatgctgttttggttactgtagccttgtagtatagtttgaagtcaggtagcatg

SEQ ID NO: 23166 - DNA, 201 bp, Homo sapiens
tgggcaaggggtataggccctgaataaaacacacaaggtctctgctttcatggaggttacatttgttatggagagttgatgagacaagaaatacataagcytgagtctttttttttttttttttttttttttttttgagacggagtctcgctctttcaccaggctggagtgcgatggcgtgatcttggctcactgcaatct

SEQ ID NO: 23167 - DNA, 201 bp, Homo sapiens
gatgatttttaagcttgagcttaggtaactggaatgatgatgacacaaaaatagagaacacaggaggagagaattgaaatgataatgggagtgcagcagcraagagctccatgttggacatagtttgagttatcaggaggacatcatttgaaagtatctatcaagtgattggaaatgcaggtcaggagcaagaagtcaggg

SEQ ID NO: 23168 - DNA, 201 bp, Homo sapiens
aatagggaatcctttccccattgcttgtttttgtcaggttggtcaaagatcagatggttgtagatgtgtggtgttatttctgagggctctgttctgttccrttggtctatatctctgttttggtatcggtaccatgctgttttggttactgtagccttgtagtatagtttgaagtcaggtagcatgatgcctccagctttg

SEQ ID NO: 23169 - DNA, 201 bp, Homo sapiens
agactatgctggaggcaagagagagcaaggcatgttttatgaaactgcaaggagttctagattctttgctttaatgagattaaccaaatagtcatatattwtataagttgaaggaagaagggatggaagaaggaaaaatcagttaggagattattttagggaggcctgggaaaaagttttgccctattttaattctgtcta

SEQ ID NO: 23170 - DNA, 201 bp, Homo sapiens
tcgacttcagactgctatgctggcagcgagaatttcaagctagtggatcttagcttgctgggctccgtgggggtgggatccgctgagctagaccacttggmtccctggcttcagccccctttccaggggggtgaatggttctgtctcgctggcattccaggcaccactgtggtatgaaaaaaaaaatcctgtagctagctc

SEQ ID NO: 23171 - DNA, 201 bp, Homo sapiens
tggtccgaccttatgaatagcacagatatgtcctctataatcgtggcctaaagaaataagaaaaaaattgttagtatctcattctgtcacctccactgagrtgcctattacaggataatgaattatatattatcgggaaacgagccatgtagtctaagggtaggcaaaacatctacaaccctcaacttttaattcattttc

SEQ ID NO: 23172 - DNA, 201 bp, Homo sapiens
accacctgctgtgcggtctggttcctaacaggccacagacccgtactggttcatcgcccggtgtgggggtagggggacccctgatgtaaaggtttcggtgrgaaatatgtactcttcggggatgtgctttttaatttcacaataatttgtgttttttgtttttcacattttcccattgtttcttgtagtcttatctccttc

SEQ ID NO: 23173 - DNA, 201 bp, Homo sapiens
ggacaaggacagaaataattttggattctcatgaaatcatcaaatggccattatgcagagatatgggaatgtaacgcagcctgatcctaagaggaccatgmaaaccagagggaaaattaaagattcatgagatggaagtaaaagccattgaaagtttttgagaaatgaaatatactgtgaaagtttgatgcagattagtct

SEQ ID NO: 23174 - DNA, 201 bp, Homo sapiens
gttcatcgcccggtgtgggggtagggggacccctgatgtaaaggtttcggtgggaaatatgtactcttcggggatgtgctttttaatttcacaataatttktgttttttgtttttcacattttcccattgtttcttgtagtcttatctccttctggaattaaaaataatttttgtcttctccttttccccccatttttaga

SEQ ID NO: 23175 - DNA, 201 bp, Homo sapiens
tcatcgcccggtgtgggggtagggggacccctgatgtaaaggtttcggtgggaaatatgtactcttcggggatgtgctttttaatttcacaataatttgtkttttttgtttttcacattttcccattgtttcttgtagtcttatctccttctggaattaaaaataatttttgtcttctccttttccccccatttttagaag

SEQ ID NO: 23176 - DNA, 201 bp, Homo sapiens
atagcagttataatagtagatagtagtaatgatagcagctaacactttagtagcatttactgtgagtcagacactattctgggtgctttgtctgtattgawtgcaagtgtttaaaatgtatggcaactctgagtggtattctttttatgaggaagaaactgagaaacaatgaaattaaataacttgcccacagtcacatag

SEQ ID NO: 23177 - DNA, 201 bp, Homo sapiens
tttgtcagctggccatttattagcagcagaagcagcgtgcagtatttttgtccattaaagctaggggattagtttcctagggctgccatgataaattaccrtaaacttagtgccttaaaacaacacaaatgtactcttgcatagttttggaggccaggagccacattccctccaaagctctggaggacgatccttccttga

SEQ ID NO: 23178 - DNA, 201 bp, Homo sapiens
atccttccttgactctttcagcttctggtggctcccgtggatttttggctctggcagcgtaactgcaatctctgtctctatcgtaacgtggcgttctcccstgtgtctcctatgttttcttttctggctcttgtaaggatactttcattggatttagggtttgtcttaatccaggacgatctcatctcaatccttacctta

SEQ ID NO: 23179 - DNA, 201 bp, Homo sapiens
aacctggcaatattttttccccagtttatcacaaagatgttttaaatatacaaaaaatcaagaaaaaaatgtccagtgaacacccacatactcaccacccrgattctaacattaacattcttctatatttgttttatagcataaccaaacctggtcattttgattcctcttcagccttcacagaaatgaattctgcgtcat

SEQ ID NO: 23180 - DNA, 201 bp, Homo sapiens
ctgaacatacaaagagatacattaggtaagaaagtagttgcttcaaaagagtatttattttctaaaagtactcatccacacatttccttcacatagtgtcrtggaataggaaattgaccagctcattcttatgattaatctataagtagtgcctttattgatataatattacaaaggaacttgtcctcgtaactgttgatg

SEQ ID NO: 23181 - DNA, 201 bp, Homo sapiens
aactagacttctgtaagtaactttctgcaaagcaatgacagaaaaaaattatttaactatatttaaactagcttctatataatatagccagctagggtttyggaataataacagagggactagagataaacattattttcatttgtcttcagaaaatcatctgccaccaaccttacacattttataaggatccttaatgat

SEQ ID NO: 23182 - DNA, 201 bp, Homo sapiens
agggttagctgggtcccaccctgctctcccctttcctccttgcctcccgcagcccctccccagggctctaacccctccccagggccccagcaattcccccyccaccttttttttctggggttagctatagagagaggagccccgcctcagtcttttctttaggggcagcaccttctattacagtctcgggaccccaaagca

SEQ ID NO: 23183 - DNA, 201 bp, Homo sapiens
tataccttattcatactgccttattttgcgtatatgtgtgtgtgtattttttaaacttaatgccctcttgctgttcgggataccacaatacattttgttgktatggcttcttaggctctcttaaatgtgatagttttctcactttcctttcttctgatgaccttgacagtttttttgtttgtttgtttgttttgagacaga

SEQ ID NO: 23184 - DNA, 201 bp, Homo sapiens
aaaaccaatctaaataaaatttattatggcacgttttttacgttgttggcatttgaatttcaactcgtttatttttcataaacaaacactctatttttccycacctatactaaacttttgtttgagttcttgcaagttttctggaatgtattgatcatcttttcaaaacccagggcccaacattatctggtaggtactaag

SEQ ID NO: 23185 - DNA, 201 bp, Homo sapiens
ttacgttgttggcatttgaatttcaactcgtttatttttcataaacaaacactctatttttccccacctatactaaacttttgtttgagttcttgcaagtyttctggaatgtattgatcatcttttcaaaacccagggcccaacattatctggtaggtactaagcacttcaatgaatgcatgtatcaaaccattagaacag

SEQ ID NO: 23186 - DNA, 201 bp, Homo sapiens
gaatgtttgttgtttcccatctgaatttcctgtggaattagaataccaggacattatttggatccttttttgaacttgtttgttttttctaccttatagtyaacatttatttaaacaataggtatttagtgccagttgacagtatggcgtctggcacgtattacatattgaataatatttgttgacttaatgagtaaatgc

SEQ ID NO: 23187 - DNA, 201 bp, Homo sapiens
ttgaacttgtttgttttttctaccttatagtcaacatttatttaaacaataggtatttagtgccagttgacagtatggcgtctggcacgtattacatattkaataatatttgttgacttaatgagtaaatgccctgagttttgcaaagatgaagcaggcacagtgttacccttgaggagagtatagtttacctgggggata

SEQ ID NO: 23188 - DNA, 201 bp, Homo sapiens
tgttgacttaatgagtaaatgccctgagttttgcaaagatgaagcaggcacagtgttacccttgaggagagtatagtttacctgggggataaaacatgtcrgtaaaaatgatgacataagactacgagagagacatgaaatgttatggaaatccaggaggagtggctgtttctaatgaaagtgaaatgtgtcatctcatct

SEQ ID NO: 23189 - DNA, 201 bp, Homo sapiens
ttacccttgaggagagtatagtttacctgggggataaaacatgtcagtaaaaatgatgacataagactacgagagagacatgaaatgttatggaaatccasgaggagtggctgtttctaatgaaagtgaaatgtgtcatctcatctgtgtacttttgattctccaggctgttcccatttcttttatgctatttgtattttc

SEQ ID NO: 23190 - DNA, 201 bp, Homo sapiens
attgccaggacatttacacacctggagcaagagtccctgggaacctaagaacgcaatgacttgtaaaagccacatgcatactattaagatgtatgtgaccrcttatgtgtgtacaaataactggaaaaaaaaaaataaggaagttaggtgttttcgggtgagtgcagttcccattttccttgatctcatttagaaaggtga

SEQ ID NO: 23191 - DNA, 201 bp, Homo sapiens
ggaaatttatttaaaagtgaactaagacgcaaacaccaggaaagaatttctgctaatggaggtaggtgtgagtgtgatgaaacatacaccatgtgaggagrggctgctttaacatgtctgggccaaagacgcgtctgtaattaaaaatattgccaggacatttacacacctggagcaagagtccctgggaacctaagaacg

SEQ ID NO: 23192 - DNA, 201 bp, Homo sapiens
atcccagcactttggaaggccaaggcgggtggatcacgaggtcaggagatcgagaccatcctggctaacacagtgaaaccctgtgtctactaaaaatacaraaaaattagctgggcatggtggtgggcacctgtagtcccagctactcaggaggctggggcaggagaatggcatgaacccgggaggtagagcttgcagtga

SEQ ID NO: 23193 - DNA, 201 bp, Homo sapiens
tgctatggtggtgtgtatgctttcatgtttatctttgtctagattgttttatcattacctaaggtgagaaaaactctcccctagccacattatactctacraagtcttttatatgctgataaagttctcgtaagctcccttttgttagtatctttttaagacgtctttcttatttataatattgccaggttattaagttgt

SEQ ID NO: 23194 - DNA, 201 bp, Homo sapiens
aaccgtattttattttttgaaaacaatctttttgagtgtcaaatgcttatctgttgagagcccactgtaaaactgaatgtctttgtggtagttgacatttragatgatgttttttaatgcctcattgtgggaggttaagtgtcattatcccgattttactcatgaagttctgagcaggtaagtgacttgtccaaagttacc

SEQ ID NO: 23195 - DNA, 201 bp, Homo sapiens
caagttagagatgaactactgtctctcaacatggtaaatataacccagctacattttcctccaattttatacccctttggttaaactccaaaagaggtatyccccctgtgaataattatgtcacataaaaagtacacattttaagtactagatcacacagtcacactcagaatgactagagtctgataccatgaaagacat

SEQ ID NO: 23196 - DNA, 201 bp, Homo sapiens
ccctgtggcctctcctgtatattatgttgctcaaaagatcataccattgagttcttaatatgagtggcacactgtgttaggaaccatgagaaagacaaaawaaaataaaataaaataaaagcacaatccctctactcagagacatgaaaatatagttggggagagataattttatgagaaataacagaggacagtaaaaga

SEQ ID NO: 23197 - DNA, 201 bp, Homo sapiens
ttatgcaaagagctagacagttccacaagcttacatttattcagcaagttcctaaatagcacttgcaatgtgctaggcactttcctaggttctaggtatayagctatgaagccgtctaagaccctgccctcgtggggcctgctttccagtaaggcaaatgaaaagtaaacaaagtcaatgcttgtggtatcagattataag

SEQ ID NO: 23198 - DNA, 201 bp, Homo sapiens
ttaactttgaacaggactcagtctgagatattatctcatttaagacttctcgggtcaggcatggtgggtcacacctataatcgaagaccagaagagagacwggaggatcacttgagcccaggagttcgagaccagcctaggcaacatacggagactctctctacagataataaaaaattagccgggcttggcgtgtgcctg

SEQ ID NO: 23199 - DNA, 201 bp, Homo sapiens
ttttaggtccattcttattctacaaagaggttatttttcctgcctccttcctcagataggtacaaatcagtaccatttccaccacagtcctgccaagaaamctactcagttccccatctttatgtatttatttccagaaagttctttttaaactgttattttaggttcaggggtacatgtgcaggtttgttatataggtaa

SEQ ID NO: 23200 - DNA, 201 bp, Homo sapiens
aggactgtgccatgattaagacaaaggaaaggtccaaagtattacgagttttgacccaagttgccatccatcctactccatctcttgatgcttatcttagsgggggtaattagtgagaaaagaaaaatgtaaagcaagttcctcatgaatcccttattaactttgaacaggactcagtctgagatattatctcatttaaga

SEQ ID NO: 23201 - DNA, 201 bp, Homo sapiens
gttgtgtctctgccaggttttggtatcagaatgattctggcctcacagaatgagttagggaggagtccctccttctcaattttttggaatagagtggtacyggctcttctttatacatctggtagaattcagctctgtcaatttctgtcaattgcctgtgttgaaatccaatgactacctcaaactatttctaatctcttt

SEQ ID NO: 23202 - DNA, 201 bp, Homo sapiens
tatcaagcagaattctttgagcacagtatttatcagaacttctcctgagattgaagatcatgtatactttcttctaggcctgtgcttagtctaagagagaragaaagagaaagagagagagagagagagagagagagaatatatatatatatcaattaaatgtgattgtactagacattttcagaagaaattatcaggaaa

SEQ ID NO: 23203 - DNA, 201 bp, Homo sapiens
tttgaaagaacataaaaggcaggcatttatttactataataaaacaatagactttgcaatgaattctgtaataactgccttttaatcctcacagtcccccmcacacacacacgagaactttataccccccaaaaaaaagttaaacgtcacacttactttattttatatctctgaagttggtcttcaatcaagcaaaaaaat

SEQ ID NO: 23204 - DNA, 201 bp, Homo sapiens
catcaccagttgttcattaatctcctttcccttatgtaaagtctccttttgtcctccctctgccagtctgtaagttttatcatgacatttatacatggaayggattgttaccttttctgggaggagaataaaccataaatatgaacgaggcattaaaagagcttaacataaatcactaagaaaaatccgtagactgtgaga

SEQ ID NO: 23205 - DNA, 201 bp, Homo sapiens
acagcctgatgctaattttttatcccccacaaattctatttcgcttttccttccatgtagtaagcaaaagtgagaagtgagctgattacattgcacatatsctagtgtgaagtgacacaattgtctttttccaatcagataggagtttgccaagctttactgacaccctgtaagtttgtccctgactcttgatcaggagcc

SEQ ID NO: 23206 - DNA, 201 bp, Homo sapiens
atcagtgtgcacagggagagagggagtgtgtcaaaaggtccagcccatttggctgtggggagaggccttataataacacatcagtagcatcactttacacrtgcctctgcagacacgagctgtccagctccctgttcctcagggtgaggctggggtagagctgggaatgacggactctggggactgatggagggccatacc

SEQ ID NO: 23207 - DNA, 201 bp, Homo sapiens
tacctttgataatatatgttattatgttatcttgtattttgggtcaaggaaatatattcaaagtttgtcatttaaacagttacaatggctcaaagaaggarggaacacttactgaaattgcttcactaaaacatgttgggaatactctctgaggtttctttactcatggaataaataggtactgttaaaaataatttcagt

SEQ ID NO: 23208 - DNA, 201 bp, Homo sapiens
tagtgagggagagcttagctcaaaaccaaaccaaaccaaacaaaaacaaactggagagttaactgagcttaggtcattctgcgctgtggttaagcgtggtrttagtcatctgatttttggcaagttactccttctacgcctcagtctgttacattaaggttgatcattctcatcttcagggaggcagttaaaatggaaaat

SEQ ID NO: 23209 - DNA, 201 bp, Homo sapiens
ttgtcttcatgtctttctcatttgcagcaagtagatgacacagtgctgccctctagctgattattggattataatggcttctctattcctaaggctatatmtatatctaaatatatatatatctaaatatatctaaatatatctaaatatatctaaatatatataaatatatatataaatatatataaatatatatatata

SEQ ID NO: 23210 - DNA, 201 bp, Homo sapiens
agtgagaaagataatatgcccggggttggatgtctgttttcatttattattaagtagaagaagatgctcacatacttgtaggtacagaagcttcaacatarcagtctttcacagtgtgagttatgatagacgcaatctaagagtaaattataaaagtgatagggccggaacagacttttattaaattttgggtaatattgt

SEQ ID NO: 23211 - DNA, 201 bp, Homo sapiens
ttattggattataatggcttctctattcctaaggctatatatatatctaaatatatatatatctaaatatatctaaatatatctaaatatatctaaatatrtataaatatatatataaatatatataaatatatatatataaatatatatatatataaatatatatataaatatatatattttttttatcagcaaagagaa

SEQ ID NO: 23212 - DNA, 201 bp, Homo sapiens
ataccctttaaatcattcttattctttctgagtgttccaacagatcttagaactattgagaattattatgccagccattcctgtttcattatttggtgaartcttactaagggcacgttatctttgacagatatttcttagctcagtttgatttaacaaaattttatgagcacttgctctttgacaagtactgtgccagct

SEQ ID NO: 23213 - DNA, 201 bp, Homo sapiens
aacctgttagggtcacattgtctccccgatttcccatttggtgctacactaaggaaaggctaacagtcactttcctcttctttccattacatacacagatyttctacaactgtgaatcctgacaaaccctctttgctttactttgggtggagaaactgagcaatttgcttcttaagcaggcttcatttacgtggataattc

SEQ ID NO: 23214 - DNA, 201 bp, Homo sapiens
attataatggcttctctattcctaaggctatatatatatctaaatatatatatatctaaatatatctaaatatatctaaatatatctaaatatatataaawatatatataaatatatataaatatatatatataaatatatatatatataaatatatatataaatatatatattttttttatcagcaaagagaagtggaca

SEQ ID NO: 23215 - DNA, 201 bp, Homo sapiens
agggcatagggtttagttggcttggcatagcctgcattctttcacttaacaggtattttgagatgggaattaattggaaattttgttttttatagttttcrtgatttaaaattaatgtgtttattttgaaggaagttgatttatgcgtttatttaaagtttattagtttatttaaagttaatcattaagatgaggggcttg

SEQ ID NO: 23216 - DNA, 201 bp, Homo sapiens
agatatgctgaactggtaagaatatgtgatacaaatattttaaaacctgaaaaaaatccaaaatccaaaacacttctgatcccaagcgttttggataagaratactcaacctgtatcggtttcatgcaactttttgaaatattagagatttaacaagtcatgactcacttcattgtctgtatatcgtaaatgttaaaggcc

SEQ ID NO: 23217 - DNA, 201 bp, Homo sapiens
aaaccccgtctctactaaaaatacaaaaaaattaggcctggtggcacatgcctgtagtcccagctacttgggagtctgaggcaggagaatcgctcgaaccygggaggcagaggttgcagtgagccgagatcacgccactgcactccagcctgggcaacagagagagactccgtctttatatatatatatatgtgtatatat

SEQ ID NO: 23218 - DNA, 201 bp, Homo sapiens
aattttgttttttatagttttcatgatttaaaattaatgtgtttattttgaaggaagttgatttatgcgtttatttaaagtttattagtttatttaaagtyaatcattaagatgaggggcttggccttcttaggaaaggtgaaatgggtaaatactgaattaacctgtttgagatccttaaatcattttaattgttgtgat

SEQ ID NO: 23219 - DNA, 201 bp, Homo sapiens
attttatttatggctatgatttattacagtgaggtagtaaggttactcaactggataacaaggggaaaaagcacaggtgttgaggtctagagaaatccatrtacaggcttcctgtgctctctcccttccctgagagggtcatatagagcacagtcttccccaacagacaaaaatgcagcatttgcgagagattcagtgcct

SEQ ID NO: 23220 - DNA, 201 bp, Homo sapiens
tctattgcttctggaggaaatattgaaagatggagacataagcaaccacctttgtcagcctgagagtttccaaagctgaatgttttaaaagtgcatttttwactatttttcttcattttgagttttgatgttacattttgtcacattatctcattaaatttgcacatctctgagctacacatactatctccatttcatgaa

SEQ ID NO: 23221 - DNA, 201 bp, Homo sapiens
tagaagatcaaagattaaattttggggctgggattccaaaggactgataattttgagctagtctctagtggttatgtgctgtcaaatgctttaaaactttyaaggaattaattctcttgaattaagcagagtcattcaaaaatgatcagcattgttgcttctagaggattggaattttagaagcaatattgtcaaattatc

SEQ ID NO: 23222 - DNA, 201 bp, Homo sapiens
agtaagtgacagagaagaaataaattgctcaggatagcttcatagagggtagaggatttagcgattttgaacatgaagtaggctctagatacttagagccmaaaagtactaagtattattcaggggacagtgagtagctcaatttggtttgaatggcaggttgaagcagggaagaactgggagaaaatgtggaatacaggt

SEQ ID NO: 23223 - DNA, 201 bp, Homo sapiens; identical to SEQ ID NO: 2910

SEQ ID NO: 23224 - DNA, 201 bp, Homo sapiens
tcctccctaaaacaaatcccgtatacttatcagtcagttcccacccacccccagcctaagtaaccactaatatattttgtgtctctataaatttgcctatmctgaatattttatataactataatcatatagtatatggtcttctgtgaccttttttcacttaccatagtaatttcaaggttaattccagttgtaccatgt

SEQ ID NO: 23225 - DNA, 201 bp, Homo sapiens
taaatctttgagctatctattctagagctgtagtgaaaggtaggtggctaaatgtactgacatggaaatcaacttttgttctaggcttagctgcactgcarccttattttgtgtccttgagtatataaaattgatgtaataatatgtgtccagcatatctcactgtgatgaatgagataatgtggatgcctgagcttctcc

SEQ ID NO: 23226 - DNA, 201 bp, Homo sapiens
cacttggtttttcttctccttttttaaccttttgatatactatgctggcttaagaaaaccagctttattattcttaaaagtaaatttaaataggcaatacmttcccatgcttcagaatttaaaagtataaaagtatacatgttaaacatctccttaaaactcctctccaatagataccctgttacctttcccacaggttaa

SEQ ID NO: 23227 - DNA, 201 bp, Homo sapiens
tgcttttcctaacagttggggtagcatttattgttagtcatttttaatattgtattcaaaaaactacaggtggataagggtttgacttaaggacagagtakgtgtaggcatggggaatatccgaatctcatcgctatttccagcccttgtactaaatagttaaataacgactctattttgctagtataaagtatttaaact

SEQ ID NO: 23228 - DNA, 201 bp, Homo sapiens
gatgccgaggcaggtggatcacttgagctctggagttcaagacaagcctgagcaacgtggtgaaaacctatctctacaaaaaatataaaaattagccatgyatcgtggtcacagctacttgggaggctgaggcgggaggattgcttgagctggggaggttgaggctgcagtgagtcaagattttgccattgcactccagct

SEQ ID NO: 23229 - DNA, 201 bp, Homo sapiens
aactggatttgagtagtttatgactcctgtttattaaatcaaaatcagcaaaagtatttcatcaatatttgtcctcttcaaacattttagtaaattttagraagttaaagtggagttgaataccagtcgtaaagctagtaatacctcttccaaaacaaacatacaaacaaacccctgaactacagttgtggaccttcatta

SEQ ID NO: 23230 - DNA, 201 bp, Homo sapiens
ccttaagtataaaaacagatttcagaaaagcaaagaagcacggctctgaaatttgaatttcatcttcaccaagtgaaggggtagtggggggagcaagccaraattgctatcagtaagtcatttttaagtcatcctttattgactttttcagttgtaaatagagttagaaaattttcttttgaaattttgttttgaaatccg

SEQ ID NO: 23231 - DNA, 201 bp, Homo sapiens
ctgtaacaagatactttttcactcttctccatatttagttcagatctgtctttgtctgtagatctttgaagagtcatttgtgaaactacattaggtgtttyttgttcattatcattttccccaagaggaattttaatcctatgtgtgttaattatttaattatcctaatgatgtctcatatggtacccctggcctcttgca

SEQ ID NO: 23232 - DNA, 201 bp, Homo sapiens
cgtcctagctctctaattcttctccataatgagttttgtgctgcatgataaaatattcatgttcaaataggttctaaactaattatctgtggccagcagtygccactgcagtcatttgctgttagcttggctcaagttaatggcttgtatttcagtacaaatagtcccttctggctgtttcctgtcctgattcttatccta

SEQ ID NO: 23233 - DNA, 201 bp, Homo sapiens
ctgcttttcaggacctttcctccttgtctccgagctacttgaggaaaggggctgtgtcttgcccatccttatatactactattaattttattacattactrtcacacattagcatcattatagttctaataataataatctttatgaagcaccaccattctgagtgctttatacgtattaattaattcaactatttcaata

SEQ ID NO: 23234 - DNA, 201 bp, Homo sapiens
tattcttgtgagttgtcaagtgtccgtgaaaaaacagtcttgaacttagagtcagaaacctggggtcagatcctggcatggtcagtccctgtctttgtgaygtgggcaagccctctaacttctctgtgctttcgtctttgtatctgggaaaagggaggtgtagcccctgggtggagtgaggggtaagtggcacagtgctcg

SEQ ID NO: 23235 - DNA, 201 bp, Homo sapiens
ccagcctgggcaacagagagagactccgtctttatatatatatatatgtgtatatatatatgtatatatatatacacatacacgtatatatatatatatayatatatatatatatatatatatatatatatatatattttacctctacttaacctccctggatgattgtcttagtgtcacatatatatatatatatatata

SEQ ID NO: 23236 - DNA, 201 bp, Homo sapiens
ctgggcaacagagagagactccgtctttatatatatatatatgtgtatatatatatgtatatatatatacacatacacgtatatatatatatatatatatwtatatatatatatatatatatatatatatattttacctctacttaacctccctggatgattgtcttagtgtcacatatatatatatatatatatatatat

SEQ ID NO: 23237 - DNA, 201 bp, Homo sapiens
acgtatatatatatatatatatatatatatatatatatatatatatatatatatattttacctctacttaacctccctggatgattgtcttagtgtcacayatatatatatatatatatatatatatacacgtatatatatatatatatatacacgtatatatatatatatatatacacgtatatatatatatatatatat

SEQ ID NO: 23238 - DNA, 201 bp, Homo sapiens
cactccagcctgggcgacgagcgaaactctgtctccacaaaaaaaaaaaaaaaaaaggagagagagagaaaatacagtgaatacctcctgtccaagaagarcttattatattgcttccaaaacaagatatgcatgtgggaaatgacagaaaaaaaaacacttctaaagacattaataagtgtgaatgcattgaagtaatga

SEQ ID NO: 23239 - DNA, 201 bp, Homo sapiens
atacacgtatatatatatatatatatacacgtatatatatatatatatatatatatatatatatatatatattttacctctacttaacctccctggatgaktgtcttagtgtcacaggatccttcgggtgtcacttcaccagccagaaccctctgtggctggcggcgcctctgcttgagtttcactcatgcccgttgggct

SEQ ID NO: 23240 - DNA, 201 bp, Homo sapiens
tttaatctcattagcagggtaattgtgctgttaggggaaatggccaaccaggttacagagaaacccacatagtctaattattcttcgacttctgtcattgragaactcagaggcaaaagatgctcagcctactatcgtggttaagtcttagaaaaatctcagacctttcacagttgccagaacctgtgtatggcattgatc

SEQ ID NO: 23241 - DNA, 201 bp, Homo sapiens
ccctgtggtgaaagtcagattgcttggcaggtgtatgttttttttttcaggcaactcaggctgtacatttggatggtagtaagcatagctttccatgactwaatggattaatatccttatcaaagtgcctaatttattgctagggaatagcatattctgtgtaacatctgagctgttgtctgaaaaaattacatgaattcc

SEQ ID NO: 23242 - DNA, 201 bp, Homo sapiens
ttcaatgtacagaatggtgaagataaaataagatgctggttgaaaattgctctgagcacttttaagtgtaatagtcgatgttgctattgtttggtatgccmaagctctttaaagtgcaggaaatttcgttacaaagatttgtgctgtcttctataaagcagagccagctgtagactagaaaactccaacccgtagaacatc

SEQ ID NO: 23243 - DNA, 201 bp, Homo sapiens
actcatggcctatagcctggtagagaacacagactcagcccttctctagacttgccttctcaaactctttcacacttgacctctttcgccattcttcaagwtagagtgggtattcggtttttcataagctctgtcatttttgttttccctctttctgcatttatttcctagccatggtaaatttgggatgttgtgaagatc

SEQ ID NO: 23244 - DNA, 201 bp, Homo sapiens
gaaaaggactgagtagagagggtagagactaagacaggcaaactattttgtaggctagtggagagtctatgcatatattacttgaggtattgtttagtagwgaagtaaacaagacaggctttggtgtatgctaaaggaatacaaagaagggagaagaagatttctaaaccttttcagagtcttttagaaaatctgtaagat

SEQ ID NO: 23245 - DNA, 201 bp, Homo sapiens
ttcaagttagagtgggtattcggtttttcataagctctgtcatttttgttttccctctttctgcatttatttcctagccatggtaaatttgggatgttgtsaagatcaagtctcagttcactctccatccacttacttgagaatagaggtactcggtagtcgtactcacattcgctgtgctccagggagctagttgtcaaa

SEQ ID NO: 23246 - DNA, 201 bp, Homo sapiens
attctataccttaaagtaaaacaaacctattttagtatttcaggccagaaaacgtatgagagtattctcgcagaaatagtttttcgtcatttctcagcctrtaaaactttttgataacctctattttgcgtggcatcgtgaagtcatgttgttggccaggccattgaatctccacaaaagtgcttgctcctagaatgtttc

SEQ ID NO: 23247 - DNA, 201 bp, Homo sapiens
ctagaactcagttctagtcctgactctgcctttactctctctcattcatttagttggcctaatgtcctctgaacaggcttcctcctgggacacttgattcsttagatgactatacttttcctgtgaagtgtgcctattttacagagaagcttcccacttcgaactggaaaaaataagcatagtggagtgactttttcaagg

SEQ ID NO: 23248 - DNA, 201 bp, Homo sapiens
tgatttttgttgtggggaagtaattgatgttctataacattgaccctatgtggatgttcatttctgcaatttcctggtcaactttcattttgttttttttrtgtttgtttgtttgtttttgagacgaagtcttgctgtgttgcccaatctggagtgcagtggcgcgatcttggctcactgcagcctccacctcccaggttc

SEQ ID NO: 23249 - DNA, 201 bp, Homo sapiens
ttttagggttattgtgaatattgttagatataagatgaattggtgcatatcctctgacgctgggagaccattgtaattgattggtcaggtattttatagcraacttctatgtagaatataggattagataaagcctttgtatacggtaagctttcagaatttaaattaaaaatgaaaaagtcaatggagatttatgggaat

SEQ ID NO: 23250 - DNA, 201 bp, Homo sapiens
cttatgagctgtaacactcactgtgaagttgtgcaccttcactcctgaggccagcgagaccacgaacccaccagaaggaatgaacaactccagacgcgccrcctttaagagctgtaacactcaccgcgaaggtctgcagcctcactctgaagtcagcgagaccacgaacccaccaagaaactccggacacatctgaacatc

SEQ ID NO: 23251 - DNA, 201 bp, Homo sapiens
tggtatgtggttgataagttaacttttaaatgtatgtaatagccagagccttttaaagttatcttaaaatgttcactgtaaagcttcgttaatagctgctstaaatctgtttgtcaagtgctttccactctcttccagtttctgctaatgctactgctattgcttactacattatccaagttggaaaccttggtatgatct

SEQ ID NO: 23252 - DNA, 201 bp, Homo sapiens
aagttatcttaaaatgttcactgtaaagcttcgttaatagctgctctaaatctgtttgtcaagtgctttccactctcttccagtttctgctaatgctactrctattgcttactacattatccaagttggaaaccttggtatgatctttcctgctttctcttttctttgtaattctgctgtctagcaggctatttctatgca

SEQ ID NO: 23253 - DNA, 201 bp, Homo sapiens
catatatgtgagcaaggaagatatacttgttgtatgctgctgaattttgaggtggtttgttactcagtattgtggcggtagctgacaaatacagaaggatrctcatttcttttaaagaccttctttaggcactgttttggaagctgcagctttccatgtagcatcaagaactttattgttcaatggcacctattttaatgc

SEQ ID NO: 23254 - DNA, 201 bp, Homo sapiens
gtctaaaatcatagcctgatgttcagaggctctaccctgtggcttcaaatgcctcatcccaggactctctgctattgctctgcactccccagtctaaccarattattcttccatgcctttgctcatgctcttccctccaactagaatttctttcctggaagccctgcctgacagaatcttaccccacaggaagtcttcctc

SEQ ID NO: 23255 - DNA, 201 bp, Homo sapiens
atgccaaactgtggtttatctttatgatgaaattatgagaaatctttctgtatggcccatatattctatatggcatatgtattaactttccaatcagaggragataaaattttgttttaaaactttaaaaagatctgcccacctttccaaaataccctgtatttccttcctggtagaaatgttttcagacagaatgtatgg

SEQ ID NO: 23256 - DNA, 201 bp, Homo sapiens
ccaaaaaatagaacgaattggcacctgccagaatcaaccattaccttggcctcactggcatcatgctcatcacgctttcgttgatgggagcatatgttccmatcaaagccatgaagtccattcctgttcccactgactgttctcctcacacacccacaggtagggcaagatccattattataaatacagaaagcccattac

SEQ ID NO: 23257 - DNA, 201 bp, Homo sapiens
ggctcaacccaaacagctgaggccaaaaagagaggaggaagaagatttcataaggtaaaaggtccattttctaagttgtcctaaacatagggaggaagcayatctgtttagctaatatttttttacatgaaatttaggcaaattctaaaaatcaagcagcaattacttgaacttagtaaaatatgttttcctcctgtctca

SEQ ID NO: 23258 - DNA, 201 bp, Homo sapiens
ggggtttcaccatgttggccagagtggtgtcgaattccagaccgcaagtgattctcccacctctgcttcccaaagtgctgggattacaggcatgagccacygtgcccggcccatagtttattccttgaattgaatggttacttattgaatgcttatgatatcccaggccctagggacagaaagatgattaaaggctaggtc

SEQ ID NO: 23259 - DNA, 201 bp, Homo sapiens
aaatttaatctcattagcagggtaattgtgctgttaggggaaatggccaaccaggttacagagaaacccacatagtctaattattcttcgacttctgtcaytggagaactcagaggcaaaagatgctcagcctactatcgtggttaagtcttagaaaaatctcagacctttcacagttgccagaacctgtgtatggcattg

SEQ ID NO: 23260 - DNA, 201 bp, Homo sapiens
atgttctataacattgaccctatgtggatgttcatttctgcaatttcctggtcaactttcattttgttttttttatgtttgtttgtttgtttttgagacgragtcttgctgtgttgcccaatctggagtgcagtggcgcgatcttggctcactgcagcctccacctcccaggttcaagtgattctcctgcgtcagtctcct

SEQ ID NO: 23261 - DNA, 201 bp, Homo sapiens
ttggccaggctggtctcaaactcctgacctcaggtcatccacctgccttggcctcccaaagtgctcggattacaggggtgagccactgcgcctggcctcarttttcattttgtcttagtaccaatggataacctttacttgaatcagttgttttattaggggccacaaaatggttattttttatttatttttttgagacag

SEQ ID NO: 23262 - DNA, 201 bp, Homo sapiens
aattttcattttgtcttagtaccaatggataacctttacttgaatcagttgttttattaggggccacaaaatggttattttttatttatttttttgagacrgagtgtcgctctgtcgccaggcttgagtattggtgcaatcatagcttacctgggacacctggactcaagcgattctcccacatcagcctccagagtagca

SEQ ID NO: 23263 - DNA, 201 bp, Homo sapiens
aggcttgagtattggtgcaatcatagcttacctgggacacctggactcaagcgattctcccacatcagcctccagagtagcaggggttacaggtacacacraccacatccagctaatttttctgttttttgtagagacagggtcttgccatgttgcctaggctggtctcaaactcctgggctcaagcaactctccgtgtcg

SEQ ID NO: 23264 - DNA, 201 bp, Homo sapiens
gctagtatctaagattgttggagggcaagaatcttatctggctttgtatctcctgaagttagtctagtgtttggcatagagaaggtacttacttatttatmtatttaatcaattagctgagttccctgctgtttccccaaacaacttcctatcctctccagaacagttttcatctggtagtcagtagtagtattgccaaca

SEQ ID NO: 23265 - DNA, 201 bp, Homo sapiens
catacaggggagagagtccagtgggggcgggctgggcaggaaaaccgcaaccacctacaaacatcatgcagtttatagagcatttccacttaccaccctcrcaccaacgacctccacctggcaaccttaatgtaacccaaaactcggggcctcaatcccccatatggctggtgttccatgaaatcggccaagggcctcaga

SEQ ID NO: 23266 - DNA, 201 bp, Homo sapiens
tgcgcgcgtgtgtgatggtgctggagatgtgtgtctgaagtcatagacatatttctctgaccatatagaaccttagattcttagcagcatctctgaactgycctctcaggagctaaaacagtacagatacagagcattcggcaaactaaagttgttttgcttttggttttgtttctgaattgtgaatttatttatgtctta

SEQ ID NO: 23267 - DNA, 201 bp, Homo sapiens
ggtatatctccgaatgctatccctcccccctcccccctccccaccacagtccccagagtgtgatattccccttcctgtgtccatgtgatctcattgttcarttcccacctatgagtgagaatatgcggtgtttggttttttgttcttgcgatagtttactgagaatgatggtttccaatttcatccatgtccctacaaagg

SEQ ID NO: 23268 - DNA, 201 bp, Homo sapiens
gctatccctcccccctcccccctccccaccacagtccccagagtgtgatattccccttcctgtgtccatgtgatctcattgttcagttcccacctatgagygagaatatgcggtgtttggttttttgttcttgcgatagtttactgagaatgatggtttccaatttcatccatgtccctacaaaggacatgaactcatcat

SEQ ID NO: 23269 - DNA, 201 bp, Homo sapiens
tccccttcctgtgtccatgtgatctcattgttcagttcccacctatgagtgagaatatgcggtgtttggttttttgttcttgcgatagtttactgagaatsatggtttccaatttcatccatgtccctacaaaggacatgaactcatcattttttatggctgcatagtattccatggtgtatatgtgccacattttcttaa

SEQ ID NO: 23270 - DNA, 201 bp, Homo sapiens
ctctgattagttggtagaaacaactgatccaaatgtctagactctgatgcctctgggaagtcctgatgatccagggtatggatttctgaagcttcacatgyttttatcagtcgatttccaagatgcccagagaccattaagatagataataaatcaagggagatttagctgtgtttggtaacatacaaagaactatactca

SEQ ID NO: 23271 - DNA, 201 bp, Homo sapiens
taccgtggtaaaaggccagaggtctccttggggaaggatgggagaaagattcactgcataaattgtcagtaatgcggtaggcttcttcctcaaggggaccyggcctcccgttcattcaaggagttctgggtctgtaaactggctcaagtctgaaaattgattgaggggctttgattctctgtttttataattcaaattagt

SEQ ID NO: 23272 - DNA, 201 bp, Homo sapiens
cattccctaactattttgtcttttaaagattttttttctgtttacatatgttggttttctttttatctttcagttcttgttttttttttttttccctcttkgcttagattttaaatttttagcctcactttattttctgttaccatgtcttcacccttggtctgtcatttgaaacgatggctcttttttacttttataccc

SEQ ID NO: 23273 - DNA, 201 bp, Homo sapiens
ttttttttttttttgtagagatggagtttcacctgaactcccgggctcaaatgatctgcctgcctcagcctcccaaaggctgggattacaggcatgagccmtcatgcctggcctttatttgttcatttaatgagagaattgtgagagagattatagactggtaattgttagattgttactccccaagaaaataagccagtg

SEQ ID NO: 23274 - DNA, 201 bp, Homo sapiens
aaaaataaaagatgaaccaggtatggtggtgtgcacctctagtcttagctgctcaggagcttgaggtgggaggatcccttgagcctggaaggttgaggctrcagtgagctgtgatcacaccactgcactccagcctaggcaacagagcaagactgcatctctctctctctttttttttcttttctttttgaggcagagtct

SEQ ID NO: 23275 - DNA, 201 bp, Homo sapiens
attcacagagctgcccccttcctaccaatagtagtgtgtatccagaagtcatgattgttccttgattgtgtctaaccacagtccttcagagaaggcatggwtggctgatccaaactgggtcacacagattctccatcttgggaatttggatttgggaccaaatgatgacagtttagtccttgctgacctaacgtaaagaga

SEQ ID NO: 23276 - DNA, 201 bp, Homo sapiens
tgatagggtggaaaaagtttgcagaaaattattttctttctttttttcttttttttttttgagatggattcatgcagtggcgcgatctcggctcactgcarcctctgcttcccaggttcaagcgattctcctgcctcagcctccctagtaactaggattacaggtgcccaccaccacgcctggctaatttttagtattttt

SEQ ID NO: 23277 - DNA, 201 bp, Homo sapiens
tattcacagagctgcccccttcctaccaatagtagtgtgtatccagaagtcatgattgttccttgattgtgtctaaccacagtccttcagagaaggcatgkatggctgatccaaactgggtcacacagattctccatcttgggaatttggatttgggaccaaatgatgacagtttagtccttgctgacctaacgtaaagag

SEQ ID NO: 23278 - DNA, 201 bp, Homo sapiens
atgcttctttcccataagttgttttgggaattaagcatcttgctgaaagtgaatgtgccattttgaaaatcttagcaaattacattttcagaattttatarggcctttttttccctttcgctacctttgttccaaatcatgcttttgaaacaatctttctcccaaagcatttctattaataatacttttcagttctccctc

SEQ ID NO: 23279 - DNA, 201 bp, Homo sapiens
cttaagaaaaaaaaaattgttcctttcccttttactattccattttgatgataggggttggtgtaaactaatggacatgctctgccctaatagcagaacartcttgggaaagacattgaactatcctttgcatcaattcttttatatgttaagttctgtcattcttctcttacagggctgttgtgtgtgaattgaatgagt

SEQ ID NO: 23280 - DNA, 201 bp, Homo sapiens
taggattagagaacatctatatttgccttcaagctcccttaaaatagtttagggaaccatttagcatcactttccatgccattgaactcagagttaaaatsgtgattgagatacctataatgcaaatagaaatgtcccgaggtcattgtgtaattttataggggtcttcaccaaagcaaggaagaaggcagtaagttttat

SEQ ID NO: 23281 - DNA, 201 bp, Homo sapiens
taagactttctggcttgctgtgctgatactcattaataaatatttcactgggtattaggaagattcagattgactaaatgaggctcttcttcaatataaaygaaagcccttgtgtttttcgctactgtgcaggcctaattctcgtgtctggccttcattaaggcaaatgaatgttagatgggtgcatcaacacagggatgg

SEQ ID NO: 23282 - DNA, 201 bp, Homo sapiens
tgaagttgatcaagcccttcttttgatgagtaaatgaataaagggatacccatgtctgctcagaaccatctttggtccgaccttatgaatagcacagataygtcctctataatcgtggcctaaagaaataagaaaaaaattgttagtatctcattctgtcacctccactgagatgcctattacaggataatgaattatata

SEQ ID NO: 23283 - DNA, 201 bp, Homo sapiens
ctaaaaatacaaaaaaattagccgggtgtggtggcaggtgcctgtagtccccagctactcaggaggctgaggcaggagaatggtgtgaacccaagaggcgrggcttgcagtgagccaagattgcaccactgcactcaagcctgggcgacagagcgagactccgtctcaaaaaaaaaaaaaaatttatacatgtgtgtttct

SEQ ID NO: 23284 - DNA, 201 bp, Homo sapiens
atccatgtccctacaaaggacatgaactcatcattttttatggctgcatagtattccatggtgtatatgtgccacattttcttaatccagtctatcattgwtggacatttgggttggttccaagtctttgctattgtgaataatgccgcaataaacatacgtgtgcatgtgtctttatagcagcatgatttatagtcattt

SEQ ID NO: 23285 - DNA, 201 bp, Homo sapiens
caaacatgagagtaagataaatttctgtccatacagaatatgtttctgtccatacagaatatgttatgattgttcttaacatgttctccagtccatagaastgtcagttggactttctggaaaatacaaatgtgcttcctgtgtgtgtgttcacatacattgtattatccgtgattgttttctatgtttcaacaaaagtag

SEQ ID NO: 23286 - DNA, 201 bp, Homo sapiens
tccatgtccctacaaaggacatgaactcatcattttttatggctgcatagtattccatggtgtatatgtgccacattttcttaatccagtctatcattgtkggacatttgggttggttccaagtctttgctattgtgaataatgccgcaataaacatacgtgtgcatgtgtctttatagcagcatgatttatagtcatttg

SEQ ID NO: 23287 - DNA, 201 bp, Homo sapiens
taactaataaattattgttaataaatataagactagtgatgacagccagtacttactatgcacgccatttgtgccagacactgctatacttaacactttayatgtagtagttactcacagcaccttatgagacaggtgttgttttcacccatatttcgtggataaggaactgagggatagagagataaagtaacttgccta

SEQ ID NO: 23288 - DNA, 201 bp, Homo sapiens
cagacgtagatttggtcttttcacatagtcccatatttcttggaggctttgctcatttctttttattcttttttctctaaccttcccttctcgcttcattycattcatttcatcttccattgctgataccctttcttccagttgatcgcattggctcctgaggcttctgcattcttcacgtagttctcgagccttggtttt

SEQ ID NO: 23289 - DNA, 201 bp, Homo sapiens
gttaataaatataagactagtgatgacagccagtacttactatgcacgccatttgtgccagacactgctatacttaacactttacatgtagtagttactcrcagcaccttatgagacaggtgttgttttcacccatatttcgtggataaggaactgagggatagagagataaagtaacttgcctaaagtcatacagctggt

SEQ ID NO: 23290 - DNA, 201 bp, Homo sapiens
tcccttctcgcttcatttcattcatttcatcttccattgctgataccctttcttccagttgatcgcattggctcctgaggcttctgcattcttcacgtagytctcgagccttggttttcagctccatcagctcctttaagcacttctctgtattggttattctagttatacattcttctaaatttttttcaaagttttcaa

SEQ ID NO: 23291 - DNA, 201 bp, Homo sapiens
cattctccatccagctttgttccgttgctggtgaggaactgcgttcctttggaggaggagaggcgctctgcgttttagagtttccagtttttctgttctgktttttccccatctttgtggttttatctacttttggtctttcatgatggtgatgtacagatgggtttttggtgtggatgtcctttctgtttgttagttttc

SEQ ID NO: 23292 - DNA, 201 bp, Homo sapiens
ccattagttatccctctgatttccttccttaggttcaaaaaaatctctctgggcttgtggaaaagatcatagcaattctctaagaaagctaataatgggarcaaattatgatctggttcacaagacatgaaacaattagggaagaaaagaatgtataataaaatactaaattatatgtgatatataatgaaggatagatag

SEQ ID NO: 23293 - DNA, 201 bp, Homo sapiens
cgttcctttggaggaggagaggcgctctgcgttttagagtttccagtttttctgttctgttttttccccatctttgtggttttatctacttttggtctttsatgatggtgatgtacagatgggtttttggtgtggatgtcctttctgtttgttagttttccttctaacagacaggaccctcagctgcaggtctgttggaat

SEQ ID NO: 23294 - DNA, 201 bp, Homo sapiens
cgtggtgcgccgttttttaagccggtctgaaaagcgcaatattcgggtgggagtgacccgattttccaggtgcgtccgtcacccctttctttgactcggaragggaactccctgaccccttgagcttcccaggtgaggcaatgcctcgccctgcttcggctcgcgcacggtgcgcgcacccactggcctgcgcccactgtc

SEQ ID NO: 23295 - DNA, 201 bp, Homo sapiens
cagttgccccctattttattttatttattttatttatttatttattcatttattttttgagaaggagtctcgctctgttgccaggctggagtgcaatggcrcaatcttggctcactgcaacctccgcctcccaggttcaagcgattctcctgcctcatccccctgagtagctgggactacaggtgcgcgccaccatgtctg

SEQ ID NO: 23296 - DNA, 201 bp, Homo sapiens
ggctggagtgcaatggcacaatcttggctcactgcaacctccgcctcccaggttcaagcgattctcctgcctcatccccctgagtagctgggactacaggygcgcgccaccatgtctggctatttttgtatttttagtagagatggggtttcaccatgttggccaggctggtcgcgaattcctaacctcatgatccgccca

SEQ ID NO: 23297 - DNA, 201 bp, Homo sapiens
ttagtagagatggggtttcaccatgttggccaggctggtcgcgaattcctaacctcatgatccgcccacctcggtctcccaaagtgctgggattacaggcrtgagccaccacacccggcccagttgcccactatttaaaggggacaatgaggagatagtttgactggaacagagttcctattagaatctagtaggagataa

SEQ ID NO: 23298 - DNA, 201 bp, Homo sapiens
atagctcaatcaaaaggtaagcccatatgtatgggatctttttgtttatagcttaaaaattttttttaatgttttaaaaaactcataaaatttactgtgtyaaccatttctaagtagacagttcagtggtgttaagtatattcacactgttgtgcagccaatctccagaaatatctcatcttgcaaagctggaactgtgtg

SEQ ID NO: 23299 - DNA, 201 bp, Homo sapiens
atctatatttgccttcaagctcccttaaaatagtttagggaaccatttagcatcactttccatgccattgaactcagagttaaaatggtgattgagatacytataatgcaaatagaaatgtcccgaggtcattgtgtaattttataggggtcttcaccaaagcaaggaagaaggcagtaagttttatagcgtgataggtgg

SEQ ID NO: 23300 - DNA, 201 bp, Homo sapiens
caccaataacaattgtaaaagccactattctaggttaattgcctgagattggaatttctgggccattagagtcttggattttcagttttacaaaaccagaytccaaagtggtagtaccaacgtctcatctaccaaaagagaatggaataaaatattttaactattaaaacttaggcccgatgcagtggctcacgcctgtaa

SEQ ID NO: 23301 - DNA, 201 bp, Homo sapiens
atatgccattcattttgaagctttggattagtttattccatgattatcctcacctatcacgtatggctagtttaagagcgttatttaatctagagtaacakttctgaatgttttttaacaacaacaacaacaacaaaatagcgcatgtgacacttcctttacttctttgtcccattcctcctcttttctaaaataaataaa

SEQ ID NO: 23302 - DNA, 201 bp, Homo sapiens
tcttcaccaaagcaaggaagaaggcagtaagttttatagcgtgataggtggcctttatgtgaagtgggttgaaatgttgctctctgtgtaggcacacagtrcatggaataggcatttcattatgttcatatctacctgtatttttcctttgatcaatgcatatgtttgattaaacagaatgaaaatctacaaaagtgaaaa

SEQ ID NO: 23303 - DNA, 201 bp, Homo sapiens
tgcttttttgaaatcttcaagatagaatctaataaaaactttcagactcagaagttggaagtaggagtactgacttcttagtataaggtgaagcagaagtrtatgactccttgttacaaggagaaaaagacacaaaaaggaagaatatgtggtcaatacagaaaaataggaattcttcatacgtgacttgataaactaaaa

SEQ ID NO: 23304 - DNA, 201 bp, Homo sapiens
tctattcacaagaaaaaaatagaaattgggagacttgagtagcttattttcaagtttaaggaatgggaaggcacttcaatatagattatcttatttcactyaataattttgtaaagtaaatgttattatttcccttttttccattgagcattgaaggtttttaaaacttacagaaagccacaaaacgagttaatgttagaa

SEQ ID NO: 23305 - DNA, 201 bp, Homo sapiens
aagatgctcagcctactatcgtggttaagtcttagaaaaatctcagacctttcacagttgccagaacctgtgtatggcattgatcatgtcctacccattcwgggatcctttcctgtataaattaacacaccaataatacaagctcctgtcatgttgctcctttttatatgtgcattttgcccacccacttttccaacaagg

SEQ ID NO: 23306 - DNA, 201 bp, Homo sapiens
gacagagtgagactccgtctcaaaaaaaaaaaaaaaaaaagttggtagttgcagatacaaaatgctactgcatgagatctgtccagtagcctcaactattkttagtatgcagtcagagagacagaaatgtatttcagggcagctgctaccaatttctttttttttgttttgttttgttttgacatgatactttttgccaga

SEQ ID NO: 23307 - DNA, 201 bp, Homo sapiens
gaaaaaggccaggccccaaaggccatatattatatggttcaatctatatgaatatccagaatggataattttatagaaacagaatgcagattgatggttgycaggggctagggaaaggggacaattgggaggaagtgcttactggataagggctcttactttggagtgacggaaatgttttggaaatagagagaggtggtg

SEQ ID NO: 23308 - DNA, 201 bp, Homo sapiens
gcttggcacttctccttcttgcctccttgtgaagaaggtgccttgcttccccttcaccttctgccgtgactgtaagttttctgagcctcccccgccccaarcatgctgaactgtgagccaattaaacctctttcctttataaattacccaatttcaggcagttctttatagcagtatgaaaatagactagtacagtatcat

SEQ ID NO: 23309 - DNA, 201 bp, Homo sapiens
tttttttgtcctcataaagtagtattaagtaatatcacattattaagtaatatttctgcactgaattttcagtcctctgatgataggattttctttctttkgtttcaaaagttgaagcaatcttaggaacaatagtcaaaaagaattcatttagggaaacatttcacaaagatcccctggtcattgctttcaaagtttaga

SEQ ID NO: 23310 - DNA, 201 bp, Homo sapiens
gcctcctagacctttgtgtagtcagaccaacagagagaatgaaagtgatgaagggacgcagccactaggactaccaatgcgtggctcagattatgtgtcarccttgatgttcatgaaaacctagaatgataagatcatgttcctcaaggaaattccagatcttggttagtctatcttgtggttaaaaagatccttaaagta

SEQ ID NO: 23311 - DNA, 201 bp, Homo sapiens
tctgattccttctgtgtttttatgatatcgtcttcttctagagaattagttgaccaaaaataaagggagtcgttctatttcttaagacctaaaataatcaytttggttcatttatgatgctctgaatgaaaaattcacaactttaggaataaaagttttccagttttgttttaataacattcctttttttgtcctcataaa

SEQ ID NO: 23312 - DNA, 201 bp, Homo sapiens
gaacatgcatcatggaaatagcctcctagacctttgtgtagtcagaccaacagagagaatgaaagtgatgaagggacgcagccactaggactaccaatgcrtggctcagattatgtgtcaaccttgatgttcatgaaaacctagaatgataagatcatgttcctcaaggaaattccagatcttggttagtctatcttgtgg

SEQ ID NO: 23313 - DNA, 201 bp, Homo sapiens
attcttatgattgggtcttaatttcctatagacattcaagccttaaaagttttcagttaaattctacataactttctccataggcaacttcttttagtcartgtggtacttctttaaattcttaataagctcagatcagatgaaagaactgtttttctatcccaaggtgacatcatttggatcccagactgaggttgcctt

SEQ ID NO: 23314 - DNA, 201 bp, Homo sapiens
attttaataaaatgaaatgattaatatttattcgacacctgctttgtgctattgctagacaaggtgatgtggggatacagaataaacttaaagcaagactycttcttctcaggaatttagtagggatcaattaattaggaaaccggaattcctcacacctacaaatccaagaacagtaaaggacactttataattgagtac

SEQ ID NO: 23315 - DNA, 201 bp, Homo sapiens
ataaaataatttcaagcataaaaatatatttcattaggataaattccagtgaggaaatgaaatagaaataataattcaaagagaaaaaggaaaagcaaaamatatccagctgttaaagaagagcttgttcatatgtattttaaatgtataatggagggtatcaaatccctatggcattgagattctattggatgctttttt

SEQ ID NO: 23316 - DNA, 201 bp, Homo sapiens
gctacctcacagggaatttgaaccagtaaactggcctttaaaagtcaaatcactgaattcacatgatgatcttgttagtactgaaaattttactttatatraaaaaatggtttcttagcatcagaaaaaataaaataatctgtcagtagattttttgattaataggcttgaggcatatattttatatacattttagctggt

SEQ ID NO: 23317 - DNA, 201 bp, Homo sapiens
aaaaaaaaaaaaaaaaaaaagagttcgagaccagcctggccaacatggtgaaagcccatctctaccaaaagtacaaaaattagccaggtgtggtggtgtaygcctataatcccagctactcgggaggctgaggcaggagaatcgcttgaacctgggaggtggaggttgcagtgagttgagattgcacccctgcactccaga

SEQ ID NO: 23318 - DNA, 201 bp, Homo sapiens; identical to SEQ ID NO: 2908

SEQ ID NO: 23319 - DNA, 201 bp, Homo sapiens
aaataaaaataaaacttaaatattaaaaagtttaaaatttttaaaataattgcattttaataatattatattttaaatttatgttgaacctccattaaatwtaaagctttttttttttaagtagggcatgccctctttttctagtaagttgtctgattgtgggcacccaataactttcttacaaataataatgttgataaa

SEQ ID NO: 23320 - DNA, 201 bp, Homo sapiens
tcaacataatccaaaagaatatcagttctgcaggaactgataatattgtaatcgaaattcttctacagagtctagtttttcttagaaaatgatgcatattstatcattttaatgtctatacaactgatagatattcacttgcaagtaatcagttagacaggaagacaccttttctttattatcctgtgtacaaatgtaata

SEQ ID NO: 23321 - DNA, 201 bp, Homo sapiens
gcaaagcagactgatcattgttgaatagttttcatctggaagttttctctttgtttgaagtgatactctcctgtccattggacatagttcttttctctgartgataacaaatcagtttaatccttttatgaatgcccttgaaatatatgaagatagctatcatagtccatttagtcttgctttccctccttaaactgaaca

SEQ ID NO: 23322 - DNA, 201 bp, Homo sapiens
acctgtgctttagggaaatttttctgagttttgtgtaagatggatttgaaaagcaagagtatagagatagaggggagagagacattaagtgcctgaatcasgggacagggaaggaaaatggagaggaaggaacagattaagagatagtaaagaggtaaacttgataagactttggccactgattggctatagaagaagaaa

SEQ ID NO: 23323 - DNA, 201 bp, Homo sapiens
attctgtcagtgtcaggactaagtaattctagatgattgcagtcctcgaagcccagctgcccacgtacttaaagctcgtgggagagattgatatgtccccrgagagtctgccttgcactgggccttcttcacctcttcgagtctcccatgcgaggctcagcagtgactcatcatgatcactggagtggtagggggctcaga

SEQ ID NO: 23324 - DNA, 201 bp, Homo sapiens
atcaaaaaatcttagctattcctgtaagttccttgtcttccttgattacataagcaatcttttttttatgcatgtcattgaaaaaatgtccaacagcatargactaagttgagaattggggagctatacctcctgacacttccttgtatgttgacatctgtatattacttagtgcctcaggagttcatatgtttttctaac

SEQ ID NO: 23325 - DNA, 201 bp, Homo sapiens
ttctacctactatttatatgacactgaaaagctcctcagcctctctgccttgatttcctcatctgcaaaaaggtaataatagtcctttcctcaaagcgttrtttcaaaaattgtcaatcttttataactggttttagcgaagtgatatgctcccccaaaaatgatttgctgctattttgataatgataataatggtaatga

SEQ ID NO: 23326 - DNA, 201 bp, Homo sapiens
tgtgtagccagaggccagggtcctataggaatgagactctccttgagctggccttggagcttttgccaacctaacttaactttgaacctcagagtgagagrcaggactagctggatttcttggccaactaagaatccctaagccttgctgggaaggtgactgcatccacctttaaacacgggggcttgcaacttagctcac

SEQ ID NO: 23327 - DNA, 201 bp, Homo sapiens
ttaaatatctgctttcatggggtttatgttctgttgtgaatgggagaggggagatagacaataaatgaatgtaatacataaacataaagaattttagggcygggcgcagtggctcacacctgtagttccagcactttgggaggccgagggcaggcagatcaccaggtcaacagattgagaccatcatggccaacatggtga

SEQ ID NO: 23328 - DNA, 201 bp, Homo sapiens
gtatgcatatgttgagtgttagtatacactgccaaataattttccaaagtggtggtaagagtttacactttttttttttttttttttgagacagagtttcscccttcgcccaggctgtagcgtagtggtgcaatctcagcccactgcaactgccaccttctggtttcaagagattctcctgcctcagcctcccaagtagct

SEQ ID NO: 23329 - DNA, 201 bp, Homo sapiens
cttttggttgttgatgtcacagaattatatctttatacattgtgtgctcaaaaacataaactagtaattcttttaaatgcattagcctcttaaatgatgtwaaaaacaaaatgtggatttataaaccaaagttaacagtaatactagcttttagactaataattgtgttttaaaaatcttttaatattttaaattatgtag

SEQ ID NO: 23330 - DNA, 201 bp, Homo sapiens
gaatgagactctgtctcaaaaaaacaaaacaaaaaaaaaaaagaattttcgaagatagtaagtactgtggagaaaagaaatggagtaaagtagatagactyaggagtgtgagaggagcaggttgtagttttaaataggatgccccagggaggctctgttgagttgagcttagaggaaaggctccaaggagttgaaagagtt

SEQ ID NO: 23331 - DNA, 201 bp, Homo sapiens
ctatgacttgtaatcaggtactgtcattatttatcttattgctcaaattgtcccaaatttggccactggtagctccttcaggttggttcctaggttgtttyaacatgtccccatccattgttgaaaacttccttacattctggtaccacaagacatttcagactcatcttgtacttcccctccctttgccttggaattaac

SEQ ID NO: 23332 - DNA, 201 bp, Homo sapiens
cttcttggtttttaaattttctttggttaagctttctctacactaatactgaaaacacacatttttctagacttcattgtttaatttttctgtattacatstaggcctttaatctatatagaatttatttctttgtaagatattgatttaatttttcctgatgtaaaaaagggtctcagtatcttttgttggtcagttctg

SEQ ID NO: 23333 - DNA, 201 bp, Homo sapiens
gccatcaacatataaatagtatagctaaatggaatttaaaactatgggactagatgaaatcttcacaggagggagtatactcatggcaaagaagaggaccrtggacttttatgaagtttgcaagatgacgagaaaccatcaaaggacattgacaagcagcagccagtgaaggaggaggaaaatctagaaaatacagtgttg

SEQ ID NO: 23334 - DNA, 201 bp, Homo sapiens
ctaactgttgcatcctcttgctgctgaaagcctactgacggagaggtcaccttggatgtttcttccatagtctgtattgtatgttcaggaattttaggaaycaattgtgttagcaagtcatccccattttaccagagtgagaacaaagcctctagtggtgtagtgacttgcctaagactcagccaggattcaattcctgat

SEQ ID NO: 23335 - DNA, 201 bp, Homo sapiens
tgtgactttggttttaaagcggtcctgaacaatagcactttctgtgatgatggaagtagtctaaaatctgcagtgccctctaaccctttgtggttattgarcacttgaaatgttgccaatgcacctgaggaactgaatttttaaatttaatagaattttaatttaagcagtaacatatggctaacgtattggtcagaaaaa

SEQ ID NO: 23336 - DNA, 201 bp, Homo sapiens
taatcaaatatagaaattgtctatcatgtcttggacttctaatgctgccaacactagtgttaaccaagctagtaaaaacaagatgaacagcaaaataataygtcatttcagaaaaatctgtaggcatctaatgaaatgattggtgttttatccttacctttcagtgctttctcctgctcaagacagccacacgaacacgga

SEQ ID NO: 23337 - DNA, 201 bp, Homo sapiens
ccctttgtggttattgagcacttgaaatgttgccaatgcacctgaggaactgaatttttaaatttaatagaattttaatttaagcagtaacatatggctarcgtattggtcagaaaaattttatacattttcacaggttgctttatggagaatagtatgtggaagcaaagaggcaaaagcagggagaagccttaggaatgc

SEQ ID NO: 23338 - DNA, 201 bp, Homo sapiens
atgttacatctccaaggatactgcagaaaggagcttgggtaccatgtgaaccagcatgcctgtaagtttcctatcaactccaagttgtgttggtacttccrttctgttcaaatggttatcagcacctgaaatgaatatgctctagattagtcttcctttttatatatagaatacacttataaaatagatggattactttaa

SEQ ID NO: 23339 - DNA, 201 bp, Homo sapiens
aacactggtggaaacagtcacatacagggtaaatactggagctagaacttaaatccagcccatctaacaataaattcaaagctctttcaattatcgcatgygtagaaagttggtaagaactagagttcagtttctggaagatgactgtctacttttttatttcatctttctttactcttcactttgtctcctaaagtagct

SEQ ID NO: 23340 - DNA, 201 bp, Homo sapiens
ggtcttcttggctcctagagaaaggatttgcgacaactttactgaattatgtttgcttaaagtgaactacaccttgatagcaatttaagattctcaacatrtaagatgttattagtattccataaaacttggatttatgagaaaccaaaaagtttaaagtattttagaagtatttttaaagctagtttcatatcctgcagc

SEQ ID NO: 23341 - DNA, 201 bp, Homo sapiens
caactaatcctattccatctgggctggggtgtaatgagatagagctacttatcaagagtataatgagatgcaaaagccattggaactgagctggaaatttmtttaaaagtgaactaagacgcaaacaccaggaaagaatttctgctaatggaggtaggtgtgagtgtgatgaaacatacaccatgtgaggaggggctgctt

SEQ ID NO: 23342 - DNA, 201 bp, Homo sapiens
tgagtcagaagttgactataggaggattgtggaaatattgatgccttggaaaggctgaagttgcagggaaagtattaagcaagagaggcgtggtttgagartagggattgaggtgattgacagcacgggttggaagaacaatgatgaaggagaagtagtgaggatattgatttagtaagtgaaagggcactgaaagaacga

SEQ ID NO: 23343 - DNA, 201 bp, Homo sapiens
gactgtgtagtagaagatttagcccaattcaaataaatttcaggtatcctagaaataaaggcttttttgttctttgagatactaaaaaattctggccgggygtgctggctcacacctgtaattctagcacattgggaggctgaggcaggcagataacctgagatcaggagttcaagaccagcctggccaacatggtgaaac

SEQ ID NO: 23344 - DNA, 201 bp, Homo sapiens
ggttgtgtttggtttttattccaattctaaggtctgtctgaacacgctgtgccttgagccatgtagcacacagaaggacaaatgatttcttcttattattmtttttattaacaattgaagggaatagttaacatttaagaaaaaaaaagactgacttgagagaaacttttggttattttctagtgagggaaaaaaagctct

SEQ ID NO: 23345 - DNA, 201 bp, Homo sapiens
ggtattcatgtaggaatgaaagagagcagcgaaatagtaggtgtgtctgtgtatgaacattagagactaattcatcaattcttcaacaaatgttttcttartacacactattgtcagactctgctttaggtgcttgagatacaagagcaaacaaaacaaagttcctgcaatcttttaatttttttgaatatttcattgaga

SEQ ID NO: 23346 - DNA, 201 bp, Homo sapiens
agttatatttgggggtattaatttcaccaactatatcacatttttctttttaaaaattaccattattattcacgttttaaaaacatccttaagcttattcrgagagtctatgaaacacctgctaaatcatatttactcttcttagaacaataaaaattgatcactatggtagatacagttgagaataaggaagatgtatga

SEQ ID NO: 23347 - DNA, 201 bp, Homo sapiens
tttcaattcacagtccagattctttctgtgacatcatattatctctatatgaatttgccttttccattcctgaggttctaacccatgaaaaagataaaacrccaagtatctaaaattagaatttgaccatgatggtggaacttatgtgacaaagttattcagggagggcagaggagtagaaaagcatctctatcaaccgtg

SEQ ID NO: 23348 - DNA, 201 bp, Homo sapiens
tcatgcaacttttcacatagaaatcttggactaaaatggagatgaaagagttcagattcatttttttagtctttattaataggagagattcagagcttctyagtaaggatggtacatctctgcagagtcaagactagattagaaaacatgtaagaggaaatgatatgttgagagatcctgcaaaatgcagaagtcataaag

SEQ ID NO: 23349 - DNA, 201 bp, Homo sapiens
atgcatgtgttcttaaatggtacgttgaagagactatacaaagaactttttttaaaaaatcaagtattacgcagccagctcatatataaccattgttgaakagaactattaccctcaataaataagaaatgatgacacttggaaaagagagaacaatagttaatgggtctgcttttccctctaaccacaaccatgaaaata

SEQ ID NO: 23350 - DNA, 201 bp, Homo sapiens
ttgaatagttcagtcaaaccgtaagagactaagggaagatttttgtttcttctgttaacaccatatagcggcaggctttgcttcccagtaatttcggttcrtacgtcaacttttccttccgttgcagggtagcggcgaagaaatccaccagaaagacaatcaaagtaacattaaaaagctcaaattttacaaaagttaagt

SEQ ID NO: 23351 - DNA, 201 bp, Homo sapiens
ctcctgcacagataagtgtccgggttcgtcctaatcaagctgaacactagtcactgggttccacggttctcttctgtgacccatggcttctaatagaactrttacactcaccgcacagcccaagattccattccttggaatctgtgaggccaagaaccccaggtcagagaacacgaggcttgccaccatcttggaagcggc

SEQ ID NO: 23352 - DNA, 201 bp, Homo sapiens
tttgggtggcctaggtgggtggatcaccttgaggtcaggatttcgagaccagcctggccaacatggtaaaaccccgtctctactaaatatacaaaaattarctgggcatggtggcaggttcctgtaatcccatctactcaggaggctgaggcaggagaatcgcttgaacctgggaggcagaggttgcagtgaggactcagt

SEQ ID NO: 23353 - DNA, 201 bp, Homo sapiens
tgaggggaaaactgcctactcaagcctcagaaatggcagacacccctccccccaccaagctcaagtgtcccaggtcgacttcagactgctatgctggcagygagaatttcaagctagtggatcttagcttgctgggctccgtgggggtgggatccgctgagctagaccacttggctccctggcttcagccccctttccagg

SEQ ID NO: 23354 - DNA, 201 bp, Homo sapiens
atgctttagagagacagtgtaatgactaggaaaatagactgcagaacagcgggtctgggttcatttcaggttctaccttgctagttggctgaccaccatcyagttcccagccttctgtgcctctgtatttcgcctatcaaatggaagtaataatagtacctaccacgcagggtggttgtgaggattaaaagtttatatatg

SEQ ID NO: 23355 - DNA, 201 bp, Homo sapiens
tgtgtccatgtgttctcattgttcaactcccacttatgagtgagaacatgcggtgtgtggtccagaaagatatttttatgtcgtttgttattttcctggcrttttgtgcttcagttatgtcattcattccttcaatctgttactcattcaaaaatcatttattaagcacttctaggagccagcgttattctagggctaaag

SEQ ID NO: 23356 - DNA, 201 bp, Homo sapiens
gcataatactattatctttgcatccctaattgtcattatcacttgtgttgctggacatttcactgcggtttcgtctgctgcaggtccagtcattcacagtmtaaattggacgacggcactttaatttggaccagtcttgtccaaggttcatttgttgagcttggctcctagtttttgaagtatcttgaaagattcagtctg

SEQ ID NO: 23357 - DNA, 201 bp, Homo sapiens
actgcaaactccacctcctgggttcacgccattctcctgcctcagcctcccaagtagctgggactaccggtgcccaccaccacgcccggctaatttttttwtttttagtagagacggggtttcaccgtgttagccaggatggtctcgatatcctgacctaatgatccacctgcctcggcctcccaaagtgctgggattaca

SEQ ID NO: 23358 - DNA, 201 bp, Homo sapiens
ccttgaaatcagattgtttcagtaaggctgagatgaggggttttgtcacaagaattgacaggtcttagcctgttggaggtaaaggggagggagaaggccayggtgatcccccaattctgccctgggcagctggcgatggcagtgcctttctctgagctagagactgagagcagaagcagctttctggagaaagatgttaag

SEQ ID NO: 23359 - DNA, 201 bp, Homo sapiens
gcctagactgtcacttttaattttgataatgttactttttcacaagagttccttcagattcacttaccctctctgatctttcattatctcacctgtagaawagtgttgagcttgatcatctgtaagattatctcaaaagtcctgttaagctgtaactagtctgtgactctatgatactctgaatgttataatcctctctaa

SEQ ID NO: 23360 - DNA, 201 bp, Homo sapiens
catctggggatcaagaatcttttgccctaagcacaggaaagaaaaatttatggaaatgacatagaattcagaaagtattccccacctaacaggtgggagamattatgtggcttattttactctaatattatgcaaccaagaaagtagaaaattggaagatattctgaaaagcatgtataaaacacattgcaaggttacata

SEQ ID NO: 23361 - DNA, 201 bp, Homo sapiens
atctggggatcaagaatcttttgccctaagcacaggaaagaaaaatttatggaaatgacatagaattcagaaagtattccccacctaacaggtgggagaawttatgtggcttattttactctaatattatgcaaccaagaaagtagaaaattggaagatattctgaaaagcatgtataaaacacattgcaaggttacataa

SEQ ID NO: 23362 - DNA, 201 bp, Homo sapiens
agagcccagcacataataagctttcaataaatgttaactccagttgaggttattactattattcttgtgccatcgtcgtttaactcaaattattactgatmatcagtggcatattgactatggatgtgaagcatagaaagttcaagacatttaacttgattttctagaaaacagcagtttaaacaatctacttttttcaag

SEQ ID NO: 23363 - DNA, 201 bp, Homo sapiens
gccattggaactgagctggaaatttatttaaaagtgaactaagacgcaaacaccaggaaagaatttctgctaatggaggtaggtgtgagtgtgatgaaacrtacaccatgtgaggaggggctgctttaacatgtctgggccaaagacgcgtctgtaattaaaaatattgccaggacatttacacacctggagcaagagtcc

SEQ ID NO: 23364 - DNA, 201 bp, Homo sapiens
acctaagaacgcaatgacttgtaaaagccacatgcatactattaagatgtatgtgaccgcttatgtgtgtacaaataactggaaaaaaaaaaataaggaasttaggtgttttcgggtgagtgcagttcccattttccttgatctcatttagaaaggtgacctcagattcctgctgactttgcaatagatactctagcagga

SEQ ID NO: 23365 - DNA, 201 bp, Homo sapiens
gtacattaagtgctatctcttgaaaaaaatgattcaacagatgtcaattttgtttatttatttattttcctaatagaggtttttactctatctccccttawagcagacctaccatcatttccctcttggcccactttcacgtacgggaggacccgtgcacactcaccttgctttcaaaactcactgccctccctgtgcaaa

SEQ ID NO: 23366 - DNA, 201 bp, Homo sapiens
gttcccattttccttgatctcatttagaaaggtgacctcagattcctgctgactttgcaatagatactctagcaggaacctgattccaaacagaaaacccrgcaatcttctcatcccaaactgatttaattatcaccagctcaagttttctttcacacaaggatttatttactgtgtgagagagatcaggaaaccattagt

SEQ ID NO: 23367 - DNA, 201 bp, Homo sapiens
gaaatagtctaatctctcttccacaaaacagttcttcaaatatttgaatgacagatccatagttctattctgtagactctgttggttctcagataatgttrgttattgatgaattttcttccattatatttccttagaattagtttcaagaagacctaaaaagaacaaatacaaaaatttagttgcgaactaaaaacttga

SEQ ID NO: 23368 - DNA, 201 bp, Homo sapiens; identical to SEQ ID NO: 2906

SEQ ID NO: 23369 - DNA, 201 bp, Homo sapiens; identical to SEQ ID NO: 2907

SEQ ID NO: 23370 - DNA, 201 bp, Homo sapiens
agatgagtgaatatatttgtgctacatgtctgttgctcattaaagtagctggtttgggattcacagcaaaaataaaaagtgttacaaggggtagaaaagargggagaagaggtcaggcagtttatagcaaagtctgctgtgctgcagctggcactagctggcgcctttgggcagtttctgctaaaccttgagcaattgctt

SEQ ID NO: 23371 - DNA, 201 bp, Homo sapiens
ttctgcttattcttcaatgttctttttatatctgcatagtactctgttgggttgatttatcataggtcaaccactctctgttgttgctcttttttatactytaagttcaggggtacatgtgcaggtttgttacataggtaaatgtgtgtcatgggggtttgttgtatagattatttcatcactcaggtattgagcctagta

SEQ ID NO: 23372 - DNA, 201 bp, Homo sapiens
ggctattccatcttttctcttagcacctaagaggcactaccctcagttcaatttattcaggtttcaatttcttcagcccagatgttccttctgtcattacrttagttcccttggaagctatccaggctgctgaaaatagcttgagtgtgtcacaacccactggcacttaccactttctcttcagtagcagaactcttgccc

SEQ ID NO: 23373 - DNA, 201 bp, Homo sapiens
gaactccttttaataaggagaatcagggacttcttcacagagggaatgggactttagctcagccttaaaaaagtgagtgagacacatgacaaaaggcactrtcatataggtggtgatggtggtttcattcactagattccatctaagtctccattcatcatgcaccagagttcaacactgattgcccgcctcacccagcgt

SEQ ID NO: 23374 - DNA, 201 bp, Homo sapiens
acagacacaccagaaatgttaaaccagttatctgagcatctcttagcccagtcaagctgacatataaaattaaacatcacaactgaggattgttttttttytcttttaacaactaaatattttactccactctcttcttgtctgcatgatttctgaagagaagtctgatataattcttatccttgttcctctataggattt

SEQ ID NO: 23375 - DNA, 201 bp, Homo sapiens
tttttgtctttgattttgtatactttgaatatgatatgcctaggtgtagaatttatggtgtgtatcctgcttggtgttttctgagcctcccagatctgtartgtagtgaggtatctctaattgatttggagtaattttcagttactattgcttcaaatatttattctgttgctttttctctttcttctccttctgatattc

SEQ ID NO: 23376 - DNA, 201 bp, Homo sapiens
ttaggcagctcctaagggagtcagaagctgcttccagcctcgtaaataatgagcacataactaacagaacctgatcttcccagcagaaataagtcagcctmcttcacagtatgcaatatggtcaatgaatcagtggttgctgagtgaactgcacttcccccagctggaggagaaacaagcttttttaggagcgatagagca

SEQ ID NO: 23377 - DNA, 201 bp, Homo sapiens
gagtgagactccgtctcaaaaaaaaaaaaaaaaaaagttggtagttgcagatacaaaatgctactgcatgagatctgtccagtagcctcaactatttttartatgcagtcagagagacagaaatgtatttcagggcagctgctaccaatttctttttttttgttttgttttgttttgacatgatactttttgccagatact

SEQ ID NO: 23378 - DNA, 201 bp, Homo sapiens
tgattttgtatactttgaatatgatatgcctaggtgtagaatttatggtgtgtatcctgcttggtgttttctgagcctcccagatctgtagtgtagtgagrtatctctaattgatttggagtaattttcagttactattgcttcaaatatttattctgttgctttttctctttcttctccttctgatattcccattatgca

SEQ ID NO: 23379 - DNA, 201 bp, Homo sapiens
agggttacttgaacagaagcactgcaatacccgtctgagagttgacttcataatcgagatggctacgaagtgactaatggacaggtagcgtaaaacgcacrgatacactagacaaaggaatgattcatatcctggatgagacagagtgggacagcatgagatgtcatcacactactcagaatggtgtgcaatttaaaatgc

SEQ ID NO: 23380 - DNA, 201 bp, Homo sapiens
atagttcttggattgtatgttttttaactgtctcagagttcttagatattctgttgttttattcttcttttctctttctggttcagttttgaaagtttctrttgacatttcttcagtgtctccagttctttccttggccatatccagtctattgctgagcccatcagaggcattcttcatttttgttacagtgttttttat

SEQ ID NO: 23381 - DNA, 201 bp, Homo sapiens
gagctagggaggccatgtgtattagaaaaacagcccccaccccaaatggttaccctcatttcattcataccctgaatgaaagaagaagaatcagttctctrgagcctggtttgaaaattcttaagtggataggtgtgattggtaggacctggagcagaattttcaggtgataaaggtcaagcaatatataaaacctacaga

SEQ ID NO: 23382 - DNA, 201 bp, Homo sapiens
tactttcgccaacaaaattcaacaaaaacaaagaagacatctcagtattttatacttttaaaattaagaatgatgtcgacacattaattttcatttactayccttgactcatagataactttttaggatatttctagtctgtagtttcaatgagttgtttgcacattgttgtattctattacagataatatgcatgctcag

SEQ ID NO: 23383 - DNA, 201 bp, Homo sapiens
cctttgcctctgccatagccttggtaactctaaccttgcttcttctagaagaggctaaattatgcataatagtttttctgtgctcagccttaagaacacakcacataaaccactccaaaatacttacacaaggacagaaagatagactgacagaagaaactatgcatttatgcgttcctggattgaacatgtcaaaacgta

SEQ ID NO: 23384 - DNA, 201 bp, Homo sapiens
agggccccaccccaagaccttttccaagcccctcagatcagattggtgcacacccacattccatgcgctcggttcactgctcttcattgcctcaacatcarctgtgacgtttcctttaaaaaagataaccctcggctaaaataaggaggctagtcgtgactcattacttggtaggataaacattttagataacgatttgat

SEQ ID NO: 23385 - DNA, 201 bp, Homo sapiens
accacattccccttgtaccagcaattcaataaaacaggcctgaaattatggagctcctagaatgtatttcttaccacaaagatagcttcatttccccatasgaggttctttttttcaaaatgttcctgatgagaaagaaacaaattcacggccctgagtctaataatacaggatttctgagccactcatcctgctaggtct

SEQ ID NO: 23386 - DNA, 201 bp, Homo sapiens
aaaaaaaaaaaaggccaacgaaatacgccttaccagaaggggtgctggaaacaaagcaaaccattttctcattcttatacagaggtacaaatgggagggayatgtggactgctgcctgcatcactagtcactgtgccatggagtaggcccacaggagtaggaggggtcctgagatgggaaatcaacatgaccatgaagaag

SEQ ID NO: 23387 - DNA, 201 bp, Homo sapiens
ccggacacatctgaacatctgaagcaacaaactccggacacaccatctttaagaactgtaacactcaccgtgagggtccgtggcttcattcttgaagtcarcaagaccaagaacccaccaattccaacacaataggtgtttagtaactactcaatgaataaatgaatatttctcataaccttgtaccctacaagcgttact

SEQ ID NO: 23388 - DNA, 201 bp, Homo sapiens
tagacttccaagtgctttccaactgttttgttgttgttgttgtttcttgcctttagtttttacagattataccttttaagttgacacacccatcaattttsactattatttttggggctcttgatgaacaacaaatagaaattcatggtacttaaaaatagtaaagagattagtatctaagatatgaaggaattgagagcc

SEQ ID NO: 23389 - DNA, 201 bp, Homo sapiens
ctggaacagtgagaatcactatttttgaattctgaaaatattaagaaggtaataaccccctcaaatacagaaaaagcgctagtaaaatggtgagtgatccyattaaggtaataatgcaaatgagacaacagccaactactaatgaaatgacccatcacagacacatatgtgttaaattaattgtgaagacttcagtgaatc

SEQ ID NO: 23390 - DNA, 201 bp, Homo sapiens
ttgtctaacttatctttagtttcaccagctgtgaaacacaaataatgtgtacttccagacctgccgcataatcagtgataacacaaaaaaagcttttattrtgtcagaaccaatctcttctaattttaattattactttgtggcttctaattttaataatcatttctgtgtaatcctagcctatgtgaatcgttttgtgag

SEQ ID NO: 23391 - DNA, 201 bp, Homo sapiens
tggacagtgtggttgggtagaaatgggcaggaaaggagaaatttcttgtattaggtaaaagagtgctttcataggtcttggtaagaaggagtacgtgatcraagtggtgttttatgatctcactggccccactgtgctaaatagcacagactagacactaggaactctggtggcttctgaagcccttcaggtttcctgtgt

SEQ ID NO: 23392 - DNA, 201 bp, Homo sapiens
ataatcagtgataacacaaaaaaagcttttattatgtcagaaccaatctcttctaattttaattattactttgtggcttctaattttaataatcatttctktgtaatcctagcctatgtgaatcgttttgtgagatgaatacaaccaagtggggtcagtgtcaaaaggctgccaagtgtcactgctgcttgggttgcagta

SEQ ID NO: 23393 - DNA, 201 bp, Homo sapiens
aggtgatctacccgcctcggcctctcaaagtgctgggattacaggcatgagccaccgcgcctggcccaggagtcacttctaattcctcacagctatcccaraatgtctttgaacacaggatttagtgacagaaccacaacaagccatatgagagccccacactgggcggtacactgcacctggaaatgtgcgtgtgaatgt

SEQ ID NO: 23394 - DNA, 201 bp, Homo sapiens
gtgtaatcctagcctatgtgaatcgttttgtgagatgaatacaaccaagtggggtcagtgtcaaaaggctgccaagtgtcactgctgcttgggttgcagtrttgtctgcaactagtatctttgaagcttttgttaagaccatattggcttccttagctcagaggaagtaaaaaatccagacattggtagttatttatcaaa

SEQ ID NO: 23395 - DNA, 201 bp, Homo sapiens
tgtagatgcaaagtgctttaggcgtaaaagattcatgaataacaacaataatgataagcaatatttattgagcattttctgtaaggtactttttttttctkgttttttcttttcttttttttttcttttcttttttttttttgagtcagtgtcttgccctgttgccaaggatggagtgcagtggcaggatcatagctcact

SEQ ID NO: 23396 - DNA, 201 bp, Homo sapiens
tcaatatgatactggctgtgagtttatcataaatagctcttactattttgaggtacgttccatcagtacctagtttattgagagtttttagcatgaagagrtgttgaattttatcgaaggctttcctgcatctattgagataatcatgtggttttggtcattggttctgtttatgtgatggattatgtttattgatttgcg

SEQ ID NO: 23397 - DNA, 201 bp, Homo sapiens
tgatgtgctgctggattcagtttgccagtattttattgaggattttcacatcagtgttcatcagggatattgccctgaaattttgttgttgttgttatgtytctgtcaggtttgtgtatcaggatgatgctggcctcataaaatgggttagggaggagtccctctttttctattgtttggaatagtttcataaggaatggc

SEQ ID NO: 23398 - DNA, 201 bp, Homo sapiens
gaaagccattagaaaatcattataataaataccaacattgatctacttcttccctctcctttggaacctcccctttccttgtttttaaaccttttagttgrgctttatatagcaaagtaatcaaactctcacaggccattataaaagaaatttaaatgatttttacgaaaaccattttccttgtttaagatttcagggaac

SEQ ID NO: 23399 - DNA, 201 bp, Homo sapiens
tataggtctattcagggctttgacttcttcctggtttagtcttgggagggtgtatgtgtccaggaatttattcatttcttctggattttctagtttattcrcatagaggtgtttatagtattctttgatggtaatttgtatttctgtgggatcagtggtaatctcccctttataattttttattgcatctatttgattctt

SEQ ID NO: 23400 - DNA, 201 bp, Homo sapiens
ttgttttgtgtgtgtgtgtgtgtgtgtgtttgtttgttttagcagcagaaccctttcttctagcagaattttactgtaaagtctgaattgggtaacaaatsaaagtggagcctctctgactaaggaagcagggaaggcaagatggagagaatggagactgaaaaatgttaaattgaattaagtttggcccaaagctgcctc

SEQ ID NO: 23401 - DNA, 201 bp, Homo sapiens
gttttgtgtgtgtgtgtgtgtgtgtgtttgtttgttttagcagcagaaccctttcttctagcagaattttactgtaaagtctgaattgggtaacaaatcaragtggagcctctctgactaaggaagcagggaaggcaagatggagagaatggagactgaaaaatgttaaattgaattaagtttggcccaaagctgcctctg

SEQ ID NO: 23402 - DNA, 201 bp, Homo sapiens
cagaaccctttcttctagcagaattttactgtaaagtctgaattgggtaacaaatcaaagtggagcctctctgactaaggaagcagggaaggcaagatggwgagaatggagactgaaaaatgttaaattgaattaagtttggcccaaagctgcctctgtacatgttttaagtttgaccaaaaggtttctttgtacatagtg

SEQ ID NO: 23403 - DNA, 201 bp, Homo sapiens
tttttttaacatgggagactttcatagaagcatgatttaggtgttgtcatgaagtcgtaggaagggattagatgctttctcaagaaatcttttaatcttakcattttgtcctcatattttccgtacttgttggatgaatgttgaaatttagttttgtaatcaccggaggcatagtgtcagtgaatattttcatcaccacac

SEQ ID NO: 23404 - DNA, 201 bp, Homo sapiens
ttggtcttttaacagagattaggaactctgcagggcactttccaaaaatccttgccttagaggttgcagcattgcattaaaggtagcccagagatccttgrtgacccttcatctcactacttcctggtccagtcttctctgagatttaaagtgccatagttcaaaaatgtctcaggagtagaaggttacattcattcatca

SEQ ID NO: 23405 - DNA, 201 bp, Homo sapiens
ccatgatgcaaatttacctatataacaaacttacacaggtacccctcagcctaaaataaaggtttaaattaaaaagatacgggccgggtgtggtggctcaygcctgtaatcccagcactttgggaggccgaggcgggcagatcacgaggtcaggagatcgagaccatcctggctaacacagtgaaaccacgtctctactaa

SEQ ID NO: 23406 - DNA, 201 bp, Homo sapiens
aaagaccaggagaaaatatctgcaaagtccatatctgataaaggacttgtatccagaatatataatgaactctcaaaacttaataataagaaaacaaaaamcccaatttttaaaactgggcaaatgatttgaacagatatttcatcaaagatatacacgcagaaaataagcacatgagaatatgctcaacatcattagtca

SEQ ID NO: 23407 - DNA, 201 bp, Homo sapiens
atgatcatatgatttttgtcctttattctgttgatgtgatgtatcgcatttattgatttgcatatgttgaaccatcttttcatccctgggatgaatcccayttgatcacagtgaatgatatttttaatgtgttgtcaaattctatttgctagcactttgtcaaggatttttgcatttatattcatcagggatattggcctg

SEQ ID NO: 23408 - DNA, 201 bp, Homo sapiens
taaagtatccaaggacttgcccctctttctggatagggagatcttcaacctgttgaccacataattagatgaaatatatattctcatgtaacaaacctgaygccagtagtgttaggcagctcctaagggagtcagaagctgcttccagcctcgtaaataatgagcacataactaacagaacctgatcttcccagcagaaat

SEQ ID NO: 23409 - DNA, 201 bp, Homo sapiens
taacctttatgagtgaaaatgctgcctaatatttggaaatcaaacatttatagctctaaataaaacttacctctacagttacttctcacttttattcttaygtctaaagggtgtggaaacatcattgaacattgtttttcacacgcagatgagactctgttgaagggagttttgtggtttaggggtttagggggttacagg

SEQ ID NO: 23410 - DNA, 201 bp, Homo sapiens
tatcatgtcttggacttctaatgctgccaacactagtgttaaccaagctagtaaaaacaagatgaacagcaaaataatacgtcatttcagaaaaatctgtrggcatctaatgaaatgattggtgttttatccttacctttcagtgctttctcctgctcaagacagccacacgaacacggatctccccccagtgtcagagca

SEQ ID NO: 23411 - DNA, 201 bp, Homo sapiens
ttgaatcctctgtgatgcttctcgtgttctttatccctagttggagaaataactctttgaagatactttttcatgtacattcgggagacatcagtaatttrggtgatattttcatctttacggtctcgatgagtcatagagtaagtgtctctctcctggtttaagtggtgaattccttcagaaagccactggccgactagc

SEQ ID NO: 23412 - DNA, 201 bp, Homo sapiens
ttctttatccctagttggagaaataactctttgaagatactttttcatgtacattcgggagacatcagtaatttgggtgatattttcatctttacggtctmgatgagtcatagagtaagtgtctctctcctggtttaagtggtgaattccttcagaaagccactggccgactagccccttggtgactgtcccagtaacatg

SEQ ID NO: 23413 - DNA, 201 bp, Homo sapiens
tggtgacaactggaccaaaaaaatgaaggagagtgaagattccaggtgacactgagattttgaggttttgcaagctagttccgttaagcaaaattcagtgkctagggaggccacctgacaagggcagctgatagaaatgtctgcagacaagtgaaaatgacgttttgatctactgagaaaccagatcttgagaaagacatc

SEQ ID NO: 23414 - DNA, 201 bp, Homo sapiens
gtgtagctcgagtaggaggtgtctgatacattgtcttctcttttcattgaaatggattggtaaaactaggcggcataagttagtggggaaaatttagatayatcttagattagatgaagacctttcaaaatagggctttaaaacatacaattcaaatatacgtgcttatacttttacgtgaattacaaattgggtaaagat

SEQ ID NO: 23415 - DNA, 201 bp, Homo sapiens
ttggctactttagtgcatagagaaatgtttatacctgggaatatctggagagtcctagaaagatctacccagcaactaaattggtagttattaattttttwaaattttatttttgagacaaatttcactctgttacccaggctggactgcagtggtgcaatctcggctcactgccacctctgcctcctgggttcaagtgat

SEQ ID NO: 23416 - DNA, 201 bp, Homo sapiens
tttacttttatattttcaaaatgtatgacatatggctaaacaccgattgcaactaactgggcggttttatactactgaataaaatggagagccagtcaagrtatcaacccatgtatctacgcacatttcagcagtttctaaagaggtgaggcatcccaatctagttagcacaaaagaataggcggtttctcatgagaaaca

SEQ ID NO: 23417 - DNA, 201 bp, Homo sapiens
ttttttttttttttttgagacagagtttcgcccttcgcccaggctgtagcgtagtggtgcaatctcagcccactgcaactgccaccttctggtttcaagarattctcctgcctcagcctcccaagtagctgggattacaggcacccaccacaacgcctggctgatttttgtatttttagtagagacagggtttcaccatat

SEQ ID NO: 23418 - DNA, 201 bp, Homo sapiens
ttcagaatgtctcattagctttttgctccctgtctcatactgaaaaaggagaatctaaacagtcacaaagactagcagaccagtagattttctcttcccgkgggcatatacctaaatctttgtgctagaccagccctatttgcagatctaagagctgctggtgtattatgaccagagacactgcaaagcctgtattgcccc

SEQ ID NO: 23419 - DNA, 201 bp, Homo sapiens
ttaaatcttgcaactgcattcttctgctctgtgtttactacggctcgagctgagctttcgcttgctgtccactaccgctgtttgctgccatcgcagacccrccgctgacttccatccctccagatccggcagggtgtccactgtgctcctgatccaccaaggcgcccattgccgcccccgatcgggctaaaggcttgccat

SEQ ID NO: 23420 - DNA, 201 bp, Homo sapiens
cactcatggttcactgcaaccttgcactcctggactcaagctatcttcctgcctcagcctcccaagtacctggaactacagttgcacctcaccatgctggsctaattttttaattttgtgtagagatagggtcttgttacattgcccaggctggtctgtaactcctggcctcaagtgatcctcccatctcggcctcccata

SEQ ID NO: 23421 - DNA, 201 bp, Homo sapiens
ataaatattttgttctgctgaagttcccgaaaagtaacatcttaaaccacctcctacttagggtgactttgcctttccttttgctcctctctctaaaggcmgaacacgtttcactccaaaaccaaataacgcacatttctctcctaatttatggttttcaaaatttcagagtgtttttttttccccttgctgtccagaatg

SEQ ID NO: 23422 - DNA, 201 bp, Homo sapiens
aacaagtatttttgcaaacactttgcatggaaaaatgattggaaagaactaggttaaaatattatatattattgcatcagatgagtgacaatatgatgatmtttttcttttgtaattttctatgtttttcaagttttcttggttgagtaggtattatttttgtaatttgggagaaatgccaagcttaagaaaaaaatacca

SEQ ID NO: 23423 - DNA, 201 bp, Homo sapiens
aggccctacctcttaatactgttgcatggcaatcaatgtgagttttgaaggggacattcaaaccatagcttttttctgtgttgtgaggaaactgcaagacrttgtttgggtcttggatgattagaaatgtggaaatgatctgtggtaacagtaacagaagcaagaaaggtctgttgactattttcttttgtctgtctgtct

SEQ ID NO: 23424 - DNA, 201 bp, Homo sapiens
ggcatgagccaccatgcccggtggagaatttggatttctaaaaagctatcagatgataccagtggtgcatagaccacactttgagtagcaagagcctaatwttttttttttttttttttttttgagacggagtctcactctgtcgccaggctagagagcagtggaacgatcttggctcactgcaacctctgactccctggt

SEQ ID NO: 23425 - DNA, 201 bp, Homo sapiens
cacgtaggtatggtatacacctacgtaaggagtataggagtataaaccatgtactcctaacttggagtgcatgataaagcttcagggagtgcataataaascttggagtgcatgataaagcttcagggagtccataaacccccaaaattatatgcaaaatctgtgtttatatagatgtgaattttttctggcaagatagtc

SEQ ID NO: 23426 - DNA, 201 bp, Homo sapiens
gtcaaatgcaataattcaagtctcatttcctcttcgaagaggaagcagtgtggtattttataaagctttctgcaaatccttgtgttatctgtgtaacttcragtgacggactttcctaaactttaggtttcttatgtgtaaactagaccatgtgtaggttaaattaataaaatgaagtgtatagcacatggttactttttc

SEQ ID NO: 23427 - DNA, 201 bp, Homo sapiens
acattgattcttcctatccatgagcatggaatgtttttccgtttgtgtcctctcttatttccttgagcagtggtttgtagttctccttgaagaggtccttmacatcctttgtaagttgtatccctaagtattttattctctttgtagcaattgtgaatgggagttcactcatgatttggctctctgtctgttattggtgta

SEQ ID NO: 23428 - DNA, 201 bp, Homo sapiens
catttaagtcctgcagcaacttatggcattatcattatttcccatttaaagatgaccaaactgagtctcagtaagttgctgaagattacacagcttgtaartaactggaaaggtaattgatgtatacttattaacagattcatcaagttacatgcattaaatatgtacagcatcttgtttgtctgtcagtcatatcctaat

SEQ ID NO: 23429 - DNA, 201 bp, Homo sapiens
tgtgtgcccattaaacaactcctctttgtccacctccaccaacccctggcggcccccattctactttctgtttctattaatttgactactgtggatacctyatataagtggaatcatatagtatttgtcttttgtgactagttatttcacttagcataatattttcagcatttgtccatgttgtaccctataccagaattt

SEQ ID NO: 23430 - DNA, 201 bp, Homo sapiens
ttgaacatcttgtctcttgttccagacatttggcacgtgttgccccaagcccaattcctttatgtgggaaaagggtctgccaaagaaggctaatttacctycttgtgaatgaaggactccagaatgtgaatgatggattgggatccattgtcagtgtggacacgagtcatttactcttctgtctaattttttagatcatgg

SEQ ID NO: 23431 - DNA, 201 bp, Homo sapiens
tccagttggtgaaattgcttcaatagcctaatttccaaaaggatcatctctgagtttgtcaagagatgagaacatgcatcatggaaatagcctcctagacstttgtgtagtcagaccaacagagagaatgaaagtgatgaagggacgcagccactaggactaccaatgcgtggctcagattatgtgtcaaccttgatgttc

SEQ ID NO: 23432 - DNA, 201 bp, Homo sapiens
ggtgatatggcagcagatttttgagcagaatccagctgctttccgaagctggagattccactggggatgtagacagcttgggaggaaataaaagccgagtycataagtgagcctgggaggagtgaagaagcagagcaagcaggacagaaagtgggcggggccagctatagggaaagaccttggggttgaagggatttgata

SEQ ID NO: 23433 - DNA, 201 bp, Homo sapiens
aggagaaacaagcttttttaggagcgatagagcatgcaataggatgtagatgggaaaggaatctgatgaattgattttcactggaaaagtctcagagattyttcacctgagattgcttaatagtcctaaagctttaagctgctaatgagtctctgtccaacccactgggggcacttacatgttgctaagcactgagtaggc

SEQ ID NO: 23434 - DNA, 201 bp, Homo sapiens
gtaaaagcactctcttttattctctctgaatcctgtaatgcatgtagcacattacaaactgccctcttgggattcatgagcccttgaaggtgaagcctggstatttctctaattccagtgtttgaaatggtaggtaattattatttatgtattatctgtctttgtaacaatggcaagaaatataatagtaagaaaccagta

SEQ ID NO: 23435 - DNA, 201 bp, Homo sapiens
cagaagagcttgggaaaattcttgtattttatatctattatgctcttgattttatatctactgtatctccctgatctgtggccagctgggatgcaaatacrgcacaagaagttcacagtatcaaaggagcaagtgaataggaccccagaatgtgattgttatgaaagtactgagattattacatttaggccctatgtgatt

SEQ ID NO: 23436 - DNA, 201 bp, Homo sapiens
tcctgggaattaattagtcatggttaagatgtaattcatcatgcaaaatatcagagctgtcttaatgaaaaattcttaatgatccagaaatgtctttgtgwccagcttaactggaatctagtttattcttttatgttcctccatgaacttgacaataatttataagtcataatcattttgagaataggaatggaaaaaaaa

SEQ ID NO: 23437 - DNA, 201 bp, Homo sapiens
caagaaaggagtgattacataaattgttttagaactctgggcttttctccatgagggatgggaacgaatacttttactgtctttgatgcgttgggctcacktagcattttgcagtgactggcctgtgtaattaaatatttagtctttaagactcataattctgtaccaaaacactatgaagtaaccactcaacctttcttg

SEQ ID NO: 23438 - DNA, 201 bp, Homo sapiens
acatgagagataaatacttttgtgcttgcattcgtacatataactcactattagtaatctaagggaacttcattacttggaaattaaattcaggagatttwggtgccctgctcttttgtttgagaatcactgccctctgtgataggcttttcactggagcctgaagggatgatggaaaggagagatattcccccagatggc

SEQ ID NO: 23439 - DNA, 201 bp, Homo sapiens
gtgttgccccaagcccaattcctttatgtgggaaaagggtctgccaaagaaggctaatttacctccttgtgaatgaaggactccagaatgtgaatgatggrttgggatccattgtcagtgtggacacgagtcatttactcttctgtctaattttttagatcatgggtaatttatgaaaaattcaattcatgtttgatttgt

SEQ ID NO: 23440 - DNA, 201 bp, Homo sapiens
tactaaaagtctttaattcctatgtaataagtggacctatttatgaaattaactataaagaatttaacacagatgcctcttgaaggaacaaagaactgtargaatggaatggtagctcagatggcttaaaatatttagtttggtttactgttagttcacttttgatgtgaatttgatgttactccaacccattttgttatg

SEQ ID NO: 23441 - DNA, 201 bp, Homo sapiens
atggtagctcagatggcttaaaatatttagtttggtttactgttagttcacttttgatgtgaatttgatgttactccaacccattttgttatgtcgaaatmctgataatgtgatatatcaatagatgacccaaagtgagactctaaaaggcaatactgtcttccaagtaggaaagggctccagaggaggtaactttgagaa

SEQ ID NO: 23442 - DNA, 201 bp, Homo sapiens
cataagccagtcacatttttgacatatgaaatacttccagtctttgacttctgttattcatacctgagtaatgttcagcttaggccagcttcactaaattwcacgtttgagaaaaggactaggttttgatttgctgatagtttgccttaaaaattcctcattgatatgtttaacatagtacatgcatccttaacttcacaa

SEQ ID NO: 23443 - DNA, 201 bp, Homo sapiens
gagtaatttgttaaagtgtacaggacctctctttactatttttgcactattttgtgtttgcacacaaatgcagcagtacatttatctctcagaaatttcarttctctctggcaagttgatagggtaaataccctctctaatctttttttctctgggtcttcagctctgcaaatatcccctcattccttgtaaactgtccaa

SEQ ID NO: 23444 - DNA, 201 bp, Homo sapiens
tgaaaataaattaatgagtttgaatattggaagaaatagaaaatgaatttgatcttataaagcatccacagtatgtatgtatgtatatctgtgtgtgtgtrtatatatataactggaacagtgagaatcactatttttgaattctgaaaatattaagaaggtaataaccccctcaaatacagaaaaagcgctagtaaaatg

SEQ ID NO: 23445 - DNA, 201 bp, Homo sapiens
ttaatggcctgtgacaaaatgggtctctgtaggctgagcaaccatgcaaggtggggatttttccctgtttttggtaaggtaatgaagaaggaaaaaaaaartctcatccaaagatgcaaagaaacaatctgctggcccaggtcattttcatggtatctttttgtttctcctttctttgttttgtaagtacatgcattttgg

SEQ ID NO: 23446 - DNA, 201 bp, Homo sapiens
gcggatcatgaggtcaggagattgagaccatcctggctaacatggtgaaaccccgtctctactaaaaatacaaaaaattagccgggcgtggtggcgggcayctgtagtcccagctactcgggaggctgaggcaggagaatggcgtgaacccgggaggtgaagcttgcagtgagccgagatcgcaccactgcactccagcct

SEQ ID NO: 23447 - DNA, 201 bp, Homo sapiens
ttaatgagaatgatgaaatgtataaatgctgttgatctgttcatcaccttcattatagagcaagtcacgtaaggatttatctctttgaaacccagtcttaycccaggccctagcaaatagttattgctttataatcacttttaaaatgaacaatgctgaacaaattaatgggttactcgattagcctttaaaatttttttt

SEQ ID NO: 23448 - DNA, 201 bp, Homo sapiens
atagaaagctattcaaaaagttatattcatttaatcaaaaaataaattattggggggtatgtagtaaactctgtgtgtgtgtgtgtgtgtgtgtgtgtgtrtgtgtgtgtgtgtgtgtgtgttgagaacaaagtgatgaatcaccaaggcttcagagttcttgcctcctttattctgacagtcattcttatttatgctgat

SEQ ID NO: 23449 - DNA, 201 bp, Homo sapiens
agaaagctattcaaaaagttatattcatttaatcaaaaaataaattattggggggtatgtagtaaactctgtgtgtgtgtgtgtgtgtgtgtgtgtgtgtrtgtgtgtgtgtgtgtgtgttgagaacaaagtgatgaatcaccaaggcttcagagttcttgcctcctttattctgacagtcattcttatttatgctgataa

SEQ ID NO: 23450 - DNA, 201 bp, Homo sapiens
gaaagctattcaaaaagttatattcatttaatcaaaaaataaattattggggggtatgtagtaaactctgtgtgtgtgtgtgtgtgtgtgtgtgtgtgtgwgtgtgtgtgtgtgtgtgttgagaacaaagtgatgaatcaccaaggcttcagagttcttgcctcctttattctgacagtcattcttatttatgctgataac

SEQ ID NO: 23451 - DNA, 201 bp, Homo sapiens
gcctctgagagttctcctcatggtggaagtccactacagagctgctgagagcagagcctttagcctgatgttccaggagctcttgctactgccccatccabccgtccgtccatccatccatccatccatccatccatccatccatccatccatccatgaatgattgctgctctatcatgcctcatagctggccctggggag

SEQ ID NO: 23452 - DNA, 201 bp, Homo sapiens
gagttctcctcatggtggaagtccactacagagctgctgagagcagagcctttagcctgatgttccaggagctcttgctactgccccatccatccgtccghccatccatccatccatccatccatccatccatccatccatccatccatgaatgattgctgctctatcatgcctcatagctggccctggggagtggtttta

SEQ ID NO: 23453 - DNA, 201 bp, Homo sapiens
accaaaataatggtagtataacactctttcatttatttttatcaaagcatctgtggaaatatattccatttttcaaatatatcagtgctcaagtgtcatcrtgaaagaacaactaaccaaactgtattgaagatggggttgtaaagagttttacatgttgatcacaataatacatatttttggttcattttgttttctttt

SEQ ID NO: 23454 - DNA, 201 bp, Homo sapiens
tagtgtaattagtacatatcacttggttatgtaattaaaagaatattaaggacagattttcacaataaacccctatcattcagacatccctgctccctttkgtataaaaagcaactttgctggagagagggttgcaagtttaagtttctcatacttatcaggcgagggaacttatatttgagtttttattttatatcagat

SEQ ID NO: 23455 - DNA, 201 bp, Homo sapiens
ccctactgggaggtgtctcctagtcaggaggcatgggggtcagggacccacttgaggcaatctgacccttagcagagctcaaatgctgtgctgggagatcygttgctctcttcagagccgtcaggcagggacgtttaagtctgctgaagctgtgcccacagctgccccttcccctaggtgctctgttacagggaggtgggg

SEQ ID NO: 23456 - DNA, 201 bp, Homo sapiens
agtttgcctgtaaatgaaattaggtttatcttatttctcccagaaatagcattacttagaaaattttgaattatttctttctgaacaaagttaaatggccmaggctaggggctaaattttgattattattacatacatatattttttgccttttatcagcaaataatggtgcattgggaaaattcaagtattaagaaatca

SEQ ID NO: 23457 - DNA, 201 bp, Homo sapiens
ttcatgttgttggaggtgtatcgttaaatttctagaagagggatagctcaatcaaaaggtaagcccatatgtatgggatctttttgtttatagcttaaaarttttttttaatgttttaaaaaactcataaaatttactgtgtcaaccatttctaagtagacagttcagtggtgttaagtatattcacactgttgtgcagcc

SEQ ID NO: 23458 - DNA, 201 bp, Homo sapiens
ggaattcaggaccattcaactaagataatacggtataatgcagggaccaacaatctttttctttttgggctatgctgtctgtgttgcagctatgcggctcygcctttgtggtggggaagtagccatagacaacatatatataagtgaatgcatgtggctgtgttccagtaaactgtatttacaaaagtgggtggcaggcca

SEQ ID NO: 23459 - DNA, 201 bp, Homo sapiens
atgttgtgtgtctggttgactggataaactcttcagtcttataggatttgaaagaacataaaaggcaggcatttatttactataataaaacaatagacttkgcaatgaattctgtaataactgccttttaatcctcacagtcccccacacacacacacgagaactttataccccccaaaaaaaagttaaacgtcacactta

SEQ ID NO: 23460 - DNA, 201 bp, Homo sapiens
gtttcttgtaaccttcaaaaatgctaacaatagaaatcacaggccaacctgaagttaatccagtaccttgtaaccacagccttttaccacccttaactgasctgtgtgtgggtggcttgcatcccacggttggtactctgggcttagagagtccttgcatgctatgtgggtggcgttcatcctgtagtgttcctacgggtt

SEQ ID NO: 23461 - DNA, 201 bp, Homo sapiens
catggcccttaacacccaccccaacacacccacctcctcctcgccacccagtgaccattcacccacctgttctaaggtttctcccaactattgaatgaatwtaggaggttagaatttctcctagacaaattcacttgggtttttctaagatgactcccctttcattacttgcttcccataattccagatttcctggagtcc

SEQ ID NO: 23462 - DNA, 201 bp, Homo sapiens
ttttctaagatgactcccctttcattacttgcttcccataattccagatttcctggagtccttgatgtgatttttcctttcttgttgccattcacagcccytccccgttcactaacattggcccctttcaccactctgtatcttcctgtgcattaatgaaggtattaagtgagatcagttctaaagccagcatccttagaa

SEQ ID NO: 23463 - DNA, 201 bp, Homo sapiens
tttgacctcatattttttctttaagcctgtttgtaaattctgcctaactctttagcctgacaaacagagcttcagagtttgtttgttatataagtatattsatcttttctgaacagtgaaactttttgaaattatcttctgtacttgaagtggatcatctagtgattagtgacatcaggttgaattaattatttatatttt

SEQ ID NO: 23464 - DNA, 201 bp, Homo sapiens
aggcactgcatcaaacggttcactgacattcaaatacgtatcagccacagtagtcttttcatccaccaaattcacattgttatccaaagctatccatcacrtttgtcagagtatttgggtctttaattaaacctgctggatattgttcatatttccattagctcctttctagttagtctattatttttctaattgacatct

SEQ ID NO: 23465 - DNA, 201 bp, Homo sapiens
tttctttagggtaattgtttattgctgatcaatgccagtatttcaaattagaatatttggaattacttttgggattggtgttcattccaaatgtactaacrtatttattgttgagggcagtatgttagtagccttttcattcatttggatgactattttttaataaaatgggatcgatgcatattagagataatgtaatct

SEQ ID NO: 23466 - DNA, 201 bp, Homo sapiens
ttagctcctttctagttagtctattatttttctaattgacatctgttctgagtctcatgtccttgaatttcaggtggcccattttgtagctttggtttatktaggttttctctctttcataaattacctaaggatttagttaatacaccctcaagtgtttgccactgggacctgctgatttacatatgtttacgcttctca

SEQ ID NO: 23467 - DNA, 201 bp, Homo sapiens
acagatccaactatttcctgaacctgagggcagatatgggccagcatggatgcgctcaaagacgtagatgctgacaaaatgagttgggcttgggcttctcrctctgtggaacagaatttgacctatagtgtgggtctaagaggaattgaaccacacagccaagattctttctagatatgagtggtgaaatgtcccacagcc

SEQ ID NO: 23468 - DNA, 201 bp, Homo sapiens
ccctcaagtgtttgccactgggacctgctgatttacatatgtttacgcttctcaaataatccagagttttttggttcttctacgaaatcattttcctttgwggcccttcagtcctgtaagaagtagtcttgtgtctcagcaaggcagagagatctcctacaatttcaagaactgtactagagtcactaaccaggaccagaa

SEQ ID NO: 23469 - DNA, 201 bp, Homo sapiens
gtcttaacatcattgtgaggtagctggctaggggcagagtcaacggccaaaaaatagaacgaattggcacctgccagaatcaaccattaccttggcctcaytggcatcatgctcatcacgctttcgttgatgggagcatatgttcccatcaaagccatgaagtccattcctgttcccactgactgttctcctcacacaccc

SEQ ID NO: 23470 - DNA, 201 bp, Homo sapiens
gctgccgccattatcacctcccaccatgattctgaggcctccccagccatgtggaactgcaaatccaattaaacctctttttgttcccagttttgggtatrtctttatcagcagcatcaaaacaaactaatacaccccatgtctggaattctcataccaggtttataccattaagtttgttggagtaacactcagataagc

SEQ ID NO: 23471 - DNA, 201 bp, Homo sapiens
ggtagctggctaggggcagagtcaacggccaaaaaatagaacgaattggcacctgccagaatcaaccattaccttggcctcactggcatcatgctcatcaygctttcgttgatgggagcatatgttcccatcaaagccatgaagtccattcctgttcccactgactgttctcctcacacacccacaggtagggcaagatcc

SEQ ID NO: 23472 - DNA, 201 bp, Homo sapiens
caagcgattctcctgcctcagcctcccgagtagctgggattacaggcatgcaccaccatgcccggctaattttgtatttttagtagagatggagtttctcyatgttggtcaggctggtctggaactcctgacctcaggtaatcggcccacctcggcctcccaaagtgctggagttacaggtgtgagccactgcgcccggcc

SEQ ID NO: 23473 - DNA, 201 bp, Homo sapiens
gctggctaggggcagagtcaacggccaaaaaatagaacgaattggcacctgccagaatcaaccattaccttggcctcactggcatcatgctcatcacgctytcgttgatgggagcatatgttcccatcaaagccatgaagtccattcctgttcccactgactgttctcctcacacacccacaggtagggcaagatccatta

SEQ ID NO: 23474 - DNA, 201 bp, Homo sapiens
gatacctgaatccatagatagtgccaagccctatatacactgtgttttttcctatatgtacatacctatgataagatttaatttataaattaggcacagtmagagattaacaacaataactaataataaaatgcaggttgaatatcccttatctgaaatgcttgggaccagaaatgttttgcatttctgatttttttcaga

SEQ ID NO: 23475 - DNA, 201 bp, Homo sapiens
tgaggcaggagaatggcgtgaacccgggaggcggagcttgcagtgagccgagatcccgccactgcactccagcctgggcgacagagtgagactccgtctcaaaaaaaaaaaaaaaaaaagttggtagttgcagatacaaaatgctactgcatgagatctgtccagtagcctcaactatttttagtatgcagtcagagagac

SEQ ID NO: 23476 - DNA, 201 bp, Homo sapiens
aagggatctctgaaggtgatatttgagcagaggccaaaagaaatatgggaacggttcatgcagttatttggagacagatgttctagcaagagggaacagcaagtacaaagtacctgaaagaagcatgtgcttggcatttggaggaactgtgaggggactggtaggattagaacacaatgagtgagaagtgaagggagatga

SEQ ID NO: 23477 - DNA, 201 bp, Homo sapiens
tcctcccaggaggattatttctgtgacagtatatactgggggaaatttccattgcacttctagcctttgggtttctatggaaatagtctaatctctcttcyacaaaacagttcttcaaatatttgaatgacagatccatagttctattctgtagactctgttggttctcagataatgttagttattgatgaattttcttcc

SEQ ID NO: 23478 - DNA, 201 bp, Homo sapiens
gggaggctgaggcgggtggatcatagggtcaggagtttgagacaagcctgtccaacatggtgaaaccccgtctctgctaaaaaaaaaaaaaaaaaaaaatmcaaaaattagccgggcatgatggtgtgtgcctgtaatcccagctactcgggaggctgaggcaggagaattgcttgaaccttggaggtggaggttgcagtg

SEQ ID NO: 23479 - DNA, 201 bp, Homo sapiens
tttacatttctctctgggagtttcagttgctatgattttgttgttgtgttcagcttaattgccattagctactgctgaagtctcctccttactcaccgtgyaggcagtgtccatcagcagcatttagtacaggatgaatgaacgattcctttttgttatgttcaatggaatatgtaaatactttcaaatggccttcttcaa

SEQ ID NO: 23480 - DNA, 201 bp, Homo sapiens
caacagggcgaaattccatctctacaaataataataatataaaaattagcctggtgtggtggtgcatgcctatagtctcagctacttgagaggctgaggtrgaggattgctggagccagggtggcggagattgcagtgagcctgcatcgcacgactacactccagcctgggtgacagagggagaccctgtctcaaaaaaaa

SEQ ID NO: 23481 - DNA, 201 bp, Homo sapiens
gtttccttcattttcaagacttggaacaatttatggagcattgggactatttggagtctgggaatttttctgtgaaaccatttgtgtttggtactgttcamcattttcactttttttcttataattttttctgtgttttttcctatacaaaattggtctttttaagcatttttgtctctagtgagatgtaattaacatctg

SEQ ID NO: 23482 - DNA, 201 bp, Homo sapiens
taaacatttttgaaaagactggaataaaatagaacaaaatattaattatggtttattttagaactattgcctcctgttactcttttttttttttttttttycctgtttgggttacttatcacaatccacagttatagtattggtctatttagttggttttgatggtctctccttctagcatgtatgttttaaatgagaaag

SEQ ID NO: 23483 - DNA, 201 bp, Homo sapiens
ttcaaaaatgatcagcattgttgcttctagaggattggaattttagaagcaatattgtcaaattatcatttgaagcttgtggtgcttttgtgcattgactyttacttaggaaggtattagtggcatttatttcagagagaagtaaaatcacaatacttggcattatttattattgtttaccattcaaggaattttatggct

SEQ ID NO: 23484 - DNA, 201 bp, Homo sapiens
tttacaaaagtgggtggcaggccacatttggccctcaggccgtactttgctgactcctggtatctggacaagattgctgggtttcgagctgaggtttcacrtggggcttgagacccatataatcacagagtggtctcaaatgggtctcatacttttgtatgtatttgtaaagttcacggtaatagcacttgccatgccttc

SEQ ID NO: 23485 - DNA, 201 bp, Homo sapiens
acatttatgaaatatctgccatggaccagacattgggtaaaatgcccaacaaattatatgtggtccctgtcctcatggagtttaaagcaggaaggaaggcrttactcaaagaacgctaagatgtgagaatgaaagcagccagattcttgatatgccattttcactgtttttgcttacctctgtattgattaaattttttct

SEQ ID NO: 23486 - DNA, 201 bp, Homo sapiens
cttttagagcataatcgtagggaaataaacattctatggttattgcttttgtcagtggggaaaagcataaccctgatattaaagtctcagcagacaagtartagaacagaactaattcttctatcttgtgtgtgtctttgcttcgtgaccaagtaaggcagcttcttggctgcaaacgtgggttttccagccaaatgacta

SEQ ID NO: 23487 - DNA, 201 bp, Homo sapiens
gaggcagtacagacagttctgttggctctctttctagccttggcttccctagcattatagagtactaatatcactttggcctctcttctaaaatactttcyctgttttctaacgcccctaaaaagggacagtctccagaactgtgtcctttgttctcttatctttgaacttcagtttccttgtctataaaatggcgataaa

SEQ ID NO: 23488 - DNA, 201 bp, Homo sapiens
agtgccaggaattgaaatcacctaacttaatcaaagaggggctttttattagaatgatacagaattattattatggaatataagcaggactttactaatcmagctgtaagaaggagagagatgcagctgggccttaggaacatccagagtatctattatctcctttccttccctctagatggtaaatgttaaagatacagg

SEQ ID NO: 23489 - DNA, 201 bp, Homo sapiens
accactgggctcacttgacctggcaggctgtgcttggcttggcttggcttgtgctaccggcctggatcccatgcctgtcaagggcaagtggagcagcaagrggggtgtgagcaagtgagcatgggctccagccactgctcacagccagatacactggctgcagtgggatggacaactccagggaccagcataggcaccagc

SEQ ID NO: 23490 - DNA, 201 bp, Homo sapiens
tataaaggtcttataaggctctgaacagtaattcaaaatgtaaacgtgtaggtactcaaaaacataaatgtcacatctgctttagctcttcatctccattkctgtgctgtagttttccaattgatggaaaggttttattcagatcagccatttctctttttcctggaggcattcttaatctccgtgttctaacctttaaca

SEQ ID NO: 23491 - DNA, 201 bp, Homo sapiens
ttccaataataggccacctaggaataagtagcgtagaagggaaaggcttgtcaataatcgctctttggttcatttgttttatgagtcaggactattttacrttggggtttttcaaagagggacacacctgtattccttacctgatttgtattgaatccagagaggcatggtgaagggcatggcacagagtgatctttgatt

SEQ ID NO: 23492 - DNA, 201 bp, Homo sapiens
caacattatctggtaggtactaagcacttcaatgaatgcatgtatcaaaccattagaacagcttaccactcactgacaaagacacatcttatgggtcttayttaggaggctttaagattatggcctattaaatcattactttaattttcttttgggcttaagagaaaaacatctctgtgtggaaatgcttaatatacttgg

SEQ ID NO: 23493 - DNA, 201 bp, Homo sapiens
gaagggaaaggcttgtcaataatcgctctttggttcatttgttttatgagtcaggactattttacgttggggtttttcaaagagggacacacctgtattcmttacctgatttgtattgaatccagagaggcatggtgaagggcatggcacagagtgatctttgatttggttaaataccaaatgacttgacagctcatcaaa

SEQ ID NO: 23494 - DNA, 201 bp, Homo sapiens
tcaagtttttaagaacatggtttgaaaatcactttttttttgtatttataacacaaatgcttaataatttttgagcgttggggatgagcacaacctaactyatatccattatattactattgcgcctctgacactttaaaacattaaaaacctggttttacccttaatgttttctggaattgtatttttttaaattagcag

SEQ ID NO: 23495 - DNA, 201 bp, Homo sapiens
aaataaaaagaatatgggaatttggttacagagaagacacacaaggaatgccatgtaatgatggaggcagagattagagtaaaacttgtacatgccgtagmacgccaaggattgctggctaccaccagaagctaggaaaaggcaaggaagactcctcccctagagaccccagagggagggtgactctgccaacaccttgat

SEQ ID NO: 23496 - DNA, 201 bp, Homo sapiens
gtttaaaccttattgtggactgtggatttctttgggtgaaagtctgtttttctcacccttctatctgttgagtgctgtgcagtgtcttgtacagaatagakttattttcctgtctatttctggagaggggctttttttgaagatctgatcaatgattggagtcaaactctttagtcccacatgtgatccattgtaaactaa

SEQ ID NO: 23497 - DNA, 201 bp, Homo sapiens
gtcagtgtctgtttggaaactggaggccttactggcataatggccaaaatatgtctataaactgtctgtatatttgtcagcccttttggattgttttttgwtgagaaattattttctctaaaaacctcacattcttcctccttaaaatgcttgcatgaccagtttttaatgtgaagaatttgtttatgggtgcagaatcca

SEQ ID NO: 23498 - DNA, 201 bp, Homo sapiens
cgaatgcccgtgtccacaggattggcagttagtgttagcctctgtctaggaactcagcagaggctttctgcacgttgacctcttcagtggttccttatctycctcacagcatggtgatcgcagggtacttagacttcctatatggtagctggctcccaagagtgtaaaagtggaaactgctggaccttcttaagcctaaac

SEQ ID NO: 23499 - DNA, 201 bp, Homo sapiens
atgttgttcattgtgagatatagaaatacaattgatttttgtatgttgatctcttattctttaactcttattaaattcagttgttcttgtagctttccttwtgtagagtccagcagattttgtaatatagacaccatgttttattcttcctttgcaatctgattgccttttatttctttttcttgacttgtagcaatggct

SEQ ID NO: 23500 - DNA, 201 bp, Homo sapiens
ggtggacctttttatttggttgaaactttttttgaacttaggtaaatatggtattatgttaagattgagtaaagctgttcattaaattctcgaatttcatrtgtatgttagaaatatttcccaatgatgttgaggaaagaattcgttaaaaaatctattgtgcattgagggaaaaataagtgaggaccaacagaaaggtta

SEQ ID NO: 23501 - DNA, 201 bp, Homo sapiens
acatttttgctttggggaagaggtcagcaacatacctatagtagtgtgctactaggtgaacttcctaaatgaagctcataaccaagaagaaagcaataccmgaaaagatagagtaaataaaaaacttaggaataagtgggactagaaaagctagaatagctaagtcctattacttgaccagagtatactagtgtatactct

SEQ ID NO: 23502 - DNA, 201 bp, Homo sapiens
ttcctgggcttaagcataattcttggcaagggttacacatttttgctttggggaagaggtcagcaacatacctatagtagtgtgctactaggtgaacttcytaaatgaagctcataaccaagaagaaagcaataccagaaaagatagagtaaataaaaaacttaggaataagtgggactagaaaagctagaatagctaagt

SEQ ID NO: 23503 - DNA, 201 bp, Homo sapiens
ttttgcacatgtacccacaagaatgtgattcccaaacttggctagagtttggatgtcacacctaggaaatttatagaaaaaataatgtacatgttttaggktcctacccaagaattatgaaaggaaaatttctgaaaatttttatagatatgaacatttatttgttttaaagttccctctggatggaggtccatgcccagt

SEQ ID NO: 23504 - DNA, 201 bp, Homo sapiens
ctttatgagtggactgataatggttcattttggttgcgagaaagaaaacatgctcagttgctctgggagctgggtgtttatggtaggaggttaacaacaayaaaaaaaaagccaaggggatcatctcaataatcactctggacctcagtgccttagaagaagggaagagtacaggaggctttaagggaatctttctggacc

SEQ ID NO: 23505 - DNA, 201 bp, Homo sapiens
tctgtggccattaatatatttagtaaggtgaatttctttgatgaatttatctaatctccattcgcatttcctatgtatagttttgaagtaacaagtcaggmcttttatacttttttttttctgaaagatggtattttcaaaaatatcttaacataaaaatgcttagcctccaggtcttaaaaatataaaggattccctatt

SEQ ID NO: 23506 - DNA, 201 bp, Homo sapiens
ctgtgtgcctccctagcacttcccctttgtcatggtgcacaccactgcaccctattgtccctttgcctctgcctaccttgctgtgaacttattcaggtcayggatggtttcttactcatttctgtaactgcaatgagtaagtgagtgaatgaaatgttcatcctcattctgatggggaaacttatttctaattttagggac

SEQ ID NO: 23507 - DNA, 201 bp, Homo sapiens
tttctatctttaaagaagatgataagatagctcagggctatgcttctgaaactggattccttacatccctgggaatagctgtttgccaggggtctgccaartacatggcattttctcctgaagctttgaccttaaatattttagggaaacattttttccaataaaatgtacatgtataacagaacagaatgttaaatttgc

SEQ ID NO: 23508 - DNA, 201 bp, Homo sapiens
ttgtgccccaccctagagatctgtggaactttgaacttgagagagatgatttgaaattggaacttatgtttaaaagagaagtggagcataaaagtttggaraatttgcagcctgatgatgcgatagaaaagaaaaacccattttctggggagaatttcaagcttgctgcagaagtttgcataagtaatgaggagctaaatg

SEQ ID NO: 23509 - DNA, 201 bp, Homo sapiens
ctaggtattttattctctttgtagcaattgtgaatgggagttcactcatgatttggctctctgtctgtaattggtgtataggaatgcttgtgatttttgcrcattgattttgtatcctgagactttgctgaagttgcttatcatcttaaggagattttgggctgaggtgatggggttttctaaatatacaatcgtgtcatc

SEQ ID NO: 23510 - DNA, 201 bp, Homo sapiens
cctagacctttgctagcttcacaataacaagaacatttcactattgcttggtggggttacagggagtgaaataggcactgaccacacgtcataaacacacygtataattgattcctgaatattcagaactcatcccttgaaaaagagtatgaacttttggaaaagataaacctagaatgttgtaggtaagtatagacatac

SEQ ID NO: 23511 - DNA, 201 bp, Homo sapiens
tgcgtgtgaggaaaggaaatcctcaggctgatttattgttcagcgctgagtgtaaacagtgtgctatccttgtcacagccaaacgaaaaaggacgcaatcwctatcctgaacagatcattcttttaaaaataatattttggcctgcttataaagcatggttcgtaataaaaaatttgggctacagaaatataatacaatta

SEQ ID NO: 23512 - DNA, 201 bp, Homo sapiens
tagactcttgtgggcggatcacctgaggtcaggagtttgagaccagcctggccaacatagagaaaccctgtctctactaaaagtacaaaaattagccaggyatgatggtgggcgcctgtaatcccagctactcgggaggccgaggcaggagaatcgcttgaacccgggaggcggaggttgcagtgagccaagatcgcacca

SEQ ID NO: 23513 - DNA, 201 bp, Homo sapiens
aatcctacaaccgataaagaaaacaaaaaggtgactttttggaaactaataactgtaatttacttataatcttgaacattaaggaaaagtatgataatacrttaatgtgagatatggcttatcaatccagatgtttttgtttctagagattgattaggtacataactttgtgagaaataactggataatgccacagccaga

SEQ ID NO: 23514 - DNA, 201 bp, Homo sapiens
ttttattgaatgatccctgtattagtcagggttcccctgaaaatggatggcactggattgtcgggcctgtaccaggccatcgccagcagtccagagtgaasagaagcagtgtatgtgtggaggtcaccacccccccgcccgccagccccgtggacgctatgcgtctagtaggagggccgctgcggtgagtcttgaagccca

SEQ ID NO: 23515 - DNA, 201 bp, Homo sapiens
atattttatttccatatgcttctcctaatctgtggctttttttttattctcttgataatgttatacatagaacagaagtttttacctttgatgtagtccartttgttaatttgttctttatatggatcatgctaaaggtattacatctaacaaatctttgcctaccccaaagttacaaagacattctcctttgttatcttc

SEQ ID NO: 23516 - DNA, 201 bp, Homo sapiens
gatcttcacatgtcagaatgcacccactgaagagagaaaagctctagtgggacaccagggtggaacagcctcagttacctgttctgttttagaatcttctktcactgtttccttttttggatctccagcctttttaacagccaaaggagtccacagccagaatattttgaaattctttactctcctccttcctgtctcctt

SEQ ID NO: 23517 - DNA, 201 bp, Homo sapiens
tataaatttccctctacacactgctttaaatgtgtcccagagattctggtacgttgtgtctttgttctcattggtttcaaagaacatgtttatttctgccytcagtttttaatttacccagtagtcattcaggagcaggttgttcagtttccatgtagttgtgcagttctgtgtgagtttcttaatcctgagttccacttt

SEQ ID NO: 23518 - DNA, 201 bp, Homo sapiens
gtagattgaaaaataaacttgaattattttatgatcatgacctgaaaccacatgtaaagttgaacaaccaagaaaactatctctgcttttgcttccttttytgatccacagtaagttaatgctcaggactggatataacacataaggaattctaaggatcctaagtaacagtgctatgtatggggcatcatggggttatca

SEQ ID NO: 23519 - DNA, 201 bp, Homo sapiens
tgcctacaaaaatgcattgtaatttgcacagtgtagtgcctttgcatagtgattttatgctattgttttggaatgttgtttgaatatcttctttcatcttycagtgcattttgaatatattttctggtcctttcccttaatgtataagttcattggtttacaaattttagttttctcaaaaatatttatgacagggttttg

SEQ ID NO: 23520 - DNA, 201 bp, Homo sapiens
ttatatagctaaagctgataagactaggaattagtaagtaattgtaactttattcatacgttaaaataggttaaattatctctcacctctctgtcatctamggaatgcctatgaccatttaagaaatgggacctgaactgctagggcattttattaaggaaaaaacaattcagaatgacattggcagcctgtttagtgaaa

SEQ ID NO: 23521 - DNA, 201 bp, Homo sapiens
tagtggtattgtctgtatttcctgaatttgaatgttggcctgtgttgctagtttggggaagttctcctggataatatcctgaagtgtggttttgaacttgkttccattctccctgtcactttcaggtacaccaatcaaatgtaggtttggtcttttcacgtagtttcatatttgttggagtctttgtttgttccttttcat

SEQ ID NO: 23522 - DNA, 201 bp, Homo sapiens
gtgagctgttccaagggcactgaaagccaatcagtttttcacaacaaagaaagagacaggaagtagtcaagccaaacacaaaatgttgaagatcttggtgygtataagtggcttgcaaagtgtggtgtttgagatcactctgaaggtcatgcaggagtcctagaaccatgcctaatgtatgcttagaggcatttagcttta

SEQ ID NO: 23523 - DNA, 201 bp, Homo sapiens
gagtatctaaaggagtgtatgtttaaggcacttaaaatgcacttaagggaatgttggtaggtgttttagtctgtttaggctgctccaacaaaataccatasactctgtggtttataaatgacagctgacagttctggagtctaagaaatctacaatcaaggtgccagtagattcagtgtctggcaagggccattacagatg

SEQ ID NO: 23524 - DNA, 201 bp, Homo sapiens
acaaaaaaccaaacaccgcatgttctcactcatagatgggaattgaacaatgagaacacatggacacaggaaggggaacatcacactctgggactgttgtrgggtggggggaggggggggagggatagcattagaagatatacctaatgctaaatgatgagttaatgggtgcagcacaccagcatggcacatgtatacata

SEQ ID NO: 23525 - DNA, 201 bp, Homo sapiens
ggggaaatcctggctcatcagtatctcaagcttttcctacagtctctcaaattgcgtgtaacatctcggagcatatcattttagctttctaggtgtacccytgatttgtatccatctttaacttatcctagtctaattttctgccctcttttgccatcaaaaataatagcaaaaacctcaattacttttgcagcaacctaa

SEQ ID NO: 23526 - DNA, 201 bp, Homo sapiens
attctcaggattattttatctaatattttgaagacaggattatatagccaaaatatttaagcttatagtcaattctgggttcatctattatcactgccatkaactggctgcataatgaaagctaagttatttaacctctcacagcctcagtttcctcatctgtaaaataggaatgatatttatttcaaattctaggtaata

SEQ ID NO: 23527 - DNA, 201 bp, Homo sapiens
agtgtgtgttaagcctttccctttgtagagctgatttggggacacggttttacacatatacatatacatatacatatacatatacatatacatatacatayacatatacgtatacgtatacatatgactgtcctcatgaagattttttctgtagggcagtgtaatagaaagaatccccgattggaaccacagaggtcatga

SEQ ID NO: 23528 - DNA, 201 bp, Homo sapiens
ccttgtggcctaattgcctctcaaaggctccacctctttcattcatgtccctacaaaggacatgaactcatcatttttatggctgcatagtattccatggkgtatatgtgccacattttcttaatccagtctatcattgttggacatttgggttggttccaagtctttgctattgtgattggaaatcatcattctcagtaa

SEQ ID NO: 23529 - DNA, 201 bp, Homo sapiens
agctcctcataatatatcattccatgtgccagaaaaactaagtgtgggcaaagaagaaacaaacttgtgagcaacagtgtattttcttaagcacaactccrtctatgaactggaaaggtccttgtgctgggatgtgcaattgtgtcaggattttggacttatgaggttgctcactaataataatatttgtatggccctttt

SEQ ID NO: 23530 - DNA, 201 bp, Homo sapiens
atattgatagttgggtagaagcacaaataaataaaagtagtttaaaagcaagtaaaaactaatgatcaagtggcagtttgtttctataataccaataatarctgaatatttgtatcattaaaagctaaatttggctatgaaaataaatgtttatcatacaaatttaggcaatataaatatatatatgaaaacaagaggaga

SEQ ID NO: 23531 - DNA, 201 bp, Homo sapiens
aggaaataaaaaagttgggtgtttttctttaacataaatgatgcaagtcatctcatttaaagtgtattcaggatgagtataaattattaagagggccttastaagaacctttaaggaatatattagcagttttacatgtcaaaaacaattttatttttttggaaaatgtcagttacacttagcatattgatagttgggtag

SEQ ID NO: 23532 - DNA, 201 bp, Homo sapiens
caatttatgtgcatttttctgtagatatgttgatagttgttctctgagctaagggctccatagcctctttaaaaaaaaaaatcagcacatcgaaatgatgrtgcagagtcatttgcattctctgaaactttgccagtcagaaataccaattgcacatgctcttcattttagcttataaatcaataaaccctgtctgcatga

SEQ ID NO: 23533 - DNA, 201 bp, Homo sapiens
aatccataggattgtaactaaatggttctatctgacttgaattccttttttcacttcagaaaaaggttaaggaggaaaacttcaaataaaaataagggagrgactaaaccttagagttacctgttagatattgtggtgattgcggatcctcagagtttgaaagtggactcatagaagtttacaatgactgagcaggttaga

SEQ ID NO: 23534 - DNA, 201 bp, Homo sapiens
tctgaatccataggattgtaactaaatggttctatctgacttgaattccttttttcacttcagaaaaaggttaaggaggaaaacttcaaataaaaataagrgagggactaaaccttagagttacctgttagatattgtggtgattgcggatcctcagagtttgaaagtggactcatagaagtttacaatgactgagcaggt

SEQ ID NO: 23535 - DNA, 201 bp, Homo sapiens
aaaaaaaaaaaaaaggattgtcttgactgaaaatgggaaatgtgtaaatgtgttgtgtgttgttgtatatgctgaggtcagaagttaggcttatatgcagragtaatgtttactctttttctactcttgggaaagactgtcataggtggtcagagaggaaaggacattgcaggcagcacagagagctaggataatttcctt

SEQ ID NO: 23536 - DNA, 201 bp, Homo sapiens
acttctgatagtattttgtttgaacaaaaggctggttccacagaggaataaagaaaaaaatttgaaaatcatttctgcttgttgtacaactctaaaagcawctttgcattaaaaaaatcttcttctgaataaaagtttatgtatacctatcagtaaaatttctaacagtatagaaatgttaaaaaatcaatagaaaagcgc

SEQ ID NO: 23537 - DNA, 201 bp, Homo sapiens
aactttttctctattcagtagtcagccatatcaacaagaagcatttttttttttttttgagatggagtcttgctctgtcgcccagcctagagtacagtggygcgatctcagctcagtgcaacctccacctcctgggttcaagtgattctcctgcctcagcctcctgagtagctgtgattataggcacgcaacaccacaccc

SEQ ID NO: 23538 - DNA, 201 bp, Homo sapiens
acccagcccacgtggggagtctcagccattcccattgcttcacttatcatttctctacaggttctcccagattttaatctgcacagtaggtctcttccctragtttcagactcacagtcaatgcacatctcatctgaactcaaatttagtaagtctaaaatggaacacttaatttcaaaattcatatatgtgcttcttccc

SEQ ID NO: 23539 - DNA, 201 bp, Homo sapiens
cacacaaagaatgtttgggaagagtagacaattgtggcagagttaattctggtggtaagtcatgtttattgttgcaattctgtttttaatgaggacataamatttgctaaacataattaaggcctaatttactctgaatatgtgtttattgtaacatatctgcttttgaaactattatttataagcacaattagaaaaatg

SEQ ID NO: 23540 - DNA, 201 bp, Homo sapiens
tgggctgtagttagtgacccctgtcctacagcacaaataagatgacttaggcctagagaattagttaatatatgttaccacaaaatgatctcagctataakgaaaccacgctgtggccttttgtagaagtgtgattttttttttcttttatttttagtatcagtgattcctgcttaggctatcatgatgatttagctccaa

SEQ ID NO: 23541 - DNA, 201 bp, Homo sapiens
tggttttataaaggagagtttccctccggaagctttttttgcctgctgccatccatgtaagacatgacttgctcttcctcaccttccgccatgattatgakgcctccccagccacttggaactgtaagtccattaaactcttcttcctgtataaattacccagtctcaggtatttctttatcagcagcatgaaaatgggct

SEQ ID NO: 23542 - DNA, 201 bp, Homo sapiens
cggcagcccctgcctgagctttgcatttcccagaatgagccctgagaggaccttcactgttgggatggagcagggagtgagaatgtagccgttaagctccrcaaatcacatttaatctgaggcacagtgtttctttctaatttattccccatctacttccagaaggaatttgaagtcactcacaataaaaagcacacatgc

SEQ ID NO: 23543 - DNA, 201 bp, Homo sapiens
cgagatctgatggttttataaaggagagtttccctccggaagctttttttgcctgctgccatccatgtaagacatgacttgctcttcctcaccttccgccmtgattatgaggcctccccagccacttggaactgtaagtccattaaactcttcttcctgtataaattacccagtctcaggtatttctttatcagcagcatg

SEQ ID NO: 23544 - DNA, 201 bp, Homo sapiens
gtttatcttttaaacacaaggactaatggtagtgggacgaagagaatgagaatgggggatggagattctagagctctggagggactctgggaccaggatgyactatcctgttggtcatccggagcggcagcccctgcctgagctttgcatttcccagaatgagccctgagaggaccttcactgttgggatggagcagggag

SEQ ID NO: 23545 - DNA, 201 bp, Homo sapiens
cttctgaccgaccttggcccagtttttgaaattctaacaattctcatttacccccttgaatgaagaaagactctttgagatgcatatgccatcactactgygaatatctaagatttctcgactgtgtaataagtgcctggcacagttctacatggcttacctaagggaaaatagcatagaggtcaggcctgtctactgaaa

SEQ ID NO: 23546 - DNA, 201 bp, Homo sapiens
tctgtatatttgtcagcccttttggattgttttttgttgagaaattattttctctaaaaacctcacattcttcctccttaaaatgcttgcatgaccagttwttaatgtgaagaatttgtttatgggtgcagaatccatgccggcaccatcagttgcctctgggctgtgctgagagtctcatggtgctgacctattcacatt

SEQ ID NO: 23547 - DNA, 201 bp, Homo sapiens
agttagtttcttttctagttaccttgtttcaaagccaagggagccaaatctcaaaatgccttcccactcacttggataattaagatgaaaataacaattayataactgtgtagcagaaaagaagtctttaagtttggcaccttgaaagcagtgctcactgttgccactggtactcgaaaagtaatgactctgtgggaaagg

SEQ ID NO: 23548 - DNA, 201 bp, Homo sapiens
ctgggagggttgcgaagacattgcagaggcggtgcccttgagggattagaatgatccgaaagcatagccttgcactgtggaagtgagtggtttacttcgcrgaggatggtagcaagcactttgggtgcataatgggtcgtgcaagagtggcacctcttgtgtgtacatgtcacagagctgccccgtgaaggaggctggtgg

SEQ ID NO: 23549 - DNA, 201 bp, Homo sapiens
ctgtataaaattaccaatggatagttccaggactgtgccacttagggttttatagagctgagtcagctgaactgaattaatgattgatttctaaaagcttmccttatgtaaacttaatctgtttttgcttttttatatcctaggtgcccaaaccagtagattattcttgccaaccctggtaagtattaaaaatgtttatgt

SEQ ID NO: 23550 - DNA, 201 bp, Homo sapiens
tcattgctgtggatagtgagggtttcagtgttggggaatttctgctttctgattgacacctgccccattgtgaaagtgctttcaactgctggagttggatraggttaccaacttttagcttcattgctttgccccttattcatatgactaatatgtctttttctacccattaggcccacagaaagtgtgctttcgttagcg

SEQ ID NO: 23551 - DNA, 201 bp, Homo sapiens
ccatagccatgctgttgtcttgttttgattttaagtgtccagatccattagagcagaggcagcagtacaagctgctggctcttacatgtttggcttatgawgcctttttgaaaatcaatgatacagaaactccagagctaggctgcctaggtttgaatgcagtcttcactatttaccagctctgtgaccttgctcaagtca

SEQ ID NO: 23552 - DNA, 201 bp, Homo sapiens
cgaagcacaagaacaaacatacttcatgtctcttgccagtttttttcaataacatttctgaaaggcaaaaaaaaaaatatgtttaatcttcatttgcaaargttttaatttggctgttatttaatttgtgataatgttatgtaaatttaacatgctctgagaatgcccaggcatagggtatagaagtagagtgtgttggtt

SEQ ID NO: 23553 - DNA, 201 bp, Homo sapiens
caaactgttcaaggatttttttttctagcaaaacaggaagaaattgggggaaaagcatatggactcaggttgagcatatgatgtattttcaactcgagtcrgcactttactcatatttgtagtgtgacttaaaattaatttgggtgaagcactcagatttgagggaggaaaaaaaatccctatttgggactaagtcaacat

SEQ ID NO: 23554 - DNA, 201 bp, Homo sapiens
tgttgcccaggctggagtgcagtggcaagatcttggctccctgcaacctctgcctcccaggttcaaccgattcttgtacctcagccacccaagtagctgarattgcaggtgtgtgccaccatgcctagctaagtttttgtatttttagtagaggcagtgtttcaccatgttgaccaggctggtctcaaactcttggcctca

SEQ ID NO: 23555 - DNA, 201 bp, Homo sapiens
agaggcatagactttagatatgtgagcatcaggaaatgatgtctaacctggaatccaggatatgagcagggatcaacagcatctaaatggagagaagaggkttgcaggcagagggaacagctccaagaaaggccctgagttggagaaggcacaggatggttagggttggagcaggagagccattcacaaagagaatggaag

SEQ ID NO: 23556 - DNA, 201 bp, Homo sapiens
tctggttatgtttaatatgtatttgatacttcttggcattcttgaacatgcttatgaggaaggagaagtcacaggcaggaggaagagcaaaggatgatatygaaatttccatcagcaaataagcattaccctggttaaaactaaatgcaaataaaattagtaagctgaattagtgtttgtttccctgaggctttataacag

SEQ ID NO: 23557 - DNA, 201 bp, Homo sapiens
acccaatttgagttttcaagatgttgaaattggagtttctcaataatctctctttccttgttctctctgaatttcttctcttggatctgtcctgcaaattrctgctagaatattcttccataagcactgttttcatcatacctctgcattgctcaaaattattatggtttaggggaaatactgtaggccactaatcttgca

SEQ ID NO: 23558 - DNA, 201 bp, Homo sapiens
ctaattttgcaacaaaatcctgaaaattctaatttataaatctctaagttttatattgctcgaatcgtaatcttcattgtaaattgtttgcaggtttagayagagttttggtttgtgtttaaatgatacagcagattttaaatatacctttctttcctctttttttcttcctttgcctctatgtcctgattcaggcagagg

SEQ ID NO: 23559 - DNA, 201 bp, Homo sapiens
tcttcttgtagtcattttcaggactacctttctgattcccttttccgtgataacagatttctgaaatgagcaccacagcctcttgctcgcatctttcttgkttggaggaggatttatttctccccttcaaggctcattccgagttcacaaaggatcactacttctgttgtctggcaggtctgtgcatgccttgccaagcct

SEQ ID NO: 23560 - DNA, 201 bp, Homo sapiens
ttatttcaggaacacggaggtgctaggcctttttcaagaacatgagatcataaatctcaagaaaatctgagcactgatgtaatatttttcacctaaagtgkcactcaaggtcaaagttaccaattaaattttaatactgagctttaaaaatttccttctgtctcagtgtaggagatacaagatttatttcagtttgcatgt

SEQ ID NO: 23561 - DNA, 201 bp, Homo sapiens
ctttgcagggcctcacttaaagtggcttataaaagcaactgattaaagagtttaggaggccgggtgtaactacttcaccaggtccaaatttcagagccatrttcaaaggtatattatatatattctctatagcccttttgcactggaaaggaacttaatgcatagtccagtgggtagtaggtgcttaataaatgctacatg

SEQ ID NO: 23562 - DNA, 201 bp, Homo sapiens
atggagaccatcctggctaacacggtgaaaccccatctctactaaaaatacaagcaaaaaaaaaatagctgggggtggtggcgggtgcctgtagtcccagytacttgggaggctgaggcaggagaatggcgtgagcccgggaggcagaacttgcagtgagccgagatcgcgccactgcactccagcctggtgacaaagcga

SEQ ID NO: 23563 - DNA, 201 bp, Homo sapiens
ggaacatattctaaccaagatggctgctgggctttgttctctccatcgtcactatgacttaacaaattgagtcccaatatttggagttggcaaccaaaaakattttttttcttactgttataaggtaccaacaacttatcaagtgtaatgatatacacgtggaagacttactagaaaaacaaataaaacaaactttaaaac

SEQ ID NO: 23564 - DNA, 201 bp, Homo sapiens
aaagagtagaagaattactttgtgtgaatttaaacatttaaaataacaaaaagctaataatctatcacttaataatccttaccatgtggctgtaactgttscaagcatttaaggtaaattaactcatttaattctcactgcaaaacctatgaagtcagtgctagtattatctccattttatagaggaacaaacaggcacag

SEQ ID NO: 23565 - DNA, 201 bp, Homo sapiens
tggcattgaatctataaattaccttgggcagtatggccatttttacgatattgattcttcctatccatgagcatggaatgttcttccatttgtttgtgtcytcttttatttcgttgagcagtggtttgtagttctccttgaagacatccttcacatcccttgtaagttggattcctaggtattttattctctttgtagcaa

SEQ ID NO: 23566 - DNA, 201 bp, Homo sapiens
gagatgacagaatgacaaatgaaatttgcactttaaaattgttcaaaatatgatctgctgaacatctccaggtttttcaatataaaatactttttaggttmttttaaagtataaaaaaatcttagcctctccaaatgcagttggtttaggggcgtgaaaattcctccgatgttattttttaaatacaccagttcatagttt

SEQ ID NO: 23567 - DNA, 201 bp, Homo sapiens
ctccgtcctagacttttgagaatatagattggggaggggagtatacgcatagagatgacagaatgacaaatgaaatttgcactttaaaattgttcaaaatwtgatctgctgaacatctccaggtttttcaatataaaatactttttaggttcttttaaagtataaaaaaatcttagcctctccaaatgcagttggtttagg

SEQ ID NO: 23568 - DNA, 201 bp, Homo sapiens
atacaaggaattaattttcacattgatttttaaaaatatataacatcagttttttagtgacttgtttcactcttcaatataagtataatttttatttactrtgtgactgtactaaaaatctctgttttgtgtggatggaggattatagtaagctctgaggctagtcaatccatttggaaacttgagtttgttttaagggag

SEQ ID NO: 23569 - DNA, 201 bp, Homo sapiens
ataagtggaaagatattaaagggcattttggatagcaaccatttatcccacctgtattgtagaacacctactatatgctaaaatcagaagcaaagagcaarttgtcagaattcattatatcgctgtgcccttgtttcattccttttatcctttgatctctgtacccctgacaacagatcatgctgaaattggaagtgctga

SEQ ID NO: 23570 - DNA, 201 bp, Homo sapiens
aatctcttaaagaaacatcctgcagagctcccacttaggcctgctctttctgtcctgatgtctctctgtggcatcttttcagatgcttctttagaggatcrttttggatggggaaggtataggcctgggcttatgatgatgagggatttcctgtctgtctggagaagttagaacatgtataagtgctcctgggtatgggga

SEQ ID NO: 23571 - DNA, 201 bp, Homo sapiens
ggctggtctcaaacttctgacctcaggtgatccgcacatcttggcctcccaaagtggtgggatttcaggcgtgagccaccatgcccagccaagaagcattktttaatcagtgatgctctttgtgctcttgatgcattttcttcccagcagcaataccatttgtgcctgttatttactctgaaatttcctccctggagggca

SEQ ID NO: 23572 - DNA, 201 bp, Homo sapiens
tgaaattgacaaagggatgaggacttagcttttcttctgaaggtgactttctgcccatggatcttccatttccattaatcagaagtattcgttaaaaaaaraaaaaaaagaaaaaaaaaagctagagagaaaagaaaaaacaaaccaacctcctgttccatgccccaggcaatcttcttgtgtaaagcaatctgtggcagc

SEQ ID NO: 23573 - DNA, 201 bp, Homo sapiens
ttgaaattgacaaagggatgaggacttagcttttcttctgaaggtgactttctgcccatggatcttccatttccattaatcagaagtattcgttaaaaaargaaaaaaaagaaaaaaaaaagctagagagaaaagaaaaaacaaaccaacctcctgttccatgccccaggcaatcttcttgtgtaaagcaatctgtggcag

SEQ ID NO: 23574 - DNA, 201 bp, Homo sapiens
tttcaaccagaatataatttttaatgatgttataggatgtggctaaatattattaagcatttgaagtatctcttaacacttctttttgttcaagttagccstttttggatgttgtcttccttgggttggaaaaccttctatatttcatgctctatatcccttatattaatctagtcttcattcaccctggaaatgataatt

SEQ ID NO: 23575 - DNA, 201 bp, Homo sapiens
ccatactttacagagctttatagcaataatgtttaacatagtctaactatactctcaagcaacaaaaagagatcctgattggatcagtgtggatcaggagyccacttgtgatccagaaagctatgactagtaggagttgttataaacattgcatagttggcgtgaaaggcaattccaaaaaggggagtaggcagaggttgg

SEQ ID NO: 23576 - DNA, 201 bp, Homo sapiens
aagtggtctattgtgttttcttcccatattttaaatcttataacttttgaaaaatttttaataacctagaattgttctggtgtaaggtaaggaaataattrattttaaaaatgtgataatttcagccagttttggtaagcattactcccagttctcttattttgtattaatgcctagccagatttttccctcatttgcttt

SEQ ID NO: 23577 - DNA, 201 bp, Homo sapiens
tagggtcaaaagtaaccttccaatttaattaaaataatagatcatttgttagtttttatactataaaatttccttttttctagtagtcttgaaaaaatatrtaccaacagaaatattatgttgtaagaaaatgatgtttggagtttgaaaagcaatttgaaaaagggtgtgactcttttgagttttagtattctatgcaca

SEQ ID NO: 23578 - DNA, 201 bp, Homo sapiens
ggcacatgtatacctatgtaacaaaactccatgttctgcacatgtaccccagaacttaaagtataataataaaaaaaagaaacacataaaaaaatgctgaygaaagaaattgaagaggcacataccaaaaaaaggaaagatattccatgctcatggattgaaagaattaatattgttctgttaaaagaaaaacttcaggtg

SEQ ID NO: 23579 - DNA, 201 bp, Homo sapiens
aaaaagcacagatttccaaagtcttggttaaaaacaaagacttgagtggcatgtagattttattccaatctcagtcacttgtttgtgaaatgactttgtayggattacttaacccctctcaatctattttctcatctgtaaaatgggataaaagtagctacctcatgatactggtcaagctattattgcagggtgtttata

SEQ ID NO: 23580 - DNA, 201 bp, Homo sapiens
gatagaagtggccaggctaatacatcattcaggcaagagatgatggcggcttttaccaaagcaatagcagggcagatggtgggaagaataggctctgaatrtattctgaagatggagccagcaggggtttattgatggactagattagggatatgagaagagaggagtcaagtatgtctccagaatttttgccctgagaaa

SEQ ID NO: 23581 - DNA, 201 bp, Homo sapiens
aataatactgttagtgccctgcagattgtagataatgcttactaagatatcctcaattaaaaagtagcatcattctctaaactttggtatgtaattcattrcaaagcaggaaaatgtttttttaaaacctctggctaaatttgctttttggagtttgtaacatactctcttgctcttttgattcttttccctgttttgcat

SEQ ID NO: 23582 - DNA, 201 bp, Homo sapiens
taacacttagattttaaaatctttttaagcaaatacccctatttagtgccaggtactgttctcagtacagctgctcctccattaatgatggggttatgtcytcattaagccattgtaagtggaaactatcgtaagtcaaaactgcattcaatgcacctaacctattgtacattatagctttgcttatcatactttaaacat

SEQ ID NO: 23583 - DNA, 201 bp, Homo sapiens
gcagggtgggggaaaggagagcatcaggaaaaatagctaatgcatgctgcacttaattcttaggtgatgcgttgataggtgcagcaaaccaccatggcacrcgtttacctatgtaacaaacctgcacatcctgcacatgtaccctggaacttaaaataaaatgaaataaataaaataaaactttaaaaaatgcttattgct

SEQ ID NO: 23584 - DNA, 201 bp, Homo sapiens
caatcccattactaggcatatacccagaggaatagaaatcattctactataaagatacatgcatgcgtatgttcactgcagcactattcacaatggcaaargcacggaatcagcccaaatgcccatcagtgatagactggataaagaaaatgtggtacatatatcatagaataccatgccgacataaagaggaatgagatc

SEQ ID NO: 23585 - DNA, 201 bp, Homo sapiens
cagtgtggcaatccctcaaagacctagaaccagaaataccaactgactcagcaatcccattactaggcatatacccagaggaatagaaatcattctactayaaagatacatgcatgcgtatgttcactgcagcactattcacaatggcaaaagcacggaatcagcccaaatgcccatcagtgatagactggataaagaaaa

SEQ ID NO: 23586 - DNA, 201 bp, Homo sapiens
gactgatcattagagaaatgcaaatcaaaaccacaataagataccatctcacgctattcagaatggcaattattaaaaagtcaagaaacaatagatgctgstgaggcagtggagaaataggaatgcttttatactgttggtgggaatgtaaattagttcatccattgtggaagacagtgtggcaatccctcaaagacctag

SEQ ID NO: 23587 - DNA, 201 bp, Homo sapiens
agaagacatttatgcagctaacacatatatgaaaaaaaaagctcaacatgactgatcattagagaaatgcaaatcaaaaccacaataagataccatctcaygctattcagaatggcaattattaaaaagtcaagaaacaatagatgctgctgaggcagtggagaaataggaatgcttttatactgttggtgggaatgtaaa

SEQ ID NO: 23588 - DNA, 201 bp, Homo sapiens
ttccattgacctccattccccttctgttttatacgttggtgccctttctctccctctctccttcttttaagttctttcctgctcaagattttgagagaccrgtaacaccgaatgctcatagttcattagcggtatgaaatggtaaggacctgcctaggaggcttcctttttttactctcagatcggggtttgctgggtagc

SEQ ID NO: 23589 - DNA, 201 bp, Homo sapiens
ccatgtggtgttggacctgtggatgcacaaaagtcaagagttgaagtttaggtatccgtctaacaaagatctaataaccagagtctacaaggcacttaaamaaatttacaagaaagaaacaaacaaccccattaaaaagcaggcaaaggacatgaacagacacttctcaaaagaagacatttatgcagctaacacatatat

SEQ ID NO: 23590 - DNA, 201 bp, Homo sapiens
ggcctttgcttcagagggtgcaagccccaggcctttgcagcttccatgtggtgttggacctgtggatgcacaaaagtcaagagttgaagtttaggtatccrtctaacaaagatctaataaccagagtctacaaggcacttaaacaaatttacaagaaagaaacaaacaaccccattaaaaagcaggcaaaggacatgaaca

SEQ ID NO: 23591 - DNA, 201 bp, Homo sapiens
aacttacagctcaggcctttgcttcagagggtgcaagccccaggcctttgcagcttccatgtggtgttggacctgtggatgcacaaaagtcaagagttgargtttaggtatccgtctaacaaagatctaataaccagagtctacaaggcacttaaacaaatttacaagaaagaaacaaacaaccccattaaaaagcaggca

SEQ ID NO: 23592 - DNA, 201 bp, Homo sapiens
tccttgttgtgattgtcagatgggtttgctgacaagtttggatagttggcatcttaatatttgaaattctttagcataaattaggctcatttattggattraggagaaaaactctgcagattcgaaattaacctttctaggatgggaattaaactatttgttcataggaagaaggagggttttagcatcagtcagaccggg

SEQ ID NO: 23593 - DNA, 201 bp, Homo sapiens
ttatggataaaatagtcccagagagagagacacaaggatggacacttagaaaacagtcccagctactcgggaggctgaggcaggagaatggcgtgaaccckggaggcggagcttgcagtgagccgagatcgtgtaactgcactccaaactgggcaacagagcgaaactccgtctcaaaaaaaagaaagaaagaaaacagtc

SEQ ID NO: 23594 - DNA, 201 bp, Homo sapiens
tgggtcttagcttgtaattatagtgaggattagtattaaaatagctaacaaatagctattactgctgtttattacattactacctgagcagtaattagaaygtgggacaattactttcagagtagtagtttgagttctatatatgtaattaaaaaagaaaaaaagaagaagaagaaggaggagggggaaggacccagtatg

SEQ ID NO: 23595 - DNA, 201 bp, Homo sapiens
gttggtgccctttctctccctctctccttcttttaagttctttcctgctcaagattttgagagaccagtaacaccgaatgctcatagttcattagcggtaygaaatggtaaggacctgcctaggaggcttcctttttttactctcagatcggggtttgctgggtagcccttataaggggcaatgtctttagggggaagaag

SEQ ID NO: 23596 - DNA, 201 bp, Homo sapiens
taaaatcaacctcattagtcattaccgcaaacttccctctcctatgctttgtcttagttaaaggcccaccatccaaacactcacatagacctgggtgtcarcgtcttccacatcttgattcactttcctgttcttcttagctctcctcctaagtctctctaggatgcattgataatggtgttgatatacacagaaaatctc

SEQ ID NO: 23597 - DNA, 201 bp, Homo sapiens
ctcctatgctttgtcttagttaaaggcccaccatccaaacactcacatagacctgggtgtcagcgtcttccacatcttgattcactttcctgttcttcttrgctctcctcctaagtctctctaggatgcattgataatggtgttgatatacacagaaaatctcattgtctcttgcttgaacaactcaaaagtttcctaatt

SEQ ID NO: 23598 - DNA, 201 bp, Homo sapiens
gatgcattgataatggtgttgatatacacagaaaatctcattgtctcttgcttgaacaactcaaaagtttcctaattccctgctcttaatcttattcttayataatttataaaattatcttccgtctgatggtttcattctttcacatactgtactttacatttcttacagaataatgtccaaactttccaatatggccta

SEQ ID NO: 23599 - DNA, 201 bp, Homo sapiens
ttactatttcctctgcctgaaacatgctcccttttctccgaacagttccaaggaccaccctttcattgctttctgtccaaactctttgccaatcattaacygtaccttgaccatccaatggtagcctgaattaaattgttctctaattatttctatgtaggctttatgcatttgccaaggttaggctgttctgtggtaact

SEQ ID NO: 23600 - DNA, 201 bp, Homo sapiens
caaagctaatgtaattttagggtgtcgtttccttctcacagtacaccaccgcgaaggtctaatcccagacagcaatctttatggacatttgcttttccccycactacactacatgactaagcccctttggtctccacttcttactctgacattgaccagtatagcttgctttgcatcctctcagtttaaacaaagtaacat

SEQ ID NO: 23601 - DNA, 201 bp, Homo sapiens
aacatagagtctcctaatggcttagaagtatgtaatccatgttacctctcagaataaagttactttaaaaatccaaaaaaaagttatttaaaaaaatacaraagatgatgggatatgtaggaagtaaacagcaagttgcccatcattaaatactttcctgttgaaaatactgtcaatggtgttgtttgatgttgtttatat

SEQ ID NO: 23602 - DNA, 201 bp, Homo sapiens
attattcattcattcgttaaacagatatatattaaacacctaacacatacaaggcactgttctggttctgggatatagcaattaagaagacaaagttcctscctttatggagtttacatttcaatggggaaactcaggcaagtctggtttggaggagtttcatatttttatatagagtggtcaggtaagatctccctcgta

SEQ ID NO: 23603 - DNA, 201 bp, Homo sapiens
atgctgaaaaaacgtttgataaaatttaacatcactttatgataaaaatcctcaacaaacgttaagaatagaaggaacataattccaaataataaaggccwtatatgacaaacccatagtcaatagcatattgaatggggaaaaattgaaggcctttttgctaagatctggaaaaagagatgcccatttttattcaacata

SEQ ID NO: 23604 - DNA, 201 bp, Homo sapiens
tattcttttcctccagtcttctctatatctgaaagctgctaatttttggaagttgagaatgttctgttgtccttttctctattttgatacttggttgggtractcagagaagacatgaatcacaagtgttcaagattgttgaataatttctgttgcttgaatttcagcagatatttgttggatttcaaggacatttttcac

SEQ ID NO: 23605 - DNA, 201 bp, Homo sapiens
atttcactgttttctattttcacatcttgaaatctcatcttgctagaaagacattctcatgtcttctcttagaccggtagtatccatttatatggaattcrtaattatatgccttcacaaaattcatatgatctgcttatgccaatgaatataaaggtgaaagatagaaactgctgttatctctctatcgtaggtgtcccc

SEQ ID NO: 23606 - DNA, 201 bp, Homo sapiens
aatggtgcgatctcagctcactgcatcctctgcctcctgggttcaagtgattttcctacctcagcctctcgagtagctgggattataggcatgcgccaccmcacctggctaattttgtatttttagtagacacggggtttctccatgttggtcaggctggtctcaaactcctttttttttttttttagcaatattaacaga

SEQ ID NO: 23607 - DNA, 201 bp, Homo sapiens
gacttatattttcaagtcagcattataatgttgatgcaaagcagtgataaattgcaaggtatatgaaacagattatactacacattgttttgatctgtggmgaatgggattagaaatttcaatgtagaaaagtcctgtgcatgtgatgctgatggacaaattttcagagttattgggctcctgggcatctaagaaaggcat

SEQ ID NO: 23608 - DNA, 201 bp, Homo sapiens
cagtagtcagccatatcaacaagaagcatttttttttttttttgagatggagtcttgctctgtcgcccagcctagagtacagtggcgcgatctcagctcastgcaacctccacctcctgggttcaagtgattctcctgcctcagcctcctgagtagctgtgattataggcacgcaacaccacacccaggtaatttttgtat

SEQ ID NO: 23609 - DNA, 201 bp, Homo sapiens
tgggggactggtgggtttcctctgaatgggcttgaaagagcatgggttgaaaaccactggattagatgctgattataacactgcagtaactgatgcttttwtaagaccacttatgacatattagatacaatttaactctcctatcttctccatattatacccattaatacagttgatgaaactgaggtcttgaaatatgaa

SEQ ID NO: 23610 - DNA, 201 bp, Homo sapiens
cttctatgcatttttagtttactgatctatatcccaagtgcctagaatatcaccttgctatgtagtaggtactcagatatttgctgaatgaataaaggtgygcatgaatgaagttgagtaacatttatagaacagaaagggcaggaggcaaaactgttacacagtggttgggggcagaaataaatgcaggagaaaatatta

SEQ ID NO: 23611 - DNA, 201 bp, Homo sapiens
aagatttacttaagaaacacgaatgcactgcttgtgcactgcgcaaaagttctggggtcaagttccaactttcactaaggatcccagaacagcccggcagragctgcccagggctaacgcgctttgctctcaaacccggccgccagtcgccgacgcatgcgcagtctagcaccgtggcacaggcctttctcaagcaggttt

SEQ ID NO: 23612 - DNA, 201 bp, Homo sapiens
gaatattggctcagaggtttgcaatctgggcagcaatgtaaagtttcattcataaaaagtattctagattttttttttaagatgtcagaggtctttagcaktggcttccatgaacagttaccatgggtctactatgtatagggcatgttgacaggcactggggaagcattatggctctagagagatttccaatttggtcag

SEQ ID NO: 23613 - DNA, 201 bp, Homo sapiens
ctgtgaaagagcttgaaagtatagggatgatgttgaaaattctgtcatcaacagataatataccctgcagcatccttccgaattcattcctcaacacacgyatgctacttacaactgaacacttaatcaggaccatagctagatatatgctgtttggtaatttgcttttatcacttgatttagtataacgcatatctttct

SEQ ID NO: 23614 - DNA, 201 bp, Homo sapiens
ctaacgtaaacacgcacacacacacacaaacaaacaaacaaaaaacacttggtatttactttcttttaaacttccaagtcatgtagtccctgcctggctgytctgtgtcattactacatcatggcacttgacacctttatctatattcactacatttttgtttaaatcagcgctgtttgcagtaagtctattgtgtttgcc

SEQ ID NO: 23615 - DNA, 201 bp, Homo sapiens
ggtcaatgcatttccttccttttgcctcatgaattgagttcttgctatgggaaaggaacatatttttccagttatctgattataatttagagcatttaaartttttattgctgttgctgtgagcgattagcagtgtactttcaattttgtactcttggttgtgtatacactctgggcacaatggcatgccagaggatcatc

SEQ ID NO: 23616 - DNA, 201 bp, Homo sapiens
tcatttgtggcccctgattcttgctgtccatgatgtttctcctgaatccttcttgtgacattgttcttcctacttaatccatgaatcgtattaattcattyattcactcactgccttgtaaggtagtgattctagacacttgttctagttataggtacttgaatacactggtgatcaaaaaagagacactccaaccatccc

SEQ ID NO: 23617 - DNA, 201 bp, Homo sapiens
aatctgaaaatttcaaagtaacgatgaaaattatgatttgtaaattaatatctaacaattaaaacctctctttaaaagtgatattagtatgtttttaatcyaacatctagtaaaaataagaaaaagtacagcaaaatataagaggtgcttgtctctactttttgcataagtacataatttgaacatataggatatcaagag

SEQ ID NO: 23618 - DNA, 201 bp, Homo sapiens
tcatgttggagtcaaataacacacttgtctattataagtaaggagtgatctgtggatttgagttgtttcttaagaatagttcagtatcctcttgttattgrtattagtttactcttctatctgtgaaacacaatagggcctggaattaaatttaaatctggaaagtgtgtaaaacataagcaaactccagagcttctttta

SEQ ID NO: 23619 - DNA, 201 bp, Homo sapiens
caatctgatcatcaccaacatttctagccttagtttggtctcctctgcctgaatttccagtcactgccttcacactttacatcccctcaacttgtcttgtrcgtcacacagttttctcccctctcctttgtgtctagttttccctaaccatcatttgtggcccctgattcttgctgtccatgatgtttctcctgaatcctt

SEQ ID NO: 23620 - DNA, 201 bp, Homo sapiens
ctagaccacacaacaatattagctccagtagaattttctaaagctgtgtatttttcttcctgatctaaaattcaagtgttagtctgcatcatcatcagagkcaaagaagaacattacagaaatgtaagaaagaatcagatctcctttgttaagaaaactgattccggacaccaaaagactcattgctttgggttataaacc

SEQ ID NO: 23621 - DNA, 201 bp, Homo sapiens
ccagcttgatcaggcctgtgcacacctcagtttgatatttaaatttttggacaatctgatcatcaccaacatttctagccttagtttggtctcctctgccygaatttccagtcactgccttcacactttacatcccctcaacttgtcttgtgcgtcacacagttttctcccctctcctttgtgtctagttttccctaacca

SEQ ID NO: 23622 - DNA, 201 bp, Homo sapiens
cctgcttctgttgtagcatggaatttttccaccaaaattctatgccgtggttccttttactcctctctgaagaccagcagatcaatgaaaaagtcatgctytcttagaaagagccctataagctgtgatggcaggggaatcccagcacctagcatcccaggctcaacctgattcttaggacctgattcttagattgtgaac

SEQ ID NO: 23623 - DNA, 201 bp, Homo sapiens
tatttccttctcttcagaaaccgtgatgactttctgcacccagcttgatcaggcctgtgcacacctcagtttgatatttaaatttttggacaatctgatcrtcaccaacatttctagccttagtttggtctcctctgcctgaatttccagtcactgccttcacactttacatcccctcaacttgtcttgtgcgtcacacag

SEQ ID NO: 23624 - DNA, 201 bp, Homo sapiens
tgtttgttaaaaaaggaagaaattatttcaaaatatatggtctttataaacacataaacttctagaaacatttataactgaaaatgtgttgtttttacaaygtatcattttctagtagcagtaagttatgctgtagctcaactattcttaaaaccttcctggcaacgtttctctaggaaattgagatccttaaaattttta

SEQ ID NO: 23625 - DNA, 201 bp, Homo sapiens
atggagttttcttttcagaacagggccagcagggccagggagaaagttagctcctctcctgccatcgaatattaaacacgcgcgcgtgtgcgcgcgcgcgygcgcacgcacgcacacacacacacacacacacacacacacagagaaactcaactctgaacacaggatatttaataccctgacatcttatttttgattaga

SEQ ID NO: 23626 - DNA, 201 bp, Homo sapiens
aaataccccgttgttttcagtgtatgatactacctgttgtctttaatgcaaagaaaaaaacatttggttgctttatacccaaaaaaattaataacccatgyttctaaaccatttaaaatcaatcaatcaatctctttttcccaggcatatcttcttatttgatttggcagtgatcgtatgtaagagaaaaggtgataacta

SEQ ID NO: 23627 - DNA, 201 bp, Homo sapiens
tggctctttagaattctgttgttggatttattaaataagcacccagtgctagacaatttagatagtttccaacttcttgctcttatatcagtgatttgctstgcatctttttgactaaaactttgtatatgaccatttattcttcagggaaaattccaagaaatgtaatttccgagtccgattgtgtggtccatggccttt

SEQ ID NO: 23628 - DNA, 201 bp, Homo sapiens
gttaaagaaactaaaaataaaaaaatagaaaaaaggggaaggagaattagaaaaatcagaaaaggaaatttacaggggagtgaagagatggcagtgatacstgcatttgtacaactccttcaggttaaaagctgctccttggactgtgaactccttgggaaaaggcctgtcttctctttgtatctttagcatctaatcttg

SEQ ID NO: 23629 - DNA, 201 bp, Homo sapiens
gttgtcttagggtgcccttcacctactctgcgtgtgtgtggcgcgacaaagggaatttgatcaagctcttctataataacgaaggggagggacgaaacgakgtgatggggtaatttgcctttagtctcttcttttgctttgcgtcttgtactcatgttttcctaaaagaggaaccatgacatacatgaggactcgaggaag

SEQ ID NO: 23630 - DNA, 201 bp, Homo sapiens
agacacagcatttttattctattaggcatcactacatgggtgacctactatcattttgaatttttctcctgtgttgaactcataatttctttgtctgcaarttacttgtattaagcttatgttttatacatagctcataagaaagaaaaaacaaaggaatacaatacacagatatatacatgttaatgttagtaaggttgc

SEQ ID NO: 23631 - DNA, 201 bp, Homo sapiens
aaattcttagactttttgtacttgtctgatttatccagggttttagacaactttccagtttatattaagaataggctaaaacgtaaaccatcagaacttawcagccacatggaaatttcattaaaataggctcactggagccatgtaatagaattagtccagattcaatacatttatattactttcctctaaatgtaatca

SEQ ID NO: 23632 - DNA, 201 bp, Homo sapiens
agatagtttaactgttaagaaattgtttttacatatttatggaaatattctataggtctttatataacatgttagtatttatatgtttacctgtataactrtaataaaatataatgcttacaatggtttataatacttagaggaaattatgcataatatatatattcccctctctatcctcctaccggtccctccatccaa

SEQ ID NO: 23633 - DNA, 201 bp, Homo sapiens
ttaaataactaggttaaggttatcctccatgaactagtgtaatagcaaggaatagcactaacattttaatttctcatacttttaataccttttttcctggyttttacagattaagaaaatcaaaacgatatatttaatgccttcttatttgcaaattttcttagaatgttacagtagataatttcactttagaactaaaga

SEQ ID NO: 23634 - DNA, 201 bp, Homo sapiens
cactgagttaaatgcaatgcctcgcgcttgctgcactctttctctaccatgtgcacagattctctctctctaccacacagctactaccaggagatggggggaggggtggcatccatgattcaagactgtctttcctatcctcttcagtgctgctttcagtgatgaagttaaaaccaggtactgtgagtgctcacttgattt

SEQ ID NO: 23635 - DNA, 201 bp, Homo sapiens
ccaattttcagagtatgtcatttctagtaatgactaattgatttctttttggaggggaggggcagactttctattgttttaagtctcattctgagctagtrggtctttatatatattcaatgtgttttttatcaaggtactcataattctttaaaaaaattttttagttttaatttttgtgggtacataggtatacatatt

SEQ ID NO: 23636 - DNA, 201 bp, Homo sapiens
tgttgtaatattaatagatgacatccaggaaagtcttgggttttgcaatattttcatctagccatttcacagaatagagaatttatccttattctaaaggrtataattatttaaagaataaaccatagagttcttataattccaagataataagaatagaaggcacttttgaaatttccttgaataaatcctaatttcttg

SEQ ID NO: 23637 - DNA, 201 bp, Homo sapiens
agtatgatttgtaaggccaagggctggatatggtcttgcattttgtacactgagtaaagatttctgctagtagaggttgaaatgcaactgctgtcttctcrctgtgggatctcaccagggtttacatctgccctggaggggtactttcttctagtttgtataaaatattcatcatctcactaggctagtgttggtgaccct

SEQ ID NO: 23638 - DNA, 201 bp, Homo sapiens
ctatatttgagatttatttttcatctgaaacagtattctagccaggacacaaagcatgtgaatgattctggaagagaagagcctactggtgatagctgtaytgggtgggcggcacatgctggggttggggctgggggtgtgcctgtggaagggcatgagttattggcttgatgtcacttttagtggttaagaagatcttca

SEQ ID NO: 23639 - DNA, 201 bp, Homo sapiens
tttgtgatgggtgtttaggccttagcaagtgcaggatgcactggtcctggcaagtggagccatgctgggctttgtgggtgggctttttgggttttgtgggyacagcttggactcgtgttgcaggtgaggcttaggaaggggtttgacatttttagtcatttggggtggaatagcatttgctgcttttactgtatttcagtc

SEQ ID NO: 23640 - DNA, 201 bp, Homo sapiens
aatttttttgtagagatggggtctcagtgcattccccaggctggtctcttaactcctgggctcaagtaatcctactgccttggcctcccaaagtgctgggragattcaattttcatatgtcaattaaatttacagaatttgcaaatccaattgcaggaaatgggtagatgagctttaactttttttctccttctaattgct

SEQ ID NO: 23641 - DNA, 201 bp, Homo sapiens
tgattattctcccaatgaaaattcaaatgctgtctggattggagcctctttgcacacattcctcaaaggatttttaacataaagtcctaggcaacatacaytcacaatttgaaatcattaaatcaatccagaaacaaaccaccttatgccaagatcagcagaaacaataaaatatataattaaatccacaaatatagcaga

SEQ ID NO: 23642 - DNA, 201 bp, Homo sapiens
tgaagttttgttttagggatagtctagcacaaagtaggcatttaataaattactgttgaatgaatgaacaaaggagtgaaaaagcaaatgcaagtccctasctgtatatagaacattagcaatggtagatactaattaaatcagcctgtagaatcatattgaatgatatttgctgacccaagaagtggctagaaggagaaa

SEQ ID NO: 23643 - DNA, 201 bp, Homo sapiens
gaatattaagcattgaatgtaccatgtactgttttctgtttacatcctcttgaataaggcataaaaatgagcacttgaagttttgttttagggatagtctmgcacaaagtaggcatttaataaattactgttgaatgaatgaacaaaggagtgaaaaagcaaatgcaagtccctagctgtatatagaacattagcaatggt

SEQ ID NO: 23644 - DNA, 201 bp, Homo sapiens
ttctggaagaatcattattttcaacatcattatagttctattgtcagaatatgttttttaatattaagaaaatatatagaagaggcaaattttacttagtrgaatttatataactaagtagtctaaaaggttttagaagaaataaaccacagctacaaattagacgcattgtgcaggtttcccctttcccactgaactgag

SEQ ID NO: 23645 - DNA, 201 bp, Homo sapiens
tgcagagtattgtgaagagtaagtgaactcagatgggcaagatacctagcacagcaccagagatgtagtggacagttggtaatcatgtgagattctttccmttctcctgtcccacaccatcctctgatcttctcatggtatagggctttcctcacagttcttttgggaactcttagaactctataacttcgcttgtctatg

SEQ ID NO: 23646 - DNA, 201 bp, Homo sapiens
ttgcaacgtgatttaacagttctagaccaattgttacttgggcttctgagcactatacattattcaccatacggaattgaatgccattgagtacattaaaratagtcctgtatatatgacttgaaccacagctgtttccatctagtattgagtaggtgcatagttaacctccactattcctattctttggaaatcagctta

SEQ ID NO: 23647 - DNA, 201 bp, Homo sapiens
attttcttccattctgtaggttgtctctttactctgttgagagtttcttttgctgtgcagaagctctttagttaattagatcccatttgtcaatttttgcktttgtatttctctctatagacatttgtacagggcacaaaggcatagagataaatcatatgaagttcccacttttagggggcgaagagaaaatggagttga

SEQ ID NO: 23648 - DNA, 201 bp, Homo sapiens
ttcagcaggactggtaccagtttttctttgtacatcaggaagaatttggctgtgaatccacctgtttttttttgttggtaggtttcttattactgattcawtttcagaatgtgttactgatctgttcaggttttcaatttctttctggttcaatcttggaggttgtgttattctaggagtttatatatttcctctagcttt

SEQ ID NO: 23649 - DNA, 201 bp, Homo sapiens
atagtgctgtagtgaacatatgtgtacgtgtgtctttatactagaacagtttatattcctttgggtgtatatcctgcaatgggattgctgggtcaaatggyatttctgtctttaggtctttgaggcatcaccacactgtcttccacaaatgttgaactaatttacactcccaccaacagtgtataagtgtttctttttctc

SEQ ID NO: 23650 - DNA, 201 bp, Homo sapiens
tggcccattttcccatagaacattttttctttaaaatagaatgaaaatactgagcatacctttaaatgacttgatttatgttttatttatctgtcttaatkattctgtagatttaaaaatgatttaaatcattttcagagtgggttaataccctgctatataacacattcaaaatttatctgcctccagttgtgtttatgg

SEQ ID NO: 23651 - DNA, 201 bp, Homo sapiens
gtgaatgaaactcaatccctgaccctgtgttgcttttagtctatacagtacgggttttacttcatattttcccttataaaacagtggatgggaagggagcygtttgggttagagtgaatgggcatggctaaagtttggtaggtgggtaatgcttttctggatacatagttaattttgctcatgtgtacattataccactaa

SEQ ID NO: 23652 - DNA, 201 bp, Homo sapiens
caggcgtgagccaccgcgcccggcctattttctaattttaagtgaatgcatctcaaaagggtgacgaaggaccacattcctatcgaacagcaataattcamtgtggcaatatcttgccacaaataatttaaacattaattgtggttttgaggggcagtgtgcagtgggagtaaaaggggtagggtttagagtctccaaaag

SEQ ID NO: 23653 - DNA, 201 bp, Homo sapiens
aggcagttactaaagctttccatgcattatctcatctaattgtccaacaccgtgaggcaggcactgttatttatccccatgtggtggatactctctgaagmtaagaggggtttagtaacttacaccaacaagtggtttgtggtagagccaaacttagaataagaacattaagagcgaactgaattcttgtcagcgaggcta

SEQ ID NO: 23654 - DNA, 201 bp, Homo sapiens
ttgaactccatttacttaccctttgtaagtattggtttcttcccttatgctatggtttggccctgtgtgcccacccaaatctcatcctgaattgtaatccycacgtgtcaagggaggggccaggcaggaggggattggatcatgggatttcctccacgctgttctcatgatagtgagtgagttctcatgagaactgatggt

SEQ ID NO: 23655 - DNA, 201 bp, Homo sapiens
ccttcttgcagtttcttgaagactatgctgttaaatgtctctgtgctgttgcatatacctttttgtctgcttgaagttccctttttcatttgtctacttgwagattcagttcaagagtcatctttgtattgtcttccctgacttttctcccaggtgtggctgagcacatgctgctttgtgccacagtgtctggtagaatgc

SEQ ID NO: 23656 - DNA, 201 bp, Homo sapiens
ttctgtttttaatgaggacataaaatttgctaaacataattaaggcctaatttactctgaatatgtgtttattgtaacatatctgcttttgaaactattayttataagcacaattagaaaaatgcttaaaatttatgtgagttttctgcataactttgttttaaattatttaaaatttgtgtgacttttatacatatcttg

SEQ ID NO: 23657 - DNA, 201 bp, Homo sapiens
atcttggagacagaggtcttcaagagggagttggatggtttcatgtcactcatttctttaaaagccctaaataaatgactaaaaccatacaaacatagccraaaaaatagagtaacaaaaacaacagaaagaatatattcttctatctttagttcttaaatttcctttttattcttttaaatatttagctcaggaatgcta

SEQ ID NO: 23658 - DNA, 201 bp, Homo sapiens
attaaaaacagaagttgccgactaaggctaataaaagggcagcagtaatttttgtctactgtcactgttgtttctctagattgtcatatctttaaaaactyggtaagacaaatctgttagtgtttgattttagatttcttgtttataatctaaaaatcagacccagaatctgatttacctttttggttctaatctagttat

SEQ ID NO: 23659 - DNA, 201 bp, Homo sapiens
ttaagaagtttgggaacctaaagacatcaaatcaagaatattaagcattgaatgtaccatgtactgttttctgtttacatcctcttgaataaggcataaaratgagcacttgaagttttgttttagggatagtctagcacaaagtaggcatttaataaattactgttgaatgaatgaacaaaggagtgaaaaagcaaatgc

SEQ ID NO: 23660 - DNA, 201 bp, Homo sapiens
ctgctccttatatctataaagtttaacaaggattctttaccaaaatcactgctgatttttcctaatagccttaggcttttgggaagaagcagcagaaaaaytagaatttattggctgccagatgataaagtacagtttcttggggagatagcaatttagaattttagcaaagttactatgaagtataatgatgaaagggag

SEQ ID NO: 23661 - DNA, 201 bp, Homo sapiens
caaaactggaaatctggtttgagaactgaaatcaaacttctctttgctgtttcaaggattcctctatagatcaaacagtgaatctttcgggtagttttttwaaaaaactctatttccttcctaatatacatgtaaatatgcacacagaggtttacagacataccaagatatacgtatctatatacgtaagtagagggaaag

SEQ ID NO: 23662 - DNA, 201 bp, Homo sapiens
taaagaaattgaagcatcttgagttgaaagaaaaataagaaaatctctatggatgtaaagatcattcccagttcaaaagctaaggatgggcagcaaggtcrtgtcctggaaaatgtaaactctgtcaaatttgtaaccaagatccaggcatcctccctgctggaagtaacttacattctgttgaaacaagcaggctgagca

SEQ ID NO: 23663 - DNA, 201 bp, Homo sapiens
atttataagagaaaattggaaagaattacattgacctctgtgagtagcagatatgcggagctatgacaggtactatacttcatcagaaactaaaaacagtstcaagtaccatttgtgctttatcaacttttgtttaccacgaaaaagcataagtttgtttttctgccattttgaaagaaaataagtgcaggaaagtagaaa

SEQ ID NO: 23664 - DNA, 201 bp, Homo sapiens
tgcaatggtgcgatctgtgctcactgcagcctccacctcccaggtccaggcaattctcctgcctctgcctcctgagtagctgggattacaggcacccaccrtcacgcccagctaatttttgtatttttttagtagagacggggtttcaccatgtttgccaggctggtctcgaactcctgacctcaggtgatccacccacct

SEQ ID NO: 23665 - DNA, 201 bp, Homo sapiens
tgcagtttactcaagggctgttaaataaacttacctcttacttctgtcggaaagtcagaaacagtttacagagttgtaaaatataatagaaataaaaattmttgttgttattctttaattgccaccccaatagaatttatcacttgaatttttgttgttccatctttatatgccccattctttaatctctttggagacagt

SEQ ID NO: 23666 - DNA, 201 bp, Homo sapiens
aaatgtaatacaattttatagaaggtagtcaagaaagtcctctccaagggagtgacaattaggtgggacctgaagcgagtaaaggaacacaggaatgtcamtgtttggaaaaaagaatattcctggtggagggaataccaagtgcaaagctcctgaggtcattaagtggcaggcatactggaggaacagcagggtcagtgt

SEQ ID NO: 23667 - DNA, 201 bp, Homo sapiens
tgatcttcagttcaaaaataagtatattttttcatgctgatttagtgtttgtttttatttatgataggttaaagaggtaaacattaatcatatttagttayacatttaacatgttcctcttattatataatacagttaaataaaatgcagttggccagtgaatatctaagaaatttggtgtctgtatatgttagattttag

SEQ ID NO: 23668 - DNA, 201 bp, Homo sapiens
attcaagatacagaggccgggcgtggtggctcatgcctgtaatgccagcactttgggaggccgagacgggcggatcacttgaggtcaggagtttgatatcracctggcgaacatggtgaaactccatctctgctaaaaacacaaaaatcagccaggtgtagtggtgcatgcccgtaatcccagctacttcggaggctgaga

SEQ ID NO: 23669 - DNA, 201 bp, Homo sapiens
ccagaaatgtaagtaacttgcctgaaccacacagctcatcacagaacagggattccgtacccatgccccttcagtgcaccatgtcgtaggacatccttttycattcttttctttagagagtttgttgtccaaattgctggtaaggaataaaactcatgtttttttttaaactcaggttttctatctcctaaccccaaacta

SEQ ID NO: 23670 - DNA, 201 bp, Homo sapiens
gtcagcccctactaggagatgtctcccagttaggctacatgggggtcagggacccacttgaggaggcagtctgtccattctcagagctcaaacaccatgcygggagaaccactgctctcttcagagctgccagacagggacattttagtctgcaaacgtttctgctgccttttattcagctatgccctgcccccagaggtg

SEQ ID NO: 23671 - DNA, 201 bp, Homo sapiens
ttgaatattaaaaatgtctgctcacagaacagactgtatctattcaatttctagtttcattaagttttatcacatggtttattgaaaaggacaggtcccayggagtccaggccagtagcagccatgtagtaactttttctctattcagtagtcagccatatcaacaagaagcatttttttttttttttgagatggagtctt

SEQ ID NO: 23672 - DNA, 201 bp, Homo sapiens
ggattctgtgtggttgagagttgctgtattctataaaaggggaaatcctggctcatcagtatctcaagcttttcctacagtctctcaaattgcgtgtaacrtctcggagcatatcattttagctttctaggtgtacccctgatttgtatccatctttaacttatcctagtctaattttctgccctcttttgccatcaaaaa

SEQ ID NO: 23673 - DNA, 201 bp, Homo sapiens
cacaaaaaatctcaatctcataatgtttcaagaaagtttacggatttgtgttgggccacatgtggcctgcagaccatgggctggacaagcttgctctacaytaattcacacagtttaaaacattttccaactattctcacatatttatcttctggttgtattttataatcatttgtcaagttaaaaaaatctcattgtata

SEQ ID NO: 23674 - DNA, 201 bp, Homo sapiens
ttcataaagcaagtccttagatacctacaaagagacatagactcccacacaataataatgggaaactttaacaccccattgtcaatattagacagatgaaygagacagaagattaataaggatatccaggacttgaactcagcaatgcactaagccgacctaatagacatctacagaactctccaccacaaatcaacagaa

SEQ ID NO: 23675 - DNA, 201 bp, Homo sapiens
ttgctgactctccaggcacctgcttgttcacagtgagtctatatgcttcctccggcattatatttagaagctgaaggagagagacatctttaattaccatsttctaatttccaagaggagagaactaaggtccattagtccattagatcattagcaacgtttccctggccatgtttgtgttgctcttataaccagatcagt

SEQ ID NO: 23676 - DNA, 201 bp, Homo sapiens
taaatgctttctagcatattgaagcaccaactttttatgtattgaatttaaagcagtgatttacactgctaacactgtaacatttacaacatttacaacaytacatttacaacattacaacatttacaggctaacagcaaaacatttacaagtttctatagagaactttaggaagtattctttctattttctggaagaaat

SEQ ID NO: 23677 - DNA, 201 bp, Homo sapiens
tgtttttcagctttatcaggtcgtttatgttcttctcaaaactggttattcttgttagcaattcctctaactttttaaaagtttcttagcttccttgcatwtggttataacatacttctttagttcgcaggagttttttattacccaccttctgaagcctacttctgtcaattcgtcaaactcattctctttccagttttg

SEQ ID NO: 23678 - DNA, 201 bp, Homo sapiens
ttctttctggtgcatgggggtggggggagatattaagtattccccaagagcaatggtcagtttagtaattcgtctttgtatttttcttccttccttccccrtttttaatctgctcctcaggatcacttcaccaactaaatcctgcattcaggattttgtctaaacttctactttctgggaaactcaggctaagacagacta

SEQ ID NO: 23679 - DNA, 201 bp, Homo sapiens
aggtcccacggagtccaggccagtagcagccatgtagtaactttttctctattcagtagtcagccatatcaacaagaagcatttttttttttttttgagayggagtcttgctctgtcgcccagcctagagtacagtggcgcgatctcagctcagtgcaacctccacctcctgggttcaagtgattctcctgcctcagcctc

SEQ ID NO: 23680 - DNA, 201 bp, Homo sapiens
agacaggaagatgggaggagcctctgaagttttctcaaaagaaaatgggatcagtgtatgaaaatttaacatgagggatataccctacttctggcaaaacmaacaaaacagaagtactgaggacctggtcattaaaatgtacagaaactctaatcttttaagtgtccataaaaaggtgtagctcgtcacaggccccgaagg

SEQ ID NO: 23681 - DNA, 201 bp, Homo sapiens
taccccttgtatacatcttatccttttaaatattatttttgtgactgtttttcttttctttcctttttttttttttttgagtcggagttttgctcttgtcrctcaagctggagtgtaatggcgcgatctcgattcactgcaacctctgcctcccaggttcaagcgattctcccgcctcagcctcttgaatagctgggatta

SEQ ID NO: 23682 - DNA, 201 bp, Homo sapiens
tctcatgatagtgagtgagttctcatgagaactgatggtttcataaggcagtatttcttgctcttgctctctgtctcacttgtcaccatgtaagatgtacstgcttcaccttctgccatgattgtaagtttcctgaggcctccccagccatgtggaactgtgagcaaattaaacctcttttctgtataaattccccagtct

SEQ ID NO: 23683 - DNA, 201 bp, Homo sapiens
ttggccctgtgtgcccacccaaatctcatcctgaattgtaatccccacgtgtcaagggaggggccaggcaggaggggattggatcatgggatttcctccaygctgttctcatgatagtgagtgagttctcatgagaactgatggtttcataaggcagtatttcttgctcttgctctctgtctcacttgtcaccatgtaaga

SEQ ID NO: 23684 - DNA, 201 bp, Homo sapiens
gtgagataatgttgattcttaccacagtacctgagcaaagtgagaacttactattttaatctaaggtgatatagtgaaaaatcaggtttttttttttttttgaaagacgtgggcttatttagtatttttattgttttcatgatctggagtacacgtggatgggaacgttaaggagcaccaaactttaaaataatacgcaag

SEQ ID NO: 23685 - DNA, 201 bp, Homo sapiens
tattgcctctttctgctcctcttgggctctcttccttgtctttattttctggcttctttattcttccctttcttcttttttctctttgtccttttcccccragtttctctgtgtttttatcaataagacctttcaaaatcagtaaaacttttgaacacaagaaaggatctttaacagcttgagttcaaaaggtagccatgt

SEQ ID NO: 23686 - DNA, 201 bp, Homo sapiens
ctaaggaaacaggttttgatggagttttcaatgcatggctttatggactcaagaatcaaatgttttctgaacaatgtgaagaaagttttgtttctagatccttatatgttcctgtgtctccttttctgtagaaaagctctgcaatttttaatcagtaacacaaaaatgcctccatggaaatgtccataattctcagcgtgc

SEQ ID NO: 23687 - DNA, 201 bp, Homo sapiens
agaagaaaagagaggagaatcaaatagatgcaataaaaatgataaaggggatatcaccatcgatcccacagaaatacaaactaccttcagagaatactatraacacctctatgtaaataaactagaaaatctagaagaaatggataaattcctggacagatactccctcccaagactaaactaggaagatgttgaatccct

SEQ ID NO: 23688 - DNA, 201 bp, Homo sapiens
tccttcttttgcctgcttcagacatagaagcgtctggtccattgatttcaggacgtgtggaacactagcatgtactgaacagatcatatttgaagccatcygttccttacctgtgacctcattggatttgcttcattcattcattcattcatttattcattcattcattcattcatccctttatcctgaaaatattttcag

SEQ ID NO: 23689 - DNA, 201 bp, Homo sapiens
atatatcttcttctcagcaccacatcacacttattccaaaattgaccacattgttggaagtaaaacactcctcagcaaatgtaaaagaacagaaatcacarcaaactgtctctcagaccacagtgcaatcaaattagaactcaggattaagaaactcactcaaaaccgcacaactacatggaaactgaacaacctgctcct

SEQ ID NO: 23690 - DNA, 201 bp, Homo sapiens
aataataatgggaaactttaacaccccattgtcaatattagacagatgaacgagacagaagattaataaggatatccaggacttgaactcagcaatgcacyaagccgacctaatagacatctacagaactctccaccacaaatcaacagaatatatcttcttctcagcaccacatcacacttattccaaaattgaccacat

SEQ ID NO: 23691 - DNA, 201 bp, Homo sapiens
gtgtctttatagtagcatgatttataatcctttgggtatatacccagtagtgggattgctgggtcaaatggtatttctagttctagatccttgaggaattrccacactgtcttccacaatggttgaagtagtttacagttccaccaacagtgtaaaagtgttcctatttctccacatactctccagcacttgtttcctgac

SEQ ID NO: 23692 - DNA, 201 bp, Homo sapiens
tgtgtctttatagtagcatgatttataatcctttgggtatatacccagtagtgggattgctgggtcaaatggtatttctagttctagatccttgaggaatygccacactgtcttccacaatggttgaagtagtttacagttccaccaacagtgtaaaagtgttcctatttctccacatactctccagcacttgtttcctga

SEQ ID NO: 23693 - DNA, 201 bp, Homo sapiens
ttgtacttcagtgtgaactgaagagatcacagtttcatacacaaggtttttcatacatgtaatctcttgagttaccctcttacacttcaataattacatayggattcctagtcccaaggacactgagcatataagtcgttgtgctggagattctcagaagaatgggtgtcctctggggacttggtcacagacctaaaaagg

SEQ ID NO: 23694 - DNA, 201 bp, Homo sapiens
gtagagggtgtgagggagagggaaaaattcattgtgattttgaagttcccagtttggaagatggagtaaatgaatcagatatgtcaggaaacacatggaarttgagttttgtatatgctgcatttgagatgcctgaggagcagttaggaatgcatatctggagaacaaagaggtccaggctagggggaaagtgaggtcttc

SEQ ID NO: 23695 - DNA, 201 bp, Homo sapiens
aaatttgtaaatcggagagaggttgtgtatttataataaaatattccattttcttatttaggagcttgctatgcggcttttaatttattgaatgcgttgtygggcacggtggctcacacctgtaatgccagcactttgggaggctgaggtgggcagatcacctgaggtcaggagtttgagaccagcctggccaatatggtg

SEQ ID NO: 23696 - DNA, 201 bp, Homo sapiens
aaatgaggccagccatcttttgtttgctttcatttcctttaaagattatataagtagttatcaatattttctccaaatacttgtatttttgttttttgttkaaaataaatatcaggttcctatctaaattttacatttaaatgcagaatataagcctcatgaaggcagcaattttgtcgattttattccttatcgttggct

SEQ ID NO: 23697 - DNA, 201 bp, Homo sapiens
attgtccaaatcagatttttttttttttttaaagaaagggacactagcaataattgtggtaggacatcagggcttgaaccaggaccatctgtggaaaccargccagtggtctttgtacagaaattctgttttaggcagaaggagctatatatacaagtggctatttaaaattcacataatatttcaaacagtgttagatta

SEQ ID NO: 23698 - DNA, 201 bp, Homo sapiens
ggattacaggtgcccaccaccacgcctggccaatttttgtatttttagtagagatggggtttcaccatgttggccaggctggtctcgagcttgacctcagrtagtccgctcatctcaacctctcaaagtgctggaattacaggcatgagccaccgcgcctggacgtgactgatttttctactagatctaagcttcacgatg

SEQ ID NO: 23699 - DNA, 201 bp, Homo sapiens
aggtgttaacattactgtgattgggcaggcaggtatcacttgcacgctgaaggaacattctcaaagttttttggagttcagactctaaggggaggcaggaraagatgaggggtattctaggaggagacagtctagggctggctggatgtggcctgatgagagtcacctcctgactgggattatgtaacttgggaagtgaag

SEQ ID NO: 23700 - DNA, 201 bp, Homo sapiens
aggaatcattatgcagcagagcccccctgtattatacttaatttacatatttatttgtgtgctagtggattagaacactgtttattttattcctccatttygatcatttactctattaggcttctaagagcagttaaaccaatcttctcacctacaatggacataaaaccccagtttaattggggtgttatgaaaacaaaa

SEQ ID NO: 23701 - DNA, 201 bp, Homo sapiens
tgcctttgaccacatagtgatggttcaggaatggggttagtcactcagttgggaccaataagacatttgcaagggtagttttatttttctctcttcctgayacagaagagtgtagatgtgagtctacacaaggagctataaccatctgggtaccacatggagtttcaaaatggacccagttcagagggaatagagttgaag

SEQ ID NO: 23702 - DNA, 201 bp, Homo sapiens
ggtctcaaactcctttttttttttttttagcaatattaacagatggaacttttatttatttatttatttatttatttatttatttatttatttatttatttttgagacagtgtctcactctgttgcccaggctggagtgcagtggcatgatcacagctcactgcagcctcaacatcctgggctcaagtgatcctttcacct

SEQ ID NO: 23703 - DNA, 201 bp, Homo sapiens
ttccactaattccattttatttcctttctggattttttactaaaatccagtaggctatttgtagctattgcatttactgcataatagaaaatgaccttatrtgatatcctttgttgtagtgaaacccttgtggaagatgaagaagatctctatgactgtgtttatggggaagatgaaggtggagaagtctatgaggactta

SEQ ID NO: 23704 - DNA, 201 bp, Homo sapiens
tggtctcaaactcctttttttttttttttagcaatattaacagatggaacttttatttatttatttatttatttatttatttatttatttatttatttatttttgagacagtgtctcactctgttgcccaggctggagtgcagtggcatgatcacagctcactgcagcctcaacatcctgggctcaagtgatcctttcacc

SEQ ID NO: 23705 - DNA, 201 bp, Homo sapiens
ctggtctcaaactcctttttttttttttttagcaatattaacagatggaacttttatttatttatttatttatttatttatttatttatttatttatttatttttgagacagtgtctcactctgttgcccaggctggagtgcagtggcatgatcacagctcactgcagcctcaacatcctgggctcaagtgatcctttcac

SEQ ID NO: 23706 - DNA, 201 bp, Homo sapiens
gctggtctcaaactcctttttttttttttttagcaatattaacagatggaacttttatttatttatttatttatttatttatttatttatttatttatttatttttgagacagtgtctcactctgttgcccaggctggagtgcagtggcatgatcacagctcactgcagcctcaacatcctgggctcaagtgatcctttca

SEQ ID NO: 23707 - DNA, 201 bp, Homo sapiens
gtggcgcgatctcggctcactgcaagctccgcctcccgggttcacgccattctcccgcctcagcctcccgagtagctgggactacaggcgcccgccaccaygcccggctaattttttgtatttttagtagaggcggggtttcactgtgttagccaggatggtctcgatctcctgacctcatgatccgcccgcctctgcctc

SEQ ID NO: 23708 - DNA, 201 bp, Homo sapiens
taggcatgcgccaccacacctggctaattttgtatttttagtagacacggggtttctccatgttggtcaggctggtctcaaactcctttttttttttttttagcaatattaacagatggaacttttatttatttatttatttatttatttatttatttatttatttatttatttttgagacagtgtctcactctgttgccc

SEQ ID NO: 23709 - DNA, 201 bp, Homo sapiens
tacttttccagattcgagggtatctagtttgtttcatcactctttaaaaagaagcccaaggtatcttaaaggatgaaacagcgcctcggtgctgctcttcrtcatagaacctcacctcatgccatggcttggaaagctctgcaggcccaggcgtgtcctcttatactcagaaaacaacccttcaaggtcatcaattccatt

SEQ ID NO: 23710 - DNA, 201 bp, Homo sapiens
ttcttgtaacaattttttacattagtttttaaaagatgcaagagatacatctctgtttatatatacgtatgttatatatgtaacatatataacatatatawcatatatgttatatatttatatgtgacatatctgtttatatatacatatatggtatatatgtaacattttttctttgatttatttttaattacatagttc

SEQ ID NO: 23711 - DNA, 201 bp, Homo sapiens
atgacgaagtctatagtggagccaaacaaaaaggactgcaggaacactaaggggtaagctaaaaatcctgcctgagagaattaagaaaggcttctcagagragataacatttgagctgggtcctcaagaatgaacaggaattctccagtgggaaaggtcactatgaatgcaatgattagaactacttagtaagcgtacaaa

SEQ ID NO: 23712 - DNA, 201 bp, Homo sapiens
tgttgattcttgtaacaattttttacattagtttttaaaagatgcaagagatacatctctgtttatatatacgtatgttatatatgtaacatatataacawatatatcatatatgttatatatttatatgtgacatatctgtttatatatacatatatggtatatatgtaacattttttctttgatttatttttaattaca

SEQ ID NO: 23713 - DNA, 201 bp, Homo sapiens
cagtctttttgcttgtggcattagactcatgcaagtttataagtagtgtgtgttaagcctttccctttgtagagctgatttggggacacggttttacacatatacatatacatatacatatacatatacatatacatatacatatacatatacgtatacgtatacatatgactgtcctcatgaagattttttctgtagggc

SEQ ID NO: 23714 - DNA, 201 bp, Homo sapiens
ccgcacctggccccttgttgattcttgtaacaattttttacattagtttttaaaagatgcaagagatacatctctgtttatatatacgtatgttatatatrtaacatatataacatatatatcatatatgttatatatttatatgtgacatatctgtttatatatacatatatggtatatatgtaacattttttctttgat

SEQ ID NO: 23715 - DNA, 201 bp, Homo sapiens
tccattctcagagctcaaacaccatgccgggagaaccactgctctcttcagagctgccagacagggacattttagtctgcaaacgtttctgctgccttttrttcagctatgccctgcccccagaggtggagtctacagaggcagacaggcttgttgagctgaggtgggctccacccaggtcgagcttcccggccactttgt

SEQ ID NO: 23716 - DNA, 201 bp, Homo sapiens
tgttgatgaaattccttagcttttgtttgtatgagaaagtctttatttctccttcatgtttgaaggatattttcactgaatatactgttctagggcataawttttttttttttttttttttgagacagagtgtcactctgtcacccaggctggagtgcagtggtgtgatctcggctcactgcaagctctgcctcctgggtt

SEQ ID NO: 23717 - DNA, 201 bp, Homo sapiens
gtatcaccagcagaggctgcagaacagcaaattttgtagaacagcaaatattgatgcctgatccttcctctgtaggcttcatctcagaggggcatctggcwgtatgaggtatcagtcagcccctactaggagatgtctcccagttaggctacatgggggtcagggacccacttgaggaggcagtctgtccattctcagagc

SEQ ID NO: 23718 - DNA, 201 bp, Homo sapiens
aagtgatagagggaaattagaggctattgttactagtgtgtgatgggttcatgtactaccaactcttctcctcaaagctgcagatagcctggtcgtgcaaraatttgtttcttgtagcacgtctcctctcatttgcctcgctgtgccgctatattttgtttagcatgtgcttttctcttaataacaacacagtgattcaca

SEQ ID NO: 23719 - DNA, 201 bp, Homo sapiens
tgctaggcatcctttgcctgactgtgtgtaaggtgtggcaatctcagtagtcacattggccctcccatttcccgtagtctttggaaatctgaccggcagcrttgagaagtaagtaaaaggggtgccctctcagatgtcccttccttttaaggaatgatgtgtatcaaatcacaagatcggtcggggaaggagcagcgtgac

SEQ ID NO: 23720 - DNA, 201 bp, Homo sapiens
taaaccctttgggtttaccaaaacaggaaacatggagagaaaggacaaccaagtcatccactgggcacttctggattgttctgacatcctaattatgtccytaggctgcaagctcttccctccatgcctgcttcctcttccatttctgcccctttcttatctacagacctgtttctacagggaacagatatttcagtcttt

SEQ ID NO: 23721 - DNA, 201 bp, Homo sapiens
ttttaagagattctgacaacttgaatcaagccactaaaactttttttttgtaattgtgaagggaaagcaaacaattcattgaaaattttatatttgttatmgtttggttttgttcatcaattattcattcattcgttaaacagatatatattaaacacctaacacatacaaggcactgttctggttctgggatatagcaat

SEQ ID NO: 23722 - DNA, 201 bp, Homo sapiens
cagatatatattaaacacctaacacatacaaggcactgttctggttctgggatatagcaattaagaagacaaagttcctgcctttatggagtttacatttyaatggggaaactcaggcaagtctggtttggaggagtttcatatttttatatagagtggtcaggtaagatctccctcgtaaagcaactcaaaaggagagaa

SEQ ID NO: 23723 - DNA, 201 bp, Homo sapiens
agttagttataacatattgctgacatttttatattcttctctcttcatttatgatgtccacataatttacagttcttgaacaactgatcaactgcaattgyacatcttcattagtaagtgatgctgggcttcccttttttatttagttacttcaggatctttaccagctactctaaagcatttttattctgagcctgatgg

SEQ ID NO: 23724 - DNA, 201 bp, Homo sapiens
tattagatttatcacattatagagagaaaaccaataataatggtttatttgtaaaaatgttttctttagtatgtcttagttttaatttgatgaaagtagtrctaaaccatatcttccaaataggaactggtcaaacataccactgatccgactgagaaggcaaatctgaaactggctcttgatgccatgaaggtagggcag

SEQ ID NO: 23725 - DNA, 201 bp, Homo sapiens
ataattaaggcctaatttactctgaatatgtgtttattgtaacatatctgcttttgaaactattatttataagcacaattagaaaaatgcttaaaatttaygtgagttttctgcataactttgttttaaattatttaaaatttgtgtgacttttatacatatcttggagacagaggtcttcaagagggagttggatggttt

SEQ ID NO: 23726 - DNA, 201 bp, Homo sapiens
ggcgaggagctgcgatcctttggaggagaagaggccctctggtttttagaattttcagctttactgctctggtgtctcctcatctttgtggtttttatctmcctttggtctttgatgatggtgacctacaaatggggttttggtgtggatgtcctttttgttgatgttgatgctattcctttctgtttgttagttttccct

SEQ ID NO: 23727 - DNA, 201 bp, Homo sapiens
tcattctccatccagctttgttccattgctggcgaggagctgcgatcctttggaggagaagaggccctctggtttttagaattttcagctttactgctctrgtgtctcctcatctttgtggtttttatctacctttggtctttgatgatggtgacctacaaatggggttttggtgtggatgtcctttttgttgatgttgat

SEQ ID NO: 23728 - DNA, 201 bp, Homo sapiens
actttaaagtagttttttctaattctgtgaagaaagtcattggtagctggatggggatggcattgaatctataaattaccttgggcagtatggccattttyacgatattgattcttcctatccatgagcatggaatgttcttccatttgtttgtgtcttcttttatttcgttgagcagtggtttgtagttctccttgaaga

SEQ ID NO: 23729 - DNA, 201 bp, Homo sapiens
gtaggacttttacttgtttttaaagttactctgaatattttattaggaaagactaattaacataataatttatgtaacatctgctgggattttttttaacstttgcttgcttataactatataattatgacttgttactgcatttggagacatatgcatgacctttcagagttcaaaacaaccatagggaatcttttgtct

SEQ ID NO: 23730 - DNA, 201 bp, Homo sapiens
gctttttagagtaagtatgctttaaaagtataaaaaatggtaacattttaatgtaataaggtagttgtcttgagtaaatatctctactaatatttgttttyattttcatgtgattatgaaaaactctgacatgtgcattttatattttagaaccaaccagttttgctttttggacgacctcagggagatggtgaaattcga

SEQ ID NO: 23731 - DNA, 201 bp, Homo sapiens
gcaaataaacatagtttaatatctatcagcttttcatcttagccagcattcttcacccaagccctataataacattacctaaaccatccaggtggctgggyatagaatcatcttgagccaaatagcagaaggatttaatgatgaagctgaacattcttaaaagattagattatgcctggtacatttcctttcatccgagac

SEQ ID NO: 23732 - DNA, 201 bp, Homo sapiens
agacttatttgtcatgtagacctgagctttttagagtaagtatgctttaaaagtataaaaaatggtaacattttaatgtaataaggtagttgtcttgagtwaatatctctactaatatttgtttttattttcatgtgattatgaaaaactctgacatgtgcattttatattttagaaccaaccagttttgctttttggacg

SEQ ID NO: 23733 - DNA, 201 bp, Homo sapiens
ggtcaagtctgcagtgagccatgatcatgccactgcactccagcctgggcagcaaagcaagaccctgtctcaaaacaaacaaacaaacaaaaataaacaaraagaaaaaagattgttcataagtaattgttgaaaaataaatgaattatatgtaaaaaaaaccagaatgtgacataaaatgtttcttaaactacatataaa

SEQ ID NO: 23734 - DNA, 201 bp, Homo sapiens
tgttcctccactgggcagtgtgcttcatgagggcagtgtctgtatcattttgccgtacacctgttatggtggttggcacgtagtagatgctcaaaaaataytaattgccgaaccgtctcgtaatttggacccttccggttgagtctttcttttcatagctaatttcccctttaagaatatatactaattaaaatcaattga

SEQ ID NO: 23735 - DNA, 201 bp, Homo sapiens
gctcagaatgagtggtaacacaaaagatttgggtacttccagagacactgtttaagatgataatgttcaggcctataatcccagcattttgggaggctaargtgggaggattgtttgggcccaggaattgaagaccagccttggcaacatagagcttatctctacaattatttttttaattagctgggcactgtagcacat

SEQ ID NO: 23736 - DNA, 201 bp, Homo sapiens
tagtgattttcagtcaattcttttttcctctagcgtgtacagtaagtgttcataaacacttaaaaataatttagttatcagcctctgggaaaatagctcaytattttaaataattaactcagagcttttcgtccttgaggtcctagctcaagaaagccagcctggactttatagaccaaattagcgcgcgcccccccgccc

SEQ ID NO: 23737 - DNA, 201 bp, Homo sapiens
tggagaaagtggcttaccaccttgcttttactgtctgtgttcactgcaacttgcccctgctttcattcacctctttgcagtgcctcataacaacaccctcytggctttctgtcattcccctggtcatgttccaacgctccaaatcccagacaccctgaatccctaactctcgcttagtaccagcaagctcaactagtcctc

SEQ ID NO: 23738 - DNA, 201 bp, Homo sapiens
atgtgaggacttatttctgggctctctactattctgttggtctatatacctgtttgtatgccagtgccgcatgattttgattattgtggctttgcaataarttttggaaacaagtcagtaagtatgagacttccagctttgttccttttcaagattgttttgactattcagaatcccttgagattccataagaattttaga

SEQ ID NO: 23739 - DNA, 201 bp, Homo sapiens
tgcaaatacttttcttgtgtctgttggcttttcactctgttgatattgtctgtgaggcacaaaagtttttaattttgacaaagtcccatttatcaatctcraagaaataattgctgaatctattgtcataaagtttttccccattttcttgtaaaagttttatagttttaactgttatgtttgggtatttgaaacattttt

SEQ ID NO: 23740 - DNA, 201 bp, Homo sapiens
ggaactgtagtagcactatgtagcgttacaggcccagttgagttttgtggtcatattgaaaattagacgatcggtaatgtccatgcttaacttcttagatagagtcacaaaatatgtggcaagttagacttgatcagggtgtttgtttttctagaaaagcacaatggaagaagagaaggtaaggggatttacagggaagtg

SEQ ID NO: 23741 - DNA, 201 bp, Homo sapiens
cctattgttagctattatttggagcattattttatcatgtttttcatcctctgttaacatagacccttcatggtgttaaagccagtcacaagttgacattytggttttccttaatcttgggcatttagtggatagaaccatgaacagcaaagtagttccttttgatttccatgtaaaattatttttaaattgtattttgtg

SEQ ID NO: 23742 - DNA, 201 bp, Homo sapiens
gtttcaccatgttgcctagagtggtctccaactcctgagctcaggcagtccacccgccttggcctcccaaagtgttaggattacaggcatgagctgccacrcccagccctgatttacctttcctacagttactttggctactgcattgagaacagactggagagcagcaaggatagaagtggccaggctaatacatcattc

SEQ ID NO: 23743 - DNA, 201 bp, Homo sapiens
tttctggacagctgaagacctttttaaacctcgaagcctttatttgaatgctaacaatggatgagaatcgttttgaatgtgtttcactcttctcctcttaygttagatgtaatttaatctttctgatgaccaaagattgtcattataagcatcattaatgaaaattgagcacatacaatgctctaagagttctgttcccta

SEQ ID NO: 23744 - DNA, 201 bp, Homo sapiens
catgctttatttttaatttcacaacaaagctgtgagaggtattatgcccattttacagatgaggaagctacactgagagttgtgacaggtgtccaaattcrtgtaagtaataaacgctgaaactgagctttaaaccaaatccttataaaacttccatatatgtgtttccataactagaagaagcattgtatgtttttaact

SEQ ID NO: 23745 - DNA, 201 bp, Homo sapiens
gttaaaaagtcaagcagtaagatgttaatgttggaaaaaatatttgaaggtctttacttactttgccaaatacctttttattgtttttgcagttatttctrtagtatttgttaagtgtgctgtacattaaggaaataatcatacaccatttatggtgtttccaactttatgaacattttagtaagagatattttagagtgt

SEQ ID NO: 23746 - DNA, 201 bp, Homo sapiens
taattaaggcctaatttactctgaatatgtgtttattgtaacatatctgcttttgaaactattatttataagcacaattagaaaaatgcttaaaatttatrtgagttttctgcataactttgttttaaattatttaaaatttgtgtgacttttatacatatcttggagacagaggtcttcaagagggagttggatggtttc

SEQ ID NO: 23747 - DNA, 201 bp, Homo sapiens
tcccatgtaacaaatctgcacatatacctcctgaatctaaaatatgagttgaaattacaaaaaataggtagaatatctgagtaaaaatttctcagaagacrtacagatggctaatatttatacgaaaaaatgttcagcatcactaataatcacagaaaagcaaattaaaaccacaatgaaccatcatctcactccagttac

SEQ ID NO: 23748 - DNA, 201 bp, Homo sapiens
ggtttgtttgggtaacagccatcttaatggttttaaagcaatatctcatcgtgggtttgatttgcattttcttaatgactaatgatgttgaatattgtctytgtgtgtttgctggccatttgtatattctctttggaaaaatgcctattcaaatgctttgcccatttttgaatcaagttgttttttgtctttgtgttgtag

SEQ ID NO: 23749 - DNA, 201 bp, Homo sapiens
tattttcatagatgtgggactttagagtgttacatcctgtgtatgtttagaaaaagctgaaggatgagctagtaaatcaaggaagagggagatatagaagycaggaaaggggagcaaagagaagtcccaggactacagtaattcaacaggcttagtagagcaagcagtatcaattagaagagcgtggagggctcagaagaa

SEQ ID NO: 23750 - DNA, 201 bp, Homo sapiens
aggctgcagtgaaccgagatcatgccactgcactgcagcctaggcaacagagcgagactctgactctgtctcaaaaaaaaaagtgtgtgtgtgtgtgtgtrtatatatatatatacgtatatatatatatgtgtgtatatatatgtgtgtatatatatacacacacacatacatacacacacacattaatgctataaatat

SEQ ID NO: 23751 - DNA, 201 bp, Homo sapiens
atttaaataagtagtataatgttaaacagtttacaagtattttaggactattatcagctaagcactaaatcagtcatcgagaattattccatgtttttatkcagagtttaaatacaaggaatgtactcttttagataaatagatcctaaagcatgttttctaatcaagaaatgtctcaaggggctaggtgtgctggctcaa

SEQ ID NO: 23752 - DNA, 201 bp, Homo sapiens
ggaggctgcagtgaaccgagatcatgccactgcactgcagcctaggcaacagagcgagactctgactctgtctcaaaaaaaaaagtgtgtgtgtgtgtgtrtgtatatatatatatacgtatatatatatatgtgtgtatatatatgtgtgtatatatatacacacacacatacatacacacacacattaatgctataaat

SEQ ID NO: 23753 - DNA, 201 bp, Homo sapiens
gagtgtaatggcgcgatctcgattcactgcaacctctgcctcccaggttcaagcgattctcccgcctcagcctcttgaatagctgggattacaggtgcccrccaccacgcctggccaatttttgtatttttagtagagatggggtttcaccatgttggccaggctggtctcgagcttgacctcaggtagtccgctcatctc

SEQ ID NO: 23754 - DNA, 201 bp, Homo sapiens
gcggaggctgcagtgaaccgagatcatgccactgcactgcagcctaggcaacagagcgagactctgactctgtctcaaaaaaaaaagtgtgtgtgtgtgtrtgtgtatatatatatatacgtatatatatatatgtgtgtatatatatgtgtgtatatatatacacacacacatacatacacacacacattaatgctataa

SEQ ID NO: 23755 - DNA, 201 bp, Homo sapiens
aggcggaggctgcagtgaaccgagatcatgccactgcactgcagcctaggcaacagagcgagactctgactctgtctcaaaaaaaaaagtgtgtgtgtgtrtgtgtgtatatatatatatacgtatatatatatatgtgtgtatatatatgtgtgtatatatatacacacacacatacatacacacacacattaatgctat

SEQ ID NO: 23756 - DNA, 201 bp, Homo sapiens
ccggcacgggcgccccgcctccagccggcagctcccattaatcatgcggctaatttctttgtgtaaatgcaaacgtctaggtgcgctgagcttgccctgcytcccagccttctgctttgggaccacttcggcaccactttggcgtttcctaccttggcttgaaatggtttagctcctcaagctgaatgcgaaagctttgcg

SEQ ID NO: 23757 - DNA, 201 bp, Homo sapiens
tctgaaactggctcttgatgccatgaaggtagggcagattcatcagtaatttgtttgtattttttattcttgcctaaagacaatggaattcaaattgcatwcacacacacacacacacacacacacacacacacatatacacacatatatatacacaaacatatatatatacacataaataaaatattatgacatgcctat

SEQ ID NO: 23758 - DNA, 201 bp, Homo sapiens
ggctgaggaatcagctatagagaatggaggggatagagctgcaaggggcgagggggcgacgatctctaaaactttcagcgccgtgctctactgatgctctrggcacttttttcattgctctggggagtctgggtgccccaattaatccgtcgctcctttgagcatttgttgtttagggggtcctgggggaccccatcgtat

SEQ ID NO: 23759 - DNA, 201 bp, Homo sapiens
tttttacttactactatactttagtggcgaaatcacttgaaatgcttgatgatttgaaaccacagattcacaaagtgagaatattttatagtgggtgattkggaactttaataacatgacttttatttaatgaagtaaaagtaacttttaaggaataaaagaatagaatttttatggatttattatacttaatagattctg

SEQ ID NO: 23760 - DNA, 201 bp, Homo sapiens
aactgtagtagcactatgtagcgttacaggcccagttgagttttgtggtcatattgaaaattagacgatcggtaatgtccatgcttaacttcttagatagagtcacaaaatatgtggcaagttagacttgatcagggtgtttgtttttctagaaaagcacaatggaagaagagaaggtaaggggatttacagggaagtgat

SEQ ID NO: 23761 - DNA, 201 bp, Homo sapiens
ctgagatcgcgccactgcactccagcctgagcgacagagcgagactccgtccaccccccaccccaaaaaaatttcttatttcgtatcatggaaactgaacygtagagaatttatccaaggtcatgttgctagaaagcagtacagctcgggctctaaatccagatttgcgtcctgggatagtgtatataatgtggattttgg

SEQ ID NO: 23762 - DNA, 201 bp, Homo sapiens
gaactgtagtagcactatgtagcgttacaggcccagttgagttttgtggtcatattgaaaattagacgatcggtaatgtccatgcttaacttcttagatagagtcacaaaatatgtggcaagttagacttgatcagggtgtttgtttttctagaaaagcacaatggaagaagagaaggtaaggggatttacagggaagtga

SEQ ID NO: 23763 - DNA, 201 bp, Homo sapiens
accatttgatcctgacaacaaccctattagttagaaattacttcttatggccaggcacggcggctaatgcctgtaatcctagcattttgggaggccgaggygggcggatcacgaggtcagaagatctagaccattctggctaacacggtgaaaccctgtctgtactaaaaatacaaaaaaaattagccgggcgtggcggcc

SEQ ID NO: 23764 - DNA, 201 bp, Homo sapiens
gggaactgtagtagcactatgtagcgttacaggcccagttgagttttgtggtcatattgaaaattagacgatcggtaatgtccatgcttaacttcttagatagagtcacaaaatatgtggcaagttagacttgatcagggtgtttgtttttctagaaaagcacaatggaagaagagaaggtaaggggatttacagggaagt

SEQ ID NO: 23765 - DNA, 201 bp, Homo sapiens
gggaggcggaggttgcagtgagccaagatcgcaccattgcactccagcctaggtgacaagagtaagactctggctcaaaaaaaaaaaaaaaaaaaaaaaargaaaaaagcagatcttttttcatgtgactcttatgcctgttacaagtaatgctggcaaatccttcctgatcttttcaccaccagaaagacaggatagaaa

SEQ ID NO: 23766 - DNA, 201 bp, Homo sapiens
gggttcaacatgctatgacctgaaactggaacaagtgagaataaactgggaaagaaaaaaacatggagtggggaaagaagtgagtaaattgaaggtgaatyagatgatccgtgggaatactttttagatgccaaggaattttcatttcagttgtaggagagatttccctgatacatcatggcatttctgaagctttcctgt

SEQ ID NO: 23767 - DNA, 201 bp, Homo sapiens
gaacattgtgccttccctgaacacttgatgagattatgtccttttggtttgtgcttccgtagcgtttgcaatttttctaatgtaaaacacataatgctttrtaatatttgcctgtataattttccttttccctgttagactctaagtttttgaggataagggaaaaactgccttgtttattatgttgttcacattccaagc

SEQ ID NO: 23768 - DNA, 201 bp, Homo sapiens
aaaaattgagacagtattcttttgtgcatgttttttgagcttccctaatgttttaactttatagtttttttataaaaacaatttgtcatattttaaaatgyaattttaatcactcggaggaaggggactaggtacatttgtattcatgtcgtgtggggatataagtttgttgacagtctcattttgcaaaatggatttaat

SEQ ID NO: 23769 - DNA, 201 bp, Homo sapiens
aatcatgtggcatgtaagtctgcttattacattcttctagctataatatgtttggtgaaagagcttatcaaaccatttttttttcattatattcattttcratccaaagttaccaaggattcaaaaatctagagaaagtttatgggggttacagaagacccagagatattttcaaagcctttccaatagaatactatgcat

SEQ ID NO: 23770 - DNA, 201 bp, Homo sapiens
ggatcaggctgggacagagtgtttctagtattggcctgcaagacactggctctgccctcagcagggatggctgtgtgcagtcaggtatgtaaaactagttrgctcccacccttgaccttgtcatatgaccgatcatatgaaagtgtatttgtgagctataattattgaggtatctgccttatctcccttgctagactgata

SEQ ID NO: 23771 - DNA, 201 bp, Homo sapiens
tctgaaagatatttgattaaaatgatataacatctgagaggagagaatgactatcactacctggagttgccatgcaaggcttgacacagaaatgtaatggmgtgaagaatgaggaatactccaggtagaggaaaaagatgaatgactatgcaatttattgtccaaatcagatttttttttttttttaaagaaagggacact

SEQ ID NO: 23772 - DNA, 201 bp, Homo sapiens
tataattatgacttgttactgcatttggagacatatgcatgacctttcagagttcaaaacaaccatagggaatcttttgtctagtcttttcatttcgctartaaggaaacaaagtctgagagagaaatgaagtgccacccagttaaataatggcagggtggtagtagaatagaattttagggaatcatgaaattatactct

SEQ ID NO: 23773 - DNA, 201 bp, Homo sapiens
tgaccggcagcattgagaagtaagtaaaaggggtgccctctcagatgtcccttccttttaaggaatgatgtgtatcaaatcacaagatcggtcggggaagragcagcgtgacacaggtgtatcttttctgtggtttgcgatgaggcataagtgcataaattccaaccaggaaaggaagtgcagggaattctactctcagga

SEQ ID NO: 23774 - DNA, 201 bp, Homo sapiens
cagttaattttttatttttagtagagacagggtttcactgtggtagccaggatggtctcgaactcctgacctcatgatccacctgccttggtgtcccaacktgctgggactacaggtgtgaaccactgtgcccagtcgatattcttttttaacccataccagtggtgacttacacctataaatttttatagcttccccatt

SEQ ID NO: 23775 - DNA, 201 bp, Homo sapiens
gataatctgccagcataattttaaactcaataccaatcaggatcttttcatgtaaagtagttgtggcatctttaggcatcttaagcacttgttctgtctgygtgattggtggcttaacctaggttctctggaaagcagagcctggggtaaggcactgaagtactgaaaccctcttggtgaggtacaatcccatggcttgcc

SEQ ID NO: 23776 - DNA, 201 bp, Homo sapiens
acctcccaggttcacaccattctcctgcctcagcctcccaagtagctgggactacaggtgcccgccaccatgcctggctaattttttttttttttttttgkatttttagtagagatagggtttcactgtgttggccaggatggtctcgatctcctgatctcgtgatctgcccgcctcagcctcccaaagtgctgggattac

SEQ ID NO: 23777 - DNA, 201 bp, Homo sapiens
ctctctttttgtcaagtaaactatatccattcttctaggtgcaatacttcatctgaggttaagctgaaatgaaataacaatgaaaaaccgtcagagaacawtgctgaatactcttcccaacctagtgcatcagtggcacaccccacactcactggggtcattttgcccattagggctgagctacttatctacatcctttga

SEQ ID NO: 23778 - DNA, 201 bp, Homo sapiens
atgaattcagcctcgttagaattttcccttgttggtttgtgttcattccacaagactacatctgataaacctgtatgtattattagttactctttattttyttaaagtcaagatattatctagattaatatttaggggaaagcagaaggctaaaagtaaataaactttgaaactatggtcttgtgttaatctcttcatggc

SEQ ID NO: 23779 - DNA, 201 bp, Homo sapiens
ccacgcctggcctcggtgcatgttcttcttgaacatcctgcttattggaggcacaaacagccacctgcctgggaattgggaaggggtgtgtgggagcaggrgccaccttgagcagtggtcaggtgtgagaacacccctcctatttttacacaggcatcgtcctttgtacagagtgggggaaggccaagagaccatcttgaa

SEQ ID NO: 23780 - DNA, 201 bp, Homo sapiens
cacctcagcctcccaaagtgctaggattacaggcatgagccaccacgcctggcctcggtgcatgttcttcttgaacatcctgcttattggaggcacaaacagccacctgcctgggaattgggaaggggtgtgtgggagcaggagccaccttgagcagtggtcaggtgtgagaacacccctcctatttttacacaggcatcg

SEQ ID NO: 23781 - DNA, 201 bp, Homo sapiens
ccacctcagcctcccaaagtgctaggattacaggcatgagccaccacgcctggcctcggtgcatgttcttcttgaacatcctgcttattggaggcacaaacagccacctgcctgggaattgggaaggggtgtgtgggagcaggagccaccttgagcagtggtcaggtgtgagaacacccctcctatttttacacaggcatc

SEQ ID NO: 23782 - DNA, 201 bp, Homo sapiens
cccacctcagcctcccaaagtgctaggattacaggcatgagccaccacgcctggcctcggtgcatgttcttcttgaacatcctgcttattggaggcacaaacagccacctgcctgggaattgggaaggggtgtgtgggagcaggagccaccttgagcagtggtcaggtgtgagaacacccctcctatttttacacaggcat

SEQ ID NO: 23783 - DNA, 201 bp, Homo sapiens
gcccacctcagcctcccaaagtgctaggattacaggcatgagccaccacgcctggcctcggtgcatgttcttcttgaacatcctgcttattggaggcacaaacagccacctgcctgggaattgggaaggggtgtgtgggagcaggagccaccttgagcagtggtcaggtgtgagaacacccctcctatttttacacaggca

SEQ ID NO: 23784 - DNA, 201 bp, Homo sapiens
attgccctggccagaactttcaacactatgttgaataggagtggtgagagagggcatccctgtcttgtgccagttttcaaagggaatgcttccagtttttkcccattcagtatgatattggctgtgggtttgtcataaatacctcttattattttgagatacgttccatcagtacctagtttattgagagttttcagtatg

SEQ ID NO: 23785 - DNA, 201 bp, Homo sapiens
tttgtgggcatagtgttgttcattgtattcccttgttatcgtttcagtgtccatggaattagtagtaatgatctctcctttatttctgatattagcaattwgtgtcatctttcttttttcttggtttgcttagctggaagtttatcagttttattgatcttttcaaagaaccatcttttggttttattggttcctcctatt

SEQ ID NO: 23786 - DNA, 201 bp, Homo sapiens
agcttctctcattaagcatttgggtgggcaacagacttcatgggaggctttggcagtggaggtgagaggggctgagatctgttgtaaacaatttatagcamcttttgtgttaaagcaaacatgactgcctgatagaatagaaagcagaatttacatatgataaagaaattctagctgtgtggtagactgggccacttcagg

SEQ ID NO: 23787 - DNA, 201 bp, Homo sapiens
ctgagttaggaactagagagaaatgtaatacaattttatagaaggtagtcaagaaagtcctctccaagggagtgacaattaggtgggacctgaagcgagtraaggaacacaggaatgtcactgtttggaaaaaagaatattcctggtggagggaataccaagtgcaaagctcctgaggtcattaagtggcaggcatactgg

SEQ ID NO: 23788 - DNA, 201 bp, Homo sapiens
gtatagaaatgttaaaaaatcaatagaaaagcgcaatttcatagcagtttcacctcctagatagtcaccattgttgacagttcggtgcatgttcttctttkttttttttttttttttttttttgagagggagtcttgctatgttgcccaggctggagtgcagtggcgtgatctcggctcactgcaacctccgcctcctggg

SEQ ID NO: 23789 - DNA, 201 bp, Homo sapiens
taacaagggcagggaataatggatgctggtgaggatatggagaaaatggaaccctcatatactgttggtgggaatgtaaatggtaaaactaatatagaaaactgtttggagattcctcaaaaaattaaatattgaattattatataacctagcacttatattactgactatatatccaaaatagtggaaataaatatattg

SEQ ID NO: 23790 - DNA, 201 bp, Homo sapiens
gctaaattctaccaaacatttaaagaactgataccaattcaactctaactcttcaaaaaaaaaaaaaactgaagaggaagaaatactttcaaacttattcyacaaagctaacatcaccctaataccaaaaccagacaagcacacaacagaaagtagactacaggccaatatcactgataaacacagatacaaaagtcctca

SEQ ID NO: 23791 - DNA, 201 bp, Homo sapiens
attataagtataggccaacaaattgggaaaactagaagaaacagataaatgcctggacacatacaacctgacaagattaagccacgaagaaatagaaaacytcagcaaaccaataaggagcaacaagattgaagccgtaataaaaagtctctcattaaagaaaagcccaggacctgatggcttcactgctaaattctacca

SEQ ID NO: 23792 - DNA, 201 bp, Homo sapiens
aaagagaaaagaagcaaataacatataaaggaactccagttggtctggcaacagacttctcaacagaaaacatacattttcaaagtgctgccaggggaatmaaaaaaaaaacccaacccccaccccacccctgctgccatccaagagtattgtttcaacaacgctatccttcacatatgaaagagagataatctttgccag

SEQ ID NO: 23793 - DNA, 201 bp, Homo sapiens
tgttcacttcattcatatttgtcatttctgtgttcaataatagcccatgttcatgagcagtttctaagcattagcatttcttagcccatatgtatcccgtrtttctactaaagatggaaatgttagtgttaaaaccttgagaaatatgtcagcaaagcttcccaggacattgtataaaatatctttgttttgagacttaat

SEQ ID NO: 23794 - DNA, 201 bp, Homo sapiens
atggtgtatagggggtgggggttgaagagaggttggttaatgggcacaagcatacagttagatagaaggagtaagttctaatgttcaatagcaaagtagartgagtatagttaataatgcattacatttttcaaaatagctagaagagaggacttgaaatgttccaacacatagaaattataaatgtttgaggtggtggtt

SEQ ID NO: 23795 - DNA, 201 bp, Homo sapiens
cctaaatgtttacctgtcaacagataaatgggtaaagaaaacatggtgtgtatacacacacacacacacacacacacacacacacacacacacacacacactggagtactatttagccatacaaaagaataaaatcctgtcatttacaacaacatggttggttctggagatcattatgttaagtgcaataactcaggcaca

SEQ ID NO: 23796 - DNA, 201 bp, Homo sapiens
acctaaatgtttacctgtcaacagataaatgggtaaagaaaacatggtgtgtatacacacacacacacacacacacacacacacacacacacacacacacactggagtactatttagccatacaaaagaataaaatcctgtcatttacaacaacatggttggttctggagatcattatgttaagtgcaataactcaggcac

SEQ ID NO: 23797 - DNA, 201 bp, Homo sapiens
gcctggtgatgtctgtttttgctttcctcatggttcttggcctcattgcagagaggcaaggctgctgaacaagtggatgctaggccgatgagtttgtatcwtgcaggttgtcattaaatcctttaatgagacttatgaaatgattttatgaaacaacttgacgtatttaacatgcttatagtgcctagcacatgtacttaa

SEQ ID NO: 23798 - DNA, 201 bp, Homo sapiens
agcttcttgttagaattcttgacatttactcacctgcataaaatagggctgaaaggggctttgcaaatgatgtagttcagacttctcattttgcaggtgttatcacagaggtaagttgatgttttcaagattgatcatttgtagacaggataatggcctccctaagatgtccatatcttaaccttgaaactgatgaatatg

SEQ ID NO: 23799 - DNA, 201 bp, Homo sapiens
gcacgaggatctcttgaggccaggaactggaggctgtagtgggctatgattgcatcactgccctccaccctgggtgatagagcaagactttgtctcaaaawaaaaaaaagtgtgtaattatgtcttattcactaaatagtgcatgatcttatgtgcatgagaaactcatagtttctagaacctgttttctggttctcagac

SEQ ID NO: 23800 - DNA, 201 bp, Homo sapiens
aaattaaacttaatttttataagccagctgcggtggctcacacttgtaatcccagtactttgggatcctcccaaggtaggaggattgcttgaagccaggakttcaaggccagcctggtaacatagttgtcaccctgtgattgcctggggccagcattgcagatggtaaagaatttaccaagacaatcgtaggtaaagaaag

SEQ ID NO: 23801 - DNA, 201 bp, Homo sapiens
tctgtcaatgtctattaggtccaatttgtcaagtgttaagtttaagtccataatttctttgttaggtttctgcctcgatgatctgtctaatgctgtcagtkgagtgttgacatctttcactattattttgtgcctgtcttttcgtgggtctctaaaaacttgttttatgaatctggatgctccagtgttaggtgtatatat

SEQ ID NO: 23802 - DNA, 201 bp, Homo sapiens
tctgcatctatattcatcagggatatcagcttgaagttttgtttcgttttgtttttttttgcccattgtttctctgccaggttttggtattaggatgatgytggctttgtagagtcagttagggaggagtccttcctctttgattttttgggaacagcttcagcaggactggtaccagtttttctttgtacatcaggaaga

SEQ ID NO: 23803 - DNA, 201 bp, Homo sapiens
aaactaactttttgatgtgcttctagagttggtttgctagtattttgttaaggatttctgcatctatattcatcagggatatcagcttgaagttttgtttygttttgtttttttttgcccattgtttctctgccaggttttggtattaggatgatgctggctttgtagagtcagttagggaggagtccttcctctttgatt

SEQ ID NO: 23804 - DNA, 201 bp, Homo sapiens
cagatagttgtaggtgtgcagctttatttattggttctgtattctgtttcattggtctatgtgtcactttttgtatcagtaccatgctgttttggttactrtagccttgtagtgtagtttcaagttgggtaatgtgatgcctttggctttgttccttttgcttaagattgctttggctatttgggctcttttttggttcca

SEQ ID NO: 23805 - DNA, 201 bp, Homo sapiens
attgcttttgagaacttgaccatgaattatttgccaggtcccatgttgagaagagtatttcctaggttttcttctaggatttttacagtttgaggtcttasatttaagtcttcaatccatctcgagttgatttttgtatatggtgataggtaggagtccagttccattctcctgtgtatggctagccagtaatgccagtac

SEQ ID NO: 23806 - DNA, 201 bp, Homo sapiens
gaccattttggcagcagacaacttacatatttagtgagggttaagtgcgcagcctgattgttgctcgttcactcatgggtttgtttttttgtttttgtttyttctcctcttcctaggcccttcccaacagaagaaagcattaatgatgaagacatctacaaaggccttcctgatttaatagagtatgttgaaaatttcaag

SEQ ID NO: 23807 - DNA, 201 bp, Homo sapiens
aattagccttcatagtgttttttgaagggaaatgaaaggtcctcttgcctagaatttcttctgaccgaccttggcccagtttttgaaattctaacaattcwcatttacccccttgaatgaagaaagactctttgagatgcatatgccatcactactgcgaatatctaagatttctcgactgtgtaataagtgcctggcaca

SEQ ID NO: 23808 - DNA, 201 bp, Homo sapiens
ctcggtaatgtggaggtttaaatacgcctgctcatacttcagcagatggctagtgaattgaaccaccttcctcatatatatatatataaatatatatatayacacacacacacacgcacacatacatttttaatctcaacagtgtaattctaagacaaaagtctatagatgattagtgaacatttagagttgtgatagaaa

SEQ ID NO: 23809 - DNA, 201 bp, Homo sapiens
cagccttgcatcccagggatgaaactgacttgatcgtgatggacaagctttttcatgtgctgctggattcagtttgccactatttttttttttttttttttgagacggagtcttgctctgttgcccaggttggagtgcagtggcatgatcttggctcactgcaagctccgcctccagggttcacgccattctcctgcctaa

SEQ ID NO: 23810 - DNA, 201 bp, Homo sapiens
catctgcaaacagagacaatttgacttcctctcttcctatttgaatgccctttatttctttatctttcctgattgccctgtccaggacttccaatattgckttgaataggagtggtgagagagggcatccttgtcttgtgctgattttcaaagggaatgcttccaggttttgcccattcagtatgatattggctgtgggtt

SEQ ID NO: 23811 - DNA, 201 bp, Homo sapiens
tgctcagaaaaatcacagctgtcatgaaatggagtctttcaatagcctgtttgatccggaaacatgcgaaagtatttcatgcatgacaaaggattagtaartattaaatagtattcttgttttgttattgcctagtgaggatcaagctctctcatttttctctggttatgtttaatatgtatttgatacttcttggcattc

SEQ ID NO: 23812 - DNA, 201 bp, Homo sapiens
tacagattaaaagcaatctcactgtattgtacttgaaattgagaattatgtttccattttattgtatctagtaaaacctgaaactcttgaaaaactttttwaaaaaaatcagcaaactcgtaaaatagcatcagttactgtattttctcaaatataaacaaggcgctatactgaatcgatcacaaatttttctaagtgggt

SEQ ID NO: 23813 - DNA, 201 bp, Homo sapiens
gtgagaaggggatgctagtactcacacatttacttatttatttattattttttgagacagggtttcaccctccatgcctaggctggagtgcagtggtgcartcttggctcactgcaacctccttctctctgactgaagcaatccttccacctcagcctcccgagtagctgggactacaggtgcatgccaccacagccagct

SEQ ID NO: 23814 - DNA, 201 bp, Homo sapiens
ctagggtacatgtgcacaacgtgcaggtttgttacgtatgtatacatgtgccatgttggtttgctgcacccattaattcatgatttacattaggtttttcwcctaatgctatccctcccccattccctcaccccagatgggccccagtgtgtgatgttccccacccttcgtccaagtgttctcattgttcaattcccacct

SEQ ID NO: 23815 - DNA, 201 bp, Homo sapiens
gacagtcctagtggctgggagaaccctttcctgtccactcttgcctatctaactagctgtaacaggtttaaaacttgatagtggatccctgttgtttataagagaataacatctaaactcttttacaagccgcacaagattcttcatgatcaggcctctgcctacctttctaaccttatttctcactttcctactcccata

SEQ ID NO: 23816 - DNA, 201 bp, Homo sapiens
tggtggagtgcccctggaaactcatactctgccattttgtctcttactgtgtactcccaggaaattgcttatctctggtgcctgcattcagttaacacttyagtgcaacaggtgtggaccatcaggaagtggcttttcccttgcatcagctgccaagttatcacttttagagaggcagtgtgataattgccaaaccttcac

SEQ ID NO: 23817 - DNA, 201 bp, Homo sapiens
tggagacatttctattttggtaatgtttcttgttttgttcaccctgccaggagctaaatggttacaaatgccctatttttttttttttttttttttttttkgagatggagtctcgctcttttgcccaggctggagtacagtgacacaatctcggctcaatgcagcctccaccttccaggttcaagtgattctcctgcctca

SEQ ID NO: 23818 - DNA, 201 bp, Homo sapiens
gaaaaggaggtgagggataaaagactgcaaattgggtttagtgtatactgctcgggtgatgggtgcaccaaaatctcagatcaccactaaataacttactyatgtaaccaaataccacctgttcccacagaacctatgtaaataaaaaattgaaaaacaaaacaatacatggtttctgagttagatcttggtttggattcc

SEQ ID NO: 23819 - DNA, 201 bp, Homo sapiens
taagaatgatacagtggacttgggactcaggggaaagtgtgaaaaggaggtgagggataaaagactgcaaattgggtttagtgtatactgctcgggtgatkggtgcaccaaaatctcagatcaccactaaataacttactcatgtaaccaaataccacctgttcccacagaacctatgtaaataaaaaattgaaaaacaaa

SEQ ID NO: 23820 - DNA, 201 bp, Homo sapiens
tgaggatgcaaatgaataagaatgatacagtggacttgggactcaggggaaagtgtgaaaaggaggtgagggataaaagactgcaaattgggtttagtgtrtactgctcgggtgatgggtgcaccaaaatctcagatcaccactaaataacttactcatgtaaccaaataccacctgttcccacagaacctatgtaaataa

SEQ ID NO: 23821 - DNA, 201 bp, Homo sapiens
tcttagaattgagctctttcctcagtagtaattcacttcaaactccaccaacatcaacaaaaattagaacagtttgaaacgctttctacacttttttttttaatcacacaggaaagaggagtgagtttagtaacttgaactcatttaagagtcagcagaggccttcaggttagatatgactctcactcttcagggttgtta

SEQ ID NO: 23822 - DNA, 201 bp, Homo sapiens
tgatggttagtaggtttttttccatttttttaaactttattttggtataacttacatataataaaatgcatctatttaaagttttcacatgtatatttttwaaaaaatatgtgccactgcagttagggtatgtgtgtattttgcttaggtggatctgagtcttttagacactgaaagcaaattttaacttttgttttttta

SEQ ID NO: 23823 - DNA, 201 bp, Homo sapiens
ttttgccatgttggccaggctggtctcgagctcctgacctcaggtgatctgcccacctcggcctcctgaagtgttgggattacagacatgagccaccgcayctggcctccagttttctaattaagaccttttaacctcatcacttctaggacaaagccaagatctctttggcatgccatggacatcccagctcccctcttc

SEQ ID NO: 23824 - DNA, 201 bp, Homo sapiens
cagattgaggctgcagtgaactgagattgcaccactgcactccagcctgggtgacagagcaagaaagaccctgtctcaaaataataataataataataatrataataataataataataataataaataatttatttttaattttgggggtacatagtaggtgtatatatttatggggtacatgagctattttggtacagg

SEQ ID NO: 23825 - DNA, 201 bp, Homo sapiens
tcagattgaggctgcagtgaactgagattgcaccactgcactccagcctgggtgacagagcaagaaagaccctgtctcaaaataataataataataataatgataataataataataataataataaataatttatttttaattttgggggtacatagtaggtgtatatatttatggggtacatgagctattttggtacag

SEQ ID NO: 23826 - DNA, 201 bp, Homo sapiens
agactaaggataaagtgagggaaaaaggaaggaaggtcagggagagagttagtagttttcagattgatggttgggggaaaaatattgaagtatcaaaggayaaagcaataccagtactattcctaaagttaatattcacctacatttcaaatattttacattgaaaaattgtagatgacaaaagcttataggataatgcct

SEQ ID NO: 23827 - DNA, 201 bp, Homo sapiens
atcagattgaggctgcagtgaactgagattgcaccactgcactccagcctgggtgacagagcaagaaagaccctgtctcaaaataataataataataataatgataataataataataataataataaataatttatttttaattttgggggtacatagtaggtgtatatatttatggggtacatgagctattttggtaca

SEQ ID NO: 23828 - DNA, 201 bp, Homo sapiens
gatcagattgaggctgcagtgaactgagattgcaccactgcactccagcctgggtgacagagcaagaaagaccctgtctcaaaataataataataataatratgataataataataataataataataaataatttatttttaattttgggggtacatagtaggtgtatatatttatggggtacatgagctattttggtac

SEQ ID NO: 23829 - DNA, 201 bp, Homo sapiens
atgagagagttgtccttgttgaaaggagatgtggtgaagatttacacaaagatgagtgcaaatggctggtggagaggagaagtaaatggcagggtaagttrgccctctcgatgtgctggtgcatgtgaaagaaggggactgagcagttgtttgcacccattgtggcaccagggagaagcctctatactgtattacagcttt

SEQ ID NO: 23830 - DNA, 201 bp, Homo sapiens
aagtaaatggcagggtaagttggccctctcgatgtgctggtgcatgtgaaagaaggggactgagcagttgtttgcacccattgtggcaccagggagaagcytctatactgtattacagctttcagcccacaggcctctgccctctggaaactggtgctgtgttttgctgataccagggactcgctgaaaatatttgaaatg

SEQ ID NO: 23831 - DNA, 201 bp, Homo sapiens
gaactttaatcataatatgtgttctgtgaatcccagagaatattttgctacaatctttgcatggaatcctgtgttttgctctccctatggtagctgtgtgkaacttcagttgacctctgtggtagtgtcatgctagatcagaagtaatacgtccaaagtgatatgaaccactgtggtgtctaagacaatatatacccagag

SEQ ID NO: 23832 - DNA, 201 bp, Homo sapiens
aaattggtcatccttattgtatttatgtgctcaggagttcatgtgtttgagaacaaaagtatccttatcaaaaatatgttggattcttttttccaaaggarcttgtggagtactacaagcatcattctctcaaggaagggttcagaaccttagatacaactctgcagtttccatacaaggagccagaacattcagctggac

SEQ ID NO: 23833 - DNA, 201 bp, Homo sapiens
cacggagagcgcgcgggactcgctgcagcggcggccgggtcgcggcgcacccgggccgggaccggagccgagcctagcgcggcgcccgcgacccgtcagcygcggctcctgctccctcgatcccgcgcggggaaagggccggcggctgttggcgtcggcggggcgcggaggaaccgcggcggcggcggcggcggccgcatc

SEQ ID NO: 23834 - DNA, 201 bp, Homo sapiens
atttggaggtttttgggcattgttatatgccctgaaaatagcctgctacatggcaagtgacacacacacacacacacacacacacacacacacacacacamtctacacaggagaacttggaacaaaagtcctggatgcaaatcctggctctgccatcaagaattgtgggccataaggagataatttactgtagtcattaag

SEQ ID NO: 23835 - DNA, 201 bp, Homo sapiens
acagaaatgtaatggcgtgaagaatgaggaatactccaggtagaggaaaaagatgaatgactatgcaatttattgtccaaatcagatttttttttttttttaaagaaagggacactagcaataattgtggtaggacatcagggcttgaaccaggaccatctgtggaaaccaggccagtggtctttgtacagaaattctgtt

SEQ ID NO: 23836 - DNA, 201 bp, Homo sapiens
tcgtgacagaataactggctgtaggaacatctcactgaggattattatttttgtaagttgacactggagctttagcaacttgaccaagttttttactctawtttttaattctttcattctctgattttagttgacctcttttagctgtttccagaatcatctagaagatcttttgtattagtcatgagctggaggccaggt

SEQ ID NO: 23837 - DNA, 201 bp, Homo sapiens
gttcgtgacagaataactggctgtaggaacatctcactgaggattattatttttgtaagttgacactggagctttagcaacttgaccaagttttttactckattttttaattctttcattctctgattttagttgacctcttttagctgtttccagaatcatctagaagatcttttgtattagtcatgagctggaggccag

SEQ ID NO: 23838 - DNA, 201 bp, Homo sapiens
catccatgtaagacatgacttgctcttcctcaccttccgccatgattatgaggcctccccagccacttggaactgtaagtccattaaactcttcttcctgyataaattacccagtctcaggtatttctttatcagcagcatgaaaatgggctaatacaaacacacaggcttgtaaaagtagattacttttaagtaaacact

SEQ ID NO: 23839 - DNA, 201 bp, Homo sapiens
cttgaattcccacatgttgtgggagtgacctggtgggaggtaattgaatcatgagggcaggtctttcctgtgctgttctcatgtgagtgaataagtctcaygagatctgatggttttataaaggagagtttccctccggaagctttttttgcctgctgccatccatgtaagacatgacttgctcttcctcaccttccgcca

SEQ ID NO: 23840 - DNA, 201 bp, Homo sapiens
aaaacagtttaagtctgaaaagtggtataaatggaacggaacatgacattcctgtagccatttttttaatacagattatatccctgattaataacaaaattgccagtctttttaaatataaaattacaacaaccatatagaatcacacacctccaacctctgctgatcttgatcttagtacatgaggcttgggttgcgatt

SEQ ID NO: 23841 - DNA, 201 bp, Homo sapiens
aaaataacttgtggacactattttcttgtataattgaaaattatgcaccactaccaccactaccacaaatagttttgtataagatatgtctgttaagttcmgagaccacaaagtccctattgtgatgcaataacctcggttaactgagcatatcttctccatgtcctggtgaggatagctatttcagaagatcatttatag

SEQ ID NO: 23842 - DNA, 201 bp, Homo sapiens
tttcgctttctttgcttggtgttttgctggcctttgttggaagtcttatggagcagtttaagtgagcagaagatgagctaaaggaatggaaggaggagacrtaaggaacttgcagaattaaataccctgccgagatacttgtccattcagcagcttcagttgcttagcactggacctgatcctgtggaggatgcagaagca

SEQ ID NO: 23843 - DNA, 201 bp, Homo sapiens
tagaaaatgatagtcataggtgtgttttctgtatgtgctacaaatttcacaaagctttcattcttcataggaaactaacgtaaacacgcacacacacacamaaacaaacaaacaaaaaacacttggtatttactttcttttaaacttccaagtcatgtagtccctgcctggctgttctgtgtcattactacatcatggcac

SEQ ID NO: 23844 - DNA, 201 bp, Homo sapiens
gaaatgcctaatgaggcaagtgcagtcctgtttgctttagaaaaaatttgctcaatgaccttctttctctcagaatctgaaaaatatccacttttaatcarataagaaatatatcattcagaaaatggcaaccacaaaaagcttctcagagaataaggtgcaagtgaatctacttagaatacacaagtattctcactggag

SEQ ID NO: 23845 - DNA, 201 bp, Homo sapiens
gggagatgtgttgctgtttaaaacagaactttgagacctccccacccccgttcagtgataagagaatgaacaatgcattttaatggaaaaattgaagtaamgcaagatagttcaaattaactggagaaccatgattgttggttccagaaaaattcactgttgtattctcagtgtttgaaaatgactgtcacatgataggca

SEQ ID NO: 23846 - DNA, 201 bp, Homo sapiens
aggcgtgagccaccatgcccagccaagaagcattgtttaatcagtgatgctctttgtgctcttgatgcattttcttcccagcagcaataccatttgtgccygttatttactctgaaatttcctccctggagggcatactaaggaaaaccagaaggggtagaggaagcctgtggtggtatcaagagttggccagagggggag

SEQ ID NO: 23847 - DNA, 201 bp, Homo sapiens
gcgtgatctttcatagcacagtatcatatttttgttgtaaatttgaaattttactctgtaagttttctgacaaccaagacaagtgggaaaaaaaaagactygatgagttgtggcattcttattgtgtggcaaaatattacaacagccctttggaggagagagtttttcctgtatggtaagaaggctatatagtgtggatcc

SEQ ID NO: 23848 - DNA, 201 bp, Homo sapiens
tttaacctctcattctggctcttctgaggcaagagtggtaactaagagaagaattagaagaaaattgtgttaatcgagatgacaaaaatggtggtataggyggtcagattctgagtaaattttaaacatagaaccaaccggattggatgatgaattaagtaaaggatgtgaaaaaaagagaggagtcaaggatgactgtag

SEQ ID NO: 23849 - DNA, 201 bp, Homo sapiens
aaagtcaaaatgtccctctggccaaatcaaaaggattcatatattctttatatagggctcttcacatcagctcacatttctgtttctaaactattaaagcyctaacgacttatgcaaatgtttataactggatataaatgtttgagtctgggctgcccctgtagggggttttccctcttgattcaggttgttatcaagtat

SEQ ID NO: 23850 - DNA, 201 bp, Homo sapiens
gtgtgaggaaaggaaatcctcaggctgatttattgttcagcgctgagtgtaaacagtgtgctatccttgtcacagccaaacgaaaaaggacgcaatcactrtcctgaacagatcattcttttaaaaataatattttggcctgcttataaagcatggttcgtaataaaaaatttgggctacagaaatataatacaattaaat

SEQ ID NO: 23851 - DNA, 201 bp, Homo sapiens
ctccgaaagtgagacccatctaggagccatattccacattggtgcaagtttaagtcttctaaaacatacaacacctttaaagaaatgccatcaccaatgayagaattcagctatcactgtcaaattgtttcctaactactttttatatttaagtcccactgtctttcttcatgagtctctattatgcttgtacagagaggc

SEQ ID NO: 23852 - DNA, 201 bp, Homo sapiens
aaaaattggaacactagagaaaaatactatcagtgctgtggggtcataattatcatttttattaaaaattcctactttaccagagcattttttccaaaccraggacctctgggtatgatctaatttgcatggctttaatatattaacagttcacttcaggggaactacctaattagcttgcctgtggccatttctgaccat

SEQ ID NO: 23853 - DNA, 201 bp, Homo sapiens
gctttatgagggagggatgtagtcagtcttatttatggtagcattcacagtgcaaagccaatatcaatgcatgaatgatctgtaaatatttgctgaataartgaatgaacccatagaacaaagaaggaaaattaggttcttgcaaagtgcccttaatcatttttacttttacgctgttatcttctcctttagatatccttt

SEQ ID NO: 23854 - DNA, 201 bp, Homo sapiens
acacacatcatccctaattaagaatttgtggatcaaatgttttttggccaaccatgactgagtggagtactgtgggggcattgcaaaagtgcttatataayataagcaaagaacattggtggtagccgagacattggaaatccttaggtcgtgctctgtgtttcacaggtgaggataatgaagccaagaagggttgaatga

SEQ ID NO: 23855 - DNA, 201 bp, Homo sapiens
ttgaagtacttacattccttggaattcaagatatccaaggattaatgagtgctataagtcaaattgtaattaaagattcaaatccaaaggtgctggcagcrttgcctgcttttagcagatctgaatattgaaagctgggttcaaatgtaggttgtcatttacctgccatcctcctagaagtcactttacttctctgaccct

SEQ ID NO: 23856 - DNA, 201 bp, Homo sapiens
tattagacgactgagatcatagcacattcctctcagacattttaaaaggaccctctgtgccattctctgtgctaggcatgagcagctataaagtgacagaycttggcatgagttgagcacctacactgtgcctgtcctgcctgggtgctctactgggcatcttcttgcatgagctcattccgtcttcagaatggccctgca

SEQ ID NO: 23857 - DNA, 201 bp, Homo sapiens
accatagacaggagatgacctgctaagtgcttgagctaagcattctgtcagtgggggaggctgtagtggataattgtaatgccagtggtaggaggagcagrcttgaaactgaggcagtctggttaaaaaatgatgcagacctttactagagcaactgtaaaagaggcccagagtttgagagatttgggatgtttaagaatt

SEQ ID NO: 23858 - DNA, 201 bp, Homo sapiens
taagacattaataaaaataaatattcagagagtcttacatacttaagataccagttgatatacataatgttaatttaataatttggaataaaaactaacamccattcaatagaagaaagttggttaaatgagttttcagaacttcataaaatggagaactctgcagccatttaaatattttagaagaaaaatggaatgaaa

SEQ ID NO: 23859 - DNA, 201 bp, Homo sapiens
aggctggactgcaatggcgcggtctccgcacactgcaacctctgcctcccgggttcaagcgattctcctgcctcaacctcccaagtagctgggattacagrcatacaccaccacatctggctaatttttgtatttttagtagagacggggtttcaccatgttggccaggctggtcttgaactcctgacctcaggtgatcca

SEQ ID NO: 23860 - DNA, 201 bp, Homo sapiens
tttacatttgtcttcaatccatctcgagctgatttttgtatatcatataaggaaggggttcaccttcagtcctgcatatggctagccagttatcccagcaycatttatcaaatgtttagctgccacttacaagtgagaacgtgttatttgcttttcctttcctgtgttaattcacgtatgataatggcctgcagctccatc

SEQ ID NO: 23861 - DNA, 201 bp, Homo sapiens
ctttaaattttactgcttaatgaaattatagattttttttttaattatagggcaagttaagtgaagataaatagaggggaatttgaagaggaggggatagwttgagggagtttagaaaatggtattgcttttgattctgggatatattgtttatcggggtccatgagtagtgctgaatgttctattctgggcttaaaattt

SEQ ID NO: 23862 - DNA, 201 bp, Homo sapiens
attctgggcttaaaatttattttcctgcatttgctacatccatctcctcaaaaattctgatataggcaggtagaaaccaagaactgaggaaaacacaggcrgttcataaatgggtcaacttcatttctagcaatatggcaactagagacaaagcctggaactgcagcacaatgcaaacttgggtatatccccgattccagg

SEQ ID NO: 23863 - DNA, 201 bp, Homo sapiens
cccattaatagcatggaatgcatatatcagatatttggacatgagacaaactatctgtactcctattcgtaggaatttttaaagtaaccctctctatagamtgtactttatttcttatttttaacattaatatacctgctttgtctttgttcattttctatttgaccattagcagctacaagttttctttctttgtttgaa

SEQ ID NO: 23864 - DNA, 201 bp, Homo sapiens
aaagcagagagaaaaatatgctttcattgtctaaaaactaaaaattagctcaaaaaggacagtagtagtttttttttttattttttatagttttagagatkgggtcttgctctgtcacccaggatggagtgcagcgatgccatcataacccattgcagccttgaactcctgggctgaagtgatcctccaaagtgctgggat

SEQ ID NO: 23865 - DNA, 201 bp, Homo sapiens
attggtattaaaatacatgcatagaaatgagatatcagaatacatatataaatataatatcctgggaatatatagtactagttgggtttgcatgttaccaygtgagttatctgatattttttacatgttctgattattttctgttctataacaaaagcatggaaaatgctgagttacttttcaaagtgtaggaatccactg

SEQ ID NO: 23866 - DNA, 201 bp, Homo sapiens
tatagtattttttttaatggtctgggtgcacatctactttctgcaatctttcataagctccttaataactggagcttcatcttttcatatttatacccatrgtatctggaacatagcaggtgatcaggaaatatatattgaactgaattggaagcgcaactttataaaagggaacactggtttgtggtgtgaaaattcttt

SEQ ID NO: 23867 - DNA, 201 bp, Homo sapiens
ctaatggctttcatgatcttttgcttatctttaccaataaacatagtcaactgtgatagttgagaggttttttttttggtgaaattattagtgtttgttaytgcaataaagaagcaaagaaaaactcccaatattgaaaacatatattgtggggtttattcaaatccaagaaagagtgaactgtaggtttgtgttgtagct

SEQ ID NO: 23868 - DNA, 201 bp, Homo sapiens
agcaatggcaacaaaagccaaaattgacaaatgggatctaattaaactaaagagcttctgcacagcaaaagaaaccaccatcagagtgaacagacaacctmcagaatgggagaaaatttttgcaacctactcatctgacaaaggtgtgatatccagaatctacaatgaactcaaacaaatttacaagataaaaacaaacaa

SEQ ID NO: 23869 - DNA, 201 bp, Homo sapiens
tttgattttcccaaaggaaaaggtggacattgaattattttggataatgtgaaaaagagtgaaacagagaatagctcatttcggagctgagttcagaaaayaggcaattgtagaaaaggtgaatcctattagacgactgagatcatagcacattcctctcagacattttaaaaggaccctctgtgccattctctgtgctag

SEQ ID NO: 23870 - DNA, 201 bp, Homo sapiens
tggctactgctgtgttctttcaaggccctggtgtcctaccatcagcaggtggtgaagccaggcttgtatccttcccttcagggcagcaagttcccccaggycccaggtgggtccagaggtatcatctgggagccagggactggagtccaaaatcttagaagtctacctgtgttctattgtactgtggctgagctggcatac

SEQ ID NO: 23871 - DNA, 201 bp, Homo sapiens
attagagcagaactaaaggaaatagagacacacaaaacccttcaaaaaatcagtgagtccaggagctggttttctgaaaagatcaacaaaatagatagacygctagcaagactaataaagaagaaaagagaggagaatcaaatagatgcaataaaaatgataaaggggatatcaccatcgatcccacagaaatacaaacta

SEQ ID NO: 23872 - DNA, 201 bp, Homo sapiens
tatccatgagcatggaatgttcttccatttgtttgtgtcctctttgattttgttgagcagtggtttgtagttctccttgaagacatccttcacatcccttktaagttggattcctaggtattttattctctttgtagcaattgtgaatgggcgttcactcatgatttggctctctgtttgtctgtaattggtgtataggaa

SEQ ID NO: 23873 - DNA, 201 bp, Homo sapiens
gtctgggacatgtagtgataattctttgctgttatatcgtgctttacaagtagtttccaaagcatttttggataatgcccaatctgattcttaaagagtcyggtgaggtagctaagaaggtattattccttttaaaaaatgagaaaatagtagagagattaagtattttttcatttccttagcaaatgacagaagctgagc

SEQ ID NO: 23874 - DNA, 201 bp, Homo sapiens
aattaccagaggaaattttattcattctgcaaatatttatcgtgcacttgccttgttgccagacactgttggaagccctgggcaaataacaatgagggagmcattgcaattgaatttaagtattattatttctaaatataataatattctgttaatatataatggattaagtttcaggactgaactcttgatatttctatt

SEQ ID NO: 23875 - DNA, 201 bp, Homo sapiens
tagaataatataggtaaatcctgaagtttgattttgcctatggttcaaattttgctgcttatccattattaaatctgtagtactcctttttgataagtcayggagaataaaagaaaataactcctgcagcatccatgacaatgcatgaagaacagcaagccttgtgtatctccacaggatggcttcttcccagtgtcttta

SEQ ID NO: 23876 - DNA, 201 bp, Homo sapiens
tcaaggtgcatctaaaataaatcccttttcctaatctcctattatttttcctctttagaattccatagcatatttcttggacagctgtgtagcctttaaamaattgtggtaaaatatatatagcattggccgggtgtggtggctcacacatgtaatcccagcactttgggaggccgaggcgggcagatcacctgaggtcag

SEQ ID NO: 23877 - DNA, 201 bp, Homo sapiens
ctggcatgatttcatagctcacaactcccacaaagggaaactattgcttagacagtttgcacgttaacaggccaccaagtaactgtactagatacgtgatstttttgctttatatcttaatattccttcattatgttgactttaagactggaggtagtttgagtcacccctaaataacatccttgtaacattgttagtgca

SEQ ID NO: 23878 - DNA, 201 bp, Homo sapiens
taggaatgagatttgggactgcaaactggggaactatcctaaaatctgtatgcagaacaagagatagatgtcagggtccctgccttttcccatggtagtcyggacaaattgccctttcctgcagtggcaggagacactggagttagaaggtatattatgtggaaaaggtgaaccatgtagggcctagatttggaaagatca

SEQ ID NO: 23879 - DNA, 201 bp, Homo sapiens
tcaaagaaatgatacagaaatttctcagaaccgaaggacatgtggctccaaattgaagatacttctgaaaggcaaggacaatataaaaaacacattatcaygaaattttgcagtatatagagaatacagaaagaatttgaaggtttctagggagaaaaaaatcaggcaacatacaaagaattagaaatggtattgaatgga

SEQ ID NO: 23880 - DNA, 201 bp, Homo sapiens
atttatttatgttttatatatatcttatacacaaagcctgaaggtaattttatgtaatattttaaattttgtgcatgaagcaaagtttcgactgcattttkactataatctgcattttagtggaaacatgctgactctcagaaagtttcagattttggaggtttctgaatttcagattttaagattagagatgctcaacgt

SEQ ID NO: 23881 - DNA, 201 bp, Homo sapiens
aataccacagagattggttaacttataaagaagatatatttatttgtctcatggttctaaaagttgggcagtccaaaatcgaggggctgcatctggtgagrgccttctcattgcataataacatggcaggagatatcacaaagcgaggaagcagtgggagagacagagagagagtagtggatgaactcattctttttatca

SEQ ID NO: 23882 - DNA, 201 bp, Homo sapiens
gctcactgaaaagttatttaaagataatcatattctaattttgcaacaaaatcctgaaaattctaatttataaatctctaagttttatattgctcgaatcrtaatcttcattgtaaattgtttgcaggtttagatagagttttggtttgtgtttaaatgatacagcagattttaaatatacctttctttcctctttttttc

SEQ ID NO: 23883 - DNA, 201 bp, Homo sapiens
taacaaacattagcaaaggatgtaattatgaaaagaaaaacaaggagctggaaaaaaaatctcaatatcagaaaagtgcttttatcaagtttagtaaatarctataaaaattgctgaagaggcagctgaactaatctgaagctacccctccattttgtttctgttcatttgttgagcaaatttatattgagtccttacaat

SEQ ID NO: 23884 - DNA, 201 bp, Homo sapiens
taagatgttaatgttggaaaaaatatttgaaggtctttacttactttgccaaatacctttttattgtttttgcagttatttctatagtatttgttaagtgygctgtacattaaggaaataatcatacaccatttatggtgtttccaactttatgaacattttagtaagagatattttagagtgtctacattcagaggctta

SEQ ID NO: 23885 - DNA, 201 bp, Homo sapiens
gtttcaagcgaatacaatgtggaaatagattagaattaactgagatcatggtaattttttgacattttattttacataaatttgtacccaaatgctacagrctcaacttactagtaaagttttcttaagtaattaacactattatgtaatgggccttcccactctagtaaacagtactagtggctttattacctgttgaaa

SEQ ID NO: 23886 - DNA, 201 bp, Homo sapiens
ctgattaaatttaatgtatttaggtcaaaaggaaaaaatgtatcataatcagacatagtcctcagcaaaggctgaaaagggcaaaagcaagatgaagggaraaaatgatgaatcaagctaatttccataatcctgttttattagtactggcccatgggtggtacagcacacacaaaccacaaatagtgtcaaattcctcag

SEQ ID NO: 23887 - DNA, 201 bp, Homo sapiens
atgcctgtgccatgctgactgtactatccaaggacaaagaaatgggtgctgatacagtaatgctcttttctttctggaaatgtgatcttccttgttgaacrtgttaaatattttattcattctgtgttcttcttttcattgggagttagtgttgatttctcagactcttaggttgtgtctaattatagtgctgattccacc

SEQ ID NO: 23888 - DNA, 201 bp, Homo sapiens
ttttttgcccattgtttctctgccaggttttggtattaggatgatgctggctttgtagagtcagttagggaggagtccttcctctttgattttttgggaayagcttcagcaggactggtaccagtttttctttgtacatcaggaagaatttggctgtgaatccacctgtttttttttgttggtaggtttcttattactgat

SEQ ID NO: 23889 - DNA, 201 bp, Homo sapiens
tgtcctctctgcatgtcctttagggtcatcatttactgtgatattagcatcagtatgaaaataatttgaagcttcatattgtgcagtcctaaactgatacyacatgtagcatacttattttgtaattcaggggatatttgaaggtatgatttcttagaatgaggatgatgatgccccttctgttgggacccactgatacac

SEQ ID NO: 23890 - DNA, 201 bp, Homo sapiens
tggtaaattactgtatttttgaacgaatgacttaaaaaattacccattagaaatgagttgtggcctggacaataatcaaaacagaaatattggcttttaawttgctgagaatagggaggttttggtttagtgaactgatgacaagattacagctaaggaacaacccttctccatttatgtcctctctgcatgtcctttagg

SEQ ID NO: 23891 - DNA, 201 bp, Homo sapiens
tttgtggactggatcaagggccccactgctgtgtgcagcttaaggatttggtgccctgtgttcccagctgctccagccatggcgaaaaggggccaacttayagctcaggcctttgcttcagagggtgcaagccccaggcctttgcagcttccatgtggtgttggacctgtggatgcacaaaagtcaagagttgaagtttag

SEQ ID NO: 23892 - DNA, 201 bp, Homo sapiens
tagcccctctactttctgtttgcttctgttttcatggaaatttgtgcaagtgaagcaattatttaaatcatcacattgtctgctcaatgttggactttgtrgtagatgctgggtattcaaatgtgaatgaaactcaatccctgaccctgtgttgcttttagtctatacagtacgggttttacttcatattttcccttataa

SEQ ID NO: 23893 - DNA, 201 bp, Homo sapiens
cactcacaatagagaggggtggattggatgggacaaaactaggcgtgagcaggactggtactgaagtcattcaacagaagataaggccagagaaaggaggygaatagagggatagagaggaacaaaaaagattaaagtgataattatgagttgggatggctgggactttgcaaccttttagatacagagaaagagtggaaa

SEQ ID NO: 23894 - DNA, 201 bp, Homo sapiens
ccacaggctgcattttgaatagcaagacattgtaccatttgatcctgacaacaaccctattagttagaaattacttcttatggccaggcacggcggctaaygcctgtaatcctagcattttgggaggccgaggtgggcggatcacgaggtcagaagatctagaccattctggctaacacggtgaaaccctgtctgtactaa

SEQ ID NO: 23895 - DNA, 201 bp, Homo sapiens
cctagatattgttagacatggtgactgatctgaccattttggcagcagacaacttacatatttagtgagggttaagtgcgcagcctgattgttgctcgttsactcatgggtttgtttttttgtttttgttttttctcctcttcctaggcccttcccaacagaagaaagcattaatgatgaagacatctacaaaggccttcc

SEQ ID NO: 23896 - DNA, 201 bp, Homo sapiens; identical to SEQ ID NO: 2925

SEQ ID NO: 23897 - DNA, 201 bp, Homo sapiens
ttgtggttcctatgcaacgtgttttaaagtaccaccttctcctccaggtatgtaacttaaaacagtttatttattgtccatttattcactcaacaaaataytaatgaagcatcaactacattgcagatattccatgtgttgggcccaatccccttaaaattttgaattattattatagttaagtgggaaataacagaacag

SEQ ID NO: 23898 - DNA, 201 bp, Homo sapiens
tttctggtagcgtagcagaaagctggttcatcacttctgagttagttcaatggtagagcaggctgacaccagccactggctctagaagcacttctttctarcaggccacttgtgtgaccagggagcttctgctattataagtttgcataaatatcctgtcaatacatagagcaggatgctgaaactgtaactacagtgtgt

SEQ ID NO: 23899 - DNA, 201 bp, Homo sapiens
aaggtcgcagtattggtgtaatattatctaagtggatgctaatatgcataaaagagttctctttcaagaagcttccagaacaacatgatgcaggtaggttrtctataatgttaggcagtgaatgaagagtccgggagatgataaccacctcaacgttcccatttaaatgtcactgttactgggccctttttaattctattc

SEQ ID NO: 23900 - DNA, 201 bp, Homo sapiens
ctcaggtattacattatagcagtgggaggacggactaatacagtaaattggtacccagagtggggggcactgctataaagatacttgaaaatgtggaagcractttggaactgggtaatggatagaggttggaacagtttggagggctcagaagaagacaggaagatgtgggaaagtttggaacttcctagagacttgttg

SEQ ID NO: 23901 - DNA, 201 bp, Homo sapiens
gttcagcagacttagttaaatagtgtcttcagcatgtgtttctctccctccaattcctttccttaccatgggatcagtttccttgtgatattctcaactcygaaagtgagacccatctaggagccatattccacattggtgcaagtttaagtcttctaaaacatacaacacctttaaagaaatgccatcaccaatgataga

SEQ ID NO: 23902 - DNA, 201 bp, Homo sapiens
cttctcaccaagatatggtagaacctgattctttccagattttgtattgagtaacaacgtgggttttggcttacctacatgtagactggtttttgttgccraattttttttttctatcattaaaggtattctcttgtttctttcacacacacacacacacacacacacacacacacagtcataagactataatttaggatt

SEQ ID NO: 23903 - DNA, 201 bp, Homo sapiens
cactccagcctgggcagcagagtgagatgccgtcccaaaaagaaaaaaaaaaaaaaagattaaattactgacacacatcatccctaattaagaatttgtgsatcaaatgttttttggccaaccatgactgagtggagtactgtgggggcattgcaaaagtgcttatataatataagcaaagaacattggtggtagccgaga

SEQ ID NO: 23904 - DNA, 201 bp, Homo sapiens
ataatgagacccttcgtgaaattaaacagtttcagctatctatagagaatttggtatgtaattatctttccatccagcttcccctcacccccacatcaacsacattctaggagttgttgttgaagaaaacatagtttaccttcaagtttctactgttggaggttgttgccagtccctttgtttggcagtgttcatgtgggt

SEQ ID NO: 23905 - DNA, 201 bp, Homo sapiens
agggtaaaaatcatgagcccttttctcagagcaggtttgattgaggaagacccaggatacctcacagagagtgatggagatggggaaggaaaaagagagakaggggtttacagaaaacaaacgctgcctagggaatgtgactgagaacataagtgatctgtgcaataacgcacaacccagaaaccctctgagcctggagaa

SEQ ID NO: 23906 - DNA, 201 bp, Homo sapiens
ctgattagggggatctttttcacaggagacctgttttctcaaacctccaaccattgatgtatatgttaccctcttcctggttttccctttcacccccgttstgtcagctaaatccttccttatcatcaaggcacaatactgggttgccttttctgacgtcttctcagaaccaaaaaggcttctatcataacacccatcata

SEQ ID NO: 23907 - DNA, 201 bp, Homo sapiens
tttcctccttattgggtctaaatgtggaatcatgtactggttgatcctttgaagccatgtgtttttttaggcatgtttacagtggccccttttatgttaayttgctgattttcatactcaaagaagacatgtactttatggcttgaatcctaaaatatgtgactcccccactgggaatgtgttttaattgtttttgagaac

SEQ ID NO: 23908 - DNA, 201 bp, Homo sapiens
tcgctgattatcgttccatgtgtggagatagcacaatttgtttacccgttaacctgttgatggactttcaggttgccactagtttttggctattgcaaatraagcttctatgaacattcaaatataattctttgtatggacataatgcttttatttttcttagatactaatgccaagaggggaatatatagatcatatgta

SEQ ID NO: 23909 - DNA, 201 bp, Homo sapiens
aatcaggataataaacatatccaatatcatccctaaaagtttttgtgccccttggtaatccctccatcatgctccttcctgttgctttgttccgccttgcrcaacaaccctcagcaaccactgttctgctttcagactggagatgagtttgtatttttttagaatttgatgtgcatcacatagcatatattgttttttgta

SEQ ID NO: 23910 - DNA, 201 bp, Homo sapiens
aaaacttgtttggcttattttcaggtttaccaaagatgcaggtcattaggaactattctggaacaccacccccagctctgcatgaaggaccccctttacasctccaggccggggataccgttgaacttctgaaaggagatgcacacagtctgttttggcaggtactgttgttgcaggaaaggggtcctgatgcagacccca

SEQ ID NO: 23911 - DNA, 201 bp, Homo sapiens
tcaattctaaaacttgtttggcttattttcaggtttaccaaagatgcaggtcattaggaactattctggaacaccacccccagctctgcatgaaggacccyctttacagctccaggccggggataccgttgaacttctgaaaggagatgcacacagtctgttttggcaggtactgttgttgcaggaaaggggtcctgatgc

SEQ ID NO: 23912 - DNA, 201 bp, Homo sapiens
aggcatagcagggagctcttgggcttcctctagaaacttcagtgactccatgaaagatgttctatggatctttgtaaaaatcccattattttccaaaatgrtcatctcaaacctgccttagattgctttaggtttacctgtagggcttgtatatttgaagggcattaaattgacttttgcatttcttgctctacaatgaac

SEQ ID NO: 23913 - DNA, 201 bp, Homo sapiens
gccttggacagaggcaatgctgtgtggaatagcatgattgtggataaggcattctgtgagtccacggatggtagtcttggcagaagcattgcatacaaaayaggcaaacccatatctggagtaattgtctattccagtgaggacaaacttctgccttttccatgatggaagaggtccaatataatcaacctgccaccaggt

SEQ ID NO: 23914 - DNA, 201 bp, Homo sapiens
cattccacatgactccattgctgataaactcagtgatctctaagtctccattttctctgtgatcaccagtgggtggcattttatagcaaaaaggttatagkctctagagttcaaattttggatctgctgctaattagctggatgatctagggcaggctcttttccctctgggttcccttggcttcctctggaggacaccac

SEQ ID NO: 23915 - DNA, 201 bp, Homo sapiens
taatgggaaactttaacaccccattgtcaatattagacagatgaacgagacagaagattaataaggatatccaggacttgaactcagcaatgcactaagcygacctaatagacatctacagaactctccaccacaaatcaacagaatatatcttcttctcagcaccacatcacacttattccaaaattgaccacattgttg

SEQ ID NO: 23916 - DNA, 201 bp, Homo sapiens
tactgggcaatgtgatacatacacagaaaggatgagcctcctcagtgatgaaatcagccagtgcccaagaggaaagtaataggcagaaaggatagagttgrtgaaaaaattgattcttttccattaaactgtacgtgatgtgttttttatgaagcaggcatcagctgaaggagaaatattttttcaactaaaaaagagatt

SEQ ID NO: 23917 - DNA, 201 bp, Homo sapiens
ggacatttttaaacagaggttaaaaacctatcagaggcatattttctaaggggagaagaaaacctatattaaattaatactaaatgactgttcgaaatatraacatctgtaaatctaatttattctccgttcttgatctcatttgtgaagtgtgatgccttctgtggcagtagattgtgttaagaattttattgatgattg

SEQ ID NO: 23918 - DNA, 201 bp, Homo sapiens
tgacttagatatctgcctcctgcttccatgttctgtaagagcaaatattcttcaatgagtgctgctcctttagactgtctctcttggcctcctcttcagcygctggtgtctcacatgttaagcctatttattgcagtctttgagttaagttaatcaccagccctgaattacttgggtgtagtcagatgagcagaataatgt

SEQ ID NO: 23919 - DNA, 201 bp, Homo sapiens
gttgggaattacgtgtcaacatatgtatttgggggtacataaacatttagtctatagcaatgggtttattagtagaaattatatatgagttttaaggagtragaatagtagttcagattattttttcccttgggttggtggatgagctgaatattcagacatcagtaagtatatgccaggaagaaggtaaagtatgttaat

SEQ ID NO: 23920 - DNA, 201 bp, Homo sapiens
atagatatagacacaaagttctgattgcataaatgcatgtatataaatgtacatataaaatttttaaatattatatactatttttgtgcagatttattacrtatagcagtgtcttaaaaacaattagtgaattgtttaataaacatataaaaagatctaggattacacaatacatacaagaaagcaaaacaaattgggaaa

SEQ ID NO: 23921 - DNA, 201 bp, Homo sapiens
acttacaagagaagtgctgttgtatttatgtttgtaagaacatacgtggctgggtgcagtggctcacgcctgtaatcccagcactttgggaggtcaaggcsggcggatcacgaggtcaggagatggagaccatcctggctaacacggtgaaaccccatctctactaaaaatacaagcaaaaaaaaaatagctgggggtggt

SEQ ID NO: 23922 - DNA, 201 bp, Homo sapiens
gtcattatgttagtataattatttttcatccattatgcaatgccttctttccacagtttaattaccaaagattttttatgtatgtgatccttttgttgtgwgtaaaaggtattcacagttaaaggattccaaatacacgaacttgatgataaaccaaggggaacatgagaaatagagtagctttgctggaaaataatctgg

SEQ ID NO: 23923 - DNA, 201 bp, Homo sapiens
catgttttttggggactttgtgacaagtttcctctccggagaccaattatttgtctgcagaaaacgttcagttgttttctatttagcattgtgagatttgycctgtcattatgttagtataattatttttcatccattatgcaatgccttctttccacagtttaattaccaaagattttttatgtatgtgatccttttgtt

SEQ ID NO: 23924 - DNA, 201 bp, Homo sapiens
caaattttgtagaacagcaaatattgatgcctgatccttcctctgtaggcttcatctcagaggggcatctggctgtatgaggtatcagtcagcccctactrggagatgtctcccagttaggctacatgggggtcagggacccacttgaggaggcagtctgtccattctcagagctcaaacaccatgccgggagaaccactg

SEQ ID NO: 23925 - DNA, 201 bp, Homo sapiens
gcttactgaacagcctcagggtgcctggttaatgctcacatatccagcaccctccctgtgttcctttgtaaatctagtaagaaaaccagccagctagctgscacttaaaaatcactgttttctaagtaagtaggggagagcataaaccagacaactggtacccaccctccatcagagaaaatttcttaattctatatccat

SEQ ID NO: 23926 - DNA, 201 bp, Homo sapiens
tctttcatattatcagacatgagtctgtaactcattatgcttccaatttttgtgccttggctaccaacaaatctagagcaaaattttcctttcattcacartgactcttgttacagcttttctagtgcagctatccatcttgctcaacatagcttcaatgctgattttaatgatcctagcagtcttttacaaatccatgtt

SEQ ID NO: 23927 - DNA, 201 bp, Homo sapiens
cctttgggaatcactttattaggtttacttcttttcatgtctctatcttcatcctagattgaaagaactgtaaggccagaggccatgtattttttgtcccrgtacaatgcttggtactcatcaggcatttaataaacacttattgaataaaagaatgtctgaagcagctgaataatagtataagacaactttcagattgta

SEQ ID NO: 23928 - DNA, 201 bp, Homo sapiens
gttctgagacatgactgggaaaactgaaatgagccagctggccattggcggtccacacctctccatgaaaagtatctgcagagcgcctctgccggagcacrgaggactttctggcggaattcctgtagcttgtgtgaggatcaaacctaagcagagtttaatgaaattctactttggagtgatttgtttatcttctgtgag

SEQ ID NO: 23929 - DNA, 201 bp, Homo sapiens
agactattaaaggaaccaggtcctttaatccctggtgattcctcttcatttagaacagatcttgtgttagtgagtacctttccctaaaatgggggtctgaytctttgctctatatctttgtcatgaaaatctgccaattccctgtccaggagccagtggatttgggacagaggaggaagactcaaccaacctccagtggat

SEQ ID NO: 23930 - DNA, 201 bp, Homo sapiens
tcttcagctcatcctgagactttgagatcaagtaaaactgactttcaccctaccctgcccccagccacctgtgtgcaggaaagttgctcagcctctcagarccttcatgttttgatctgtaaaatggccctgatgaggatccctactgcatggaattgtggtgaagagtgtgaattgaattctgagggaaaagcaaccagt

SEQ ID NO: 23931 - DNA, 201 bp, Homo sapiens
ctcatcttgttaaataatcacaaaattatgatggagcagtttatcctgttttagcaaatgagaaaattcaggaccagaaatgtaagtaacttgcctgaacsacacagctcatcacagaacagggattccgtacccatgccccttcagtgcaccatgtcgtaggacatccttttccattcttttctttagagagtttgttgt

SEQ ID NO: 23932 - DNA, 201 bp, Homo sapiens
tcctgcccaagggcttgtgcatatggtagttactcaataaatacttatgaaatggatgaatgactctgccttgtagatttgttctgagaagtaaatgtgaraaagtatatgaagagcctagtgatgtatctggtacattagagatgtgaaataaatgcctcttttgaccattttaattttttgtttctccaaatctgtaat

SEQ ID NO: 23933 - DNA, 201 bp, Homo sapiens
tttaaaggtttaaaaagtgatatattttcacttttttgaaaaagtgcaatttgaggcattcctgttctcatcaccaagatttaagagatattaacactttktcatatttgtgtcatatcatttttgaatttttttttttttttgagacagagtcttgttatgttgtgcaggctggtcttgaactcctggcccaaggcaatt

SEQ ID NO: 23934 - DNA, 201 bp, Homo sapiens
ctccttccctcttttccggaatttgcgtctgtgtgattcctaggtaatcattactgaaagcatgatcagcattttatggtttaaaaaaaaaaaactgcackgggtgcatttccactaaacgtatagagaatatatctgagggaacacagtagagctccatgtggatactgattgattagtattgggcccgtggagactgct

SEQ ID NO: 23935 - DNA, 201 bp, Homo sapiens
gagaagtgaagtaacttgtccaaagtcatccaagtactcaattttcaagtcattattcaagtatagattcatcaacttttaaagctcatgatcttttgttwatacatcacattgcctttctgttaggccagaggtcctcaacccctgggccacagacaagtaccaggtccatggcctgttaggaaccaggccacacagcag

SEQ ID NO: 23936 - DNA, 201 bp, Homo sapiens
gaagaggaggggatagattgagggagtttagaaaatggtattgcttttgattctgggatatattgtttatcggggtccatgagtagtgctgaatgttctaytctgggcttaaaatttattttcctgcatttgctacatccatctcctcaaaaattctgatataggcaggtagaaaccaagaactgaggaaaacacaggcgg

SEQ ID NO: 23937 - DNA, 201 bp, Homo sapiens
gtggcattgtgccccaccctagagatctgtggaactttgaacttgagagagatgatttgaaattggaacttatgtttaaaagagaagtggagcataaaagkttggagaatttgcagcctgatgatgcgatagaaaagaaaaacccattttctggggagaatttcaagcttgctgcagaagtttgcataagtaatgaggagc

SEQ ID NO: 23938 - DNA, 201 bp, Homo sapiens
ccttttcttttcattccctttagtcccttgtctgcggtgactcaattcaagatcacatacactcattacactcatacacacactgcttaaaatctgaaatyatgtgctttatccagagctctggacttagttggttcttggatatattgagtcttctgggcctggctttgctacttgtctctgcacattccctcagtttca

SEQ ID NO: 23939 - DNA, 201 bp, Homo sapiens
tccaaattataaatcatcatgactcaccagattaatattgattaatattgtttcctttgcctggaatgccttttcttttcattccctttagtcccttgtcygcggtgactcaattcaagatcacatacactcattacactcatacacacactgcttaaaatctgaaattatgtgctttatccagagctctggacttagttg

SEQ ID NO: 23940 - DNA, 201 bp, Homo sapiens
atgtaattaaaatgtttcccctggcataatattagaaattactatattattttttgacatcatgacagtatctgtaactttgttcgtttccgtactgtatrtaaagaattttccataactgtttcaatcgtcagtttatgattaactcactctttggaaatgtttcctactgagctgtctgttggcacattgacagtgcag

SEQ ID NO: 23941 - DNA, 201 bp, Homo sapiens
ccttcaggttagatatgactctcactcttcagggttgttaaatactgaaaaaagctcctgaaagagggagatttcttttctaagactgctgaggtctggtsgggggagagggggggaatgggggacgttgagggtttatgttttgaaaaaccatttactttcttacttttgaaaaaagatgaatctctttctggctttctg

SEQ ID NO: 23942 - DNA, 201 bp, Homo sapiens
caaatcacatatctatttgagattgaagcagcagtttgaactcaggtctagctgattgtccactactgtaccatagtgcaaacattcacatagcacataaygtgtactttgcatatattgagggaatcagcgcatcaatcccaacatgtggatactattatttttcccatttataggtcctagcttgtgggtaatggaact

SEQ ID NO: 23943 - DNA, 201 bp, Homo sapiens
tggccatgaatcacaggtgaggtggacacttctctaagctgttggccctgaaaaacaccagagatatttctggttttatttttcttttatccttccgcctrttcctcctgcacctttaaaaaaatcttccttgatttttctttattttcaccctctcttttggggaaatgaaaaatgaaaatgaattggggaaatgaaaaa

SEQ ID NO: 23944 - DNA, 201 bp, Homo sapiens
tggccaacatagagaaaccctgtctctactaaaagtacaaaaattagccaggcatgatggtgggcgcctgtaatcccagctactcgggaggccgaggcagragaatcgcttgaacccgggaggcggaggttgcagtgagccaagatcgcaccattgcactccagcctaggtgacaagagtaagactctggctcaaaaaaaa

SEQ ID NO: 23945 - DNA, 201 bp, Homo sapiens
ttgtttcatggtaagtctcctggctttcctactcatttataaatttagtttcagatattgtcatagccaatatgagccctcaaaaccttatctgctattartatatccagaacattcagaaaggattactttggattattttctcatttacaatttgaaacaacaacagaaaaagtcagttgcttaggttcttaataactt

SEQ ID NO: 23946 - DNA, 201 bp, Homo sapiens
ccctggttctctctccggtcttaacccatggtcattttgtgatctagaaggcaccagccttctcgggcatcaggctgcctgccagcttggaaagctgtacmaaaggaaggggggataagaaggtggtttctaagattcctttaatctctggaaagctgtgatttaactgtcttgaggtccaaaaagtgatggaggataaaa

SEQ ID NO: 23947 - DNA, 201 bp, Homo sapiens
atatggggaagccactctacctggggtgggggaaggccctggttctctctccggtcttaacccatggtcattttgtgatctagaaggcaccagccttctcrggcatcaggctgcctgccagcttggaaagctgtacaaaaggaaggggggataagaaggtggtttctaagattcctttaatctctggaaagctgtgattta

SEQ ID NO: 23948 - DNA, 201 bp, Homo sapiens
catatggggaagccactctacctggggtgggggaaggccctggttctctctccggtcttaacccatggtcattttgtgatctagaaggcaccagccttctygggcatcaggctgcctgccagcttggaaagctgtacaaaaggaaggggggataagaaggtggtttctaagattcctttaatctctggaaagctgtgattt

SEQ ID NO: 23949 - DNA, 201 bp, Homo sapiens
agaaacaaccaaacaaatgcagaatttaggacattttgtaagacaaccagcctggactcttcaaaaagtcaatgtcattaaagaagaataaaggcaaaagkatttttagattaaaagatactgactaaaagataaaactgccaaatgcagtgggtaaaacatgactggatcctagtactaaaagtgggcaattgaggaaat

SEQ ID NO: 23950 - DNA, 201 bp, Homo sapiens
tctacattgtgtgaaggtctattagcactcaccgaccttctcatgaaatgtcatttctcatttgggactgaaataactcatctcacaataagctgtagagrtttttcctcttccattgcctcagttaacaccactagtccattattcctagcaactttggagaagtcggtgtttattttttcaaataaaaagggaagccat

SEQ ID NO: 23951 - DNA, 201 bp, Homo sapiens
ttagaaaatctacattgtgtgaaggtctattagcactcaccgaccttctcatgaaatgtcatttctcatttgggactgaaataactcatctcacaataagytgtagaggtttttcctcttccattgcctcagttaacaccactagtccattattcctagcaactttggagaagtcggtgtttattttttcaaataaaaagg

SEQ ID NO: 23952 - DNA, 201 bp, Homo sapiens
gatgatctgagacctttggagaggtatagaggaggagttatgatgagaagagaaggagaattcttcttgtaccttaatgtttgtaaatcggtttcatggtygtctcttctgtgcctttcgaaactgccaatcatcttattataatggccactcataatttgaattatgccagaccctcaaattcagggccgatctttcaat

SEQ ID NO: 23953 - DNA, 201 bp, Homo sapiens
acaaataaaaattattcttttattaaatttctaggagatgtaagatttagctcacctaattttaaaagagagatatagagaagatatggtgaaagggacaraaatagggaactccagtaagagagaagcttgatattattatattccttacacctcttcctccttaccagttaaaaaaaaggatgatctgagacctttgga

SEQ ID NO: 23954 - DNA, 201 bp, Homo sapiens
ctttctttcaccaaaggcagcgacatgcaccactttcattagcaggttaattaacttaggaaaatagatgatccaggctaactttgacctctgcacttccmaggtattcagttttttagtgcaaagactaaaaacacaaaaggaggagtaaagatgctgcttgtcttccttttgtatgtccagggactaatgcaggtgttg

SEQ ID NO: 23955 - DNA, 201 bp, Homo sapiens
atagccaatatgagccctcaaaaccttatctgctattaatatatccagaacattcagaaaggattactttggattattttctcatttacaatttgaaacarcaacagaaaaagtcagttgcttaggttcttaataactttttcttgtatattaaagacttttctttaccagctgcttggtaatttttgtttccacagtgct

SEQ ID NO: 23956 - DNA, 201 bp, Homo sapiens
agtgagccgagatcgcgccactgctgtccagcctgggcgacagagcgagactctgactcaaaaaaaaaaaaaaaaagctgacaagaaaactggtgttgaasccaattccatcagattccagaatctttgattttagtgttgtgctctatgacttccaatcttaaatacttagttaaaaagtcaagcagtaagatgttaatg

SEQ ID NO: 23957 - DNA, 201 bp, Homo sapiens
aactgcagaaatgtccagaaaatgatatacgaagttgttgtctagcagaaattaagcagacagaagaaaaatatacagaaactttggagtcaatagaaaargtaagtcatcaggtattatttttgatgcccaaatactgcctaatatagttaatatattagactcactgtttcttctgaaggtgtgtatgtgtattataat

SEQ ID NO: 23958 - DNA, 201 bp, Homo sapiens
aattagaagaaaattgtgttaatcgagatgacaaaaatggtggtataggtggtcagattctgagtaaattttaaacatagaaccaaccggattggatgatsaattaagtaaaggatgtgaaaaaaagagaggagtcaaggatgactgtaggttttggcatgagaaactgcatgaatggtgaagattacaggggtggggaag

SEQ ID NO: 23959 - DNA, 201 bp, Homo sapiens
tggactggatcaagggccccactgctgtgtgcagcttaaggatttggtgccctgtgttcccagctgctccagccatggcgaaaaggggccaacttacagcycaggcctttgcttcagagggtgcaagccccaggcctttgcagcttccatgtggtgttggacctgtggatgcacaaaagtcaagagttgaagtttaggtat

SEQ ID NO: 23960 - DNA, 201 bp, Homo sapiens
tcaggagtctgttggaacaagtgaaatttgtgatacctattagactttgaatgggatttgttgagaaaggtgttaggtatatgaatcaggcattaaggggraagactgaattgacaaatagattgggccattatcatcacacaatggcattaaggccctgggactaagtgagatcaccctagtgaatgcatgttagggaag

SEQ ID NO: 23961 - DNA, 201 bp, Homo sapiens
aaagtttggagaatttgcagcctgatgatgcgatagaaaagaaaaacccattttctggggagaatttcaagcttgctgcagaagtttgcataagtaatgargagctaaatgttaattgccaagacaatggggaaaatgtctccagggcatgtcagaggtcttcatggcagccccttccatcatggtcctagagtcctagga

SEQ ID NO: 23962 - DNA, 201 bp, Homo sapiens
gattcaagttctcagacctctaggacttgctttggtttatacatccccacccccatgcacgcatgtacacatacactgataaatgtatataagcttttatkcacagacctgcttgtattacctgaacagttctttgtgttttgattctattgtgttctgtgttgctgagtagcagttggtaagcaatggcatgtcatcctt

SEQ ID NO: 23963 - DNA, 201 bp, Homo sapiens
ataaaagtttggagaatttgcagcctgatgatgcgatagaaaagaaaaacccattttctggggagaatttcaagcttgctgcagaagtttgcataagtaaygaggagctaaatgttaattgccaagacaatggggaaaatgtctccagggcatgtcagaggtcttcatggcagccccttccatcatggtcctagagtccta

SEQ ID NO: 23964 - DNA, 201 bp, Homo sapiens
acatacactgataaatgtatataagcttttatgcacagacctgcttgtattacctgaacagttctttgtgttttgattctattgtgttctgtgttgctgartagcagttggtaagcaatggcatgtcatccttgtccctgattttggccgaatgaggacattcttgttgatttataacatgcacaatatcagctgaaggtt

SEQ ID NO: 23965 - DNA, 201 bp, Homo sapiens
tcctgaggcctccccagccatgtggaactgtgagcaaattaaacctcttttctgtataaattccccagtctcaggtattacattatagcagtgggaggacrgactaatacagtaaattggtacccagagtggggggcactgctataaagatacttgaaaatgtggaagcgactttggaactgggtaatggatagaggttgg

SEQ ID NO: 23966 - DNA, 201 bp, Homo sapiens
tagagatttcttgtcttttttccctttcagattggttatttacgggcagtactgcagtggagtggagtcagccatctctagtttagactacatttctaagwcaaaagaagatgtcaaactgaaattagaggtgcctatttatttttagtttatgacataaagcaaaataaacctaaaagcaatgtattcctctttatgatc

SEQ ID NO: 23967 - DNA, 201 bp, Homo sapiens
caccatgtaagatgtacctgcttcaccttctgccatgattgtaagtttcctgaggcctccccagccatgtggaactgtgagcaaattaaacctcttttctktataaattccccagtctcaggtattacattatagcagtgggaggacggactaatacagtaaattggtacccagagtggggggcactgctataaagatact

SEQ ID NO: 23968 - DNA, 201 bp, Homo sapiens
gactacatttctaagtcaaaagaagatgtcaaactgaaattagaggtgcctatttatttttagtttatgacataaagcaaaataaacctaaaagcaatgtrttcctctttatgatcagtgaagcagtacatttcccattattttaaatataatttcatgtcaattttataaaatatttaaacagctctataaaatagtaat

SEQ ID NO: 23969 - DNA, 201 bp, Homo sapiens
ctcacttgtcaccatgtaagatgtacctgcttcaccttctgccatgattgtaagtttcctgaggcctccccagccatgtggaactgtgagcaaattaaacmtcttttctgtataaattccccagtctcaggtattacattatagcagtgggaggacggactaatacagtaaattggtacccagagtggggggcactgctat

SEQ ID NO: 23970 - DNA, 201 bp, Homo sapiens
aaatctacaagctctggagtcttggtctgtttgaatcctagcttcacaatttactccttgggtgattttgaactccatttacttaccctttgtaagtattrgtttcttcccttatgctatggtttggccctgtgtgcccacccaaatctcatcctgaattgtaatccccacgtgtcaagggaggggccaggcaggagggga

SEQ ID NO: 23971 - DNA, 201 bp, Homo sapiens
aaaggtagccatgtcaacctttgattttcccaaaggaaaaggtggacattgaattattttggataatgtgaaaaagagtgaaacagagaatagctcatttyggagctgagttcagaaaacaggcaattgtagaaaaggtgaatcctattagacgactgagatcatagcacattcctctcagacattttaaaaggaccctct

SEQ ID NO: 23972 - DNA, 201 bp, Homo sapiens
aattctgaggaggattaggttgctatgtccttccaggttgcttgttcccacacagccagattctggtacatatttgaatgcatagcatacttttggcttaraaaacattgcacatttagtagtcattttgcttgaatcagatctctacctgatgtcattttgatgaatttagggtttagatgactaaattgcagctttgtt

SEQ ID NO: 23973 - DNA, 201 bp, Homo sapiens
aaaaataatagcaaaaacctcaattacttttgcagcaacctaaatagctaagccaagaataatgtaaaaaaaaagttaaatgttttcaaaatacctactargtacaaaaatttgattattttaatatgaacattgctgaatctcctccttgagctatagtttcagtggccaaaagcaaagacctgagttagagttcccaat

SEQ ID NO: 23974 - DNA, 201 bp, Homo sapiens
aagaaatctttctttcattaccaatttcatttcttatctgacattaagcacaggattgtcattaattataaaacatggcccctttccgcaaagaatttatrttcttcctaggaaaggaatagatatagacacaaagttctgattgcataaatgcatgtatataaatgtacatataaaatttttaaatattatatactattt

SEQ ID NO: 23975 - DNA, 201 bp, Homo sapiens
tggtgtaatattatctaagtggatgctaatatgcataaaagagttctctttcaagaagcttccagaacaacatgatgcaggtaggttgtctataatgttargcagtgaatgaagagtccgggagatgataaccacctcaacgttcccatttaaatgtcactgttactgggccctttttaattctattccaggacgtgtacc

SEQ ID NO: 23976 - DNA, 201 bp, Homo sapiens
ataataaaaaaaaccatgaaaatagatgacagagtaggcacaggaagaccagttaggcccatacagcaatcaaggtaagagatgatagtggcctggaacarcacgtagccatataggtgactatatttatattttgagggtgatccaaaaggatattatgacacatcagatgtgatgtataatagtaatagaagacttaag

SEQ ID NO: 23977 - DNA, 201 bp, Homo sapiens
gattcagataacctcattcagtgctatcttttaaatgtttcaaggctcagagcagtacttatgatcttagaatttctcatcttttatactgttcattaatwcttttatagtgtctcatataacctcatgttctaaattgaaaactggtctcggccaggcagagtggctcatgcctgtaatccccagcactttgagaggctg

SEQ ID NO: 23978 - DNA, 201 bp, Homo sapiens
tgagaggttttttttttggtgaaattattagtgtttgttattgcaataaagaagcaaagaaaaactcccaatattgaaaacatatattgtggggtttattsaaatccaagaaagagtgaactgtaggtttgtgttgtagcttgttagcacatttaaatcattcactccctattaataattgtgattaatctttatagacaa

SEQ ID NO: 23979 - DNA, 201 bp, Homo sapiens
tgtgccatagtttcctcatttgtaaaaggaaatgaataagaggacctaccttacgttgttgttgtgagcattacgtgagctaatatatgtaggccaggcgygttggctcattcctgtaatcctagaactttgggaggccaagtgggaggatcacttgaagccaggagcttgggactgtggtgagctgtgatggcaccacta

SEQ ID NO: 23980 - DNA, 201 bp, Homo sapiens
cgggtgtaactacttcaccaggtccaaatttcagagccatgttcaaaggtatattatatatattctctatagcccttttgcactggaaaggaacttaatgmatagtccagtgggtagtaggtgcttaataaatgctacatgaattaataagtgatgatacagtttttatgtatgcattgacattctttctttttaaattcc

SEQ ID NO: 23981 - DNA, 201 bp, Homo sapiens
tattattgtagtagttatgttttagaagataaagtatatatctattaaatatttagaagaaaatcctgaaaaagaagtaatgaacctagtgagctacttcraacatttatcatcaataaactgttccttacttagaacgtcagatatggagtggacttcctttgccatatctatggttatgctggttgaataccattccat

SEQ ID NO: 23982 - DNA, 201 bp, Homo sapiens
caggtttgttacatgtgccacgtatggtttgctgcacctatcaacctgctacctagacaaggatgaagcttgtggattttcttgtgatccaaatgacctcyctatagaaagtgatttttttttccgacgataatttatagtccatctccttttctcttttggctgttctttttttgtactggtatctgccagacagtatgc

SEQ ID NO: 23983 - DNA, 201 bp, Homo sapiens
ataatattttagataagatttaagaggattctaattctagctacttgataggaatgcgaatgatgataaggcttttagagttagataagagagagggctarcaccctgatattctgtaattgaaacagagtttcaagtcctttggtcaagtattacccttattccttcaggaatagtagatattttaagattacagatagg

SEQ ID NO: 23984 - DNA, 201 bp, Homo sapiens
gaagatgtgggaaagtttggaacttcctagagacttgttgaatggttttgaccaaagtgctgataatggtgtggacaatgaagttcgggctgaggtggtcycaaatggagatgaggaacttgttgggaattggagtaaaggtcactcttgctgtgttttagtaaagagactggtggcattgtgccccaccctagagatctg

SEQ ID NO: 23985 - DNA, 201 bp, Homo sapiens
caccatggttaatcattagaataaaaagtcctgaagcttaataaaggcttcagtccttaaatgtgcaaaaaatatcatgtttatgagtggacctctcttasttgggagcagtttcacctgtaaatgaataagtgactgtgaggttgtccattgtgaccagtattgctgcacctagacccatgttcaattgaagctgctgtt

SEQ ID NO: 23986 - DNA, 201 bp, Homo sapiens
ccacacctggctaattttgtatttttagtagacacggggtttctccatgttggtcaggctggtctcaaactcctttttttttttttttagcaatattaacrgatggaacttttatttatttatttatttatttatttatttatttatttatttatttatttttgagacagtgtctcactctgttgcccaggctggagtgca

SEQ ID NO: 23987 - DNA, 201 bp, Homo sapiens
aatttatctgatagaattctgaattccttctttgtgttatcttgaatttctttgaatttcctcaaaacagctattttaaattctctgtctgaaaggtcacrtatctctgtttctccaggattggtccttggtgcctaatttagttcattaggtgaggtcatgttttcctggatggtcttggtgcttgtggatgtttgtctg

SEQ ID NO: 23988 - DNA, 201 bp, Homo sapiens
aggtattttattctctttgtagcaattgtgaatgggagttcactcatgatttggctctctgtctgtaattggtgtataggaatgcttgtgatttttgcacmttgattttgtatcctgagactttgctgaagttgcttatcatcttaaggagattttgggctgaggtgatggggttttctaaatatacaatcgtgtcatctg

SEQ ID NO: 23989 - DNA, 201 bp, Homo sapiens
ttatagatttaactgactttacatttcattcaataatttctttgcaatgtcactgaaatgcagtgacagatgtatatttaaaattactataaagcccatcwtgaataaaataaagaagtgtaatatatagtagataagaaaatactatttttcagagctaagcatgatctgatttttatcagtattttgaaagtatttatt

SEQ ID NO: 23990 - DNA, 201 bp, Homo sapiens
aggagtttgagaccagcctggccaacatagagaaaccctgtctctactaaaagtacaaaaattagccaggcatgatggtgggcgcctgtaatcccagctaytcgggaggccgaggcaggagaatcgcttgaacccgggaggcggaggttgcagtgagccaagatcgcaccattgcactccagcctaggtgacaagagtaag

SEQ ID NO: 23991 - DNA, 201 bp, Homo sapiens
tgtatttttagtagagacagggttttgccatgttggccaggctggtctcaaacttctgacctcaggtgatccgcacatcttggcctcccaaagtggtgggrtttcaggcgtgagccaccatgcccagccaagaagcattgtttaatcagtgatgctctttgtgctcttgatgcattttcttcccagcagcaataccatttg

SEQ ID NO: 23992 - DNA, 201 bp, Homo sapiens
ttcttatttgatttggcagtgatcgtatgtaagagaaaaggtgataactatgaaatgaaggaaataatagatcttcagcagtacaagatagccaataatcytacaaccgataaagaaaacaaaaaggtgactttttggaaactaataactgtaatttacttataatcttgaacattaaggaaaagtatgataatacattaa

SEQ ID NO: 23993 - DNA, 201 bp, Homo sapiens
aacccctctagctccctctgcccacgaaggggtgcaactggccttgctgtctcccctgggcttcagatgttgcttgtcatactagtctgtgttttccctcrgtacccttcattgttatggtctttcctaatagactgttggttttttgagagcaggaagcattgtatcctcattttgctccctgaagcttttggagtgtgt

SEQ ID NO: 23994 - DNA, 201 bp, Homo sapiens
tatgtgggccttgtctcttcaactttatggcaggctcgtagaggatacgtatcttcataacctgtaagtcccactgggcctagaatgttactaaagcactrcactttttctcttgagatggagttttgctcttgttgtgcaggctggagtgcaatggtgcgatctcagctcactgcatcctctgcctcctgggttcaagtg

SEQ ID NO: 23995 - DNA, 201 bp, Homo sapiens
tactaaagacattcagaacaggtatatgtggttttggaataatttacgggtgtatcatgcatttatttccctttaagagatgtttcttctgtgtgtgtccrtaagggtgcaatttttaaatgtaaaatgggtttatatatggccacacaaaattgcataatgagaaaacaagaattatttacagcaaattgttgactgtag

SEQ ID NO: 23996 - DNA, 201 bp, Homo sapiens
atctttggatgagtcttcttactttaattattctgctgaatggacatatgctcccctcactttcctcccccaccatagctgtccaaatctatttgaattcygttaacttcacgttttctcatgccctgattcagtctcttatgcctaaatttagtctcgaagcatgaaaccataaaggattctccagtccaccctagaact

SEQ ID NO: 23997 - DNA, 201 bp, Homo sapiens
gttctaaacatgggaatacctcattttctcagtgcttttcatccattccttccatctcaagtgctgaaaatgtctcagaagtcctagaccttgataaaggktattggccatgttattctcatctgtctgctcctgctctgctctgaacagttctggaatactaagacagccatacagtagcagccaatatctttggatgag

SEQ ID NO: 23998 - DNA, 201 bp, Homo sapiens
gcccttatgcctaccctgttttggttctaaacatgggaatacctcattttctcagtgcttttcatccattccttccatctcaagtgctgaaaatgtctcaraagtcctagaccttgataaaggttattggccatgttattctcatctgtctgctcctgctctgctctgaacagttctggaatactaagacagccatacagt

SEQ ID NO: 23999 - DNA, 201 bp, Homo sapiens
gtaaggtagccttgatacctagatgttgtgatttcctttgtggagagaaacaaacttctgggcctgtttctacccatctgctgttgggttgaaagcacagytctcatcatgtttctttccttccgaagtgtctgatgtgtttctctgctgcctctacaagcacccattttcttctgtatccagccttgtggcccttatgcc

SEQ ID NO: 24000 - DNA, 201 bp, Homo sapiens
ggctgaggtggtcccaaatggagatgaggaacttgttgggaattggagtaaaggtcactcttgctgtgttttagtaaagagactggtggcattgtgccccrccctagagatctgtggaactttgaacttgagagagatgatttgaaattggaacttatgtttaaaagagaagtggagcataaaagtttggagaatttgcag

SEQ ID NO: 24001 - DNA, 201 bp, Homo sapiens
gctactcgagaggctgaggcaggagatttgcttgaacctggaagagggaggttgcagtgagctgagattgtgccactgcactccagcctgggtgacagagkgagactctgtctcataacaaacaaacaaacaaaaaactgcgttttgttcattcagaaatagagttcattctttcattcattcagcatttatttcacccct

SEQ ID NO: 24002 - DNA, 201 bp, Homo sapiens
attcatgactaggaataactgtttggggctgagacggaggtgaacatttaaagagtactttgaataaatgggtttctttacttatgatgaaatactatgaytggagataccattttcctaattaaaatgttgctgttgttcttcatgactcacatattaatttctatactccttaatattgggttaagagtcaaatcagag

SEQ ID NO: 24003 - DNA, 201 bp, Homo sapiens
catagtgctcttacatggtaaacagtaaaagttactgctgactctacaacttctacttcctctactactgctgctacttctaactcttattctaacacagyactttcctatatttctaaggcttgaatacatttactaattatgactcatagcaatgtacatctttgcctttatgattttttaaatataacttgcttattt

SEQ ID NO: 24004 - DNA, 201 bp, Homo sapiens
ttaccttacttgacctttctctttcatttaacactgctaatcatcctccttgatgctatccttcacaacccatcatgcgcccatgccatcttttggaaatmtgattgactttcctggtttagctacaacccacaccccaggtagataaaggtccatctgtgcatgaaacttctctcctgaagtatgaattttaaattacca

SEQ ID NO: 24005 - DNA, 201 bp, Homo sapiens
actaaaagtacttgtcacaggactaaagtaagcttttcttatatgttatgtataaaatctcagcaatgccactattagagacacgtgcatatgtgttttcktctccatatctgggcatcttttgtaaggaagcacgtatcacagcgtgttaaagggaagggactaagaattttagcaaagcaaaatgaaactaacaaacat

SEQ ID NO: 24006 - DNA, 201 bp, Homo sapiens
tacctctcagaataaagttactttaaaaatccaaaaaaaagttatttaaaaaaatacaaaagatgatgggatatgtaggaagtaaacagcaagttgcccawcattaaatactttcctgttgaaaatactgtcaatggtgttgtttgatgttgtttatatagagttccccaaaattataaaatttcagacagaaaagatttt

SEQ ID NO: 24007 - DNA, 201 bp, Homo sapiens
ttagatttctttcataatattgtgttttggtggtttgatgtgtgtatatttctagtaaatactaacagtataaatttctagatttttgtcttatttttctrtattctcaaactgaacttaataaattgtgcataatgaatagtcaaatccaacctcccttctcacttcaaatattggttgtatcctcaaccaatccagtaa

SEQ ID NO: 24008 - DNA, 201 bp, Homo sapiens
taatattaagaagcagctctcaccctataccaggtgtgttcactctccaaggcagatgattgtatgctgctcaggaatcttctcataagtaaatagtgaarcacttttgtaatttgtaagctctgtgatttttattttttctcctctcttgaagaccttctttctctccatgtaccagtttataggcctcctctgcttccc

SEQ ID NO: 24009 - DNA, 201 bp, Homo sapiens
agtttctgtatgtttaaggccagcaaagtctagggagattgaattctggttttgaaaaatatcaaccacaccggtggtatcaactacttgggaggctgagrcacaggcctcccttgaacccaggaggcggaggttgcaggcagctgggatggtgccatgcactccagcctgggcaagagagagaagctctgtctcaaaaaa

SEQ ID NO: 24010 - DNA, 201 bp, Homo sapiens
gttttagaaaacagtcaaaataaaaaggagctcttataagttaaatattatagaagacttgggaaataaagtttagcaaatcttccaaaaagtcagagatrgataatatgagagaagctatatggaagctagactgttgacccaggggatacagcattcaagtagcaggaattccagaaagagaaaaccaagggcagcaat

SEQ ID NO: 24011 - DNA, 201 bp, Homo sapiens
gaatttatattcttcctaggaaaggaatagatatagacacaaagttctgattgcataaatgcatgtatataaatgtacatataaaatttttaaatattatrtactatttttgtgcagatttattacatatagcagtgtcttaaaaacaattagtgaattgtttaataaacatataaaaagatctaggattacacaatacat

SEQ ID NO: 24012 - DNA, 201 bp, Homo sapiens
tcacacattattatttaattctgagatagggatattgatagcataatattaaaatctttcattagagaatttttttttggtctagcaataacctaaattcraaggagttttgttttccttcatctatcagaattgttatttaaaagtacccactacccaggacagtatggttactttgttgccttcaggaaagggaatatt

SEQ ID NO: 24013 - DNA, 201 bp, Homo sapiens
attatgtagataattgattgattaatttaatcaatgactttctcaaagatggttctgagacatgactgggaaaactgaaatgagccagctggccattggcrgtccacacctctccatgaaaagtatctgcagagcgcctctgccggagcacagaggactttctggcggaattcctgtagcttgtgtgaggatcaaacctaa

SEQ ID NO: 24014 - DNA, 201 bp, Homo sapiens
gtgtgttaagcctttccctttgtagagctgatttggggacacggttttacacatatacatatacatatacatatacatatacatatacatatacatatacrtatacgtatacgtatacatatgactgtcctcatgaagattttttctgtagggcagtgtaatagaaagaatccccgattggaaccacagaggtcatgagca

SEQ ID NO: 24015 - DNA, 201 bp, Homo sapiens
taagaccgttggaaaagcgtagtattaaggcgggagtgtcccgattttcctggtatagtctgtcacggcttcccttggctaggaaagggaaatcccccaaycccttgagcttcttgggtgaggcgatgccctgcccagctttggctcgccctctgtggccgcacccactgtccaaccagtcccagtgagatgaaccaggta

SEQ ID NO: 24016 - DNA, 201 bp, Homo sapiens
ttttgcagtggctgttaccggttgttcctttccgtgtttagtgcttccttcaggagctcttgtaaggcaggcctggtggtgacaaaatctctcagcatttrcttgtttgtaaaggattttatttctccttcacttaggaagcttagtttggctggatatgaaattctgggttgaaaattctgttctttaaaaatgttgaat

SEQ ID NO: 24017 - DNA, 201 bp, Homo sapiens
cttgttgaattgatccctttaccattatgtaatggccttctttgtctcctttgatctttgttggtttaaagtctgttttatcagagactaggattgcaagscctgcttttcttttgctttccatctggttggtagatcttcctccatccctttattttgagcctgtgtgtgtctctgcacgtgagatgggtctcctgaata

SEQ ID NO: 24018 - DNA, 201 bp, Homo sapiens
tcttgttgaattgatccctttaccattatgtaatggccttctttgtctcctttgatctttgttggtttaaagtctgttttatcagagactaggattgcaasgcctgcttttcttttgctttccatctggttggtagatcttcctccatccctttattttgagcctgtgtgtgtctctgcacgtgagatgggtctcctgaat

SEQ ID NO: 24019 - DNA, 201 bp, Homo sapiens
tgtgtgagtttcttaatcctgagttccactttgatcacactgtagtctgagagacagtttgttgtgatttctgttcttttacatttgctgaggagtgtttyacttccaactatgtggtcaattttggaataagtgtgatgtggtgctgagaagaatgtatattgtgttgatttgtggtggagagttctgtagatgtctatt

SEQ ID NO: 24020 - DNA, 201 bp, Homo sapiens
ctgtcctctaatggatgttgcgatccacgttgagagtcctgaataggagggaaggtggactccagaagagccaatgtgtccaattcatgatctggcttgcmcaaggtcatgcagatagaaaatactgtcaaggtaaagactaaaacatgggtgtctcagctgtaagtcaaataaatgctgtctctattcctctgtcataca

SEQ ID NO: 24021 - DNA, 201 bp, Homo sapiens
tcccaggtccaggcaattctcctgcctctgcctcctgagtagctgggattacaggcacccaccatcacgcccagctaatttttgtatttttttagtagagrcggggtttcaccatgtttgccaggctggtctcgaactcctgacctcaggtgatccacccacctcggcctcccaaagtgctgggattacaggcgtgagccg

SEQ ID NO: 24022 - DNA, 201 bp, Homo sapiens
catccacatacctcttccccagatttctttgtcaccaattttccaatcatgcttcttccaggtccctgaccacccagccaaaccattggctacagcccacrtatcagtatataatcacacaaccaggtgcactgattgaagttctgcccactggaaatatttcccttcagcactgtccttcagggatgtcttggaaagggg

SEQ ID NO: 24023 - DNA, 201 bp, Homo sapiens
acatcattcaggcaagagatgatggcggcttttaccaaagcaatagcagggcagatggtgggaagaataggctctgaatatattctgaagatggagccagsaggggtttattgatggactagattagggatatgagaagagaggagtcaagtatgtctccagaatttttgccctgagaaactggatgatgaagttcccatt

SEQ ID NO: 24024 - DNA, 201 bp, Homo sapiens
cccgccagccccgtggacgctatgcgtctagtaggagggccgctgcggtgagtcttgaagcccagggctgggcccgggcagagccgccgcaggtgcagatsttggtggtagtagcacatattctaaagagaacttcaaaggccgaagtggagaagggttccatgtgaacagcagttggacatgggtcattcggtcctgaga

SEQ ID NO: 24025 - DNA, 201 bp, Homo sapiens
ataaatagtgactaaattgatttctaagagttggagtctttttattgaatgatccctgtattagtcagggttcccctgaaaatggatggcactggattgtygggcctgtaccaggccatcgccagcagtccagagtgaacagaagcagtgtatgtgtggaggtcaccacccccccgcccgccagccccgtggacgctatgc

SEQ ID NO: 24026 - DNA, 201 bp, Homo sapiens
gtaaggcagtatttgtttcaaagaaagaaaatatagatggtatttgtgtgttccttctctgagacctgattcacacctcttcacttaggtgaattatatasaaaacaataactaaatttatccccaaatagttttaacatagaaagccttgttagggaagaaagtgccacttaaccagaagtgataacatagatttgacaa

SEQ ID NO: 24027 - DNA, 201 bp, Homo sapiens
gccagaattccaagttatgccatctgtacattgctatactgcccccaaaatgcagaatgtgaacacattactcatttctatttgttttcctgaattttgtrtttgacttctcttaaaaagactgaatctatttttaatttattggtattaaaatacatgcatagaaatgagatatcagaatacatatataaatataatatc

SEQ ID NO: 24028 - DNA, 201 bp, Homo sapiens
taaaattgtaagttatcttgtgcaaagcatgtcacaatacatgttctgtatatataggaaattacgttttaaacaaatataaatacttaatattgaaatastcagttttgttttgttttttttggtaaaatatgacaaactaagcctaacttccccaaggattttcagaagtaggaagaaaaatattctatggctctgcct

SEQ ID NO: 24029 - DNA, 201 bp, Homo sapiens
gaacgttaaggagcaccaaactttaaaataatacgcaagtatggcattaaaaggacataaaattttttaacttttacgttataaaagtcaataggaaatcrttgaaaattcctagtctagtcaaatagaagagtcatatattctcagtgtctgttcctaggtaattatttcaatgtactctgtccttacataagtcatttt

SEQ ID NO: 24030 - DNA, 201 bp, Homo sapiens
ttattattttctagatatctccaactattaaaaaatatatttaggatttagtatagtcatgatgtcataataactaatatatactgagtatttactatatrtgctttgtactgtacatgttttgttttatttcttcaacatttatataagaaaagtggtggtgactgttgttattttttatgggtgaagaaacaaagaaac

SEQ ID NO: 24031 - DNA, 201 bp, Homo sapiens
cccttaccacttggaggctgaaagtatcattaacaaaacctaggaagtgtaatggatagtaattattattttctagatatctccaactattaaaaaatatrtttaggatttagtatagtcatgatgtcataataactaatatatactgagtatttactatatatgctttgtactgtacatgttttgttttatttcttcaac

SEQ ID NO: 24032 - DNA, 201 bp, Homo sapiens
ctctgccttgctgcactgacccctttctcagacacgctcagaggcctctatgtcagggccttggtatggaacacttctttagtctgggctgttgtgtgctrcggttctccatggcttgctccttttgcacctcagatctctgctccaccatcctcttctctgtgagaccttctctaaccatcctgtttaagttcccccacc

SEQ ID NO: 24033 - DNA, 201 bp, Homo sapiens
actgcttctggttgacactagtagcttctaaaaataaaatttacaacatatgagagcaacaaaatataaggatggggcacccttaccacttggaggctgamagtatcattaacaaaacctaggaagtgtaatggatagtaattattattttctagatatctccaactattaaaaaatatatttaggatttagtatagtcat

SEQ ID NO: 24034 - DNA, 201 bp, Homo sapiens
ctgaaactggctcttgatgccatgaaggtagggcagattcatcagtaatttgtttgtattttttattcttgcctaaagacaatggaattcaaattgcatayacacacacacacacacacacacacacacacacatatacacacatatatatacacaaacatatatatatacacataaataaaatattatgacatgcctatg

SEQ ID NO: 24035 - DNA, 201 bp, Homo sapiens
tttattgcgtctatttgattcttctctcttttcttctttattagtcttgctagcggtctatctattttgtgatcttttcagaaaaccagctcttggattcrttgattttttgaagggttttttgtgtctctatctccttcagttctgctctaaccttagttatttcttaccttttgctagcttttgaatgtgtttgctctt

SEQ ID NO: 24036 - DNA, 201 bp, Homo sapiens
tctctgatggtagtttgtatttctgtgggatcggtggtgatatcccctttatcattttttattgcgtctatttgattcttctctcttttcttctttattartcttgctagcggtctatctattttgtgatcttttcagaaaaccagctcttggattcgttgattttttgaagggttttttgtgtctctatctccttcagtt

SEQ ID NO: 24037 - DNA, 201 bp, Homo sapiens
tttctaaatatacaatcgtgtcatctgcaaacagggacaatttgatttcctcttttcctaattgaataccctttatttctttctcctgcctgattgccctkgccagaactttcaacactatgttgaataggagtggtgagagagggcatccctgtcttgtgccagttttcaaagggaatgcttccagttttttcccattca

SEQ ID NO: 24038 - DNA, 201 bp, Homo sapiens
ttggtaccagtaccatgctgttttggttactgtagccttgtaggatagcttgaagtcagctagcgtgatgcctccagctttgttctttttgtttaggattrtcttggcaatgcgggctcttttttgtttccatatgaactttaaagtagttttttctaattctgtgaagaaagtcattggtagctggatggggatggcatt

SEQ ID NO: 24039 - DNA, 201 bp, Homo sapiens
tgtgtctttatagtagcatgatttataatcctttgggtatatacccagtaatgggattgctgggtcaaatggtatttctagttctagatcattgaggaatygccacactgtcttccacaatggttgaagtagtttacagtcccaccaacagtgtaaaagtgttcctatttctccacatcctgtccagcacctgttgtttcc

SEQ ID NO: 24040 - DNA, 201 bp, Homo sapiens
cagagcctttcatctgttgttgtttttttctttttctttttaaatgaacaataatagtacagccagagagtttaacctgacagtggtggttactgtgctaytgtctccggcttgtctgagtagtgtagagatttgctcaaagagtaagattgttttggagttgtttgttgtactaagtcaacttggtatatggtttcctcc

SEQ ID NO: 24041 - DNA, 201 bp, Homo sapiens
ttttcagaacagggccagcagggccagggagaaagttagctcctctcctgccatcgaatattaaacacgcgcgcgtgtgcgcgcgcgcgcgcgcacgcacrcacacacacacacacacacacacacacacagagaaactcaactctgaacacaggatatttaataccctgacatcttatttttgattagatacatcagtaa

SEQ ID NO: 24042 - DNA, 201 bp, Homo sapiens
tagtagagacagggttttgccatgttggccaggctggtctcaaacttctgacctcaggtgatccgcacatcttggcctcccaaagtggtgggatttcaggygtgagccaccatgcccagccaagaagcattgtttaatcagtgatgctctttgtgctcttgatgcattttcttcccagcagcaataccatttgtgcctgtt

SEQ ID NO: 24043 - DNA, 201 bp, Homo sapiens
acttctgctgcctgagccctgggaactgttaaaaatacagatggttggtgtttcccatttgtctctttttcttacacttaagttcctttaccatttaagayttataaagtttcaccaacctccgatgagtgattctcagaatcactgaacatataattgaaaacactttataaccccaaagagcaacaggtagagaagtta

SEQ ID NO: 24044 - DNA, 201 bp, Homo sapiens
atcttcaaactcaggctccactagacaagaatattttcttgaagtttactttctgtagtttatatgataaaaacaaaaagcatgtttctcacatttcaaayctagagttatatttcatcaaacataatttgttttaatctaaagatattgctcagatattttgaataccagagagagaattaccagaggaaattttattca

SEQ ID NO: 24045 - DNA, 201 bp, Homo sapiens
tttgctgagaatgattgtttccagcttcatccttgtccctacaaaggacatgaactcatcattttttatggctgcatagtattccttggtgtatatctgcyacattttcttaatccagtctatcattgttggacatttgggttggttccaagtctttgctattgtgaatagtgatgcaataaacatacatgtgcatgtgtc

SEQ ID NO: 24046 - DNA, 201 bp, Homo sapiens
catgtgcttcaagggcagcagcagtccagtgtggctggagcagaatgagggaaggggactgagcatgaggtgggagagctggtgggcttctaggccatgcraggacattgggaagggttgtgagcagaagtgacatgatgtgatttaagtctttaacctctcattctggctcttctgaggcaagagtggtaactaagagaa

SEQ ID NO: 24047 - DNA, 201 bp, Homo sapiens
gcacatcccctgtgcttccttttttttttgtgatgctttccagtgttgttattatttgtatagtgtctaattttcctactagaccacatgcttcatgaggkcaggagctctttctgttttcttcacaactcaattgcccggacctagtaagtccacagcacatataatgagtgctcactaaagatgcattgcagtaaattt

SEQ ID NO: 24048 - DNA, 201 bp, Homo sapiens
gaaagaaagccagaagcaagaagaccatttggctggcagttttctgagagtaggaatgatatagatacctgaattgggatggtgcagctgagaattactgwacgattaacttcatattgcagagaaagaaagcactttacttagaaaggcgacaaggagggctgaacggtgtactaactttgcaaggctagttcacagaga

SEQ ID NO: 24049 - DNA, 201 bp, Homo sapiens
taggttctctggaaagcagagcctggggtaaggcactgaagtactgaaaccctcttggtgaggtacaatcccatggcttgccagagtgaggaaatgagatygtgtctttttttttttttaagatggagaaaattataccatgtttgcaatacaaatggggttgatctagtatagatcaccacatattttctaattttcaaa

SEQ ID NO: 24050 - DNA, 201 bp, Homo sapiens
agaaagaaagccagaagcaagaagaccatttggctggcagttttctgagagtaggaatgatatagatacctgaattgggatggtgcagctgagaattactraacgattaacttcatattgcagagaaagaaagcactttacttagaaaggcgacaaggagggctgaacggtgtactaactttgcaaggctagttcacagag

SEQ ID NO: 24051 - DNA, 201 bp, Homo sapiens
caccacatattctcactcataggtgggaatcgaacaatgagaacacatggacacaggaaggggaacatcacaccctggggactgttgtggggtgggaggarggggggagggatagcattgggagatatacctaatgctagatgacgagttagtgggtgcagcgcaccagcgtggcacatgtatacatatgtaactaacctg

SEQ ID NO: 24052 - DNA, 201 bp, Homo sapiens
aacaccacatattctcactcataggtgggaatcgaacaatgagaacacatggacacaggaaggggaacatcacaccctggggactgttgtggggtgggagragggggggagggatagcattgggagatatacctaatgctagatgacgagttagtgggtgcagcgcaccagcgtggcacatgtatacatatgtaactaacc

SEQ ID NO: 24053 - DNA, 201 bp, Homo sapiens
tattcaccatggaatactatgcagccataaaaaatgatgagttcatgtcctttgtagggacatggatgaaattggaaatcatcattctcagtaaactatcrcgagaacaaaaaaccaaacaccacatattctcactcataggtgggaatcgaacaatgagaacacatggacacaggaaggggaacatcacaccctggggac

SEQ ID NO: 24054 - DNA, 201 bp, Homo sapiens
agcctgattgttgctcgttcactcatgggtttgtttttttgtttttgttttttctcctcttcctaggcccttcccaacagaagaaagcattaatgatgaaracatctacaaaggccttcctgatttaatagagtatgttgaaaatttcaagcaaaatttagccactgccaatttatgtgtccattgtgggttttaactgtg

SEQ ID NO: 24055 - DNA, 201 bp, Homo sapiens
gactgataatttaaagtttataccagccacagaaaggaatggaacatacgcatatgtatcttatattttacagatttaataaagcagagagaaaaatatgmtttcattgtctaaaaactaaaaattagctcaaaaaggacagtagtagtttttttttttattttttatagttttagagatggggtcttgctctgtcaccca

SEQ ID NO: 24056 - DNA, 201 bp, Homo sapiens
tcagatgtaacaaaacaccataatgaattcatgtattgctgacctttccatatctttatctgcgaggggggtgtgtgtgcatgcgagtgcccagtgccctwgactgataatttaaagtttataccagccacagaaaggaatggaacatacgcatatgtatcttatattttacagatttaataaagcagagagaaaaatatg

SEQ ID NO: 24057 - DNA, 201 bp, Homo sapiens
tgactagaaagatgatttttgatacagtttgagtattcctcatttgaaaatctgacatctgaaatgctctaaagtccaaactttttaagcactgacatgaygctcaaaggaaatgctcattggagcacatacgattttagatttttggattagggatgtggaatgtaattcaaatattctaatttttttaaatccaaaatg

SEQ ID NO: 24058 - DNA, 201 bp, Homo sapiens
gagtaaaaaataaagaagtataattgtatttaagttggtgcaaaaataattggggctttgccattacttttaatggcaaaaaatgtttgtttgtttttttwaaaaaagaaaagttagcaaaagaaaaggtaaaataagaggcataccataagcatcacatgtggtagaaacaggtagattcagaattagccttcatagtgt

SEQ ID NO: 24059 - DNA, 201 bp, Homo sapiens
aatacaaaaattagccgggtgtggtggcacatgcctgtcgtcccagctactcgcaagactgaagcaggagaattgtttgaacctgagaggcggaggttgcrgtgagctgagattgtgccactgcactccagcctgggtactagactgagactccgtcttgaaaaaaaaaaaaaagagatttgacaagataaatactattgt

SEQ ID NO: 24060 - DNA, 201 bp, Homo sapiens
attaaatcatgaggaacaatatagagggtaaaagcacagtttccaaaattagacctgtttgtgaatcctgttacatgcctcactagcagtgtgatcttgarcaaattatctaacttctctaagcctcagtttcctcctcaataaaatgaagatggcaatgataccttcccagcatgtggtcttggggatttaaattgagtc

SEQ ID NO: 24061 - DNA, 201 bp, Homo sapiens
tttgtggttgacaatgattgttttctggaatctttggagaagcgaaagccagtagggggcagcatcagctcttgcttcttcctcgataaccctggctccayaggtcctttaaacctctctgggagaaatagacgttaaaagtgatgcaagtgttacagccctgtgaatgtgtcattatcattgtgtataaaaaaaatgtgt

SEQ ID NO: 24062 - DNA, 201 bp, Homo sapiens
agaccaaattagcgcgcgcccccccgcccctttctgtactccttcatggcaattgtgcgtttgtaattgcatgcttctgtgaatatttgttcctccactgsgcagtgtgcttcatgagggcagtgtctgtatcattttgccgtacacctgttatggtggttggcacgtagtagatgctcaaaaaatattaattgccgaacc

SEQ ID NO: 24063 - DNA, 201 bp, Homo sapiens
tttagttatcagcctctgggaaaatagctcattattttaaataattaactcagagcttttcgtccttgaggtcctagctcaagaaagccagcctggacttyatagaccaaattagcgcgcgcccccccgcccctttctgtactccttcatggcaattgtgcgtttgtaattgcatgcttctgtgaatatttgttcctccac

SEQ ID NO: 24064 - DNA, 201 bp, Homo sapiens
ctctgactctgtctcaaaaaaaaaagtgtgtgtgtgtgtgtgtgtatatatatatatacgtatatatatatatgtgtgtatatatatgtgtgtatatatayacacacacacatacatacacacacacattaatgctataaatatatatagcattaatttgccattctaattattttcaaattagaagtgcattcatgatgt

SEQ ID NO: 24065 - DNA, 201 bp, Homo sapiens
gagaggactagaggaagtatggtgttggggtgtatgtggggagaggggaaggaatatctggagctagttatgattgaagtgcctagtagacatctagatgkgtacgccgagcaagttggaggagttggagatgtaggtataaagtttggagtcatcaaggtgaagatggtatttaaaatcatgagactgggtgataccaca

SEQ ID NO: 24066 - DNA, 201 bp, Homo sapiens
gactctgactctgtctcaaaaaaaaaagtgtgtgtgtgtgtgtgtgtatatatatatatacgtatatatatatatgtgtgtatatatatgtgtgtatatayatacacacacacatacatacacacacacattaatgctataaatatatatagcattaatttgccattctaattattttcaaattagaagtgcattcatgat

SEQ ID NO: 24067 - DNA, 201 bp, Homo sapiens
tgaggaatgggcagggcaattacataacacagccttgtaggccaatatgctgaattgggattttattgtgactgcagtgggaagctattaaaaggtttctwtcagggagtattacaacagactgattgacatttcaagaagaccctgtgagcaggcagcccagccagcaagctgttgaagtggtttcaagagaggatgcag

SEQ ID NO: 24068 - DNA, 201 bp, Homo sapiens
aaatggaaatagtatattgtcaaatcacatcaaatgaataaggattattcccagtttaaaaaaaatagaacttattcatacttttgttagcatataagaayattttgtgtatgtcatttaaacaatgtgtatatatcatcatgtatgcgttgctaacagtaaactctaaattcacatttccttaagtggtctcaagtatgt

SEQ ID NO: 24069 - DNA, 201 bp, Homo sapiens
cttcacttctaagtgtgccatctagcttcataaggtatacttcaggaagaagcacacataaatagacacatatatatttatttatatatatatatagaccmatataaatatttctgtatgtatgtgtgtgtgtgtatatatatatatataattttgtacggatactatattctcaataaaatgttttttaaaaactacatg

SEQ ID NO: 24070 - DNA, 201 bp, Homo sapiens
tttcatattacactcttaacttccgcaggttcaaaactgcattttgtggctgggcacagtcgctcattcctgtaatcctagcactttgggaggccgaggcsggcggattgccagagctcaggagttcgagaccagcctgggcaacatggtgaaaccctgtctctactaaaatacaaaaaaattagctgggtgtggtagtgg

SEQ ID NO: 24071 - DNA, 201 bp, Homo sapiens
aggtatagtaattgaaataaaagccttaatggacatattacatggcatatcagacacagttgtgtaggaaattgaggagaaatctgaagaaattgctcaargagcagttaagagagattaagaagttaaaaataaaacagaaaatggagtgatgagatacaaatacatttaatagaaggagagaatagagataattgtaga

SEQ ID NO: 24072 - DNA, 201 bp, Homo sapiens
gtcatggtgctgatgggaatgtagtagtgaggacgaccagaggtcacttggttttggtaggatttagccggcttctttactgcaacctgttttatcagcarggtctttatgacctgtatcttgtgccaacctcctatctcatactgtgacttagaatgccttaattgtcagggaatgcagtcgagtaggtttcagcctcat

SEQ ID NO: 24073 - DNA, 201 bp, Homo sapiens
ttctcacacactgatttatttgaaaaacctagtctcctcaaatgtcttcagtattaaattaatccataagtcaatgtgaaactctgcttttaatataactrgtaattatttaaagcttatttattattttgatggatcctctggtttttatgaaacatgtgatatgctggctgcctgaaaagagtagaatttttggcacag

SEQ ID NO: 24074 - DNA, 201 bp, Homo sapiens
taggaaataaagcaaaacagtctctactcagcctggtttcatggaaatggatcaaatttgttttttaccttctttattcagtgctccatatttctgtctcyggccatcacagccatttttctgtgtccagctcacattcacattctaagggagagaggatccaagcaggacttagtggggttctctgcactggctacaaag

SEQ ID NO: 24075 - DNA, 201 bp, Homo sapiens
aaagacataaccgtagtactgctattgctatttttcttgttattaagtagtgatatatgctgggaccacagtgtaaagtagaatcagaggcagatttcacyccatagctttctaacagtgatatattaggataagatgcatgctaaagtaaagcaatgtagttaattcaagggtctggatactgtactgattattccagaa

SEQ ID NO: 24076 - DNA, 201 bp, Homo sapiens
tgggctctgagccatgaggaatgggcagggcaattacataacacagccttgtaggccaatatgctgaattgggattttattgtgactgcagtgggaagctrttaaaaggtttctatcagggagtattacaacagactgattgacatttcaagaagaccctgtgagcaggcagcccagccagcaagctgttgaagtggtttc

SEQ ID NO: 24077 - DNA, 201 bp, Homo sapiens
agagttaaaaatgccatattgagattagtgctgtgaactggctgctataactgaggattacaaggggagtcctagtttagataagttggttggaaaaagtycttttaagtcatttgaactgagacctagcagataagaagcagccagccacacgaagatctaggggaaagtgacccaggcagaagccgtagcaggtgaaat

SEQ ID NO: 24078 - DNA, 201 bp, Homo sapiens
atacacacatatatatacacaaacatatatatatacacataaataaaatattatgacatgcctatgtataatacacatttgtttttagtggagaaaactgkatttttttttttttactggaatagttatccttgcatggatttaattgttagacaacgcataaaactaagaagtatattaaaatcacttagatacaagtat

SEQ ID NO: 24079 - DNA, 201 bp, Homo sapiens
gaaactggctcttgatgccatgaaggtagggcagattcatcagtaatttgtttgtattttttattcttgcctaaagacaatggaattcaaattgcatacayacacacacacacacacacacacacacacacatatacacacatatatatacacaaacatatatatatacacataaataaaatattatgacatgcctatgta

SEQ ID NO: 24080 - DNA, 201 bp, Homo sapiens
tgagtagggtagagacaggatctgatttatattatagaaacctacccctgatgacaatagagtgactggactgtagtgaggagagactgcaagtcagaagsccgatcagaagctcattatgattacctggttttgttgttttttgttttaagagagggtctttctctgttgcccaagctagagtgcaatggtgtagtcatg

SEQ ID NO: 24081 - DNA, 201 bp, Homo sapiens
acagtaagccaaagagaattgtgtgacattccatattgctttctactatactaaattataataagactacatttattttgaagtgattcttgttatagccyacaaagctatggtttccacggttagtcttctaaatgagggtggagagtcttataaatttaatttgatagctataccaggagactcattagttctgctcca

SEQ ID NO: 24082 - DNA, 201 bp, Homo sapiens
aagtgggaaataacagaacagctggacattttttcttccttttagcagagatggtcagtagctgccataaatcacattttgtgtccttaaaacaggactgsctagaaaataattaaaaacaagtcaaaacaaataaaaatattttttcaaccaagtcttctgtagttatcagtatttatttatgagcacctcaatattgca

SEQ ID NO: 24083 - DNA, 201 bp, Homo sapiens
tttgaacaatgtttgttgtatcagtcactgtattatccatgtattttgaattttattaaatttcaggtagagatatatagccagctcttaaatttaacagygtgtggcttatatgcctgtttaatatcccttttccttttctttgttcagtgtagcactgaggtcaggggagaaggggcaggtgattttcaaatcagaagc

SEQ ID NO: 24084 - DNA, 201 bp, Homo sapiens
acagagtgcatgatcacaacagtatataagtctagaaacctaggttaagtcgtgtttttttgtacatcatgtttttttttttgttttgttttttgtttttkgttttttttttcctgaagaggagttcgaggacttcatgctttcaaagaacttttgaacaatgtttgttgtatcagtcactgtattatccatgtattttga

SEQ ID NO: 24085 - DNA, 201 bp, Homo sapiens
tataaacagagtgcatgatcacaacagtatataagtctagaaacctaggttaagtcgtgtttttttgtacatcatgtttttttttttgttttgttttttgktttttgttttttttttcctgaagaggagttcgaggacttcatgctttcaaagaacttttgaacaatgtttgttgtatcagtcactgtattatccatgtat

SEQ ID NO: 24086 - DNA, 201 bp, Homo sapiens
gaggggttgtcatttttctggtttttggtgggggaaaaggaatagaaaatgcattctgattttgtagatacatcatagttattatagaaaatatcctcaargagtaaaatgcattgctatataaaatacataatagaatagcaataataaaagacataaccgtagtactgctattgctatttttcttgttattaagtagtg

SEQ ID NO: 24087 - DNA, 201 bp, Homo sapiens
ggtattgttactagctatgtctgtttctgggagttaatgtatctcagaatttcctattattttgtggtaacaagttagaaattaatatattgcaggaaaayagtcttcttagtgtccttggagatgttttcttttgtaaaaattcttgaatggatgtttccagtggcaggtcagaatccccacaaagaggatttaagaatc

SEQ ID NO: 24088 - DNA, 201 bp, Homo sapiens
ctaaagcagatttgcagaaccctttgtctacctttcccacctgcctcacaaagtagctcttatttatgctatccaggatgattttcatttctttacagatrccactcttcttactcaccaaaggatagacaaagggaaagaaagaaaattcatgacatggatttactctagttgattgttggcctattgacctgcaggtat

SEQ ID NO: 24089 - DNA, 201 bp, Homo sapiens
ccttcctagcttctggaatataagccacccttctaaagcagatttgcagaaccctttgtctacctttcccacctgcctcacaaagtagctcttatttatgytatccaggatgattttcatttctttacagatgccactcttcttactcaccaaaggatagacaaagggaaagaaagaaaattcatgacatggatttactct

SEQ ID NO: 24090 - DNA, 201 bp, Homo sapiens
aatacttcttaaatttatgattgttaccaaggacagcacaaactataatttggatccatttaacctatatagatactctactctcttgaacaatggaaatstatttcccatagtttacagtcttcctgacatagaaatgttttgttgatcttatctggctgtactgctttgctttgcccatagaggaggtgctaaggacat

SEQ ID NO: 24091 - DNA, 201 bp, Homo sapiens
gtttgcttttttctgcttgctctttagtgggaaagtgttaattttgaaattgcatctgtaaattatagtcatgtgaattttgtgctctgctggaatttctrtgtgttggcctggagtctgtctggagcacagcaggcaaagcagttgggtgtggctgaacatgggagtgtgtggagagtgggcagagtgagggtggaaggg

SEQ ID NO: 24092 - DNA, 201 bp, Homo sapiens
aggggtatgtctgactgggcaatgtggccagagcagaaggaccaagaggaagagtagctggagatgaggttcaaggggtaagtgaggccagatcacttaargccctaaaggactttagcttttacccttgaagaaacaggaaaccattggagggatgtgggcaaaggagaaacatggtctgtctttaaagttttaatagga

SEQ ID NO: 24093 - DNA, 201 bp, Homo sapiens
caattctttatcatttgcgtactaagtttaacacactctaacagaccagcataaatttaggcagagcagggaatatttctatctagaaaactgtgctttcrggcagctaactgcatggatgagttccaggttttatctactttgctatttggaccgggggatggtaaaacagtgtatgaggaaagtttcttactgtctttc

SEQ ID NO: 24094 - DNA, 201 bp, Homo sapiens
tagagactttacctctttcattttacacttccttctttccttcttccttctcaccctgcttttctccctttttcattccattctattgtgatcataaaaartcattaaggtatttagtatttagagatgatctgttattttatttttattttattttatgtattgtattgtattgtattttaatttttttgaaatggagtc

SEQ ID NO: 24095 - DNA, 201 bp, Homo sapiens
aaaaaatactaaaacatcttgattttatattggttacatgttgaaatgataatattctaggtatcttgaattaaataaaatatatgattaaaattattttyacctggttgtatatttttctaacatggcttttaaaatattaagttatgtatgtgacttacacatttctgttgactagctctggtccagaaactacatttc

SEQ ID NO: 24096 - DNA, 201 bp, Homo sapiens
acacaaggctattggcaatctgaatctacaccatcttaagatacatgggaagtcattactgtaacttgtcaagtttgataaatgcagccaaatcacagcaracatgcccagagttaggaggtatatattttggtgtccatttttgccacacactggccctcaaactttggtgagactatcgatgtatagaactcagcatct

SEQ ID NO: 24097 - DNA, 201 bp, Homo sapiens
cttctctgacccttagaaggttctcatttcaaaatgaaaatacagaaatcatgggttttgtgagattatataatactaatcacttaacctagtgcctgatratcataagcactcaataattatttgctgagttaaagaatggaaaaaaacaagctgattctcttggacctcagggtttcaaaaagctattctatttaagcc

SEQ ID NO: 24098 - DNA, 201 bp, Homo sapiens
atataaacagagtgcatgatcacaacagtatataagtctagaaacctaggttaagtcgtgtttttttgtacatcatgtttttttttttgttttgttttttkttttttgttttttttttcctgaagaggagttcgaggacttcatgctttcaaagaacttttgaacaatgtttgttgtatcagtcactgtattatccatgta

SEQ ID NO: 24099 - DNA, 201 bp, Homo sapiens
actttgcatcaagtcttcgataaatattcacattttattagtagtgtcttttttccagtggagagttaagagaagcaataaaccaactgacctctttgcaraatatttgtgctacagagataccttccctgaagtgggtcagattccatgtgatatgagttatcttctgtccagaacagttcaggtctctcgttttcctct

SEQ ID NO: 24100 - DNA, 201 bp, Homo sapiens
aattcataaattgcatacatagattattgatctcagggatctagaatctccacaaaacatttgggagatattactgtgtaagtcttcatatacatctccamaatgttgccattttttggcaactcagacaataatgttcttttcttccttccttttggaagcatttattgtctaaaccattttattttatactttaaatgt

SEQ ID NO: 24101 - DNA, 201 bp, Homo sapiens
tgaaggtctttacttactttgccaaatacctttttattgtttttgcagttatttctatagtatttgttaagtgtgctgtacattaaggaaataatcatacwccatttatggtgtttccaactttatgaacattttagtaagagatattttagagtgtctacattcagaggcttattttttaatcatctaaatctttgtcat

SEQ ID NO: 24102 - DNA, 201 bp, Homo sapiens
gtgctagtgcattcttcactgtctcccgcaagggcagtcctcactcagctgatggggtgaacagtgataataatttagatgggtaggactcttcttgcgcrcttggaaaagtgctaagtgctttatactgtttatcttatttaccattccttggggttggtactgtaattctctctgtttgacagataagaaaactgagtc

SEQ ID NO: 24103 - DNA, 201 bp, Homo sapiens
gactaagattattggtaatgtactcagattgtttaaggggaatatttaatttctagtgccgtgatgctattctttttttttttttttttttttttttttgkgactgagtcttgctctggcacccaggctagagtgcgatggcacgatctcagctcactgcaacctccacctcctgggttcaagtgattctcctgcctcagc

SEQ ID NO: 24104 - DNA, 201 bp, Homo sapiens
tccaatgcagaacctgttttttcatcattttatatctcagctccttcatgaactcaccagaccttcctatcctttgatgtggtacagagaatgtgcaaacygatttacctgccctaatgttctctggccagattgccgcctaaacccctcagtatggaaattatgttactgccaatatggatcaccatctccctggtgtcc

SEQ ID NO: 24105 - DNA, 201 bp, Homo sapiens
taacacaaatgataatttgtattttgtgagatggtgaagagcatctatttgggcttctctagaagggcttatgataattctgcctttcagtgctacctttrttcttagaattgagctctttcctcagtagtaattcacttcaaactccaccaacatcaacaaaaattagaacagtttgaaacgctttctacactttttttt

SEQ ID NO: 24106 - DNA, 201 bp, Homo sapiens
aaatgatgaatcaagctaatttccataatcctgttttattagtactggcccatgggtggtacagcacacacaaaccacaaatagtgtcaaattcctcagtrgaaaccaggctactcctgggccagcccagatttgtggatcttgcctgataccagttcagggcagccaacttgatgtggcatgtcctactcacatggatct

SEQ ID NO: 24107 - DNA, 201 bp, Homo sapiens
gaaaagggcaaaagcaagatgaagggaaaaaatgatgaatcaagctaatttccataatcctgttttattagtactggcccatgggtggtacagcacacacmaaccacaaatagtgtcaaattcctcagtggaaaccaggctactcctgggccagcccagatttgtggatcttgcctgataccagttcagggcagccaactt

SEQ ID NO: 24108 - DNA, 201 bp, Homo sapiens
aaccacatacagtcagaggagctaatgactgaaaaatgctccttgttcgttgcaaaatacccaagacccagaaaaagaagtcttccagggctcctaaggtrgaaattccttttaggattttaaggccacaagtaacagagtcctaaagcagtagattttatcacagtttcaaaaaatagctatgtaattcaactacagttg

SEQ ID NO: 24109 - DNA, 201 bp, Homo sapiens
tggccaaatcaaaaggattcatatattctttatatagggctcttcacatcagctcacatttctgtttctaaactattaaagccctaacgacttatgcaaaygtttataactggatataaatgtttgagtctgggctgcccctgtagggggttttccctcttgattcaggttgttatcaagtattctctgggggaaataacc

SEQ ID NO: 24110 - DNA, 201 bp, Homo sapiens
gaaagtcaaaatgtccctctggccaaatcaaaaggattcatatattctttatatagggctcttcacatcagctcacatttctgtttctaaactattaaagmcctaacgacttatgcaaatgtttataactggatataaatgtttgagtctgggctgcccctgtagggggttttccctcttgattcaggttgttatcaagta

SEQ ID NO: 24111 - DNA, 201 bp, Homo sapiens
tcattttgatgaatttagggtttagatgactaaattgcagctttgttgtgaaactttctatagaaagttatttttttcctttttttaggtctaacataagrccagactatgcagactccaatttccacgacttcaagatgcataccttcactcgagtcacatcctgcaaagtctgccagatgctcctgaggtaagcctgct

SEQ ID NO: 24112 - DNA, 201 bp, Homo sapiens
cactcttgagcttttacccaatcttcttcaactctgagaattaggatttaatgggatgggcgttagcaatgaggtgagatcagtatgggaatcaggaattkgatgggggatatctttcggtccattactttctaataagctcagcacttttgacctggcctcatcagaatggttgttttgaaacaggaaagtcaaaatgtc

SEQ ID NO: 24113 - DNA, 201 bp, Homo sapiens
tctgttttactttgctgtaattcaagtaatcagtcaccccactcttgagcttttacccaatcttcttcaactctgagaattaggatttaatgggatgggcrttagcaatgaggtgagatcagtatgggaatcaggaattggatgggggatatctttcggtccattactttctaataagctcagcacttttgacctggcctc

SEQ ID NO: 24114 - DNA, 201 bp, Homo sapiens
tctctcttttccagggtattgataactccctaaggaaagggattacatctttcccttgccctttcatccctgacacctagtagaatttatggcatatgcaratactcaataaatatttaagtgaaggatgaaatgaaaataaaatcataacttctccaagattaagaattactaagaggcaaactagtgttataagaaagc

SEQ ID NO: 24115 - DNA, 201 bp, Homo sapiens
cttgccttcactaggtggaacatttcctttaaggttgcaaagggaggtcagtgcgatagctcacacctgtaatccctgcactttcagagaccaaggtgggyggatcacttgagttcaggagttcgagaccagcctggccaacatggtgaaacccccatctctactaaaaatacaaaaattagccgggtgtgatggtgcatg

SEQ ID NO: 24116 - DNA, 201 bp, Homo sapiens
taaacagtctttatttgctttggctaaacttagagttaacggatggactcagtgtacaatagcatagacacaaaactgagtgccagttctcactcactttrggatacactgcatgctgtctttccattcctcctcatttgctgcatttgtatatttgttatttttctgttagtgaatagtaataaataactcctgttaagc

SEQ ID NO: 24117 - DNA, 201 bp, Homo sapiens
tggaggcttttctggtaggcggccttggggctgtccacctccagagccttaacagctagcccaggtcatcctgggttcttcttcccttagccctcacagarcatcagctactattcctgaacactcctcccatttccactactttcctgtctactgcagccatcttggttccagtgcctcacctctcacttgggtggttga

SEQ ID NO: 24118 - DNA, 201 bp, Homo sapiens
gaggtgatagatgctacggtggagttatgtccggggtcctatggggacacaaaggggacacagaccatgggccagagaaggctccgtggaggagtgggtgrcctcactgggttcaggatggtacatgtccaccatgtagaagacacagagagaacaagggcttcttgcttggaagcatcctggaggcttttctggtaggcg

SEQ ID NO: 24119 - DNA, 201 bp, Homo sapiens
gagccaccaggcctggcctgaaatatttttaaaagccaataaattttcattttaaatgaggtgatagatgctacggtggagttatgtccggggtcctatgrggacacaaaggggacacagaccatgggccagagaaggctccgtggaggagtgggtggcctcactgggttcaggatggtacatgtccaccatgtagaagac

SEQ ID NO: 24120 - DNA, 201 bp, Homo sapiens
cccgccaccatgcctggctaattttttttttttttttttgtatttttagtagagatagggtttcactgtgttggccaggatggtctcgatctcctgatctygtgatctgcccgcctcagcctcccaaagtgctgggattacaggcgtgagccaccaggcctggcctgaaatatttttaaaagccaataaattttcatttta

SEQ ID NO: 24121 - DNA, 201 bp, Homo sapiens
ctggagtgcagtggcactatctcagctcactgcaagccccacctcccaggttcacaccattctcctgcctcagcctcccaagtagctgggactacaggtgyccgccaccatgcctggctaattttttttttttttttttgtatttttagtagagatagggtttcactgtgttggccaggatggtctcgatctcctgatctc

SEQ ID NO: 24122 - DNA, 201 bp, Homo sapiens
tgttaagtggttgctgtgagcctgtctgtgaactaggtgatggaaatacaacagtgaagaatcactttgattctactgcccttaagaaattttccgttgtyagattgaaagaccaatgaacagatcactggcacggcttatgtttttatatactcttcaggggtgtctaaatttatgcagatatttttcatattgaagcaa

SEQ ID NO: 24123 - DNA, 201 bp, Homo sapiens
cacgcctggcctcggtgcatgttcttcttgaacatcctgcttattggaggcacaaacagccacctgcctgggaattgggaaggggtgtgtgggagcaggarccaccttgagcagtggtcaggtgtgagaacacccctcctatttttacacaggcatcgtcctttgtacagagtgggggaaggccaagagaccatcttgaac

SEQ ID NO: 24124 - DNA, 201 bp, Homo sapiens
ctgggttcacgccattctcctgcctcagcctcctgagtagctgggactacaggtgcccaccaccacgcccggctaattttttgtatttttagtagagatgrggtttacactgtgttagccagaatggtctcgatctcctgacctcatgatccgcccacctcagcctcccaaagtgctaggattacaggcatgagccaccac

SEQ ID NO: 24125 - DNA, 201 bp, Homo sapiens
agggagggatgaagagaagttggctaatggctacagatatacaatttgatagaaaaaataaatcttagcctgtgatagatcactaaagtgactgtagttarcatgactctatgtacatttcaagatggctggaagagaataatttgaacattcccagcataaagaaaagttaaatatttaagttgaggtatatgccaattg

SEQ ID NO: 24126 - DNA, 201 bp, Homo sapiens
tgtttagtgtagcactattcacaaacaccaaaatatggaatcgacctaaatgccaacaatagatgaataggtaatgaaaatgtgatatatgtacacaatgsaatattattcaaccataaagaatgacatcctgtcatttgttgcaacatggatgggactggagatcattatgttaagtgaagtgagccaagcacagaaaat

SEQ ID NO: 24127 - DNA, 201 bp, Homo sapiens
atttatacgaaaaaatgttcagcatcactaataatcacagaaaagcaaattaaaaccacaatgaaccatcatctcactccagttacaatggcttttataamaagggcagggaataatggatgctggtgaggatatggagaaaatggaaccctcatatactgttggtgggaatgtaaatggtaaaactaatatagaaaactg

SEQ ID NO: 24128 - DNA, 201 bp, Homo sapiens
atattgaactgaattggaagcgcaactttataaaagggaacactggtttgtggtgtgaaaattctttaacctttttgaaaagccgacctatgctgctgctkcttatactttgaaaattaagaaaatggtttgttcaagcactgtagttctcacttataagtaggaactgaacgatgagaacatgtggacacatggcagtgg

SEQ ID NO: 24129 - DNA, 201 bp, Homo sapiens
tatacctcctgaatctaaaatatgagttgaaattacaaaaaataggtagaatatctgagtaaaaatttctcagaagacatacagatggctaatatttataygaaaaaatgttcagcatcactaataatcacagaaaagcaaattaaaaccacaatgaaccatcatctcactccagttacaatggcttttataacaagggca

SEQ ID NO: 24130 - DNA, 201 bp, Homo sapiens
ggaaatgctccagaacataagtctgggcaaatattttttgtgtaagatctcaaaagcacaggcagccaaagcaaagatagacaaataggattatataaagrcaaaatgtttctacacagcaaagataacaatcaacaaagtgaagagacaactcacagaatgagaaaaaatatttgcaaactatccatataacaagagatt

SEQ ID NO: 24131 - DNA, 201 bp, Homo sapiens
tctggtggtgttgaatagagagagattatgactcaagcctaccttgctttttttttcttttttttttcttttaatgagactgagtcttgctcttcagatgrcccagcccagagtgcaatggtgtgataccggcccactgcaacttccgcctcctaggtttaagcggttctcccatctcagcctcctgagtagctgggattg

SEQ ID NO: 24132 - DNA, 201 bp, Homo sapiens
tacagtctggcatatcttattgccaattgtttgattttatgtggaagtgggtgacacagttattactgagtctctttataaaaatcttatttacgtaaaayatacaaggtaaggaaatgcattcattaacaactgaagactgagtgagtaaaaaaataacttgtggacactattttcttgtataattgaaaattatgcacc

SEQ ID NO: 24133 - DNA, 201 bp, Homo sapiens
aggatagtgtctgacagagtaagacctttgtaagtgttagttctactaattattatttttcagattcctgcattatttttataacagcagatgacaagcartgtgaaaaagtaccattataagtacaatgtaagtggaatacaaatgttagccatggttttctacacctttgaggaaataatattgatttttgttccccac

SEQ ID NO: 24134 - DNA, 201 bp, Homo sapiens
ctattatccctaatctttaaaacaatttagcaaggtattactcttttatttgtttaagccagaaatatttttgtgttaagtggttgctgtgagcctgtctrtgaactaggtgatggaaatacaacagtgaagaatcactttgattctactgcccttaagaaattttccgttgtcagattgaaagaccaatgaacagatcac

SEQ ID NO: 24135 - DNA, 201 bp, Homo sapiens
tacaattgtgatacaatgatttaaaatcagattacatttatttatgagagtattattgatattgctgtttttaacaacatgcactggtgggtcactgtagycaaaggaaaatactaaattcaatccgtgattgaagccattaagatcaaagctgacttcctggagtttgactgaagtgtgtctgccatgcgggtaagagcg

SEQ ID NO: 24136 - DNA, 201 bp, Homo sapiens
gtctgtgttttccctcagtacccttcattgttatggtctttcctaatagactgttggttttttgagagcaggaagcattgtatcctcattttgctccctgmagcttttggagtgtgtgtctggtgtatctagcacagaatgaagtgttcagtaaatacaagaaacttatagaaagggtagtgaagtggaaagagcaataac

SEQ ID NO: 24137 - DNA, 201 bp, Homo sapiens
agaatctgaaaaatatccacttttaatcaaataagaaatatatcattcagaaaatggcaaccacaaaaagcttctcagagaataaggtgcaagtgaatctrcttagaatacacaagtattctcactggagtacgatgtgatgatgagaggggtgggccagagactggtcattcttgcccatcaaacctgtatcaacctgaa

SEQ ID NO: 24138 - DNA, 201 bp, Homo sapiens; identical to SEQ ID NO: 2927

SEQ ID NO: 24139 - DNA, 201 bp, Homo sapiens
cagtttgggagtccgaggcgggcagatcatgaggtcaggagtttgagaccagcctgaccaacatggtgaaaccccgtctctagtaaaaatacaaaaattarctgggcgtggtggcaggtgcctgtaatccaagttactcaggaggctgaggcaggagaatcgctttaacctgggaggcggaggttgcagtgagccaagatc

SEQ ID NO: 24140 - DNA, 201 bp, Homo sapiens
ggctcactcctgtaatcccagcagtttgggagtccgaggcgggcagatcatgaggtcaggagtttgagaccagcctgaccaacatggtgaaaccccgtctytagtaaaaatacaaaaattagctgggcgtggtggcaggtgcctgtaatccaagttactcaggaggctgaggcaggagaatcgctttaacctgggaggcgg

SEQ ID NO: 24141 - DNA, 201 bp, Homo sapiens
gtggctcactcctgtaatcccagcagtttgggagtccgaggcgggcagatcatgaggtcaggagtttgagaccagcctgaccaacatggtgaaaccccgtytctagtaaaaatacaaaaattagctgggcgtggtggcaggtgcctgtaatccaagttactcaggaggctgaggcaggagaatcgctttaacctgggaggc

SEQ ID NO: 24142 - DNA, 201 bp, Homo sapiens
tgattgcagtgatttgtttacatgcctctctcttttccagggtattgataactccctaaggaaagggattacatctttcccttgccctttcatccctgacrcctagtagaatttatggcatatgcagatactcaataaatatttaagtgaaggatgaaatgaaaataaaatcataacttctccaagattaagaattactaa

SEQ ID NO: 24143 - DNA, 201 bp, Homo sapiens
tttggtaagttagatgcatggtccagctagcttaattatctgtcttgcgtgctggggactatatggagagtgattcctgtccatcatagtattggtctcawaaggtcaatttctagttcagacagcttcaggtctcctttggtctccaggatttgcatatttatctgttttatctttagttttgatggaaaaataatgcgt

SEQ ID NO: 24144 - DNA, 201 bp, Homo sapiens
agcctgggcaacagagtgagaccccatctcaaacaaacaaacaaacaaaaacattaagagttggaagaataataagaaaaaaagtcagtaaggagtggagwgacaatacagatggagcaggcaatgaattaatgtggctttcagatcctttacttcagttttttggtacatttggcctgatgtagaatgtcctacgatgta

SEQ ID NO: 24145 - DNA, 201 bp, Homo sapiens
tgagtttgctgtgacagcttgatttttattctcagctttattacaatttctatgggtaaatatacttaactctaaattttggggctgcattcacccaaacrgaagcccttggaataaatactggcctggtccccactgtggaggcaatcattgtttcctaagttggggagaaagccacaggatggagtggagagggcaggt

SEQ ID NO: 24146 - DNA, 201 bp, Homo sapiens
agcccccctgtattatacttaatttacatatttatttgtgtgctagtggattagaacactgtttattttattcctccatttcgatcatttactctattagrcttctaagagcagttaaaccaatcttctcacctacaatggacataaaaccccagtttaattggggtgttatgaaaacaaaatactctgtttgtagaatcc

SEQ ID NO: 24147 - DNA, 201 bp, Homo sapiens
tactcgaagaaaacactggggaaatgctccagaacataagtctgggcaaatattttttgtgtaagatctcaaaagcacaggcagccaaagcaaagatagasaaataggattatataaaggcaaaatgtttctacacagcaaagataacaatcaacaaagtgaagagacaactcacagaatgagaaaaaatatttgcaaact

SEQ ID NO: 24148 - DNA, 201 bp, Homo sapiens
tgcagtccttatcaaaatatcagtgatattcttcacagaaatagaaaaatgttctaaattttatctggaaccccaaatgaccttgaatagctaaagcaatyctgagcaacaactacaaagctggaggcatcacagtatctgacttccaaatatactacaaaaatatagtaaccaaatcagcatggcatggaaacaaacatg

SEQ ID NO: 24149 - DNA, 201 bp, Homo sapiens
taaaatgtttacttggacttggtggtattaacactttttaatgttaataatgacattttttgtaaagttcatgtagacttcatgcatcattgttttctcarttctaaaacttgtttggcttattttcaggtttaccaaagatgcaggtcattaggaactattctggaacaccacccccagctctgcatgaaggaccccctt

SEQ ID NO: 24150 - DNA, 201 bp, Homo sapiens
gtggggggttggggagggagagcatcaggaataataggtaatggaagctgagcttaatacccaggtgatggtttgatctgtgcagcaaaccaccatggcasatgtttacttatgtaacaaacctgcacatcttgcacgtttactctggaacttaaaagttgaagaaaaataaaataggaggggagggcaaagagtgattgt

SEQ ID NO: 24151 - DNA, 201 bp, Homo sapiens
ctttgcattaaaaaaatcttcttctgaataaaagtttatgtatacctatcagtaaaatttctaacagtatagaaatgttaaaaaatcaatagaaaagcgcratttcatagcagtttcacctcctagatagtcaccattgttgacagttcggtgcatgttcttcttttttttttttttttttttttttttgagagggagtct

SEQ ID NO: 24152 - DNA, 201 bp, Homo sapiens
ccctccttgcttttgcctttagttgaggtactcatcactgggattattgaaattgtcttctaggtgttttcttgccatcagttttgaatcgtttcaagctmatcttcaacataatcttccaaaaatgtagatctgatcattttactcatgggtttatcaccaggggaaggtatctgagttaccagtggcgaatctgtacag

SEQ ID NO: 24153 - DNA, 201 bp, Homo sapiens
accttgaatagctaaagcaattctgagcaacaactacaaagctggaggcatcacagtatctgacttccaaatatactacaaaaatatagtaaccaaatcarcatggcatggaaacaaacatgtagaccaatggaacagaatagaccacccagatataagcctacacatttacagccaactcatgttagacataggctccaa

SEQ ID NO: 24154 - DNA, 201 bp, Homo sapiens
ttgctttaacagttcaaatgacagtgctactcaaagcaatctatagattcaatgcagtccttatcaaaatatcagtgatattcttcacagaaatagaaaamtgttctaaattttatctggaaccccaaatgaccttgaatagctaaagcaattctgagcaacaactacaaagctggaggcatcacagtatctgacttccaa

SEQ ID NO: 24155 - DNA, 201 bp, Homo sapiens
agccgtaataaaaagtctctcattaaagaaaagcccaggacctgatggcttcactgctaaattctaccaaacatttaaagaactgataccaattcaactckaactcttcaaaaaaaaaaaaaactgaagaggaagaaatactttcaaacttattccacaaagctaacatcaccctaataccaaaaccagacaagcacacaa

SEQ ID NO: 24156 - DNA, 201 bp, Homo sapiens
ggcagttgcttctctgcacttcttctcagctctgtcttgttcccagccttaccttgggcccctgctgctctttctgcttattgccacctagaattcaggawaacttttcttccttcaagttctgttgctgtggagggcaatgccaagggcacacttacctgtactgttgcttggtttcccactatgcagccatacgaaagg

SEQ ID NO: 24157 - DNA, 201 bp, Homo sapiens
aagataaacaatattgacaaacctttaaatagactaccaaaaaagagagaaggcccaaatgaatacaatcagaaacaagaaaggcgacataacaactgagrccacagaaataaaaagaatcattagaaactattataagtataggccaacaaattgggaaaactagaagaaacagataaatgcctggacacatacaacctg

SEQ ID NO: 24158 - DNA, 201 bp, Homo sapiens
aacctctattcttcaggccacgtggtgttacttatgaacatagtgaccttgggagcattttctgaaaatactcttccccctccttgttttgattctggaayagtttcctttttcctcacaattctaccttccttcaacagttgcatttacagataatatccttcaccgtttgtttctttatgcatcactagtgtgtgtata

SEQ ID NO: 24159 - DNA, 201 bp, Homo sapiens
agcaagaacaaactaaacccagccttaaaaatgaaaagttggttttctgaaaagataaacaatattgacaaacctttaaatagactaccaaaaaagagagraggcccaaatgaatacaatcagaaacaagaaaggcgacataacaactgagaccacagaaataaaaagaatcattagaaactattataagtataggccaac

SEQ ID NO: 24160 - DNA, 201 bp, Homo sapiens
gaaaatactggcataaaaacctctattcttcaggccacgtggtgttacttatgaacatagtgaccttgggagcattttctgaaaatactcttccccctccytgttttgattctggaacagtttcctttttcctcacaattctaccttccttcaacagttgcatttacagataatatccttcaccgtttgtttctttatgca

SEQ ID NO: 24161 - DNA, 201 bp, Homo sapiens
acttggataattaagatgaaaataacaattatataactgtgtagcagaaaagaagtctttaagtttggcaccttgaaagcagtgctcactgttgccactgrtactcgaaaagtaatgactctgtgggaaaggtctgcaaagaaaggaatctccctttctgagcattgcagggttcaacatgctatgacctgaaactggaac

SEQ ID NO: 24162 - DNA, 201 bp, Homo sapiens
gggctaccatctgtagccctggaaactctgctttgtaacttggccaaaggagatgccaagtcagtggcttttcagtaccatgctataggtggtacattccrcagatatcctgggcacaaaccctgagccagcctccccacactgctagtatcccttttgagacctccctcatttgggactagtagcacactaattgtttgc

SEQ ID NO: 24163 - DNA, 201 bp, Homo sapiens
ctattattgtagtagttatgttttagaagataaagtatatatctattaaatatttagaagaaaatcctgaaaaagaagtaatgaacctagtgagctacttsgaacatttatcatcaataaactgttccttacttagaacgtcagatatggagtggacttcctttgccatatctatggttatgctggttgaataccattcca

SEQ ID NO: 24164 - DNA, 201 bp, Homo sapiens
attccaacgtatgttcttaccctcaagggttgaagatagtaaaagccattattggagacttaaatttcaaaatggtggcatagaagcaagctggcttcaayggcccccacagaaaaccaaaatcaaatgtacagcagcaagactaacaatatcccagaactcagtatgaggatgagtgagttcctggggccacagagaagt

SEQ ID NO: 24165 - DNA, 201 bp, Homo sapiens
tactgaactggagtccagagacccaggctaaagccaagactctggccgtgttcaatgatgcttttgcctaccaatgatcagtaaaggcttattaatatatraaatgatgaaatggtgttctgtgtgatttggggaccatccctgaacctctctgtgttttagttagctcatttggaaaataagagggtttgaataaacatt

SEQ ID NO: 24166 - DNA, 201 bp, Homo sapiens
agcatgttatattgcttttaaagtaacatgccataagttacattgaatttcaaggtaaagttaaaaggtcaaagatgtatatggattgctagcatcttttyggtctcagatgtttgcaaagctgagtcagacttaggaggtaggagtgtgtatgaagcagagtggggctgggctatgtgctggttataaactgtgaaactc

SEQ ID NO: 24167 - DNA, 201 bp, Homo sapiens
ccatctcttttgtttttcagtctattccaatctggcatttgttcccatcaccacattacaattacttttatcaacatcactcatgaaatttatattctgtwtactgggacacttctctaccctcatcttaatcagctgtttgccagttttctactcagttcacgtctccctgcttcttgaaaccttcttcctctgctgctt

SEQ ID NO: 24168 - DNA, 201 bp, Homo sapiens
ttcttcttttcattgggagttagtgttgatttctcagactcttaggttgtgtctaattatagtgctgattccacctcaaaatattgctgaactgacagtgrtcaaaggaaaccaaaaaagtagtccaaagaaagaaatgatgaggctttgcttatttttcagttgccaagaataacataaaaatctctttaggtgggagaa

SEQ ID NO: 24169 - DNA, 201 bp, Homo sapiens
ggagtttgactgaagtgtgtctgccatgcgggtaagagcgcagtcctcatggctactgctcgctgccaggttggacggagcattggtgggtaaagggtgcrgcctggggcttgggttggcccagagccttagggttgaagcaaaccatggagaagttctctttgactagtaaaaacatactaacaagtgtttcatctattt

SEQ ID NO: 24170 - DNA, 201 bp, Homo sapiens
gtttcaaagtgagtcagggtaggcccggctcagtggctcatatctgtaatcccagcactttgggaggccgaggcggggggatcacttgaggtcagaagttsgagaccagcctggccaacatactgaaaccctgtctctactaaaaatacaaaaattagccaggcgtgttggcgggcacctgtcatcccagctacttgggag

SEQ ID NO: 24171 - DNA, 201 bp, Homo sapiens
tgaggtgggaggatcacttgagcacatgagatcagattgaggctgcagtgaactgagattgcaccactgcactccagcctgggtgacagagcaagaaagamcctgtctcaaaataataataataataataatgataataataataataataataataaataatttatttttaattttgggggtacatagtaggtgtatata

SEQ ID NO: 24172 - DNA, 201 bp, Homo sapiens
tctgtagtgaatcttcccagcccccaaaggcaaggttgaaaatcctggtctaggctgctgctgttcgagtccaagtatctctaggatttacccaatcagtkgcaatttatcagcagaattctaatcagtcttttcttttgttgaaaattgtttgttaaaaaaggaagaaattatttcaaaatatatggtctttataaacac

SEQ ID NO: 24173 - DNA, 201 bp, Homo sapiens
tattcctagtgcttgacccctaataggttcttggttgatgattaactgaatgggaaataaaccttggatgtagatttctagtaggtgttatattttgcaaygtgatttaacagttctagaccaattgttacttgggcttctgagcactatacattattcaccatacggaattgaatgccattgagtacattaaaaatagtc

SEQ ID NO: 24174 - DNA, 201 bp, Homo sapiens
aatgtggagaacaggaactcttatacactgttggtggtaatgtaaattagtatagccattatggagaacagtatgaagatttccccaaaaatagaactatygtgtgatccagcagttttcgctactgactgggtatttattcaaaggaaagaaaaaaagtatatcaaaggaatacctgcacccccatgtgtattgcagcac

SEQ ID NO: 24175 - DNA, 201 bp, Homo sapiens
cccctccttccctcttttccggaatttgcgtctgtgtgattcctaggtaatcattactgaaagcatgatcagcattttatggtttaaaaaaaaaaaactgyactgggtgcatttccactaaacgtatagagaatatatctgagggaacacagtagagctccatgtggatactgattgattagtattgggcccgtggagact

SEQ ID NO: 24176 - DNA, 201 bp, Homo sapiens
atttgtgtcatatcatttttgaatttttttttttttttgagacagagtcttgttatgttgtgcaggctggtcttgaactcctggcccaaggcaattctccyaccttcagcctcccaagtagctgggattatagcctcaagccactgtgcctgtctctaatatcattttctcttgtttttgaaataagaattaatatattac

SEQ ID NO: 24177 - DNA, 201 bp, Homo sapiens
aatttgaggcattcctgttctcatcaccaagatttaagagatattaacactttgtcatatttgtgtcatatcatttttgaatttttttttttttttgagayagagtcttgttatgttgtgcaggctggtcttgaactcctggcccaaggcaattctcccaccttcagcctcccaagtagctgggattatagcctcaagcca

SEQ ID NO: 24178 - DNA, 201 bp, Homo sapiens
aagggtcttgttaacttcactcttcacatgtccatattacctagaaaagtgcctggtatgtagtaggtgttcaagacataattattatagaaggaatgaamctcttttgctactattttagttcatgccaacatcatcttttgcctggactattacagtaaccaagtacccccattttttcgaagagatcatttaattatt

SEQ ID NO: 24179 - DNA, 201 bp, Homo sapiens
agaataccttgtacattggttctgaaaatgtacatgtcattatccatttgaacctccgtatggggccatcctcatcaatatacacatgtgttaatagtttscttcactgtaaaacaaacaaacaaacaaagaagttccttgcttccatattcccccgttagttatcaccttattctcatttccctttctcagaaaaatttc

SEQ ID NO: 24180 - DNA, 201 bp, Homo sapiens
ttttccatgaagtccccatgcctttccagacttacttactgatttttctatttgatacttaattatttgtaatatgcatttcatagcttattatttagtgrcattttctaattttatcaagagtttttttttttttttgagacggagtctggctctgtcgcttaggctagagtgcacgcaatctcggctcactgccagctc

SEQ ID NO: 24181 - DNA, 201 bp, Homo sapiens
ctaaccacttagttattactagtgattataaggaatacattatatatgtttatagttgagccatactaccttttacaattaatatattgaaatattttaastgaatttaacattcagttaaatgttttatttaactgaaaatgctgcatacataaaatgtcctcttgctggaagtacagatatagatagtgtatatgttcc

SEQ ID NO: 24182 - DNA, 201 bp, Homo sapiens
accatgtttgcaatacaaatggggttgatctagtatagatcaccacatattttctaattttcaaatacagtggattgtttttattatttttctcgaatccyctgtagcaattgatgttactgatcatccccttctcctaaaactctctcttccctttactctcaccacaccatattctcctgattctcttgtacctcttat

SEQ ID NO: 24183 - DNA, 201 bp, Homo sapiens
tggagaagtctatgaggacttaatgaaggcagaggaagcacatcagcccgtaggacttttacttgtttttaaagttactctgaatattttattaggaaagrctaattaacataataatttatgtaacatctgctgggattttttttaacctttgcttgcttataactatataattatgacttgttactgcatttggagaca

SEQ ID NO: 24184 - DNA, 201 bp, Homo sapiens
gataggatgattgggttagtggtaatatgcaaagacagagctgatctcgagcctttgctcttatatgctaggcttttttttttatgggtttcgtttggctrtataatcttcagatgagtgaaggaatgtctgcagagaaggaaattgaatttcatgtcctagagcaggcaggttccttggactgtatgacaggcatgtcag

SEQ ID NO: 24185 - DNA, 201 bp, Homo sapiens
gccataaaacaaacagttaatttgtggatatgagagacttgatggccaggtgtgatggttcatgcctgtaatcccagcactttgggaggctgaggtgggcrattcacctgaggtcaggagttcgagatcagcctggccaacatagtgataccccatctctactagaaatacaaaaattagccgggtgtggtggcacatgcc

SEQ ID NO: 24186 - DNA, 201 bp, Homo sapiens
atgtctatgcagatattgggagggtagaagtatctttttggagaattgctcagagttgaagttgagggcttctataaataagggttatattatatatggtwaaataaaatctgagcaggcatcagaatattccattgttttatttccttcttctttgaagttcatcatgtaggaaagccctgataatgtctgcttccagct

SEQ ID NO: 24187 - DNA, 201 bp, Homo sapiens
agaataatataggtaaatcctgaagtttgattttgcctatggttcaaattttgctgcttatccattattaaatctgtagtactcctttttgataagtcatrgagaataaaagaaaataactcctgcagcatccatgacaatgcatgaagaacagcaagccttgtgtatctccacaggatggcttcttcccagtgtctttag

SEQ ID NO: 24188 - DNA, 201 bp, Homo sapiens
ttggttaatattgctttttatatttttatattatttctaattcttaataagattctgcatggggcctagtaaatcattgtgactaaccacttagttattamtagtgattataaggaatacattatatatgtttatagttgagccatactaccttttacaattaatatattgaaatattttaactgaatttaacattcagtt

SEQ ID NO: 24189 - DNA, 201 bp, Homo sapiens
ttgaatcaactgaaaaaatcaatgtgctatataaataatgccttttaaagtatttcccatgtctttgtggaatattggctcagaggtttgcaatctgggcrgcaatgtaaagtttcattcataaaaagtattctagattttttttttaagatgtcagaggtctttagcagtggcttccatgaacagttaccatgggtctac

SEQ ID NO: 24190 - DNA, 201 bp, Homo sapiens
tgggttcttttactcttaaaatagtgttcctgttcttctatttcttttggttaatattgctttttatatttttatattatttctaattcttaataagattstgcatggggcctagtaaatcattgtgactaaccacttagttattactagtgattataaggaatacattatatatgtttatagttgagccatactaccttt

SEQ ID NO: 24191 - DNA, 201 bp, Homo sapiens
aggctctgaatatattctgaagatggagccagcaggggtttattgatggactagattagggatatgagaagagaggagtcaagtatgtctccagaattttygccctgagaaactggatgatgaagttcccatttactgaaatggagaggactagaggaagtatggtgttggggtgtatgtggggagaggggaaggaatatc

SEQ ID NO: 24192 - DNA, 201 bp, Homo sapiens
gtgggttcttttactcttaaaatagtgttcctgttcttctatttcttttggttaatattgctttttatatttttatattatttctaattcttaataagatyctgcatggggcctagtaaatcattgtgactaaccacttagttattactagtgattataaggaatacattatatatgtttatagttgagccatactacctt

SEQ ID NO: 24193 - DNA, 201 bp, Homo sapiens
cttcttcagcatctgtgggttcttttactcttaaaatagtgttcctgttcttctatttcttttggttaatattgctttttatatttttatattatttctawttcttaataagattctgcatggggcctagtaaatcattgtgactaaccacttagttattactagtgattataaggaatacattatatatgtttatagttg

SEQ ID NO: 24194 - DNA, 201 bp, Homo sapiens
gatcagagagatctggatccagattcttggctttgttacctcctctctgtgtggtcataacacaggcaaagcacttcaagctcagtgcttgcttggcacgraatagctggcaaagagccagcagtgatggaaattcttactcttactggtaggaagcagtatgggcatcaagtttgaaaacatgactttcagtccaagctg

SEQ ID NO: 24195 - DNA, 201 bp, Homo sapiens
taccttcttcagcatctgtgggttcttttactcttaaaatagtgttcctgttcttctatttcttttggttaatattgctttttatatttttatattatttmtaattcttaataagattctgcatggggcctagtaaatcattgtgactaaccacttagttattactagtgattataaggaatacattatatatgtttatag

SEQ ID NO: 24196 - DNA, 201 bp, Homo sapiens
tctggatccagattcttggctttgttacctcctctctgtgtggtcataacacaggcaaagcacttcaagctcagtgcttgcttggcacgaaatagctggcmaagagccagcagtgatggaaattcttactcttactggtaggaagcagtatgggcatcaagtttgaaaacatgactttcagtccaagctgctgtgcaaatc

SEQ ID NO: 24197 - DNA, 201 bp, Homo sapiens
aatttaaatgctgcagatttgtgtagagttctaataccaaagacagaagtaaatgttttccatatactttgtcttgcctgtatgcagccctcgtgtaatayggtgaattagagtggtatttcactttgtattattttgtaaatatgtcaatataataaatagtgactaaattgatttctaagagttggagtctttttattg

SEQ ID NO: 24198 - DNA, 201 bp, Homo sapiens
acataaaagctatataaatcaggggaacagatggttgagggacaattgtttgactttaacaatatcatacagtgagtcaacccagatttaaaatacaatartgctgtagtaagcagcactatcatcccctttcatttgctctggagactagcagtagatttgtaattgtcctattgtaattcttttcacaaatcatttagt

SEQ ID NO: 24199 - DNA, 201 bp, Homo sapiens
tgcttgcttggcacgaaatagctggcaaagagccagcagtgatggaaattcttactcttactggtaggaagcagtatgggcatcaagtttgaaaacatgaytttcagtccaagctgctgtgcaaatctttggacaatttaataagcctcagttttctaatctgtaaaatggagatgaaaatactcaccctacccacataca

SEQ ID NO: 24200 - DNA, 201 bp, Homo sapiens
agcagtcttgtaggaatgcattcattaaatcagtgcactttatcagaagatttattttttagccaggctggctacaattatggatcatgccagatgctcartggagggaggaagtgagatgaagtaggctaaagagaaataatcttggtcagattgaagaaggataagcactcttaattgtcaatatcaaatgaaaggaga

SEQ ID NO: 24201 - DNA, 201 bp, Homo sapiens
tttaataaaagccaccctgaccagatgtgagtttgtatctcattctggttttgatgtgcatttctctgattagtgatgttgaacatttatgtttgttggaracttgtgtgttctcttttgagaagggtctgttcatgtcctttgctcacttttcaatggagttcctgttttgtgcttgatttatttaagttcctgatagct

SEQ ID NO: 24202 - DNA, 201 bp, Homo sapiens
attgtttttcagtattctctttaatattcttattaaattgatttttgtttttgagtaatttggggcatgagcaatggtagtatagaaaaatttattactasgtagtgaaactagaataatgctgtctaatagaaatatgagagccataaatgcaagccatgtaattttaaattttctagttgctacatttaaaaagtgaaa

SEQ ID NO: 24203 - DNA, 201 bp, Homo sapiens
tctggaagaaattgtggattatattttccttgaacgtttggtagaattcactagtgaaaccatctgggcttgatgttttcttttggaaggttattaattaytaattcgacttctttagctgatacaggtctgttggtattatctatttctcctgtgtgagtttgtgtctttcaaggaattggcctgtttcacctaagttat

SEQ ID NO: 24204 - DNA, 201 bp, Homo sapiens
tgttttgtagcaagtaaaaagtgacctaaatgctttctagcatattgaagcaccaactttttatgtattgaatttaaagcagtgatttacactgctaacastgtaacatttacaacatttacaacattacatttacaacattacaacatttacaggctaacagcaaaacatttacaagtttctatagagaactttaggaag

SEQ ID NO: 24205 - DNA, 201 bp, Homo sapiens
tgaagcaccaaaggtttataggaaacttactcaggatgtgtgtttaagagtcaggatttaaatccaagtagcctgattccagagctgtcagttataatgcycacccaggagcattatgccttaggttgagcataatgtggagaatttgactcataggtttcacgataaattggaacagccaaactattgggaagggcggag

SEQ ID NO: 24206 - DNA, 201 bp, Homo sapiens
tccaggaagaatcatcttctttgaacccccacagtggaaagctccccgctctgtaggggtacgttttatcctaggattatctgtcacaactgaacaggcamaagactcccccaaaaatgcatttttccgtgtctgattttatcagtctggaataaccccatggggggagagggtgaaaaaacttggtgcagacagtgtggg

SEQ ID NO: 24207 - DNA, 201 bp, Homo sapiens
gttttggaaaatttaaatgctgcagatttgtgtagagttctaataccaaagacagaagtaaatgttttccatatactttgtcttgcctgtatgcagccctygtgtaatacggtgaattagagtggtatttcactttgtattattttgtaaatatgtcaatataataaatagtgactaaattgatttctaagagttggagtc

SEQ ID NO: 24208 - DNA, 201 bp, Homo sapiens; identical to SEQ ID NO: 2938

SEQ ID NO: 24209 - DNA, 201 bp, Homo sapiens
cactatgttgaataggagtggtgagagagggcatccttgtcttgtgccagtttgcaaagggaatgcttccagttttttcgcattcagtatgatcttggctstgggtttgtcacagatagctcttactcaaacaaccccatcaaaaagtgggcaaaggacatgaacagacacttctcaaaagaagacatttatgcagccaaa

SEQ ID NO: 24210 - DNA, 201 bp, Homo sapiens
tgagtctcataggaagtaaacttgaaaagagattgaaaaggagaaaaaagtgtatttgggtataatgattaatgattttgaaagacatgctttattttccrgaaatggaaaaatgataatcaggtattttttgtttctggttttgtttttaggtttcctcttcccaatatttaatgtgaagagtcccactggcacatatgg

SEQ ID NO: 24211 - DNA, 201 bp, Homo sapiens
ggtaatgcctaggttttcttctagggcttttatggttttaggtctaatgtttaagtctttaatccatcttgaattgattcttgtataaggtgtaaggaagrgatccagtttcagctttctacatatggctagccagttttcccagcaccatttattaaatagggaatcctttccccattgcttgttttttgtcaggtttgt

SEQ ID NO: 24212 - DNA, 201 bp, Homo sapiens
tttctcccattttgtgggttgcctgttcactctgatggtagtttcttttgccgtgcagaagctctttagtttaattaggtcccatttgtcaattttggctwttgttgccattgctttggtgttttagacatgaagtccttgcccatgcctatgtcctgaatggtaatgcctaggttttcttctagggcttttatggtttta

SEQ ID NO: 24213 - DNA, 201 bp, Homo sapiens
tgtgttgtgctaagggcttcacatatctagtcaaattctaatgacaattttattagtaggtactcttatcatccttattttatatatacaaaaactgaagyaccaaaggtttataggaaacttactcaggatgtgtgtttaagagtcaggatttaaatccaagtagcctgattccagagctgtcagttataatgctcaccc

SEQ ID NO: 24214 - DNA, 201 bp, Homo sapiens
tgagggagaatccctcccatgctcctctcccagtttctactggcaatccttggcatggcttggtttatagatgcaccgctccagtctctgctggtcttcasgtcaccttctgtgtgtatcattgtcccttcttttctcttatggacacctgtcattggatttagggcccacccaaatacagcttgatctcattatgagatc

SEQ ID NO: 24215 - DNA, 201 bp, Homo sapiens
gtgatgatcagcttttcttcatatgtgtgttggccacataaatgtcttcttttgagaagtgtctgttcatatcctttgcacactttttgatggggttgttygtttgttttttcttgtaaatgtgtttaagttccttgtagattctggatattagccctttgtcagatggatagattgcaaaaattttctcctattctgtag

SEQ ID NO: 24216 - DNA, 201 bp, Homo sapiens
catgaaatagcctcagaaggggctaaataagagaagtcagagtctaaggttcacaggagacacagcagatattagagtgctaagttgaaactggaaaagcrtgggaatatgggtgagtttgaaaacaaagtgtagatcagcatgttcctttcagtgtggtgacaaatagtgtagcaattcttcaaagattgacaaaggcta

SEQ ID NO: 24217 - DNA, 201 bp, Homo sapiens
gtttccagcttcaaccatgtccctgcaaaggacatgaactcattcttttttatgggtgcacagtatcccatggtgtatatgtgccacattttctttatccrgtctatcattgatgggcatttaggttggtttgaagtctttgctattgtgaatagtgctgcaataaacatacgtgggcatgtgtctttatagtagaatgat

SEQ ID NO: 24218 - DNA, 201 bp, Homo sapiens
aggagaccaagagatgtgacaactacatataacatgtggtcttggattgaatcctagaacaggggttgggaagatacatacacacacacacacacacacamgtatgtatatatatgtgtgtgtgtatagtaacatattttgtatatgttataaaatatgtgtgtatatatgttgctataaaagatgtgatacaattggcaa

SEQ ID NO: 24219 - DNA, 201 bp, Homo sapiens
cttgccccccacccctcgacaggccctgatgtgtgatgttcccctccctgtgcccatctgttctcactgttcagctcacatttataagtgagaacatgccrtgtttgtttatctgttcctgtgttagtttgctgataatgatggtttccagcttcaaccatgtccctgcaaaggacatgaactcattcttttttatgggtg

SEQ ID NO: 24220 - DNA, 201 bp, Homo sapiens
tcttaatctgatatcactttattttttttaaataagtgttttggggaagaagtgaatacaatttcattactcttagaatctttagcctaagcaacactggratatctagaggtatttgaaaacagaatttgcgtcggtttaatataactttatatttttccttgaaagcagaaactgaaaggggaacaggtaatgctctgg

SEQ ID NO: 24221 - DNA, 201 bp, Homo sapiens
tgctgtggagggcaatgccaagggcacacttacctgtactgttgcttggtttcccactatgcagccatacgaaaggaaatatatatatatatgtgtggtarcctttattagatgtttgcagataatagggaggaatgacaattaggaagagaaaccttaaaaatagttgatcagtctggctctacaaattaaaaggaagaa

SEQ ID NO: 24222 - DNA, 201 bp, Homo sapiens
aattactactctgaaactgaggtttagtattgtttcttttcatttgctacatctgactgaagacaggatgttctccatctgtgaataacaatagggggtaactcatattattaatggcctgagtaacaaggacagctattaggtaggtgtcatgtacatccagacagcagggagagattatcatttgcttaatcttccata

SEQ ID NO: 24223 - DNA, 201 bp, Homo sapiens
cataaaaacattcgatgtgctatcttccatgcttttgtttttgtgtgttttctctaaacaccaactgagtacagaggttttggctttagaagatggcaaargcacaaagggatggatgctcggtcgctatgtaggggaaagtcatctgctaagcaggaacaccattgtgggattattatgtgaatgaaattaaactttagc

SEQ ID NO: 24224 - DNA, 201 bp, Homo sapiens
aatccaagttactcaggaggctgaggcaggagaatcgctttaacctgggaggcggaggttgcagtgagccaagatcatgcaactgtactccagccttggtkacaaagcaagactctgtctcaaaaaaaaaaaaaaaaaaaaaaaaaaggaagacatttaaggaaggagtgatgtaagacactggaaaacatttgtactttt

SEQ ID NO: 24225 - DNA, 201 bp, Homo sapiens
ctctggactcagcaggtatttttctagagttgacacaaaggaagagctgtgagacatcttcctgtatcttgcctttgagtcctcttttattccccctggcygctttgttattaggctgaattttttttcattaggttttgtagtcctcatactattagatttattgtgggtcaccctaccagtcctaacaaggacatcagt

SEQ ID NO: 24226 - DNA, 201 bp, Homo sapiens
agtagagacagggttttgccatgttggccaggctggtctcaaacttctgacctcaggtgatccgcacatcttggcctcccaaagtggtgggatttcaggcrtgagccaccatgcccagccaagaagcattgtttaatcagtgatgctctttgtgctcttgatgcattttcttcccagcagcaataccatttgtgcctgtta

SEQ ID NO: 24227 - DNA, 201 bp, Homo sapiens
tctctcatcttgcttctcacccactccacctgtgtcacagtgtcatttgtgagcttgcttatgagtgtgcatggggtggtctcctactcagaacatgcccrgctgtgcttctgttgcttcctagctgcctctgcagcttctgtgagggaagactgttgggcaccaatggtagtgaagcctttggacctcaagcactgcact

SEQ ID NO: 24228 - DNA, 201 bp, Homo sapiens
cttttgacatgccttcctcgctaagcttaatgtaaatgttaatgcttgatcttcataattattttatctttatgattttttgctatgattttctagttgcraaaaaaatcatgtatttctcattagattttcactgttatatcaaactttttaaaacttttgatagtgaaaattccaagcacacaaaatagaatagtatgg

SEQ ID NO: 24229 - DNA, 201 bp, Homo sapiens
tcaaactcttgggctcaagcgaccctcctgcctcagcctgccaagtaactaggactataggcacacacaacaccacacccagctaattttaaaagtttttrtagagatgaggtctcaccatgtagctcaggttggtcttgaactcctgtgctcaagtgatcctccagcctccgcctcccaaagtgctgggattacaggtgt

SEQ ID NO: 24230 - DNA, 201 bp, Homo sapiens
agctgattaaatttaatgtatttaggtcaaaaggaaaaaatgtatcataatcagacatagtcctcagcaaaggctgaaaagggcaaaagcaagatgaagggaaaaaatgatgaatcaagctaatttccataatcctgttttattagtactggcccatgggtggtacagcacacacaaaccacaaatagtgtcaaattcctc

SEQ ID NO: 24231 - DNA, 201 bp, Homo sapiens
cacagacaggaggaatctagagaggaagtgtggttacaggggctttgctgagctgtggtgggctccacccagtccgaacttcctggaggctttgtttataytgtgaggggaaaactgcctactcaagcctccctcccccaccaagctggagcatcccaggtcgacttcagactgctgtgctggcaaggagaatttcaagcc

SEQ ID NO: 24232 - DNA, 201 bp, Homo sapiens
aatgttttccatatactttgtcttgcctgtatgcagccctcgtgtaatacggtgaattagagtggtatttcactttgtattattttgtaaatatgtcaatrtaataaatagtgactaaattgatttctaagagttggagtctttttattgaatgatccctgtattagtcagggttcccctgaaaatggatggcactggatt

SEQ ID NO: 24233 - DNA, 201 bp, Homo sapiens
ctttgctgtgaacaagaacagtttaaaaagctgcatgggagagaaaagagatgccaaagattaaagtgaaactactgccacagaagttcaccagatgggtrgaagtaccgaaacaatttccagtttggctcacaaaggcccaactatacactgtttataagagacacacctgaaacaaaatgattcagaggtactaaaaat

SEQ ID NO: 24234 - DNA, 201 bp, Homo sapiens
taggtatacatgtgccatggtggtttgcttcaccaatcaacccatcatctacactaggtacttctcctaatgcaatccctccccttgccccccacccctcracaggccctgatgtgtgatgttcccctccctgtgcccatctgttctcactgttcagctcacatttataagtgagaacatgccatgtttgtttatctgttc

SEQ ID NO: 24235 - DNA, 201 bp, Homo sapiens
ggagagcagcaaggatagaagtggccaggctaatacatcattcaggcaagagatgatggcggcttttaccaaagcaatagcagggcagatggtgggaagartaggctctgaatatattctgaagatggagccagcaggggtttattgatggactagattagggatatgagaagagaggagtcaagtatgtctccagaattt

SEQ ID NO: 24236 - DNA, 201 bp, Homo sapiens
gggaggaatgacaattaggaagagaaaccttaaaaatagttgatcagtctggctctacaaattaaaaggaagaaaactttattttttctttcttttttttwaaaaaattatactttaagttctgggatacatgtgcagaatgtgcaggtttgttacataggtatacatgtgccatggtggtttgcttcaccaatcaaccca

SEQ ID NO: 24237 - DNA, 201 bp, Homo sapiens
atacgaaaggaaatatatatatatatgtgtggtagcctttattagatgtttgcagataatagggaggaatgacaattaggaagagaaaccttaaaaatagktgatcagtctggctctacaaattaaaaggaagaaaactttattttttctttcttttttttaaaaaaattatactttaagttctgggatacatgtgcagaa

SEQ ID NO: 24238 - DNA, 201 bp, Homo sapiens
ttaagattaaaggtaaaatgaaaataaaatgaaaattcactattgaaacaaaaatttgcttttttttttttttttttctgagtgtttttctagttcaagtrtgctgggtgttagcagccaaattaaaactgaatagatatgacagtgacccttttataacacatttgtttaaggccagatgatacagatgatgacaaatgc

SEQ ID NO: 24239 - DNA, 201 bp, Homo sapiens
atttttccatggaccgagtactgggggaatggtttgggggtgaaaccgttccacttcagatcatcagacattagattcttacaaggagtgcacaacctagwtccctcgcttgcacagttcacagtaggcttcatgcttctatgagaatcgaatgcccttgctgatctgactctaggcagagctcaggcagtaatgctcact

SEQ ID NO: 24240 - DNA, 201 bp, Homo sapiens
aagggactcagtaaatatttttgttaagatttaaataagtagtataatgttaaacagtttacaagtattttaggactattatcagctaagcactaaatcartcatcgagaattattccatgtttttatgcagagtttaaatacaaggaatgtactcttttagataaatagatcctaaagcatgttttctaatcaagaaatg

SEQ ID NO: 24241 - DNA, 201 bp, Homo sapiens
cattggcttaagggtaagatgtagtttatccaagttacatatggaggtcattgagtcttcatttgcttacaataaattgtaaatatgatggatgagaaatmtgtaaggagaattggttaattccagtgggtgatatattaatagtcaatttacttgtctacacaaacaacagtgaggcagaactcttggcctttgactgtt

SEQ ID NO: 24242 - DNA, 201 bp, Homo sapiens
aacactgaagtttgggagttcaaatttttgccctcaaagtagccagactattccattggtcgatggtggtccctgattgtttagtcctgtccacatattgwtatttatctgtaacatcactatctgtacaaagcagctggctctttgaataaagaaaggtaatttcaaaagccacagtgccctacattaatgatctctaaa

SEQ ID NO: 24243 - DNA, 201 bp, Homo sapiens
cagtgtaatagaaagaatccccgattggaaccacagaggtcatgagcaacacccacccaccctcactcctgctattttatagatagatcaattaacagatwatttttccctcaaatgccactatactggatggtctcagacttcgtatccagtcagacccagaagacttcctctacagagtaatttgcccaaagccacagg

SEQ ID NO: 24244 - DNA, 201 bp, Homo sapiens
gtattccaaaattgaaaaaaaaaattcaaaatttgaaacatttctggcctaagcatttcagatcagggatactcagcctatattccaactttgatcttagrctttttcatttttgactgtctgctgggcaattctccttgactgttcttctgtaacttcaaacatagcatgtttgagactcaatgtctttcttgtgttctg

SEQ ID NO: 24245 - DNA, 201 bp, Homo sapiens
aataacacattttactcaatttaagtaataagactaggagaaacttcggtatcgtttgtatcagtgacattatgtatacgtgtgtgtgtgtgtgtgtgtgkattccagagacctcacaaaattttgctttatattttaaaaaaatgaatagcaatattggtcactaagtagaatttaattctataccttgtctgcgcaaaa

SEQ ID NO: 24246 - DNA, 201 bp, Homo sapiens
tggtatttaaagttgattaaagaaactctttatgtagaaaaaagatgggaaactaaaaatttggggagataattagactaaggataaagtgagggaaaaargaaggaaggtcagggagagagttagtagttttcagattgatggttgggggaaaaatattgaagtatcaaaggacaaagcaataccagtactattcctaaa

SEQ ID NO: 24247 - DNA, 201 bp, Homo sapiens
tatgaccagttagaataatattattcttataaaagcaagatgttcaggcaaagggagagccttgaaaataggaagaaataaagatgtagtagaattttaaattacttttctttttttcttgagcaacctggacaatctatttaaactaagcaggcagtttgatgtgaaatgtcttctgctagggaacaaaatgatcaactc

SEQ ID NO: 24248 - DNA, 201 bp, Homo sapiens
aagggagcaattttttcagttaatgtatattcataggtaaatatgttggtggttgacacttggccccagggaaagggaatttaaaggaaaaattttatctrttttcaaaaaatgaagacacatagttagcctcctcctatgaaacattggtggctttgaataatagttatacatttgcttgattttaaactgataaatgta

SEQ ID NO: 24249 - DNA, 201 bp, Homo sapiens
tgtcataataactaatatatactgagtatttactatatatgctttgtactgtacatgttttgttttatttcttcaacatttatataagaaaagtggtggtgactgttgttattttttatgggtgaagaaacaaagaaacagagcatgcaactagtgagtggtaaagccagaattccaagttatgccatctgtacattgcta

SEQ ID NO: 24250 - DNA, 201 bp, Homo sapiens
atgtcataataactaatatatactgagtatttactatatatgctttgtactgtacatgttttgttttatttcttcaacatttatataagaaaagtggtggtgactgttgttattttttatgggtgaagaaacaaagaaacagagcatgcaactagtgagtggtaaagccagaattccaagttatgccatctgtacattgct

SEQ ID NO: 24251 - DNA, 201 bp, Homo sapiens
gatgtcataataactaatatatactgagtatttactatatatgctttgtactgtacatgttttgttttatttcttcaacatttatataagaaaagtggtggtgactgttgttattttttatgggtgaagaaacaaagaaacagagcatgcaactagtgagtggtaaagccagaattccaagttatgccatctgtacattgc

SEQ ID NO: 24252 - DNA, 201 bp, Homo sapiens
attgttcctaaacctgtaccattcattgtcatggaaaatgttactacagtctaaaaagttataacaaagttcaaaatttatagttaacttaggatttttartaagaatagaatatatatcatatatatgagaatttattaggtagttttaattcacaccaccacaaggtcccacaataggctgtctgcaagctgaggagca

SEQ ID NO: 24253 - DNA, 201 bp, Homo sapiens
gcagagagaaaaatatgctttcattgtctaaaaactaaaaattagctcaaaaaggacagtagtagtttttttttttattttttatagttttagagatgggrtcttgctctgtcacccaggatggagtgcagcgatgccatcataacccattgcagccttgaactcctgggctgaagtgatcctccaaagtgctgggattac

SEQ ID NO: 24254 - DNA, 201 bp, Homo sapiens
gagaattattccatgtttttatgcagagtttaaatacaaggaatgtactcttttagataaatagatcctaaagcatgttttctaatcaagaaatgtctcarggggctaggtgtgctggctcaacgtctataatcttagcactttgggaaacagagggtggagaatcactggagccccaggagttcaagaccagcctgggta

SEQ ID NO: 24255 - DNA, 201 bp, Homo sapiens
tcttatattttacagatttaataaagcagagagaaaaatatgctttcattgtctaaaaactaaaaattagctcaaaaaggacagtagtagtttttttttttattttttatagttttagagatggggtcttgctctgtcacccaggatggagtgcagcgatgccatcataacccattgcagccttgaactcctgggctgaag

SEQ ID NO: 24256 - DNA, 201 bp, Homo sapiens
aggcatgagacaccatgccaagccaaaatgccttttctttaaccctccttgcttttgcctttagttgaggtactcatcactgggattattgaaattgtctyctaggtgttttcttgccatcagttttgaatcgtttcaagctcatcttcaacataatcttccaaaaatgtagatctgatcattttactcatgggtttatca

SEQ ID NO: 24257 - DNA, 201 bp, Homo sapiens
aagcacacataaatagacacatatatatttatttatatatatatatagacccatataaatatttctgtatgtatgtgtgtgtgtgtatatatatatatataattttgtacggatactatattctcaataaaatgttttttaaaaactacatgttcatagcagaagttttgcagtgttaatggactatggtgctgggagaaa

SEQ ID NO: 24258 - DNA, 201 bp, Homo sapiens
ttgttccaatgagtttggtaaacactgcatattgtatttatgagatatagcatagtaaaggaactgaaaagtcctgcagtgaggaaaacaaacttttgttkactccagaatttctcatatttgcacatgatattaggtatttagatatcatgctatttaggtatcacacaattgcttcaaactcattatgtataaaactga

SEQ ID NO: 24259 - DNA, 201 bp, Homo sapiens
gaagcacacataaatagacacatatatatttatttatatatatatatagacccatataaatatttctgtatgtatgtgtgtgtgtgtatatatatatatataattttgtacggatactatattctcaataaaatgttttttaaaaactacatgttcatagcagaagttttgcagtgttaatggactatggtgctgggagaa

SEQ ID NO: 24260 - DNA, 201 bp, Homo sapiens
gccatagttaatggccatcacagtcctgaaagcccacacaccaatttccaaattgcagatatcaccttgcttcaggtcactctggcattctccaagaactwtatttttgagaaataagacattaactcttatatttttttcccttaagagtaagaacattgttcgttattcatgagtgccagtagccagttctgtgacttt

SEQ ID NO: 24261 - DNA, 201 bp, Homo sapiens
attaccgaagttccaagcaatttggagaccatttgttaagcctctacatctcctatcgtatatgcaagaggagatataaagacaaagtcccagaacctatyttgcagcatgtaaataataaaatagaagtacagtcccagcttcatagtcaatgctttcttttccttgccagtgattccagaaatatcatcgatcttgagg

SEQ ID NO: 24262 - DNA, 201 bp, Homo sapiens
acaaacttcacttctaagtgtgccatctagcttcataaggtatacttcaggaagaagcacacataaatagacacatatatatttatttatatatatatatwgacccatataaatatttctgtatgtatgtgtgtgtgtgtatatatatatatataattttgtacggatactatattctcaataaaatgttttttaaaaact

SEQ ID NO: 24263 - DNA, 201 bp, Homo sapiens
tcccctaacctgggttctaagactgggccagccaaatggcacttttatagaacctcttcccaaaccagcgctcttgggcgatctttcttctgaaacgttaygtgtttccaatagggaggaaaagaagaaatgaagtaactttttgtccaggaatactcctttgtaaaggttgatttcagggctagcaaagatgccttcata

SEQ ID NO: 24264 - DNA, 201 bp, Homo sapiens
tttttttaatcacacaggaaagaggagtgagtttagtaacttgaactcatttaagagtcagcagaggccttcaggttagatatgactctcactcttcaggkttgttaaatactgaaaaaagctcctgaaagagggagatttcttttctaagactgctgaggtctggtcgggggagagggggggaatgggggacgttgaggg

SEQ ID NO: 24265 - DNA, 201 bp, Homo sapiens
atctgcattatatagttaaatttcacatgtagatggcttagcaaaaccaaaaaccaaaaaacaacaacaacaaaaaagaaaccccacacatacaacaacamcaccaaaaaattagcatcaactttccaaatgagattagaattattttgtaattaaaatagtatacagggagggaatcttttctccagagataattttttt

SEQ ID NO: 24266 - DNA, 201 bp, Homo sapiens
cccattactaggcatatacccagaggaatagaaatcattctactataaagatacatgcatgcgtatgttcactgcagcactattcacaatggcaaaagcayggaatcagcccaaatgcccatcagtgatagactggataaagaaaatgtggtacatatatcatagaataccatgccgacataaagaggaatgagatcatgt

SEQ ID NO: 24267 - DNA, 201 bp, Homo sapiens
tcccaacatgtggatactattatttttcccatttataggtcctagcttgtgggtaatggaactgaaataattcttgtagttttaagttgaaaaaatgtgartagtgttaattcagaaacaaaataatttctgatgtcgtgaatatatacattttaacaggatgtggataggttgttttcctccattccgtaggatttaatt

SEQ ID NO: 24268 - DNA, 201 bp, Homo sapiens
aaaaaaaggaattttatggagaaagaatagttgaaagacctaaggagattcttgaaggggtcaggtttcaggaaactaaagagccacccagctaagatacrgatcaaagtaagccttatgtttattgcttatctgttctgggaaaagcagaggcagccaagtaagacttctgatctgctttcaaaacctaattcaccagtt

SEQ ID NO: 24269 - DNA, 201 bp, Homo sapiens
cagtttgaactcaggtctagctgattgtccactactgtaccatagtgcaaacattcacatagcacataacgtgtactttgcatatattgagggaatcagcrcatcaatcccaacatgtggatactattatttttcccatttataggtcctagcttgtgggtaatggaactgaaataattcttgtagttttaagttgaaaaa

SEQ ID NO: 24270 - DNA, 201 bp, Homo sapiens
cagtctgttcagtcttcatgtataatttgtaaaattgtaacaacgttaagaggttaggtactacatttttctcttctgcatcccaaatcacatatctattwgagattgaagcagcagtttgaactcaggtctagctgattgtccactactgtaccatagtgcaaacattcacatagcacataacgtgtactttgcatatat

SEQ ID NO: 24271 - DNA, 201 bp, Homo sapiens
tataaagcacattttaactagattctatcctacctctttcagtagatccccttgggctactccttcaacttggcctcagtttgttcaactctgatattctyctgattctaaaatgccacttattggtagatgtaatatgtatacattgcattttgtaaagtaatgttttgctttgatgattcttagttgtgtaatcctctc

SEQ ID NO: 24272 - DNA, 201 bp, Homo sapiens
tgataaatgttggaaaaatatataaatactttaaaatgcatggtggtgttctactggaatgagattgcatgctagattgattagacaacggaagctttgtrggagagttgatactacaaaaaattgaatgtgaaagcataaactgtatgcttctcaaggataaatgtatttttgactgcttaaaatattttagcagtggta

SEQ ID NO: 24273 - DNA, 201 bp, Homo sapiens
ttagttttaaaatagcgatgacatagatttacttatttttaattctttgccttcaaaactgcaatgggttgttgacaaatttctgtcacttctcaccaatwagattctatagggaacgggagagaagaaagaggttgtatccatggccatgtcccttctccagaatatggaattacatgttctaaaaactgttctaaaagc

SEQ ID NO: 24274 - DNA, 201 bp, Homo sapiens
tcttctaggtgttttcttgccatcagttttgaatcgtttcaagctcatcttcaacataatcttccaaaaatgtagatctgatcattttactcatgggtttrtcaccaggggaaggtatctgagttaccagtggcgaatctgtacaggtctacaggaatctcaattcttgcctcctcagaagaaagaattcgactgaggggc

SEQ ID NO: 24275 - DNA, 201 bp, Homo sapiens
cagccatcgtttctctttccttctgtggccttggatctcctttgagaaaccacactttcctctttcttaattacagagtttggatggtttcatcaattatrtcccatgcctttgaccacatagtgatggttcaggaatggggttagtcactcagttgggaccaataagacatttgcaagggtagttttatttttctctctt

SEQ ID NO: 24276 - DNA, 201 bp, Homo sapiens
caccctagctccggcccctttcactctatattcagcacaacaggccaaaaagacctttttaaaccatcagattatgtcctccttttggccaaggcctccartgacctcccatatcagtcagagtaaaaactgtcccataaagatcttcatcatctgaccccactagctttccatctttcctccttttccccccattactca

SEQ ID NO: 24277 - DNA, 201 bp, Homo sapiens
gtggggtcagcaaaagggccagaacagcaacggcaaacagttccgagcctgacagtgcaggggcaaaccagctccaagtgaaaatcacctcgcgaggaaayaggctcagggatcggggcggtttccgcaggcgtctccacacacgcactctcactcactttgagggtgccaaaacaccactaggggcaactaggaggaata

SEQ ID NO: 24278 - DNA, 201 bp, Homo sapiens
aaagactcccatatttctgtctgtagtacacacctatcccctggactccacacttattggatgactaataggcctctcagatttaacacagtcaaaaagtraccacactctggtcttcccacagttgtctctcacctgggttattgcaagagccttatgtctggttttcctgcctccaccctagctccggcccctttcact

SEQ ID NO: 24279 - DNA, 201 bp, Homo sapiens
aaaatcactattttaaagtctcatatggaataattaaagcaaggatgatcaaggaatactaatcccattgtgaaaaattattgggaaataggacagccacwtggtaccacatcttcacccctgggttacttactgctataaaggggggacatgtacctttacagtagagagatgtggcagtaaccatcttaactaaatgat

SEQ ID NO: 24280 - DNA, 201 bp, Homo sapiens
ttgctaagttaccattttcagtgaatgccctgctatccttccagtgcccaaggcagagagaggtacagttataattctgaggtcttctcttttctctcccmctgcgtccccacacacagtcaatcaattaccaaatatttcttttccatgtaatctcctggagttcttcccatctctccttctactatcctagtctaaatc

SEQ ID NO: 24281 - DNA, 201 bp, Homo sapiens
aggagcgattcagagttttgtagtgaactttagcagtttgaccttcaaatgtttccttttttaagcgtcaatattgctaacattaaagtggtaacaggagkctgcaccttgaaaagccactcatgccttgtctgttgtggtagctacctggttatgaaacattttctaatccagagagctttggcctgatttataatttta

SEQ ID NO: 24282 - DNA, 201 bp, Homo sapiens
agcatagtaggcattcagtaaatgttctttgaaataagtccatttgttggaatgtcttgaaaatattttttgagggtggttgtattttctttcttgagacwcactggcacatgtgtctgtttcaagtcagcaaggctgttccaatttttgtcttaggagttttactttctgtatgcttttttgcctcatttgggagtttac

SEQ ID NO: 24283 - DNA, 201 bp, Homo sapiens
gtgagggagctctctagggcctcttttacaagggcaggaattctgcacatggggctccacccttgtggcctaattgcctctcaaaggctccacctctttcrttcatgtccctacaaaggacatgaactcatcatttttatggctgcatagtattccatggtgtatatgtgccacattttcttaatccagtctatcattgtt

SEQ ID NO: 24284 - DNA, 201 bp, Homo sapiens
acatggggctccacccttgtggcctaattgcctctcaaaggctccacctctttcattcatgtccctacaaaggacatgaactcatcatttttatggctgcrtagtattccatggtgtatatgtgccacattttcttaatccagtctatcattgttggacatttgggttggttccaagtctttgctattgtgattggaaatc

SEQ ID NO: 24285 - DNA, 201 bp, Homo sapiens
gaatgtgtcaaaatattcttggtttctttggcctctttcatcatttacccacagcccctccccattcccctaccttcattgacctcggcttggtttgcaayaatccaggtttacatttttgaaacattaaatactctgagagagttaaagacttgtctgtgttgtgttcagatttgtagggacctcctgagctccacagtc

SEQ ID NO: 24286 - DNA, 201 bp, Homo sapiens
tcataatggaattttctgaaaatataaaacacagataaaaggagaataaatgaacatttcctcaattaatattacaggtgaatgtaacctaaaatgtactycctggtgtgttatgatactgataaacttctgtttagggtaacatgattttagtatcataatatggtattatgggtgacgttttccacacaactttttaat

SEQ ID NO: 24287 - DNA, 201 bp, Homo sapiens
tatatagaagaggcaaattttacttagtagaatttatataactaagtagtctaaaaggttttagaagaaataaaccacagctacaaattagacgcattgtrcaggtttcccctttcccactgaactgagaatggtacggtctgcctccagtcacttgggttacagggcgatattacacttcagctgatgtctttgaaagct

SEQ ID NO: 24288 - DNA, 201 bp, Homo sapiens
tgtgtctcattttcctcatctgtaatgtggggatagtaattggacctaccataaaggatcatagcaaggattaaataaaacactcagagcagtgtctagcwcatattaaggattcaataagtattagtatttttgcagtttaatgataaaaaccacaattacttttgcaccaacctaatagagtcctattctccaaaatct

SEQ ID NO: 24289 - DNA, 201 bp, Homo sapiens
ttttatttaaccagaaacacacgactattagtagagtgtaactatccttttaatattgctaatttgtttgttaattcctcctgcataagtttgacttgggyattttgtctgatgtaagaccaagcacaattactaatgtgagcaaaagttaatgagcaaaattgtcaagttatatattaagggcatagttagctgtacaac

SEQ ID NO: 24290 - DNA, 201 bp, Homo sapiens
tggtcttgcattttgtacactgagtaaagatttctgctagtagaggttgaaatgcaactgctgtcttctcactgtgggatctcaccagggtttacatctgycctggaggggtactttcttctagtttgtataaaatattcatcatctcactaggctagtgttggtgaccctgggatagcaatatcaagtggttacagaaaa

SEQ ID NO: 24291 - DNA, 201 bp, Homo sapiens
tgttttttaaagcattcttattcttttctcttctgagcttaatcagtgtatggttcctaccacactcctttatattttgcactcaggtagcattgtagtgygtttatatataaaggtctggctagtggtatagtcccaaataccatacttatttacttgtatctcactgcctgctgaaaacaaaccattatagagcacttg

SEQ ID NO: 24292 - DNA, 201 bp, Homo sapiens
gtgcagaaaacatcactgggattttgataagatacatttatttttatatttatagtgttaatcacacatctctgccctttattaaaatggaatttctgaaygttagtgattttcagtcaattcttttttcctctagcgtgtacagtaagtgttcataaacacttaaaaataatttagttatcagcctctgggaaaatagct

SEQ ID NO: 24293 - DNA, 201 bp, Homo sapiens
tgcagcattcctaaaataattcatcactattgtctgtgagatttccttctaagctgagttttgatgctgctgttattattttaaagagttagtttctgctrtacacaaccatacattgtttttaaaaactatgatttagttttagcattgaggcatgaattccaaatacatgtctacacactccctcctcccatacaaggt

SEQ ID NO: 24294 - DNA, 201 bp, Homo sapiens
caaaaggtcctgatttgaatggaaaattatatgttcatctagttttagagcatttcttatacaaccacggtctcttcctctacccctctagtatgatttcrgttcccatttatgtcttttgtgtggaacacctgtttctacaaaggaagaaagaaacaactatgccagtccatacactttcatcagctaaaaaattcatct

SEQ ID NO: 24295 - DNA, 201 bp, Homo sapiens
aaaaacaattcagaatgacattggcagcctgtttagtgaaattttttccctcctgaaggacctccaagagtgtcctttaaaagaggtaaaaaaaaaaaaaatgagttttgatatgatgaccatgtgtacttgtttacccagaacagttcaatttataccatttgttctggcatagttattagtcactacccatttactctc

SEQ ID NO: 24296 - DNA, 201 bp, Homo sapiens
taattgaaaagcaacttcaaaggctgcttgatgctttcttgtcatttttagagcagtcttgagtgttacagagggtggatagcattcagaataattaactwtatgctaacagctcttttccattcctcagtttctctgtttgaagaacataaggacatttctcacggcctgttgtgagacgtttggaatgaggaaaagtga

SEQ ID NO: 24297 - DNA, 201 bp, Homo sapiens
caccaaggttagtaaaaacctcatatcatcacataaagtgcactaaatcattggatttgaggttggtctatgtcatagttacagtctgcaatttcatccaygcataggggattgacagctgctccacccattagtattaatgaattaccaacgtacatcccacacacatccaccaagaaaccaaagaaagccctcctacac

SEQ ID NO: 24298 - DNA, 201 bp, Homo sapiens
ctcaggtactctcctcttctttgctctattccacagtcatttcagccagtgtcatggttaacagtcctctgtacactaaagactcccatatttctgtctgwagtacacacctatcccctggactccacacttattggatgactaataggcctctcagatttaacacagtcaaaaagtgaccacactctggtcttcccacag

SEQ ID NO: 24299 - DNA, 201 bp, Homo sapiens
tcttttcctgatcacttcctctttgctggtttttttcttttattgcatgtcctcacaaacttcatcagaataatgccaaaaacagtgtgttcatctttccrtccatccttccttccttccatctgcccatccaatcaataaactaatttgtgtatacagtgtattcacctatattcccattattcatggccatgctgtaca

SEQ ID NO: 24300 - DNA, 201 bp, Homo sapiens
tgcagcaaaactcaggagtctatattctgtcttcacttccttttctctctttgtctctgaaaccaactccaagaggcctttcatcccactcctccatataragcctgcttttgtcaaggtacccgtgactttcacactgccagaatccatgggcagtgttgaccaatccgttggtctaaatcctatttggccgtctgcagc

SEQ ID NO: 24301 - DNA, 201 bp, Homo sapiens
tgtacataggattagacatttctattttaataacacatgaatgggccaaataaaaaaggaaaacttagaaatgaagtaagtgattgacaataatcaagaarcaatattatagataaaataaaacaagtatttagcatttgcaaagtactttcatgcatattaattctttgatccttgtaacaacctagtgagggatgtgtg

SEQ ID NO: 24302 - DNA, 201 bp, Homo sapiens
gttcaggtgaaagtgatatgagagtctatgttccttgcggcttagcaagtttactgaaatataaagagtggtaggattgtacataggattagacatttctrttttaataacacatgaatgggccaaataaaaaaggaaaacttagaaatgaagtaagtgattgacaataatcaagaaacaatattatagataaaataaaac

SEQ ID NO: 24303 - DNA, 201 bp, Homo sapiens
tttgttttatggagtttcattatgcctagtgcataagaggcacctcatgaatatttgttaaatgaggatgcatggctatttaaacttttgtgtatccttamttggcaactcttatatggatacactgaatatttaaagaaatttaaagttatttaattctaagtcctgaaattctaaattctaacaaattgttaagttaac

SEQ ID NO: 24304 - DNA, 201 bp, Homo sapiens
accacagccagctaatctttgtatttttagcagagatgaggttttgccatgttggccaggctggtctcgagctcctgacctcaggtgatctgcccacctcrgcctcctgaagtgttgggattacagacatgagccaccgcacctggcctccagttttctaattaagaccttttaacctcatcacttctaggacaaagccaa

SEQ ID NO: 24305 - DNA, 201 bp, Homo sapiens
tggtccttgcctcatcaaatataagttagaaaatctacattgtgtgaaggtctattagcactcaccgaccttctcatgaaatgtcatttctcatttgggaytgaaataactcatctcacaataagctgtagaggtttttcctcttccattgcctcagttaacaccactagtccattattcctagcaactttggagaagtcg

SEQ ID NO: 24306 - DNA, 201 bp, Homo sapiens
tacacctcttcctccttaccagttaaaaaaaaggatgatctgagacctttggagaggtatagaggaggagttatgatgagaagagaaggagaattcttctygtaccttaatgtttgtaaatcggtttcatggttgtctcttctgtgcctttcgaaactgccaatcatcttattataatggccactcataatttgaattatg

SEQ ID NO: 24307 - DNA, 201 bp, Homo sapiens
gggccccatctctaggttgctttgagctagctgtcttctggctaacaaaatagttgagtgctactttctttcaccaaaggcagcgacatgcaccactttcrttagcaggttaattaacttaggaaaatagatgatccaggctaactttgacctctgcacttcccaggtattcagttttttagtgcaaagactaaaaacaca

SEQ ID NO: 24308 - DNA, 201 bp, Homo sapiens
tccctacatgtatacatgcattatatatatgtattcacgtgatgatactcgttcccccatattttccaaaatgaggtcatagaacaggtgctgagttttgwtctgcttccttttttttttaatttaataatgacattctttgcccaaaggagtaataaaacctatttttatctaaaatctctggagaacaaaacattttac

SEQ ID NO: 24309 - DNA, 201 bp, Homo sapiens
tagactgagacattattatttttttagaatgaagaaccttcccattacttaaaatactttgtttttaaatggaactacattgcttagaatagtttaaaagrtgttttgttttttatgttcatgtatagtatataatctgttgcatgaatattttacttacatattttatgggatatgtgttttcagtagatatatttttat

SEQ ID NO: 24310 - DNA, 201 bp, Homo sapiens
gaaggcctaaaaacaatttgcaagtactgtgttgatgatttagttattagcacattttccaaaagcatgtagagaaaatatcaaatttgcatgcagtggtraggggtgcataaaggtaacttcctcctgacgtgtggctacaaagtatactatggatatactttgcggctacactgtaccacgttttcacttctcatatcc

SEQ ID NO: 24311 - DNA, 201 bp, Homo sapiens
ataattgaaaattatgcaccactaccaccactaccacaaatagttttgtataagatatgtctgttaagttcagagaccacaaagtccctattgtgatgcartaacctcggttaactgagcatatcttctccatgtcctggtgaggatagctatttcagaagatcatttataggaccatttacaaaaatacagtatcaatca

SEQ ID NO: 24312 - DNA, 201 bp, Homo sapiens
aatcttggaataagattacacaccaccacaccctcattttttgttttacattgattgttgtaccatgtttagttgttaaccactgcatctgctgaatatcyagcttcacaaagatacaccattaaaaggaacttagtgggatctaatgttaaaactacacagtaatttgagctagtaattcatgcagtatcagatgctgaa

SEQ ID NO: 24313 - DNA, 201 bp, Homo sapiens
ggcagctaggactggttgaaaagatcaccctagccgcacttgaatcttgagtcattaaatactcttcagaaaaaaggaagtgggttttagtataatttatkgttgaacattagtctttctaatttttatttttataaatgctttgaggaacatctgtgcatgaacatacttttccatatggctgattattatttaacaatg

SEQ ID NO: 24314 - DNA, 201 bp, Homo sapiens
ttgcttgaactcaggaggcagaggttgcggtgagctgagatcgcaccattgcactccagcctgggcaacaagagcaaaactccatctctcaaaaaaaaaawaatatatatatatatatatatgccttaaaaatatatatatatatgccttaaaactactttttactttatggttcattttcatggagtggtttattttttc

SEQ ID NO: 24315 - DNA, 201 bp, Homo sapiens
cctgtctctactaaaaatacaaaaaattagctgggcatggtggtgggtgtctgtaatcccagctacttgggaggctgaggcaagagaattgcttgaactcrggaggcagaggttgcggtgagctgagatcgcaccattgcactccagcctgggcaacaagagcaaaactccatctctcaaaaaaaaaaaaatatatatata

SEQ ID NO: 24316 - DNA, 201 bp, Homo sapiens
ggcggatcacctgaggtcaggagttcaagaccagcctgggcaacatggtgaaaccctgtctctactaaaaatacaaaaaattagctgggcatggtggtggrtgtctgtaatcccagctacttgggaggctgaggcaagagaattgcttgaactcaggaggcagaggttgcggtgagctgagatcgcaccattgcactccag

SEQ ID NO: 24317 - DNA, 201 bp, Homo sapiens
tagccttcacagtatgggcttgtttgtacctatctttcttccaaaggctttccagttccaaaaggacttgggtgttgtgatctaggctgtatctgcattargaggcaccccaaacccagtaatgctgtggttcttgtagagttgtagaggcaccgccttgatggtctttgataagatctggaagcattctctggaccacca

SEQ ID NO: 24318 - DNA, 201 bp, Homo sapiens
agttataggtacttgaatacactggtgatcaaaaaagagacactccaaccatcccagaacttatgttatttatcagtatttattttacagggaatcatgtkttgtgacatctttgtataatttgcatttatttattgaactcctgtaaaattttttccctgtacaaattgtaaattacttgataggtattttaaagctttt

SEQ ID NO: 24319 - DNA, 201 bp, Homo sapiens
gcctgtagtcccagctactcaggaggctgaggctggagaatagcttgaacccgggaggcggatgttgaagtgagtcgagatctgctgcactccagcctggstgacagagtgagactctgtctcaaaaaaaaaaaaaaaaaattgtaaagggaaaagactgtaattttttcctttagtaaggataactcaggtgagaagccc

SEQ ID NO: 24320 - DNA, 201 bp, Homo sapiens
ttttggtaggggagatcatattcagaaccttaaaattctctgtcatctgggagattttatgataaaacattgaggaatatgttagaaaatcaaatatctgktgcaggaagttaaagagaaagtaagccatttatttctacccaacagtgatagctctaaagaggaagagacaggaagatgggaggagcctctgaagttttc

SEQ ID NO: 24321 - DNA, 201 bp, Homo sapiens
caagatttatttaaataatgcattttttttggtaggggagatcatattcagaaccttaaaattctctgtcatctgggagattttatgataaaacattgagraatatgttagaaaatcaaatatctggtgcaggaagttaaagagaaagtaagccatttatttctacccaacagtgatagctctaaagaggaagagacagga

SEQ ID NO: 24322 - DNA, 201 bp, Homo sapiens
tgttgtggtcctttttcttccattattttattactatgtaagctacattctgccataatgactaaaagtttgtgtcaatcacagaatactttcagtgggcyatgaatttggaattccatctgacgtgattattgatttgatggtgcaagtggtttcagtaaagtatgcatgtgcacatgcccttaagagttgtggccaaat

SEQ ID NO: 24323 - DNA, 201 bp, Homo sapiens
gggcggattgccagagctcaggagttcgagaccagcctgggcaacatggtgaaaccctgtctctactaaaatacaaaaaaattagctgggtgtggtagtgsacgccaatagtcccagctactcgagaggctgaggcaggagatttgcttgaacctggaagagggaggttgcagtgagctgagattgtgccactgcactcca

SEQ ID NO: 24324 - DNA, 201 bp, Homo sapiens
tatcctctactatatatcaggaactttctttctttgaatagctattaatttagtctgtattattattataacaacagtaatttctaatgctattgaatgartgggctatctgcattttcattattacttctttcaaacaatgaattatcaattgagctgtaaaaatgtactctgttcaatctttgcatttcaggattcctt

SEQ ID NO: 24325 - DNA, 201 bp, Homo sapiens
attttgtggctgggcacagtcgctcattcctgtaatcctagcactttgggaggccgaggcgggcggattgccagagctcaggagttcgagaccagcctggrcaacatggtgaaaccctgtctctactaaaatacaaaaaaattagctgggtgtggtagtggacgccaatagtcccagctactcgagaggctgaggcaggag

SEQ ID NO: 24326 - DNA, 201 bp, Homo sapiens
tctctgtgacctctgaagctcctggtacagtgcattccacaacatactcaagttttgtcataaataataaatcattgatgattctctttttcttctttcarctgatttttggactcattgatttgtctggggaactttgaacataaccactgaacagagatattaagttgatggcagtgggatttttagaagaaacaagtg

SEQ ID NO: 24327 - DNA, 201 bp, Homo sapiens
atgatcagaactcaggataggtaatgcacctggttttcattttgagttttgtaattaaggtttttgtaaatcatattgttgcaaatatatctagcgttaarcctatagataaaaatctagaaaacttatcgagatgttacaatggctttgtatttgatttcaaaaatgtcttttgtactagttaggtgctttggcttattt

SEQ ID NO: 24328 - DNA, 201 bp, Homo sapiens
cattcctcagtttctctgtttgaagaacataaggacatttctcacggcctgttgtgagacgtttggaatgaggaaaagtgaacttttcgaggcatttgacytgtttgatgttcgtgactttggaaaggtaattatacttcatttttaacactactttttaactggaaagcatttaagcaaattgtttcaaatcttgaagta

SEQ ID NO: 24329 - DNA, 201 bp, Homo sapiens
gcccaccaccacgcctggccaatttttgtatttttagtagagatggggtttcaccatgttggccaggctggtctcgagcttgacctcaggtagtccgctcrtctcaacctctcaaagtgctggaattacaggcatgagccaccgcgcctggacgtgactgatttttctactagatctaagcttcacgatggcaggggccac

SEQ ID NO: 24330 - DNA, 201 bp, Homo sapiens
aattatttataagagaaaattggaaagaattacattgacctctgtgagtagcagatatgcggagctatgacaggtactatacttcatcagaaactaaaaasagtgtcaagtaccatttgtgctttatcaacttttgtttaccacgaaaaagcataagtttgtttttctgccattttgaaagaaaataagtgcaggaaagta

SEQ ID NO: 24331 - DNA, 201 bp, Homo sapiens
cagaaactagagaacccgtttctaacctggaggcctccatgatgtaaggaatgatcagaactcaggataggtaatgcacctggttttcattttgagttttktaattaaggtttttgtaaatcatattgttgcaaatatatctagcgttaaacctatagataaaaatctagaaaacttatcgagatgttacaatggctttgt

SEQ ID NO: 24332 - DNA, 201 bp, Homo sapiens
tcttttgtttcttggtttccaaataccccttgtatacatcttatccttttaaatattatttttgtgactgtttttcttttctttcctttttttttttttttgagtcggagttttgctcttgtcactcaagctggagtgtaatggcgcgatctcgattcactgcaacctctgcctcccaggttcaagcgattctcccgcctc

SEQ ID NO: 24333 - DNA, 201 bp, Homo sapiens
caaagaagacatgtactttatggcttgaatcctaaaatatgtgactcccccactgggaatgtgttttaattgtttttgagaacatagtttttaagcacctmtttttggttccttcctaatcttcagagtctacacacttagctctggagaagcaagttatgtgtttaggaaataatagcttattttgctgagtgttactga

SEQ ID NO: 24334 - DNA, 201 bp, Homo sapiens
ttttttttttttaaactgggccccatctctaggttgctttgagctagctgtcttctggctaacaaaatagttgagtgctactttctttcaccaaaggcagygacatgcaccactttcattagcaggttaattaacttaggaaaatagatgatccaggctaactttgacctctgcacttcccaggtattcagttttttagtg

SEQ ID NO: 24335 - DNA, 201 bp, Homo sapiens
tggtaagagaccatggtaattttgacactatccccagctcaccagttggtaattggtattattaaacgtagctacaaaataaggtgttacacttttacacygttggtgggactgtaaactagttcaaccattgtggaagtcagtgtggtgattcctcagggatctagaactagaaataccatttgacccagcaatcccatt

SEQ ID NO: 24336 - DNA, 201 bp, Homo sapiens
tttaactttttttttttttttaaactgggccccatctctaggttgctttgagctagctgtcttctggctaacaaaatagttgagtgctactttctttcacyaaaggcagcgacatgcaccactttcattagcaggttaattaacttaggaaaatagatgatccaggctaactttgacctctgcacttcccaggtattcagt

SEQ ID NO: 24337 - DNA, 201 bp, Homo sapiens
gacacagatggccttggttgagcccaggcataagtagattttataaaaccccagatgaatctaatgtgagccattgatttgattatctaattggtaagagwccatggtaattttgacactatccccagctcaccagttggtaattggtattattaaacgtagctacaaaataaggtgttacacttttacactgttggtggg

SEQ ID NO: 24338 - DNA, 201 bp, Homo sapiens
ttggagggctcagaagaagacaggaagatgtgggaaagtttggaacttcctagagacttgttgaatggttttgaccaaagtgctgataatggtgtggacartgaagttcgggctgaggtggtcccaaatggagatgaggaacttgttgggaattggagtaaaggtcactcttgctgtgttttagtaaagagactggtggca

SEQ ID NO: 24339 - DNA, 201 bp, Homo sapiens
attttaatatgtacagttaaattattattgactatagtctgcctgttgtacaaatactaggtcttattctttttaactttttttttttttttaaactgggscccatctctaggttgctttgagctagctgtcttctggctaacaaaatagttgagtgctactttctttcaccaaaggcagcgacatgcaccactttcatta

SEQ ID NO: 24340 - DNA, 201 bp, Homo sapiens
gattcattatttccttcattcctcacagccacataatgttaaaagtagaactataattgagattctgtgacaactagcccagtgccattttttactaaatrctactgcctcctattctttctagacaaaaagacattattagttgtcatttcctttcagcagcctataaacttgaagattttctggtatagtattagaatg

SEQ ID NO: 24341 - DNA, 201 bp, Homo sapiens
gaaatgtgatcttccttgttgaacatgttaaatattttattcattctgtgttcttcttttcattgggagttagtgttgatttctcagactcttaggttgtrtctaattatagtgctgattccacctcaaaatattgctgaactgacagtggtcaaaggaaaccaaaaaagtagtccaaagaaagaaatgatgaggctttgc

SEQ ID NO: 24342 - DNA, 201 bp, Homo sapiens
atctgtcccctcagacatttatcctttgtgatataaacaacccaattgtactcttctagttattttaatatgtacagttaaattattattgactatagtcygcctgttgtacaaatactaggtcttattctttttaactttttttttttttttaaactgggccccatctctaggttgctttgagctagctgtcttctggct

SEQ ID NO: 24343 - DNA, 201 bp, Homo sapiens
agacttcctatatggtagctggctcccaagagtgtaaaagtggaaactgctggaccttcttaagcctaaacaccagagctggtgcagaattacttttgccrcttttttttggttaaagcaagacatggccagcccagatacaagaggaaggggaccataccaatcaaataccaggaggtgtggttcaccaggataccaaaa

SEQ ID NO: 24344 - DNA, 201 bp, Homo sapiens
aatttagagcatttaaagtttttattgctgttgctgtgagcgattagcagtgtactttcaattttgtactcttggttgtgtatacactctgggcacaatgrcatgccagaggatcatcaaactggatagttcacacttaaattgactacatcttccaaatgggcattttatgtctgtggccttctgacatttctctggcaa

SEQ ID NO: 24345 - DNA, 201 bp, Homo sapiens
catagtaggtgtatatatttatggggtacatgagctattttggtacaggcatgtagtgtgtaataatcacattatggaaaattaggtatctgtcccctcaracatttatcctttgtgatataaacaacccaattgtactcttctagttattttaatatgtacagttaaattattattgactatagtctgcctgttgtacaa

SEQ ID NO: 24346 - DNA, 201 bp, Homo sapiens
cttcagtggttccttatcttcctcacagcatggtgatcgcagggtacttagacttcctatatggtagctggctcccaagagtgtaaaagtggaaactgctrgaccttcttaagcctaaacaccagagctggtgcagaattacttttgccgcttttttttggttaaagcaagacatggccagcccagatacaagaggaaggg

SEQ ID NO: 24347 - DNA, 201 bp, Homo sapiens
tcttaaaaattaagttgatgatggttaggaaattactattttttaggccatgttgcaagaacaaaaagctcagctagtatactttatacaatataacttgyatagatatatattcatataaaactttaaaaagtgaaagtcacaatataaatctcacagtgtactcaggatattgctatttctgttagataatagactttc

SEQ ID NO: 24348 - DNA, 201 bp, Homo sapiens
gaattcatttagtgaattgatgtaacattagcattagtctgccattagcatatcatatagcagtattatccaggtaaggaaaaatatgccatctcaaaaawataaaaataaaagaaataaaagcgacagacttatgtgtcaccttttccctcattttgaatgttgtactctaatgaggaaaaaccccagctcccctccttc

SEQ ID NO: 24349 - DNA, 201 bp, Homo sapiens
gctagtccccttgcttctcaccatactgtttctcatgacctttttgttcatccttggatgttcagttcagccacttccttggagatatgaatctcccttcrttggaactaaacctagtgggattgacatgtcctgttcatgtgtttctctctttctcaagattatcatccccttcaggaaagaacctgtagctcccagctc

SEQ ID NO: 24350 - DNA, 201 bp, Homo sapiens
ttagtgtcatacctgggacatatgtcaatattgtaagttgtttgtaggaggcagggtcatggccgtgaggcattatcttgtccttatggagaaattaattstgacttccagttgaattcctgcatttcctccaaaattttggccaggccttttcatatgctagtccccttgcttctcaccatactgtttctcatgaccttt

SEQ ID NO: 24351 - DNA, 201 bp, Homo sapiens
aactgagatactccatggcaagttcttagtgtcatacctgggacatatgtcaatattgtaagttgtttgtaggaggcagggtcatggccgtgaggcattaycttgtccttatggagaaattaattctgacttccagttgaattcctgcatttcctccaaaattttggccaggccttttcatatgctagtccccttgcttct

SEQ ID NO: 24352 - DNA, 201 bp, Homo sapiens
cagatttttctcatatgtaaaggggaaataatattagtaccttcctcttagagctgtgacaattaagtgaaatactgagtatggcactttcagcatggtayctaagacttcaaaaccatttgataaatgtgattagctcttatattaaaagtaaaatgaaagttttagagcatccatagacatgtaacttttctgtacatc

SEQ ID NO: 24353 - DNA, 201 bp, Homo sapiens
ctatacttgttagctaccatagctttggttatttgtggcatctcagtttcattatggatagaatggaataatggcatcttcttcatcgggttatgtgtatwaactgagatactccatggcaagttcttagtgtcatacctgggacatatgtcaatattgtaagttgtttgtaggaggcagggtcatggccgtgaggcatta

SEQ ID NO: 24354 - DNA, 201 bp, Homo sapiens
ccttttatcatgttggagtcaaataacacacttgtctattataagtaaggagtgatctgtggatttgagttgtttcttaagaatagttcagtatcctcttrttattggtattagtttactcttctatctgtgaaacacaatagggcctggaattaaatttaaatctggaaagtgtgtaaaacataagcaaactccagagct

SEQ ID NO: 24355 - DNA, 201 bp, Homo sapiens
gagagagatcaatcttacatttatcgaaaatatttttatattttttttctggtgtatttgtttctatataaagttttaaatttaccaggagtcaaagttayagacattttatttatgatctgttttactgcttttatgcttagaaaattttccctcctctgacttattaaacacctacttataattttattgtttaatttt

SEQ ID NO: 24356 - DNA, 201 bp, Homo sapiens
ggcattaaatttaagccactacctgcttcacggcaataaaggagtaatgaggaaagaaagagaaggagagatctttttaaattttatctgtattaaacatrttcatgcataatagcacttttaatctccaacggtagccctgtgtggtggtatagactgagggttctacagtggcacagatctggatttgtgtcctgcctc

SEQ ID NO: 24357 - DNA, 201 bp, Homo sapiens
acctgttgtgcaagaaaaggaggctctagtctacctttatttacaaccatcagctaccgagtatcaaagataggaatggatccatggtgaaattttcaggmattcttgaaaatgtgtttatttctttcttgtctttattagatgtgccctgtctccttcatttctttatttccatggcccctgctactagaagcattgtaa

SEQ ID NO: 24358 - DNA, 201 bp, Homo sapiens
tggtttatcggattagagaactgaggaaacagaacctaacacagcatgttttgtggggacagaattgaagaaaggtgccatccttaaaggaaaggtcaggrtaagaatgtgggagagccagatgatacagctcttaaggcattaaatttaagccactacctgcttcacggcaataaaggagtaatgaggaaagaaagagaa

SEQ ID NO: 24359 - DNA, 201 bp, Homo sapiens
tcatagttcattagcggtatgaaatggtaaggacctgcctaggaggcttcctttttttactctcagatcggggtttgctgggtagcccttataaggggcartgtctttagggggaagaagaatctctgtatcattccatcagtagcctgtaccttctgaaagctggaagccatggcatcttctcctcaccctcattccttc

SEQ ID NO: 24360 - DNA, 201 bp, Homo sapiens
gcttggttttagcagattaaaatgtacatctattattgtgtgcaacaagtttcagacagttttcatccttgggcatactgtgcctaggttttccacctctyctaccttgtcctttttccatttgtaggatcctctgtttgatagttctctggtatccaaaatggttgatgtggagaagtgaacctaaaataggaactggag

SEQ ID NO: 24361 - DNA, 201 bp, Homo sapiens
catgtacattgtccccacagctggttaattcagagaaaatagaacatctttctctcagtaaatccagcagaatcccaaggagagctttaattggcctagcmtagaccatgtgctcttctctgaagcaatcactgcagccagagtgctctgttgattggccagcctggcttctgtgctcacttctcaggtgggaagtgggat

SEQ ID NO: 24362 - DNA, 201 bp, Homo sapiens
tttattttgttaataagacaaactatgcaacttggaaacaaatttgaatgttggatgattagtttatgtcttaacatttgaggatgtgcatggatataaarggcaggcagttccactctccttttccctgaacttgagttgacttcttcacattcactatggcaacctcaatgatcaacacatacaggagctctgaagtgc

SEQ ID NO: 24363 - DNA, 201 bp, Homo sapiens
agtggacagttggtaatcatgtgagattctttcccttctcctgtcccacaccatcctctgatcttctcatggtatagggctttcctcacagttcttttgggaactcttagaactctataacttcgcttgtctatggcaaacttttcttctctgttgtagtcatctttgtgcagatgttttatttagattcattgaatataa

SEQ ID NO: 24364 - DNA, 201 bp, Homo sapiens
tgtacatctcacatcccattctggagtggaccttcggaaagttcctctggctccaagaagcaagtttatcattgcatacatatttagctactttaaatccmtttttttttagagggaaagaaagataaggcaatggtaatgaggcaagaaataactgccaagtgcttatagaattgagtttggttcctgccccccctcccc

SEQ ID NO: 24365 - DNA, 201 bp, Homo sapiens
ggtttgccagaaccagtctaaatgcaggttttcattacagaacactaatgaccctcaagagaagtttaaatcatgtttattctcttacaatttttttttttacaatatcaggaagtacttcagaatttctcatgtgaagcacttactatgaagaccttattttctctcattcatgtatgtttttcattttttggatgcagt

SEQ ID NO: 24366 - DNA, 201 bp, Homo sapiens
tccttcctggcagcttccagaacatgccaggctcctttatacctctgcacctttcatcatagtgttctttactggctcgggatctgttctctgctgaggtstgctagggaacatctatttatcttttaagactcagattgaaagcagctatgcccttttcctgtgccaccccccatcctatactgtaggattgtccaatct

SEQ ID NO: 24367 - DNA, 201 bp, Homo sapiens
aagcaattcttctgcctcagcctcctcctgagtagctgggattacaggcacataccaccactcctagctaattttgtatttttagtagagatgggatttcrccatgttggctaggctggtcttgaactgctgacctcaggtgatctgcccacctcggcctcccaaagtgttgagattacaggcatgagccactgcgcctgg

SEQ ID NO: 24368 - DNA, 201 bp, Homo sapiens
catgatctcagctcaccgcaacctccacttcctgggtttaagcaattcttctgcctcagcctcctcctgagtagctgggattacaggcacataccaccackcctagctaattttgtatttttagtagagatgggatttcaccatgttggctaggctggtcttgaactgctgacctcaggtgatctgcccacctcggcctcc

SEQ ID NO: 24369 - DNA, 201 bp, Homo sapiens
gtactcccagcaacttgggaggctgacgtggaaggatctcttgagcccgcagggtcaagtctgcagtgagccatgatcatgccactgcactccagcctggrcagcaaagcaagaccctgtctcaaaacaaacaaacaaacaaaaataaacaaaaagaaaaaagattgttcataagtaattgttgaaaaataaatgaattat

SEQ ID NO: 24370 - DNA, 201 bp, Homo sapiens
caaaatggatttatttatgtgtgtgcatggctcaaggtatttctctcctgtctttctttttttaggttgaatttatgtatatatatatatatatatatatatataaagttttgttataagttcggggcacatgtgcaggtttgttacataggtaaacgtgtgtcatgggggtttattgtgcagattatttcatcacccagg

SEQ ID NO: 24371 - DNA, 201 bp, Homo sapiens
acagtttattatttctcataatgctatgggtgataaggtggttcttctgcttcagttgatggttggggtggtgggagcagctgtaaggtctcgaatgcccrtgtccacaggattggcagttagtgttagcctctgtctaggaactcagcagaggctttctgcacgttgacctcttcagtggttccttatcttcctcacagc

SEQ ID NO: 24372 - DNA, 201 bp, Homo sapiens
acaaaatggatttatttatgtgtgtgcatggctcaaggtatttctctcctgtctttctttttttaggttgaatttatgtatatatatatatatatatatatatataaagttttgttataagttcggggcacatgtgcaggtttgttacataggtaaacgtgtgtcatgggggtttattgtgcagattatttcatcacccag

SEQ ID NO: 24373 - DNA, 201 bp, Homo sapiens
tataaattaccatgggcagtatggccattttcacaatattgattcttcctacccagttttgtgattattatataacagtttattatttctcataatgctakgggtgataaggtggttcttctgcttcagttgatggttggggtggtgggagcagctgtaaggtctcgaatgcccgtgtccacaggattggcagttagtgtt

SEQ ID NO: 24374 - DNA, 201 bp, Homo sapiens
cacaaaatggatttatttatgtgtgtgcatggctcaaggtatttctctcctgtctttctttttttaggttgaatttatgtatatatatatatatatatatwtatataaagttttgttataagttcggggcacatgtgcaggtttgttacataggtaaacgtgtgtcatgggggtttattgtgcagattatttcatcaccca

SEQ ID NO: 24375 - DNA, 201 bp, Homo sapiens
gggttgtttgtttttttcttgtaaatttgtttgagttcattgtagattctggatattagccctttgtcagatgagtagattgcaaaaattttctcccatgytgtaggttgcctgttcactctgatggtagtttcttttgctgtgcagaagctctttagtttaattagatcccatttgtcaattttggctttcattgccatt

SEQ ID NO: 24376 - DNA, 201 bp, Homo sapiens
atccaacctccttagtatgcaagagctcatggtcttgtgctgcttcatctctcaaagctcttctccactttgtactcctgaccttcttgcagtttcttgaagactatgctgttaaatgtctctgtgctgttgcatatacctttttgtctgcttgaagttccctttttcatttgtctacttgaagattcagttcaagagtca

SEQ ID NO: 24377 - DNA, 201 bp, Homo sapiens
gagcctggggtaaggcactgaagtactgaaaccctcttggtgaggtacaatcccatggcttgccagagtgaggaaatgagatcgtgtctttttttttttttaagatggagaaaattataccatgtttgcaatacaaatggggttgatctagtatagatcaccacatattttctaattttcaaatacagtggattgttttta

SEQ ID NO: 24378 - DNA, 201 bp, Homo sapiens
ggggttgtttgtttttttcttgtaaatttgtttgagttcattgtagattctggatattagccctttgtcagatgagtagattgcaaaaattttctcccatkttgtaggttgcctgttcactctgatggtagtttcttttgctgtgcagaagctctttagtttaattagatcccatttgtcaattttggctttcattgccat

SEQ ID NO: 24379 - DNA, 201 bp, Homo sapiens
ttttgatttgcatttctctgatggcaagtgatgatgagcattttttcatgtgtctttcagctgcataaatgtcttttgagaagtgtctgttcatatccttygcccactttttcatggggttgtttgtttttttcttgtaaatttgtttgagttcattgtagattctggatattagccctttgtcagatgagtagattgcaa

SEQ ID NO: 24380 - DNA, 201 bp, Homo sapiens
ctgcgtagcatggaggggaagggtgctggcaggggcttcagatttgactctatacttgttagctaccatagctttggttatttgtggcatctcagtttcaytatggatagaatggaataatggcatcttcttcatcgggttatgtgtataaactgagatactccatggcaagttcttagtgtcatacctgggacatatgtc

SEQ ID NO: 24381 - DNA, 201 bp, Homo sapiens
acaatggttgaactagtttacagtcccaccaacagtgtaaaagtgttcctatttctccacatcctctccagcacctgttgtttcctgactttttaatgatygccattctaactggtgtgagatggtatctcgttgtggttttgatttgcatttctctgatggcaagtgatgatgagcattttttcatgtgtctttcagctg

SEQ ID NO: 24382 - DNA, 201 bp, Homo sapiens
ctccccgagaggctgcgtagcatggaggggaagggtgctggcaggggcttcagatttgactctatacttgttagctaccatagctttggttatttgtggcrtctcagtttcattatggatagaatggaataatggcatcttcttcatcgggttatgtgtataaactgagatactccatggcaagttcttagtgtcatacct

SEQ ID NO: 24383 - DNA, 201 bp, Homo sapiens
ccaacacactgggcttgttttagccttgtgacctttacacctgctattctttctgcctgtttgactgatccctcagcgttcaagtttttgcttagatttcyctacagagaggccttctctgactatcctgtctaaaattgccaccacccccttacattgctgtgtttttacagcatttgccaatgcctgagacagtcttgg

SEQ ID NO: 24384 - DNA, 201 bp, Homo sapiens
aggaatcgccacactgacttccacaatggttgaactagtttacagtcccaccaacagtgtaaaagtgttcctatttctccacatcctctccagcacctgtygtttcctgactttttaatgattgccattctaactggtgtgagatggtatctcgttgtggttttgatttgcatttctctgatggcaagtgatgatgagcat

SEQ ID NO: 24385 - DNA, 201 bp, Homo sapiens
gtttccttgcttttgaatagaaatacaattggtagaacatttgttaatgtaatgcttttggatgtgtttttgttgtattttttttaaacttaatttttctratagtttttctttcccatggcaaatgcaggtttttttttcatttttattttgtaaatttgagtttatactaaccactgcagagcagcagcagatataaaa

SEQ ID NO: 24386 - DNA, 201 bp, Homo sapiens
gataagtgtgggttggagctattcgggatgttttagtaggcggtgtttgttctgaacagagaatctttttgggctctattatttaatagtcaagagaggcmaaaggtccttgcagccgattatcttctgctgattgagtgacttgtacagattacaaataaatatatgcgtgatcgttactcctcaaggaactgatgacat

SEQ ID NO: 24387 - DNA, 201 bp, Homo sapiens
gtgtctttatagcagcatgatttataattctttgggtatatacccagtaatgggattgctgggtcaaatggtatttctagttctagatccctgaggaatcrccacactgacttccacaatggttgaactagtttacagtcccaccaacagtgtaaaagtgttcctatttctccacatcctctccagcacctgttgtttcct

SEQ ID NO: 24388 - DNA, 201 bp, Homo sapiens
gcattgagaaagaaagtggtgttctcctttgtagttggggaaaggaagaggggagagtaggttgcctagtctagcgctacgtgttttgctgatctgagctrcagtttaaacactgggtttgttggttattgctacatagaaattatataggccaactttttctgaagttgaagtcacttgtggggaatgttgcactttgtt

SEQ ID NO: 24389 - DNA, 201 bp, Homo sapiens
tgggtggttgagacagccccctcagttggtctcctggccccttctctgttccctatgtcctctaccccagtctgcccttcactttgctttaaaaaggcagwtttgaccctgtgattgtcctttccacactttctcaatggtccttcctagcttctggaatataagccacccttctaaagcagatttgcagaaccctttgtc

SEQ ID NO: 24390 - DNA, 201 bp, Homo sapiens
cctttgtaagtttgtagataatgtgttgtccatacatatgtgtgtatatatatctttatgtgtatgtgcacatatatttatatgtactatatatgtgtgtrtatatatatatctttatgtgtatatatgccgtgtgtgtgtatctttatatgtgtgtgtatctatatgtgtgtgtatatatatcttcatatatatgtatat

SEQ ID NO: 24391 - DNA, 201 bp, Homo sapiens
gaaatatagacagaaaatagaatgtaatttagtacagagaaacagtgactgatatatatgagaataattttgtttcaaagtgagtcagggtaggcccggcycagtggctcatatctgtaatcccagcactttgggaggccgaggcggggggatcacttgaggtcagaagttcgagaccagcctggccaacatactgaaacc

SEQ ID NO: 24392 - DNA, 201 bp, Homo sapiens
ttccagttcctgtaggtgcagtgttagattgttaatttgagaacttttaaactttttgatgtaggcatttagtgctataaactttcctcttaaaactactytcattatatcccaagtattttggtatgttgtaattctgtttcattaatttcaaagattttttgatttccaccttcattttgttgtttaccttaaaatcat

SEQ ID NO: 24393 - DNA, 201 bp, Homo sapiens
ctaaattcagaggagtgtgcgtgccgagaaagaatatcaattaggtagaaatatagacagaaaatagaatgtaatttagtacagagaaacagtgactgatrtatatgagaataattttgtttcaaagtgagtcagggtaggcccggctcagtggctcatatctgtaatcccagcactttgggaggccgaggcggggggatc

SEQ ID NO: 24394 - DNA, 201 bp, Homo sapiens
ttcctgatagcttctggctattagagctttgtcggatgcatagtttgcgaatatattcttcttgattcatttaagttcctgatagattctggttattagamctttgtcggatgcatagtttgcgaatatattcttccattctgtagtttgtttactctgttgatagtttctcctactgtgcagaagctctttaggttaatt

SEQ ID NO: 24395 - DNA, 201 bp, Homo sapiens
tgcctataccatgttacatttctcccaactgtatttgtgagttttaggtgcctcttatccttgccaacatttggtgtggtcattcttttttttttttttttaaatacagggtcttcctctgttgcccaggctggagtgtgtggtactacaatcgtagctcactgtagcctcaaactcctgggctcaagccatcttcccatc

SEQ ID NO: 24396 - DNA, 201 bp, Homo sapiens
cttctctaagccgccgattgtaaaatgtagatgggcctatctttaaatttatgtaaaatttggagatgatgctaaattcagaggagtgtgcgtgccgagaragaatatcaattaggtagaaatatagacagaaaatagaatgtaatttagtacagagaaacagtgactgatatatatgagaataattttgtttcaaagtga

SEQ ID NO: 24397 - DNA, 201 bp, Homo sapiens
gttagatttttctcttcccactggaagtgaaacactgttaattcactattgagccccagacagaaatagtgtgtatggtgagaatgtggtgaggggtaatrgagattgtttggattagcaagtttctgaacagaatacaaactccttttgatttagagatggcagtgtttatgggaaggctaagacaaggtgggaaaaaga

SEQ ID NO: 24398 - DNA, 201 bp, Homo sapiens
tctgaaagtgtcttccatttttggtagaaaaatggctaagtttggtgcagatttgcagagcacagaaattaaggtatttactagagttgggggtaaagaargataaaacatttaattcattgaaattaatttcactgtgaacatttgactcaaagaaggcagactaaaggtgtctggttgtgggaattaacagaattcgag

SEQ ID NO: 24399 - DNA, 201 bp, Homo sapiens
gggtttacaggcatgaactaccgtgcccaccccaactgagccctttcttaatgactacactaagttacctccttctagtcacacagttcttgatggcagarccaggatttgcatccaggtcttttgttcctagttttcttcccctgtatatcgtgcgtgtgtgtgtatttcatttgccttgtagtaggccatgatcagggc

SEQ ID NO: 24400 - DNA, 201 bp, Homo sapiens
gctgagctggtggctgcagcatttttatgggatgttccctatttgtgtgggaagacaaccctgaaggtgaatttgtgtggagagaaaacacagaagggcascaacacagcataagcacaagtcaggggaggctgtgacatcagatgggcgctgaatgcttgtggctgggaggacaggcaaggcccaaaggagtagctctct

SEQ ID NO: 24401 - DNA, 201 bp, Homo sapiens
agcagtttttaagattctattatatgtggagtaccatttatgaggatacaaaatacaaataagaggatgtcctcaagttggatacagatagtgaaacaaartttacaaataattacacaataacatgacgaagtctatagtggagccaaacaaaaaggactgcaggaacactaaggggtaagctaaaaatcctgcctgaga

SEQ ID NO: 24402 - DNA, 201 bp, Homo sapiens
cagctgggtgagagagatgagaccaagaagaggacagagacatgaatggttactacagaggaagaaggtttgagaaataaaactgagtagagagagagttwtgtgagatgaagaatgtgcaaagacattgagatctcagtgatgtctctaacaaaaatctattctgaacgatgatgtaggacccttaataacattagtact

SEQ ID NO: 24403 - DNA, 201 bp, Homo sapiens
gaagaatgtaaaatgatcccatagttggcatggttctaaaggaaatagtgtaggagaatagtttagagtcaagcagagatggttgaaatgctagctttgcrccatttgttagctatgtgagcttggggaatttacttaaatattctgagcttttgtttattcattttgtaaattagacgattattatgaggatacagtgag

SEQ ID NO: 24404 - DNA, 201 bp, Homo sapiens
atgttgattcttaccacagtacctgagcaaagtgagaacttactattttaatctaaggtgatatagtgaaaaatcaggtttttttttttttttgaaagacrtgggcttatttagtatttttattgttttcatgatctggagtacacgtggatgggaacgttaaggagcaccaaactttaaaataatacgcaagtatggcat

SEQ ID NO: 24405 - DNA, 201 bp, Homo sapiens
atatctatatacgaagaatgagaacatatgggcacagggaggggaacatcacacaccggggcctgtcgggggttggagggcaaggggagggataacattakgagaaatacctaacgtagatgacgggttgatgggtgcaggaaaccaccatggcacatgtatacctatgtaacaaacctgcacttgcttcacatgtatccc

SEQ ID NO: 24406 - DNA, 201 bp, Homo sapiens
tttagggagtaattttgctgcaaagagaacagaaaaatgggatagtggctactaggggaaaagaaatcaatatatgggttaattaattaattaattaattwatttattttttagacagagtcttgctccgtcacccaggctggagtgcagtggtgagatcttggctcactgcaacctctgcctcctgggttcaaccaattc

SEQ ID NO: 24407 - DNA, 201 bp, Homo sapiens
agagtagtttatttgtcctgtcggaaaatttttgtacagaaggatgttaaactcggttcagagcctctttctctttcagaatgttaaaacaaaacaaaaaaccaaactgctttcaacttaaaagggagaggacagagccctctccctgacacatttcagcactaatcctctatgacgcagagcctcagctacttagcaacc

SEQ ID NO: 24408 - DNA, 201 bp, Homo sapiens
aagagtagtttatttgtcctgtcggaaaatttttgtacagaaggatgttaaactcggttcagagcctctttctctttcagaatgttaaaacaaaacaaaaaaccaaactgctttcaacttaaaagggagaggacagagccctctccctgacacatttcagcactaatcctctatgacgcagagcctcagctacttagcaac

SEQ ID NO: 24409 - DNA, 201 bp, Homo sapiens
gaagagtagtttatttgtcctgtcggaaaatttttgtacagaaggatgttaaactcggttcagagcctctttctctttcagaatgttaaaacaaaacaaaaaaccaaactgctttcaacttaaaagggagaggacagagccctctccctgacacatttcagcactaatcctctatgacgcagagcctcagctacttagcaa

SEQ ID NO: 24410 - DNA, 201 bp, Homo sapiens
ggaagagtagtttatttgtcctgtcggaaaatttttgtacagaaggatgttaaactcggttcagagcctctttctctttcagaatgttaaaacaaaacaaaaaaccaaactgctttcaacttaaaagggagaggacagagccctctccctgacacatttcagcactaatcctctatgacgcagagcctcagctacttagca

SEQ ID NO: 24411 - DNA, 201 bp, Homo sapiens
agtggaagagtagtttatttgtcctgtcggaaaatttttgtacagaaggatgttaaactcggttcagagcctctttctctttcagaatgttaaaacaaaacaaaaaaccaaactgctttcaacttaaaagggagaggacagagccctctccctgacacatttcagcactaatcctctatgacgcagagcctcagctactta

SEQ ID NO: 24412 - DNA, 201 bp, Homo sapiens
ttggatcattagtgcaactttatataaaaacagctttgagatggatggtaaactgtgcatagtttaagtgtacaatttgataagtttgaacacacacataygtacatacatatatataagtgaaactatcactataatcaggataataaacatatccaatatcatccctaaaagtttttgtgccccttggtaatccctcca

SEQ ID NO: 24413 - DNA, 201 bp, Homo sapiens
ggctggagtgcagtggctggatctcagctcaccgcaacctccgcctcatgggttcaagcgattctcctacctcagcctcccgagcagctgggactacaggygcgtgccaccacgcccggccaattttttgtatttttagtagagacgggttttcaccgtgttagccaggatggtctcgatctcctgacctcgtgatccgcc

SEQ ID NO: 24414 - DNA, 201 bp, Homo sapiens
tctctgtacccctgacaacagatcatgctgaaattggaagtgctgacagtaagaaataaattgccaaagataaccctaacaaatgaccaaaaaaaaaaaaatacattccattatatcataaactcacaacccattccacaaaaaaccatatgagttgaagaaacactatactttgtaagttgattatggctgaatagaggt

SEQ ID NO: 24415 - DNA, 201 bp, Homo sapiens
tagcttgaacccgggaggcggatgttgaagtgagtcgagatctgctgcactccagcctgggtgacagagtgagactctgtctcaaaaaaaaaaaaaaaaaattgtaaagggaaaagactgtaattttttcctttagtaaggataactcaggtgagaagcccattgcatttttattgcaccaatttctgacacttaaatgtc

SEQ ID NO: 24416 - DNA, 201 bp, Homo sapiens
tcactcttagcggtactaaattcagatttgaaaggaaattttgtttcaggtcccccttttaaaaacacttctgtattgttttgggaaactccagcattctrcatacctacatgtagctttagttttatttaaccagaaacacacgactattagtagagtgtaactatccttttaatattgctaatttgtttgttaattcct

SEQ ID NO: 24417 - DNA, 201 bp, Homo sapiens
ttcaataggttatgtaccatccatgatttacttctcttataacataaaaaaagaaatacaatgaggaataaagacaaaggccgggcgcagtggctcacacytgtaatcccagcactttgggaggccagggcgggtggatcacctgaggtcaggagttcaagaccagcctggccaatatggtaaaaccctgtctctactaaa

SEQ ID NO: 24418 - DNA, 201 bp, Homo sapiens
gaactccctgtggctgctaactcacacgtccacagagctgcatacagacgtgtcaggctctaagagttctacagattgtccaatacagtgcttgctttttktttgtttgtttgttttttgagggcttttgaggctgtttttagaatatattactgggagttattaccttcctcctggaatttgcctagtattggtgagctc

SEQ ID NO: 24419 - DNA, 201 bp, Homo sapiens
tgtgacttagaatgccttaaccgtctgggagtgcagcccactaggtgtcagccttattttacccagctcctattcaagatggcgttgctctggttcactcrtctgtgacagacctacttgctccaggtatttaaggaaccctaagaaagcatgactaaaaagagtgagcaagtgtgaggctggaacaagatgaaactggag

SEQ ID NO: 24420 - DNA, 201 bp, Homo sapiens
gagacggggtttcaccatgttggccaggctggtcttgaactcctgacctcaggtgatccacccgcttcggcctcccaaagtgctgggtttacaggcatgarctaccgtgcccaccccaactgagccctttcttaatgactacactaagttacctccttctagtcacacagttcttgatggcagagccaggatttgcatcca

SEQ ID NO: 24421 - DNA, 201 bp, Homo sapiens
ttggtctatgtgtctgtttttatgccagtgccatgctgatttggctactatagatttgtattatattttgaagtcaggtagtgtgatatctccagctttaktccatttgtccaggattgctttggctttgtgttatgttcaggtgcttttataaactgtgattgaacagttgtgcatgtgaactttgtgctaagtgtcact

SEQ ID NO: 24422 - DNA, 201 bp, Homo sapiens
cagtttttctttcctgtgtcactgggtagtctaaaggcatagtgaggtgtttagtaacttcatagtttagtaactgtgaagccaggctgcctcagtttgawtcctacctcctctaactattggctgtatgacattgggcaactatttaacatctctctacctctgtttcctcatctgtaaaatgggggtagctgtgagaac

SEQ ID NO: 24423 - DNA, 201 bp, Homo sapiens
agtatgcatagtaacaataaagaattttcatattgctatgtgattaatgtttattaagtataaaatttcacagttgtgtaaaaatatgcaaaatttataamtaattcatttttgagcaaggacacatgattggggtgggattactatttaataaaaatgctactctattatttattgtaagtcttttacaagtgtacagaa

SEQ ID NO: 24424 - DNA, 201 bp, Homo sapiens
gaatcctgcaggtgcttgtggccatgggagaaagtgtgtggcagcacctctggcacggagagttacttcctgcaagaagtccaagctgaaaatggatcccygctgggccacatttctggtgccacttcattgagcactttctgtgtagcagcagtttcctggtgttactgctgaattgtttcaggggtaatttcctgtgag

SEQ ID NO: 24425 - DNA, 201 bp, Homo sapiens
aaatggctccatggttctgcagtgctctggctgcctaaattgaacattatgtatctgtgttgttctgatggaattagaatcctgcaggtgcttgtggccaygggagaaagtgtgtggcagcacctctggcacggagagttacttcctgcaagaagtccaagctgaaaatggatccccgctgggccacatttctggtgccac

SEQ ID NO: 24426 - DNA, 201 bp, Homo sapiens
tattaactataaaaggcccccaggagctgattcatacctaacttatttctactactcctgcaatagcagagatctggtaattttccacatgtactgaattmtttcttgccactataccttgggtcatgctcttgtttctgaacaaaatgacttgacttctctatttactctacttctatatctggttaattcctatttatc

SEQ ID NO: 24427 - DNA, 201 bp, Homo sapiens
actaaactgcgaccctggtgctgtgtgggtagctcctttcctgcctcacttcctccttttccttccctcgtggcattctcagctttccatatgccctttcygggtcctggttgctcctgttccctcccctgttgctcctgatactcacctcttcttgtcttttctctctttctccctctactttttcaattctcatggttt

SEQ ID NO: 24428 - DNA, 201 bp, Homo sapiens
ttatgatgcctttttgaaaatcaatgatacagaaactccagagctaggctgcctaggtttgaatgcagtcttcactatttaccagctctgtgaccttgctsaagtcacttaaaccctctgtaccttaacttctttaaaatggaaataataagacccacttcatagggttgtcatgaggcttaaacgagttaatatatacta

SEQ ID NO: 24429 - DNA, 201 bp, Homo sapiens
tttcctgtaagccaaaacttgtaaagctttgtctccctttaaacttttgttaatgatattatttaaacatttcttttttaagcctaaattttctaagaaartgtgatttgtttacttcagtgcttgctgttatagaggctgtcattttttcccaaactagactttattgtgaggtgtggcatgcttaatttgtccacttgt

SEQ ID NO: 24430 - DNA, 201 bp, Homo sapiens
gtaccagcatgctgtctcagataagcggttctgaggaactgcagtctatggtttatgcacttactgagttaccgtggtgtcatgggcagggtgaatgcacmtgaggtggtgcaggacgccaaatagtgtaactagaagtcccagaggaggctaaagccttcttgactaaactgcgaccctggtgctgtgtgggtagctcct

SEQ ID NO: 24431 - DNA, 201 bp, Homo sapiens
aagcaggaagaaattcaagtaggaagtgacttttaagctgagctttgaaaggtgacagatttggataggcagatattttgtgagaggctattttattttgmtggaaagcagaggattttatttgggcagaggcattggggtaggaaaggtcaaagcatttgcaggtaggggagtagaccagtttgacagaatatttatgta

SEQ ID NO: 24432 - DNA, 201 bp, Homo sapiens
ttctttgtctgcaagttacttgtattaagcttatgttttatacatagctcataagaaagaaaaaacaaaggaatacaatacacagatatatacatgttaakgttagtaaggttgcaggtaacttttattttctaatttatgcttctttgtattttccagcttttagaagcttggaaatactcttttcgtaataggaaataa

SEQ ID NO: 24433 - DNA, 201 bp, Homo sapiens
cattcaggaagtaccagcatgctgtctcagataagcggttctgaggaactgcagtctatggtttatgcacttactgagttaccgtggtgtcatgggcaggrtgaatgcacctgaggtggtgcaggacgccaaatagtgtaactagaagtcccagaggaggctaaagccttcttgactaaactgcgaccctggtgctgtgtg

SEQ ID NO: 24434 - DNA, 201 bp, Homo sapiens
tgttaaatttgttgtgtgtaattccctacatgtatacatgcattatatatatgtattcacgtgatgatactcgttcccccatattttccaaaatgaggtcrtagaacaggtgctgagttttgatctgcttccttttttttttaatttaataatgacattctttgcccaaaggagtaataaaacctatttttatctaaaatc

SEQ ID NO: 24435 - DNA, 201 bp, Homo sapiens
ttattcagcaccttgcgcagaacctaataagtgctcaaaaatgacatgcagtgaatgagatgattggatggccgcttaccgctgttggctcagcccagacwtttttttattaatatatctctatgactgtgcccttgacactctcttctatatttctagatgcttagtaaaagaaatagatactttcataatttattttta

SEQ ID NO: 24436 - DNA, 201 bp, Homo sapiens
gaaatgtccttgtcttctgtaaataaatgctatcagattaaattactggcctggcacagtggctcatgcctgtaatcccaacactttgggaggctggggcragtggatgatttgaggtcaggagtttgaaaccagcctggccaacatggtgaaaccccatctctactaaaaatacaaagattagccaggcatggtggtatg

SEQ ID NO: 24437 - DNA, 201 bp, Homo sapiens
tcttcaataggttatgtaccatccatgatttacttctcttataacataaaaaaagaaatacaatgaggaataaagacaaaggccgggcgcagtggctcacrcttgtaatcccagcactttgggaggccagggcgggtggatcacctgaggtcaggagttcaagaccagcctggccaatatggtaaaaccctgtctctacta

SEQ ID NO: 24438 - DNA, 201 bp, Homo sapiens
tctactaaaaatacaaagattagccaggcatggtggtatgtgcctgtaatcccagctactcgggagactgaggcagaagaattacttgagcccgggaggcrgaggttgcagtgagcagagatccagagatcgcgccattgcactccagcctgggcagcagagtgagatgccgtcccaaaaagaaaaaaaaaaaaaaagatt

SEQ ID NO: 24439 - DNA, 201 bp, Homo sapiens
atactgacttggtgttaagtgtacaagaatgaacaagatgtgttttccctcacacaactccctatgtcctggagcaaaggtaatggtgaagatttgagatyagggagatacagagggtatacttaaaagaggcatagactttagatatgtgagcatcaggaaatgatgtctaacctggaatccaggatatgagcagggatc

SEQ ID NO: 24440 - DNA, 201 bp, Homo sapiens
aaggttttaatttggctgttatttaatttgtgataatgttatgtaaatttaacatgctctgagaatgcccaggcatagggtatagaagtagagtgtgttgrttaagagtttgggcccatggatcagagagatctggatccagattcttggctttgttacctcctctctgtgtggtcataacacaggcaaagcacttcaagc

SEQ ID NO: 24441 - DNA, 201 bp, Homo sapiens
ctgagactagtttaaatcttttaactacagaacaaatttgaagccattaaaaaaacaggggttctggtttactttttaatagttctgactttcccaagacwatatcctttgcagaggactccctgcaataatatttagaagtgactttctctattattttcagtaggggtatatgactgtgaacataatatttttgtctta

SEQ ID NO: 24442 - DNA, 201 bp, Homo sapiens
taggagctttgttgcctctggctagaaattgcctcacttgtgtcctgagactagtttaaatcttttaactacagaacaaatttgaagccattaaaaaaacrggggttctggtttactttttaatagttctgactttcccaagacaatatcctttgcagaggactccctgcaataatatttagaagtgactttctctattat

SEQ ID NO: 24443 - DNA, 201 bp, Homo sapiens
agtgaatttcagtttgttcagttttcaggaaaatacgaaaattatgaatagaaaagacagacattttgaacatactggggaatatgtaaaacctcagtttycacattatgttaaataaaaatgactttgaaacgaaataatatttgccaataacttaaagcgtaggcaaatatttgttctttaaaacaaaatggcaaggtg

SEQ ID NO: 24444 - DNA, 201 bp, Homo sapiens
attttaaaaatttctccaatttgctttcacctgagaaccctgcaagtctgctggatatgactttgaggcccttaggaaggctggaaaaaaacctcatttcwtccatttaacttgtgaatgaaaacaacagaaagaaccctgagagaaatccatggctaatgtgtgcttagcacagccaagtgtgctctgaatgaaaccaag

SEQ ID NO: 24445 - DNA, 201 bp, Homo sapiens
ttatagcacgtatcaaattgtattatttattcctgcttctctttgctagtgggctgtaaggtcgttgaacatgagggaccacatcttattcagcaccttgygcagaacctaataagtgctcaaaaatgacatgcagtgaatgagatgattggatggccgcttaccgctgttggctcagcccagacatttttttattaatat

SEQ ID NO: 24446 - DNA, 201 bp, Homo sapiens
tttttgtgccttggctaccaacaaatctagagcaaaattttcctttcattcacaatgactcttgttacagcttttctagtgcagctatccatcttgctcarcatagcttcaatgctgattttaatgatcctagcagtcttttacaaatccatgttgaaagtagttggagtaaaaaccaaaattacattttaaaaatttctc

SEQ ID NO: 24447 - DNA, 201 bp, Homo sapiens
cccattatagcacgtatcaaattgtattatttattcctgcttctctttgctagtgggctgtaaggtcgttgaacatgagggaccacatcttattcagcacyttgcgcagaacctaataagtgctcaaaaatgacatgcagtgaatgagatgattggatggccgcttaccgctgttggctcagcccagacatttttttatta

SEQ ID NO: 24448 - DNA, 201 bp, Homo sapiens
tttaggccttaccttacttgacctttctctttcatttaacactgctaatcatcctccttgatgctatccttcacaacccatcatgcgcccatgccatcttytggaaatctgattgactttcctggtttagctacaacccacaccccaggtagataaaggtccatctgtgcatgaaacttctctcctgaagtatgaatttta

SEQ ID NO: 24449 - DNA, 201 bp, Homo sapiens
caccatgcgtggctaatttttgtatttttagtagagacggggtttcaccatgttggccaggctgatctcgaactgctgacctcaggtgatccacccgcctyggcctcccaaagtgctgggattacaggcgtgaaccaccctctccagcccagttttgtttttaagtagttatctctaagcaatttaataaatatttatgtc

SEQ ID NO: 24450 - DNA, 201 bp, Homo sapiens
ggatatagataaatgagttgccttatatcaagagactgcacaaataagtctgtaagctttttttttaattctttaattttatttgtatcctactggccttygctctccttcccctctcttgttgatacatagatatgatttatatcctcatggcaggtgtcatactttgtataacttcataaatattttcttaaaggttta

SEQ ID NO: 24451 - DNA, 201 bp, Homo sapiens
caagattttgagagaccagtaacaccgaatgctcatagttcattagcggtatgaaatggtaaggacctgcctaggaggcttcctttttttactctcagatyggggtttgctgggtagcccttataaggggcaatgtctttagggggaagaagaatctctgtatcattccatcagtagcctgtaccttctgaaagctggaag

SEQ ID NO: 24452 - DNA, 201 bp, Homo sapiens
taacgaaaacctggtttaataatccagcaatgttagccattgggattcatcctttggtataataacatcagtatccatggctgggaaattattaggttctstatgtgttatggcaaatacgggtatggatatagataaatgagttgccttatatcaagagactgcacaaataagtctgtaagctttttttttaattcttta

SEQ ID NO: 24453 - DNA, 201 bp, Homo sapiens
tcaagggagggaggtgattggatcatgggggcattttccccatgctgttctcatgatagtgaataagttctcaggagatctgatggttttataaggcagtyttccctgctctggcttgctctcttgcctgcctccatgtaagaattgcctcttttgccttctgccatgattgtaagtttcctgaggcctccccatccatgt

SEQ ID NO: 24454 - DNA, 201 bp, Homo sapiens
gcagaagcttcctgctctctgaatcctttttggaggtgctggttttcttctgaaagttttaaggtgcttttttcttatgaaccaactgctcagattttttwaaaaaattaaatatcctgctacctcattttttctctatagcacattcccatgtcttaacttcgatttttttcttttctttttgtgtcacctgactttgtt

SEQ ID NO: 24455 - DNA, 201 bp, Homo sapiens
agaacctctgctagggcagtacagaagggaaatgtggggttggagctcccacacagagtccccactgccactgcctagtggagctgtgagaagagggccayggtcctccagattccacaatggtaggtccacccacagtttgcactgtgcctggaaaacccgcagacactcattgccagcctgtgagagcagccaggaggg

SEQ ID NO: 24456 - DNA, 201 bp, Homo sapiens
acctctgagaggcagatgattttctttcagcacttaggtctgaagtaacttaaatgaaaggaactaactgggtcaaaacatattgactttgtataacaatwtttgatgcaaatgatatccaattgatttcaggagaggacattgataaagtaattcttaatataatttatgatcttatttatactacagttctatgtagaa

SEQ ID NO: 24457 - DNA, 201 bp, Homo sapiens
atggcattctttaacaaaatcagcattttaactcaattgaggaaggaaggaagggtgccttttctgattgataccaaagggtcatttggccagtgtctacktagtggccctgagtggaggcaattccacaagctcttttgggaactgatgtttgatggaggaggaagaggaaatgatggagcacgtaaggtggaaagttat

SEQ ID NO: 24458 - DNA, 201 bp, Homo sapiens
ttatctgaaatgaaatacagatgattaaattatttcctaaaatcaataaaattgaatcaactgaaaaaatcaatgtgctatataaataatgccttttaaartatttcccatgtctttgtggaatattggctcagaggtttgcaatctgggcagcaatgtaaagtttcattcataaaaagtattctagattttttttttaag

SEQ ID NO: 24459 - DNA, 201 bp, Homo sapiens
accttaggtaattggaaaatgatgagcaactttaaatttaggagatttttcttttacaatataggcacagttccttggtaatctcaacattctggtggtgmcctttgcttctgaccttatttaatagactcttcacttgtgttgaaagcaattctacaaataccagcttttatctagtgtttacatgggcagtcctgcttg

SEQ ID NO: 24460 - DNA, 201 bp, Homo sapiens
ttcccagttgtgaagcttatgttgacatgtgttccttgctggccatttcagcctgggtgacagaatgaaaccctctctcttaaaaacaaaacaaaacaaarcaaaacaaaacaagccttggcttagggttgtggcttctggctacagttacaagccttctgcatttctgtaagtggctgtgataaacagggaatgctggaa

SEQ ID NO: 24461 - DNA, 201 bp, Homo sapiens
ttatcagagttttttaggtaatgaaaacgggcacacgtgtgacacaaataggagttagcaggatactcttcgtaatatttttttccttgtgtctattatasgattttccattatatatttctgtggcatctctccatcaggattctcattgtgcatgaatctatctatgcacaagagtgtcaactctgccagcagtatctg

SEQ ID NO: 24462 - DNA, 201 bp, Homo sapiens
aaattagctgggcgtggttgtgggtgcctgtaatcctagctactcgggaggctgaggcaggagaatcacttgaaccctggaggtggaggttgcaggcagcygagatcacaccactgcacaccagcccgggtgacagtgtgagatttcatcttaaaaaaaaaaaaaagatcagactcctacccagtggacctattttggtgc

SEQ ID NO: 24463 - DNA, 201 bp, Homo sapiens
gtagaaagctccttcctcttccttcctcctccctcccttattctcagtgttcaccaagtctggttgtcccagtctcctatctctgtctgttcctctcctcmtctgtctttatgttagttatggccctgaatataaaacagataaaggaagggtctggttgatgggggactggtgggtttcctctgaatgggcttgaaagag

SEQ ID NO: 24464 - DNA, 201 bp, Homo sapiens
tttttttgaaatggagtcttgctttgtcacccaggctggagtgcagtggcgcgatcttggctcactgcaagctctgcctcttgggttcacgccattctccygcctcagcctcccgagtagctgggactacaggtgcctgccaccacgcccggctaattttttgtgtgtttttagtagagacggggtttcacggtgttagcc

SEQ ID NO: 24465 - DNA, 201 bp, Homo sapiens
ttcttgctcttatatcagtgatttgctctgcatctttttgactaaaactttgtatatgaccatttattcttcagggaaaattccaagaaatgtaatttccragtccgattgtgtggtccatggccttttctgacttgtattttgcttcttcctaaattctttttgcttacttccatttctctggtaactggatgccagaaa

SEQ ID NO: 24466 - DNA, 201 bp, Homo sapiens
cctcaaagaatcctgagaggttaaaactgagtttataattatatagacttggtaatttgttaaatgcagcaagaaaaataagattacaccataagtttttyggaaatttcccattttaaataaaattgtcaattctatgctgtatgtgatgggtatggaatttgtgattaatctgtaccaattggattaaaatgggttcag

SEQ ID NO: 24467 - DNA, 201 bp, Homo sapiens
ctgacagtcctagtggctgggagaaccctttcctgtccactcttgcctatctaactagctgtaacaggtttaaaacttgatagtggatccctgttgtttataagagaataacatctaaactcttttacaagccgcacaagattcttcatgatcaggcctctgcctacctttctaaccttatttctcactttcctactccca

SEQ ID NO: 24468 - DNA, 201 bp, Homo sapiens
cctcagtgttttccaaacattatggcacactggagaaaggcagatggaggaggcacagtcttttataagaacagagatacttcccgtttgtatttgtgcawgacaggttacggattgctttcatgggcattagctcacttaatcctcaagctaattttatgggagagaaattgtttaatcctcactggggagtgatggcat

SEQ ID NO: 24469 - DNA, 201 bp, Homo sapiens
aattataactgaaaacctcagtgttttccaaacattatggcacactggagaaaggcagatggaggaggcacagtcttttataagaacagagatacttcccrtttgtatttgtgcaagacaggttacggattgctttcatgggcattagctcacttaatcctcaagctaattttatgggagagaaattgtttaatcctcact

SEQ ID NO: 24470 - DNA, 201 bp, Homo sapiens
caaaaggaccaaatcttgtttttcttttctgtctcccacagtatttagtacagtgctggctataggaccatgcctactaagtaagcactaaaatgagcccrttactgattgaggcttgaagtaaatttaattatagagtttgtacttcctaattataactgaaaacctcagtgttttccaaacattatggcacactggaga

SEQ ID NO: 24471 - DNA, 201 bp, Homo sapiens
aacttctgctccttttaacccctcactattcaagtgagtccctagttgggcctacagatacattcctacctttatacctgtctttaggctgtctctctctstaatgccttccacaaacttttggccaattaaaataaaaaatgagttcttccctttagttttcaaagtaagttccacctgcagggtttgcccttcagtcct

SEQ ID NO: 24472 - DNA, 201 bp, Homo sapiens
gtgttcctgttccccaaaggtgcttttcacactgtatgttcggacctggacatacatgaatacccttccttttggccagtctgaaagctattggagagcaraaactttgttttatttccttctgaagttagctttgtggttcccataggaaaggtattcacagaatatttgtcgattaaataattaactgttattctattc

SEQ ID NO: 24473 - DNA, 201 bp, Homo sapiens
cttgaactcaggaggcagaggttgcggtgagctgagatcgcaccattgcactccagcctgggcaacaagagcaaaactccatctctcaaaaaaaaaaaaawatatatatatatatatatgccttaaaaatatatatatatatgccttaaaactactttttactttatggttcattttcatggagtggtttattttttccat

SEQ ID NO: 24474 - DNA, 201 bp, Homo sapiens
ccttctactgcctggataaactcagtgattttttttttctggatactgagacacaaaacaagacattaatttcctccttatggaggtttttttggcagtcrgttatataaatatatattatgatacagcttgatgtggacagcacttgaggtgtgtgcaaggtagagtgatagatgagcccagtggaggcaactgtcaacc

SEQ ID NO: 24475 - DNA, 201 bp, Homo sapiens
gaaatatgtcctgaaaggcccctcatagaattggttttactgagtaatactttggtactaagtccttggctcaaatcaagaaaggacagaaagggaaggcmcacagttgtatttataaggatgtcgttgaagacattggttatatatcacacaatttcccttttatgaaaacccttcagtgtatcttttttcttttatctt

SEQ ID NO: 24476 - DNA, 201 bp, Homo sapiens
taatcatatttagttatacatttaacatgttcctcttattatataatacagttaaataaaatgcagttggccagtgaatatctaagaaatttggtgtctgkatatgttagattttagtgtctatatttgagatttatttttcatctgaaacagtattctagccaggacacaaagcatgtgaatgattctggaagagaagag

SEQ ID NO: 24477 - DNA, 201 bp, Homo sapiens
actttctgtgatgatggaaattttttgataactgtgtagttcattacagtggccacatgtgtgtggctactgaacacttaaaatgtggctagtgcaactgyagaactgggatttttgtttttaaaatttaaattaatttaaatagcctcatgtggctagtgggtactatactggagaatacagctttccagaatctttcag

SEQ ID NO: 24478 - DNA, 201 bp, Homo sapiens
catttgcttaatcttccatatacctatggaaaatttagcattaaattggtcatccttattgtatttatgtgctcaggagttcatgtgtttgagaacaaaartatccttatcaaaaatatgttggattcttttttccaaaggaacttgtggagtactacaagcatcattctctcaaggaagggttcagaaccttagatacaa

SEQ ID NO: 24479 - DNA, 201 bp, Homo sapiens
ctcatttgatgataagatacatttttattgtgaattattattcagtttcagtttacagtagagagattcagatttctgcagaatctatgaaaccaacctgygaaattttctgaaacgatagtctgaaggatggcatgtggttattacattaggtttagatgtatttaagacaaattatttataagagaaaattggaaagaa

SEQ ID NO: 24480 - DNA, 201 bp, Homo sapiens
gtattaaggggataaatgagccacagggaagagacactgtatttttctcaaagcagttctttctcctttttacagagttaggagccaagcaatttatgatyaagattttcagaagatatgttttgtcattttaagccatccttgtctgtgggtttaaaaatgaggttttagctctagcatcctggcataccttaatgtatt

SEQ ID NO: 24481 - DNA, 201 bp, Homo sapiens
ttgataaaagccattctaaatggggtaagatgatatctcactgtggttttgattttcatttccctgatggttattgatattgagaatttttcatatacctkttgacgactaatatgtcttttttgagaaatgtctactcagatctttagctcatttttaaattagattatttgtttcttcttagttgtttgagcaccttct

SEQ ID NO: 24482 - DNA, 201 bp, Homo sapiens
agaaagttagctcctctcctgccatcgaatattaaacacgcgcgcgtgtgcgcgcgcgcgcgcgcacgcacgcacacacacacacacacacacacacacasagagaaactcaactctgaacacaggatatttaataccctgacatcttatttttgattagatacatcagtaaagtttttctgtaaggcagtatttgtttca

SEQ ID NO: 24483 - DNA, 201 bp, Homo sapiens
gtggagcataaaagtttggagaatttgcagcctgatgatgcgatagaaaagaaaaacccattttctggggagaatttcaagcttgctgcagaagtttgcakaagtaatgaggagctaaatgttaattgccaagacaatggggaaaatgtctccagggcatgtcagaggtcttcatggcagccccttccatcatggtcctag

SEQ ID NO: 24484 - DNA, 201 bp, Homo sapiens
actgtcataggtggtcagagaggaaaggacattgcaggcagcacagagagctaggataatttccttttttatatttttatttttattgatatataatagawgtgcatacttttggagtacctgcaataatttgatacactgatatagtcacatcagggttcattgggatatctaccaccttatgtatttatcttttcttta

SEQ ID NO: 24485 - DNA, 201 bp, Homo sapiens
atattgaaatagtcagttttgttttgttttttttggtaaaatatgacaaactaagcctaacttccccaaggattttcagaagtaggaagaaaaatattctrtggctctgccttttgagttcagagtagctcctcccgttgttcttatttccttttgtacatatgtgtctccctttattttacaaatcctcctcatcttaat

SEQ ID NO: 24486 - DNA, 201 bp, Homo sapiens
cctctgtgccattctctgtgctaggcatgagcagctataaagtgacagaccttggcatgagttgagcacctacactgtgcctgtcctgcctgggtgctctrctgggcatcttcttgcatgagctcattccgtcttcagaatggccctgcacatttactgatgggggtcggattgcttatgcagtttactcaagggctgtta

SEQ ID NO: 24487 - DNA, 201 bp, Homo sapiens
tttcttagccgtccttttctatagtgctcattatttcctgagatagccagaaagggaaaattaagagaacataggccataacatttgaaattcttaaaaartaaaaactgattcttatttgtaggccatgatttaatacatgtggaattttcttataaagtcccctttatactacattgacctaactgctgttaaattgtt

SEQ ID NO: 24488 - DNA, 201 bp, Homo sapiens
caatatataatttagaaaaactgatttgtcatagttgttttttcccatcgattctgaataccttttcataatggtcaaaatcttcagaaactatacagttktataaattcatacattctctgaagaggagattaaagctcctccattttaacaattcactgcttgagtctttcgtacaacttctttccaagtatatgctgt

SEQ ID NO: 24489 - DNA, 201 bp, Homo sapiens
ctgttttatgtttataattaatagaactttaatcataatatgtgttctgtgaatcccagagaatattttgctacaatctttgcatggaatcctgtgttttsctctccctatggtagctgtgtggaacttcagttgacctctgtggtagtgtcatgctagatcagaagtaatacgtccaaagtgatatgaaccactgtggtg

SEQ ID NO: 24490 - DNA, 201 bp, Homo sapiens
atttttcccttgctatactgtcagcatttatagccatatctttccatggtggtccgatttatatttacagtccagtaatctttagtaagtacagtctggcwtatcttattgccaattgtttgattttatgtggaagtgggtgacacagttattactgagtctctttataaaaatcttatttacgtaaaatatacaaggtaa

SEQ ID NO: 24491 - DNA, 201 bp, Homo sapiens; identical to SEQ ID NO: 2931

SEQ ID NO: 24492 - DNA, 201 bp, Homo sapiens
gtacagttaaattattattgactatagtctgcctgttgtacaaatactaggtcttattctttttaactttttttttttttttaaactgggccccatctctrggttgctttgagctagctgtcttctggctaacaaaatagttgagtgctactttctttcaccaaaggcagcgacatgcaccactttcattagcaggttaat

SEQ ID NO: 24493 - DNA, 201 bp, Homo sapiens
gtgcagatttgcagagcacagaaattaaggtatttactagagttgggggtaaagaaggataaaacatttaattcattgaaattaatttcactgtgaacatwtgactcaaagaaggcagactaaaggtgtctggttgtgggaattaacagaattcgagttagtctatccatttatgtttccttgttagatttttctcttccc

SEQ ID NO: 24494 - DNA, 201 bp, Homo sapiens
taagtttcttataactttggtcagaagaacactgatatagtttggctgtgtccccacccaaatctcatcttgaattcccacatgttgtgggagtgacctgktgggaggtaattgaatcatgagggcaggtctttcctgtgctgttctcatgtgagtgaataagtctcacgagatctgatggttttataaaggagagtttcc

SEQ ID NO: 24495 - DNA, 201 bp, Homo sapiens
tgactggtttggtgctacttaccttcacatgccaggggtctttctttacagaaccgatgtgttgatggtgaatcatgatgcactgttcttgcacagaggtrgccctgacatttatttcatgaaagagttttcctattttgggatcttgtggggatattcatgaacataatagcctacccaggaaaaaagttagatatggtg

SEQ ID NO: 24496 - DNA, 201 bp, Homo sapiens
gttctcatctcttgcgtgggttcttgcagcagtggcctctgctctggcccatgcaggactctaccagtagattttgattatttccttctcttcagaaaccrtgatgactttctgcacccagcttgatcaggcctgtgcacacctcagtttgatatttaaatttttggacaatctgatcatcaccaacatttctagccttag

SEQ ID NO: 24497 - DNA, 201 bp, Homo sapiens
atttctaagtcaaaagaagatgtcaaactgaaattagaggtgcctatttatttttagtttatgacataaagcaaaataaacctaaaagcaatgtattcctstttatgatcagtgaagcagtacatttcccattattttaaatataatttcatgtcaattttataaaatatttaaacagctctataaaatagtaatatggta

SEQ ID NO: 24498 - DNA, 201 bp, Homo sapiens
cttatgagaaagctgaagttcagagagattatgaataacttgcgtagatagtaagaagtgcaggacgagtgagatacgttagataatgtatatgtagattwaaaatgtttactagttagctgggcagggtggctcatgcctgtagttctagctacctgagaagttgaggccaaggagtatgcacttgagcccgagagtttg

SEQ ID NO: 24499 - DNA, 201 bp, Homo sapiens
gaccagaacagttgggaaagtttgagaggtggcacgtaggccgatataaacagagtgcatgatcacaacagtatataagtctagaaacctaggttaagtcstgtttttttgtacatcatgtttttttttttgttttgttttttgttttttgttttttttttcctgaagaggagttcgaggacttcatgctttcaaagaact

SEQ ID NO: 24500 - DNA, 201 bp, Homo sapiens
ttgttgtatcagtcactgtattatccatgtattttgaattttattaaatttcaggtagagatatatagccagctcttaaatttaacagcgtgtggcttatwtgcctgtttaatatcccttttccttttctttgttcagtgtagcactgaggtcaggggagaaggggcaggtgattttcaaatcagaagcccttcactgttt

SEQ ID NO: 24501 - DNA, 201 bp, Homo sapiens
taacataagaaatataagctacaaccttaattccaagggccttaaaatgcagcagaggagataagacctactaattatagtaatattaacaatgtaacttyctgtttgagacccatgatccagagctctctacaatctgtagaagtaagaaactggttgaaatagttatccttctaatgaactgcagtaattgatgacaca

SEQ ID NO: 24502 - DNA, 201 bp, Homo sapiens
tggttgaaatagttatccttctaatgaactgcagtaattgatgacacagctagcatgtcaggatgtgtccccaattcattttgactgatagctgtagacaracatactcattaagtcacggatcattagagttaatggtgtttttttggagctcctcataatatatcattccatgtgccagaaaaactaagtgtgggcaaa

SEQ ID NO: 24503 - DNA, 201 bp, Homo sapiens
cattagagttaatggtgtttttttggagctcctcataatatatcattccatgtgccagaaaaactaagtgtgggcaaagaagaaacaaacttgtgagcaamagtgtattttcttaagcacaactccgtctatgaactggaaaggtccttgtgctgggatgtgcaattgtgtcaggattttggacttatgaggttgctcact

SEQ ID NO: 24504 - DNA, 201 bp, Homo sapiens
atacagcacaaatcatattggagtagatattacatatgataataattaaaagacccacaagacagagagagagtacacccaattgtgattgtaattgttaygaaaggcctaggattgtagttcttaaacaggaagatgtattttgctggaggctggacaaagcacatcatagttgagggaactgaataaaccatagttgag

SEQ ID NO: 24505 - DNA, 201 bp, Homo sapiens
ttcttttttcttttttttttttttttgagacggagtctcactctgtcacccaggctggagtgcagtgacaccatctcagctcactgcaagctccgcctccygggttcactccattctcctgcctcagccttctgagtagctgggactacaggcacctgccaccatgaccggctaattttgtttttgtattttcagtagaga

SEQ ID NO: 24506 - DNA, 201 bp, Homo sapiens
ggaccagaggaggttcttcataaaatgaaaacttggagggaggtggcaagtggatgcacaaataatgaatgacagacacagctgagacatgataaaagcaygcacaggggctctccacatctctgcaagacgtaccagcttgagctttcacctgcagaacttccttggatggtaatgaggctgctccacagtgttatagtt

SEQ ID NO: 24507 - DNA, 201 bp, Homo sapiens
aatgactgagagattatcccttatgccaaggaactcacagtctattaatagagaagaccatgttgaacaataattacatatactactaggagtgaatactrctaaagcactactacttcatgtatcaccaagggtatggaaaggtgtgcatgggattcaatctgggatctgctccttggggaagagatgacagagtaggta

SEQ ID NO: 24508 - DNA, 201 bp, Homo sapiens
atcctttggaggagaagaggccctctggtttttagaattttcagctttactgctctggtgtctcctcatctttgtggtttttatctacctttggtctttgrtgatggtgacctacaaatggggttttggtgtggatgtcctttttgttgatgttgatgctattcctttctgtttgttagttttccctctaacagtcaggtc

SEQ ID NO: 24509 - DNA, 201 bp, Homo sapiens
gcccgcctcggcctcccaaagtgctgggattacaggcgtgagccaccgcgcccggccaagaaaataattttcatacacaaaatagttctcttttattcatrtttagagttaaagtactacaagatttgtttttttaaattgaagatactttctgttatttacagagaaggattgttaaggaaacaaacgcactcatttatt

SEQ ID NO: 24510 - DNA, 201 bp, Homo sapiens
tttagggtctgaggtgctcaaggcccacctacattctcatatttctctctctgtccatgttcttgattcactgtggcttttttggtttttgtgtgtgtgtwtatatttttttaattttcccacctgtcagacccaggagaaaggatctatgccttttccattttccacctgaaatccattcacagtctattttttgtaatg

SEQ ID NO: 24511 - DNA, 201 bp, Homo sapiens
aacacgtcctttctcacatggcagcaggaaggagaagaatgagtgcccagtgaagggggcagccccttataaaaccatcagatcccatgagaaataactcmgtatcatgagaacaggatgggggaaaccatccccacgattcagttatctccacctggtccctctcacgacacgtggggattattggaactacaagataaa

SEQ ID NO: 24512 - DNA, 201 bp, Homo sapiens
gaattgaaaaagcattgaaaaatgattaatgaaaattataaaatcaaagatctgatgcttaaaggagtaaatccacagctatccaaaacttagccattcakcattactcagttcctaggagagcagttttgctattttaagccaggtaacaaaaatgtgtcccaaattcccaacggtatgagtattcatgtatgtttaggc

SEQ ID NO: 24513 - DNA, 201 bp, Homo sapiens
aaaccagtgttaattttctctttcattttttttaagttacctttattaaggtaatgttttttatgtttctgagttctgtttctgggacattgattcttttytttaattaattttctttctgttcttattaagataccacatggtttatggtgatttcataagatagtttaactgttaagaaattgtttttacatatttatg

SEQ ID NO: 24514 - DNA, 201 bp, Homo sapiens
aatgatgaactcctatgcattttatctagcttttcaactattaagtgaagcttggtttaagcaaatctttagatggtagcattgtgccagtactgttcccrttttatcacatgctatacgttagtctagttcagcagagcattatgctacattcccttctcagtgagttatagatcttgaagttttcacacactatgttct

SEQ ID NO: 24515 - DNA, 201 bp, Homo sapiens
acagcatttgccagagtttccctaaatattcttaatatcgttgtgttgttctatgtttaatatttaatatgccaagggttctcagggaacatatggtcacmgttttttttcccccaatggtgtctgtaaagaaacaggataaacatttcaccatagcatcaactttccaaatagatatgaaggcactgtttttagctactg

SEQ ID NO: 24516 - DNA, 201 bp, Homo sapiens
caaactgactctcctatgtagttagcataggatattaccagcaccctagaatctcactttggtccctccctcaggcctcaaaggtacttctatcttgaccktcaacgctaagattagtttttctgatttcttttttttaagtgtacgtaaatagaatcacacataatgcactcttttgtgtctggcatcttgtgttcaata

SEQ ID NO: 24517 - DNA, 201 bp, Homo sapiens
gccccttgttgattcttgtaacaattttttacattagtttttaaaagatgcaagagatacatctctgtttatatatacgtatgttatatatgtaacatatrtaacatatatatcatatatgttatatatttatatgtgacatatctgtttatatatacatatatggtatatatgtaacattttttctttgatttattttta

SEQ ID NO: 24518 - DNA, 201 bp, Homo sapiens
ttgaatgcagttgaattttttaaaagctattttaaggagttaactatttgaatcaatatatagtttttaaatatcatgcagttctgaaaaactaccttcagattattttgcagtgttggcttttggataactgcagtagtgacagaaatacaatagatatttgttgtccaagtattatttaaaaatgaggcagcatacact

SEQ ID NO: 24519 - DNA, 201 bp, Homo sapiens
gtccaaaatcttagaagtctacctgtgttctattgtactgtggctgagctggcatacaaaccacaagacacagttcttcctactcttccctcccctttccrcaggcagaggagccttaccccatggccagcatcacaggcccacagggagtactacgggactaccaccaatgttttcttaagggccaagggctcttcagac

SEQ ID NO: 24520 - DNA, 201 bp, Homo sapiens
ggaaacatggagagaaaggacaaccaagtcatccactgggcacttctggattgttctgacatcctaattatgtccctaggctgcaagctcttccctccatkcctgcttcctcttccatttctgcccctttcttatctacagacctgtttctacagggaacagatatttcagtctttgggaatttatccctattccctagcc

SEQ ID NO: 24521 - DNA, 201 bp, Homo sapiens
gggaatgttggatttgaggggactttgaaataatgaggtagaaccatttagttggacggatgagtccgggactcgtgtgaattttgggttgagcacatacrtttcacagtaattggcccatgaggtgatagttgacattatgacagtggttgtgatagaatttgtagagtatgtaaaatcaggggaaaaaagaggactagg

SEQ ID NO: 24522 - DNA, 201 bp, Homo sapiens
agaaccatttagttggacggatgagtccgggactcgtgtgaattttgggttgagcacatacatttcacagtaattggcccatgaggtgatagttgacattrtgacagtggttgtgatagaatttgtagagtatgtaaaatcaggggaaaaaagaggactagggtgaaaacttaaggaacaataactttctaagaagcagat

SEQ ID NO: 24523 - DNA, 201 bp, Homo sapiens
ttatggaatctttcataacaatagggatcaatgtcagtgtaatggtggtggatagaattcagattcatctttgaaaagaaaatatctcatattgtgtctcrtgattttttggtgtctagttggtcttcttacagtttgaaatttttgatggaaatggagcccagacatattagatttatcacattatagagagaaaaccaa

SEQ ID NO: 24524 - DNA, 201 bp, Homo sapiens
ggcttctaagagcagttaaaccaatcttctcacctacaatggacataaaaccccagtttaattggggtgttatgaaaacaaaatactctgtttgtagaatyctttgaagtgtcagatacaaagtcatgttgctgtgttggttgcttttcttttttaggtgggctggtttccatccacatatgtggaagaggatgaataaat

SEQ ID NO: 24525 - DNA, 201 bp, Homo sapiens
gaggattacaaggggagtcctagtttagataagttggttggaaaaagtccttttaagtcatttgaactgagacctagcagataagaagcagccagccacaygaagatctaggggaaagtgacccaggcagaagccgtagcaggtgaaatgctcagagttgggcaagaaccaggtgtattcaagaagctgaaaggtaagagt

SEQ ID NO: 24526 - DNA, 201 bp, Homo sapiens
gctgaattgggattttattgtgactgcagtgggaagctattaaaaggtttctatcagggagtattacaacagactgattgacatttcaagaagaccctgtragcaggcagcccagccagcaagctgttgaagtggtttcaagagaggatgcagccctggattaatctgtgggcagtgcaaatagagatgagtgaatttaag

SEQ ID NO: 24527 - DNA, 201 bp, Homo sapiens
aattgggcagcccccagaaccagaataggtccacagcgattctggggctgccacatgggaggataacatttatggtcagaaaagggaaagtaacagaaaakggaagtgaggtacagaatcagctggattggatatagctcagcgtttgccttatttgaacacagtttgaacagctggccacctgagattggctgaaactct

SEQ ID NO: 24528 - DNA, 201 bp, Homo sapiens
taaagatgctccatgacttagatggggttatgtcctgagaaacccataagttaaaagcattgtaagtcaagactgggtgttttgtagacatgatgggatgsaaaaccaaaaaacactatatccaaaaaatgctggcatcacagttacattgtagagtattggttgtttaccctcatgatcacttggctgactgggaggttt

SEQ ID NO: 24529 - DNA, 201 bp, Homo sapiens
ttattgcaaccacagctgcagtagacagttccatacaagcttccaagaacttcatgggtacatctggagagcacctcacctggggccacattctctacctktcctgtcttactcttcctcctctgggcttctttctggtgcatgggggtggggggagatattaagtattccccaagagcaatggtcagtttagtaattcgt

SEQ ID NO: 24530 - DNA, 201 bp, Homo sapiens; identical to SEQ ID NO: 2935

SEQ ID NO: 24531 - DNA, 201 bp, Homo sapiens
tttaacctctcacagcctcagtttcctcatctgtaaaataggaatgatatttatttcaaattctaggtaatatgtatcagcagagagctagccaaatagtrcaatagcagctacagctatgtgatattgaacaataggtgatacctattattattgctattattattaataataattgcatttgggattctagtatactta

SEQ ID NO: 24532 - DNA, 201 bp, Homo sapiens; identical to SEQ ID NO: 2936

SEQ ID NO: 24533 - DNA, 201 bp, Homo sapiens
ttattctgttttaactcgcttatttgaatcttggctaaaatgcttcgtgtatttaaggaatgctttaagggcttgatttctttaagtggcttttagttccrctgaggaggaagctcaacaaagaggtagaaaataaatcaaccctgtttcaaaaggaatggcattctgagacgtaataaccaagaacaggtcattataggt

SEQ ID NO: 24534 - DNA, 201 bp, Homo sapiens
gagaaacagttctagtggacaaaaagcacagatttccaaagtcttggttaaaaacaaagacttgagtggcatgtagattttattccaatctcagtcacttrtttgtgaaatgactttgtacggattacttaacccctctcaatctattttctcatctgtaaaatgggataaaagtagctacctcatgatactggtcaagct

SEQ ID NO: 24535 - DNA, 201 bp, Homo sapiens
actcctaggttgtgagttccatgaaattagggaccatttgtttgtcagtttcctgttcttggctcagtacctggcacagggtgactgctcccatgaatggycattgagtgattatttaatgaatccttcacattggccttaatgttggttagatgagaatgctagatattttttaatcctaggatgaaaaaattataatat

SEQ ID NO: 24536 - DNA, 201 bp, Homo sapiens
cattactcagttcctaggagagcagttttgctattttaagccaggtaacaaaaatgtgtcccaaattcccaacggtatgagtattcatgtatgtttaggcrtcaccataagttattactcctaggttgtgagttccatgaaattagggaccatttgtttgtcagtttcctgttcttggctcagtacctggcacagggtgac

SEQ ID NO: 24537 - DNA, 201 bp, Homo sapiens
gcaaagatgcctcacaaatgcagttagatgtctttcaattatgtgttgtattagaaaggaaagtttaagaaagtcagcaatgcttttgatctctacttccygataggttaatatatgattttattaaatcattttattttgataattctaactgcagaaatgtccagaaaatgatatacgaagttgttgtctagcagaaat

SEQ ID NO: 24538 - DNA, 201 bp, Homo sapiens
gctgtgagaactttgattctgagaagttggacactatacagtagaagtacttttttttttgttttgtggtttccagaacccaggggtgtgcttggagagcrttatcgatgaaccagaagctctcaagtcacgtttttcagttcccagcagcacccaggctgtttgtcccctcttgcaaccagctcacagcatctgcttatt

SEQ ID NO: 24539 - DNA, 201 bp, Homo sapiens
agaatctcagagagaaccaggtgctgtgagaactttgattctgagaagttggacactatacagtagaagtacttttttttttgttttgtggtttccagaayccaggggtgtgcttggagagcattatcgatgaaccagaagctctcaagtcacgtttttcagttcccagcagcacccaggctgtttgtcccctcttgcaac

SEQ ID NO: 24540 - DNA, 201 bp, Homo sapiens
gacttttgacaggtatataatgggaaaaggaaaggaaatcaggaaaactaaggaaagttaatgaggggaagagagaaagtgagtgtagctgttcctttttrgccttttaatactgtgccttgtgacagctggtctcaagcacatggtttaatgctctgttctggagtcaggagtgcctacatttctctgggaagcaggaac

SEQ ID NO: 24541 - DNA, 201 bp, Homo sapiens
agcactgactgtcattaaaaaccaaaaatacttaagtgccattactaataatagcaggtaacattacttcaccacttaccgagtgactctcagaaagtgamtaaacctgtctatctgtctgttctttagcttcctcatctctaaaatagaccaaataaaagaacctacctcctagggttcttgtgagggctagctgaatta

SEQ ID NO: 24542 - DNA, 201 bp, Homo sapiens
ctttgtattgtcttccctgacttttctcccaggtgtggctgagcacatgctgctttgtgccacagtgtctggtagaatgcagcatttcttgctgttttgcrgttttttttccttatccgtctcccttccaggctttggcttgattgaggatgccataggctagttcctttatatatggcactagaaatggacacagggagt

SEQ ID NO: 24543 - DNA, 201 bp, Homo sapiens
cttattttatacctattgaaagagctctttagatggacagattttctcatatggtactcttgtgtatatgtatttgtatgtgaaaagatatatctatataygaagaatgagaacatatgggcacagggaggggaacatcacacaccggggcctgtcgggggttggagggcaaggggagggataacattaggagaaatacct

SEQ ID NO: 24544 - DNA, 201 bp, Homo sapiens
gctagccagttttcccagcaccatttattaaatagggaatcctttccccattgcttgttttttgtcaggtttgtcaaagatcagatagttgtagatatgcrgtgttatttctgagggctctgttctgttcctttgatctatatctctgttttggtaccagtaccatgctgttttggttactgtagccttgtagtatagttt

SEQ ID NO: 24545 - DNA, 201 bp, Homo sapiens
ctgcataaggtagcaggttttaactctgcagctctcttgctcttaataacattaataagctgactacatattcggctagggtttcctttcattaagttatwctttcattcattgcttcgtgcattcaacatttgttgagcctctgcttgcattaaatactatatcatactcacgtctcaagtgttacatacaatacagctt

SEQ ID NO: 24546 - DNA, 201 bp, Homo sapiens
aagtttactctctcacccttctggaggccagaagttgaaaaccaaagtgttagcagggctaattcttcctggaggctctgagggagaatccctcccatgcycctctcccagtttctactggcaatccttggcatggcttggtttatagatgcaccgctccagtctctgctggtcttcacgtcaccttctgtgtgtatcatt

SEQ ID NO: 24547 - DNA, 201 bp, Homo sapiens
tggtttgttgggacaagggctggttcccaaaaagccccacaaaaattaaccaggtgtggtggtttgtgcctgtagtcccagctactcaggaggctgaggcyggagaatagcttgaacccgggaggcggatgttgaagtgagtcgagatctgctgcactccagcctgggtgacagagtgagactctgtctcaaaaaaaaaaa

SEQ ID NO: 24548 - DNA, 201 bp, Homo sapiens
acccataagcagaccttaaatattttgccaagtttttatttgtagagaattagttgggccacagagtagagttgggtaatttttttaaatggctatcactrtatttatataatatccaagtatcttctgtaagaacttattaattacaaaagggtaatagtaataaccaagtgattgaagttaacatccctaataatggga

SEQ ID NO: 24549 - DNA, 201 bp, Homo sapiens
caattcattgaaaattttatatttgttatcgtttggttttgttcatcaattattcattcattcgttaaacagatatatattaaacacctaacacatacaargcactgttctggttctgggatatagcaattaagaagacaaagttcctgcctttatggagtttacatttcaatggggaaactcaggcaagtctggtttgga

SEQ ID NO: 24550 - DNA, 201 bp, Homo sapiens
aacgaaatttctgttattttttagtctgattagtttgtggattatttgctttttggtaattttatagcccctctactttctgtttgcttctgttttcatgraaatttgtgcaagtgaagcaattatttaaatcatcacattgtctgctcaatgttggactttgtggtagatgctgggtattcaaatgtgaatgaaactcaa

SEQ ID NO: 24551 - DNA, 201 bp, Homo sapiens
tcaaagctatggcttataattcctttcaagtttgttttcacatttgctaaagaaaataacacattttactcaatttaagtaataagactaggagaaacttyggtatcgtttgtatcagtgacattatgtatacgtgtgtgtgtgtgtgtgtgtgtattccagagacctcacaaaattttgctttatattttaaaaaaatga

SEQ ID NO: 24552 - DNA, 201 bp, Homo sapiens
tggggaatttgccttagcagtctggatcccacaaacctttgccaggctttctgcctggacagtcctttcagaagctctggcaagctcgtctccctctaccragggggtaccttgaagagcactgttgatactttttttcttcttcttgcagtaatttcatatgggcagaattttgcaccgtttaatataccactttcttat

SEQ ID NO: 24553 - DNA, 201 bp, Homo sapiens
aaggtcaatgactgttaaggcaggggtggattagactaaaatacagaaagcataaaggcaaattggaaaagatccatggtgacactatttagttctacccrgttagaaacatgtaggaagatttaccctcgtaagactgtaaaaatggaactaaaatatcttccatgcttagtgaagtgataaagagtgttttgcagctta

SEQ ID NO: 24554 - DNA, 201 bp, Homo sapiens
catgtatgcgagacagtccatgtccaaatgctgtttataaaccatctccattgcctgtttccttggtaattggaatgactggctctcactcattatttttragagacttgaattgttgacactgctgtgtcagtgtgagataaggaaagcttagcgatttcttttgtttagagtcttcttatttacttgttgtacctgaag

SEQ ID NO: 24555 - DNA, 201 bp, Homo sapiens
taagaaagaacaggcatggaagtggggagagccatacgtatttaaaagtgaggtaaattattttatacccccataaacatgcatggtgattgctacctctmggtaccccttcagagttgtctcaactctggaaattcctttgaggggtttggcagacttttctattatggtgggagctgcagttagctactctcacacatc

SEQ ID NO: 24556 - DNA, 201 bp, Homo sapiens
ttatgaaagactgtgttaaatggtgattcaaatgtgttggattttgcttctaaaggtatgtagagtttagtatgatttatttgccaaaattatggcctagraaatgtcgtgctattgatggaatccgcattgaacacaagaggaaattgctagggaaggatgcgtgtgaggaaaggaaatcctcaggctgatttattgttc

SEQ ID NO: 24557 - DNA, 201 bp, Homo sapiens
tgacccgtttaatgaaatttctttttaatttctctttatgaaagactgtgttaaatggtgattcaaatgtgttggattttgcttctaaaggtatgtagagwttagtatgatttatttgccaaaattatggcctaggaaatgtcgtgctattgatggaatccgcattgaacacaagaggaaattgctagggaaggatgcgtg

SEQ ID NO: 24558 - DNA, 201 bp, Homo sapiens
tcaaccctgtggtttactatatttggaagcattatgttttgaagtcatatattatatacagagaagtgaaatagaatatttggtcgttgttgccacttgtkaatgaaaagtggctactattgggtaatatttattgagctctaattatcaggcaccacacattctatgcattgtatcagtgcttcttggcttttgatggaa

SEQ ID NO: 24559 - DNA, 201 bp, Homo sapiens
ttggcacttagctccttgtttacgtgaagaatcccgtgtctccactaaactccttcccttctaggccttccatatattttcctgttgcctttctatcaacyctgtggtttactatatttggaagcattatgttttgaagtcatatattatatacagagaagtgaaatagaatatttggtcgttgttgccacttgtgaatga

SEQ ID NO: 24560 - DNA, 201 bp, Homo sapiens
gatgtactacaggggctatgaaggactcaagggcagtaggaccataggaggggtcctgaagtcacacgtcagatatgcaagaaagaacttcttgcacacckcaagaacactaggtaccaggattagcaaggagttgccactgatgagttggtccctatttcccaacttgccttcactaggtggaacatttcctttaaggtt

SEQ ID NO: 24561 - DNA, 201 bp, Homo sapiens
aactctgttgatctctagcttcttcattaaaatgggtgggagagcatcttctcacttgcagacagtgcatgtaaagtgcccagaagagtgcttgacacatrgtgggcattcagcaaatggtagagtgtggatgtactacaggggctatgaaggactcaagggcagtaggaccataggaggggtcctgaagtcacacgtcag

SEQ ID NO: 24562 - DNA, 201 bp, Homo sapiens
gttctgggaatttgaagatgaatgagttaccacccttgccttcaaggtgtttcagtctagcagggagaacgatgtttaaaccagtaattaagcttgatacrgcaattattttaatgctgagccacagctctgaacagaaggggcgcagatgtggagacacaagctcatccttttattgagttccctaataaagagcaagat

SEQ ID NO: 24563 - DNA, 201 bp, Homo sapiens
ggtgattcctcagggatctagaactagaaataccatttgacccagcaatcccattactgggtatatacccaaaagattataaatcatgctgctataaaggyacatgcacacgtatgtttattgcggcattattcacaatagcaaagacttggaaccaacccaaatgtccaacaatgatagactggattaagaaaatgtggc

SEQ ID NO: 24564 - DNA, 201 bp, Homo sapiens
accaaaattctatgccgtggttccttttactcctctctgaagaccagcagatcaatgaaaaagtcatgctctcttagaaagagccctataagctgtgatgkcaggggaatcccagcacctagcatcccaggctcaacctgattcttaggacctgattcttagattgtgaacttgtatcaggaaaggtccagatgttaattt

SEQ ID NO: 24565 - DNA, 201 bp, Homo sapiens
atgctcacccaggagcattatgccttaggttgagcataatgtggagaatttgactcataggtttcacgataaattggaacagccaaactattgggaagggyggagtaaaggtggacttcaggaacaagtggaaccaggaattcaaatagcattctctctgtctgtcttttttctctacttttttctcagtaggtctgcttc

SEQ ID NO: 24566 - DNA, 201 bp, Homo sapiens
tggtcagaaggaatggctcatgttttagcaacctgaacttctggaaggaggtagaagatgattaattggtgtgaaggtttctcaaaatcaagatcatacaracttcatggagttaccttttatcatgttggagtcaaataacacacttgtctattataagtaaggagtgatctgtggatttgagttgtttcttaagaatag

SEQ ID NO: 24567 - DNA, 201 bp, Homo sapiens
ttgtatttttccaatacttggtacagtgcaatgtaggttataatatacttagatgaggacactgccatctaagtagaagttcagacaatgaagtattatcyctttttttttcctgcagggtaagggagtaacattatgggagaaagttctgagaaattctgttgtggtcctttttcttccattattttattactatgtaag

SEQ ID NO: 24568 - DNA, 201 bp, Homo sapiens
tgcttttatcaagtttagtaaataactataaaaattgctgaagaggcagctgaactaatctgaagctacccctccattttgtttctgttcatttgttgagmaaatttatattgagtccttacaatgtgaaatcactttctggagaactcaaaaggacttaaccattctaaaaagaagcttaagaatcagtaaatacgtcta

SEQ ID NO: 24569 - DNA, 201 bp, Homo sapiens
aactaaaagtacttgtcacaggactaaagtaagcttttcttatatgttatgtataaaatctcagcaatgccactattagagacacgtgcatatgtgttttyttctccatatctgggcatcttttgtaaggaagcacgtatcacagcgtgttaaagggaagggactaagaattttagcaaagcaaaatgaaactaacaaaca

SEQ ID NO: 24570 - DNA, 201 bp, Homo sapiens
ataactgccagccttgcagactttgaaagtagcaaaagtaactcccatcagaggagacaagcaaagaagatgaaaggaatcgtcactgaaaagggccaatsaatttagctttgtgtcacctgggttcagctcaaggcagttcttcagaagccaaggttagatgtgaaaagccagtaataccacagtgacctggattggtag

SEQ ID NO: 24571 - DNA, 201 bp, Homo sapiens
gaatattttgtgtatgtcatttaaacaatgtgtatatatcatcatgtatgcgttgctaacagtaaactctaaattcacatttccttaagtggtctcaagtmtgtttctcaagtttggtagtttctgagataatgaagagtttggatataggacataagatgcatttgtactgctaagtaccttgagtaacattgggaagga

SEQ ID NO: 24572 - DNA, 201 bp, Homo sapiens
gccatgtttgtgtgctgcacccattaacttctcatttaacattaggtgtatttcctaatgctatccctcccccctccccccaccccacaacaggccccagwgtgtgatgttccccttcctgtgtccatgtgttctcattgttcaattcccacctatgagtgagaacatgcggtgtttggttttttgtccttgcgataattt

SEQ ID NO: 24573 - DNA, 201 bp, Homo sapiens
ttaaaaaatgataataaataaaactgcagttatcagagttttttaggtaatgaaaacgggcacacgtgtgacacaaataggagttagcaggatactcttcstaatatttttttccttgtgtctattataggattttccattatatatttctgtggcatctctccatcaggattctcattgtgcatgaatctatctatgcac

SEQ ID NO: 24574 - DNA, 201 bp, Homo sapiens
cacatgggaagggctctcctccttgcctcctcacccccctgcctatggatccctcttctcttgcagtctgggccattgctgggcatcacttaacttgtttkgtttccctgattccctttgtctcccttccatttgagtaatttcaaagcttagctctgattctgcctctcctctgctcctcatgagcttttgatggctttt

SEQ ID NO: 24575 - DNA, 201 bp, Homo sapiens
ttgactcgtgcctgtaatccctgcactttgggaggccgaagtgggcggatcatgaggtcaggagttcaagaccagcctggaacatagtgaaaccccatctytactaaaaatacaaaaaattagctgggcgtggttgtgggtgcctgtaatcctagctactcgggaggctgaggcaggagaatcacttgaaccctggaggtg

SEQ ID NO: 24576 - DNA, 201 bp, Homo sapiens
aaatctgtatgcagaacaagagatagatgtcagggtccctgccttttcccatggtagtccggacaaattgccctttcctgcagtggcaggagacactggarttagaaggtatattatgtggaaaaggtgaaccatgtagggcctagatttggaaagatcaagcctagcagagactggggagatgccatagtgaaaacagag

SEQ ID NO: 24577 - DNA, 201 bp, Homo sapiens
ctttgggtgtttcccagctcagtcttcaggttcttgtcaaatgatcagactcagctgggcgtgttgactcgtgcctgtaatccctgcactttgggaggccraagtgggcggatcatgaggtcaggagttcaagaccagcctggaacatagtgaaaccccatctctactaaaaatacaaaaaattagctgggcgtggttgtg

SEQ ID NO: 24578 - DNA, 201 bp, Homo sapiens
ttgttaattctcaaaatgggcatttttggttaacaattcttgtatttttccaatacttggtacagtgcaatgtaggttataatatacttagatgaggacastgccatctaagtagaagttcagacaatgaagtattatctctttttttttcctgcagggtaagggagtaacattatgggagaaagttctgagaaattctgt

SEQ ID NO: 24579 - DNA, 201 bp, Homo sapiens
ccaagggcactgaaagccaatcagtttttcacaacaaagaaagagacaggaagtagtcaagccaaacacaaaatgttgaagatcttggtgcgtataagtgrcttgcaaagtgtggtgtttgagatcactctgaaggtcatgcaggagtcctagaaccatgcctaatgtatgcttagaggcatttagctttagaaagataat

SEQ ID NO: 24580 - DNA, 201 bp, Homo sapiens
ttcaggggaactacctaattagcttgcctgtggccatttctgaccatatttgctttttacctacccacagtaatacctggagttctcagaggtgctctggkcattattcataaaatctatgaaatgtgaaaagtaagtgagcatgttgatgtttgcccatgatgaaatctctcttggccggtggacctttttatttggttg

SEQ ID NO: 24581 - DNA, 201 bp, Homo sapiens
gtggacctctcttagttgggagcagtttcacctgtaaatgaataagtgactgtgaggttgtccattgtgaccagtattgctgcacctagacccatgttcarttgaagctgctgttctctcaaaaatgaaatcgtgaactgaggccttcattgcacattcaaagaaatacaaagagaaggaatggatctgtatttcaaatat

SEQ ID NO: 24582 - DNA, 201 bp, Homo sapiens
aggacaaagcaataccagtactattcctaaagttaatattcacctacatttcaaatattttacattgaaaaattgtagatgacaaaagcttataggataawgccttaaatttttagtattcccaattaatttataggaaggagacaatatatatttccaatattataatcccagggttgtagagattttgagactaaatct

SEQ ID NO: 24583 - DNA, 201 bp, Homo sapiens
atcaaaaccacaataagataccatctcacaccagttagaatggcagtcattaaaaagtcaggaaacaacaggtgctggagaggatgtggagaaataggaasacttttacactgttggtgggactgttaactagttcaaccattgtggaagtcagtgtggcgattcctcagggatctagaactagaaataccatttgaccca

SEQ ID NO: 24584 - DNA, 201 bp, Homo sapiens
agtgggtgaaggatatcaacagacacttctcaaaagaagacatttatgcagccaaaaaacacatgaaaaaatgctcatcatcactggccatcagagaaatrcaaatcaaaaccacaataagataccatctcacaccagttagaatggcagtcattaaaaagtcaggaaacaacaggtgctggagaggatgtggagaaatag

SEQ ID NO: 24585 - DNA, 201 bp, Homo sapiens
actaaagagcttctgcacagcaaaagaaaccaccatcagagtgaacagacaacctacagaatgggagaaaatttttgcaacctactcatctgacaaaggtstgatatccagaatctacaatgaactcaaacaaatttacaagataaaaacaaacaaccccatcaaaaagtgggtgaaggatatcaacagacacttctcaaa

SEQ ID NO: 24586 - DNA, 201 bp, Homo sapiens
aactaaagagcttctgcacagcaaaagaaaccaccatcagagtgaacagacaacctacagaatgggagaaaatttttgcaacctactcatctgacaaaggkgtgatatccagaatctacaatgaactcaaacaaatttacaagataaaaacaaacaaccccatcaaaaagtgggtgaaggatatcaacagacacttctcaa

SEQ ID NO: 24587 - DNA, 201 bp, Homo sapiens
atctctaatcttagtgtgccttctttttctacccttttctttattgtctaggacttggcacaatatgtgaatgaagtgaaaagagataatgagacccttcrtgaaattaaacagtttcagctatctatagagaatttggtatgtaattatctttccatccagcttcccctcacccccacatcaacgacattctaggagttg

SEQ ID NO: 24588 - DNA, 201 bp, Homo sapiens
aatggcaacaaaagccaaaattgacaaatgggatctaattaaactaaagagcttctgcacagcaaaagaaaccaccatcagagtgaacagacaacctacaraatgggagaaaatttttgcaacctactcatctgacaaaggtgtgatatccagaatctacaatgaactcaaacaaatttacaagataaaaacaaacaaccc

SEQ ID NO: 24589 - DNA, 201 bp, Homo sapiens
tcctgtcaaatcagtggcggcattagattctcataggagcgcagacttgactgtgaactgcgcatgtgagggatctaggttgcacttcctttatgagagtstaatgcctgaggtggaacagtttcctcccgaaaccacctgccacgcccccagcacccacctcacctcaccccacatccctggggccaaaaacgttggtgt

SEQ ID NO: 24590 - DNA, 201 bp, Homo sapiens
gaacagaatgaaggtatcaatttacatgaggggctctgcatcaggtttgctctgagaaagtagatagcattacattggccaacatacactgtcacaaaatrtcacttattctcctgtacactgcattctatagattaaagccttttgttgttgttctgaagaagagtggaagttgacagtttactatttataatagccata

SEQ ID NO: 24591 - DNA, 201 bp, Homo sapiens
ccaagagtgtcctttaaaagaggtaaaaaaaaaaaaaatgagttttgatatgatgaccatgtgtacttgtttacccagaacagttcaatttataccatttkttctggcatagttattagtcactacccatttactctcaaaaggtcctgatttgaatggaaaattatatgttcatctagttttagagcatttcttatacaa

SEQ ID NO: 24592 - DNA, 201 bp, Homo sapiens
tcctgaaggacctccaagagtgtcctttaaaagaggtaaaaaaaaaaaaaatgagttttgatatgatgaccatgtgtacttgtttacccagaacagttcartttataccatttgttctggcatagttattagtcactacccatttactctcaaaaggtcctgatttgaatggaaaattatatgttcatctagttttagagc

SEQ ID NO: 24593 - DNA, 201 bp, Homo sapiens
tatatagctaaagctgataagactaggaattagtaagtaattgtaactttattcatacgttaaaataggttaaattatctctcacctctctgtcatctacrgaatgcctatgaccatttaagaaatgggacctgaactgctagggcattttattaaggaaaaaacaattcagaatgacattggcagcctgtttagtgaaat

SEQ ID NO: 24594 - DNA, 201 bp, Homo sapiens
attcccattattcatggccatgctgtacatcttctttccccaaacactcaacctgtgtatttctgacagcgggaagtgactgggcagggtgacagtcgctytgaccattacccatgtgtgataaattgcttagtaatctccacagcaccatcgtgcatacattgagagtgtttagggcattgtaacttgggagaatttcca

SEQ ID NO: 24595 - DNA, 201 bp, Homo sapiens
ttggagaaaaagcattaagacacccatgatcagaggattccctttcttgctgcagaaacacagggacctcaccaaatacatttttgagtaacaggagaaasactcggtgaagtctcattccagtgttgtattcatctcaaatctacagcttatggcttttagtgggttttttttctcagtatacatttcacaacttttaat

SEQ ID NO: 24596 - DNA, 201 bp, Homo sapiens
ttcacacacacacacacacacacacacacacacacagtcataagactataatttaggattgtatcatgtacatcccacccagtgagactttggagaaaaarcattaagacacccatgatcagaggattccctttcttgctgcagaaacacagggacctcaccaaatacatttttgagtaacaggagaaacactcggtgaag

SEQ ID NO: 24597 - DNA, 201 bp, Homo sapiens
agaagaacctctctgaaatgagacaaacacatggaaattaaacaacatgctcctaaatgaccaaagggtcaatgaataaattaagaaagaaatttttaaarttcatgagacaaattaaagtggaaatatgacataccaaaatctgtgggatacagcaacagcagtactgagagggaagtttatagcagtaaatacctacat

SEQ ID NO: 24598 - DNA, 201 bp, Homo sapiens
ggtggtatgtgcctgtaatcccagctactcgggagactgaggcagaagaattacttgagcccgggaggcggaggttgcagtgagcagagatccagagatcrcgccattgcactccagcctgggcagcagagtgagatgccgtcccaaaaagaaaaaaaaaaaaaaagattaaattactgacacacatcatccctaattaag

SEQ ID NO: 24599 - DNA, 201 bp, Homo sapiens
gtgggatacagcaacagcagtactgagagggaagtttatagcagtaaatacctacatcaaaaaatataaagacttcaaatgaactaatgcacctcaaggarctagaaaagcaagaacaaactaaacccagccttaaaaatgaaaagttggttttctgaaaagataaacaatattgacaaacctttaaatagactaccaaaa

SEQ ID NO: 24600 - DNA, 201 bp, Homo sapiens
ggcagaattgaaactgtggccatggggataaaaagctatgtgaaagtgtagaggctcagtcggcattagtatgtcctgtaatcatgagaccttgattttgrcaggtatttgcctgtaaatactgagttaaatcagagtccctaattacaggaaaggagaaaaaggcagtatgtgactgcactagaacaagggaggccttgg

SEQ ID NO: 24601 - DNA, 201 bp, Homo sapiens
aacgcacaacccagaaaccctctgagcctggagaagggaggtgcagctgagtggagttagtagatctttccctccagcacctctccctgaaacttcagaartcagtcacttcaaaggattcttttcctttgccctagattaaaaggagacttctaatcctttctagaccacacaacaatattagctccagtagaattttct

SEQ ID NO: 24602 - DNA, 201 bp, Homo sapiens
tgaatgttctgtaagctggcctttgtcttagtttaccttgtcaataatttttacttcccacaggactgctgtatttggtcttcaaacagtccaggtgactygcttttttttacagatactttttcttcattttaagctgaatagaaaaatgaagggctgattagggggatctttttcacaggagacctgttttctcaaacc

SEQ ID NO: 24603 - DNA, 201 bp, Homo sapiens
ggcaattataagcagtagaactgtaatcagtgccaaaaataatatatatttttatccacaatgcaagttaaataacttagaaaatagttgtgatacttcaygcttactaatcatacatctacacgatctttattctaagaagtgaaaatgtttttacacacattccgattaattcacaaggtcttcataaagagggtaaat

SEQ ID NO: 24604 - DNA, 201 bp, Homo sapiens
aatttctaatgctattgaatgaatgggctatctgcattttcattattacttctttcaaacaatgaattatcaattgagctgtaaaaatgtactctgttcartctttgcatttcaggattccttttggcagcattttcttttcttctttgtcttcttctttttttcttcctcttcccttgaaagctctataaaattgccttc

SEQ ID NO: 24605 - DNA, 201 bp, Homo sapiens
caggagaatacaaattatcctctactatatatcaggaactttctttctttgaatagctattaatttagtctgtattattattataacaacagtaatttctratgctattgaatgaatgggctatctgcattttcattattacttctttcaaacaatgaattatcaattgagctgtaaaaatgtactctgttcaatctttgc

SEQ ID NO: 24606 - DNA, 201 bp, Homo sapiens
acatggacggagctggaagccattatcctcagcaaactaatgcaggaacagaaaaccaaacaccacatgttctcactcataagtgggagctgaacaatgaraacacatggacacagggaggggaacaacacacactggggtctgtaagcagggtgggggaaaggagagcatcaggaaaaatagctaatgcatgctgcactt

SEQ ID NO: 24607 - DNA, 201 bp, Homo sapiens
atccatccatccatcctccatccatcctccatcttcttccatctttttatcctaccattcatccattcatatacttataaagtgcctactatgtaactgastgtgtttcatgttgggagaaccagaaactagagaacccgtttctaacctggaggcctccatgatgtaaggaatgatcagaactcaggataggtaatgcac

SEQ ID NO: 24608 - DNA, 201 bp, Homo sapiens
ttaacactgctaatcatcctccttgatgctatccttcacaacccatcatgcgcccatgccatcttttggaaatctgattgactttcctggtttagctacarcccacaccccaggtagataaaggtccatctgtgcatgaaacttctctcctgaagtatgaattttaaattaccatcttctccttacatatcccctcccatg

SEQ ID NO: 24609 - DNA, 201 bp, Homo sapiens
atgatcaacacatacaggagctctgaagtgcatgccaaaactttccaacgttaataatgaataggtatgaactccactatgcaagcttctctgaacgagtmactgcaaagctaatgtaattttagggtgtcgtttccttctcacagtacaccaccgcgaaggtctaatcccagacagcaatctttatggacatttgctttt

SEQ ID NO: 24610 - DNA, 201 bp, Homo sapiens
atactcatatttaaatgtattatgataacaatgcatttagtataaatataaattttatatatctgtaaataaaacagtatattttatgtctcaaaaaaaawtaggtgttacaatactttggctttgatagttaccaaataaggggtacctttttgacaaattagtgtatgatttaaaaaatcacttgctaaacagtctttg

SEQ ID NO: 24611 - DNA, 201 bp, Homo sapiens
acatgtattatgcctgcattttagtaagtttacaattttagttataaaggtttagtgataaaattgtaatactcatatttaaatgtattatgataacaatrcatttagtataaatataaattttatatatctgtaaataaaacagtatattttatgtctcaaaaaaaaataggtgttacaatactttggctttgatagtta

SEQ ID NO: 24612 - DNA, 201 bp, Homo sapiens
tttagtcacgatgatagggtaccttcaaaaactgtactggtaattacttttctgtggcccctgttgagataggcagtcttactggacattgatgtgtttartctgaatagaacttcagataagagacaaagcaaattgtgcaataatgtatgaattgagagccacttgtattgaaaaacaaaataggacagaattttatat

SEQ ID NO: 24613 - DNA, 201 bp, Homo sapiens
aaccactgaatgaaaaattttaaagatgttactcagtgaaaagtttctaaaataaaaggcaacacatgaattactctgaaaaagttatttttagatagcarataaatatttttctttcagttatttgtaggaacatcaatctatcaaaacttttccctcatgtctttaacaggatgtaaagtatataatttaatggaataa

SEQ ID NO: 24614 - DNA, 201 bp, Homo sapiens
ggaaaatttccggaaacttcataagttccagaaatttatgaaatcaggtaaaaacggaaaatccatcaggaaaggcagagaaattcctagccaacttaggrgtttcggaaaaagaaagttatttggaataagttatagtaaaactccattctaactgactaataaaaatgagggtagattttcctcatgtttttaaagggt

SEQ ID NO: 24615 - DNA, 201 bp, Homo sapiens
taacttcctttaattatttcttatggcattaccatttaaggataatctaaatgcgtgacctgtacatatttggagatgcatttagggggctaacatcttargtgtgtttactggaagaatagacccttgggaaattatatcggtacttttttcttttttcatccattcaacacatttttattgcatgtttctctgtcccca

SEQ ID NO: 24616 - DNA, 201 bp, Homo sapiens
taattacattcagtggtttttgtaacttcattatttattgggaattagtgatttagtcagtgggagttttgtaaaacttaagattttggcttttttccccmtcctcctggataaccagttaacccaataatggcttggccgatggaagggtaaaatgaggacagttatattttttaaatgtcattactgtcaccaaatcac

SEQ ID NO: 24617 - DNA, 201 bp, Homo sapiens
tgctttcttatatgtcatttatgccataaatcccattgttagaaggtaatgcttctaacggattccattcatgcttttgagataaatggcattgactttcwtattgatcacatggaaagctgttacctgattcctttcctgagatcacttccagcctaatgtgcatttggctggaatatggttgtctcagaataacatcat

SEQ ID NO: 24618 - DNA, 201 bp, Homo sapiens
aatgaggtgggggggaaatcttttgtgtaatgctttataaacatctgcagcttgaatccataaatggcttctcagtgattcagaatgtggagagctgcccwttatgcagctccacaaggaactcatggttacacatttcaaactttggttgagagatgttgtttttccccttaggacactcacatgggagtcaagaaggtg

SEQ ID NO: 24619 - DNA, 201 bp, Homo sapiens
gtaatctgcttccctgaatccccatcttgcttgtagttgtgaagctatgcaactttccttcctctaagcatagtctgactcgtatatgtgtagtagtgatrtgttacaggaaagaggaagcattgcattaggctgggtggggtgaagcaatggacagtaaccagggaaaagatcaaggtcgtactcttccatagcaacttt

SEQ ID NO: 24620 - DNA, 201 bp, Homo sapiens
actccttactggtttttggaaagcaaccaacagctaattccaacaccatgggcagcccatacagtctctaattatctgagaaaatcaaatgatgctgttayaataattacgctggtacaagttaataaaagtgccatgttacagtcaaacagctatgttgctatctataccattgagggcatagttttaaaaagtagttat

SEQ ID NO: 24621 - DNA, 201 bp, Homo sapiens
gatgaatgaatgcatagggggatggctgggtgcatttctctcaacttttcaatttcttgaaataaataacaaaatcttaccttccctcagaagtcctggcrtggttcctttcatcttgccacagccactgataatcactttcattttctgtgtaactcaccaggcaagaagtccatgcagatttacttttagtagttcaca

SEQ ID NO: 24622 - DNA, 201 bp, Homo sapiens
atgtaaggtggataggtggatgctcttatacaggaaaaaaatgttcctttcaaaagaagcctacatttccttttatatgtttaataatattataccaaagrcatctacaagattcaacaagtcatcctgtccttttttagaaacatagttctcctgaagggacttgaaaatcctgactgatgataaaagattaaagcaaga

SEQ ID NO: 24623 - DNA, 201 bp, Homo sapiens
tgatctctgaagccccttaaggtctagtgctccttcttaaattcttataactaggaataacttaaaaattagaatttgtctcttaaaagcacttattagaygcctagagcactgaatattggaatgagttatttatgagaatcatcctaccctcctgaaactactcagacagatagaaacacataaatccaaagggaaatg

SEQ ID NO: 24624 - DNA, 201 bp, Homo sapiens
gcttcctgagttcaagcgattctcctgcctcagcctcctgagtagctgagattacagcatgccaccatgcccagctaatttttgtagttttagagatgggrtttcaccatgttggtcaggctggtctcaaactcctgacctcgtgattcacccacttcagcctcctaaagtgctgggattacaggcgtgagccaccgcacc

SEQ ID NO: 24625 - DNA, 201 bp, Homo sapiens
agggaaagggccttggactgttttggagatttgtaaagtcaaaggccactgtcaacataggataggggatgttgaaacacccagatgtctggtaggaactkgttttgctcccttttaagttttaacaaaagcatcaaattgcataaacaagagccatcctgtccccatataaccattgtaatcaagatttcagtgtgcaca

SEQ ID NO: 24626 - DNA, 201 bp, Homo sapiens
tttttttttgagatggagttttgctttgttgcccaggctggagtgcagtggcgcgacctcggcccactgcaacctctgcttcctgagttcaagcgattctyctgcctcagcctcctgagtagctgagattacagcatgccaccatgcccagctaatttttgtagttttagagatggggtttcaccatgttggtcaggctgg

SEQ ID NO: 24627 - DNA, 201 bp, Homo sapiens
aaaagtgtgtttctgaggaaatttcaatgagtcattcgtttatataacaaatacttgttgagcatctactttctattgggtactgttatagggattagagwtaacagctgcaagcaagtaaaaggcccttgctttctcagagctttcattccaggaaggagagaaagagagtaaccacacacatcaatagatgaccaggct

SEQ ID NO: 24628 - DNA, 201 bp, Homo sapiens
atccagaaataccatggttaccattttaatatacgtcttttttttttttttttttttgagatggagttttgctttgttgcccaggctggagtgcagtggcrcgacctcggcccactgcaacctctgcttcctgagttcaagcgattctcctgcctcagcctcctgagtagctgagattacagcatgccaccatgcccagct

SEQ ID NO: 24629 - DNA, 201 bp, Homo sapiens
ctccagtgacagtgcaggtgggatatctcagggctggaaaccagggccacagtgggcaggagtagaaaggaagaacagaaatcgggccctcctgtcagtcycccccacttctgactctacctccctctccaaactcatctaaaccaggaaaaggtgaggcaaaggtagtgctgagcaggaaatcagagataaaccaaaatt

SEQ ID NO: 24630 - DNA, 201 bp, Homo sapiens
ttcttcctgggttctgcaaactagctgagctcatactcagatctgtccctggcctgtcccagagaagtgccatgttagttactaaagcttccttcctaaaygaatgatcaccaagaggaccccatgtcatacctaggtcctttctatcccaatccaatttccacttatttctggggtccaaggtgaagcatgtaattttcc

SEQ ID NO: 24631 - DNA, 201 bp, Homo sapiens
cactgctgggacagggattgcactttgagagctactgctctggaggaaagccttgcatctgaaagcctcaggaagaattcaagcagtgtcccaatttaacmttgcactacaccagagtgattaagagcttgagctttgtagcaaaaatggcctgagttcgattccagccctccgcatattaactgagcaagatgctttaaa

SEQ ID NO: 24632 - DNA, 201 bp, Homo sapiens
tatgtatattgctgagttgaaagcacttattggaaaatattaaaaggctaacattaaaagactaaaggaaacagactcagaagtctctaatttaaaagaaygggaggctgagagggacagaactatgcttatctggcaccgtctgggtaatttagaggaacaaagtcaaaggtatctgaggtggctgaagcctcacactca

SEQ ID NO: 24633 - DNA, 201 bp, Homo sapiens
gtctactctattggtccataacctctatcgagacagtgaccttgtctgctttattcaatgcctggatcttttcctagcacagtgcccagcacatggagacwctgaatttggattctcctttttgaagtccccatatccacttcagtattggggtgattttgatgggattgtgacttaccatggtggatgcatcctgtgagt

SEQ ID NO: 24634 - DNA, 201 bp, Homo sapiens
acccagtgtgtggctctaggtgacatgtggccacccaagtgaggtttcggatccacctgcagtgtcagatgcttcaaggctggggtcccctgatggagagraggtggttggagatcacctgggcctcctcagcactgcctcctggctggggctggggctggggataagagagtaactgcaattgtgcttccccggcacctt

SEQ ID NO: 24635 - DNA, 201 bp, Homo sapiens
ttgtctcccctttttatgcccaagtttgagtgaggctcaccatcagatttaaatgtttacacattgaaaacaaatatgaagatggatatttacatggtggyttccacaataactctctatggaggagcactaggaggtagggattcattagaaatgcttctgaaatagagacagaagtcacaggttcactggggactttag

SEQ ID NO: 24636 - DNA, 201 bp, Homo sapiens
ttgttggaaatgcagaatccttggccaacccagacctactgaatcaggatctgcattttaactacactctcccacccaggtggtttatatgcacattaaartttggaagcttagactgtgctagactgcttttctcaccattgaagccaattgaacaatctctgtgcatatgtctcagattacatgtcatctcccaacagg

SEQ ID NO: 24637 - DNA, 201 bp, Homo sapiens
gctagactgcttttctcaccattgaagccaattgaacaatctctgtgcatatgtctcagattacatgtcatctcccaacaggaatatcaagtgctcctctytgtggaacttgctactgtggccagtcctaccctggctggatttgtagacatctagggcacaaggcaagacctgctatctcacatccatcttctgtggctt

SEQ ID NO: 24638 - DNA, 201 bp, Homo sapiens
ttggagaccagagggctcaacggaaaacattcttggtttatttccagccagaaaggcttgtttgagagatgcaatcagccatttagtattagcttcttgartcaaagtggatcctgaatcacagagttctctgtttctcaggagagacacacagacatctgaggagtcttgcctctctatagtggtttgcagcatggctag

SEQ ID NO: 24639 - DNA, 201 bp, Homo sapiens
gctcatttatcgctcagagggaggcacttgggacattttattcattacatgatgcaggagatttattggagaccagagggctcaacggaaaacattcttgrtttatttccagccagaaaggcttgtttgagagatgcaatcagccatttagtattagcttcttgaatcaaagtggatcctgaatcacagagttctctgttt

SEQ ID NO: 24640 - DNA, 201 bp, Homo sapiens
ttgcatgaggtgaaaaaagctgctccttgtcctgtattcttgtgcatggaacctaccagggctggtttcctcacatgagtagggactgaagccttatctgrgagccagtttgcccccagttgtttcaagaaataaagtgtcctcttggtcacagacagcagcagtaacaactttttcctgcggactggcagcattttccaa

SEQ ID NO: 24641 - DNA, 201 bp, Homo sapiens
tcacaatacaatgagggtaaatccttgcaatcaccagttaccagcaattgtgaagcaatggatggcatagatgtcagggggtcaggagagccttgcaagcrttcagagggcttgggagtggacacatcacagttgcactctgctgggcagcgctgtaagtctctgattggattttgccttgaattttttctggtcaagact

SEQ ID NO: 24642 - DNA, 201 bp, Homo sapiens
gaaagaaaaatggaaatcataaagattgcacgacttaggattttgtcaaaatgtgtcagaggctataatataaggctagtttttggcattctgtcagtcaytgaatgtccttcgtcagatcacagctccttttggttgtgctgactttatacccatctggaatccactgaccattagctgaaataaaatcccagatgtgct

SEQ ID NO: 24643 - DNA, 201 bp, Homo sapiens
agtttggcactacagaccagctttataggacaaaaaaaccttctttcagagctcctttttctcgccttcctgacagctccctagcagacctcttcccatgygggtagggagataaggttcctagacactgggacactggtctccatgacccctctgtgctgcccacagccctatagtaatgagcgtgctaaaggcctggtg

SEQ ID NO: 24644 - DNA, 201 bp, Homo sapiens
catggagacactgaatttggattctcctttttgaagtccccatatccacttcagtattggggtgattttgatgggattgtgacttaccatggtggatgcakcctgtgagttccaaactcaacttcttaaaaaaccttgtctatcatctatccatctatctgtctgtctgtctatctatctatctatctatctatctatcta

SEQ ID NO: 24645 - DNA, 201 bp, Homo sapiens
caccatttgccccaactgtgttcctgctgcacttgaaaatgattccagctgcctctggaagattttcatcccatttctgggaaaaacattagccaataaaytctcattgaatttggcagggcgggcacaccagcaagctgacactatgtgcatacaggcttcctggaacaactgttgctgagcaaatgaagcagcatggaa

SEQ ID NO: 24646 - DNA, 201 bp, Homo sapiens
taagatttcaaacaattgttctgaaagaaaattagtagctatttaataaggactgtctatgcatatagcagatatttaaatcataataagtataaagtaamctcaaaagcgtctcaataaggacagcatctctcttccaaacctcaatgggttttgctggctgcacttccagggcaagttgtcttggccacactttacttc

SEQ ID NO: 24647 - DNA, 201 bp, Homo sapiens
ggcctccaataggtgttcatttattcagcaaacatcttttgagtggctcctgtgactaccagccctggcaaggagaaagagaaggtaaaaaacaaaaagastaccaccccttttctaaaagaatcttgaggtttagtggcagtattggcctcttgaatttgaattggctaatatttattgagaacattccctgtgccagac

SEQ ID NO: 24648 - DNA, 201 bp, Homo sapiens
tttctaacaggttccaagatgatgcttttgctgctggtccagggacctcactttgaggagtgctggttgttatgagtctggttgttaagtgctggttgttwgttgttaaagtagagaaaacccctagcacagtgcttggcacacactaaagccatcataaaccatagtgatcatcaatgatggtgctcagtaaggatgatg

SEQ ID NO: 24649 - DNA, 201 bp, Homo sapiens
ggaagaacagaaatcgggccctcctgtcagtctcccccacttctgactctacctccctctccaaactcatctaaaccaggaaaaggtgaggcaaaggtagygctgagcaggaaatcagagataaaccaaaatttccaagaagaaaacagataatgagactttccatgcctcttctttctcaagccctggttcattgcacac

SEQ ID NO: 24650 - DNA, 201 bp, Homo sapiens; identical to SEQ ID NO: 2956

SEQ ID NO: 24651 - DNA, 201 bp, Homo sapiens
ttcccagctccagtgacagtgcaggtgggatatctcagggctggaaaccagggccacagtgggcaggagtagaaaggaagaacagaaatcgggccctcctstcagtctcccccacttctgactctacctccctctccaaactcatctaaaccaggaaaaggtgaggcaaaggtagtgctgagcaggaaatcagagataaac

SEQ ID NO: 24652 - DNA, 201 bp, Homo sapiens
tgtcttaatctaaagctttctggtgatagatgtttgagaagctaggattatattaactagtcatgttgaaactacagatttaactttaaaaaattattttwaacttactataatacccatattccaatacacattattaatgttagctatcatctcaccatttccttttttacttattttcaattttttttgaaaataagt

SEQ ID NO: 24653 - DNA, 201 bp, Homo sapiens
aagtagaaagatatgttgacagctattggtgaggaaaatagacaattatgtctcccaactgatattcttctcacagtccaggcaactcctagtagtacaayggaagaaacagctacccagaaggaacagtggtttggcaacagatggcatgagggatatcgccaaacacccagagaagactcccattcgacaacagggaca

SEQ ID NO: 24654 - DNA, 201 bp, Homo sapiens
ttctcacagtccaggcaactcctagtagtacaacggaagaaacagctacccagaaggaacagtggtttggcaacagatggcatgagggatatcgccaaacmcccagagaagactcccattcgacaacagggacagctggtaatggatggtttaacaagtaaatttggatggaaacttccttttgggttaaacggtagacat

SEQ ID NO: 24655 - DNA, 201 bp, Homo sapiens
acccagaaggaacagtggtttggcaacagatggcatgagggatatcgccaaacacccagagaagactcccattcgacaacagggacagctggtaatggatrgtttaacaagtaaatttggatggaaacttccttttgggttaaacggtagacattgaggacattgaacaaaaggacactggaggaattgtcacgagatgtt

SEQ ID NO: 24656 - DNA, 201 bp, Homo sapiens
attaaacatttggatcatttgatttctcatatcccttttagaatatcagtggcctgtttccttggtgcctttcttttctaccttccctccccatgtgtatmtgcccttaaagtagaaagatatgttgacagctattggtgaggaaaatagacaattatgtctcccaactgatattcttctcacagtccaggcaactcctag

SEQ ID NO: 24657 - DNA, 201 bp, Homo sapiens
aagatcattggggtcacttcatctctgtctgtctttcctgattgattatcctattttcaaagaatgagactcaaaatgtcctgttctgctttgcaaaatakagtttcacataagaaattaccttgggcaaggttgtgagaggatttggaatctaaatggagaaaagtgtagaggcatatttttcaatcttctacttctatg

SEQ ID NO: 24658 - DNA, 201 bp, Homo sapiens
ccatactttcttgggttattggccctcttgagtttgcatcggcttattgttggtagtcccgtgggcaacccttcttgagagaggcttctgcaaaccaagcrggccgtgctgctagctactcactgcttcttgggttccctgtctttttaaagtaaccatgtcgaaggtgcttatcattatggtaggcaattttgtcggatg

SEQ ID NO: 24659 - DNA, 201 bp, Homo sapiens
tgccaaaacagtaaccttgaaaaatattctgggcacctaggccaaaggtggtcaacctcagaagcaacatgctgagaagcagtctatacagagtaagcacytaaaagatcagctaaattaataaatacattattacattaatgaaagactagagattcatttggtttttaatatttcaactgagtaaattctttgttgtga

SEQ ID NO: 24660 - DNA, 201 bp, Homo sapiens
cacaagtgatatataattattgaaaacatttgaaaaaatacaactaaataaaataatggaaatataaatcaattattatcaatctcaccatccagaaatamcatggttaccattttaatatacgtcttttttttttttttttttttgagatggagttttgctttgttgcccaggctggagtgcagtggcgcgacctcggcc

SEQ ID NO: 24661 - DNA, 201 bp, Homo sapiens
gcaccccttcctatctatggaagctggccattttgtgtattttctggaaaacatgaaggtattccagagccagcatgaatcttacatcaaaacttctctcwtctgtgactcaggcttccttctgtttgttcaaatagactcaacactgctgaacacaaattttaactgaaactaattattcctttcatgatttttttttaa

SEQ ID NO: 24662 - DNA, 201 bp, Homo sapiens
tagctgagattacagcatgccaccatgcccagctaatttttgtagttttagagatggggtttcaccatgttggtcaggctggtctcaaactcctgacctcrtgattcacccacttcagcctcctaaagtgctgggattacaggcgtgagccaccgcacccggcctttcctgtcattttaaaatgtaaaatatataccaaaa

SEQ ID NO: 24663 - DNA, 201 bp, Homo sapiens
actttaatatccccaatttacagttagcatgacccataaaaccggtaggcaacatgaggtggcaaaaactcagtaatagcttacaaagagaatgcaatagmttctagaatgttggtgttatccatacttgatgacatgatgtgatgggggtgagttggcgggtaggttcaccaagaagtattatttagaaaaactgtgcca

SEQ ID NO: 24664 - DNA, 201 bp, Homo sapiens
gaatattctttcctccttgtgaacagtaacttactcatgccacatacacacatataaactttaatatccccaatttacagttagcatgacccataaaacckgtaggcaacatgaggtggcaaaaactcagtaatagcttacaaagagaatgcaatagattctagaatgttggtgttatccatacttgatgacatgatgtga

SEQ ID NO: 24665 - DNA, 201 bp, Homo sapiens
acacactcacatgcacacagactgcttttgaaaagtcaagctgcagaactctacggaaaccatgaagtgtaagttaagtgcttctatcctccaacactggktacagtcatgcacccacattatgagtgatggctgagactcttgctgaaagggaaaaggaaagtcttttgcctaaaattgccctgtctgatatggtagcca

SEQ ID NO: 24666 - DNA, 201 bp, Homo sapiens
cttaactaacaacaaggagtggtgcctggccaggcacttggggcattgtcccaagaggatgtcaacatgtcttcttagagaaggacagtcattgaggcctraggaagtgttcaggaggaataagcttcaccaggatagtttcaatgacttaaccctttgcatgcagtttcctcaagtgtaaaccgggggtcatatagtccc

SEQ ID NO: 24667 - DNA, 201 bp, Homo sapiens
aataagtgtgcaatgctcattggctctgattattaagtgtcaaacaccatatcaagtgtttgacataccttatttcatgtaatagtcccataaaccctgamaggttcgcattgtcatcccatcaaggaagaggtggagagtcagagaggttaagtaattaacaacctgtgtcacctaaagtgagtggcagggtcaggaatt

SEQ ID NO: 24668 - DNA, 201 bp, Homo sapiens
agcctatataaaatagtatttcatgtgtgttttaaaaacacacatttcattaacccctatagaatatctcttaagaactgtatcttcccttcctaagttartcagcaaacgtattttgagaacctactacgtaccaggcctattagaatgcttgggatcgaaggataaacatagttaggaagtaatattgaagagaggcaa

SEQ ID NO: 24669 - DNA, 201 bp, Homo sapiens
tagaatggatgagggagggagagaaactctgagaaaagaggctgtcaggagtagggctgtacatatccagggcacaaggaatttggcaaaagctggaagtrtactatagcccttctctccagccctagcctaaaccagatgaccaggcttctatttggcccagcatgtgaccatcccatcagggagcaagagagtttcctc

SEQ ID NO: 24670 - DNA, 201 bp, Homo sapiens
tatagtaatgagcgtgctaaaggcctggtggcatttctaccacgggaagtctcctctccaaatccaaaagtggcctcaaacagtcagtgttttcagttgarctcatttatcgctcagagggaggcacttgggacattttattcattacatgatgcaggagatttattggagaccagagggctcaacggaaaacattcttgg

SEQ ID NO: 24671 - DNA, 201 bp, Homo sapiens
aagaagaaaatgacttcttcgtgtcctattaagacagtgagttgtggcttttttgagagcagcttgctcagacctcttatgaaagatagatcagtagcaasagcactggtgtaggagtcagaaatctgcaattatgaaccactgagttttgtgtgtgtgtgtgtgtgtttttgtttttgttttttgtttgttttgttttgt

SEQ ID NO: 24672 - DNA, 201 bp, Homo sapiens
cagggtaacagctaggagaacccttgggattcttctccaatgtgacaggcccctccatgttggttcagcgttgactgccatgacaggctccaggctccacrgaaaaaaggcagagaaatcagggggtccagccaggcgccaagacgttggggtgccttgcatttctaagtgccaagtgatgaatagctcagttgaaagcaa

SEQ ID NO: 24673 - DNA, 201 bp, Homo sapiens
ttacgaaagtcttccctcaaactaaagctaagcagttccacaaaatgccagctatagacattagcagaaactgtatattgattaggtgatgtatcagtcaytgtaactacccagaaaaaaaaatacaatgacaaaaccaagtggcccaaccttattttctacttgcaagaggaaaaaccctatttgggccccaagatgctt

SEQ ID NO: 24674 - DNA, 201 bp, Homo sapiens
catcttgggtggcaggaaggcaaggtgtgcctgggggagctacagggagttattcaaggtcacataattagcttataattaacagagtttaggctagaacyagtgcatcccactcccagatgggggcccccggcttatctcagcatgtcagcaacccatgaatcagccctgaaatatagatattacctatgagtaacagtt

SEQ ID NO: 24675 - DNA, 201 bp, Homo sapiens
aagtcttttttaaaaataaaatcggtgtatccctgaccaagcgtccattaacactttgacaattgctcaaactgcatggtcacagcagcctcagctcatamcagccatccaatgcaaggaaggacaacaccaagcccagaggacagttcctggactgatttcttcaacccaatctcacaccccatgggacgaggtcatcaa

SEQ ID NO: 24676 - DNA, 201 bp, Homo sapiens
gagagagacatttgcatgtggcccctgagaaagaagagatttgtctgcctcaccccctgctggtgcaaacttgcacctctctcagcctcagttttcttatrtgtatcaagtttcaatgatcgcaatagtacttatctcatgtgactactgtgggattgaaacgagatagttcatgtgaagtaccgagcacagagcctggca

SEQ ID NO: 24677 - DNA, 201 bp, Homo sapiens
gcttttgtgtcctccagttcacatgctgattgctaagaagaaaatgagcatgagtgaacccaaagctgctgaaacattctgcgtttatgcaacttccttgscctctatacaaggaagatggtttcattgtcttgtctagagaataaagtcttttttaaaaataaaatcggtgtatccctgaccaagcgtccattaacactt

SEQ ID NO: 24678 - DNA, 201 bp, Homo sapiens
tttctctatgaaattctccctgtcttctttggtctcatggctacttcctgggaggaaaaagtagtaatcagctccctccccccagctaaatgtgcatggtrttagcaaattctaacccaagatgttaaaactatctgagaagaggcatgattctgcttcttgtctgtaccctcctaaagtcaaggtgcagcaaggagagag

SEQ ID NO: 24679 - DNA, 201 bp, Homo sapiens
agagcttctctacatcacatgaaggcttggaagaagataaagaccatccaacaacttctactctgacatcaagcagtaaggattataaaacctagttggcytcagctattgataagaatcaatcaattatgggtacttttgcagtgtctttggtggaggtgcatccattagctgccgttacactgttacttttaatcaaaa

SEQ ID NO: 24680 - DNA, 201 bp, Homo sapiens
gcaccctgtgaatcatagtggtggtatggggaaaggggtaaaaaagcatcaatctatggagtatgcgaaccagatggcatctgtcctgggaagaacaaatrtccttcataggagaattagaggactatactagtcaggcagaaatccagtccattcatcaagcttttcctcttgctgtggtccctacagggtcagccctgt

SEQ ID NO: 24681 - DNA, 201 bp, Homo sapiens
cctcctaaagtgctgggattacaggcgtgagccaccgcacccggcctttcctgtcattttaaaatgtaaaatatataccaaaatgtgattacaccttacayggtgtttagcaaacattgcctactggttaaccatggcttccatgtcattgaatatttcctcctcatattgtagtgcgtaatgcaatagatgtaccctaat

SEQ ID NO: 24682 - DNA, 201 bp, Homo sapiens
atacttgcaaaatatagatatgctgccatgtgctgaggaccaggggagttcttacaactgccactggccaatcatcaagcacttagatgctgggagccctrctgcccacctggccaaacccctcacttaatcctcaaactgcagtattggtcaatattatcacctcattttatggatgaagcagccgaggcttagcgaatt

SEQ ID NO: 24683 - DNA, 201 bp, Homo sapiens
acaggggggaatacattgggaagactggcacccagtccaggaaatttaacatgcaaatgctgtaatcaaagtcacaggaagagaaaacaaataggaagaamtcatccaagaaaaaaatcaagaaaacttcccagaactttaaaacatgaatatcttgactaaggacaaggtgagtacttagtaaaatgaataaaaacagac

SEQ ID NO: 24684 - DNA, 201 bp, Homo sapiens
gtcagtggtggttgtaaggtaaattgtaagtaagagctattggccaccaagtgccaagggttatgaatgatttacctttttttttttttctaaactgaagsaaactcatggttgttcctagaaaaacatgcacactcacttgcttgcattcggataagcttctttgagtaacagggaagaggccactaggattacaaggca

SEQ ID NO: 24685 - DNA, 201 bp, Homo sapiens; identical to SEQ ID NO: 2966

SEQ ID NO: 24686 - DNA, 201 bp, Homo sapiens
tttttgcagctgcatcacttcattgctaatatatttgaagaaggcaagataacctaaaggcatgaatcttgttctgttttaatccacctgtaagtcagtgktggttgtaaggtaaattgtaagtaagagctattggccaccaagtgccaagggttatgaatgatttacctttttttttttttctaaactgaaggaaactca

SEQ ID NO: 24687 - DNA, 201 bp, Homo sapiens
tgaatccaattgctcctctttacaagttaaaggatgaatgagaatactacaccctcttggtaggaaaagatggaatagtcttttcttcctgggttctgcamactagctgagctcatactcagatctgtccctggcctgtcccagagaagtgccatgttagttactaaagcttccttcctaaatgaatgatcaccaagagga

SEQ ID NO: 24688 - DNA, 201 bp, Homo sapiens
tggggtggaccaagaagctattattcctcgcaggccctacaatctaggcaaagctttgaaatgtgctcggacaattttatcagagatctattttccttgawctgaggcttagggggcagtatagatgagattaatggcatttgggatcagtgatggtttatccaggagagaatgcatagtacctgtaaccaggagcctgaa

SEQ ID NO: 24689 - DNA, 201 bp, Homo sapiens
ggctttatatccttgctgctcagagcgtagtccctggaaccagcagcctgggtaccctgggagtttgttggaaatgcacaatctcagacccaaccccagayctcctatggcagagtctgcatcttaacaagtttccagggattcatgtgcatggtgcagcttaagacatctttctctgccccggtttttagagacaggaga

SEQ ID NO: 24690 - DNA, 201 bp, Homo sapiens
ctcagcctcacttgttgcatctgtgaaatgggggtgattttttgacttctcaaggtatagcatctattaaggcacatagactacaatctgacacaaattarcagctccatacattgcagaatcttttctttttcacttaaggagatgctaaaagaggcaagaggaaagaaaatcaaatttggagatgccgtgggctgtgtg

SEQ ID NO: 24691 - DNA, 201 bp, Homo sapiens
gaagaggccactaggattacaaggcagttagtgcccattggagtgtgactggcattgtgcaccctgtgaatcatagtggtggtatggggaaaggggtaaawaagcatcaatctatggagtatgcgaaccagatggcatctgtcctgggaagaacaaatatccttcataggagaattagaggactatactagtcaggcagaa

SEQ ID NO: 24692 - DNA, 201 bp, Homo sapiens
gcaaagatgaattccaaatcttatttaatctgtgtgctgggggggaagaggagtgtatttccttttgccaggtatctgagcctacaaaaagccccataaayaagtaaaatgtgtccatgagttcataaaagagtgagccttagacatacagaccacctgtcaaaagagccctgtcattctctattatattatcctctttta

SEQ ID NO: 24693 - DNA, 201 bp, Homo sapiens
gggcatgggaagtaggggtcacatagtacaactgtggctgccagaagctgctcttcacaatctggatgaaatattcagagaaggaactataacttgtgggktgggccacaaatccaaaaagggtcttgtgagtattatcgtcactgaataaactctcaggtgctgcaaagagaaaatggtgttatttctagtcagaatata

SEQ ID NO: 24694 - DNA, 201 bp, Homo sapiens
tagcatctcaactttttaatgaacccaaaaatgaacaggagggttttctgagccagtcccctgcctccacacagttagctcatgaatccaacatcatgggrggaagtcttcaggattttgtttcccattccttttttatcacctaaatatagttaaaggatttgtgatgactgcatccagagatgtttaaaaatggacctg

SEQ ID NO: 24695 - DNA, 201 bp, Homo sapiens
attttatattaaaaattgctctttcataggcaggaaaaagtccttcctaatagtttgagtccaaagcttaagggtctagcatctcaactttttaatgaacmcaaaaatgaacaggagggttttctgagccagtcccctgcctccacacagttagctcatgaatccaacatcatgggaggaagtcttcaggattttgtttcc

SEQ ID NO: 24696 - DNA, 201 bp, Homo sapiens
ctcatattaacatcgtggttggcattactggcctcctgtatgggatgaaagtttaatgacttctgcaaggttatgaaaggtcaagatcacagctaattagygcaaattcaggatttgaattctagtttctaccccagagctgatgtccatgtcaccatggacatcatttgctcccaatatacctgatttactttcaagggg

SEQ ID NO: 24697 - DNA, 201 bp, Homo sapiens
attgagttgtttgttcattaggataggatagggctgaaagggatgtgaattgagttgtttgttcattatcacttcattatttgtcacctggatgaaaggtraaggtggctgattagtgtttctccatcagctagaactttgactgggaaatgagccaatcaaatagcagcaaaatatttgccctcaccttacaggcccttg

SEQ ID NO: 24698 - DNA, 201 bp, Homo sapiens
ctcactccccactgtgggcacggaggcactgcgccacccagggcaagacctcgccctctctccagctcctctcccaggatatccaacatcctgtgaaaccmagagatcttgctccagccggattcagagaaatttagcgggaaaggagaggccaaaggctgaacccaatggtgcaaggttttacggttcggtcatcctctg

SEQ ID NO: 24699 - DNA, 201 bp, Homo sapiens
agaagtcctggcatggttcctttcatcttgccacagccactgataatcactttcattttctgtgtaactcaccaggcaagaagtccatgcagatttacttktagtagttcacatgacaaataaatactgcgtttgatttccaaacattaaaccatagtatattatagatagatatagagttatcattcaaagtatgatatt

SEQ ID NO: 24700 - DNA, 201 bp, Homo sapiens
cagacatgtacacccatgttcgctttagcatctgatagaaaaagaggaacatgaggaaagacagagattgagtcaccaacatgtgacctggtgatttctgwgtcctctgactttgaaatcagtggaaatttagagctctactttgtcacttgtaatgctttgttgttgcaaataaatatttttgcagctgcatcacttcat

SEQ ID NO: 24701 - DNA, 201 bp, Homo sapiens
acacacacatacatgcacacacacacagacatgtacacccatgttcgctttagcatctgatagaaaaagaggaacatgaggaaagacagagattgagtcaycaacatgtgacctggtgatttctgagtcctctgactttgaaatcagtggaaatttagagctctactttgtcacttgtaatgctttgttgttgcaaataaa

SEQ ID NO: 24702 - DNA, 201 bp, Homo sapiens
gctttatatccttgctgctcagagcgtagtccctggaaccagcagcctgggtaccctgggagtttgttggaaatgcacaatctcagacccaaccccagacstcctatggcagagtctgcatcttaacaagtttccagggattcatgtgcatggtgcagcttaagacatctttctctgccccggtttttagagacaggagac

SEQ ID NO: 24703 - DNA, 201 bp, Homo sapiens
tttaaaaatatccccacaatccagcttctccctctgtagggcttctgcttgggaaagtttgtgtaactccccaaaacatctgaagagtgaatagcagtagkgttcttggactgcgaaggagaccctgcttcttatgtgcatgctcttgtgcacacagacagaaacacacacatacatgcacacacacacagacatgtacac

SEQ ID NO: 24704 - DNA, 201 bp, Homo sapiens
ctttatggaaactaatggtgctttaagaggcacagatttcatagaaagagacccagttgttcccaccctgatggttctaggtctaggtctaggtcaccaaygtctatggtgaaagaatgggcttttgcgaggtatggtctcctgtcatgtatgagggtcatttatttaagggaaaaccaagaccttattttctttgacaac

SEQ ID NO: 24705 - DNA, 201 bp, Homo sapiens
ccttagacatacagaccacctgtcaaaagagccctgtcattctctattatattatcctcttttattttctgtgtaacactatgagtatctgaaattaccgkattcatgtattaatcatttacctgtatactatatcctcactctagaggtaagctctttgagggcacagatcgtgtctgactccccagcccccaagattgt

SEQ ID NO: 24706 - DNA, 201 bp, Homo sapiens
gtctttcttggatctttccgatccaagccatatggttactgcaatctcacaatacaatgagggtaaatccttgcaatcaccagttaccagcaattgtgaarcaatggatggcatagatgtcagggggtcaggagagccttgcaagcgttcagagggcttgggagtggacacatcacagttgcactctgctgggcagcgctg

SEQ ID NO: 24707 - DNA, 201 bp, Homo sapiens
actctccccaggggcaatggggcctccaaggccaccaaagatcaaggtgccaggtgggggatgcctcccagcttcccattcatttttcagttgggggccastcagcagctcctcaggtgaggattgtctcagaactgaagaatggttcaaattggcccaagatgctgaaatttattgcagggatcactgggacagtgtgta

SEQ ID NO: 24708 - DNA, 201 bp, Homo sapiens; identical to SEQ ID NO: 2967

SEQ ID NO: 24709 - DNA, 201 bp, Homo sapiens
caaaacaattgagaactcttgggaggcatcttcaggaaaggaggtggtggaaactttcctctcctcactctccccaggggcaatggggcctccaaggccaycaaagatcaaggtgccaggtgggggatgcctcccagcttcccattcatttttcagttgggggccactcagcagctcctcaggtgaggattgtctcagaac

SEQ ID NO: 24710 - DNA, 201 bp, Homo sapiens
gcagctgggcttagaactggaaggctcctttcccacagctgaatggattattgcctaaggagtcaaccccacgtattaatttggccaagtcaatctgcaayctgtatgacaactggagtttaaagtcagctaaagacacctttgtgaatcatagagcgggaacccagaggaagccattaggggtcctctcggctggaatcc

SEQ ID NO: 24711 - DNA, 201 bp, Homo sapiens
aggtgggaggagtgcttgggcccaggagtttgaggttacactgagctaagattgtgctactgcactccagcctgggtgatggagccagaccctgtctctaytaaaaattaggaaaagaaatagcctgtctactctattggtccataacctctatcgagacagtgaccttgtctgctttattcaatgcctggatcttttcct

SEQ ID NO: 24712 - DNA, 201 bp, Homo sapiens
caccccaactccatctgtgcagcaaacaacacaggggtgtacatcctcacatccaacacctcccagtatgacacatattgcttcaatgcttcaggttggtyctcaggggggtgtctgttggcgtgaaaggctgtgggagcctggtctttggagctcagcttaagtggggattcatgtagcctccatttacataacaaatgc

SEQ ID NO: 24713 - DNA, 201 bp, Homo sapiens
ctttcaattctgccactcccagtgtcttcctgcaatttagcacccctcatgttcctaaactaaatcccacagttccaggcatcctaggaaaaaaaaaatcmatatttagcagcagaagaaagagtgtatattcacaaacatctcttctaaaattggaggagcggctttttgggaagtccttaattgacctctccttatttc

SEQ ID NO: 24714 - DNA, 201 bp, Homo sapiens
gagctgcagcacatggcagaaagtaaccgttctcccggatgcgcacagtcgttgtctggactaacaggctcctgtgcccaagggctcgccaagccccaccrggctgtgtctaggcagggcagagctgggcggggcagagactggggctggaacagggcgagtggctgttatcaaggtggtcacagaagggatcacaattcc

SEQ ID NO: 24715 - DNA, 201 bp, Homo sapiens
gtcaagtgaattgatctttggaatccttattttctatgaagatctttgatgaatacagtgtcttttttgcattctgtccctgactgttctatagaaagacrtcccttgtactctttagagcaaagttggtagctcttatggtcttcatttgaattctaccactgcttctttttctgtttttaagcccatggtaacttgggg

SEQ ID NO: 24716 - DNA, 201 bp, Homo sapiens
actctatttctccctatttatggataacaagtggaaagcttttgcagcaattgtgtgttctggagacaagcacatggtgggtggtgatcttacaaatacgrgttcatcactgattccacctccacacagataggaatgatgtcacaggtggaagaagagacccaaatcattctgaaggctcaactactttactggaaggtt

SEQ ID NO: 24717 - DNA, 201 bp, Homo sapiens
atgtacaatgtctagtctcaacctcatacctgcaaagatatcacaatatttttgttagcatgttccttaccacagttcttggatttctaccaaaacaaagyttctacaaaacttcctgtggtcatccttcttagcctttgctgccccagtttccttaattcttattaaagttctagctcatttatcagtggattaagcaat

SEQ ID NO: 24718 - DNA, 201 bp, Homo sapiens
ttatatattttttaagaataatcatctgtcaaaatgtaatttcatgcaatagtctggtatataaaactgatgcaagtggaacttctgtggttgggatgggkcctggggagggagaggcacagcttactcctcagcttttactctgaccactaggtctgcttctgaggggtctctaaggaacctccaggttccatgaaacac

SEQ ID NO: 24719 - DNA, 201 bp, Homo sapiens
aatagaaatatttaaaaattagtagagtataggcactagctaattcaaatgcttggttgtaaacaactatgtcttgtaaatgagaataaagtttattctcycaatgacgatgataacatctttctcactcacttttactcaaattggctttattgggcaggagagacagagatggagttataggtatcatgattgaactta

SEQ ID NO: 24720 - DNA, 201 bp, Homo sapiens
tatttggtatttttttatcctttttgacttaatgagcatttggaaaccataaggcccacagcaacctgacctttgacttgcccagactctctgagcaattytgtgagttgagtcaacaatcaatggttttcaaattattcaattgttcactcaacgcatactagttgaacaccaatatctgtgctctgctaggcactgggg

SEQ ID NO: 24721 - DNA, 201 bp, Homo sapiens
tttcaacaatcaattcaatcatgattacaacagctttgatgagcactagtgctacagcaactgagacagcaaccaagaggcaagaaacctgggattggttytcatggttgtttctaccatcagagtcaaagaatcatcttcacacaacaacacaaatggctggtaatgagttattattatctcatagcgtatgttttcttg

SEQ ID NO: 24722 - DNA, 201 bp, Homo sapiens
atgcagcaacaccaaaatatgtgttcaaagagggagaagaggagaaaaagagaaaggaagttatcgtggtctgataacagggcatgtcagaatgggaaagrgtgttaggaattatgtagccaacttgtttgattggaaagataaggaagcctcaagggctgcaagtgactttcccaaggtcacaaaactaattggtggcaa

SEQ ID NO: 24723 - DNA, 201 bp, Homo sapiens
atactgtgtgaaccatttggggataataatccctctgcctcccctagacctctccacctttgcctgctggtgtgaaagtgttttgtgctagtaggcagaarcacgtgatataaaactacaaggtcctattattacctaggataactttcgcctctatctatgtctcctgttgctggttgaccccaatcattgaaactgtat

SEQ ID NO: 24724 - DNA, 201 bp, Homo sapiens
taatctgagtgataccaaattgtatctctcttgagaagtagttaatgtgaaaaatgggtgaacctatgatcataccttagttatatcttgatgagattatrgaagaagaaatagaatgttttgagaagtggggaaaatatctcacaaaatttctcttgtctcatgttcttcctgttttatttatctatgggatctactgct

SEQ ID NO: 24725 - DNA, 201 bp, Homo sapiens
agagaggggagaggagagaaacccagggaaaggcaaaacatgagccaggtgtttaaagtgggggaataagaatggcttgattggggccaggggaggggtcwgtctgcttggataagagaattcatgaaaagaacagtgagagatgaggtcggacagattccaggcaatcaagtaacagtggcactgtccactggcagaaga

SEQ ID NO: 24726 - DNA, 201 bp, Homo sapiens
gagagcataaccaagtgtcagaagacaggaaaaacagacatctcgattgcatgtgaaggcttcaaggaatttgaggatgagttgaatgtggaaaagaagayagacagagagaggggagaggagagaaacccagggaaaggcaaaacatgagccaggtgtttaaagtgggggaataagaatggcttgattggggccagggga

SEQ ID NO: 24727 - DNA, 201 bp, Homo sapiens
aaatcataaagattgcacgacttaggattttgtcaaaatgtgtcagaggctataatataaggctagtttttggcattctgtcagtcactgaatgtccttcrtcagatcacagctccttttggttgtgctgactttatacccatctggaatccactgaccattagctgaaataaaatcccagatgtgctcagatctcacatc

SEQ ID NO: 24728 - DNA, 201 bp, Homo sapiens
ctttaaatgagtagctactacatgccaatcacagatgttgcctctgctgagtatccagtcaaaaaaccagaatctaacagagctaactaagcaccatcttrcaggaaaccagctgacgtcagctccgcagccaccagtgagttactgggcccacatctgcctgcaagagggggaggggaattcaggtaacccacaagaggg

SEQ ID NO: 24729 - DNA, 201 bp, Homo sapiens
aaaaatgaaggaggaggaagttgtaatggaaacttctgccaatgcatattctgagttgactcattcattctgatctctgaatagaagctctactctcttcyatgtgatggaaagttgaggatagggtagggctgagagggatgtgaattgagttgtttgttcattaggataggatagggctgaaagggatgtgaattgagt

SEQ ID NO: 24730 - DNA, 201 bp, Homo sapiens
tggggtatgcaagtcaactccctcactttcttttaaaaatcctgggaaatccattataccttctgtgcctgattttcttcctttgcaagtgggttgcttgscgtccagctcagccactaatgcaagtcaccacaacaggtacgtcttcaaataccatctcagcaggctgggagccaaatgaagaaaatgaagatgaaagag

SEQ ID NO: 24731 - DNA, 201 bp, Homo sapiens
tgtcactatgttagagtgcttctcttggtatattaagatatcgaggcaccctagaaatccagacgattgtacctggaagtactgtagttgttttcaaaaayttcatttgggaatctagttgtgggtgaggtcataacatccactgagcttttaaacatgatgtcagaggaaggggttagaattgcaaaaatgaaggaggag

SEQ ID NO: 24732 - DNA, 201 bp, Homo sapiens
tagttaatgtgaaaaatgggtgaacctatgatcataccttagttatatcttgatgagattatggaagaagaaatagaatgttttgagaagtggggaaaatrtctcacaaaatttctcttgtctcatgttcttcctgttttatttatctatgggatctactgctacagattgtctttgaatgatcaggctttatcagagaat

SEQ ID NO: 24733 - DNA, 201 bp, Homo sapiens
gctcaagaaataacatttttctaattgcttcaatcatcgttatcacagtttcaaccacaccacgggcttttgaccacacaaaacagaaccaggactggacycagtggaacccaagccattcaaatccggaagtgctacttcagacaaccacaaggatgactggtaatgggttctgcatatttaatgaaagatttttttccc

SEQ ID NO: 24734 - DNA, 201 bp, Homo sapiens
tttgtatgaagtggagagaagaggaataaatatgaattttagttactacatgaacataaaataaatataattaaaaataaatataattacattcccttaartaatagtgcataaaatatagactgttttgcttgtgttccttccagttagcttgctacataaagccacataccattaattcaaatttcatcgtcaaaaatt

SEQ ID NO: 24735 - DNA, 201 bp, Homo sapiens
acatgactttgtcagagggcttggggctgggcatggtgtgggtggcgaaggggagaaggaggaaaggggaaggaaaggagctcttgttgccccattctggrgagtggtggactctggacaaccacgaggaaactttggaaaggagcaaggctttgaggaggagtccagtctttgtatgggaaagcaaaaagtggagaaatg

SEQ ID NO: 24736 - DNA, 201 bp, Homo sapiens
ggctttttatgttttaacttgatttacattcatactattgatagtgtaatattcagtgattttcaccaacgataatttactcaacaattcctttgtttttrgtccaaggaagcatatctggaagagttttctggtgaaattaaatcagcttaagagctctataatccagcctgttggggaatgttctcaatacttacttgg

SEQ ID NO: 24737 - DNA, 201 bp, Homo sapiens
ctgtggcagcatggcatgggtcaagaagtacttctccttcatcttcctttgatgtcggtaactcatcctttctgcactgcgggagttgttaatgcttttgkgtcctccagttcacatgctgattgctaagaagaaaatgagcatgagtgaacccaaagctgctgaaacattctgcgtttatgcaacttccttgccctctat

SEQ ID NO: 24738 - DNA, 201 bp, Homo sapiens
agtttctacaaaacttcctgtggtcatccttcttagcctttgctgccccagtttccttaattcttattaaagttctagctcatttatcagtggattaagcratgaacggtaattaacattgtggacccattcaaggctgttttgccatcattttttggaataccttaaaaagactaaactttgtgataggctgtataagaa

SEQ ID NO: 24739 - DNA, 201 bp, Homo sapiens
aaaccatgaacaactttataaaccccatgcttattggaaaaggaaggagcaaagtcatgtgtaaatgtgtttgggagattgcttggtatggtagaaacagyatgagctttgggatcagacaaattttgggttttaatactgattctaccacttacttaactgtgaaactctgttcacacatcttaaatattttgagtcagt

SEQ ID NO: 24740 - DNA, 201 bp, Homo sapiens
cgcagcagcctgggtgaagagtgagaccctgaaaaagaaaagaaagataagaaaagaaaagaaacaagaaaagaaaagaaacaaaaaaagaaaagaaaggycatactgaaaaagtgaaaccatgcttaaagagtgttgagattccctatcctcctctcccagcttggctctcagaatgctgggagctaggcatatgttctc

SEQ ID NO: 24741 - DNA, 201 bp, Homo sapiens
caagaactactcctggacttccagttaaagagaggagagtgtacataccttcattccctcatgtaagcctctaaaaagaaaataaagagatatttccagayggaatcaaccagtggagttaaagagattggaagaagagacaagagcaacaaaaacttgaagctgaaaagtgatagctgattggtaactgaatgaacaagt

SEQ ID NO: 24742 - DNA, 201 bp, Homo sapiens; identical to SEQ ID NO: 2962

SEQ ID NO: 24743 - DNA, 201 bp, Homo sapiens
ttgtcactatgttagagtgcttctcttggtatattaagatatcgaggcaccctagaaatccagacgattgtacctggaagtactgtagttgttttcaaaamcttcatttgggaatctagttgtgggtgaggtcataacatccactgagcttttaaacatgatgtcagaggaaggggttagaattgcaaaaatgaaggagga

SEQ ID NO: 24744 - DNA, 201 bp, Homo sapiens
caggccttccgagccccttttcttctttcttttttccttttttttttttttttttttttgagacggagtcttactgtgtcacccaggctggagtgcggtgrtgcaatctcagcttactgcaacctccacctcccaggttcaagcaattctcctgcttcagtctcctgagtagttgggattcagccacgcaccaccatgccc

SEQ ID NO: 24745 - DNA, 201 bp, Homo sapiens
ccatcatcacagcagatgtagacagaaatggcaccactgcttatgaaggaaactggaacccagaagcacaccctcccctcattcaccatgagcatcatgargaagaagagaccccacattctacaagcacaagtaagcaagatggcggtcggcagttctgggttagatgaattagtaaagacattccagcaatagggaaga

SEQ ID NO: 24746 - DNA, 201 bp, Homo sapiens
tttgagaccagcgtggccaacatggagaaaccctacctctactaaaaacacaaaaattagccaggtgtggtggcgggtgcctgtaatcccagctacttggktggctgaggcaggagaatttcttgaacccaggaggcagaggttgcagtgagccgagatagtgccattgcaccccagcctggttgatgaagtgagactttg

SEQ ID NO: 24747 - DNA, 201 bp, Homo sapiens
gtctgattacccttgttttgtggctgggattaccgaaactcccagaggttaagtcatcctctgataagggggaaagccaatgctcagacctggactttctyggtccaaggctgctgattgaattctggattcttcccaaatagtgtaatctcgtgtcaactcaaatcaattcaagtttcctttccagtttcccacatccca

SEQ ID NO: 24748 - DNA, 201 bp, Homo sapiens
ggagatgacaaatagggatcaggcacacctgggtggctcaagttagaaaacaaattaactcattttgcagaatctggagacgtctggtctggagaactgayagtgccctctctttgggcatagtatgactgtaggttgtctttgggtggtcttcatatggaatgtactgtgtttgccatgttccctaggagatctggcctc

SEQ ID NO: 24749 - DNA, 201 bp, Homo sapiens
cacagctctaaaacagtgcaaaataaatccctaaatatcgttaaggattgtcaggtagaagagtcatgagatcagttgccaagttacccacctaaatcttytgagataaattctgccatgccataaaagtatgttacctggcttctaaaccccagccagcctgccctctctttcctggtgaggtctcagtctgcctccttc

SEQ ID NO: 24750 - DNA, 201 bp, Homo sapiens
ccagctttccatttcacactcctgctcacatttggtttagatttggcttttctttgctcgagaggaacaggatttattactaccagtcagaagccatcagkccccaatatttcagcaaagaaccctagtctgccagagtgagtaatgctctgtttgcactcaagtctccctgaaccagtcaccccaaataggatgtcactg

SEQ ID NO: 24751 - DNA, 201 bp, Homo sapiens
ggctaccatattggatggcacagctctaaaacagtgcaaaataaatccctaaatatcgttaaggattgtcaggtagaagagtcatgagatcagttgccaasttacccacctaaatcttttgagataaattctgccatgccataaaagtatgttacctggcttctaaaccccagccagcctgccctctctttcctggtgagg

SEQ ID NO: 24752 - DNA, 201 bp, Homo sapiens
gaaaatcattagtctctgaagttgacatacaaggatgggtcatgggcttgcatgatgaagtgatctgtgagtcacgttgtcttaaagatgctgggttgggrgttctattacttctttaggtttttccacccctgccatcatccaaaacagctttctttgctgttcctcatgtcacctgactccttgagttacagctctcca

SEQ ID NO: 24753 - DNA, 201 bp, Homo sapiens
cttcacaatctggatgaaatattcagagaaggaactataacttgtgggttgggccacaaatccaaaaagggtcttgtgagtattatcgtcactgaataaaytctcaggtgctgcaaagagaaaatggtgttatttctagtcagaatatacaaccatctcacaatgatactctaaggaatcaaggcatagtcctatgcaaat

SEQ ID NO: 24754 - DNA, 201 bp, Homo sapiens
gactttttcagaacagcgagatagttgtgctgacaaaacaaaaacaaaaacatcatttaagatgccttcagatgcaagtacatgtcataatagaaatattyaaaaattagtagagtataggcactagctaattcaaatgcttggttgtaaacaactatgtcttgtaaatgagaataaagtttattctctcaatgacgatga

SEQ ID NO: 24755 - DNA, 201 bp, Homo sapiens
aaaactttcttttggttccccaactaatttttttttggtcgagggaccgcctgctgatgtggacagaataaacttttcagaaagtatgcatgtgcagtgargaggctgggacacctggttctcctgagcatcaagacaaggcatttgttgcaaattctttatttgacttggaattaaaattgatttgtcatagagaattac

SEQ ID NO: 24756 - DNA, 201 bp, Homo sapiens
atccccttcaaaggctgaggcttttctgctttgagtgtcacatttaagagaaagagatacagaatcctattttcatcagagaaagtttggttgaaaatggrgcctccaataggtgttcatttattcagcaaacatcttttgagtggctcctgtgactaccagccctggcaaggagaaagagaaggtaaaaaacaaaaagag

SEQ ID NO: 24757 - DNA, 201 bp, Homo sapiens
agcgagtatctcaccaggaaagtagctgcttggatgccataaattactatgtcctgatttgataattgaaaacagatttgccacgcagctaaaaggtggtkaacagctgtacgggccccttaatgggctctgtgattctaaagctgtcaacccatttctaatccccttcaaaggctgaggcttttctgctttgagtgtcac

SEQ ID NO: 24758 - DNA, 201 bp, Homo sapiens
tttacaaagagtctttatacctcccttcagcttcctcattttcccttggattacttttgctcaattaaatatgaatttcctattgtgtgcaatcagccctytattgccaagccctagaatgcaccacttttgctcacatacacagtccataagctttgcacatgtcaccatagaaacgctggcatggatgctgtcgacatt

SEQ ID NO: 24759 - DNA, 201 bp, Homo sapiens
ttttaaatgggtgaaatggtaaattttatgttatgcatattttaacataacaatgataataattttaactaagtacgttgcctccttatttcctacagggycaagttcaaactccctggcatagcttacaccttgtagtccccatacctgtaacctcatgtctgctatcttcccccagccccttcatctgatctatgttca

SEQ ID NO: 24760 - DNA, 201 bp, Homo sapiens
aattatctgagaaaatcaaatgatgctgttacaataattacgctggtacaagttaataaaagtgccatgttacagtcaaacagctatgttgctatctatamcattgagggcatagttttaaaaagtagttatgctacctgattgtataaggaacaaaactgagagaaaaaatctaaaaggccgcctatgattgaatggaaa

SEQ ID NO: 24761 - DNA, 201 bp, Homo sapiens
aacatttgaaaaaatacaactaaataaaataatggaaatataaatcaattattatcaatctcaccatccagaaataccatggttaccattttaatatacgkcttttttttttttttttttttgagatggagttttgctttgttgcccaggctggagtgcagtggcgcgacctcggcccactgcaacctctgcttcctgagt

SEQ ID NO: 24762 - DNA, 201 bp, Homo sapiens
aattctttatttgacttggaattaaaattgatttgtcatagagaattactaaagggaagggttctcctaaggttgtaaattacccttttaattctctcctsttcagaggtctccagactgagcctctcttggggaaagagaagaatgtggcatgcaccgttctcctttgccccagcttgcctaagcacacctgaagacaga

SEQ ID NO: 24763 - DNA, 201 bp, Homo sapiens
agacttggagaaggtagattgacccagcacacatggctagttagcaagggacagcggtgagacttaaatccagggttgtccagctctagacaccaaagtcytgaacactgtgcaacactgctgctgagaattctcatgttccttgacacaaaataacattactaagccttagccttaatcaaatgaggtgggggggaaatc

SEQ ID NO: 24764 - DNA, 201 bp, Homo sapiens
tggtagctttgagatgaggcataagattctgcatttctagcgatctccccaggtatgcctgtcctgatggtctgagagccacactttgagtagcaaggtcytaaattaaaaatagaaaataacaaccacacacaactaccaataccgtgtatttcttcaaatctctgcaaaattatgatgaacagcattctgttatcccca

SEQ ID NO: 24765 - DNA, 201 bp, Homo sapiens
agcaattctcctgcctcagcctcccgagtagctgggactacaggcacatgccactatgcctggctaatttttgtatttttagtagagacggggtttcaccmtgttgactaggttgatctcaatctcttgaccttgtgatccgcctgcttcagcctcccaaagtactgggattacaggcgtgagcaaactccttattttata

SEQ ID NO: 24766 - DNA, 201 bp, Homo sapiens
tcagtaatatattagcagggactctaatagggtgatttttcatagtcagaaagggccactgccgctaaactccttatttatttattgtgaggtggagtctygctctgttgccaagctgtaatgcagaggcacaatctcagctcactgcaacctctgcttcctgggttcaagcaattctcctgcctcagcctcccgagtagc

SEQ ID NO: 24767 - DNA, 201 bp, Homo sapiens
tgaatgaatgaatgaaattatgaaaaactacaaatgaatgaattgactgtgtgattcaatgagaaaatgtcctttagaaagaagtctgccggaaagtgcasgcttctcctttctgctgatctgattctcacagccagtaataagagaaggaaatgcagatttctctcatcaaagtgtaggccctgaacccttctttggaca

SEQ ID NO: 24768 - DNA, 201 bp, Homo sapiens
tccacccctgccatcatccaaaacagctttctttgctgttcctcatgtcacctgactccttgagttacagctctccaagagaaatcatattttattccctyttcatgagagcacataattattttaggagtcagttgggttgatagatactgcgtgaggctccagagaagattttcctttaaagaatctatctgggccagg

SEQ ID NO: 24769 - DNA, 201 bp, Homo sapiens
atgaaatattcagagaaggaactataacttgtgggttgggccacaaatccaaaaagggtcttgtgagtattatcgtcactgaataaactctcaggtgctgyaaagagaaaatggtgttatttctagtcagaatatacaaccatctcacaatgatactctaaggaatcaaggcatagtcctatgcaaatctaaaattgtcca

SEQ ID NO: 24770 - DNA, 201 bp, Homo sapiens
tgaacctgtctgttctactatatgatgaggtgtgagggtacggagaaattcattatggtcccccaaaccaggtaagtagaaagtggtagaaccagggatasagctcagctctctccaaagtctctggcttaacatgcctgaattgtctattgtcagaagtttggtaaactgaatttgctgaagttaagacatcatctccaa

SEQ ID NO: 24771 - DNA, 201 bp, Homo sapiens
agaccaattaggtaaagtcactcaaaatttttgagagtggatgctcagaggtaacactttggcatagaattgttaaatagcatgcactttaatggaagaayagaatcattaaagattggttgataacaagtcacagtgtatttaaccatcatcacagcagatgtagacagaaatggcaccactgcttatgaaggaaactgg

SEQ ID NO: 24772 - DNA, 201 bp, Homo sapiens
ggctatgaatggcttgctcatgacatattttgtatttgatgagaataccatagtgtttgataaatattcagaaatgtatcgctaaaacatatggctattckaggtattctttttcagaatcatctataggaaagctctagctgctcaggcattcctttccccactgaaattactaacaacataaagtgattatcatggtat

SEQ ID NO: 24773 - DNA, 201 bp, Homo sapiens
aggcctgtttgacaggaggaaaactgatgcttagagacgttaagtgacttgctggcattcacatagccaggagcagtgctggatggaaacccagctccacygagctccaaagcctaggcttagaatatgttagactgtataagatggacgaacttggaaggatttcagggagggaaggattttggtggactctaggcctta

SEQ ID NO: 24774 - DNA, 201 bp, Homo sapiens
tgaagaatgtgatgaggagggtattaattaaaagttgtaggccaggcgtggtggctcacacctgtaatcccagcaccctgggaggccgaggcgggcagatsacgaggtcaggagatcgagaccatcctggctaacacagtgaaaccccatctctactaaaaaatacaaaaaattaaccaggcgtagtggcgggtgcctgta

SEQ ID NO: 24775 - DNA, 201 bp, Homo sapiens
gcatgacttgccccaggatccagtggtggagttgggatttccgcattatctaacatcctcccatgttagactccaatgcttatgctccttcaattcattaygtgtctggaggactttggaagctatacgtggctctcccacactacctgtcccctgtggccagcataagtgaactcttgcatgggtggcttctctctccat

SEQ ID NO: 24776 - DNA, 201 bp, Homo sapiens
gaagtttcttttttaaaaaaattgtttatttatttattatttttatttttaacagggacaggatctccctatgtttcccaggctggtctcaaagtcctggrctcaagagatcctcctgtctcagcctcccaaagtgctgggattacaggtgtgagccaccatgcccggcttcttagaagtttcttttagaaccattgtgtc

SEQ ID NO: 24777 - DNA, 201 bp, Homo sapiens
cataagaaattaccttgggcaaggttgtgagaggatttggaatctaaatggagaaaagtgtagaggcatatttttcaatcttctacttctatgtcattttycctgtgtgttggattgctaagattatgtatctattgctggcagaaatatcatatcctaaattcttggagaatgatattggttgcccaagattgtatagaa

SEQ ID NO: 24778 - DNA, 201 bp, Homo sapiens
tttgaagcaatggaggaagaatttttaaaaattcatgaagctttcattttgatgaggctcttcacaagatgtcttagaagtttcttttttaaaaaaattgkttatttatttattatttttatttttaacagggacaggatctccctatgtttcccaggctggtctcaaagtcctggactcaagagatcctcctgtctcagc

SEQ ID NO: 24779 - DNA, 201 bp, Homo sapiens
ggaaaaggtctttttggcagtgtttcatcttcttggttcatttttgggctttcttgatagctgaaaaaaaaatctaactcaccttactattttgtttgggsatgatggtttcagcctctctgcttgaacttgttctcagttttttgtctactgttagctcatattcttccaatgcacatttttgggcattattggttatag

SEQ ID NO: 24780 - DNA, 201 bp, Homo sapiens
aggaggctgaggcaggagaattgctcggacctggcaggcagagtttgcagtgagccaagattgcaccactgcactccagcctgggtgacagagcaagactytgtctcaaaaaaaaccaaaaaacaaaaaacaaaaaaacaggttaatatcagcaaattcatagagtttatctagtatgaactcattcagtcatcctataaa

SEQ ID NO: 24781 - DNA, 201 bp, Homo sapiens
ttctttacatttgtttgccttatatgacattggataaattatattctttacttctataaataatcgtgaggaaaatagtgctcatgttatgttatggttgycatatcacaatgtctaagatcatgcaggggtggggaggggggatacagagattgcagaataaagacaatgctatttttaaatgttgacaatgtttatctt

SEQ ID NO: 24782 - DNA, 201 bp, Homo sapiens
atcccagcactttaggaggccgaggcaggtggatcacgaggtcaggagttcgagaccagcctggccaaccctgtctctactaaaaatacaaaaattagccrggcgtggtcctgcgcacctgtaatcccagctactcaggaggctgaggcaggagaattgctcggacctggcaggcagagtttgcagtgagccaagattgca

SEQ ID NO: 24783 - DNA, 201 bp, Homo sapiens
tcgaaaacctccagctcatggctcagtcgcccaatcaagtaaatagaaaatctctttccttcacaggttattaaattgctgcttgattttgctttgatcakgaattcaggggattcagtttgaagaatgagtagcatgaaatttatacccatgaggaatttgcatttctgatgttgtcctaagattgtgggagacattagg

SEQ ID NO: 24784 - DNA, 201 bp, Homo sapiens
ttcctgattcagtaggtctggggtggagcccaagcatttgcatttctaatcagttccctggtaatactgacactgctgggacagggattgcactttgagarctactgctctggaggaaagccttgcatctgaaagcctcaggaagaattcaagcagtgtcccaatttaacattgcactacaccagagtgattaagagcttg

SEQ ID NO: 24785 - DNA, 201 bp, Homo sapiens
atccaccagcctcagcctcccaaagtgctaggattacagacgtgagccaccacgcccagccatgaatttaaagtttaaatggcaattttaatagtcacagkaccctagaatgcttatagcctaatgttagtaaatcaaatgctttttacaagactgatattcacagacactgattctttctgatttccacagtggtacgga

SEQ ID NO: 24786 - DNA, 201 bp, Homo sapiens
tttgggatttagtgactgtctttctcctggttgtaatatttattcggtggtgggcatggcttatgggtgtgctttatgaagtttttgcacctgcaactcargtcagtacctttcttaaaagaacacaaaagaaataaacttgaaacagtccaagtgattttagatatgggcaatgggtcaacctccagttgatatatgtca

SEQ ID NO: 24787 - DNA, 201 bp, Homo sapiens
gcgggatccctggaacaacaacaacaacaaaacattgctagtatctctttctatcactaagaaatgttcaaattctagtagccttaatttctactctatgwgcagggatgtcctagagatcagcctaaagtcgttcataatttctttgaggaatacaaaagaaatctagaattaagaaggtcccattttactgcttgccac

SEQ ID NO: 24788 - DNA, 201 bp, Homo sapiens
attgacaatcaacaaaggtggcgggatccctggaacaacaacaacaacaaaacattgctagtatctctttctatcactaagaaatgttcaaattctagtarccttaatttctactctatgtgcagggatgtcctagagatcagcctaaagtcgttcataatttctttgaggaatacaaaagaaatctagaattaagaaggt

SEQ ID NO: 24789 - DNA, 201 bp, Homo sapiens
cttctgcaaaccaagcgggccgtgctgctagctactcactgcttcttgggttccctgtctttttaaagtaaccatgtcgaaggtgcttatcattatggtakgcaattttgtcggatgttagcgaacacaataattagtggtctcagcaggaaggagaataggtctaccctaaagtaccacttcccaccaaagaagaaaatc

SEQ ID NO: 24790 - DNA, 201 bp, Homo sapiens
cggcaaatgctcttctgtatttagacctgctggtttcctagccagaagtgggtgtttgcacaagtggacaaaacttgccccttaaaaaagaaaatcaaaakcttcatcattttgcagatgtatcttccctgctgaggctattagtctgctacttcaaatccttttcggaggaatatatggaattaatagcaacacatttta

SEQ ID NO: 24791 - DNA, 201 bp, Homo sapiens
gaaaccacagatgttgatcttcatgtatatctgtgcttgttaatttccaggttgaatttcacagagaacggcaaatgctcttctgtatttagacctgctgrtttcctagccagaagtgggtgtttgcacaagtggacaaaacttgccccttaaaaaagaaaatcaaaatcttcatcattttgcagatgtatcttccctgct

SEQ ID NO: 24792 - DNA, 201 bp, Homo sapiens
aaatcagctgtagaccataagccaccttcaggtagtggtttgggaaatcaagcaataacactaatattgattccttcagatatggactccagtcatagtayaacgcttcagcctactgcaaatccaaacacaggtttggtggaagatttggacaggacaggacctctttcaatgacaacgcgtaagaataacgatgctcag

SEQ ID NO: 24793 - DNA, 201 bp, Homo sapiens
ttgtgttggaccacattcaaagtcatcctggaccacacaaggcctgtgagccgcaggttggacaagcttgccctatatgaagtctgaaagtgataaaagtkctataaaaaagaaagcaaaatacgaggctaatgagtgctagggatgcttttattttctgagaaggtggtcagggaaagtgcctcctggactgttctgaga

SEQ ID NO: 24794 - DNA, 201 bp, Homo sapiens
ttaaatgtcattgaatgggatattatgaaattcccatcttagccatttaggtcaatatcctgttgtttttctcttacaggtatgggttcatagaagggcaygtggtgattccccggatccaccccaactccatctgtgcagcaaacaacacaggggtgtacatcctcacatccaacacctcccagtatgacacatattgct

SEQ ID NO: 24795 - DNA, 201 bp, Homo sapiens
acagtccaggcaactcctagtagtacaacggaagaaacagctacccagaaggaacagtggtttggcaacagatggcatgagggatatcgccaaacacccaragaagactcccattcgacaacagggacagctggtaatggatggtttaacaagtaaatttggatggaaacttccttttgggttaaacggtagacattgagg

SEQ ID NO: 24796 - DNA, 201 bp, Homo sapiens
aagaataacgatgctcagccactttattgacttgtattcctgcttcatctcttactcgctattggccaagatgcagagctttggtggtggaatggtgctaygtggcttacttcagcccagagtgtgaaactgtcttcattgtctgtatttcttgtggaggtctctcaacctgattttcccttcatttctttgtgccttcca

SEQ ID NO: 24797 - DNA, 201 bp, Homo sapiens
gaaaaacctgctggatttagcttcctcctctctgccctcctgctgcaccacagcttcccttgcacatggcattttctcagcccacatctcattttttgagrcattttatattcaaaaaaaattgtgtttttagcacaattaaaaaataagcaagtttttagccaccaggatgctgctagaagaggctgggctgtgtatgtt

SEQ ID NO: 24798 - DNA, 201 bp, Homo sapiens
gctaacccattcctatttaggctgaaaacaattaagagttatgggtacttaaaaaaatcattatgtttataaaattagtgatagaaggagcatagtgttctatacagtcacacacatacacttccttatttcttttatttaaactttgagtaacatagcagtctatgtttgggtcagttttcccttttttgtaattacatt

SEQ ID NO: 24799 - DNA, 201 bp, Homo sapiens
aaatcaagcaataacactaatattgattccttcagatatggactccagtcatagtataacgcttcagcctactgcaaatccaaacacaggtttggtggaasatttggacaggacaggacctctttcaatgacaacgcgtaagaataacgatgctcagccactttattgacttgtattcctgcttcatctcttactcgctat

SEQ ID NO: 24800 - DNA, 201 bp, Homo sapiens
tgcttagtagtggaatctggaaagaaagtttgtcaagtgaattgatctttggaatccttattttctatgaagatctttgatgaatacagtgtcttttttgyattctgtccctgactgttctatagaaagacatcccttgtactctttagagcaaagttggtagctcttatggtcttcatttgaattctaccactgcttctt

SEQ ID NO: 24801 - DNA, 201 bp, Homo sapiens
tctactattatgaaaactcaggttttctaaaacaatctcaagttgcggcagtggactgtgagaatagggggccccctcactccccaaacataagaagtatrtgcttttcttcttttatctatcccgctgagatatgtctatcttatttggaataaaagtatttattttggaaaacagctttttagcatttttaaaatgatg

SEQ ID NO: 24802 - DNA, 201 bp, Homo sapiens
agccaccgcgcccggccttatttgactttttaaggagtctgtcctaaactgaacttattactgtctccaaattatttatgcaaaagaatctaacatttctrtttcttcccatagatttgaatataacctgccgctttgcaggtgtattccacgtggagaaaaatggtcgctacagcatctctcggacggaggccgctgacc

SEQ ID NO: 24803 - DNA, 201 bp, Homo sapiens
acaaaacatgttgactcagattttgtcatgatccttctgttaggtgcatctcttattccagccctaacagattgggtgacaatatcagggtgctggtggaygtacgcctctttctttccagtgtgctgctatgatggtggctggttacctgtggtgtcttattttctttcactggctatgaatggcttgctcatgacatat

SEQ ID NO: 24804 - DNA, 201 bp, Homo sapiens
aattcatgacacctggggcaaagaaatgatcctatgaacatctagaaaggaaaaatacatacatggaggatcaacaatcagaatagaatcagatttctcartggccacattggaagatagaagaccatgaaacagggcctcaaaatactgaaagaattatttccaagctagaattctaacttagttaagctgcaaattaag

SEQ ID NO: 24805 - DNA, 201 bp, Homo sapiens
ccaggctggtcttgagctcctgacctcaggtgatccacccacctcggcctcccaaagtgctgggattgtaggcatgagccaccgcgcccggccttatttgrctttttaaggagtctgtcctaaactgaacttattactgtctccaaattatttatgcaaaagaatctaacatttctatttcttcccatagatttgaatata

SEQ ID NO: 24806 - DNA, 201 bp, Homo sapiens
ttctgcttagcacctatggacataattcaacatgatgccctctttcttctggaggggtgtgataactgcttgataataagcactttttcaggcctattgaraatgtggttaatgattctaaacttgatttttcataacttgtaaaatagagctgacagtattatagttctgaaaacagttttgcgttatttgggtatcaaa

SEQ ID NO: 24807 - DNA, 201 bp, Homo sapiens
aaaaaattaaccaggcgtagtggcgggtgcctgtagtcctagctattcgggaggctgaggcaggagaatggtgtgaacccaggaggagatcgcgccactgyactccagcactctaacctgggtgacagagccagactccatctcaaaaaaaaaaaaaaaaagttgtggaagttcctaaattgaaggccctaaaggcttaaa

SEQ ID NO: 24808 - DNA, 201 bp, Homo sapiens
gagggacagaactatgcttatctggcaccgtctgggtaatttagaggaacaaagtcaaaggtatctgaggtggctgaagcctcacactcattttatttttwaaaaaagcaaaaacaaaatgggtttccatcaacttgaaagtcttcttttggagaaaatctggttttctatgagtgatgtgtggttcacatgtttcaaact

SEQ ID NO: 24809 - DNA, 201 bp, Homo sapiens
gagctgggttttagaatcataaactctcaggtttggaaaggatgttaaatggtctggttcaatcaacacttctaataatttaatctcttacacaactttcytgccaagtgatcttcctgactatgggaaacataatactttatgaagaagttcattgttggatagttcagattattggttttttaaatccaacatttggaa

SEQ ID NO: 24810 - DNA, 201 bp, Homo sapiens
taagattatgtatctattgctggcagaaatatcatatcctaaattcttggagaatgatattggttgcccaagattgtatagaagattaaggagctaggacyctgaagagctgggttttagaatcataaactctcaggtttggaaaggatgttaaatggtctggttcaatcaacacttctaataatttaatctcttacacaa

SEQ ID NO: 24811 - DNA, 201 bp, Homo sapiens; identical to SEQ ID NO: 2958

SEQ ID NO: 24812 - DNA, 201 bp, Homo sapiens
aaatatgggagattacaaggacaccctcatttattaactttcattgatggagttaatggccatatttcaaaataactaggcattctttctgcagagggggrtaataaacatggaaaaattattctttacatttgtttgccttatatgacattggataaattatattctttacttctataaataatcgtgaggaaaatagtg

SEQ ID NO: 24813 - DNA, 201 bp, Homo sapiens
cctgagatttaagggaagaggagataaaggtaagacacagatccatgaggatctctgatcttcagagtcagaagatccaagctgtggctgggcgcgggggytcacacctgtaatcccagcactttgggaggctgaggcaggcagatcatttgaggtcaggagtttgagaccagcgtggccaacatggagaaaccctacctc

SEQ ID NO: 24814 - DNA, 201 bp, Homo sapiens
gaccttcctgagcattgcacactcacgtgctgattttctcgtctctagacagctggaagctggtgatgccattcagggaggtgggctcttgtggttgtcartaaactgcctgcattgactactactgcctaccttttttcctcatctataactgtttttcttaccttagcataagaagtgccatattggaagttttatttt

SEQ ID NO: 24815 - DNA, 201 bp, Homo sapiens
ctcataaggtaaaagaaacttatttccaagcaggaccacctttattgtgtccccagatcacctcacagggcagaaaaatgcccctcagtctgggagaagayctagagagaattatggactccttactggtttttggaaagcaaccaacagctaattccaacaccatgggcagcccatacagtctctaattatctgagaaaa

SEQ ID NO: 24816 - DNA, 201 bp, Homo sapiens
gtttcatcgtcttcttgctgttaggaggtctatgaagcagagaagaactttcctttggaaaacaactaaatgaagacagtcacctcgctagaactgacacrtgggctgtttttatattcttgaaggccactctctccctacctgaaccaagacctataggtttacatgttatttacattttatatataatatatatatata

SEQ ID NO: 24817 - DNA, 201 bp, Homo sapiens
ataagaagagcactgtttcatcgtcttcttgctgttaggaggtctatgaagcagagaagaactttcctttggaaaacaactaaatgaagacagtcacctcsctagaactgacacatgggctgtttttatattcttgaaggccactctctccctacctgaaccaagacctataggtttacatgttatttacattttatatat

SEQ ID NO: 24818 - DNA, 201 bp, Homo sapiens
tctaccactgcttctttttctgtttttaagcccatggtaacttggggaaggctttgatgctcttactgttatttctactattatgaaaactcaggttttcyaaaacaatctcaagttgcggcagtggactgtgagaatagggggccccctcactccccaaacataagaagtatgtgcttttcttcttttatctatcccgct

SEQ ID NO: 24819 - DNA, 201 bp, Homo sapiens
gttctttgaccttccagaaagttaacaaacaaaatgccttgagcatctcagacaacggctgccatgaccttggctctacactggtccacctgctttgactkgtccacttttgctttgactggaccacttccacctcttggtagctattcctttgattgtgctttgtcttcaggatcacacacataaggccatgtttcatct

SEQ ID NO: 24820 - DNA, 201 bp, Homo sapiens
ggaaaatgaggatactaatattacccacctcataggaatgttttaaggataaaatgagtaaataattctaaagtgcctaaaatagagcctggcatatacayaatgaatgcacaataaatattagccactgctcttgctgttggcattattaatatcctcccgggtaataatttgggtttgcgttagtatcaaggaaacctg

SEQ ID NO: 24821 - DNA, 201 bp, Homo sapiens
aggttaagtaattaacaacctgtgtcacctaaagtgagtggcagggtcaggaattgaaccaggtttgaggaggtcctaactaggttgaactactgaccttmataaaagtttggcactacagaccagctttataggacaaaaaaaccttctttcagagctcctttttctcgccttcctgacagctccctagcagacctcttc

SEQ ID NO: 24822 - DNA, 201 bp, Homo sapiens
aaaccctgacaggttcgcattgtcatcccatcaaggaagaggtggagagtcagagaggttaagtaattaacaacctgtgtcacctaaagtgagtggcaggktcaggaattgaaccaggtttgaggaggtcctaactaggttgaactactgaccttcataaaagtttggcactacagaccagctttataggacaaaaaaacc

SEQ ID NO: 24823 - DNA, 201 bp, Homo sapiens
taatggcatttgggatcagtgatggtttatccaggagagaatgcatagtacctgtaaccaggagcctgaataggaggcaacatagcatagaggttagaatsctgactttcccacttggatgacattgggcaaaggacttcaccactttgtgcctcagtttcctcatctctaaaatgggtttagcaatagtgcctacctcat

SEQ ID NO: 24824 - DNA, 201 bp, Homo sapiens
cacacctgggtggctcaagttagaaaacaaattaactcattttgcagaatctggagacgtctggtctggagaactgacagtgccctctctttgggcatagyatgactgtaggttgtctttgggtggtcttcatatggaatgtactgtgtttgccatgttccctaggagatctggcctcagaaatggccctgtgatggtatg

SEQ ID NO: 24825 - DNA, 201 bp, Homo sapiens
agaaggttgcttcagctacactgcagtctgcttttaagacacaaggaatggaatgcagggtggaagtttcagggcctgttatcagaccgcttgagacagtrctgctcagagggctaccagtaacatctgtggatgatcagtcaggcccaagattcaggcagaaatctttattcctaaagcaagggatgaaagagtagagga

SEQ ID NO: 24826 - DNA, 201 bp, Homo sapiens
atccctcctgaggagatgacaaatagggatcaggcacacctgggtggctcaagttagaaaacaaattaactcattttgcagaatctggagacgtctggtckggagaactgacagtgccctctctttgggcatagtatgactgtaggttgtctttgggtggtcttcatatggaatgtactgtgtttgccatgttccctagga

SEQ ID NO: 24827 - DNA, 201 bp, Homo sapiens
aaatttggagagcttaccagtgcttctggctgcccaagtggtttgtgtgtggttgactcccaggagctcaatcactttgggtgcagtccacccagagagcyatgttccagctacatcaacctggagccttagcttggtcagtctagatttttgggtttggctgcagacatctcgtaatgtcacaaggacagcctgtgtcct

SEQ ID NO: 24828 - DNA, 201 bp, Homo sapiens
ggtgacgatcaggttactatagattccttataaggtgccttcataatggataactgtagccattttatgtaagcattgtcctgtgattaaaaaaaaaaaaagattccagtatgcttttgaaaaatgtgggtgggggagagagttttaatatgctgcattcaagatttgacctatggatttagattctagcaattcatgagg

SEQ ID NO: 24829 - DNA, 201 bp, Homo sapiens
tataaatatttatttatatttatatatttatattcatttatataaatttatatttatatatttatatttatttatataaatttatatataaattatatttwtatatttaaatatatattataaatatataaaaattatatttatatataaatttatatatatatattatatataattctatatataatataatatataata

SEQ ID NO: 24830 - DNA, 201 bp, Homo sapiens
caataatgctttaaaacaacaaaaccttgtccttttcccttcctacttctgatcagaaccagctcagtaagatttattagttgtgcaatctgttttggacwtgagctcagcaaatcagaggacagaaatagaatcctggctttttaatgataaacactgtaaaaataaaaaatttggagagcttaccagtgcttctggctg

SEQ ID NO: 24831 - DNA, 201 bp, Homo sapiens
aacttgggtatattttagataaaagaatgcttccttttgccagtgttttttccatttgtctgtgtttgcatgtgtgtgtgtgtgtgtgtgtgtgtgtgtgttgtgtgtacaagttggctgttatgatggaattgctttctttgtcttatcttgtgatatatgaagttgaaccacatgaaactgatatttttgcaggtgaaa

SEQ ID NO: 24832 - DNA, 201 bp, Homo sapiens
acatcttgctggagtgtcagttttccctaaagatgtgaaggggatgttaaattagctggaaagggacttaagacattatcagcctgagacaaacacagatwtatacatatacatatatatatatttatatatatatttatttatatatatttataaatatttatttatatttatatatttatattcatttatataaattta

SEQ ID NO: 24833 - DNA, 201 bp, Homo sapiens
gactcatggtctgcactgggcagccaaaggcgattcggccaccaagtgtgattctggcctcattcagaagtggatgctaaacaatacaccctttcaccagsagcccatcacatgggcatcaggagatgggggcgagtgatgtgccagccttctagactggcaggcctggggggcagcagagggcacaatagctagaaagac

SEQ ID NO: 24834 - DNA, 201 bp, Homo sapiens
aaacttgggtatattttagataaaagaatgcttccttttgccagtgttttttccatttgtctgtgtttgcatgtgtgtgtgtgtgtgtgtgtgtgtgtgtgttgtgtgtacaagttggctgttatgatggaattgctttctttgtcttatcttgtgatatatgaagttgaaccacatgaaactgatatttttgcaggtgaa

SEQ ID NO: 24835 - DNA, 201 bp, Homo sapiens
ttttgagaaggatcaaaatataaatgtcaaatatctcgatgccaactatcaaaagtcttacctcttaaactgggccttctgttcccatggaaggtttgaakttgggtgaagggaaagatgaagccttgaggtaaacttggtacatcttgctggagtgtcagttttccctaaagatgtgaaggggatgttaaattagctgga

SEQ ID NO: 24836 - DNA, 201 bp, Homo sapiens
ctttgagacgataaaggagaggacactaactaaacaagaagacaatgatctgatcaggacaagaagacttggagtacaaaatgagaagaagataatagggkaatggattttttagtggcacagtgggaaatggcgtaggtgtttacactgcactggagccctcactgtgcttggaactggttccctgtgcacagtcttgca

SEQ ID NO: 24837 - DNA, 201 bp, Homo sapiens
ctgcccaccacagcatcacagaaaggtgaattggacttggtttatgaaaaataaaaaaaccctggatagtcagagaaaggaagtgggtggtgggggttggdggggggggcagttttcctaagaaggagactcctgtaaggagaaacgtgaaggaagaaaagccaaggaatgaatatgtcagtgagtggatccatttttcac

SEQ ID NO: 24838 - DNA, 201 bp, Homo sapiens
ctggaaaacatgaaggtattccagagccagcatgaatcttacatcaaaacttctctcttctgtgactcaggcttccttctgtttgttcaaatagactcaamactgctgaacacaaattttaactgaaactaattattcctttcatgatttttttttaaagctctttataggtctctaaataaaatcactttgtttctatca

SEQ ID NO: 24839 - DNA, 201 bp, Homo sapiens
tcagatttgagcttaatatcatggtgctttggaatgctggagtgaattttgaaggctctggctagcagagaagtttatttggctttttgtttgtttgttcyttttttttttttttttttgagatagagtctcgctctgtcacccaggctggagtgtagtggcatgatctcggctcactgtaacctctgcctcctggttcaa

SEQ ID NO: 24840 - DNA, 201 bp, Homo sapiens
aatgtaagagtgatattattttaccatgtcttttctcagatttgagcttaatatcatggtgctttggaatgctggagtgaattttgaaggctctggctagyagagaagtttatttggctttttgtttgtttgttctttttttttttttttttttgagatagagtctcgctctgtcacccaggctggagtgtagtggcatga

SEQ ID NO: 24841 - DNA, 201 bp, Homo sapiens
ggaagtgttcaggaggaataagcttcaccaggatagtttcaatgacttaaccctttgcatgcagtttcctcaagtgtaaaccgggggtcatatagtcccargagttttcaattacagcctttgaagtcttttgagattgttacacaggatcaagtagaagaggatgatttctagctctctattggaatttcagattaatgt

SEQ ID NO: 24842 - DNA, 201 bp, Homo sapiens
atggagctggttaatgccagttctgtctgattccagacctggttcttaactaacaacaaggagtggtgcctggccaggcacttggggcattgtcccaagasgatgtcaacatgtcttcttagagaaggacagtcattgaggcctgaggaagtgttcaggaggaataagcttcaccaggatagtttcaatgacttaaccctt

SEQ ID NO: 24843 - DNA, 201 bp, Homo sapiens
tcaaaataaagtttgaaacaattaggatggatttgcaaataacctttcacaaaacatgttgactcagattttgtcatgatccttctgttaggtgcatctcwtattccagccctaacagattgggtgacaatatcagggtgctggtggatgtacgcctctttctttccagtgtgctgctatgatggtggctggttacctgtg

SEQ ID NO: 24844 - DNA, 201 bp, Homo sapiens
acccaaacagatctacctgtaaatgaattgtatggtcaggcttcagggaaaaatttcccatggtgttggttttttttttttttttttttttttttaatttkttaaatctctatggcatatttttccaatttctgcttttctttttttttcttttctgcttagcacctatggacataattcaacatgatgccctctttcttc

SEQ ID NO: 24845 - DNA, 201 bp, Homo sapiens
cagctgggtcattaagacagctcagcctgcatgcagtaaattctactcagcaaatatttattaacccagttccacgggagtactgagaaattgaaacacayagtctcacccaggtagtttagattgagtacccagtataaagtatcttgaattactttctgctttctctatcttcctactttctgcagtaggaagaaagtg

SEQ ID NO: 24846 - DNA, 201 bp, Homo sapiens
acggaaaaaaggcagagaaatcagggggtccagccaggcgccaagacgttggggtgccttgcatttctaagtgccaagtgatgaatagctcagttgaaagyaacccagggcacattctggaggaaattctctgggtatgattgtgcatgactgttttctctgctcattaaaccctcatctgcctccagggcaattccggga

SEQ ID NO: 24847 - DNA, 201 bp, Homo sapiens
gtcacataattagcttataattaacagagtttaggctagaaccagtgcatcccactcccagatgggggcccccggcttatctcagcatgtcagcaacccawgaatcagccctgaaatatagatattacctatgagtaacagtttctcatcctacctcaactgttacgaaagtcttccctcaaactaaagctaagcagttcc

SEQ ID NO: 24848 - DNA, 201 bp, Homo sapiens
aagctgccagagccttagtgttacagccacatccattaccccaccattcacatacatttcatgccccagggtgagaatccacatatcccaagcagagaggcacagctttggtaaactgagtcttagctaactcatgtcagaaaccaagtgttatcctggggtttgactcctggctcttgccacattcatagcaggatgctg

SEQ ID NO: 24849 - DNA, 201 bp, Homo sapiens
tatcaagtttcaatgatcgcaatagtacttatctcatgtgactactgtgggattgaaacgagatagttcatgtgaagtaccgagcacagagcctggcacasagtaggtactctattagtgttaatatcactggaaaacccagctgggggctcagcagtagaagctgccagagccttagtgttacagccacatccattaccc

SEQ ID NO: 24850 - DNA, 201 bp, Homo sapiens
tggctcctaattatcaggaagcctggaggtcttgagtggttgtaaccaaggatactgaaagtggttgaccagttaataaagaattaagttagagtaagagrcactttacttttaagctgcctttaatacactttaatctttgagatgattggctaatatctgttaagtaccaggctctttgcagagagtcaggtcctttgc

SEQ ID NO: 24851 - DNA, 201 bp, Homo sapiens
gatataggaaaggagcccgattatctgtttgagcttcctgttctttgtattgtttggaaggctaaagtcaacagccacttttgtattctgcattgtttgcrttgttaaaaactctggaaaactcatctggtttcttctccaaaagtagcttcccagagccctgggagacactcagaaataagatccttttcaaataggcca

SEQ ID NO: 24852 - DNA, 201 bp, Homo sapiens
gtgaaaattacacagtgctctcttcccagcacatgttgtgattttctacaacttcagaaataactggggtggaccaagaagctattattcctcgcaggccmtacaatctaggcaaagctttgaaatgtgctcggacaattttatcagagatctattttccttgatctgaggcttagggggcagtatagatgagattaatgg

SEQ ID NO: 24853 - DNA, 201 bp, Homo sapiens
gatgtattgaccagctcctggattccatattgaaaatcccttgcagcccagctccaatactagtaccaggccactcacctctcaggaaagtttgggaagaygtagataatggcaacttgggtgaaaattacacagtgctctcttcccagcacatgttgtgattttctacaacttcagaaataactggggtggaccaagaag

SEQ ID NO: 24854 - DNA, 201 bp, Homo sapiens
caggagaatggtgtgaacccaggaggagatcgcgccactgcactccagcactctaacctgggtgacagagccagactccatctcaaaaaaaaaaaaaaaaagttgtggaagttcctaaattgaaggccctaaaggcttaaatgatgggagctagaactcaagaattatcttagttaatcaaagcccagctgaggtcaaagg

SEQ ID NO: 24855 - DNA, 201 bp, Homo sapiens
attggctgtgcatggtggcatgcacctgtagtcccagctgctcaggaggctgaggtgggaggagtgcttgggcccaggagtttgaggttacactgagctargattgtgctactgcactccagcctgggtgatggagccagaccctgtctctattaaaaattaggaaaagaaatagcctgtctactctattggtccataacc

SEQ ID NO: 24856 - DNA, 201 bp, Homo sapiens
taattgtgaagaagggagacaccatttctgttgtcaacgaagcccacagagaagttccaaaatttcagaatgctggaatttctggttactagagaccttgragataataatttcttgtaattctttacctggttgtgtcacagactttgaaaaccaatgaaaaccagagatgttgccctacctaaacacacacacacacac

SEQ ID NO: 24857 - DNA, 201 bp, Homo sapiens
tcactcttgctaattaggcttctgacttcagacaggtcagaagctctgtccagcaaaatttttaaatctttaatataaggagcatgaaccagatgacatttaagatccttccctctctgacattctataaacttcagtttgagtctctgaaaaaaatggaacttttttgctttttccctttcttttcaccatctatatcaa

SEQ ID NO: 24858 - DNA, 201 bp, Homo sapiens
tcccttttctactgcactcttagagtgcattaatgtgtgtgaagtgttttcggttccattatctaaagcagccctcatattaacatcgtggttggcattaytggcctcctgtatgggatgaaagtttaatgacttctgcaaggttatgaaaggtcaagatcacagctaattagtgcaaattcaggatttgaattctagttt

SEQ ID NO: 24859 - DNA, 201 bp, Homo sapiens
aacctaaactaattcaggaagcagactcctgccttggaacactgtatttccttgtcttctgggtgtcaaaggaattctttcttttttttttttttttttttcagatctggtatggcctatttgggtggggaaaattagaaattctgctggctaggcagtagctttttccatttttccccctcataccactcctttcaggaa

SEQ ID NO: 24860 - DNA, 201 bp, Homo sapiens
agagcataatagggagatctcatctgatttaaagcaccagggaaagcctcccaggacctgttggatgaatagcagtaaccatgtctccaggatccccacarttccttgaggacccttgttgtcagacttctcagagctgtaccagccctctcactgtctcaccattgggtcttctgagtaagaaagcaagaaaaaaaattt

SEQ ID NO: 24861 - DNA, 201 bp, Homo sapiens
caaattagcagctccatacattgcagaatcttttctttttcacttaaggagatgctaaaagaggcaagaggaaagaaaatcaaatttggagatgccgtggsctgtgtgttgaagttgggctctggtggaattggtggtgaccttttgcttctctccatctggatggctgtatcttcaaagacaacaagtcttaactgcagt

SEQ ID NO: 24862 - DNA, 201 bp, Homo sapiens
aaacctaaactaattcaggaagcagactcctgccttggaacactgtatttccttgtcttctgggtgtcaaaggaattctttcttttttttttttttttttttcagatctggtatggcctatttgggtggggaaaattagaaattctgctggctaggcagtagctttttccatttttccccctcataccactcctttcagga

SEQ ID NO: 24863 - DNA, 201 bp, Homo sapiens
tttataaagtctctctttctctttctctctctctcatctctctccaatctatcctctctatcaagagagaacacatgtaatgtagagtgagagcccatgtrttggataattaggcttctggctcctaattatcaggaagcctggaggtcttgagtggttgtaaccaaggatactgaaagtggttgaccagttaataaagaa

SEQ ID NO: 24864 - DNA, 201 bp, Homo sapiens
tacttttaaatttttttacaatgttcctgcattacttttgtaatcacaaattttaaaaatcctccctaatgtgtttgcattagagaaggagccgtgtctatcttatttaaaattgtacccccaggcttccacagtgcctgatatagaatgtatatttattaatgaatgaattcactgtggtgggaaaatttccggaaactt

SEQ ID NO: 24865 - DNA, 201 bp, Homo sapiens
ctgagagcaggatgctggtaacactttcttttgtgttttgccaattgtttctttttactggctagtccaccctgtctgacgcattcattataccataaccmccttgacaccagagtgaaatgccatttctctgcaggtaggagagagtcacacggattccttgagtgtttgtagcgtaagtgagaaagatatgtagccttc

SEQ ID NO: 24866 - DNA, 201 bp, Homo sapiens
ttacttttaaatttttttacaatgttcctgcattacttttgtaatcacaaattttaaaaatcctccctaatgtgtttgcattagagaaggagccgtgtctatcttatttaaaattgtacccccaggcttccacagtgcctgatatagaatgtatatttattaatgaatgaattcactgtggtgggaaaatttccggaaact

SEQ ID NO: 24867 - DNA, 201 bp, Homo sapiens
attctgagagcaggatgctggtaacactttcttttgtgttttgccaattgtttctttttactggctagtccaccctgtctgacgcattcattataccatamccaccttgacaccagagtgaaatgccatttctctgcaggtaggagagagtcacacggattccttgagtgtttgtagcgtaagtgagaaagatatgtagcc

SEQ ID NO: 24868 - DNA, 201 bp, Homo sapiens
tgcactaggcagagatggagtaagaaagaactggaggctacatttcttgtcttaaaggagttaacaatcttgttgaagcaatgagacaaaaaaaaaaaaaagaaagaaactggagaagaggataaatgtgtttaaggataaataaattctgaatgtcttggattagagtcagatgataggggtattaagtgagctaaagat

SEQ ID NO: 24869 - DNA, 201 bp, Homo sapiens
tcctcaggtgaggattgtctcagaactgaagaatggttcaaattggcccaagatgctgaaatttattgcagggatcactgggacagtgtgtagcaatttakgaggcttctctctaagggaatcagtagctgctgcatttctcttaattgaaaccactctttccctccagcttcgatggggcaggttctcatatctgcgtgc

SEQ ID NO: 24870 - DNA, 201 bp, Homo sapiens
gtggcaaaaactcagtaatagcttacaaagagaatgcaatagattctagaatgttggtgttatccatacttgatgacatgatgtgatgggggtgagttggygggtaggttcaccaagaagtattatttagaaaaactgtgccaaagaaatctatcatttcacccataactggtattaagtattgcaaaactcatttccata

SEQ ID NO: 24871 - DNA, 201 bp, Homo sapiens
aaataaatatgtggctgttagagtcttggccctgcagacttggatcaaagcagacttttcaaactactctctcttactctctcttaaaaaaaattttttttggtttctcttctatgtttctctggtttgaaaaagtaaataaaaaggcatgaaagttattaagctatattatattaagatatattatttttgggagccctg

SEQ ID NO: 24872 - DNA, 201 bp, Homo sapiens
gagtgctgcatgagtggcttaagagaacaccattaggcttgaaaaagagtgaactgcaaaaacacattttctccatttcacctagttgttattttccccccatgtgctaatgatgcaaacaaaagaaaataaaaataatagacattggcttatgtcttttcaagttccatttcttgtttcttcttttactattttcagaat

SEQ ID NO: 24873 - DNA, 201 bp, Homo sapiens
tgtattgatggtcagcaatgtaaatagcacagcgttaagcatcaaaggagatgcaaataagcctatgaatggtccttgccaaagaaggacttatatttccrttttatgtcactgttggcttttgttctgacattgggtttgggatttagtgactgtctttctcctggttgtaatatttattcggtggtgggcatggcttat

SEQ ID NO: 24874 - DNA, 201 bp, Homo sapiens
cagctctaaaacagtgcaaaataaatccctaaatatcgttaaggattgtcaggtagaagagtcatgagatcagttgccaagttacccacctaaatcttttragataaattctgccatgccataaaagtatgttacctggcttctaaaccccagccagcctgccctctctttcctggtgaggtctcagtctgcctccttcca

SEQ ID NO: 24875 - DNA, 201 bp, Homo sapiens
cctgtctccatggagcttacatgctaaattggggaggcaaacaataaacaaataaatattaaataccattcaggactgtccaatcttttggcttccctagstcacattgggagaagaattgtcttgggccccacataaattacactaaaactaagagtagctgataagctaaaacacaaacaaaaatcacacaaaaaaaat

SEQ ID NO: 24876 - DNA, 201 bp, Homo sapiens
tttattagttgtgcaatctgttttggacatgagctcagcaaatcagaggacagaaatagaatcctggctttttaatgataaacactgtaaaaataaaaaakttggagagcttaccagtgcttctggctgcccaagtggtttgtgtgtggttgactcccaggagctcaatcactttgggtgcagtccacccagagagctatg

SEQ ID NO: 24877 - DNA, 201 bp, Homo sapiens
tagtctcctctctcctggaacttacagtctatctggaagacagacagtaaacaactaatgatgcctttgtttaattacacttgtggtaagtgctatgaagragaagcactggatcttgtgagagcataatagggagatctcatctgatttaaagcaccagggaaagcctcccaggacctgttggatgaatagcagtaacca

SEQ ID NO: 24878 - DNA, 201 bp, Homo sapiens
ttaatctgagtgataccaaattgtatctctcttgagaagtagttaatgtgaaaaatgggtgaacctatgatcataccttagttatatcttgatgagattayggaagaagaaatagaatgttttgagaagtggggaaaatatctcacaaaatttctcttgtctcatgttcttcctgttttatttatctatgggatctactgc

SEQ ID NO: 24879 - DNA, 201 bp, Homo sapiens
acaaaacaaattccaatgtatcttctcctgtcttctgcagcactgggggagtcccctgataacagggatcatgtcacattcatttttgtgggcccagatcycagtaatattgacccataactgttgaactgcaatgaatgtctagaatataaaagtcatgatatctatatatatggaagcatgctgtcagtatgggctaag

SEQ ID NO: 24880 - DNA, 201 bp, Homo sapiens
ctccattcaccatttgccccaactgtgttcctgctgcacttgaaaatgattccagctgcctctggaagattttcatcccatttctgggaaaaacattagcyaataaactctcattgaatttggcagggcgggcacaccagcaagctgacactatgtgcatacaggcttcctggaacaactgttgctgagcaaatgaagcag

SEQ ID NO: 24881 - DNA, 201 bp, Homo sapiens
tggagaggaggtggttggagatcacctgggcctcctcagcactgcctcctggctggggctggggctggggataagagagtaactgcaattgtgcttccccrgcaccttcgctttaggtcactccaccgaagagcctgaaagggaagtggttcttgcgaaagaatgagctgaagcaggtggcagatgctaccaggcaccgtg

SEQ ID NO: 24882 - DNA, 201 bp, Homo sapiens
tgttctttgtattgtttggaaggctaaagtcaacagccacttttgtattctgcattgtttgcgttgttaaaaactctggaaaactcatctggtttcttctscaaaagtagcttcccagagccctgggagacactcagaaataagatccttttcaaataggccagcagggaccagggtctctcagaaccagctttcctatct

SEQ ID NO: 24883 - DNA, 201 bp, Homo sapiens
gtgttgagaaagaggagagcgtctgagagccctgggtcttagggctggcacacacctttctgctcccttctctctaattgagcattagagactccgccccytgctgggagttagaactttagctgtgttttcccatgtgaaggagcaaagaggcaaagcttcatctctgttggggctagcatcaactaattcaggtattcc

SEQ ID NO: 24884 - DNA, 201 bp, Homo sapiens
gctactgcactccagcctgggtgatggagccagaccctgtctctattaaaaattaggaaaagaaatagcctgtctactctattggtccataacctctatcragacagtgaccttgtctgctttattcaatgcctggatcttttcctagcacagtgcccagcacatggagacactgaatttggattctcctttttgaagtcc

SEQ ID NO: 24885 - DNA, 201 bp, Homo sapiens
cggccctcgctttcatgtgcttgtaaagttgtttggcaggaactgggacttggaaaggagacatgactttgtcagagggcttggggctgggcatggtgtgrgtggcgaaggggagaaggaggaaaggggaaggaaaggagctcttgttgccccattctggggagtggtggactctggacaaccacgaggaaactttggaaa

SEQ ID NO: 24886 - DNA, 201 bp, Homo sapiens
aggatcttttcaaacatgtcttatccttgttagtgcctcaaactagatcctgttcagatatatcaagttagtgagagtttattttggtgcaaaaaaaaaaatttgaaatctatgtatagttttttcatagcacgtatttttcatggaacttttggaagacccgtcatatagacacactcacacaatggatgcatgtattgt

SEQ ID NO: 24887 - DNA, 201 bp, Homo sapiens
ctccaatgggcaagagtgttgtagggacaaagtgctttgcccgtagtacttcatagaatcctctagaccatgtggaaggtgagcagatgaagcagctctgrccagagaagttaggaacatgtcccagtcacacaactgaaactgcaggaagtcagtcctgggattaactgcaggatctgaacactgtactctttatattgt

SEQ ID NO: 24888 - DNA, 201 bp, Homo sapiens
gagcatgaatatgagaggcaaccactggaccagctgcttggtcctcaccacctcctgcttctgccaatcagtgtggggaaatctcaacagtaaggtggctyatattccctgcctggcagcctcagagcagagagaagagccttgataccagggcaacatcagggaccctggagctagggctccaatatctcatccaaacag

SEQ ID NO: 24889 - DNA, 201 bp, Homo sapiens
cttgtaattctttacctggttgtgtcacagactttgaaaaccaatgaaaaccagagatgttgccctacctaaacacacacacacacacacacacacacacatccatacacacaatcttgcatataatctcacaggtccatggatgtattgaccagctcctggattccatattgaaaatcccttgcagcccagctccaatac

SEQ ID NO: 24890 - DNA, 201 bp, Homo sapiens
cgggaggacccatacaccagttgattcccctcttgccacttaacagcagcgtgagcttgggcagttgcacttgttaaatgtctggaacaatacttagcacrtaatttctaaagcttaatgtttagttcacagaaggtatcccaagaatagaaatgattattatattttagcttctctctattactgattcactatgtgctg

SEQ ID NO: 24891 - DNA, 201 bp, Homo sapiens
cacctccatataatcagatgcttggtgtggtgtaatgaagatgaggaggtctggctttgataagagtcatttagaaggtataaaggcagtggaacaagacrggaggacccatacaccagttgattcccctcttgccacttaacagcagcgtgagcttgggcagttgcacttgttaaatgtctggaacaatacttagcacgt

SEQ ID NO: 24892 - DNA, 201 bp, Homo sapiens
tcttgtaattctttacctggttgtgtcacagactttgaaaaccaatgaaaaccagagatgttgccctacctaaacacacacacacacacacacacacacacatccatacacacaatcttgcatataatctcacaggtccatggatgtattgaccagctcctggattccatattgaaaatcccttgcagcccagctccaata

SEQ ID NO: 24893 - DNA, 201 bp, Homo sapiens
acactcctccaacccccatgtctgcttctggaaggtggtggcagaggagagaagtagaagtactatatgggagatgcgggagattcttgccttctctgtcrgtctctttgggcaattatcaagctgtcatctgaccagatactaccatagcttcttcgggggcaaatccgtagggaatcctgacatccgacggggagccac

SEQ ID NO: 24894 - DNA, 201 bp, Homo sapiens
caacttcttaaaaaaccttgtctatcatctatccatctatctgtctgtctgtctatctatctatctatctatctatctatctatctatctatctatcatcygtctgtattctatgttccatctatcatctatctgtcatatatctatctctatctattaattatctctatctttatctatttatatctatcatctatctgc

SEQ ID NO: 24895 - DNA, 201 bp, Homo sapiens
actcaacttcttaaaaaaccttgtctatcatctatccatctatctgtctgtctgtctatctatctatctatctatctatctatctatctatctatctatcatctgtctgtattctatgttccatctatcatctatctgtcatatatctatctctatctattaattatctctatctttatctatttatatctatcatctatc

SEQ ID NO: 24896 - DNA, 201 bp, Homo sapiens
tcatctgtcaagccaaggatgagagtaatgaaaattttcccatcaagtttcacgtcctttgcagaaacttcgttttcaaccatcttgttggccttctctgscctgttgataatgcgccccctagtggatgctttacaacatcccctttgtcttcgtagaaactgagtccttccgcctgacttcagttctcgaatcctcaac

SEQ ID NO: 24897 - DNA, 201 bp, Homo sapiens
atgctgctataaagacacatgcacatgtatgtttattgtggcattattcacaatagcaaagacttggaaccaacccaaatgtccaacaatgatagactggrtgaggggatctttgcttgggaattgcatgcctggtgttgagaaagaggagagcgtctgagagccctgggtcttagggctggcacacacctttctgctccc

SEQ ID NO: 24898 - DNA, 201 bp, Homo sapiens
ggcggcagcccctccggctgagtcggccctgggggactggagtcaagtgagctgtctgcgaagtgcattgggctccggaaagcagggctgggatttgcgcyaaaccgttggagaatgtgtctgtggaagcaccatttggttgaaagaaaaagagaaagagaagaaagtttgttgggcaggctgccggcgcgcagttttggg

SEQ ID NO: 24899 - DNA, 201 bp, Homo sapiens
ccaaactcaacttcttaaaaaaccttgtctatcatctatccatctatctgtctgtctgtctatctatctatctatctatctatctatctatctatctatctatcatctgtctgtattctatgttccatctatcatctatctgtcatatatctatctctatctattaattatctctatctttatctatttatatctatcatc

SEQ ID NO: 24900 - DNA, 201 bp, Homo sapiens
aaagaagagggccctggtggtttccctatagtctctagggaagtttatttgtatgttacctaccagtgccatcttctgctttgtctttgggcattctgacycctgactccttccaacctgtctccccgttccttctaaaaggccccacttccaaatatttggcactgtcctaacccttgaggttctcccagagacccgcag

SEQ ID NO: 24901 - DNA, 201 bp, Homo sapiens
ttgtgacttaccatggtggatgcatcctgtgagttccaaactcaacttcttaaaaaaccttgtctatcatctatccatctatctgtctgtctgtctatctrtctatctatctatctatctatctatctatctatctatcatctgtctgtattctatgttccatctatcatctatctgtcatatatctatctctatctatta

SEQ ID NO: 24902 - DNA, 201 bp, Homo sapiens
tggacaaaatttagacctttgtgtaaaagctgactgagaaaagtgcaatgtgttcatctgtcaagccaaggatgagagtaatgaaaattttcccatcaagkttcacgtcctttgcagaaacttcgttttcaaccatcttgttggccttctctggcctgttgataatgcgccccctagtggatgctttacaacatccccttt

SEQ ID NO: 24903 - DNA, 201 bp, Homo sapiens
gggatttggggatctaggatttatactactgaagctgaaataataataataatgatagcaacaacacagcctgtcatggtggcccatgcctgtaatcctakgactttgggaggctgaggcagcaaattacccaaggtcaggagtttgagaccagccttggccaacatggtgaaaccccatctttacaaaaaatacaaaaat

SEQ ID NO: 24904 - DNA, 201 bp, Homo sapiens
gggattgtgacttaccatggtggatgcatcctgtgagttccaaactcaacttcttaaaaaaccttgtctatcatctatccatctatctgtctgtctgtctrtctatctatctatctatctatctatctatctatctatctatcatctgtctgtattctatgttccatctatcatctatctgtcatatatctatctctatct

SEQ ID NO: 24905 - DNA, 201 bp, Homo sapiens
aagaaatgaagagagaaatgtgaagaaaagctgtcagaggggtaaactgtcagagggatgcaaagaagagtaagatttcaaacaattgttctgaaagaaarttagtagctatttaataaggactgtctatgcatatagcagatatttaaatcataataagtataaagtaacctcaaaagcgtctcaataaggacagcatct

SEQ ID NO: 24906 - DNA, 201 bp, Homo sapiens
ttaggaacatgtcccagtcacacaactgaaactgcaggaagtcagtcctgggattaactgcaggatctgaacactgtactctttatattgtactttaaaaacattgcttcacatggccagaaaagccaacctctgaagaagagaaaaattgttcccttcactctcagagcttcatgagcaccttggacttgccagctttcc

SEQ ID NO: 24907 - DNA, 201 bp, Homo sapiens
gggaacatctggctcagtccacaggaagggatgcaggccttttcctgggaatgaggactcatcccatattccagcccccttcccccaacttttttttttttcaattttagtgcatctctttacacttaacaggtctgcagtgacttctaggaggatccacacaccaatcgtggaactaggcagcatctttttccacttcct

SEQ ID NO: 24908 - DNA, 201 bp, Homo sapiens
ggcaaaggctcagtggagaagaaagtctggctgggcatcctggcctcaagccccatttcttgcctgtgttgacacctggtcttgaacaccagtagtttgcytgtcagggccgcccataacccggctcctcaatcctgccccattaggcttccagactgctgatctcattacgtggtgactactgttttccagaagtcttgt

SEQ ID NO: 24909 - DNA, 201 bp, Homo sapiens
aaccatgaacaactttataaaccccatgcttattggaaaaggaaggagcaaagtcatgtgtaaatgtgtttgggagattgcttggtatggtagaaacagcrtgagctttgggatcagacaaattttgggttttaatactgattctaccacttacttaactgtgaaactctgttcacacatcttaaatattttgagtcagta

SEQ ID NO: 24910 - DNA, 201 bp, Homo sapiens
agagaagattttcctttaaagaatctatctgggccaggtgcagtggctcactccatgtgcagtggctcactttgggaggccgaggcagtggattagttgakcctaggagttcaagaccagcctgggcaacatggcgaaaccccatctctacaaaaaacacaaaaattagccgggcatagtggcgcatgcctgtggtctcag

SEQ ID NO: 24911 - DNA, 201 bp, Homo sapiens
acagatggcagagtctcatgggttaggataaaaccttagcagctactctcttttgtctgccccaccctgattggtagcaactcttagatatatgaaaactyattaccatttaattgtgcccacaccccctgccaagctaaggaggctttggggaaaccagtttgtctgttcagatgagaaattagtcatgcgagctacaat

SEQ ID NO: 24912 - DNA, 201 bp, Homo sapiens
agtgcttgggcccaggagtttgaggttacactgagctaagattgtgctactgcactccagcctgggtgatggagccagaccctgtctctattaaaaattargaaaagaaatagcctgtctactctattggtccataacctctatcgagacagtgaccttgtctgctttattcaatgcctggatcttttcctagcacagtgc

SEQ ID NO: 24913 - DNA, 201 bp, Homo sapiens
tgtttctctggtttgaaaaagtaaataaaaaggcatgaaagttattaagctatattatattaagatatattatttttgggagccctgagagggctcctacyagttattctagagctgcatagagccttcctcaaactatggctccaagcaagataatcacaacaagcaaggactttattttttgaatttccaatggccttg

SEQ ID NO: 24914 - DNA, 201 bp, Homo sapiens
agagactggggctggaacagggcgagtggctgttatcaaggtggtcacagaagggatcacaattccaagtgtgagactagctggcaatgggttttccagaraggggtcctgggttctcccagctccccactgagccttgttccaaagcttacagtccgcagtgtcactgccaccttagcgctgtggaagcttgaaccagct

SEQ ID NO: 24915 - DNA, 201 bp, Homo sapiens
gtgttatttctagtcagaatatacaaccatctcacaatgatactctaaggaatcaaggcatagtcctatgcaaatctaaaattgtccattgaatagccacrgtccgagtctacacatttaaagttgtcttattctaggattctaatttgtcagagggctgtgagagtcaacattctccattctctaccttagcaatactct

SEQ ID NO: 24916 - DNA, 201 bp, Homo sapiens
gcctctgccaggttcggtccgccatcctcgtcccgtcctccgccggcccctgccccgcgcccagggatcctccagctcctttcgcccgcgccctccgttcrctccggacaccatggacaagttttggtggcacgcagcctggggactctgcctcgtgccgctgagcctggcgcagatcggtgagtgcccgccgcagcctgg

SEQ ID NO: 24917 - DNA, 201 bp, Homo sapiens
ctcttttcacctcctccactccaacaaaagcttccaaaggaaatcttccttcttaaaagaaactgatttccatgattcagaataaaatttagtaaagactratgaattaggactccattaatttagcatttttgctacatcaagaatcaaaaagggattaaacttttctatccccatatctcttaaagccaggaaagattt

SEQ ID NO: 24918 - DNA, 201 bp, Homo sapiens
gtgtcctcttggtcacagacagcagcagtaacaactttttcctgcggactggcagcattttccaagcacctgctcttcaggtgggagttacgggtcactgycttcattccagacgggcggctctttgagtcatggcatgccagcttctgagtggctgaggactagatccagacaaggatttttcagtcccaaacactcttc

SEQ ID NO: 24919 - DNA, 201 bp, Homo sapiens
ttaagccttcacatctaggaaggctaaaggttgagtttgtctgtttcatcctgtcttggctgatcacatgcacatacaaccacacactcacttgcatacamacatataagtatgaggagaattcaaaatgttcatggaaaaatgagattaaaagataaaagtttaaagatgtaaactttacttctcaacataagcaccatc

SEQ ID NO: 24920 - DNA, 201 bp, Homo sapiens
attcaagatactgttataagctatgatagcggccatttagtccatccctaaagaactgagggtcctgggaatttaatcacatcaatgcaatctttcttacwttgttaactaaagaaaaatgggtgccctttgaagatttttaaagattaagtaacaaaaaaaaaaaagtcagaaggagtcaaatttggactataaggtgga

SEQ ID NO: 24921 - DNA, 201 bp, Homo sapiens
aagaatctaacatttctatttcttcccatagatttgaatataacctgccgctttgcaggtgtattccacgtggagaaaaatggtcgctacagcatctctcsgacggaggccgctgacctctgcaaggctttcaatagcaccttgcccacaatggcccagatggagaaagctctgagcatcggatttgagacctgcaggtaa

SEQ ID NO: 24922 - DNA, 201 bp, Homo sapiens
gacagcagcagtaacaactttttcctgcggactggcagcattttccaagcacctgctcttcaggtgggagttacgggtcactgtcttcattccagacgggyggctctttgagtcatggcatgccagcttctgagtggctgaggactagatccagacaaggatttttcagtcccaaacactcttcctgaaaatgcaagagga

SEQ ID NO: 24923 - DNA, 201 bp, Homo sapiens
accttgggaactcacccatgcagaagtggagagacaggttttcaataataaaggctaagggcttcaaatttcagcttgggttactagagttcagtgagagmtttactttttattttcgcctcttctaggattctttaaatctcattaagaaatgaagagagaaatgtgaagaaaagctgtcagaggggtaaactgtcagag

SEQ ID NO: 24924 - DNA, 201 bp, Homo sapiens
ctaccggaaagaatgctggggggttaaatgagataatatctgtaaaatgatggaatatagtagacgcatataggtttccttccctcatttctgctatcttmatcacttttgtgtgaatacacagtaggggtctagaaagaatatgaaccatgatttgggagaagtcagaggtgttccaaaaatttctgaacctctcccaaa

SEQ ID NO: 24925 - DNA, 201 bp, Homo sapiens
acagcagcagtaacaactttttcctgcggactggcagcattttccaagcacctgctcttcaggtgggagttacgggtcactgtcttcattccagacgggcrgctctttgagtcatggcatgccagcttctgagtggctgaggactagatccagacaaggatttttcagtcccaaacactcttcctgaaaatgcaagaggag

SEQ ID NO: 24926 - DNA, 201 bp, Homo sapiens
taggggtgaactgaatgaagtgttgcacggcattaaatgtcattgaatgggatattatgaaattcccatcttagccatttaggtcaatatcctgttgtttytctcttacaggtatgggttcatagaagggcacgtggtgattccccggatccaccccaactccatctgtgcagcaaacaacacaggggtgtacatcctcac

SEQ ID NO: 24927 - DNA, 201 bp, Homo sapiens
ggctgggcatggtgtgggtggcgaaggggagaaggaggaaaggggaaggaaaggagctcttgttgccccattctggggagtggtggactctggacaaccaygaggaaactttggaaaggagcaaggctttgaggaggagtccagtctttgtatgggaaagcaaaaagtggagaaatggccaaatgtagttaagtgacattg

SEQ ID NO: 24928 - DNA, 201 bp, Homo sapiens
tttcttttgtggttacaactagactacaggctatcatagtgttcattttccctgccgtcacatttcttgacacacagttaggtgcttttggttactgatargagcattgggattcaaatattcttttttccatgtctctgtgttctctggttttctggagtgactgggagcaatgctgcaattgagcctggacaatccagg

SEQ ID NO: 24929 - DNA, 201 bp, Homo sapiens
aagcgtttccttggtgcagtgatgaaaatcccaatgcacaggtgaaattaagaaataacttaataatggagtaaaatggtaactttaatttaatgaccttyacaaggtagctaagtatttccttgtataaatttgatctgtgttacttgagtaggctattctagataggcttctttttcttttgtggttacaactagacta

SEQ ID NO: 24930 - DNA, 201 bp, Homo sapiens
tcaacctccagttgatatatgtcactgagggccctgtgtttgcccaggcaagcgtttccttggtgcagtgatgaaaatcccaatgcacaggtgaaattaaraaataacttaataatggagtaaaatggtaactttaatttaatgacctttacaaggtagctaagtatttccttgtataaatttgatctgtgttacttgagt

SEQ ID NO: 24931 - DNA, 201 bp, Homo sapiens
gcaaacaacacaggggtgtacatcctcacatccaacacctcccagtatgacacatattgcttcaatgcttcaggttggttctcaggggggtgtctgttggygtgaaaggctgtgggagcctggtctttggagctcagcttaagtggggattcatgtagcctccatttacataacaaatgctcactgaatatctgtacagca

SEQ ID NO: 24932 - DNA, 201 bp, Homo sapiens
tatttcagaatctgaagctccccatgaagaaagcccttcaattttagttgaaaggtttttgctttcaaagcaaggctaacaagcagggagtccaggaagcwaataactggcattcgttgattaaatcttggccatctaggttgtggctgtaggttaaccaaagttgggcatccacccaaggctttgatcgtcacctccagg

SEQ ID NO: 24933 - DNA, 201 bp, Homo sapiens
actgcaaaaacacattttctccatttcacctagttgttattttccccccatgtgctaatgatgcaaacaaaagaaaataaaaataatagacattggcttaygtcttttcaagttccatttcttgtttcttcttttactattttcagaatcaaggaagataatacagaattttaacagttttcttacctcattttgcatttg

SEQ ID NO: 24934 - DNA, 201 bp, Homo sapiens
taactgtgaaactctgttcacacatcttaaatattttgagtcagtaaagagacagtaaaaccttcatagggtggctatgaggattaaatttaacaagtacrtgtcagtgctggggtatattaggtcctcaaaaatattaattcctacctgccatcacccacatatgcacagtaggtacttaacttcttccttcaccatttc

SEQ ID NO: 24935 - DNA, 201 bp, Homo sapiens
cctgctggatttagcttcctcctctctgccctcctgctgcaccacagcttcccttgcacatggcattttctcagcccacatctcattttttgaggcatttwatattcaaaaaaaattgtgtttttagcacaattaaaaaataagcaagtttttagccaccaggatgctgctagaagaggctgggctgtgtatgttgtatct

SEQ ID NO: 24936 - DNA, 201 bp, Homo sapiens
gattttaaaagaagggaaatagattctatctcctaatgggagaagctgcaaagtcacactgcaaaaaatatggttacaaaaaagccaattatcagggccaktagtgtgatcaagatctacgatagacatgttgaaagattcttgtgctcaagggcacctctcatgtttatgcttaaaatacactcaccatttgagccatat

SEQ ID NO: 24937 - DNA, 201 bp, Homo sapiens
tcttacaggtatgggttcatagaagggcacgtggtgattccccggatccaccccaactccatctgtgcagcaaacaacacaggggtgtacatcctcacatmcaacacctcccagtatgacacatattgcttcaatgcttcaggttggttctcaggggggtgtctgttggcgtgaaaggctgtgggagcctggtctttggag

SEQ ID NO: 24938 - DNA, 201 bp, Homo sapiens
atgcatttgtgtgtgtgattaacaaacaggtcagctagaagctgtctgatttcggacagcttcatctgggatgattggggtctttttccatctgactcttmcatgcctccagctggctggtccaggcctgacagggttccaagtaagagcacatgctcacaggtcctcttgaggcctaggctcagaactggtgctctgtca

SEQ ID NO: 24939 - DNA, 201 bp, Homo sapiens
gagcacaaatttaaaaataaacctcacagaaggtttgcaagataaagttaaagaaataccctcagaaatacagcaaaagcaaataaatggaaacagggggraatacattgggaagactggcacccagtccaggaaatttaacatgcaaatgctgtaatcaaagtcacaggaagagaaaacaaataggaagaactcatccaa

SEQ ID NO: 24940 - DNA, 201 bp, Homo sapiens
taatcctagcactttgggaggttgaggagggcggattgcttgagctcaggagcttagagaatagcctgggcaacatggcaaacccttgtctctataaaaartataaaaattagccaggtatggtggtgtgtacctgtggtcccagctactcgggaggctgagttgggaggatcatgtttgagcctgggaggtcaaagctgc

SEQ ID NO: 24941 - DNA, 201 bp, Homo sapiens; identical to SEQ ID NO: 2961

SEQ ID NO: 24942 - DNA, 201 bp, Homo sapiens
atattaagatatattatttttgggagccctgagagggctcctaccagttattctagagctgcatagagccttcctcaaactatggctccaagcaagataawcacaacaagcaaggactttattttttgaatttccaatggccttgcggtaagcggtgcacaagaagagcaagccacggtggcaatcacagtgaattgttgt

SEQ ID NO: 24943 - DNA, 201 bp, Homo sapiens; identical to SEQ ID NO: 2964

SEQ ID NO: 24944 - DNA, 201 bp, Homo sapiens
acatccgacggggagccactttggcaatggcaaacggtgtctcctctccacagagcttgtgatgtcagaaattacccataactggggcaggttttgtcttyccaaagattgtctgcccagctagacctgagagacagggagacaaacacagaatgagggggtgggtcttgtgggggtggggaacgatggaaactcacagag

SEQ ID NO: 24945 - DNA, 201 bp, Homo sapiens; identical to SEQ ID NO: 2979

SEQ ID NO: 24946 - DNA, 201 bp, Homo sapiens
aatggacagtaaccagggaaaagatcaaggtcgtactcttccatagcaactttcttttgcgtttgggtcttaagtaatgtttgagaaaccttaaattaacragaataatttgtcttatgttattaaacttcctatatcagggttgtatgagttagccaatgttaggaaaacatcactatggccttatacctctagaaaaat

SEQ ID NO: 24947 - DNA, 201 bp, Homo sapiens
tgtcggggcagtctgggcaggaggaggacactgaaggatgcttcccagcaccaagatctgagggctgtcccctgctccctggacaggtgacaactgtatcyagaaaatctaccaggaactggccttcaaccgccctcaacactacacaggcatcgtggcagagctcctgttgaaggcggaactgtcactagaagccatcaa

SEQ ID NO: 24948 - DNA, 201 bp, Homo sapiens
aaccgattgcggctgaacccagatgtgctgtcgcccaaggccgtgcagaggttcctcccgatggtggatgcagtggccagggacttctcccaggccctgargaagaaggtgctgcagaacgcccgggggagcctgaccctggacgtccagcccagcatcttccactacaccatagaaggtgtgggccatgcgggaaggtcc

SEQ ID NO: 24949 - DNA, 201 bp, Homo sapiens
cagtcagctccctgcaggccgattccccttggggacaaggaggatgggatacgggtcagggcctgtgtcttgctggggcggcctcacaagctctgccctgscctctgtaggaatgggcctgaatggcgcttcaaccgattgcggctgaacccagatgtgctgtcgcccaaggccgtgcagaggttcctcccgatggtggat

SEQ ID NO: 24950 - DNA, 201 bp, Homo sapiens
gagcagggagatttgggtgtcggggcagtctgggcaggaggaggacactgaaggatgcttcccagcaccaagatctgagggctgtcccctgctccctggayaggtgacaactgtatccagaaaatctaccaggaactggccttcaaccgccctcaacactacacaggcatcgtggcagagctcctgttgaaggcggaactg

SEQ ID NO: 24951 - DNA, 201 bp, Homo sapiens
gaggctggcctatagatgacatctgggagagagtcaggacccaggaaggcaggtccaggaggctgggtgcgcataatggaaggaaggggagcgctcctgtmtgtgtgtgtgtcttgcatctgtgcacatgctgtgtgtttctctgtacctgcatttgcacatgtgtagtgtgtgcacgtgtctgtgtgtgaatgtatgtgt

SEQ ID NO: 24952 - DNA, 201 bp, Homo sapiens
gagggtggacaggagacactttggattgggactgcagggtggggccacgagggacatgaccctgtccagcagggcctcctgcttggccccacaggtacaayttgggaggaccacgcatggtgtgtgtgatgctgccggaggatgtggagaagctgcaacaggtggacagcctgcatccctgcaggatgatcctggagccct

SEQ ID NO: 24953 - DNA, 201 bp, Homo sapiens; identical to SEQ ID NO: 3122

SEQ ID NO: 24954 - DNA, 201 bp, Homo sapiens; identical to SEQ ID NO: 3123

SEQ ID NO: 24955 - DNA, 201 bp, Homo sapiens
gggagcattggaatggcactcagggcaaaggcagaggtgtgcgtggcagcgccctggctgtccctgcaaagggcacgggcactgggcactagagccgctcrggcccctaggacggtgctgccgtttgaagccatgccccagcatccaggcaacaggtggctgaggctgctgcagatctggagggagcagggttatgagcac

SEQ ID NO: 24956 - DNA, 201 bp, Homo sapiens
tgtgaaaccaggtcattgaggtagaccctaatccaatatgacaggtgtccttggaggaaaagggattagaacccaggcacaaacagagggtgtctctgtgrtttggtcaataaaccaagaagagaagcttgagcagaaaccatccccccgaacaccttcatctaagtcttctagcctctggaattgtgaaaaaacaacttt

SEQ ID NO: 24957 - DNA, 201 bp, Homo sapiens
tggagggagcattggaatggcactcagggcaaaggcagaggtgtgcgtggcagcgccctggctgtccctgcaaagggcacgggcactgggcactagagccrctcgggcccctaggacggtgctgccgtttgaagccatgccccagcatccaggcaacaggtggctgaggctgctgcagatctggagggagcagggttatga

SEQ ID NO: 24958 - DNA, 201 bp, Homo sapiens
tatacaacattttggaaaaggccaaagcatggtgatgataaaaagatcggagatgtcagggactggggcaggagggatgagcaggcagagcacaggttttyttttcctctttttaagacagtgaaaatactcctaggatcctgcaaggagggatacaaattacatacatttgtcaaaacccacagcatgttgaccaccagg

SEQ ID NO: 24959 - DNA, 201 bp, Homo sapiens
cccgaacaccttcatctaagtcttctagcctctggaattgtgaaaaaacaactttctgttgtttaagccacccagtccagggtactttgttattgcagccraagcaaactaacgtgataggctaagcagtcagcaagctgcagaaactcattacaattgctaaaaccaaagaaagaaaagcaatccatgtcctgtgtccag

SEQ ID NO: 24960 - DNA, 201 bp, Homo sapiens
atgaaggtggagttggagagatgagttttaagcgtatattgcaaactctagggcaaccactaaagaagtgagacccagcctctagaaaaaaaaaaaaaaaaggaaattagctatcaagccacgaaaagaaatggaggaaccttaaacgcatattactaactgagatacgtcactttgaaaaggctacaaacggtgtcattc

SEQ ID NO: 24961 - DNA, 201 bp, Homo sapiens
taaattaaatttgggggacatatcagggaaatgaaagttctattgactgtcttttccaagacagttgggtactttgagaagtgatatatgtcctctggttmctataagtaaaacttgtaagttaaggagaagtgtcctggtgttagtgtatgtggagacaggtgattttgttttatattttgagtatctgtgaggcaagag

SEQ ID NO: 24962 - DNA, 201 bp, Homo sapiens
tgcacatgctgtgtgtttctctgtacctgcatttgcacatgtgtagtgtgtgcacgtgtctgtgtgtgaatgtatgtgtggtgtgtgtgcacaagtgtctstgtgtgtgcatgtgcaggtgccggcatgggtgtagtgtttgtgcacacatgcacatgcgtctcttcacacatggtgttgaggtcttgcatgggcgcacgt

SEQ ID NO: 24963 - DNA, 201 bp, Homo sapiens
ctaaaacaaaacaacaacaacaaaaataggccgggcgcggtgactcaccacacctgtaatcccagcactttgggaggccgaggtgggcagatcacctgagstcaggagttcgagactagcctggccaacacggtgaaaccccgtctctactaaaaatacaaaaattagctgggcgtggtggcacatgcctgtaatcccagc

SEQ ID NO: 24964 - DNA, 201 bp, Homo sapiens
tcagggcctgtgtcttgctggggcggcctcacaagctctgccctggcctctgtaggaatgggcctgaatggcgcttcaaccgattgcggctgaacccagawgtgctgtcgcccaaggccgtgcagaggttcctcccgatggtggatgcagtggccagggacttctcccaggccctgaagaagaaggtgctgcagaacgccc

SEQ ID NO: 24965 - DNA, 201 bp, Homo sapiens
gaagtcagggaatctggcccaagtggtcatcaaggtttcagatccggggtcccagggctctgtcgtgctcagggcatggatgtctccacccctcagagggmggttgtcctgggaggggtgtcccgggggctgagtcctcctgtgcaaggtctgaccctgcagacatggcttctgtagacagcgtttcccttgctgatgacg

SEQ ID NO: 24966 - DNA, 201 bp, Homo sapiens
tgcccagggcagggaagggtggggaggagagggcagccaggggctctcccctcaggacactgtgtgggtgaggtgggcaaagcttgacaacaggggtcacytcctttcttggagaaaagccctaccctgttactacagggagggcccgcatgggtgaggtggtgccagacttgggtcgccaggtcccgggaatgacctcag

SEQ ID NO: 24967 - DNA, 201 bp, Homo sapiens
ggcatccatggagcccccacgcactctggctgtgggtgaggatggcatgaagcacaaagcttggtttctgtcctgcagaagatgcagacacttcactgggrctgctgccccagaggcactgtgcccagggcagggaagggtggggaggagagggcagccaggggctctcccctcaggacactgtgtgggtgaggtgggcaa

SEQ ID NO: 24968 - DNA, 201 bp, Homo sapiens; identical to SEQ ID NO: 3135

SEQ ID NO: 24969 - DNA, 201 bp, Homo sapiens
gtgcccagggcagggaagggtggggaggagagggcagccaggggctctcccctcaggacactgtgtgggtgaggtgggcaaagcttgacaacaggggtcasctcctttcttggagaaaagccctaccctgttactacagggagggcccgcatgggtgaggtggtgccagacttgggtcgccaggtcccgggaatgacctca

SEQ ID NO: 24970 - DNA, 201 bp, Homo sapiens
gtgggtgaggatggcatgaagcacaaagcttggtttctgtcctgcagaagatgcagacacttcactggggctgctgccccagaggcactgtgcccagggcrgggaagggtggggaggagagggcagccaggggctctcccctcaggacactgtgtgggtgaggtgggcaaagcttgacaacaggggtcacctcctttcttg

SEQ ID NO: 24971 - DNA, 201 bp, Homo sapiens
atgcgtctcttcacacatggtgttgaggtcttgcatgggcgcacgtgtgcatgtgcatcttctgcctgtcatcactgtcaacagctcacagcagccagctrgacataaataaaggagttttgcaggaatgtggctgacaggggaaattcctccccaccattccctgggggcatccatggagcccccacgcactctggctgt

SEQ ID NO: 24972 - DNA, 201 bp, Homo sapiens
gcccgtggagagggtggcgcctggtcaggtgggcagggagaggctgatgcttggagtcggtcacctgcagggatgttgtcattaggacgggggaaggactrgatgaggatgtcacagtggtgacagcccccactccatggtaggaagggaacgctattgggaatagtggggtttaggtaaaagggcacccgtgggtcgggg

SEQ ID NO: 24973 - DNA, 201 bp, Homo sapiens
tgtttttgtctgctttgttgaaggtcagttggctgtaactatttgggtttatttctgggttctctattctgttccttggtctatgtgcctacttttatacmagtaccatgctgttttggtgactatggccttatagtataacttgaaataaggtaatgtgatgcctccagatttgttctttttgattagtcttgctttggc

SEQ ID NO: 24974 - DNA, 201 bp, Homo sapiens
cctgggtggcctacagacaacatcgtgggcacaaatgtggcgtgttcttgttgtaagcggcgagttgggagctgagagctgggagcagggtgggcagcctrggtgtaggggggaggcgagagaggtaggacccaaaagcacatctgccctgggcccctgtggtgggcagtgagggtgagcacccggcccagaggacggcca

SEQ ID NO: 24975 - DNA, 201 bp, Homo sapiens
tctcaaaattattatagatatattcaaatttgttgacatatatatacaggcaggtccccccgccacccttcacacagcctcccaccatcagcagcttgcawttacatagaacagtcttcaaaacaggaaatggacagtggcacgattcactgagcttatttagaacttaccagtgaaatgtgtgcctgcgaatgggtgtgt

SEQ ID NO: 24976 - DNA, 201 bp, Homo sapiens
gagggctttagctgtgaagccgctaatccaggagcagggagggtggacaggagacactttggattgggactgcagggtggggccacgagggacatgacccygtccagcagggcctcctgcttggccccacaggtacaacttgggaggaccacgcatggtgtgtgtgatgctgccggaggatgtggagaagctgcaacaggt

SEQ ID NO: 24977 - DNA, 201 bp, Homo sapiens
acaacaaaaataggccgggcgcggtgactcaccacacctgtaatcccagcactttgggaggccgaggtgggcagatcacctgaggtcaggagttcgagacyagcctggccaacacggtgaaaccccgtctctactaaaaatacaaaaattagctgggcgtggtggcacatgcctgtaatcccagctacttgggaggctgag

SEQ ID NO: 24978 - DNA, 201 bp, Homo sapiens; identical to SEQ ID NO: 3113

SEQ ID NO: 24979 - DNA, 201 bp, Homo sapiens; identical to SEQ ID NO: 3114

SEQ ID NO: 24980 - DNA, 201 bp, Homo sapiens
actataagtaaaacttgtaagttaaggagaagtgtcctggtgttagtgtatgtggagacaggtgattttgttttatattttgagtatctgtgaggcaagakattcccagagtgctttaccttgaaggggccaactcttagacataatccagccattagtagtaagaaggaagatggggacatttgttggacatccagcgtt

SEQ ID NO: 24981 - DNA, 201 bp, Homo sapiens; identical to SEQ ID NO: 3117

SEQ ID NO: 24982 - DNA, 201 bp, Homo sapiens
gtggaatatgcagaggtccgagttttggctccaatctgtccaaaggtgtcctcagtagctggggtgagcttgtggggtgctatttccatgacccacgcatrgtgggtgctggggatggagggtcactggctcagggtctgtgagagcttctttccaggagacctcaataggtagaaagttgttttgtttttgtcgtgtttt

SEQ ID NO: 24983 - DNA, 201 bp, Homo sapiens; identical to SEQ ID NO: 3119

SEQ ID NO: 24984 - DNA, 201 bp, Homo sapiens
cgaggcctgagcggtataatccccagcgctggctagacatcaggggctccggcaggaacttccaccacgtgccctttggctttggcatgcgccagtgcctygggcggcgcctggcagaggcagagatgctgctgctgctgcaccacgtaagcaggcctgggggcgggggcgggacctgggcagcagaggcgggacctgcac

SEQ ID NO: 24985 - DNA, 201 bp, Homo sapiens
gtgcacgtgtctgtgtgtgaatgtatgtgtggtgtgtgtgcacaagtgtctctgtgtgtgcatgtgcaggtgccggcatgggtgtagtgtttgtgcacacrtgcacatgcgtctcttcacacatggtgttgaggtcttgcatgggcgcacgtgtgcatgtgcatcttctgcctgtcatcactgtcaacagctcacagcagc

SEQ ID NO: 24986 - DNA, 201 bp, Homo sapiens; identical to SEQ ID NO: 3125

SEQ ID NO: 24987 - DNA, 201 bp, Homo sapiens
ggatgtgagctgctggcacagggcccctgcccggatgaggacagactcaggcaagcactgctcgtcttccagcctgggtgtggctcccagcacccggcctstcatggtctcctgggtattcccagctccttagcaggaccagtgaggtgagcccagacccggcctcggacatgttttcatctccttccatgccaccttgtg

SEQ ID NO: 24988 - DNA, 201 bp, Homo sapiens
tggctagacatcaggggctccggcaggaacttccaccacgtgccctttggctttggcatgcgccagtgcctcgggcggcgcctggcagaggcagagatgcygctgctgctgcaccacgtaagcaggcctgggggcgggggcgggacctgggcagcagaggcgggacctgcacactgggggcggggcttgcatggtgtgatt

SEQ ID NO: 24989 - DNA, 201 bp, Homo sapiens
gcagctgtgtgagccgtgggtatgaaagggccccttcctctaggctggccccgggccacagctactgcagggcagtccagccccactctggcctcggctgstgtggcggtacacaggctctgacctgcatcagggtgccccagggcaccattcccagggcatcaggaaccctgtcatcctcccccatggccaggtgccgcc

SEQ ID NO: 24990 - DNA, 201 bp, Homo sapiens
actcagccttgcagtgcccgccacggcccctcctgccgttggaaggacttgactcgggtattaaaaacataatcagcagtcagaggccacagtctacacgytccccgagcaatcacccgctgaaacgcaagccgtcttcatgtccccacaccctggctccagtcaccagcaaaatgcagcaaggtggcctctggacgtccc

SEQ ID NO: 24991 - DNA, 201 bp, Homo sapiens
ctacgacctgggcttcccatggatctgggacctctgcggggtcttcggtaggaagggtgctgagagcacagggagccccatccagctgaggaccctttctrtggatgcccccacctccaggctctaccctgtgggtctgtttttggagcgagtggtgagctcagacttggtgcttcagaactaccacatcccagctggggt

SEQ ID NO: 24992 - DNA, 201 bp, Homo sapiens
gaagagcatttcagaaggaatcagtaaagagaaaatgaagtcttttattttttcttaatcttaattgatctaagagtttgctaaaacaaaacaacaacaayaaaaataggccgggcgcggtgactcaccacacctgtaatcccagcactttgggaggccgaggtgggcagatcacctgaggtcaggagttcgagactagcc

SEQ ID NO: 24993 - DNA, 201 bp, Homo sapiens
gcaagcaagaagacagtggagggaaacatttcaagtgttagaagaaaaaagaaaatacatcaacctagaattctgcatcctgtgaaattatccttcaaaartgaacataaatattttctcaggtaaataaaaattgaggggattcgctgccaatagaactgacttgccagaaatgttttttaaaagttctgcagagagaaa

SEQ ID NO: 24994 - DNA, 201 bp, Homo sapiens
gcgtgccacatgtgagaagagccacacacagccccagcccttactgctcaacctgtctatttatgtcaaggaaacactgagaagcccttgtaatgttcacrggttggggacacaggctcactgaaagactcagacctactcacaggaccacaacacactcccctctccgcacaccttacctctgcatcatcaaaggcacct

SEQ ID NO: 24995 - DNA, 201 bp, Homo sapiens
cctttcagagagactgtcttgccagagcctaagctgctgggttttatcagagctgaactatctgggaaagaagagagacatccaaccccagtccgtgtagmgtgccacatgtgagaagagccacacacagccccagcccttactgctcaacctgtctatttatgtcaaggaaacactgagaagcccttgtaatgttcacgg

SEQ ID NO: 24996 - DNA, 201 bp, Homo sapiens
ttggtgcttcagaactaccacatcccagctggggtgagtgagccccacacccctcgagctgagaacctccctccccagtcattccctgatccctgctctgyaccgtccgcagacattggtacaggttttcctctactcgctgggtcgcaatgccgccttgttcccgaggcctgagcggtataatccccagcgctggctaga

SEQ ID NO: 24997 - DNA, 201 bp, Homo sapiens
acatcccagctggggtgagtgagccccacacccctcgagctgagaacctccctccccagtcattccctgatccctgctctgcaccgtccgcagacattggwacaggttttcctctactcgctgggtcgcaatgccgccttgttcccgaggcctgagcggtataatccccagcgctggctagacatcaggggctccggcagg

SEQ ID NO: 24998 - DNA, 201 bp, Homo sapiens
cagggagccccatccagctgaggaccctttctgtggatgcccccacctccaggctctaccctgtgggtctgtttttggagcgagtggtgagctcagacttrgtgcttcagaactaccacatcccagctggggtgagtgagccccacacccctcgagctgagaacctccctccccagtcattccctgatccctgctctgcac

SEQ ID NO: 24999 - DNA, 201 bp, Homo sapiens
ggtaggaagggtgctgagagcacagggagccccatccagctgaggaccctttctgtggatgcccccacctccaggctctaccctgtgggtctgtttttggwgcgagtggtgagctcagacttggtgcttcagaactaccacatcccagctggggtgagtgagccccacacccctcgagctgagaacctccctccccagtca

SEQ ID NO: 25000 - DNA, 201 bp, Homo sapiens
gcttctcaagttaggggaggtttggctgggctcagcaggtgcaaggaagcacttcctacgacctgggcttcccatggatctgggacctctgcggggtcttsggtaggaagggtgctgagagcacagggagccccatccagctgaggaccctttctgtggatgcccccacctccaggctctaccctgtgggtctgtttttgg

SEQ ID NO: 25001 - DNA, 201 bp, Homo sapiens
tgcttggatgtcattattgagaaagcactagcattagtttctttatccacttgttgattgatgggtgtttgggttggttccacgtttttgcacttgcaaaytgtgttgctataaacatgcgtgtgcaagtgtcttttttgtataatgacttcttttcttctgggtggattgctggatcaaatggtagttctacttttagtt

SEQ ID NO: 25002 - DNA, 201 bp, Homo sapiens
tggggattaacgtggggcatgtccttctgcgcttggggcttctcaagttaggggaggtttggctgggctcagcaggtgcaaggaagcacttcctacgaccygggcttcccatggatctgggacctctgcggggtcttcggtaggaagggtgctgagagcacagggagccccatccagctgaggaccctttctgtggatgcc

SEQ ID NO: 25003 - DNA, 201 bp, Homo sapiens
ttcctccccctcaaggacagggagctcttcttcctctggaatccctcttcaacaccctggggattaacgtggggcatgtccttctgcgcttggggcttctyaagttaggggaggtttggctgggctcagcaggtgcaaggaagcacttcctacgacctgggcttcccatggatctgggacctctgcggggtcttcggtagg

SEQ ID NO: 25004 - DNA, 201 bp, Homo sapiens
ctcttcctccccctcaaggacagggagctcttcttcctctggaatccctcttcaacaccctggggattaacgtggggcatgtccttctgcgcttggggctkctcaagttaggggaggtttggctgggctcagcaggtgcaaggaagcacttcctacgacctgggcttcccatggatctgggacctctgcggggtcttcggt

SEQ ID NO: 25005 - DNA, 201 bp, Homo sapiens
gcacctgctcttcctccccctcaaggacagggagctcttcttcctctggaatccctcttcaacaccctggggattaacgtggggcatgtccttctgcgctyggggcttctcaagttaggggaggtttggctgggctcagcaggtgcaaggaagcacttcctacgacctgggcttcccatggatctgggacctctgcggggt

SEQ ID NO: 25006 - DNA, 201 bp, Homo sapiens
tgcatctgtgcacatgctgtgtgtttctctgtacctgcatttgcacatgtgtagtgtgtgcacgtgtctgtgtgtgaatgtatgtgtggtgtgtgtgcacragtgtctctgtgtgtgcatgtgcaggtgccggcatgggtgtagtgtttgtgcacacatgcacatgcgtctcttcacacatggtgttgaggtcttgcatgg

SEQ ID NO: 25007 - DNA, 201 bp, Homo sapiens
attggtacaggttttcctctactcgctgggtcgcaatgccgccttgttcccgaggcctgagcggtataatccccagcgctggctagacatcaggggctccrgcaggaacttccaccacgtgccctttggctttggcatgcgccagtgcctcgggcggcgcctggcagaggcagagatgctgctgctgctgcaccacgtaag

SEQ ID NO: 25008 - DNA, 201 bp, Homo sapiens; identical to SEQ ID NO: 3129

SEQ ID NO: 25009 - DNA, 201 bp, Homo sapiens
cactgaaggatgcttcccagcaccaagatctgagggctgtcccctgctccctggacaggtgacaactgtatccagaaaatctaccaggaactggccttcarccgccctcaacactacacaggcatcgtggcagagctcctgttgaaggcggaactgtcactagaagccatcaaggccaactctatggaactcactgcaggg

SEQ ID NO: 25010 - DNA, 201 bp, Homo sapiens
gagggctgtcccctgctccctggacaggtgacaactgtatccagaaaatctaccaggaactggccttcaaccgccctcaacactacacaggcatcgtggcrgagctcctgttgaaggcggaactgtcactagaagccatcaaggccaactctatggaactcactgcagggagcgtggacacggtcaggccagcaaccagcc

SEQ ID NO: 25011 - DNA, 201 bp, Homo sapiens
aaacccacagcatgttgaccaccaggaggagaccccatgtgactccaggaccctggttgataacaacgtatcgagattcctcacatggaaccagtgcgctyctgtggtggagggtgtacctgtgtcagggcagggggtacgtggacattttctgcagtttttgatcaattttgcaatgaactaaatctgtggtataaaaat

SEQ ID NO: 25012 - DNA, 201 bp, Homo sapiens
cctggacaggtgacaactgtatccagaaaatctaccaggaactggccttcaaccgccctcaacactacacaggcatcgtggcagagctcctgttgaaggcrgaactgtcactagaagccatcaaggccaactctatggaactcactgcagggagcgtggacacggtcaggccagcaaccagccccacccagagagggtgat

SEQ ID NO: 25013 - DNA, 201 bp, Homo sapiens
cctgtgcaaggtctgaccctgcagacatggcttctgtagacagcgtttcccttgctgatgacgctctttgagctggctcggaaccccgacgtgcagcagaycctgcgccaggagagcctggccgccgcagccagcatcagtgaacatccccagaaggcaaccaccgagctgcccttgctgcgggcggccctcaaggagacc

SEQ ID NO: 25014 - DNA, 201 bp, Homo sapiens
tctaaacattgaaatggggactaggggagtggggtggagcctgtacagaataatggggcttgggcaagacctgggcaggattcagtctgggcctggtccgyaaggtggggctggtcagaaatgggataggttggggcccaggctgctgctcccccttcagcataattgttgcacctgggacgatgggaggaagctgcccca

SEQ ID NO: 25015 - DNA, 201 bp, Homo sapiens
ctaggggagtggggtggagcctgtacagaataatggggcttgggcaagacctgggcaggattcagtctgggcctggtccgcaaggtggggctggtcagaartgggataggttggggcccaggctgctgctcccccttcagcataattgttgcacctgggacgatgggaggaagctgccccaggtccatgggctactgacca

SEQ ID NO: 25016 - DNA, 201 bp, Homo sapiens; identical to SEQ ID NO: 3137

SEQ ID NO: 25017 - DNA, 201 bp, Homo sapiens
tctgggcaggaggaggacactgaaggatgcttcccagcaccaagatctgagggctgtcccctgctccctggacaggtgacaactgtatccagaaaatctaycaggaactggccttcaaccgccctcaacactacacaggcatcgtggcagagctcctgttgaaggcggaactgtcactagaagccatcaaggccaactcta

SEQ ID NO: 25018 - DNA, 201 bp, Homo sapiens
caagcctgcctcccaggcactgcctgccaatgccacacggcacccacgttccccatccccaggctacaggccccacatttctgttgccctcagccttcccyctcctttgttaagggatgagatttgcaggggaggggaaatgtgagctccccctcacatgagactgagtttgcagttacctgtgtggggatccatgctcca

SEQ ID NO: 25019 - DNA, 201 bp, Homo sapiens
aggtgtgggccatgcgggaaggtccagccccagagaccctggagtggccagggatggggatggaggactgaagggagtgtggggaggcagccaggaggccyggggctgccttgtgctcagcagtgcatcctccccgcagccagcaacttagctctttttggagagcggctgggcctggttggccacagccccagttctgcc

SEQ ID NO: 25020 - DNA, 201 bp, Homo sapiens
gggaggggtcggggattcctcaccttcctgccagggagattggtgtgaggctggggctgggctgggctgatccggagaatttgggatgagagcagggagayttgggtgtcggggcagtctgggcaggaggaggacactgaaggatgcttcccagcaccaagatctgagggctgtcccctgctccctggacaggtgacaact

SEQ ID NO: 25021 - DNA, 201 bp, Homo sapiens
aatgccacacggcacccacgttccccatccccaggctacaggccccacatttctgttgccctcagccttccccctcctttgttaagggatgagatttgcargggaggggaaatgtgagctccccctcacatgagactgagtttgcagttacctgtgtggggatccatgctccaggctggaagaaagttggatgaggccctg

SEQ ID NO: 25022 - DNA, 201 bp, Homo sapiens
gaaggtgtgggccatgcgggaaggtccagccccagagaccctggagtggccagggatggggatggaggactgaagggagtgtggggaggcagccaggaggyctggggctgccttgtgctcagcagtgcatcctccccgcagccagcaacttagctctttttggagagcggctgggcctggttggccacagccccagttctg

SEQ ID NO: 25023 - DNA, 201 bp, Homo sapiens
gaggctggggctgggctgggctgatccggagaatttgggatgagagcagggagatttgggtgtcggggcagtctgggcaggaggaggacactgaaggatgyttcccagcaccaagatctgagggctgtcccctgctccctggacaggtgacaactgtatccagaaaatctaccaggaactggccttcaaccgccctcaaca

SEQ ID NO: 25024 - DNA, 201 bp, Homo sapiens
gattgacacctgggaacagtggatggggccttggttggttgaggtcggcgtgaccagggaggatctgtgctgagcaagacagggtaggatctgggtgaggytgcttctaaacattgaaatggggactaggggagtggggtggagcctgtacagaataatggggcttgggcaagacctgggcaggattcagtctgggcctgg

SEQ ID NO: 25025 - DNA, 201 bp, Homo sapiens
tggacgtccagcccagcatcttccactacaccatagaaggtgtgggccatgcgggaaggtccagccccagagaccctggagtggccagggatggggatggrggactgaagggagtgtggggaggcagccaggaggcctggggctgccttgtgctcagcagtgcatcctccccgcagccagcaacttagctctttttggaga

SEQ ID NO: 25026 - DNA, 201 bp, Homo sapiens
ctactgaccaggccagatggaaacccagcctctgtcctaggtgctgaagcacttcctggtggagacactaactcaagaggacataaagatggtctacagcktcatattgaggcctggcacgtcccccctcctcactttcagagcgattaactagtcttgcatctgcacccagggtcccagcctggccaccagcttccctct

SEQ ID NO: 25027 - DNA, 201 bp, Homo sapiens
gcctgaccctggacgtccagcccagcatcttccactacaccatagaaggtgtgggccatgcgggaaggtccagccccagagaccctggagtggccagggayggggatggaggactgaagggagtgtggggaggcagccaggaggcctggggctgccttgtgctcagcagtgcatcctccccgcagccagcaacttagctct

SEQ ID NO: 25028 - DNA, 201 bp, Homo sapiens; identical to SEQ ID NO: 3118

SEQ ID NO: 25029 - DNA, 201 bp, Homo sapiens
aaggtgctgcagaacgcccgggggagcctgaccctggacgtccagcccagcatcttccactacaccatagaaggtgtgggccatgcgggaaggtccagccycagagaccctggagtggccagggatggggatggaggactgaagggagtgtggggaggcagccaggaggcctggggctgccttgtgctcagcagtgcatcc

SEQ ID NO: 25030 - DNA, 201 bp, Homo sapiens
tactgctgccctggtctccatgtggcagtgctgctgcttcttgtaaaggctctaacttgggcctgtgcgggcggatgttggttgtggtgctgtcagctggyagggttggtctgacctcaggccctgggggaagtggtcaggtgtcagcagagttggaatggggtaggtagctccccagttcccagacctctggatggccca

SEQ ID NO: 25031 - DNA, 201 bp, Homo sapiens
agtgctttaccttgaaggggccaactcttagacataatccagccattagtagtaagaaggaagatggggacatttgttggacatccagcgttaggatgacwgccagaggttggccaatgttattgacccttaggtcttgttcttcatagaggacgccctggctaaagcagcagcattccactgatgccattacttcatgct

SEQ ID NO: 25032 - DNA, 201 bp, Homo sapiens
tgaagaagaaggtgctgcagaacgcccgggggagcctgaccctggacgtccagcccagcatcttccactacaccatagaaggtgtgggccatgcgggaagrtccagccccagagaccctggagtggccagggatggggatggaggactgaagggagtgtggggaggcagccaggaggcctggggctgccttgtgctcagca

SEQ ID NO: 25033 - DNA, 201 bp, Homo sapiens
agaacagggccgagaagagcagtttgggcaccttatggccatcaaaagtggtcaaaagagatgccagggggcctgagaggaaactgacaaagtgtgtttgycaaaggagggatcaagtctcctttagggttaatatggcttggatgtgtgtccttccaaatctcatgttgaaacgtgaccccccgtgccccaatgtggcag

SEQ ID NO: 25034 - DNA, 201 bp, Homo sapiens
aggccctgaagaagaaggtgctgcagaacgcccgggggagcctgaccctggacgtccagcccagcatcttccactacaccatagaaggtgtgggccatgcrggaaggtccagccccagagaccctggagtggccagggatggggatggaggactgaagggagtgtggggaggcagccaggaggcctggggctgccttgtgc

SEQ ID NO: 25035 - DNA, 201 bp, Homo sapiens
ttagacataatccagccattagtagtaagaaggaagatggggacatttgttggacatccagcgttaggatgacagccagaggttggccaatgttattgacycttaggtcttgttcttcatagaggacgccctggctaaagcagcagcattccactgatgccattacttcatgctgattggcagtgctattgagtagtctct

SEQ ID NO: 25036 - DNA, 201 bp, Homo sapiens
caggccctgaagaagaaggtgctgcagaacgcccgggggagcctgaccctggacgtccagcccagcatcttccactacaccatagaaggtgtgggccatgygggaaggtccagccccagagaccctggagtggccagggatggggatggaggactgaagggagtgtggggaggcagccaggaggcctggggctgccttgtg

SEQ ID NO: 25037 - DNA, 201 bp, Homo sapiens
gtggacctcagcacagccccagcaggacaagtgctgaggtccacattaggagggctgagcctccagattccatttaacagttttttgtttatatttttggwtttgatgaaggtttgggctcaaatgggtcctgtatcggatgagcagatgcctgccccatggtacaatccatggttaatggatcccaggaaataattcacc

SEQ ID NO: 25038 - DNA, 201 bp, Homo sapiens
cccaggccctgaagaagaaggtgctgcagaacgcccgggggagcctgaccctggacgtccagcccagcatcttccactacaccatagaaggtgtgggccabgcgggaaggtccagccccagagaccctggagtggccagggatggggatggaggactgaagggagtgtggggaggcagccaggaggcctggggctgccttg

SEQ ID NO: 25039 - DNA, 201 bp, Homo sapiens
tgagagtctcaggcaggtccagagccagttctcccatgacgtgatatgtttccagagcaggttcctgggtgagataaaaggatttgggctgaacagggtgsagggagcattggaatggcactcagggcaaaggcagaggtgtgcgtggcagcgccctggctgtccctgcaaagggcacgggcactgggcactagagccgct

SEQ ID NO: 25040 - DNA, 201 bp, Homo sapiens
gtcctaggtgctgaagcacttcctggtggagacactaactcaagaggacataaagatggtctacagcttcatattgaggcctggcacgtcccccctcctcrctttcagagcgattaactagtcttgcatctgcacccagggtcccagcctggccaccagcttccctctgcctgaccccaggccacctgtcttctctcccac

SEQ ID NO: 25041 - DNA, 201 bp, Homo sapiens
gcctttccaagggagggtggacaggcagtgccaggtgccactgatctgtcctcccaagggaaggcgggggccctggcgggcagcatcagcagggaggggcrggcagctcaggcctggcacggcaagcgaccaggcgtgttctcctacccaggggtctaggctgagggtcctggggctttggcgggtccccctggagtctcc

SEQ ID NO: 25042 - DNA, 201 bp, Homo sapiens
ggcctccagccttgaccttcgctctgagagtctcaggcaggtccagagccagttctcccatgacgtgatatgtttccagagcaggttcctgggtgagataraaggatttgggctgaacagggtggagggagcattggaatggcactcagggcaaaggcagaggtgtgcgtggcagcgccctggctgtccctgcaaagggca

SEQ ID NO: 25043 - DNA, 201 bp, Homo sapiens
cgaccattcttgcaggagtaaggtggtatcacattgtggttttgatttgcatttgactgatcattagtgatgttgagaatgttttcatatgtttgttggcyatttgtttatcttcttttgagaactgtctattcatgtccttagcccactttttgatgggtttgtttgtttgtttcttgctaatttgtttgagttgattgt

SEQ ID NO: 25044 - DNA, 201 bp, Homo sapiens
taagttaaggagaagtgtcctggtgttagtgtatgtggagacaggtgattttgttttatattttgagtatctgtgaggcaagagattcccagagtgctttrccttgaaggggccaactcttagacataatccagccattagtagtaagaaggaagatggggacatttgttggacatccagcgttaggatgacagccagagg

SEQ ID NO: 25045 - DNA, 201 bp, Homo sapiens
ggctgataaacagcgtcacccagcagcccattcccctgcacctgctcttcctccccctcaaggacagggagctcttcttcctctggaatccctcttcaacrccctggggattaacgtggggcatgtccttctgcgcttggggcttctcaagttaggggaggtttggctgggctcagcaggtgcaaggaagcacttcctacg

SEQ ID NO: 25046 - DNA, 201 bp, Homo sapiens
agggcagggggtacgtggacattttctgcagtttttgatcaattttgcaatgaactaaatctgtggtataaaaataaagtctattaaaagaatccaaggcyccctctcatctcacgataagataaagtccccatccattttactcctctcagccctggagaaaggagaggccaggtcccaccaccttccaccagcatggac

SEQ ID NO: 25047 - DNA, 201 bp, Homo sapiens
aacccacagcatgttgaccaccaggaggagaccccatgtgactccaggaccctggttgataacaacgtatcgagattcctcacatggaaccagtgcgctcytgtggtggagggtgtacctgtgtcagggcagggggtacgtggacattttctgcagtttttgatcaattttgcaatgaactaaatctgtggtataaaaata

SEQ ID NO: 25048 - DNA, 201 bp, Homo sapiens
agatttgcatttgacgggttctgtgacttacaagttgtgtggccttgagcaaataattccatctcactaaaccttagttctttcatgtaaccaatgggaamggtaatacttaccttatcatattgatgtgaagatcctgtgatgtgaaattccctgcaatatggcacctgtgttaaacctctatttagatgccaaattcag

SEQ ID NO: 25049 - DNA, 201 bp, Homo sapiens
ttcatgtaaccaatgggaaaggtaatacttaccttatcatattgatgtgaagatcctgtgatgtgaaattccctgcaatatggcacctgtgttaaacctckatttagatgccaaattcagaattcatcagatttcagggcaagaaacaaactctttactctggatatttccatatgaaagggatttaatgcaaggaattat

SEQ ID NO: 25050 - DNA, 201 bp, Homo sapiens
aaacattggccactcaatgagaagcaaacttggagggtaggaggaaagtcctaaggaggggtcagggaagtatccaggccatcaactttcaaagtgctccrggacataatttagaaagtcaattggcacacctagccaggagtatatcttgagaaagtagtattctttgaagcctcctgaagcctgggttttaccaacagc

SEQ ID NO: 25051 - DNA, 201 bp, Homo sapiens
atggtattttgcttttgaatctctctaacagagtctgggtctcaaattgtcttcatgcacagtgtcatgcttaccctcacaatcacttactggaggcaggsaaggagggtgagtattccttgccaccttttacagatgtggaaaaagaaactcagagatgagacttatctagggatacagcttgtcttctggtctgttcag

SEQ ID NO: 25052 - DNA, 201 bp, Homo sapiens
atccttctaagaaatgatctgctgtggtcctggaaaaggaagcttcatgagccttatagaatgttaaggctacaaggaaagaaagtccagaaattaacatrcattggtatgttaacttggtaacttagtaaaacaagttatggagtagaagttgttcttattcactgctgtgttttggtgctcagagtaggttttcgtatg

SEQ ID NO: 25053 - DNA, 201 bp, Homo sapiens
cgctgtgtcacccaggctggagtgcagtggtgtgatcttggtgcactgcacgctccgcctcccaggttcatgccattctcctgcctcagcctcccgagtasctgggactacaggcgcctgccaccactcctggctaatttttttttgtatttttagtagagacggggattcagcgtgttagccaggatggtctcaatctcc

SEQ ID NO: 25054 - DNA, 201 bp, Homo sapiens
ccagaaattaacatgcattggtatgttaacttggtaacttagtaaaacaagttatggagtagaagttgttcttattcactgctgtgttttggtgctcagartaggttttcgtatgtatgagacacttaagtatttggtagagacatgaaacaagtaggaaaggacagaattatttagcaaatgctggtgggataattgatt

SEQ ID NO: 25055 - DNA, 201 bp, Homo sapiens
caggtgttggcctgtgtcttaggtctttccttcctccattggggaaaaaggaaagtggcaaaggtgtgctgggatacagagctttggaggttttggcctcrggtgtttgcaagcactgtactaattctagccaccttctcaattaaaataagaatacaagaatgaaatgcagtctcccaaatctcttttctttgccagctt

SEQ ID NO: 25056 - DNA, 201 bp, Homo sapiens
aaaattctggagatcatagagcaaacaccatatatgatcctaagcaaaatgaattggtccacttccgtgggacagttacccattttccccttttcctcccsttgtccccttaagttcggcaccaccatgcccttcagctatgattgtctcccattacagctggtgggtgcccccaagctatgcagcctcagggtgttctgt

SEQ ID NO: 25057 - DNA, 201 bp, Homo sapiens
agacacttaagtatttggtagagacatgaaacaagtaggaaaggacagaattatttagcaaatgctggtgggataattgattaactgtttgacatacactraaataaataacatggattaaagagttaacttacaaatagaaaattaaaagaatgatccaaatgtcagtagtacttctgaaggggcaacgattttgtgcat

SEQ ID NO: 25058 - DNA, 201 bp, Homo sapiens
gttaaattcataggataaaatttgaacttttgcaaatgagtaaacagccaaaacaaacaccgcttcagaaaaaaaaaaaaatacacgttttctccttttgraaagcaagcaatgcttaagcaaaataccttaaaagttaactaaaaagcttttctaaaataaacaactctgcttgtgatcctaaattgggaccacatgtag

SEQ ID NO: 25059 - DNA, 201 bp, Homo sapiens
gcctcagggtgttctgttgtagtgggtgctgacttgggagggcaacgggaaatcccctcagtgtatgctatggtctgaatgtttgtgtctcccccagattyatatgttgatgcctaatccccactgcaatagtattaaaagatagggtctttgggggtgattagaccttgagggcttcacccttacaaatgggatccatgc

SEQ ID NO: 25060 - DNA, 201 bp, Homo sapiens
tgggagggcaacgggaaatcccctcagtgtatgctatggtctgaatgtttgtgtctcccccagattcatatgttgatgcctaatccccactgcaatagtawtaaaagatagggtctttgggggtgattagaccttgagggcttcacccttacaaatgggatccatgcccttatgaaagaggccagaggaagctcatttgcc

SEQ ID NO: 25061 - DNA, 201 bp, Homo sapiens
caccagacacagaatctacaggcactttaatcttggacttcccagccccacaactgtgagcaataaatttcagctgtttgcatatcacttggtctaaagtrttttttacagcagcctgaatggaccaagacagtgtgccttgatatccctaaatactagagattttttagggaaacatagctttattttttttgcccctct

SEQ ID NO: 25062 - DNA, 201 bp, Homo sapiens
taagccacatgccttctcatagctggaaggagaatatctctttagtcttctaattataatgtaatatgatcctgggagtgactatcccatgacctttttcrgataacaagggactgatatctcattatattcccagcaggtgggaatcttgggagtcttcctagaattgtatactatagctaggatgaaaactaacaaaga

SEQ ID NO: 25063 - DNA, 201 bp, Homo sapiens
gccctagcacctagcacaatgtctggtacataataggtgctcaattaatgtttgttgaatgaatgaaggagcatctagtgttatcactaaagaaagattasaacccagacatgatgttttctcctcactgctgatcttcaggaaattgtgtcatcagatagctgccttttgagtcaatgccagccagtacttgtaaaagag

SEQ ID NO: 25064 - DNA, 201 bp, Homo sapiens
tttttcagagcacaattaaagccaaggctcagctaggcatggtggctcacgcctgtaatcccagcactttgggaggccgaggagggtggatcacctgaggycagtagttcaagaccagcctggccaacatggtgaaaccccatctctactaaaagtacaaaaattagccgggcgtggtggtatgctcctgttatctcaggt

SEQ ID NO: 25065 - DNA, 201 bp, Homo sapiens
aatctctggttgacagagcttcaagtcatgactactcaaaaccacacttatgtgtccaggcagcactataccaaatccaactaaagagacagcaacctaayattgaccgtagtctccagagtcttctactctggtctgcttcacagcctgtgtcatacacatcctaaatttcaccagtgtttcatgcatctctatagggtt

SEQ ID NO: 25066 - DNA, 201 bp, Homo sapiens
tcttatgggtcttggtatctaaattagtagcaaggacttatgagctggtttactgcacatctttgcaccaaaaataataatttttaaaaagaccacattgyatctgataaagagctctatagttgtgtgaaaaacacaattagagacatctatcagtcagaaaatgtttcataggccactgaggtattaattagtacactg

SEQ ID NO: 25067 - DNA, 201 bp, Homo sapiens
agcccatcctaatagactgaatgttctattgtttgatgaatgttatgtgccagtagaacttgttgataagccattcttccgaacagaaaccataactatayacacaggaaacaaaaatatttgtaatggcttttagcagtggcaactgaacacctgaggagtgagacgcatcttaataaagcccatttggaaactatagtg

SEQ ID NO: 25068 - DNA, 201 bp, Homo sapiens; identical to SEQ ID NO: 8316

SEQ ID NO: 25069 - DNA, 201 bp, Homo sapiens
tcagaaatctctggttgacagagcttcaagtcatgactactcaaaaccacacttatgtgtccaggcagcactataccaaatccaactaaagagacagcaayctaacattgaccgtagtctccagagtcttctactctggtctgcttcacagcctgtgtcatacacatcctaaatttcaccagtgtttcatgcatctctata

SEQ ID NO: 25070 - DNA, 201 bp, Homo sapiens
taaatcatgaccatttggcatcagtgtgctaaaaacaagtcttgccaatctaattatattcttccatttgccagcattattcatttatttgccagcttgawgagggaaatgcagtgggcatggtgcatttggacttttgcaaagcatttgacaagatcgttttatgttcccctattggaagaggtggaaagatacagccta

SEQ ID NO: 25071 - DNA, 201 bp, Homo sapiens
catattgatgtgaagatcctgtgatgtgaaattccctgcaatatggcacctgtgttaaacctctatttagatgccaaattcagaattcatcagatttcagsgcaagaaacaaactctttactctggatatttccatatgaaagggatttaatgcaaggaattatgtgcttacaaaattatttaaagaagtggaggagcatg

SEQ ID NO: 25072 - DNA, 201 bp, Homo sapiens
catcagatttcagggcaagaaacaaactctttactctggatatttccatatgaaagggatttaatgcaaggaattatgtgcttacaaaattatttaaagamgtggaggagcatgaggcagggatccacagttcggtttaaccagttcaaggtcacgcacatagctggaatccagaggtcaggaaatagtggttggtgtcac

SEQ ID NO: 25073 - DNA, 201 bp, Homo sapiens
actctggatatttccatatgaaagggatttaatgcaaggaattatgtgcttacaaaattatttaaagaagtggaggagcatgaggcagggatccacagttsggtttaaccagttcaaggtcacgcacatagctggaatccagaggtcaggaaatagtggttggtgtcactgccaccaccacatcactaccaatgatgtgtg

SEQ ID NO: 25074 - DNA, 201 bp, Homo sapiens
tccctacactagctctgaaggtagctatcacaaatgagctggatgaatcatcagaaagatacagaaaggttaaaaataaaaggataatcaaagatttaccmattaaacacaaatcaacagagtgagagtggcaagctaatagaactataaatcaacatctgatttatcaatttatatttagcagccaattgccaacacaat

SEQ ID NO: 25075 - DNA, 201 bp, Homo sapiens
agagcaaacaccatatatgatcctaagcaaaatgaattggtccacttccgtgggacagttacccattttccccttttcctccccttgtccccttaagttcrgcaccaccatgcccttcagctatgattgtctcccattacagctggtgggtgcccccaagctatgcagcctcagggtgttctgttgtagtgggtgctgact

SEQ ID NO: 25076 - DNA, 201 bp, Homo sapiens
ctcctgaccttgtgatcctcccaccttggcctcccaaagtgttgggattatgggcgtgagccactgcacctaacctctgtgatctcttaaatatatatgargttttatttttgaaacaccaaatttcaaatgaagcataggcattttgatctatttcagttaaatttaacacaaaagcagtaaattgtagtgacttcattt

SEQ ID NO: 25077 - DNA, 201 bp, Homo sapiens; identical to SEQ ID NO: 3146

SEQ ID NO: 25078 - DNA, 201 bp, Homo sapiens
tatcaatgtttgtaataatatagaacttgtacttatcagattcccagaggatgacatgaagttggaagagataccatcagatgacagagttgggattcaaraagatcccagcagactagaacaatgagccaaacaagatcagaactgagtggggatatgtctgtgtttctgtggttgggccagatgctgaagccatgggag

SEQ ID NO: 25079 - DNA, 201 bp, Homo sapiens
caaaagcaacctcctaaggattctttgttacaacccctttctgggtggtcctcgaaccacaacctggagtggttgcatcattataattgtattatcacaawtgccgattgtagcctatcagtatacatttggtcttttatctgcaggttgacaatggtctccaggatggtctctaccatgctatctggcctactgttttgg

SEQ ID NO: 25080 - DNA, 201 bp, Homo sapiens
ttctttctgtgtctccccttctttgggaattgatgcacttttctgcacttgctactcttttttttttttttttttgagacaaagtctcgctgtgtcacccmggctggagtgcagtggtgtgatcttggtgcactgcacgctccgcctcccaggttcatgccattctcctgcctcagcctcccgagtagctgggactacagg

SEQ ID NO: 25081 - DNA, 201 bp, Homo sapiens
tacaaagcagtgacctagatctgggctagatacttctcatcattctcattacaaagcaatgaaatataatataaatgtaaacaaaacaagcgaacaaccamtcgatgttgcctgaatgcgggggctagaggaatcagcagaggtaagattgtccttttaaggttaaactttaatcaacacagcacacaaagccagagtgat

SEQ ID NO: 25082 - DNA, 201 bp, Homo sapiens; identical to SEQ ID NO: 3145

SEQ ID NO: 25083 - DNA, 201 bp, Homo sapiens; identical to SEQ ID NO: 8321

SEQ ID NO: 25084 - DNA, 201 bp, Homo sapiens
ctagacaggaagaaaatatggggagtcatttcagttatgatgactgtgaacaccgtgaagaagggtgagaatccaagacattttaaagggggaaaaactarctagaattggtatacggaataaatataacatgaagaagaaagaagagatatgtcaggttcatatgaaatggacaatatgaactttttctttgaatgcatt

SEQ ID NO: 25085 - DNA, 201 bp, Homo sapiens
acactgcaacgctggtttatgtcagactatcatctttgactcggcatgacaacagtgcatatttgaaggccatcaaaccaatgatattagccttgtttackgtttagctggaaaatatctcccatgtggtatagtaagaagagcactgaatttgaattctgaagctcaccagagtgttccactgactagtctcagggctac

SEQ ID NO: 25086 - DNA, 201 bp, Homo sapiens
atatatgatcctaagcaaaatgaattggtccacttccgtgggacagttacccattttccccttttcctccccttgtccccttaagttcggcaccaccatgmccttcagctatgattgtctcccattacagctggtgggtgcccccaagctatgcagcctcagggtgttctgttgtagtgggtgctgacttgggagggcaac

SEQ ID NO: 25087 - DNA, 201 bp, Homo sapiens
ttcctcctacattgttttagagaaatcttcattaatgaccacttttatttttttcagcgtcttgctttaacatgcattgtcagttccctctgtcttcaacrtacacacatttcctgtcttaaaacaacaaagcaacaacattcctaagttaattttgcttcttccaatttgcattattccatttccttctttttcataaac

SEQ ID NO: 25088 - DNA, 201 bp, Homo sapiens
ttaagagacatacgagccaaatataatgtgtgtgggtcttatttgcatcctgactcaaagaaaagcattgatcagacagtcagggaagtttgagtagtaaytgaatattttggtatgattcaagtgttacacagtattatattatggctatttttttaaaagagcccttatatcttagggataaatattgaattatttaca

SEQ ID NO: 25089 - DNA, 201 bp, Homo sapiens
tgatgtcggctcggccgcctgccgccaacccgagatttggtattgccagttgtgggagggcgtcctgctaaaatccttgaggtggaggctggggtcagacraaggatgcgtaggggattagaatgtttggctatcagtaaggggaagggagtactgagggaggagattgtgtagttcatcaaatcagagcggcgtttgctg

SEQ ID NO: 25090 - DNA, 201 bp, Homo sapiens
tttctctttgcctctgtcttcttctttcctgtggagacaatagcgtgtggtggaactgcctgagtgcttactgagaaggagaaaccaagcgcagattgtayagaagctgacgaatgagtcctctgattgtggacaagtgatggcgctttttgtaaaattgtgtatgtgtttacctcaagtagtgaaaaaaaaaaaagaaaa

SEQ ID NO: 25091 - DNA, 201 bp, Homo sapiens
caccaccactgcctccccatattctaacctccagaactgttaaggcaatgttagcaacataataatagcaatataggggctcattctgtgcctggcattgkcctaaacactcttaacatgtatttgcacacaccctcacaacaaccctaaaaggtaaatgctttaattatctccgttttgcagaggaggaaactgagggac

SEQ ID NO: 25092 - DNA, 201 bp, Homo sapiens
tgggactacctggacatacttctacagtatgctgggagtatggtttctcttcaggccaaagtggaattttacttgatggtttgtgtggacgtttagaaataacactcagagctgatatttctacagattttcaagtttatcactttaatggaagtttctggcttcttgtattaaatatccccatagttttcctgattagta

SEQ ID NO: 25093 - DNA, 201 bp, Homo sapiens
aggcaggagaatcacttgaacctgggaggtggaggttgcagtgagtcgagatggcgccactgcactccagcctgggcaacaagagtgaaactccgtctcaaaaaaaaaaaaaaaaaaaaaaaaaagggtttgcaaggccgctgcctgaagcatgcatccaaacacgttaagcagctgtggggtaagctgcaaggataatgt

SEQ ID NO: 25094 - DNA, 201 bp, Homo sapiens
gtagcgagtttcaaagtcacccactcagagagggctgcctgactgccctgtctgagtagcacccccctacattctctgttgcagtctcctttttttttttwaaaaaaaaacagagtctcactctgtcccccaggctggagtgcaatggtgcgatctcggctcactgcaagctccgcctcccgggttctcgccattctcctg

SEQ ID NO: 25095 - DNA, 201 bp, Homo sapiens
tagcgagtttcaaagtcacccactcagagagggctgcctgactgccctgtctgagtagcacccccctacattctctgttgcagtctcctttttttttttawaaaaaaaacagagtctcactctgtcccccaggctggagtgcaatggtgcgatctcggctcactgcaagctccgcctcccgggttctcgccattctcctgc

SEQ ID NO: 25096 - DNA, 201 bp, Homo sapiens; identical to SEQ ID NO: 8315

SEQ ID NO: 25097 - DNA, 201 bp, Homo sapiens
aaacaaatgtttattctagccatttataaagaacacttatggatttacagcagcttaggatagtgaaaaagaagtagaggaatggtaattaattcaggtaygaatttgtaaggccaagtgagaatcacgttccttgtcgtggcccaaaaggccttgtcagactcagatggagtctcctcgttttagtctacagacatatgg

SEQ ID NO: 25098 - DNA, 201 bp, Homo sapiens; identical to SEQ ID NO: 8320

SEQ ID NO: 25099 - DNA, 201 bp, Homo sapiens
tttgttacccatagttttaagccattgagtaaaactaattcggtgagattgtagtctgtttaggttgacatttgatttcaggagtggattaacacaaatgygttgaatcggcaagcatgcaaacctagcacatggcttgaattagaacaaatccgacagagcttcctgtcatcccttttagggagaatctcagtccttctc

SEQ ID NO: 25100 - DNA, 201 bp, Homo sapiens
caatgggaaaggtaatacttaccttatcatattgatgtgaagatcctgtgatgtgaaattccctgcaatatggcacctgtgttaaacctctatttagatgycaaattcagaattcatcagatttcagggcaagaaacaaactctttactctggatatttccatatgaaagggatttaatgcaaggaattatgtgcttacaa

SEQ ID NO: 25101 - DNA, 201 bp, Homo sapiens
acctatatatttcaggccagctcttttgagacaaacaataaatatctacctttttaaggcaggaagtgcttggttattcacctaagctgttgtcatggagytctctgagtttccactaatacctgaggcctgatcagctgtgctggaaaagaaacagccactcccggggcatcaaaagcctctttatccagagactccatt

SEQ ID NO: 25102 - DNA, 201 bp, Homo sapiens
ggaggccgaggcgggcggatcacagggtcaggagatcgagaccatcctggctaacacggtgaaaccccgtctctactaacaatacaaaaaattagctggaygtggtggcgggcacctgtagtcccagctactcaggaggctgaggcaggagaatggcatgaacccaggaggcggagcttgcagtgagccgagatcgtgcca

SEQ ID NO: 25103 - DNA, 201 bp, Homo sapiens
agtgatgaggtggagggccaggagggaatggggatatagataatcaagactggccatacactgataactgttgaagctgggtcaagggtacttgggagttmattgtacttcttatatctttttttttgttgcttttttttttgtttttgagacagagtcttgatgtatcacccaggctggagtgcactggtgtgatctcag

SEQ ID NO: 25104 - DNA, 201 bp, Homo sapiens
aatcaagactggccatacactgataactgttgaagctgggtcaagggtacttgggagttcattgtacttcttatatctttttttttgttgctttttttttkgtttttgagacagagtcttgatgtatcacccaggctggagtgcactggtgtgatctcagctcaccgcaacctccacctcctgggttcaagcgattctcct

SEQ ID NO: 25105 - DNA, 201 bp, Homo sapiens
attatgtgtttacttaaacttaggtctccttgtttattttctcattactacctaccagtaaaacattgtttccttggttttcacatggaagtgggaattgwgtatgtcttgcttttctaaactgggaaccacaaaccttcctcagtgcttatatggaatgacagtctcaagcttgtcttcagcccagccatcctttaagtt

SEQ ID NO: 25106 - DNA, 201 bp, Homo sapiens
tggcagattccgtgcctggggagagactgcttcctgattcataggtggctgtctttcattgtattcacatggcagaagagatgagagagctctctggggcytcttttattaccatcacattggggattaggcttcaacatgtaaattttaagaggaacacaaacattccatccatagcccagctagtatttgtgggatcag

SEQ ID NO: 25107 - DNA, 201 bp, Homo sapiens
tagtagccacagaggaagtcaaaggcactaaggagggcagcactgaagtttcaggtgggaaagtcttcagcttcaccagtaggctaggaatgagagaaagaaaggagggagactgagtcaaggtgtgagtgaaggcaaggagcccagttggtggcatgatgaggtgggagggatgaaaacatctcttttcagctctcttca

SEQ ID NO: 25108 - DNA, 201 bp, Homo sapiens
tagccacagaggaagtcaaaggcactaaggagggcagcactgaagtttcaggtgggaaagtcttcagcttcaccagtaggctaggaatgagagaaagaaaggagggagactgagtcaaggtgtgagtgaaggcaaggagcccagttggtggcatgatgaggtgggagggatgaaaacatctcttttcagctctcttcatct

SEQ ID NO: 25109 - DNA, 201 bp, Homo sapiens
aaatataacatgaagaagaaagaagagatatgtcaggttcatatgaaatggacaatatgaactttttctttgaatgcattttagaaagaaagaaaagagargaatagagggaggaaggacataaaaaagagaagagagagtgagggaaagagtagattgcggaggagtactgggaagagatccacaagaggtgatcgaagc

SEQ ID NO: 25110 - DNA, 201 bp, Homo sapiens
agccacagaggaagtcaaaggcactaaggagggcagcactgaagtttcaggtgggaaagtcttcagcttcaccagtaggctaggaatgagagaaagaaaggagggagactgagtcaaggtgtgagtgaaggcaaggagcccagttggtggcatgatgaggtgggagggatgaaaacatctcttttcagctctcttcatctc

SEQ ID NO: 25111 - DNA, 201 bp, Homo sapiens
ggcctctgtaattaacctgtcaatgatcatgagttggtgcacgtgtgtttgtgtgtagagcggggaagagaagattagggctgttaaaaaaaaagaatatwtatatatatatatatatatatatatatatatatatatatataatatataatatgttatatatacacatatgtatacatatatacatatataacatatata

SEQ ID NO: 25112 - DNA, 201 bp, Homo sapiens
ccacagaggaagtcaaaggcactaaggagggcagcactgaagtttcaggtgggaaagtcttcagcttcaccagtaggctaggaatgagagaaagaaaggagggagactgagtcaaggtgtgagtgaaggcaaggagcccagttggtggcatgatgaggtgggagggatgaaaacatctcttttcagctctcttcatctctt

SEQ ID NO: 25113 - DNA, 201 bp, Homo sapiens
ctcacttagaatgatgaatagtgattcttgtcctactgacctcactaggacgtttttaataaggatgaaagcactttgaaactgttgaaaccataacatcmcaaaaaaaaaaaaaaaaaaaagagagagagtgacgaagtaacgcaggtcccatttatgttcttaatttctgaccaaccttaacttccatcaaaactgctt

SEQ ID NO: 25114 - DNA, 201 bp, Homo sapiens
cttgtcctactgacctcactaggacgtttttaataaggatgaaagcactttgaaactgttgaaaccataacatcccaaaaaaaaaaaaaaaaaaaagagasagagtgacgaagtaacgcaggtcccatttatgttcttaatttctgaccaaccttaacttccatcaaaactgcttccactagccccagccaggagagccgt

SEQ ID NO: 25115 - DNA, 201 bp, Homo sapiens
tcatcaggctctccaacggacatcgcttatactatgagaactcacgttcaagggaggtgtttacctctaattcccacagaactagcgtaagtaaaaaatgrggcagcaggatcctttccttgcaaagtgtgagcaagtgcctctgtagagtaaaactttaagtaaaaggactacaacggcagtgacagctcctttatctga

SEQ ID NO: 25116 - DNA, 201 bp, Homo sapiens
gcactctctcggagctaattttatctcattttatatataattttaataagcctggctctctcattttctagccccttattactgaaaatgtggctcatggrccagcagcatctgcactatctgggagcttgtgaggaatgcagaatctcaggccccacccttcaccttgaatcagaatccacatttggataagatccccgt

SEQ ID NO: 25117 - DNA, 201 bp, Homo sapiens
catgtgacaagggccacacccagaaagtctgtccttggtttctgcgatggcttccccaggctttagcagatgatttttagtggaacgcgcagtctgtagcrattctagcaactccattccgttcaggaaatgtgtattgcttcccccatcagtgtgggacatatctggggggacatgagggtctgtctgccctcccagggt

SEQ ID NO: 25118 - DNA, 201 bp, Homo sapiens
tttactgcaggcttagtttttaaccatcccagggctgcccaaggtaggaacttggtctagatactccacatttagctacttcatatacagtgttgcctcaygtaaaactcaatgtcacatttgctttggctttccagggtattttatagcatcaagacttgataagtgatcaaggtccattctgctaatccactggtacct

SEQ ID NO: 25119 - DNA, 201 bp, Homo sapiens
gacataatttagaaagtcaattggcacacctagccaggagtatatcttgagaaagtagtattctttgaagcctcctgaagcctgggttttaccaacagccyagtcctggcaagattcggggagcttgtacttcacatactcaactttctgtttctaaagggaaaggagactctaccaagcctttttggccatcaggctgct

SEQ ID NO: 25120 - DNA, 201 bp, Homo sapiens; identical to SEQ ID NO: 8322

SEQ ID NO: 25121 - DNA, 201 bp, Homo sapiens
taaaacagcttccttatccagttgtgtttagtttatttaaacgatcacatcagcattaggttctggtttggggtttttttttttatttgtttgtttaagtytcgtttctgacactttctgaaagatgcaacatggagataggccaggagggaaactagttttagggtgttctcattacattcattttatgtcattttttat

SEQ ID NO: 25122 - DNA, 201 bp, Homo sapiens
tttttattttttcttatacaaaatagagataatgttgctaacttcatggaatatttgaggaaatgatatgaaagtgtctggacgtgcagtaacctcatggsttcttctcactgtcttataaatgtaaataaagatctaatattaatttggttatctaataacaacttaatacatagaacttagtagactgcatggccacat

SEQ ID NO: 25123 - DNA, 201 bp, Homo sapiens
tcatcagggaaccataagtgtaaaggcatggaggtacaactattatgtacccacaaaaactaaaaaaataaaaggcatggagacatgaaagatcatggatyaggacaattcagaattaaaaactctgtttcccttattacccttggaataatgtgcttaacatagcaatttttttttcttctttttgagacagagtctcac

SEQ ID NO: 25124 - DNA, 201 bp, Homo sapiens
tctcctggtccattgtagcccactgttctcaccgctcattcattaaacctactagtatttattgagtgccaggcactgttttaggtactgaggaaataaaygtgaacagcaaagtagcagggcgaggaaatgtagtccttaaataaacaaataagtattgggctttccttttttcctttttttctttacccatttgttagt

SEQ ID NO: 25125 - DNA, 201 bp, Homo sapiens
gacaattcagaattaaaaactctgtttcccttattacccttggaataatgtgcttaacatagcaatttttttttcttctttttgagacagagtctcactcygtcacccaggctggagtgcagtggtgcaatcttggctcactgcaagctctgcctcccgggttcacaccattctcctgcctcagcctcctgagtagctgtt

SEQ ID NO: 25126 - DNA, 201 bp, Homo sapiens
gaatagcagaaacatcttttctcctcctctttcctttgaaacctttgagagataccaggcttcacatataaatctcacagataccagccacagggttaggkcctggagaacgaaaccctccagatcccctatctgtcacaggatcacatggtgatcactaaagtgccactgccttggccagggggacaggagagccaggaa

SEQ ID NO: 25127 - DNA, 201 bp, Homo sapiens
tgcagatgggctgtaccagctgcagcttcaagtccagtgcctcttgtgggaaaggagccactcccttgtcattcgccacatctacactgcaacgctggttyatgtcagactatcatctttgactcggcatgacaacagtgcatatttgaaggccatcaaaccaatgatattagccttgtttacggtttagctggaaaatat

SEQ ID NO: 25128 - DNA, 201 bp, Homo sapiens
tcatgcattataaagtgaccaccctagctaacatttattaagcacaatatttgccagaattcttgcaaaaagccttacaaggactattttattttatcctyataccaacggcttaaggatggtattacttaagtattcttgttttacagatgaggtcatacagctaaggtgatgaggccaatattcaaactcaagcatctg

SEQ ID NO: 25129 - DNA, 201 bp, Homo sapiens
gctagcaccacagccattcatcctgattgaactcccactgtggacacagccagctggagcctcagagcagtcacacagcatgaggaggggtttacaatggrgtcattctagaagagaatttcctccgttcttgctactgggagagagaaaatagattgttgagtgtttcctacagcgtttgtgcaaagccatcctcccctc

SEQ ID NO: 25130 - DNA, 201 bp, Homo sapiens
atgcatttcagattccccttcctacctaaatagggccatagaataataattatctttcttatgggtcttggtatctaaattagtagcaaggacttatgagstggtttactgcacatctttgcaccaaaaataataatttttaaaaagaccacattgcatctgataaagagctctatagttgtgtgaaaaacacaattagag

SEQ ID NO: 25131 - DNA, 201 bp, Homo sapiens
gatgcttgtgcttcaatattaaatagaaatgaatatatacttagtataaaaagatacgtagcaacaattggagtcagtacaccaaattttaagtggttgarctaaaatagcaggataacagtgaccttatcttttttcataatgtgctttcagcctgtatttctggatggcaattgccttcctttcttgacccaagtcctg

SEQ ID NO: 25132 - DNA, 201 bp, Homo sapiens
ctggaccccggtgttttcctcttctgtctgtccagcacatcacactgcttctttggctagttgatctagttaattataggtactgtacagatgcagaaagkgttaaaccttgaccacaaggtttatccttaaggatgatcctcactcctgggctcattgttgatacttctttgtatttgcttctttagcctcattgtgaat

SEQ ID NO: 25133 - DNA, 201 bp, Homo sapiens
atctgctgtgagtttccagaggacattgtaagcaaagatccaatcccagtggttcttccagttgtgaaatgggaatcatgttctctgtgtgccctacccartctcttgcccaagtgagagaagacaaatatagaagtgccttgagtttttcagagcacaattaaagccaaggctcagctaggcatggtggctcacgcctgt

SEQ ID NO: 25134 - DNA, 201 bp, Homo sapiens
taatatatataaacgtattttggaaagtataaaatggtacacaggtgcaaagcatcattctcatggtccttaattctttcatcctcctgtatatatatatrtatatatatatatatatatatgtatgtatgtatttccaggtgtaagtggctttgggattggaagatagtcgtatctttcaatcttaagtttccttcacgt

SEQ ID NO: 25135 - DNA, 201 bp, Homo sapiens
aggaagcacgttggccctgcccatcatgaggtctcagatgatgttcccatcttgattaaagacattaacactgccccaccaccacccccagtacatgaatsaatataaagaaactatacgctttcttttttgaacaatgaagtcttccttcagtgaagctcagcatctgctgtgagtttccagaggacattgtaagcaaag

SEQ ID NO: 25136 - DNA, 201 bp, Homo sapiens
aattctttcatcctcctgtatatatatatatatatatatatatatatatatgtatgtatgtatttccaggtgtaagtggctttgggattggaagatagtcrtatctttcaatcttaagtttccttcacgtggcctcagaaaactgcccccagtagttgcatgttaaactttgccagaatcagtttcccacctggccttaag

SEQ ID NO: 25137 - DNA, 201 bp, Homo sapiens
tgtgtgctttgggggtcacttgtcatgtgagtttagagaatgtggatattgcaacataaaccctcaccattctaaacagcttaaactaaattctgttactrgggaggagagctgaggtgataatatccatctctaagtataaactattgtgtgttcattttcccattatgggagacaaatttctcttctccgctagtgctc

SEQ ID NO: 25138 - DNA, 201 bp, Homo sapiens
cagaaggatcactctagcaaactgccagggccagccctctgccctgaggcaagtcaatgaattagccaattcagcacagatagaatcattcctttgttttyctcaattaccaaatgctgtgtgctttgggggtcacttgtcatgtgagtttagagaatgtggatattgcaacataaaccctcaccattctaaacagcttaa

SEQ ID NO: 25139 - DNA, 201 bp, Homo sapiens
gaagaaagagaaggaatgaaaacaaatgcctttcaagacaaaatatccgaatgggtttcattttgcttatctgccaacaggctcaacccaatttagatctstcctacaaggacaggatagtgccagccagggtgtctgcccttgccggctatgtggggcagtccctgtgagggaccaggctcgaattcagagcagaaggat

SEQ ID NO: 25140 - DNA, 201 bp, Homo sapiens
gaatggtaattaattcaggtacgaatttgtaaggccaagtgagaatcacgttccttgtcgtggcccaaaaggccttgtcagactcagatggagtctcctcrttttagtctacagacatatgggtggaagtgacatgatggaataattacattcccaagccgtgtacccaaaatctgtgctaggaccactcccctggccagt

SEQ ID NO: 25141 - DNA, 201 bp, Homo sapiens
ctctggatatttccatatgaaagggatttaatgcaaggaattatgtgcttacaaaattatttaaagaagtggaggagcatgaggcagggatccacagttcrgtttaaccagttcaaggtcacgcacatagctggaatccagaggtcaggaaatagtggttggtgtcactgccaccaccacatcactaccaatgatgtgtga

SEQ ID NO: 25142 - DNA, 201 bp, Homo sapiens
ataagtttggtgtttttatgaatttgagttatgtgtgctttcttcacccgttttaccatgtgtgggtaagagacttgccatttttaagaatcagaagaatyctgtgaggtgtatttccagtgtctgtgtgtagtgctgcagctgtctgagcgtattgccggaggcacctcctttggactttaaggcacgaattgctcatca

SEQ ID NO: 25143 - DNA, 201 bp, Homo sapiens
cagttttccaattatccaggcccatttacctctgctcccactcagcgagccctttggctatttctctgttcattggcacctaaagtcaaggagaaagaaaygaacatttattaagtgctatgtttgtaccagttaatcttctcaatgaagtattattatcacccctgttttacagagaaggaaactaatattcaaagaggt

SEQ ID NO: 25144 - DNA, 201 bp, Homo sapiens
tgataggcaaaaatggcatttcattgttttatttgtgtttatttgatgaccaatgaaacagaacatctcttcctattatatagctttttgcttttcttagkctctgaaatatttgttaatacgatgcattgcttctttattagatctaatttttgtctatccactttaagatttgtttctttccattttcacatgtagact

SEQ ID NO: 25145 - DNA, 201 bp, Homo sapiens
taatagtaaccagaattcaaactcagacaacatgggaaaatattttcagaaaatgcgacagccaaaggccttgcatctttattatgtaaaatgttcatacraattgataagaaaaacactgaaattccaagagcataaacaaacagctcacataaaagaaattaaaattagtaaatatatgggaagatatttgacccagct

SEQ ID NO: 25146 - DNA, 201 bp, Homo sapiens
ggaggaggggccggggcggagctaagatgcggaggagggtgacgcactagctctccagttcgcccgttcctggcctgacccccaccaaggcccataccgcwgtaggctcctcgggctgcccctcggtgagtacagttttgatgtcggctcggccgcctgccgccaacccgagatttggtattgccagttgtgggagggcgt

SEQ ID NO: 25147 - DNA, 201 bp, Homo sapiens
aaagatccaatcccagtggttcttccagttgtgaaatgggaatcatgttctctgtgtgccctacccaatctcttgcccaagtgagagaagacaaatatagmagtgccttgagtttttcagagcacaattaaagccaaggctcagctaggcatggtggctcacgcctgtaatcccagcactttgggaggccgaggagggtgg

SEQ ID NO: 25148 - DNA, 201 bp, Homo sapiens
ccccttcctacctaaatagggccatagaataataattatctttcttatgggtcttggtatctaaattagtagcaaggacttatgagctggtttactgcacwtctttgcaccaaaaataataatttttaaaaagaccacattgcatctgataaagagctctatagttgtgtgaaaaacacaattagagacatctatcagtca

SEQ ID NO: 25149 - DNA, 201 bp, Homo sapiens
accagcttgactttgtggcaggaggcatcagggtatccagatagacttactgttttaaaagaaacagcatttccaggctggctaggacagagaaaactacstagaacaatacttttcctacctggtggatcatcagaattacctgggaagcttaaaatgaaagattcctggcccctaatctctccaggaattcaaatatgg

SEQ ID NO: 25150 - DNA, 201 bp, Homo sapiens
tagtacttaagacatttgccttcatgagtttttggtaatcaatattgtacagccagtaatttaattttttcatggtatcaatctgatattaaagctctagwatctgggaagagcacagcaaagcttacctgactgactccactattatatttggaatggataattgagatataatttaaagggtagaatatattctttcta

SEQ ID NO: 25151 - DNA, 201 bp, Homo sapiens
aataatatatataaacgtattttggaaagtataaaatggtacacaggtgcaaagcatcattctcatggtccttaattctttcatcctcctgtatatatatrtatatatatatatatatatatatgtatgtatgtatttccaggtgtaagtggctttgggattggaagatagtcgtatctttcaatcttaagtttccttcac

SEQ ID NO: 25152 - DNA, 201 bp, Homo sapiens
atatatataaacgtattttggaaagtataaaatggtacacaggtgcaaagcatcattctcatggtccttaattctttcatcctcctgtatatatatatatrtatatatatatatatatatgtatgtatgtatttccaggtgtaagtggctttgggattggaagatagtcgtatctttcaatcttaagtttccttcacgtgg

SEQ ID NO: 25153 - DNA, 201 bp, Homo sapiens
ggccaaaccactgtaattgataaaaggaatttttattattttaaatatttctaagatgaattctcagcaaggtgttgtcttgtggcatgtcacttttcaartgtctgaggacattgctcactttgtaattctcacctactttgtgatgcatctttgtagagtgagtcggacctttcacgattcatgcgtttagcagtcaga

SEQ ID NO: 25154 - DNA, 201 bp, Homo sapiens
gctgagttagaaaaacctaacagcccatcctaatagactgaatgttctattgtttgatgaatgttatgtgccagtagaacttgttgataagccattcttcygaacagaaaccataactatatacacaggaaacaaaaatatttgtaatggcttttagcagtggcaactgaacacctgaggagtgagacgcatcttaataaa

SEQ ID NO: 25155 - DNA, 201 bp, Homo sapiens
ccgtctctactaaaaatacaaaaaaattagccgggcgcggtggcgggtgcctgtagtcccagctacttgggaggctgaggcaggagaatggcgtgaacccrggaggcggagcttgcagcgagccgagatagtgccactgcagtccggcctgggcaaaagagcaagactccgtctcaaaaaaaaaaagaaaaaaaaaaagaa

SEQ ID NO: 25156 - DNA, 201 bp, Homo sapiens; identical to SEQ ID NO: 8318

SEQ ID NO: 25157 - DNA, 201 bp, Homo sapiens
gcaggagaatggcgtgaacccgggaggcggagcttgcagcgagccgagatagtgccactgcagtccggcctgggcaaaagagcaagactccgtctcaaaaraaaaaagaaaaaaaaaaagaaattaatagttactctgtgggaagaagttttggggctgtgtaaatattctgctcctcgttcaacttttaaccaacaaata

SEQ ID NO: 25158 - DNA, 201 bp, Homo sapiens
tgaacccgggaggcggagcttgcagcgagccgagatagtgccactgcagtccggcctgggcaaaagagcaagactccgtctcaaaaaaaaaaagaaaaaaraaaagaaattaatagttactctgtgggaagaagttttggggctgtgtaaatattctgctcctcgttcaacttttaaccaacaaatataacatccattgat

SEQ ID NO: 25159 - DNA, 201 bp, Homo sapiens
ccaacattatataaagcttcaaatatatcaataccaagtgtactgatatgtctaacctttgcatctattgggttaatgtggaatcataggtatccctacastagctctgaaggtagctatcacaaatgagctggatgaatcatcagaaagatacagaaaggttaaaaataaaaggataatcaaagatttacccattaaaca

SEQ ID NO: 25160 - DNA, 201 bp, Homo sapiens
cccacgcatactttcatacagtccctgaaacggggcataatgataagagttactctatatacataacaagctctgtatacattgttcatttaaacatccckccctacattttatagatgaagccattgaggcagacggattccatgacttaaccaaaactcctcaactagtaagtggcagagttggaacttgaatttaggc

SEQ ID NO: 25161 - DNA, 201 bp, Homo sapiens
gctaactagtacagcatcaaaatgataaaaacagtaagaaataagagaatgacagtcacttattgttagtagtagattttaacatatagccatcagattaygatagactagagataaaatatgaatatggatataaaaagaatataattataaatgttgataaattggctatatttagatgtttatgggttatataaaata

SEQ ID NO: 25162 - DNA, 201 bp, Homo sapiens
gctcctcgttcaacttttaaccaacaaatataacatccattgatgatgcttaccagattcaataatgatgatagctgcaaaatgatgattttcttactccrctattctttctgcatttactagttgacattctattctaagcaagagtttcccctgctgttctatttatttatttatttataaatgtgtttatttatatag

SEQ ID NO: 25163 - DNA, 201 bp, Homo sapiens
ctccaggaagctccctggctgtatttaggagtgtaatttgaaaccaggatctggacagttgtccaaaatcttgatggcactatggaaagcccttttaatgmacttgaacctgctactcacatggaaaacaggctcaccactccccaaggaatcaacaaggaatgggcgtgaggagagatagctgatttcttttcattcaat

SEQ ID NO: 25164 - DNA, 201 bp, Homo sapiens
gttgacagagcttcaagtcatgactactcaaaaccacacttatgtgtccaggcagcactataccaaatccaactaaagagacagcaacctaacattgaccrtagtctccagagtcttctactctggtctgcttcacagcctgtgtcatacacatcctaaatttcaccagtgtttcatgcatctctatagggttttatcaaa

SEQ ID NO: 25165 - DNA, 201 bp, Homo sapiens
ttttagtacagacggggtttcaccgtgttagccaggatggtctcgatctcctgacctcgtgatctgcccacctcggcctcccaaagtgctgggattacagrcgtgagccaccgcgcccggccccagaaacgattcttgttcatttcttttctgagatgtctgtatctgatgttcacatataacaccaaaccacatggtttt

SEQ ID NO: 25166 - DNA, 201 bp, Homo sapiens
tctgaatgtttgtgtctcccccagattcatatgttgatgcctaatccccactgcaatagtattaaaagatagggtctttgggggtgattagaccttgaggrcttcacccttacaaatgggatccatgcccttatgaaagaggccagaggaagctcatttgccctttccaccgtgggagaacacaggagacggagccactgt

SEQ ID NO: 25167 - DNA, 201 bp, Homo sapiens
ccaggctggtcttgaactcctaaccttgtgatccacccgcctctgcctcccaaagtgctggcattataggtgtgagccaccgcacccggcccatttaatayagttttatatccgaatgccctttaatactctgagaatacactgttacaacactgtatagtcattgatattcccagtaatagtcccaaattatcaagaaca

SEQ ID NO: 25168 - DNA, 201 bp, Homo sapiens
gaacgaactagagaacaggaactatgtctttcacatttatgtcgtctatagcacctaacgtaattattgctacacagtatgttgctacagggagtcttccrtggcctagatctgggctagatacttctcctctacacaactgtgacacactgccgtatcctggttacattatcagtgcattacaactggctgtattacgtt

SEQ ID NO: 25169 - DNA, 201 bp, Homo sapiens
ccatggcctagatctgggctagatacttctcctctacacaactgtgacacactgccgtatcctggttacattatcagtgcattacaactggctgtattacrtttgtttctttttgtttctctatgaactatgagagcagagcctacatttatctggttcatcactgaccctctagtacctagcccaggttttgattatata

SEQ ID NO: 25170 - DNA, 201 bp, Homo sapiens
atggaaacttaagacaaaagcaacctcctaaggattctttgttacaacccctttctgggtggtcctcgaaccacaacctggagtggttgcatcattataaytgtattatcacaattgccgattgtagcctatcagtatacatttggtcttttatctgcaggttgacaatggtctccaggatggtctctaccatgctatctg

SEQ ID NO: 25171 - DNA, 201 bp, Homo sapiens
atatttccctttgtattggtcaaatacatgcacagatggcaccaacaccacggggatctctggagatgaaggtaggtatttcttcagtcactcagcacttracaactgtcagagagggccgggcgtggtggcttatgcccgtaatcccagcactttgggaggccgaggcgggtggatcccgaggtcaggagattgagacca

SEQ ID NO: 25172 - DNA, 201 bp, Homo sapiens
cttatgtgtcttgactaaaatctgtttctaggttatcctcaccctggaggaaccaatgagaacattgggcttgtaggccatctatgaatggactgggaccscccaatgggcccatgcctttggggttgcattttgtccaccttgaacttcaatccttaaagtctctggatgattttcagtttttctctgttgagcaattgc

SEQ ID NO: 25173 - DNA, 201 bp, Homo sapiens
acctttggctgtttgcagcagatgatggatgtctagaaaacacccctgacactgcagagttcagtcgagagttccagttgcaccagcatctctttgatccrgaacatgactatccaggcttgggcaagtgggtaagtcctatctcaattgttagtagattttgcactttggtactctgaaggtgctgatggcagggatgag

SEQ ID NO: 25174 - DNA, 201 bp, Homo sapiens
tatttaggagtgtaatttgaaaccaggatctggacagttgtccaaaatcttgatggcactatggaaagcccttttaatgaacttgaacctgctactcacakggaaaacaggctcaccactccccaaggaatcaacaaggaatgggcgtgaggagagatagctgatttcttttcattcaatttgtatgcttctcttacccat

SEQ ID NO: 25175 - DNA, 201 bp, Homo sapiens
atcctcagcagatgatgggaggaattatttgctgagtttgtccagactctgaatagcccttggtcactgaagtgtgcaaaaacatggcaacaatgcaggtkctatggtctgaaaatgtttgcaaaggaaggagaggaaagagcagttattctgacagtaaatgatacataatactaatattggaaggattattttttccct

SEQ ID NO: 25176 - DNA, 201 bp, Homo sapiens
caggacctcatcatttttttgagcacttctttattttctgacctaattagctattccatcttcacccatccttgcactttccttcctagccctggaattaracttttctccaggaagctccctggctgtatttaggagtgtaatttgaaaccaggatctggacagttgtccaaaatcttgatggcactatggaaagccctt

SEQ ID NO: 25177 - DNA, 201 bp, Homo sapiens
tggatggcaattgccttcctttcttgacccaagtcctgcccaagctccacgcccagcttccagagccctacccatctgtgttgatgccacttagtttccarcttttccaagaagccctcccatcccatcagccaaatggaactctccctttcccatgctctttttttttttctttttttgagacagagttttgctctgtca

SEQ ID NO: 25178 - DNA, 201 bp, Homo sapiens
gcttttccaagaagccctcccatcccatcagccaaatggaactctccctttcccatgctctttttttttttctttttttgagacagagttttgctctgtcrctcaggctggagtgcagtggcatgatcttggctcactgcaacctccacttctcgggttcaagtgattctcctgcctcagcctcttgagtagctgggatta

SEQ ID NO: 25179 - DNA, 201 bp, Homo sapiens
tcgcaaagtgctgcaatgacaggcatgagccaccaggcctggcccctttcccatgctcttgtgatgctgtattaacatttcttttacaggataatatacartttgccttgtatggaaataatatgtgtacagtatgtgtctgtttctgcaactaaatttctaaacccctagagggcaagaaccatttcatttatttttctc

SEQ ID NO: 25180 - DNA, 201 bp, Homo sapiens
agaactgttaaggcaatgttagcaacataataatagcaatataggggctcattctgtgcctggcattgtcctaaacactcttaacatgtatttgcacacascctcacaacaaccctaaaaggtaaatgctttaattatctccgttttgcagaggaggaaactgagggacttgcctacgatcactcagcatgtggctgagca

SEQ ID NO: 25181 - DNA, 201 bp, Homo sapiens
ccagggctcagtgctgggtccacttctcttatttccctcaattctctatctacttgatctcattcattctcttgactctcaatccatttcttggctggtgwctccggtgtttgtatttcagcccacatttctttcttgcatatccataggcttacactaattgctaaattgccaggtttcgatcctgatttctcaaaccac

SEQ ID NO: 25182 - DNA, 201 bp, Homo sapiens
ctcaaaccaccaccttccccagcctgtttatatcagtcttttctgtctaaatgagtagtgcccctgcttagccatatatgcaaactaaatacctacagtarcccttgattttctccatcacacttcatgcctcaattttaagtaatttatttcatttttatctctaaaatccatgtgcaatttcctgtctgcttctctcta

SEQ ID NO: 25183 - DNA, 201 bp, Homo sapiens
tttccgttagcattttaaataatatatttgcacacttctcacaacaaccttataagtagatgcctttattatcctatttttttcagaggaggaagctaatytttaagagactctactttctcatggttttccctttcttcttctacacagtgtctacatacttacatatacacacccacatgagactataagtcctgtgag

SEQ ID NO: 25184 - DNA, 201 bp, Homo sapiens
gtccaaagcaaataaaaacacaaagacaaacagggacctacttggcattacatgaaaaaaaagagtgtgtatgtttatggcagagaactcgggttaacccrtagccgtactattttctagctatgtgtaatcctggcaactttctaagcctagttctctcaaataaaatcggcccaaataaaatgggcttgtctggttcga

SEQ ID NO: 25185 - DNA, 201 bp, Homo sapiens
gcctttttggccatcaggctgctcttccaaaattgtctggtgacttaagtgtaggtgaatcagaaacatgtggatcaaatttcctgctaaaatacacatgkgtttggcaattaaaagaaaatgtgtagaatatggcagatttggtggccagaaagccccgtgagaaggcaagggccactgaaaattatcataactatatag

SEQ ID NO: 25186 - DNA, 201 bp, Homo sapiens
agaaaccttagacagattaaactgaacagactttgagtaaagagcaatttgcaaaacaggttcagagagactctgcactgccgtgtggttgaagacaaccratggacagcaaaaggaaagtgaggtacacgaaaagtgagggacagaaacagccgtattggttacatttcagtgtttgccttatctgaacatggtttgaac

SEQ ID NO: 25187 - DNA, 201 bp, Homo sapiens
tgcattggtatgttaacttggtaacttagtaaaacaagttatggagtagaagttgttcttattcactgctgtgttttggtgctcagagtaggttttcgtaygtatgagacacttaagtatttggtagagacatgaaacaagtaggaaaggacagaattatttagcaaatgctggtgggataattgattaactgtttgacat

SEQ ID NO: 25188 - DNA, 201 bp, Homo sapiens
gtctcacaataggggattggttaatatgttgtagtacagccattggactaaaaactacatagccatttataattacaggaatagagaccatgcagccaaawggaaagatgcttgtgcttcaatattaaatagaaatgaatatatacttagtataaaaagatacgtagcaacaattggagtcagtacaccaaattttaagtg

SEQ ID NO: 25189 - DNA, 201 bp, Homo sapiens
gaagaagagggaagaatggcgagagaggaggtagtgcagaggtgtgcggtcaggatttcctgtaatggccaccaggtggtgccatctgcccgggacgattwgatgtctggtgcaggagagcggagagctggggagagtattaataaggtggtcacaagtgaggtgattggagtgccattcatacatgtgggacattagttg

SEQ ID NO: 25190 - DNA, 201 bp, Homo sapiens
ctggcttattgtgttagtcatgggtaaccaactagaatgaagaacgaactagagaacaggaactatgtctttcacatttatgtcgtctatagcacctaacrtaattattgctacacagtatgttgctacagggagtcttccatggcctagatctgggctagatacttctcctctacacaactgtgacacactgccgtatcc

SEQ ID NO: 25191 - DNA, 201 bp, Homo sapiens
cctgtaatggccaccaggtggtgccatctgcccgggacgattagatgtctggtgcaggagagcggagagctggggagagtattaataaggtggtcacaagygaggtgattggagtgccattcatacatgtgggacattagttgggcctctgtaattaacctgtcaatgatcatgagttggtgcacgtgtgtttgtgtgtag

SEQ ID NO: 25192 - DNA, 201 bp, Homo sapiens
ataaaaggataatcaaagatttacccattaaacacaaatcaacagagtgagagtggcaagctaatagaactataaatcaacatctgatttatcaatttatrtttagcagccaattgccaacacaattaaaatgaaacatttatacccttggatatgctaactagtacagcatcaaaatgataaaaacagtaagaaataaga

SEQ ID NO: 25193 - DNA, 201 bp, Homo sapiens
aagaaccatttcatttatttttctctccccacagcagaaggcacagggcttttcctgtgtgatatgcctgaataaatattggttgaaattaattgaattgyactgcaatgaactacttctgattccctcgcaggtggagctcatgaaggacttcagcatttgggtccttttggcaacatccccaacatcgtggcagagttg

SEQ ID NO: 25194 - DNA, 201 bp, Homo sapiens
cagtcaacattctaacagtgtcatgcatcaacaccgagttagcatctatcctaaaatcctgtttatttgggggccaggaggtggcatgggagagaagaggwtcaggaagaagctggttaaggaagaaggttgaaattttccatgttgttcatgcatccaacccactttcctacccactaatgccatagagaatggtgagtg

SEQ ID NO: 25195 - DNA, 201 bp, Homo sapiens
ctgtttatttgggggccaggaggtggcatgggagagaagaggttcaggaagaagctggttaaggaagaaggttgaaattttccatgttgttcatgcatccmacccactttcctacccactaatgccatagagaatggtgagtgggcttcacttacatccggctttgagcagctgaccttggtggttaagagtagtggctct

SEQ ID NO: 25196 - DNA, 201 bp, Homo sapiens
aatattcagctatttgtacactattattacacacttgatcccatggcatcacagtttaacagagtagttagatacaaaaactttgtaattagatttgcatytgacgggttctgtgacttacaagttgtgtggccttgagcaaataattccatctcactaaaccttagttctttcatgtaaccaatgggaaaggtaatactt

SEQ ID NO: 25197 - DNA, 201 bp, Homo sapiens
agcagtgtcaagaactagacaacctggctaattgtaaatggcccccctttcagcattgactttgatgtctcattatgtctttcaaatgagaccctccttcytccccctaaccctgcacaaaattcacaatccctcctctgtccccctttttattgctgttgtctaaaatatattagacatgggaaaaatgactcattttta

SEQ ID NO: 25198 - DNA, 201 bp, Homo sapiens
gacatgggaaaaatgactcatttttagagcatcatgcctagtaataatagaatttacataaaagcagcatctgagagagatagccttctttctttggtttsaatggaaaacttgcttgatttcaaagggaagtcatagtataaactgtcagtcaaagggagataatgggaagggaactaaaacatattgcaaacctattat

SEQ ID NO: 25199 - DNA, 201 bp, Homo sapiens
catcatgcctagtaataatagaatttacataaaagcagcatctgagagagatagccttctttctttggtttgaatggaaaacttgcttgatttcaaagggmagtcatagtataaactgtcagtcaaagggagataatgggaagggaactaaaacatattgcaaacctattatgtgccgggtgttctaaatgtaatcatctc

SEQ ID NO: 25200 - DNA, 201 bp, Homo sapiens
gagctgcatctttaacagtgattcacatattacacatttcagtgtctgtcttgtttcctgcatttctctcttcgttagtgcatcaagacacatttattaaygacacatcatatgccttccgggccccgtgttaggtaatgggaatacaaagatgaatgataatagtaattgtattacataatacataatactatataatac

SEQ ID NO: 25201 - DNA, 201 bp, Homo sapiens
aaatttcctgctaaaatacacatgggtttggcaattaaaagaaaatgtgtagaatatggcagatttggtggccagaaagccccgtgagaaggcaagggccrctgaaaattatcataactatatagtaaaagaaaacttgattccaaatgggcacagaggaatccatggagaaagttggtaagacatttatgggtgtcacac

SEQ ID NO: 25202 - DNA, 201 bp, Homo sapiens
aggccacaagtaaaggcagggtgtttgcaaagattcttgtagaaccatgtccttgaatttgggtttaaaaacttattaacttataagttgcaaaagaaagkctcttttagaaaagagctgctataagatgggctgagttagaaaaacctaacagcccatcctaatagactgaatgttctattgtttgatgaatgttatgtg

SEQ ID NO: 25203 - DNA, 201 bp, Homo sapiens
taagccattcttccgaacagaaaccataactatatacacaggaaacaaaaatatttgtaatggcttttagcagtggcaactgaacacctgaggagtgagaygcatcttaataaagcccatttggaaactatagtgacttccccacaaggtgtcaccttccttgttaggactcatcacgataccattcatttattcattcag

SEQ ID NO: 25204 - DNA, 201 bp, Homo sapiens
aaatacacatgggtttggcaattaaaagaaaatgtgtagaatatggcagatttggtggccagaaagccccgtgagaaggcaagggccactgaaaattatcrtaactatatagtaaaagaaaacttgattccaaatgggcacagaggaatccatggagaaagttggtaagacatttatgggtgtcacacatcggcttctgaa

SEQ ID NO: 25205 - DNA, 201 bp, Homo sapiens
agagaccatgcagccaaatggaaagatgcttgtgcttcaatattaaatagaaatgaatatatacttagtataaaaagatacgtagcaacaattggagtcartacaccaaattttaagtggttgagctaaaatagcaggataacagtgaccttatcttttttcataatgtgctttcagcctgtatttctggatggcaattgc

SEQ ID NO: 25206 - DNA, 201 bp, Homo sapiens
agacaaccgatggacagcaaaaggaaagtgaggtacacgaaaagtgagggacagaaacagccgtattggttacatttcagtgtttgccttatctgaacatrgtttgaacagttggccacctttggccgaatctcagtgattggcacaagagtaggttacagcctgtttacacatccagctaggttacagtttgctatgtac

SEQ ID NO: 25207 - DNA, 201 bp, Homo sapiens
tgtcttaggtctttccttcctccattggggaaaaaggaaagtggcaaaggtgtgctgggatacagagctttggaggttttggcctcaggtgtttgcaagcrctgtactaattctagccaccttctcaattaaaataagaatacaagaatgaaatgcagtctcccaaatctcttttctttgccagcttatacatttatacac

SEQ ID NO: 25208 - DNA, 201 bp, Homo sapiens
aaatatttgtaatggcttttagcagtggcaactgaacacctgaggagtgagacgcatcttaataaagcccatttggaaactatagtgacttccccacaagrtgtcaccttccttgttaggactcatcacgataccattcatttattcattcagcagtaacttatcaaggatctattctatgtgccaaatactgagctatat

SEQ ID NO: 25209 - DNA, 201 bp, Homo sapiens
cttttagcagtggcaactgaacacctgaggagtgagacgcatcttaataaagcccatttggaaactatagtgacttccccacaaggtgtcaccttccttgwtaggactcatcacgataccattcatttattcattcagcagtaacttatcaaggatctattctatgtgccaaatactgagctatattctgggactggggag

SEQ ID NO: 25210 - DNA, 201 bp, Homo sapiens
gcagctaacgttcatggagtgcttattacataccaggtactgaggtaagcattttacatacagtatccgatttgtatcctcccacaagcatgttatccccrggttaaaaggggaggaattggggtccagtgagattgggaggttatgagaatcccacagtgtgtggcagaatgtggacttgaactcagggccctaacaaca

SEQ ID NO: 25211 - DNA, 201 bp, Homo sapiens
actaaagaggtataagatataggctcttccttcatggagtttaaagcacatttgcaaccataaatattcagctatttgtacactattattacacacttgawcccatggcatcacagtttaacagagtagttagatacaaaaactttgtaattagatttgcatttgacgggttctgtgacttacaagttgtgtggccttgag

SEQ ID NO: 25212 - DNA, 201 bp, Homo sapiens
taacttagcttgaaactttaattgtctctacttcctggcccaccattccttctgccctgactcagtgaatgaccatggtcacgatttaggtcatttttccstgagactagtgattaccaaaactcagaatgctggctaagacacatgctataaaggattttactttagcctcaatttcctccacataggaaaggcttagaa

SEQ ID NO: 25213 - DNA, 201 bp, Homo sapiens; identical to SEQ ID NO: 8324

SEQ ID NO: 25214 - DNA, 201 bp, Homo sapiens
agagagctgagcgaggttcgcctccccgggcgggacacgagctccggtcctctcttggcgcaaacccccgccccccgcggagggactacttttcgtctccygcggagggactacttcctcccccgcggaggcgtcggtccaggcggcgcgcacggtatggcggcggcggcggcggcggcggcgcgcgcctgagaagagggg

SEQ ID NO: 25215 - DNA, 201 bp, Homo sapiens
tcgctgctgcggcgcccaggtctttgcctccgcgtcactttctcctcatcgagtccccggaggcagagagctgagcgaggttcgcctccccgggcgggacrcgagctccggtcctctcttggcgcaaacccccgccccccgcggagggactacttttcgtctcctgcggagggactacttcctcccccgcggaggcgtcgg

SEQ ID NO: 25216 - DNA, 201 bp, Homo sapiens
gtcactgcagcgtcaatcccccccggctctagccattctcatgcctcagcctcttaagtagctggggctacaggtacacacctaccacccctggctatttwttatttcttgtagagatggggtcttactatgttactcaggctggtctcgaactcctgggctcaagcagtcctctggccttggcctcccaaagcgctggga

SEQ ID NO: 25217 - DNA, 201 bp, Homo sapiens
gcactttgggaggctgaggtgggcggatcacctgaggtcaggagtttcgagaccagcctggccaccatggcgaagccttgtctctactaaaaatacaaaarattagccaggcatggtgactggtgcttgtaatcccagctactcaggaggctgaggtaggagaatcgcttgcacccaggaggcagaggttgcagtgagcca

SEQ ID NO: 25218 - DNA, 201 bp, Homo sapiens; identical to SEQ ID NO: 3192

SEQ ID NO: 25219 - DNA, 201 bp, Homo sapiens
cattctcttttctctgcaacttcaccagcatctgctattttttgatgccctccaccccccagtgtttttttttgtttttgttttttttttttttttttggragatagggtctcactcttgcccaggctggagtgttgtggtgcaatcatggctcactcactgcagcgtcaacctcctgggcttgagtgatcctcccccctc

SEQ ID NO: 25220 - DNA, 201 bp, Homo sapiens
atagcacagacgagagccactacgcccagactagtttcctcattcttaaaatgggaataacagaatctaagagttgcctgcggtaaatgagattacacacrtacttatcacgtgggcttccaaatgtcagctctctgatgcgctagctgtgcaatcctgtgtaagtctcctaattttcaggtcccatttcctcttttgtga

SEQ ID NO: 25221 - DNA, 201 bp, Homo sapiens; identical to SEQ ID NO: 3193

SEQ ID NO: 25222 - DNA, 201 bp, Homo sapiens
actacagtcacccaacaccatgcatggactaagtttttaattttttgtagagagagggtctcactatgtttaagaccagccttgaactcctgggctcatgyggtcctcctgccttggtcttccaaagtgctgatagcacagacgagagccactacgcccagactagtttcctcattcttaaaatgggaataacagaatcta

SEQ ID NO: 25223 - DNA, 201 bp, Homo sapiens; identical to SEQ ID NO: 3194

SEQ ID NO: 25224 - DNA, 201 bp, Homo sapiens; identical to SEQ ID NO: 3160

SEQ ID NO: 25225 - DNA, 201 bp, Homo sapiens
gccctgttgccctatgaggagaccgtgggattggggttgcagaaattccataagcctcttgccacctttgtgaaccacatgacacagatctggcaggaccrgagacaactgggaattgccacagtggtttgggatgtggccatggttctctccacacatctggagatgggagctgtggagctcttgggctgccccgcagtg

SEQ ID NO: 25226 - DNA, 201 bp, Homo sapiens
tgaattaagttacagtttcactagcagtgtataaccattctcttttctctgcaacttcaccagcatctgctattttttgatgccctccaccccccagtgtktttttttgtttttgttttttttttttttttttggaagatagggtctcactcttgcccaggctggagtgttgtggtgcaatcatggctcactcactgcagc

SEQ ID NO: 25227 - DNA, 201 bp, Homo sapiens
tagtcccagctactggggaggctgaggcagaattgcttgaacctgggaggcggagggtgtagtgagccgagatcatgccattgcactccagcctgggcaasagagcaagattctgtctcaaaaaaaaaaaaaaaaaaaaagatatgactctaaggtttttgaaaagagattaacggcttgggtatggtagtcacacctata

SEQ ID NO: 25228 - DNA, 201 bp, Homo sapiens; identical to SEQ ID NO: 3161

SEQ ID NO: 25229 - DNA, 201 bp, Homo sapiens
gctgaggcaggagaatcacttgaacccaggaggtataggttgtagtgagccgagatcagcgaaactctgtctcaaaaaaaaaaaaaaaaacaaaaacaatytcacaagcacaggactgaaatgaacctcatagcataatgctaggcaataaagcatttggtaaagctgagaggcaggagaaaagccctttgacaaatctct

SEQ ID NO: 25230 - DNA, 201 bp, Homo sapiens; identical to SEQ ID NO: 3162

SEQ ID NO: 25231 - DNA, 201 bp, Homo sapiens
ataaccatatgaaaagctaccaaaatatgtcacagggaattgaaaactagaacaacaattagatacatctattagaatagctaaagtccaaaatggaaaayatttacattgactttttattaactttactcagaatggcctgttgtatcactttctttgctaatggtggtagtgttaaatcttacggatgttctctttttg

SEQ ID NO: 25232 - DNA, 201 bp, Homo sapiens
acactaatactaattttccagtatcattttgtagtccatgctcactcacgtttacctagttttttcaaacatgacattttacagtggtctgcgtgaatgakaatcctaacagggtccacaggttacatttagacgtgtcacttcatttagagcaacctcctcttacccctcctaagagacaggactgattgtcttgtccag

SEQ ID NO: 25233 - DNA, 201 bp, Homo sapiens; identical to SEQ ID NO: 3164

SEQ ID NO: 25234 - DNA, 201 bp, Homo sapiens
tgataaatgacttatattcacaatatacaaagaactcttaaaaccaagcaataagaaggcagcctaatttaaaaatgggcagaagatctaacagacacctyaccaaagaagataaacagatgacaaataaccatatgaaaagctaccaaaatatgtcacagggaattgaaaactagaacaacaattagatacatctattag

SEQ ID NO: 25235 - DNA, 201 bp, Homo sapiens
gataagggcagcgcgctcaccgcagctggaaggtgcgcgggcctggcagccgcgacggcgcctaaggccggggctccgcggtcttccgagtggcccccgcrgttgccgccgctccttggctctgcttgggccctgggtctccgtgaagccgcggcgtccagcggcgccagccccaggtgtgtgtggttctcgcgtggatct

SEQ ID NO: 25236 - DNA, 201 bp, Homo sapiens
tactcgggaggctgaggcaggagaatcacttgaacccaggaggtataggttgtagtgagccgagatcagcgaaactctgtctcaaaaaaaaaaaaaaaaamaaaaacaatctcacaagcacaggactgaaatgaacctcatagcataatgctaggcaataaagcatttggtaaagctgagaggcaggagaaaagccctttg

SEQ ID NO: 25237 - DNA, 201 bp, Homo sapiens; identical to SEQ ID NO: 3166

SEQ ID NO: 25238 - DNA, 201 bp, Homo sapiens
ttacttactgttctttttttgtcgttaaccaaattgtatttagtacaaatatttcaaaagttatttatccttcttatacaaaatacagcatactacagatrgtcccacacttgacatttttcacttaaaatatctttgagatcactccatatgatccttatttgttttaagagttatgtagtactttatggcatgattgaa

SEQ ID NO: 25239 - DNA, 201 bp, Homo sapiens; identical to SEQ ID NO: 9178

SEQ ID NO: 25240 - DNA, 201 bp, Homo sapiens
actgaggacgaagaggaggaggaggaggggcggagggagacgcccgaggacagggaggtgcgtctgcagctggcgcggaagaggtgaggcaccgggataasggcagcgcgctcaccgcagctggaaggtgcgcgggcctggcagccgcgacggcgcctaaggccggggctccgcggtcttccgagtggcccccgcggttgc

SEQ ID NO: 25241 - DNA, 201 bp, Homo sapiens
tcattaagtgtgctatcttatatgagtattgttcctagtgcccccaaaacaattagaatagtaacatcaaagatcattaatcacaaatcacagtaacagayacaataaaaatgaaaaagtttgaaatatggtaattactaaaatgtgacatagagacaagaatgagctcatgctgtttaaaaatggcaccaataaatttac

SEQ ID NO: 25242 - DNA, 201 bp, Homo sapiens; identical to SEQ ID NO: 9181

SEQ ID NO: 25243 - DNA, 201 bp, Homo sapiens; identical to SEQ ID NO: 9183

SEQ ID NO: 25244 - DNA, 201 bp, Homo sapiens
cctaggaggttgaggctgcaatgagccttggttgcgccagtgtaactctagcctgggtgacacagtgagacactgtgtcaaaaaaacaaaaaatgaggcartaaacaacaatataatgtcattatcagatctgcagatcttactcaaattttaccagtcaatggtcctgataattttcatagcaaaataaaatcctggatc

SEQ ID NO: 25245 - DNA, 201 bp, Homo sapiens; identical to SEQ ID NO: 9185

SEQ ID NO: 25246 - DNA, 201 bp, Homo sapiens
tcatcataatagaccagttaacccaggagtcctaatgttttaaaacatcattgtggtgatcttgtttattctatctcactaaggatatccagtttcctaarctcttactggctagcaatttcgtcttaattttattgctaaatgttcaaattttgcttccaaactcactttatttttgcagatgtgtacatctgctaaata

SEQ ID NO: 25247 - DNA, 201 bp, Homo sapiens; identical to SEQ ID NO: 3171

SEQ ID NO: 25248 - DNA, 201 bp, Homo sapiens; identical to SEQ ID NO: 3183

SEQ ID NO: 25249 - DNA, 201 bp, Homo sapiens
cagagcaagactctgtctcaaaaaaaaaaaaaaaaaaaaaaaaaagagagagagataaggatccacctcctgtgatccaattacctcccaccaggctccayctgcaacactggggattacaactgaacatgaaatttgggtgggaggctgggtgcagtggctcacacctgtaatcccagcactgtgggaggctgaggcagg

SEQ ID NO: 25250 - DNA, 201 bp, Homo sapiens
ctagccaacatggtgaaaccctgtctctactaaaaatacaaaaattagctgggtgtggtggcacacacctgtcatcccagctacttgggaggctgaggcaygaaaactgcttgaacccaggaggcggaggttgcagtgagccaagatcacgccactgcactccagcctgggtgactgagcgagactccgtctcaaaaaaca

SEQ ID NO: 25251 - DNA, 201 bp, Homo sapiens
tgaatggtgctgaggatgaaaaagttactgctttaaagtacagtcatgtgctgcataacagtggtggtctcataagattataatgaaggttaaaaatttcyattgcttagtgaagtaatcatagctgtcctcaagtcctagtgcagtgcattaccttttctgtttggatacacagacacagacttaccattgtgtgacaac

SEQ ID NO: 25252 - DNA, 201 bp, Homo sapiens
cctcttccagaatgaaattctagggttaaaatatatatatatctatgtgtgtgtgtatacacacacacacacacacacacacacacacacacacacacacmccccttctttttttgatcttggttctgtgattcttcataaccttttaaggcataaagtgcctttaaacagatttgttaaaaaatatgttttaccagattt

SEQ ID NO: 25253 - DNA, 201 bp, Homo sapiens
agaggttgcagtgaggcgagatcgtgccactgtattccagcccagccaacagagcaagactctgtctcaaaaaaaaaaaaaaaaaaaaaaaaaagagagasagataaggatccacctcctgtgatccaattacctcccaccaggctccacctgcaacactggggattacaactgaacatgaaatttgggtgggaggctggg

SEQ ID NO: 25254 - DNA, 201 bp, Homo sapiens
ttcctcttagcatttaatccaaagaatgtaaggtattcaaataattttctgtaactcttacttggaacattgattcattactccaaatttgaataacagtrcgttaaatttagagttaggaaatactactactaatcagtgccagaataaaatgttaatagtgaatattttaatgttttgatgataaaattactctcagtt

SEQ ID NO: 25255 - DNA, 201 bp, Homo sapiens
tggtaacatgtacctcagaggtgtggtgagaattaatttaatcagtaatgcaatgtgtttaaatagtgcctaatacacaataatgttagctacgattatgrttaaaaccatctgtttaaactgtttttatttttttgagacagggtcttgctctgttgcgtaggctgtagtgcatggtgcagtcatggctcactgtagcct

SEQ ID NO: 25256 - DNA, 201 bp, Homo sapiens
tttctgtgcctctgcctatgtaatatgtacttcagaggcgtggtaacatgtacctcagaggtgtggtgagaattaatttaatcagtaatgcaatgtgtttraatagtgcctaatacacaataatgttagctacgattatgattaaaaccatctgtttaaactgtttttatttttttgagacagggtcttgctctgttgcgt

SEQ ID NO: 25257 - DNA, 201 bp, Homo sapiens
cccaaactgctgggattagaggtgtgagccaccgtgcccagccctattatgtagacttttttagacgagcaacttttcttctgttcttttggttcatgacrtttggaaaagattattttcactccttgactataggctagggtagacttacttccttttagacttccctgtactatattgtatataattatctttgatgta

SEQ ID NO: 25258 - DNA, 201 bp, Homo sapiens
agagctccagtgtgatttcaagccccctctaaaaactgccttagtctgcatgaagtagttaactctccaaagtgctttttgtctggcaaatcccttcacarttttcacctctcgtctaaaagcttccttaaaggaagccttccttgatcccttaggctaggttaggtttccagtctgtgttctcatagcactctgcacttt

SEQ ID NO: 25259 - DNA, 201 bp, Homo sapiens
gtaggttaataattaagcatggggtttgagtttaaatccaaattcttttactttgtcatgttgcttagcttttctgtgcctctgcctatgtaatatgtacytcagaggcgtggtaacatgtacctcagaggtgtggtgagaattaatttaatcagtaatgcaatgtgtttaaatagtgcctaatacacaataatgttagct

SEQ ID NO: 25260 - DNA, 201 bp, Homo sapiens
gtttggtcagcacggagtagtagctctggcatcatgtggctgtgtagagctccagtgtgatttcaagccccctctaaaaactgccttagtctgcatgaagkagttaactctccaaagtgctttttgtctggcaaatcccttcacaattttcacctctcgtctaaaagcttccttaaaggaagccttccttgatcccttagg

SEQ ID NO: 25261 - DNA, 201 bp, Homo sapiens
cacggcactccagcctgagcatcagagcgagactcttgtttcaaaaaaaaaaaaaaccaaaaaaaaaagtatttaatactacagtgttaaaatttcctgaytgagtaatgttttgaggaatgaagtattagatatgactgaaaagttcatttaattgtcttatgatgcagtaggttaataattaagcatggggtttgagtt

SEQ ID NO: 25262 - DNA, 201 bp, Homo sapiens; identical to SEQ ID NO: 3217

SEQ ID NO: 25263 - DNA, 201 bp, Homo sapiens
agagttgcacatttgaactctatttttgactgtggagataacctagttttataagctatgaaaattgaattttaataccgtatatatttattttttgtgtktttttcttcctctcattgttttttatggtattcatagttgatccacctgaagaattaggagctagtatttctgtcacaacagatgagctagagaaattgc

SEQ ID NO: 25264 - DNA, 201 bp, Homo sapiens
tagtaaaaagaatgtggtggagtcctccagatgtctagtgtgggtggaggatatcaactggttatttcagtgatctacagccttaccttttgaatgctaartgtctggaaacttcaggcagggtcctacaaaacaaactgccatcaagattggtgtgtaccatgaaggcagttttagatagtttgactgttcatggctgca

SEQ ID NO: 25265 - DNA, 201 bp, Homo sapiens
gtggtggtaggtgcatgtgatcccagctatttgggaggctgaggcaggagaatagcttgaacccgggaggtggatgttgcagtgagccgagactgcgccayggcactccagcctgagcatcagagcgagactcttgtttcaaaaaaaaaaaaaaccaaaaaaaaaagtatttaatactacagtgttaaaatttcctgactg

SEQ ID NO: 25266 - DNA, 201 bp, Homo sapiens
aatttcaccttaattttgcatattttaaaatttttgtttaccctttgtagcatatttacattttagcatttgctaacattgatttaatgtgttaaagattmattttggatatagggttgacttgttggagatactagttcataattttaaaattcccaagagaagtgtctttgaagtggtaaacacagtgcactttaagcc

SEQ ID NO: 25267 - DNA, 201 bp, Homo sapiens
tggctaagatagtcacatactgtatacttgtgcaatccagtggttttacatgttgagcatcccaactcagaattttgaaatgcaccaaaatctgaaacttyctgtatataaacatgatgttctagtgtgcatttcagattttggatttttggatttggcatgctcaacctgtaagtgcaaatgcaaattttccaaaatctg

SEQ ID NO: 25268 - DNA, 201 bp, Homo sapiens
ggctgaggcaggagaatggcgtgaacttgggaggcggagcttgcagtgagcagagactctgtctcaaaaaaaaaaaaaaaaaaaaaaaaaaaaaagaaccrgggtcttgctctgttgcccaggctggagtgcatggtgtgatcataatgtcatcgtaatgtcaagctcctgggctaaaacaagtctcctgagtagctgcga

SEQ ID NO: 25269 - DNA, 201 bp, Homo sapiens
aatgttaatagtgaatattttaatgttttgatgataaaattactctcagtttaagaaatatgatataattctatttagtcattctctgtgaaccaattatytttgtattttgttaaatactgtttcctttgttcatatgtttggccagaaacctcaagccgaagaggttaaaatctcagacaaaaataattcctgagttgg

SEQ ID NO: 25270 - DNA, 201 bp, Homo sapiens; identical to SEQ ID NO: 3219

SEQ ID NO: 25271 - DNA, 201 bp, Homo sapiens
tgaggaactgaattgataatttaaatttaaaacttacaattgattaatgtattaaaacattttttttccttttgttttcgttttctttttttttttctttyttttttttttttttgagatggagtctcactctgttgcccaggctggagtgtgatggcgtgatctcggctcactgcagcctctgcctcctgggttcaagtg

SEQ ID NO: 25272 - DNA, 201 bp, Homo sapiens
ttccatattggctgcacctttttacattcccgctggcagtgtataaaagccacagtttgttcacatccttgccaacacttgttgtttttggagttttgtgkgtgtgtgtgtgtgtgtgtgtgtgtgtgtgtgtgtgtgtgtgtgttttcttttttttcttttttttttttgagcctgtctcactctgttgcccaggctgga

SEQ ID NO: 25273 - DNA, 201 bp, Homo sapiens; identical to SEQ ID NO: 3220

SEQ ID NO: 25274 - DNA, 201 bp, Homo sapiens; identical to SEQ ID NO: 3222

SEQ ID NO: 25275 - DNA, 201 bp, Homo sapiens
ctcttgttgcccaggctggagtacagtggtgcgatctcagctcactgaaatctctgccttccaggttcaagcgattctcctgcctcagcctcccgagtagytgggattacaggcgcccaccaccatgcatggctaattttttgtatttttagtagagacagggtttcaccatgttgatcaggctggtcttgaactcctgac

SEQ ID NO: 25276 - DNA, 201 bp, Homo sapiens
caaattgcttatctgtctggaaatttgatttagaacaggtgacttaaacatattctttcatggacagttaggtttagaattcctttttttttttttttttktgacggagttccgctcttgttgcccaggctggagtacagtggtgcgatctcagctcactgaaatctctgccttccaggttcaagcgattctcctgcctca

SEQ ID NO: 25277 - DNA, 201 bp, Homo sapiens
gcctcaaacttatgagctcaagtcatcctcctgcctcagccttctgagtagctgggactataggtgtgtgccacgtcatctagttagttcttaattttttrtagagacagtgtcttgctatgtttcacaagctggtcttgaacttctggcctcaagcaatcctcctccattggcctcccaaagcactgggctttataagca

SEQ ID NO: 25278 - DNA, 201 bp, Homo sapiens
tttagaggaaaatataaagatgtggccttgacactgaaagaacttacagtttaatggaagagataaacataataaacatggaacaattcgattatcttctrtaagtgccatgctttgtgaatggtacatttatattgaattgtcaattacgtgatacatagattcttcacacttggtgtgcagcatttgaagtttttgtat

SEQ ID NO: 25279 - DNA, 201 bp, Homo sapiens
aagagaattgaaaaatgccttgacaggttgcagtttatcttgtgaaatagtagctattgaccttaggtagtggcgatggctgcacagcattgtgcatgtaytaaatgccactgaattgttgactttaaaatggttcatatgggccgggcgcggtggcttacgcctgtaatcccagcactttgggaggccgaggcgggcaga

SEQ ID NO: 25280 - DNA, 201 bp, Homo sapiens
ggaggctgaggcaggagaatcgcttgaagccgggaggtggaggttgcagtgagcagagattgcgccactgcacttcccaccaggtgacagtgtgagactctgtctcaaaaaaaaaaaagtacaaatactggaaataaaaaacttttattttccagaagtttggttgcctacttaaaatccaagagaattgaaaaatgcctt

SEQ ID NO: 25281 - DNA, 201 bp, Homo sapiens
gggaggctgaggcaggagaatcgcttgaagccgggaggtggaggttgcagtgagcagagattgcgccactgcacttcccaccaggtgacagtgtgagactctgtctcaaaaaaaaaaaagtacaaatactggaaataaaaaacttttattttccagaagtttggttgcctacttaaaatccaagagaattgaaaaatgcct

SEQ ID NO: 25282 - DNA, 201 bp, Homo sapiens
atagtttttgatattattaagctgttgtcattaaaacttgctctccaactaggtcttgtccaataagcatgtggctcctgatcatcttttgcaaatctgcsagcgcatcggtcctatgttggataaagaaattccacccagtatttcaagagtcacttctttacttggtgcaggaaggcagtctttgctacgtacagcaaa

SEQ ID NO: 25283 - DNA, 201 bp, Homo sapiens
atgcttttttaagtgatatattcctgtgtaaaggaactaaatatatatgctgtgtgaaaactaatcattagatggacatggcaaaaatagtcattctgaakggtgaaagtttcttttatttttcattcagacagtgcatgctgcccctttctaatctaagaaactttgttctcttccccttggtagaatttgcggaggatg

SEQ ID NO: 25284 - DNA, 201 bp, Homo sapiens
taaatgatgtcttataggatctttgatatcttaacatctctctcaaagatgtatgcttcacttacaggccagttagcatatatatatatttttttttttttgagacaggcgagttagcgtaatatgtatatatatttttttcttgttgcccaggctagagtgcaatggcacgatcccagctcactgcaacctccacctcct

SEQ ID NO: 25285 - DNA, 201 bp, Homo sapiens
atgatttagatactaaatgatgtcttataggatctttgatatcttaacatctctctcaaagatgtatgcttcacttacaggccagttagcatatatatatatttttttttttttgagacaggcgagttagcgtaatatgtatatatatttttttcttgttgcccaggctagagtgcaatggcacgatcccagctcactgca

SEQ ID NO: 25286 - DNA, 201 bp, Homo sapiens
gtgcacctaggtggtttccttttttttttttttttgtgggagccttgctctgtcacccaggctggagtgcagtggcgccatcttggctcactgcaagctcygcctcctgggttcacgccattctcctgcctcagcctccccagcagctgggactacaggcacctgccaccacgcctggctaatttttttgtatttttagta

SEQ ID NO: 25287 - DNA, 201 bp, Homo sapiens
aacctgggaggtggaggttgcagtgatccagcattggggccactacactccagcctggaccacggagcaagactgtctcaaaaaaaaaaaaaaaaaaaaamaacacacaaagctttttaacaaaggtttgttgacagtgacttcagtagctatggaattctgattcatagtcctttttttttttttttcggcacagtaaag

SEQ ID NO: 25288 - DNA, 201 bp, Homo sapiens
atttttccttttcaatacttagccaattttgtgatttcgtttgtttttagctcaagaaagaattccacattttagcaagtggcaaagatgttggtttgttaacagttattcagattgctggtggggtgtgtgaagtggtccaggctttctaggggatattttgttaatagtagttgaaactgaaaaatatttggaactttt

SEQ ID NO: 25289 - DNA, 201 bp, Homo sapiens
gaggctgaggcaggagaatggcgtgaacttgggaggcggagcttgcagtgagcagagactctgtctcaaaaaaaaaaaaaaaaaaaaaaaaaaaaaagaamcagggtcttgctctgttgcccaggctggagtgcatggtgtgatcataatgtcatcgtaatgtcaagctcctgggctaaaacaagtctcctgagtagctgc

SEQ ID NO: 25290 - DNA, 201 bp, Homo sapiens
tttagacttccctgtactatattgtatataattatctttgatgtaacattggcataatttacacaattatactaggatctaaaatgatcagaaggttgaaragtaatttcagatttcacactgaaaatgttctggtatacccaattattttacccttgatatcataacaacgtagacttaaatgggaagacttgacactgt

SEQ ID NO: 25291 - DNA, 201 bp, Homo sapiens
tttctcatgtaaggcaacatagtcataggttatgaggattatgatgtggacatctttggtggggccattattctgcctatcatattatcagatgtgcttcrtattctgcgaaaacaaatattataaacctgggaggtgagaggtcatggaatagcctttcactagataatgtgctcttgttagagtatgcttttcatagct

SEQ ID NO: 25292 - DNA, 201 bp, Homo sapiens
tccaacagctgttcctataggagtatttcaggagttttttttttttttttttgactttaagcagttgacccagcactgttgaacatgcatactgaaaatayaaatttaatcttggttgcacttaaaaagactagtatctaaagtatgtgtggtaaaaccacagtatattcattattattgcatgtgttgaatttttgttag

SEQ ID NO: 25293 - DNA, 201 bp, Homo sapiens
tataacctagatgtgtagtagggtgtactgtaaggtttgtgtaagcacactctgtgatgtttgcttaagacgaaatagcctaacgatgcatttctcagaaygtatccttgctgttgagcaacatatgactatactaataggtgtgtaccattccattcactgcaatacccccttcaaattaatacgaattctgaacttgtt

SEQ ID NO: 25294 - DNA, 201 bp, Homo sapiens
tgagcagagactctgtctcaaaaaaaaaaaaaaaaaaaaaaaaaaaaaagaaccagggtcttgctctgttgcccaggctggagtgcatggtgtgatcatartgtcatcgtaatgtcaagctcctgggctaaaacaagtctcctgagtagctgcgatcatagatgtgcacaactatgcccagctaatttttaaattttttgt

SEQ ID NO: 25295 - DNA, 201 bp, Homo sapiens
gcattttagtcatagtcttggatggaatcatacttgaattttattcaagaggcaagaatttgcaactgtggaacagtttttaatacacttaaaaggagacmaaaactagatccaacagctgttcctataggagtatttcaggagttttttttttttttttttgactttaagcagttgacccagcactgttgaacatgcata

SEQ ID NO: 25296 - DNA, 201 bp, Homo sapiens
agaactagagctgctcaaagaaaaactggtaagagactcagtagtacttttatggaatgtatatcaaaagaatccaaaagttataaattgaatagattctygatttaatgcatctacgtaagattaagttaatgtcctttaggttccttagatttaggaaggaaatgaattttggcattaaaaagtgaagaaaaggctggg

SEQ ID NO: 25297 - DNA, 201 bp, Homo sapiens
atattgctagactgtaactcatcaatcacactaccatgatcattaagtgtccccaagttacaaatgaaatacctatagaatgatagatctctatagtcaakgacaatacagaatctatagaggaaagaaattagctaccctcaggatggaagggtcttttagagttccactgtgaaaattaaatgataatgggattagttt

SEQ ID NO: 25298 - DNA, 201 bp, Homo sapiens
cctgcagctaattaaatttttaattggaagtctgtttataaaatacataaactatattttgtaaatctacactaggattaatctgttatttttagaaatakaattaaaaactatttggaatgctgattatgtaccttttaatactccaaatttcatcagctttttttgggaatggtttttaaaaaatatattctaagcatt

SEQ ID NO: 25299 - DNA, 201 bp, Homo sapiens
ccctgtctcgaaacgcaacaacaaaaaagaagtatttcagatgtacacaaatgagaataatgtaatgcaccgctgtatatcatcaaatttgaataataatwatttttttttttgagacagtctgttttgaggagcagcctcggctcactgcaacctctgcctcctgggttcaagtgatcctcctgcctcagcctcctcagt

SEQ ID NO: 25300 - DNA, 201 bp, Homo sapiens
aggtgggcaaacagtagaacaagttcaaaggatgaaccacaatttggtgtctagtattttggtatcacagccagttttcttttcttccctctcacactctytctctcgtgtagctgttatgtaagaaatgaccttactgtgctgttaggaatgggtaaaaggatggtgagacatgcaaactatgtcttctgaaatgctgga

SEQ ID NO: 25301 - DNA, 201 bp, Homo sapiens
ccactgtgctccagcctaggtgagcgagaccctgtctcgaaacgcaacaacaaaaaagaagtatttcagatgtacacaaatgagaataatgtaatgcaccsctgtatatcatcaaatttgaataataattatttttttttttgagacagtctgttttgaggagcagcctcggctcactgcaacctctgcctcctgggttca

SEQ ID NO: 25302 - DNA, 201 bp, Homo sapiens
tttggggaatgttacaaacaatgggatcaaacagatagagtacagtcaaagtttagcaactttcgagccttgcagaagagtttggattactgaactgggtyccttattgagtgacagagtcacattatgtttcaggaagattaagtttggcagtgatgtgcagagggaggggaagagcctggaaaaacagggagtcaaggt

SEQ ID NO: 25303 - DNA, 201 bp, Homo sapiens
gaaaagaaatagacctataacaaatggttctacattatctggtgagaagtgaaatactatgttatttctttgctgagcacccaaatgtgtaacactggccrttactagagatttagaggaaaatataaagatgtggccttgacactgaaagaacttacagtttaatggaagagataaacataataaacatggaacaattcg

SEQ ID NO: 25304 - DNA, 201 bp, Homo sapiens
tgtgtgccaccacacccagctaatttttgtatttttaggagagatggggtttcaccatgttggccaggatggtctcgatctcttgacctcatgatccgccygcctcggcctcccaaagtggtgggattacaggcatgaggctccgcgcttggccacaaagtgtaatcttttgtgtctggcttctttgacttagtgtggtgc

SEQ ID NO: 25305 - DNA, 201 bp, Homo sapiens
ccagtctacctcaagtaggacagcttatcttggaacccacaagacaagtgctggtatctcttcaggtgttacttctggtgactcttcagattcagcagaaycatcagaaaggaggaaaagaaatagacctataacaaatggttctacattatctggtgagaagtgaaatactatgttatttctttgctgagcacccaaatg

SEQ ID NO: 25306 - DNA, 201 bp, Homo sapiens
ttttttctttttcctctttcttggcctttaacttttgttgaatattagcaagtattgttacagagtgtcctcagttttgtctgatattttttcatgattarattgttatagttttttaaatgaaataaaacataagtgatattgtgtccttcatgaatcatattaggaggcacatgatatttatttgtccccttactatgg

SEQ ID NO: 25307 - DNA, 201 bp, Homo sapiens
aggaaatactactactaatcagtgccagaataaaatgttaatagtgaatattttaatgttttgatgataaaattactctcagtttaagaaatatgatatamttctatttagtcattctctgtgaaccaattatctttgtattttgttaaatactgtttcctttgttcatatgtttggccagaaacctcaagccgaagaggt

SEQ ID NO: 25308 - DNA, 201 bp, Homo sapiens
ttgcatagaattggtcctaacttttttccttttgtgtttcctagattgaaggacaaggacatggagctgtgtttgactgtaagttttcacaggatggacarcattttgcctgtacagattctcatgggcaccttctgatatttggttttggatgcagcaaaccatatgaaaaggtcatttttaatactttgttgtagcatg

SEQ ID NO: 25309 - DNA, 201 bp, Homo sapiens
tcctgcggcagttaagttttcatgggtagaaccctccttcaatatttcagtatcgattgtattattccatagagacagttaacattctgatatttgagaarttaacagttaagtgttctgtgctatgaaagaaaagttaggctgagtgcagtggctcacgcttgtaatcttagcactttgggaggctgaggcaggcaggcg

SEQ ID NO: 25310 - DNA, 201 bp, Homo sapiens
gttagactatgggtttcttcaccctgctcttggccagacttacccacaagtgaaaaagaggggccaggaagctttctccaggtggaaaagaggggttattrctgcaattaggtgttaaatgtcatggccagaataagggcaatccttgccttaggtacccagattgcatctgcccattgcataagtctcaaggccacaagg

SEQ ID NO: 25311 - DNA, 201 bp, Homo sapiens
tcatcaagtgccaatatcacagagtccatatccagattttctttttgttccctgggtgtcttttttttttttttttttttgagacggagtctcgctctgtygcccaggctggagtgcagcggtgcgatctcggctcactgcaagctccgcctcccggattcacgccattctccagcctcagcctcccgagtagctgggact

SEQ ID NO: 25312 - DNA, 201 bp, Homo sapiens
aaataaggactgcttattatatcatcaagtgccaatatcacagagtccatatccagattttctttttgttccctgggtgtcttttttttttttttttttttgagacggagtctcgctctgtcgcccaggctggagtgcagcggtgcgatctcggctcactgcaagctccgcctcccggattcacgccattctccagcctca

SEQ ID NO: 25313 - DNA, 201 bp, Homo sapiens
tagtgtgagatggtatctcattgtggttttgatttgcatttctctaatgattagtatgttgaacattttttctttacacctatgtatagagatagtgagamattccttgagaagttgcttactgcatcataatgtacgaatatgtatttttcatttctgagatgtatacttttaaggtgacatccttttcagattattgtt

SEQ ID NO: 25314 - DNA, 201 bp, Homo sapiens
cctctcatcgagtcgggtaagacgcgaggccgtgccacccccgccctggcgctcccggctgcttcggcttccccggctccccgggctcccccggctcccckggccccgtccccctcccctccccgccggggcttgacctgactccttgtcttcccgcagagctgtacttccttatcgcccggtacctatcggcgggcccgt

SEQ ID NO: 25315 - DNA, 201 bp, Homo sapiens
agtgctggaattacaggtgtaagcccccgcgtctggccttgactttttaataatagccattctgactagtgtgagatggtatctcattgtggttttgattkgcatttctctaatgattagtatgttgaacattttttctttacacctatgtatagagatagtgagaaattccttgagaagttgcttactgcatcataatgt

SEQ ID NO: 25316 - DNA, 201 bp, Homo sapiens
ttgacttctaaggcaaggcccttttatgcagtgtatccactgctctatgtatcatgcagctttttcagtctggctgagggaacaggcgtgggtgctggccyttttgtgcatcaggcctttgttatcacagaactttcatttggttcttttcctggcttcctgtcatttcttcacacgtgtgggttgatcagtattcaccag

SEQ ID NO: 25317 - DNA, 201 bp, Homo sapiens
cagagagaggccagatcgtgtggacttggccttttcctctgggtctgatgggagcctctggaggattttgagagaggaaggacaagtccgtctttagtttktttttttttttttcttgagatggagtttcgctctcgttgcccaggctggagtacaatggctcgatctcggctcactgcaacctccacctcctgggttcag

SEQ ID NO: 25318 - DNA, 201 bp, Homo sapiens
tttttaatgataaggtggttttgtgttgtaatcacagcactttgggaggctgaagtgggaggactgcttgaggccaggcgtttgagaccagtgtaggcaayacagtaagaccctgtctctacaattaaaaaaataaaaataaaaaatgtggttttgtgttagactatgggtttcttcaccctgctcttggccagacttacc

SEQ ID NO: 25319 - DNA, 201 bp, Homo sapiens
tgtagaggtggggtttttgtatgtgttcccaggctggtctcgaacttctggactcaagtgatcctcccaccctggcttcccagagtgttgagattacagaygtgagccactgttccttgccctaattttttaatgataaggtggttttgtgttgtaatcacagcactttgggaggctgaagtgggaggactgcttgaggcc

SEQ ID NO: 25320 - DNA, 201 bp, Homo sapiens
aacaacccagacatccaaccacaagagaatggattaatacattgtggtctttgtacccagtggcatattaaactacttaaaaatgaatgaatcacagccaygctcaacaggaatgaacgtttgaaacaattctgtattgagtgagaaaattttgagaaaagatgcttccaaccccttccctgatcacactccgtcctttgc

SEQ ID NO: 25321 - DNA, 201 bp, Homo sapiens
gaatgtcttaatatgtgacttggcagagtatgaggcataaacatttttttttaaagaaatgaatgtgttgtgaatgtacacactgcattttgaagagtagytatgaagaaaaaatatgtcagatctctattttgttttgataacatattgaaataatattttggatatatttaaaatatgctatgaagtttactgttttac

SEQ ID NO: 25322 - DNA, 201 bp, Homo sapiens
ttactaagttttatatacccttaaaaattaatctgttttattggtctacctttttggctgtgggactcttaattatagtatatacaaacatgtaaattccrgaagagatataagtgacctataaatatattttgcttacggcttggtacttactgattatgcagactttcttggtaggggccgggggacggtgggcagggc

SEQ ID NO: 25323 - DNA, 201 bp, Homo sapiens
tccggaagagatataagtgacctataaatatattttgcttacggcttggtacttactgattatgcagactttcttggtaggggccgggggacggtgggcakggcaggcattttctccctaggtcacccaggctggagtgcaatggtgtgatctcagctcactgcaacctctgcctccaaagttcaagcgattctcttgcct

SEQ ID NO: 25324 - DNA, 201 bp, Homo sapiens
aagagatataagtgacctataaatatattttgcttacggcttggtacttactgattatgcagactttcttggtaggggccgggggacggtgggcagggcasgcattttctccctaggtcacccaggctggagtgcaatggtgtgatctcagctcactgcaacctctgcctccaaagttcaagcgattctcttgcctcagcc

SEQ ID NO: 25325 - DNA, 201 bp, Homo sapiens
tgatttgagttattgaaatggaaacaggaaatactttttagaatgatatctaaaatgtttcagtattttctcatgtttgtatgtcataataacttaatagyttgaagataattttgtaaatttatctttgtgtttttatatgtttaaccagaagagtttcagtgaatgctggagtgttattagatagtacttatatattgt

SEQ ID NO: 25326 - DNA, 201 bp, Homo sapiens
atgacaattaggacgttttacactcagataatactattatcaaatctatagtgtgtaaccaaaaatttccagttattctagtaatgttcgtttatagcttytaaaattctcccaatttttatttgggaccacatacgaaatacgaaagttagttgtcatagttccttaatttcctgtaatctggagcaggttgtcagtttt

SEQ ID NO: 25327 - DNA, 201 bp, Homo sapiens
gttagccaggatggtctccatctcttgacctcatgatccatctgccttggcctcccaaagtgttgggattacaggcgtgagccactgtgcctggcctctakttttctttaattgtcaccagcccctctcagccttttttctttttcctctttcttggcctttaacttttgttgaatattagcaagtattgttacagagtgt

SEQ ID NO: 25328 - DNA, 201 bp, Homo sapiens
aatagcctttcactagataatgtgctcttgttagagtatgcttttcatagctaactttgtaatatttctgaaattggttaagttatatgaaaataacttaygtttcatgcatagtttaaaaatttcatttctggaaaaatgtgttgagagcaacatatatgacattattgtatttttatagaagacagtagatcagttaca

SEQ ID NO: 25329 - DNA, 201 bp, Homo sapiens
tgaaagctgtattttagtagtcttaggtttgtagttagtcttcacttaaaattataaaacatgttgaatgacagggctaagcaacacaagtgcaaattttrcttgttaaagcaaataggcttctagcattaaaacttcattttttcaaattcacagaccatgtagatgatcatttttgtatttgtccttttccccccttta

SEQ ID NO: 25330 - DNA, 201 bp, Homo sapiens
tgttagatgtgcctttctttgaaatgaaagctgtattttagtagtcttaggtttgtagttagtcttcacttaaaattataaaacatgttgaatgacagggytaagcaacacaagtgcaaattttgcttgttaaagcaaataggcttctagcattaaaacttcattttttcaaattcacagaccatgtagatgatcattttt

SEQ ID NO: 25331 - DNA, 201 bp, Homo sapiens
acttttccctcataaaatctgaaaacttgaacaagctagggttaggtatgtagaattgtttagaaagcagaacttcttttcttaaaaatatttttagagcrctggtgcttaattggcattatattgccacccttaataatacagatggggaggccaggcacagtgactcaatgcctgtaatcccagtcctttgggaggccg

SEQ ID NO: 25332 - DNA, 201 bp, Homo sapiens
tttgatagtttaaatttatttcccacacataatatcttgatgaaattattctttttcagtttttgtacagtgaacttgtgtggtaacctttctcttttttyggataggtcaaagacttttccctcataaaatctgaaaacttgaacaagctagggttaggtatgtagaattgtttagaaagcagaacttcttttcttaaaa

SEQ ID NO: 25333 - DNA, 201 bp, Homo sapiens
tgtatgataatctaaatttgtgattttctttgaataggctaaactgtgtatgtttgatagtttaaatttatttcccacacataatatcttgatgaaattaytctttttcagtttttgtacagtgaacttgtgtggtaacctttctcttttttcggataggtcaaagacttttccctcataaaatctgaaaacttgaacaag

SEQ ID NO: 25334 - DNA, 201 bp, Homo sapiens
ttactagagatttagaggaaaatataaagatgtggccttgacactgaaagaacttacagtttaatggaagagataaacataataaacatggaacaattcgrttatcttctataagtgccatgctttgtgaatggtacatttatattgaattgtcaattacgtgatacatagattcttcacacttggtgtgcagcatttgaa

SEQ ID NO: 25335 - DNA, 201 bp, Homo sapiens
tcttccagaatgaaattctagggttaaaatatatatatatctatgtgtgtgtgtatacacacacacacacacacacacacacacacacacacacacacaccccttctttttttgatcttggttctgtgattcttcataaccttttaaggcataaagtgcctttaaacagatttgttaaaaaatatgttttaccagattttc

SEQ ID NO: 25336 - DNA, 201 bp, Homo sapiens
ttcctcttccagaatgaaattctagggttaaaatatatatatatctatgtgtgtgtgtatacacacacacacacacacacacacacacacacacacacacacaccccttctttttttgatcttggttctgtgattcttcataaccttttaaggcataaagtgcctttaaacagatttgttaaaaaatatgttttaccagat

SEQ ID NO: 25337 - DNA, 201 bp, Homo sapiens
cagggtttttctttttcttttttttttttttctagcctactcaagtgaagtggtgacactgggtttttgagaataagctttatattgaaagttgactcctraggagacaggagtgaatttcaaatctgactccggtgctggctttaaagcagtatttttattttttatttttttttaaagaaaaggttcagggcatggatt

SEQ ID NO: 25338 - DNA, 201 bp, Homo sapiens
agtactgggattataggcatgagccactgtgcctggcagaataaaatttatatatatgaaatactgaaaataactgtcaaagatcatttcagattaagtayaacaaatttcacattcatttgtgagcatatatatatgtatatgagaagcatgtaagaaattcgtatatctcacatactttttaaaaaagttttctggtat

SEQ ID NO: 25339 - DNA, 201 bp, Homo sapiens
gagcctgtttatctaaccaagcccatgaaataagaatgtgattttaataatgcatagtaagatagaaaactgtcagtgttctgaagtactggtcagggttrggccatcttttcttttatttgaagcttttgggaaggcagtccacatccagaggttatttgatagatacagatttaaataacttaaaacaacaattgaaaa

SEQ ID NO: 25340 - DNA, 201 bp, Homo sapiens
ccaggctagtgtttgaactcctggcttcaatttatccacctgccttggcctcctaaagtgctgggattacaggcatgttcggccatttcttagctgttttraaggaaaataggattatctcaatattcattcacccatatttctcacatgccttaaacttccattctcctttctcataattcctggcctagtggccaacca

SEQ ID NO: 25341 - DNA, 201 bp, Homo sapiens
tcagttctgtagttatatttccttcctcctctgtctttaccactcgtatacatgaaaattacaattaaataacatggatttgacaggcccaatgcagggtkagatatttaaagatatctaggccaggtgcggtggctcacacttgtaatcccagcacttggggaggctgaggcgggtggatcacaaggtcaagagatcgag

SEQ ID NO: 25342 - DNA, 201 bp, Homo sapiens
atttattgcatacctaccataagtatgtcaggactcatcatagccctgcagatgtgtcagagagcaaaacagacacagatctctgtctgccttcatagaakgtcaagagatagacaataaacaaaatagacggggacatgttacagtaggttagaagatcaacagtgctatggaggaaaagaacacaggaagagtaaaaga

SEQ ID NO: 25343 - DNA, 201 bp, Homo sapiens
tggtttccactggtgctgatgggacagtttgcttttggcaatgggatttagaatccttaaaatttaggtaagtggctttaattatgtaacaggttttgttktttaatgtagttacagtttaatctaatgaaatgaagttttattgttatgagaaattgtgtattgttgcttttttttaacctttgaacttaatttttatta

SEQ ID NO: 25344 - DNA, 201 bp, Homo sapiens
ttaatggaagagataaacataataaacatggaacaattcgattatcttctataagtgccatgctttgtgaatggtacatttatattgaattgtcaattacrtgatacatagattcttcacacttggtgtgcagcatttgaagtttttgtatctttttaatttaaaaattaagaagtactaagaatcaatgaagttcaaagc

SEQ ID NO: 25345 - DNA, 201 bp, Homo sapiens
tccagattctctattcatttaccccattgccgcatgactttgagaaatgaacactttgttcatatagatctttgtttctatcatataccatattccccctygcttttgaacttgtgctgatattattcctttgcttagtgtgtgtttgttttccttgcattttcctactatttaatccttcctagatgtctctagctagtt

SEQ ID NO: 25346 - DNA, 201 bp, Homo sapiens
cctgtgggaaggaagggagcatctgtcagtcctttggagggatgggtgggggcagatatagtgggacttatgggggaggcctttgcttcacagatgcggartcctttgcaggactggggccctggtctccccgcgagagacttgaagtccaccagtgtcgttcacttcagtcttgaggagatggaactgccatgactgcat

SEQ ID NO: 25347 - DNA, 201 bp, Homo sapiens
aaacatattctttcatggacagttaggtttagaattcctttttttttttttttttgtgacggagttccgctcttgttgcccaggctggagtacagtggtgygatctcagctcactgaaatctctgccttccaggttcaagcgattctcctgcctcagcctcccgagtagctgggattacaggcgcccaccaccatgcatgg

SEQ ID NO: 25348 - DNA, 201 bp, Homo sapiens
aagtattttttaaaaacctgattttagttttttttttcctgcagaatcttaacttttccattattctggatgacaaataaacatttattaaaatgtgttaraattagtatttactaggttcctaaattgtcagtataggtactttgatcacacatcaaaatggaatttctgcaacttaaagcattttgttacaaattgtag

SEQ ID NO: 25349 - DNA, 201 bp, Homo sapiens
tgagaaatttgtggttgcatgtctgttttaaaaaaaaggctttttgttttttagcataagccagaatattctaacctactaagtctgtgtcctttgctccytttgtagtatactttcatctaaattactgatccccaatatgttgatacacaggtgagaaagggaagaattcctaataaactgctattacttttaggtgca

SEQ ID NO: 25350 - DNA, 201 bp, Homo sapiens
agtccatgaatagatgaagatataagtgggacagaaatagctacaaattgcttatctgtctggaaatttgatttagaacaggtgacttaaacatattcttycatggacagttaggtttagaattcctttttttttttttttttgtgacggagttccgctcttgttgcccaggctggagtacagtggtgcgatctcagctca

SEQ ID NO: 25351 - DNA, 201 bp, Homo sapiens
attcatctgtagatgggtgtttaggttgattcatgtcttgactattgtgaatggcactgcagtaaacatgggagtgcaattatctcttcaatatactgatytcatttccctttggatatacacccaaaagcatagggaacaaaagcaaaaacagacaaatgggattacatcaaactacaaagcttctgcacagcaaaggaa

SEQ ID NO: 25352 - DNA, 201 bp, Homo sapiens
gcctgtaatcccagcactttgggaggccgaggcgggcagatcacgaggtcagcagatggagaccatcctggctaacatggtgaaaccccatctctactaawaatataaaaacaacattagccgagcatggtggccagcgcctgtagtcccagctactcgggagaccgaggcaggagaatggcgtgaacctgggagacggag

SEQ ID NO: 25353 - DNA, 201 bp, Homo sapiens
ggtgcgtgcctgtagtcccagctatttcggaggctgaggcggaaggatcacttgactctgggagtttgaggctgcattgaactatcctcctgccactgcaytccagcctgggagatggagcaaggcctagtttcttttttttaaaaaaaaaatttatataaattttttggcttttgttggtagaattgcttaaaaccctac

SEQ ID NO: 25354 - DNA, 201 bp, Homo sapiens
agtttggttgcctacttaaaatccaagagaattgaaaaatgccttgacaggttgcagtttatcttgtgaaatagtagctattgaccttaggtagtggcgayggctgcacagcattgtgcatgtactaaatgccactgaattgttgactttaaaatggttcatatgggccgggcgcggtggcttacgcctgtaatcccagca

SEQ ID NO: 25355 - DNA, 201 bp, Homo sapiens
aggtgggcggatcacgaggtcaggagtttcagaccagcctgaccaacataatgaaaccctgtctgtattaaaaatacaaaaaattagccgggcatggtggygggcacctgtaatcccagctacttgggaggctgaggcaggagaatcgcttgaagccgggaggtggaggttgcagtgagcagagattgcgccactgcactt

SEQ ID NO: 25356 - DNA, 201 bp, Homo sapiens
tcctaataaactgctattacttttaggtgcatggggtttgatttttgagctctaatgaaatgcttaaacttctttccagttcaaattttacacttaatttrtaatatttattgagtatattatgtcctcaacaagtaactataaaatgaaatacttaactcggtgaagactattttatgcaaagttttttttttttttttt

SEQ ID NO: 25357 - DNA, 201 bp, Homo sapiens
ctcctgccgaccttgccctgagggatgctcgcccgcgccccccgcccgccgcccgccgcccgcccccggccccccgccccccgccccccccgcgccggagsggtggtcactcgtgtgcgtttcgtgtctttccagttgttgccgaagagattggactgggagggcaacgagcacaacaggagctacgaggagttggtgagc

SEQ ID NO: 25358 - DNA, 201 bp, Homo sapiens
tgtcctcaacaagtaactataaaatgaaatacttaactcggtgaagactattttatgcaaagtttttttttttttttttttttttttttagcaatttcagkgtaatgaaagaatttaagctttgaatttataatttgctgtggtggggttaatttctgtcagtatttgagattgtattatcagtcttgcataatgaaatcc

SEQ ID NO: 25359 - DNA, 201 bp, Homo sapiens
aagtaactataaaatgaaatacttaactcggtgaagactattttatgcaaagtttttttttttttttttttttttttttagcaatttcagtgtaatgaaaraatttaagctttgaatttataatttgctgtggtggggttaatttctgtcagtatttgagattgtattatcagtcttgcataatgaaatccttttttggct

SEQ ID NO: 25360 - DNA, 201 bp, Homo sapiens
gtgaagactattttatgcaaagtttttttttttttttttttttttttttagcaatttcagtgtaatgaaagaatttaagctttgaatttataatttgctgkggtggggttaatttctgtcagtatttgagattgtattatcagtcttgcataatgaaatccttttttggctaagtatttaattcgaacatatttgcctttt

SEQ ID NO: 25361 - DNA, 201 bp, Homo sapiens
aagactattttatgcaaagtttttttttttttttttttttttttttagcaatttcagtgtaatgaaagaatttaagctttgaatttataatttgctgtggkggggttaatttctgtcagtatttgagattgtattatcagtcttgcataatgaaatccttttttggctaagtatttaattcgaacatatttgcctttttaa

SEQ ID NO: 25362 - DNA, 201 bp, Homo sapiens
ttttttttttttttttttttagcaatttcagtgtaatgaaagaatttaagctttgaatttataatttgctgtggtggggttaatttctgtcagtatttgarattgtattatcagtcttgcataatgaaatccttttttggctaagtatttaattcgaacatatttgcctttttaaaaagtgcttggcctaaacttattgta

SEQ ID NO: 25363 - DNA, 201 bp, Homo sapiens
aagagacaggactgattgtcttgtccagtgcccccacactctgaatttgtctgatagcttcgttgtggtgtcacttaacgtttgtatcacctgcatgtccygtaaaatgaatgttcatttggaggcttggtcagattctcattcaaagttttgtcggcaagaatgcttctactaagtggtgctttctgtttcttattgcag

SEQ ID NO: 25364 - DNA, 201 bp, Homo sapiens
gttcaatttttttatgcacattcacctaggctgtgtattactggtcacttaaatagatttggtgtgaaattttatgataaaaggtgacttttgttctagtmagtattctcaaagaaaagagagtgagtagctattttgggatgaagatagttataactgagatagcggtttttgtttttgttttttgtttttggcccaggc

SEQ ID NO: 25365 - DNA, 201 bp, Homo sapiens
tataaggcttttaaaggtacattggtatctctcattagaatttggtgaaaactggtggtggttcaatttttttatgcacattcacctaggctgtgtattaytggtcacttaaatagatttggtgtgaaattttatgataaaaggtgacttttgttctagtcagtattctcaaagaaaagagagtgagtagctattttggga

SEQ ID NO: 25366 - DNA, 201 bp, Homo sapiens
agcacagggtgtgcagatgcactaaggaatcatgctgacacatatgtcacgtgatgagaggggcagataagcccctctgggcgaaggttttagtattacartgaggctcagggttaggattggtccttctcctggccttgtgcacatatgggcggatagagttaactctccttagtaggattcatggtggaatgctgcttg

SEQ ID NO: 25367 - DNA, 201 bp, Homo sapiens
gtatgtcactggcaactcagattagcacttgagaggcctaatattttacagtggttattttagctttatgttcaaaatcttgattatgacagttgatctgrgtgggttaactttaagtgagcctgtttatctaaccaagcccatgaaataagaatgtgattttaataatgcatagtaagatagaaaactgtcagtgttctg

SEQ ID NO: 25368 - DNA, 201 bp, Homo sapiens
gcaagactattaaactgtaacttaagtagaagttctggaaactgaattgtatatgttttactttttagtttagcccgatggccaaaggctctcaaagatayatggtttccactggtgctgatgggacagtttgcttttggcaatgggatttagaatccttaaaatttaggtaagtggctttaattatgtaacaggttttgt

SEQ ID NO: 25369 - DNA, 201 bp, Homo sapiens
tcactgatagagaattgatcatcttgggatgtaagttcttccatcagaaggcacaaaatgtctagtgttttttgtattactcactgatgatcattgccttrcatccgttagttattagggacagaaaatgttactcttactagtgcacggttcttggctgtcagtgtaacagaaattaataggaggctaggcagacttccc

SEQ ID NO: 25370 - DNA, 201 bp, Homo sapiens
tgtccaccaccacacccggctaatttttgtatttttagtagagacagggtttcaccatgttgggcaggctggtctcgaactcctgaccaagtaacctgccyggctcagcctcccaaagtgctgggattacaggcgtgagccaccgtgccgcttagttgatttaatttaccaaaatatttaaagtttttttcacaataagca

SEQ ID NO: 25371 - DNA, 201 bp, Homo sapiens
tatctttatgtagactgtctttgccttaaagaaaaatactattattccataggtgttctgaccatagtcataatttattacataaataagagagtattctrtagttggaaagagttaaagttaatttggatggcatataaaaggtattcttttaatatttaaaagatttgctgtactaacattaatttttggatatatttt

SEQ ID NO: 25372 - DNA, 201 bp, Homo sapiens
cccaggctggagtgcagtggtgtgatctcagctcgctgcaacctctgcctcctgggttcaagcgattcttgtgcctcagcctcccgagtagctagaattayaggtgtccaccaccacacccggctaatttttgtatttttagtagagacagggtttcaccatgttgggcaggctggtctcgaactcctgaccaagtaacct

SEQ ID NO: 25373 - DNA, 201 bp, Homo sapiens
gaccttgtgatccgcccacctgggcctcccaaagtgttgggattacaggcgtgagccactgtgcctggcctagactaacatttaaccattgttagttgatrtaagagagccgtgaactttgagttggacttactactttgcagagaacttgggggaaaatagtattggtaatggagtctgacccgtagaaatgataactcg

SEQ ID NO: 25374 - DNA, 201 bp, Homo sapiens
cacattaatcactggttcaggaaaatgggttgattataaaataacccattagtgttcaagtaagtattaaaaacctatctgaaaaaatttggaatttatcrttttaatgttttaagcgtaagttaggagaggtgagaagtttaactttcattttgtgggtgtaaaattcaagagtagataatcaaatgtttcttgaatggg

SEQ ID NO: 25375 - DNA, 201 bp, Homo sapiens; identical to SEQ ID NO: 3184

SEQ ID NO: 25376 - DNA, 201 bp, Homo sapiens
ccgtctcaaaaaaaaaaaaaaaaaaaaaaaaaaaaacatagacatacctaacactttccctctagcacattctagacttactgaattagattacattgtamttaaatatatgtattaactgtaaaccccccaaaataaaaagctcctcagacctctacaagtgattcatgttcacattaatcactggttcaggaaaatggg

SEQ ID NO: 25377 - DNA, 201 bp, Homo sapiens
attccgtctcaaaaaaaaaaaaaaaaaaaaaaaaaaaaacatagacatacctaacactttccctctagcacattctagacttactgaattagattacattrtaattaaatatatgtattaactgtaaaccccccaaaataaaaagctcctcagacctctacaagtgattcatgttcacattaatcactggttcaggaaaat

SEQ ID NO: 25378 - DNA, 201 bp, Homo sapiens
cattaaaataatagtcatttaaaaatgttgaaataaggaaaatctttttaatcttattgttaaccttatttctaggtcccgtttcattagcaaatggatgyggcagaaaagccactcgaaagagagtctatttaagtgattctgataacaattcattggagactggtgaaattctaaaagccagagctggaaataaccgaa

SEQ ID NO: 25379 - DNA, 201 bp, Homo sapiens; identical to SEQ ID NO: 3187

SEQ ID NO: 25380 - DNA, 201 bp, Homo sapiens; identical to SEQ ID NO: 3191

SEQ ID NO: 25381 - DNA, 201 bp, Homo sapiens
gaggttatgattttttcactacggtagtattacctatattttggatttcatgtgtttatttcctgaaactgtcaattgaagttaagtttgcaagactattraactgtaacttaagtagaagttctggaaactgaattgtatatgttttactttttagtttagcccgatggccaaaggctctcaaagatacatggtttccac

SEQ ID NO: 25382 - DNA, 201 bp, Homo sapiens
aagctcttactggctagcaatttcgtcttaattttattgctaaatgttcaaattttgcttccaaactcactttatttttgcagatgtgtacatctgctaartactaattttatgtaaatgattttgttgattatctttccacatcttaaaatgtttctaacagctttgagattttatctcaacaggctctctctgacccca

SEQ ID NO: 25383 - DNA, 201 bp, Homo sapiens
atatattatttttggattacctgcttaatttggatacatacttaacggaaaacaagaaaaaccttcaagattctaaattaggatttaagatggctagttaygtttacaaagggttgggggaaaacctgatattcctctgtttgaaattaggcacgtataggttggtgaactgtttatattttaatgtataatttgaatcct

SEQ ID NO: 25384 - DNA, 201 bp, Homo sapiens
tttcctcatttttaactgttatccattagtttgggatatcataatttcttctgttcccttaaatggtctctgtatttcggggcttttctggattttttttktttttttgctttattttcttttactgtttcattaggataatttttattgctgtgtcttcagtttttattgctgtgtctacactatgttagtgtaaaattt

SEQ ID NO: 25385 - DNA, 201 bp, Homo sapiens
aagtaggtcaatagtggagccaggaaaataagtattacctaagtgttgtcattcacatgttacatatatggtgatagtttgtggtgtgtataaaacttacytgacaaaaagcgtggaacttgacttttcaggtttttctctgtcagtgcagttgctatgttgcagaagatcaacagtatcagtggctggaaaaggtaagag

SEQ ID NO: 25386 - DNA, 201 bp, Homo sapiens
tctattgctgtatataacaaaccaccctaaaatttaggtgtttacatggcaaacgttgcatatttcatgtattggttgatcaggaactgggagctgatttractgggtgattttggctcatgaggttacaacatgttgactggggctgcagtcatctgaggacttgatgagggttggatgatattctttccgagcttattc

SEQ ID NO: 25387 - DNA, 201 bp, Homo sapiens
agcttgcagagccaaacactaacttatgtgaattgttttttacagcatttctgtcatcatttgttatgaattcaggagtctgggaggaagttggttgtgcyaaactctggaatgaatggtgtagaacaacagacactacacatctgtcctccacagaggctttttgtgtgttttatcatctaaaatccaatccctcggtag

SEQ ID NO: 25388 - DNA, 201 bp, Homo sapiens; identical to SEQ ID NO: 3173

SEQ ID NO: 25389 - DNA, 201 bp, Homo sapiens
tttctgtataatggtggtattaggtagacggtcttgaatggctctttcagctctcaaattctacagtaacttgagcttactttttattgaatagaaaatayagcttgcagagccaaacactaacttatgtgaattgttttttacagcatttctgtcatcatttgttatgaattcaggagtctgggaggaagttggttgtgc

SEQ ID NO: 25390 - DNA, 201 bp, Homo sapiens
tttaggaaaacagttttgtatgatgaaatattgtgcagaatctgtaaataaggtagcttaaaaataaaaaaaaagtctaattagaatatgattaatccttraaatgtagaaactagagattgtgttgagtcagaactgttatgtttgtatccaggtttctattcaccacatataccatcttagaatacacacatatctgtg

SEQ ID NO: 25391 - DNA, 201 bp, Homo sapiens
gtggctcacacctgtcatcccagcactttaggaggctgaggcaggtggatcacctgaggtcaggagttcaagaccagcctggccaacagggtgaaaccccrtctctactaaaaatacaaaacttagccgggcgtggtggcaggtgcctgtaatcccagctacttgggaggctgaggcaggagaatcacttgaacccaggag

SEQ ID NO: 25392 - DNA, 201 bp, Homo sapiens
gcattttattatgcctgggaggcactattctaaatggtttacacgttatctaatttcatcattccaacaagtaggaattcaggcactcttataatctcttttaaaaatgaggaaactgaggtacagatatggaggttcagtaactttcccacatttatataaaaagttagcagcatgggccgggtgcagtggctcatgcct

SEQ ID NO: 25393 - DNA, 201 bp, Homo sapiens
catgttcttagggaatgaaaaaggattattaagaatgatttttttttttcaagcctgggtgccacaaagatcatctggtagtctttctttggagattttgwtaataacatgttataactctggtaataccaaatgtctttgatatgttatttattaagattatgttattattttctaatgagactctaaatacttaaggtg

SEQ ID NO: 25394 - DNA, 201 bp, Homo sapiens
tgtagagatggggttttgccatgttgcccaggctggtctggaactcctgagctcaaatgatctgccgtcagtctcccaaagtggacctcgcctggcctaamtattccttttcttcatttttttaataattttttttttttttttttttggagatggagtctcgctctgttgcccaggctggggcgcagttgtgtgatcttg

SEQ ID NO: 25395 - DNA, 201 bp, Homo sapiens
taaacgtgctctgagttaacctggtagccagtacacagtacacagtaaatgacatttcttatctgtatgttagaactactattcaataagctaaaatattytgagcttcctcagattttctcctttttttttttttgagacagagtcttgccctgttgcccaggctggagtgcaatggcacaatctcggctcactgcaacc

SEQ ID NO: 25396 - DNA, 201 bp, Homo sapiens; identical to SEQ ID NO: 5436

SEQ ID NO: 25397 - DNA, 201 bp, Homo sapiens
aagaatggacttagtttttttccagattactgcacaattgtaataccatttatgcagtgatccattgttcgcccaacagatttgagataataccttaattstacttaagtcttagattaggattcatgttttctcccatttttccttccagtttttcagtcagctttcccaggttgaatagggtctagttttggattgtat

SEQ ID NO: 25398 - DNA, 201 bp, Homo sapiens; identical to SEQ ID NO: 3185

SEQ ID NO: 25399 - DNA, 201 bp, Homo sapiens
cttacatgttatttactggtagtatactttagtatggcaaatctttcagttgctctgtcagtgtgcactttttctgatactaatcaccagtagtggtttgrctgttaaattttaaagagaaataagtaggtcaatagtggagccaggaaaataagtattacctaagtgttgtcattcacatgttacatatatggtgatagt

SEQ ID NO: 25400 - DNA, 201 bp, Homo sapiens
cagctaatttttaaattttttgtaggcatggggtcatgctatgttgcccaggctagtgtttgaactcctggcttcaatttatccacctgccttggcctccyaaagtgctgggattacaggcatgttcggccatttcttagctgttttaaaggaaaataggattatctcaatattcattcacccatatttctcacatgcctt

SEQ ID NO: 25401 - DNA, 201 bp, Homo sapiens
gccactgtgcctggcctctagttttctttaattgtcaccagcccctctcagccttttttctttttcctctttcttggcctttaacttttgttgaatattascaagtattgttacagagtgtcctcagttttgtctgatattttttcatgattagattgttatagttttttaaatgaaataaaacataagtgatattgtgtc

SEQ ID NO: 25402 - DNA, 201 bp, Homo sapiens
tcattcacagacagattaaaaaaaaaagctttccatttttaggcaaattcttaaactttattagccttagttcctcattcttttttgagacagggtcttgmtctgttgcccaggctggagcacagtggtaccaccatagcttgtgacagccttaaactcctgggctcaagtgatctcctgcctcagtctccccaaatagct

SEQ ID NO: 25403 - DNA, 201 bp, Homo sapiens
ctggctaagttttgtatttttagtagagatggggttttgccacgttggccaggctggtctcaaactcctgacctcaggcgatccacccacctcggcctctsaaagtgctaggattacaggcgtcagccaccctgcctgcttctccttattttttcaagaaataccagtctgtttcatttgcgctcccttaaaatttaagaa

SEQ ID NO: 25404 - DNA, 201 bp, Homo sapiens
gcaggaatttcagaggctgctttcaggtttttgtggtatttagtcctctacaggaagacttttgttggctttgaatcttttctctgacttcttggtgaatrtgtagagtatctttttaaactggttatttttcaaaaatgggaaattctgaccattgttaatgtattttaatttgtaccctaacgaaatttttttttgttt

SEQ ID NO: 25405 - DNA, 201 bp, Homo sapiens; identical to SEQ ID NO: 3152

SEQ ID NO: 25406 - DNA, 201 bp, Homo sapiens; identical to SEQ ID NO: 3156

SEQ ID NO: 25407 - DNA, 201 bp, Homo sapiens; identical to SEQ ID NO: 3157

SEQ ID NO: 25408 - DNA, 201 bp, Homo sapiens
gatattttgtaattataatatgggcagtagtgtccttggtgctgagttgtaatgtactgatttgagttattgaaatggaaacaggaaatactttttagaakgatatctaaaatgtttcagtattttctcatgtttgtatgtcataataacttaatagcttgaagataattttgtaaatttatctttgtgtttttatatgtt

SEQ ID NO: 25409 - DNA, 201 bp, Homo sapiens
aggagcctcttttcaaggctccctgtcctttcaaaatgactagtagttttccatagcatccttactatgagacaggggaagatattatagttcatcttgtwaatttttgacctatatctgaaattaagcagccctattttcttttagtaagaaatgttatttcttttatttttttgagacagagttttgctctcgtccagg

SEQ ID NO: 25410 - DNA, 201 bp, Homo sapiens
aataaagatttattccttttcattattcaacagcgaccaatttgtatgtgtgtgtgttttaatgtataaatcaaatagctggggtttaacttatttctgayattctttattgatgtttaaatcatctcttttctagccatgaggagcctcttttcaaggctccctgtcctttcaaaatgactagtagttttccatagcatc

SEQ ID NO: 25411 - DNA, 201 bp, Homo sapiens
atttacaaatacacacatagacctttatatttttagggtgttcacaggttgtgatgagaacattcaggaaacccagttaagatcccttcctctgtaaggtwcccctagtggttgtagaacatagtaagtacatgatggcaagtaactatggactcatttatataaagttctgctggcctaaagtttttcagaagagtatta

SEQ ID NO: 25412 - DNA, 201 bp, Homo sapiens
taagattatgttattattttctaatgagactctaaatacttaaggtgctctgattttattcctaggatgatagtgatcttcctaaaacatcttctggaagraggagagtaagttactctgcatggttgacttttgtagtttctttttctttgttttaaaatcaattcaggattttagtttttgtctttgaaaagttatatc

SEQ ID NO: 25413 - DNA, 201 bp, Homo sapiens
tatgttatggacatgccttctttccctaaacctcatgaaccaacctctgcaagtttccatcttttcttctgcagctttgtcacctctcagccttcatagarttaaagagagttagggccttgctctgggttaagctttggcttaagggaatgttattgctggtttgaccctctatccagacaccaaaactttctctatatt

SEQ ID NO: 25414 - DNA, 201 bp, Homo sapiens
actatagaacacaaaatgcagaaactataggaatctgtatgtttctggggatttgtggatagaggtaaaacacaagttttctatttaggaaatgcatgaascgtctttttatagctgtaatttcaaattttagaattagttcatgttcttagggaatgaaaaaggattattaagaatgatttttttttttcaagcctgggt

SEQ ID NO: 25415 - DNA, 201 bp, Homo sapiens
gagtgcggtggcatgatctcggctcactgcaacctccacctcccgggatcaagcgattctcctgcctcagcctcctgagtagctgggcttacaggcgcccrccaccacacccagctaattttttatatttttagtagagacagggtttcaccatgttggccaggctggtctcgaactcctgacctcaggcgctccacctgc

SEQ ID NO: 25416 - DNA, 201 bp, Homo sapiens
taaacgcattcttctggcacctactgtattgccttaacaatatattctagaaatcgtatcagttcacagaattcttcatcctattttttttttttttttttaaatagcttcatactactcctctgtgtggagtaattaacctttctaatctctttatgggcatttaggttgtttcttatgctttgctgttataagtgatgt

SEQ ID NO: 25417 - DNA, 201 bp, Homo sapiens
gatttactccttgatccatgggctgcagaatggatgtggtgttagcaggcatgaaaacaacattaatctcctttgatgtgcccatcagaggtcttggatgrctaggtctattgtccacaagcagtaatatttggaaaggagtcttctttttctgctcagtaggtctgaacagtgggcttacaatatctggtaaaccatgct

SEQ ID NO: 25418 - DNA, 201 bp, Homo sapiens; identical to SEQ ID NO: 3154

SEQ ID NO: 25419 - DNA, 201 bp, Homo sapiens
aaagcacatgatttgttttgtcccactactggtgatacgtgctttgatcacttcctaaggtggtggtgtttgcaggtttctctatggtaaaattacagtcytgattgttggatttactccttgatccatgggctgcagaatggatgtggtgttagcaggcatgaaaacaacattaatctcctttgatgtgcccatcagagg

SEQ ID NO: 25420 - DNA, 201 bp, Homo sapiens; identical to SEQ ID NO: 3155

SEQ ID NO: 25421 - DNA, 201 bp, Homo sapiens
atttgtgtacatacccgaagtactgtactgtagtagcttatccaaccgatctttacacaattcgaatgagacttgttaatcgattttacaggttagtagamacctgctttcaaaatgtttaaaaagctatatttggcaatattgactagggtaaacaaagaaagagatagtggtagaattgggggctgattagcattttct

SEQ ID NO: 25422 - DNA, 201 bp, Homo sapiens
caagtgatccgcccaccttggcctctcaaaagtgctgggattataggtgtgagctaccatgcccagcctttgttaattaaaacatgttagatgcttgtaawatctttttttttttttttttttttttgagacggagtcttgctctgttgcccaggctggagtgcagtggtgcgatcttggctcactgtaagttccgcctcc

SEQ ID NO: 25423 - DNA, 201 bp, Homo sapiens
tgttaaaacttgttagaactgctgagagcttaatacgatggttaaatatatataggacccatgtcttaaaaccagaactttattgtacaccagcaataaasaagtaataaatacaatggaagaagagtataatttgtaatagcaacaaaacccctcaaacacataggaatgaatttaacaggaaatgtgaaatatgtttat

SEQ ID NO: 25424 - DNA, 201 bp, Homo sapiens
gcccagctaatttttgtattttttatagaggcatgatttcatcctgttggccaggttggtctggaactcctgacctcaagtgatccgcccaccttggcctytcaaaagtgctgggattataggtgtgagctaccatgcccagcctttgttaattaaaacatgttagatgcttgtaatatcttttttttttttttttttttt

SEQ ID NO: 25425 - DNA, 201 bp, Homo sapiens
agcagttttactatgttgtcctgtagtcatgatctattgctgtataacaaattaccccaaaatttagcagcttaaaactacactaatttgttgttatctgycagtttctgtaagtcagcggtccagacacagctcagatgggttccctgtctccttttctctgaaggtgcagtcaaaatattggcagaactggggttttag

SEQ ID NO: 25426 - DNA, 201 bp, Homo sapiens
gtttttgtatgtgttcccaggctggtctcgaacttctggactcaagtgatcctcccaccctggcttcccagagtgttgagattacagacgtgagccactgktccttgccctaattttttaatgataaggtggttttgtgttgtaatcacagcactttgggaggctgaagtgggaggactgcttgaggccaggcgtttgaga

SEQ ID NO: 25427 - DNA, 201 bp, Homo sapiens; identical to SEQ ID NO: 3153

SEQ ID NO: 25428 - DNA, 201 bp, Homo sapiens
cattttattatgcctgggaggcactattctaaatggtttacacgttatctaatttcatcattccaacaagtaggaattcaggcactcttataatctcttttaaaaatgaggaaactgaggtacagatatggaggttcagtaactttcccacatttatataaaaagttagcagcatgggccgggtgcagtggctcatgcctg

SEQ ID NO: 25429 - DNA, 201 bp, Homo sapiens
gactgtaccactgcactcctgcctgtgtgacagaatgacatactgtctctaaagcggaaaaaaacaaaacaaaaaacagcccaggagccagggaagacttytaacacatattttgttgaatgaatgaatgaagtgatccaggtttttgtgtgcatttaatttcacctctaggtgctgatccagtttgtggtatagtgttct

SEQ ID NO: 25430 - DNA, 201 bp, Homo sapiens
gactgcgaggctgcagtgagctctgactgtaccactgcactcctgcctgtgtgacagaatgacatactgtctctaaagcggaaaaaaacaaaacaaaaaamagcccaggagccagggaagacttttaacacatattttgttgaatgaatgaatgaagtgatccaggtttttgtgtgcatttaatttcacctctaggtgctg

SEQ ID NO: 25431 - DNA, 201 bp, Homo sapiens
actatgcccagctaatttttaaattttttgtaggcatggggtcatgctatgttgcccaggctagtgtttgaactcctggcttcaatttatccacctgcctyggcctcctaaagtgctgggattacaggcatgttcggccatttcttagctgttttaaaggaaaataggattatctcaatattcattcacccatatttctca

SEQ ID NO: 25432 - DNA, 201 bp, Homo sapiens
tgggcaacagagcaagacccgcatctctaaaaaacagtaaaaaattagccaggcatggtggtgcacacctgtagtctcaagtactcagcggtaggactgcraggctgcagtgagctctgactgtaccactgcactcctgcctgtgtgacagaatgacatactgtctctaaagcggaaaaaaacaaaacaaaaaacagccca

SEQ ID NO: 25433 - DNA, 201 bp, Homo sapiens
gccttggttgcgccagtgtaactctagcctgggtgacacagtgagacactgtgtcaaaaaaacaaaaaatgaggcaataaacaacaatataatgtcattaycagatctgcagatcttactcaaattttaccagtcaatggtcctgataattttcatagcaaaataaaatcctggatcacgtgttacattttgttgtgtctg

SEQ ID NO: 25434 - DNA, 201 bp, Homo sapiens
aaacacacaaagctttttaacaaaggtttgttgacagtgacttcagtagctatggaattctgattcatagtcctttttttttttttttcggcacagtaaaratgttctactgccttatgccttcctaatgttggaaatttagcagtcttattgctcctttgaaaataatgttgtttttggtctggttgcttttaggatttt

SEQ ID NO: 25435 - DNA, 201 bp, Homo sapiens
caaaagatcagataccttcttcatttttactttgaaagtcctccaaaaatcgatcaaagtccaggtgtggtggctcacgcctgtaatcccagcactttggraggccaagacaggagggtcacttaaggccaggcaatgcagtgagaccctgtctctaaaaaataaataaataaataaaatctatcgaagtgttaactctcc

SEQ ID NO: 25436 - DNA, 201 bp, Homo sapiens
cttatataacagggtcatgttgagagctgggcattgttcagcgagcttcacaggcatgctctctggaaatgctcacaaacacctctagctgtctcatgatycttaaataatgcatggaaatgatttaggacagtgtccagcatacaaacatatccaataaatgttattagttgtcatgcttattttaaagattattaaaca

SEQ ID NO: 25437 - DNA, 201 bp, Homo sapiens
ctttgcctttgggaggaaggtgtagtatcctagtctggaaataactattttaccatgcagctctgttccaacctctccgcctcaagtaccttgaatttgcscaacacagtagacatgggatggtttcctttgggaaaactgttacgtaaggtcattctagaaaggctagggtggtatgtagtggcattatcattattgatg

SEQ ID NO: 25438 - DNA, 201 bp, Homo sapiens
ctgcaacctctgcctcccaagttcaagtgattctcctgcctcatcctcctgagtagctgggattacaggtgcctgtcaccaagctcggctaatttttttttgtatttttagtggagacaggagtttcaccatgtggtcaggctggtcttgaactcctgacctcaagtgatcggcccgcctcggcctctcaaagtgctggga

SEQ ID NO: 25439 - DNA, 201 bp, Homo sapiens
taaatagtgcctaatacacaataatgttagctacgattatgattaaaaccatctgtttaaactgtttttatttttttgagacagggtcttgctctgttgcrtaggctgtagtgcatggtgcagtcatggctcactgtagcctcaaactcctgggctcaagctgtcctcctccttcagcctcccaagtagctgggattaaca

SEQ ID NO: 25440 - DNA, 201 bp, Homo sapiens
tagatgttgtgtaaaagtgactgcatattgtgctattaacaatcatctagttttgccgggcgtggtggctcatgcctgttaatcccagcactttgggaagygaaggccgtcagatcacttgcggtcaggcatttgagaccagcgtaccaacatggtgaaaccccggctctactaaaaaaaatacaaaaattagccgggcgt

SEQ ID NO: 25441 - DNA, 201 bp, Homo sapiens
aaaagcaaagcgagattctgatatacataaagttcaggccagtggatgcctctggggaccagcaggggagtgctatagaaagggcagcttcagtcgggcgcagtggctcacgcttgtaatcccagcactttgggaggcggaggtgggcagatcacctgaggtcaggagttcaagaccagcctagccaacatggtgaaaccc

SEQ ID NO: 25442 - DNA, 201 bp, Homo sapiens
cattcttatttaattatttttttttgagacggagtctagctctgttgcctaggctggagtgcagtggtgcagcctcggctcactgcactgcaacctcccchtcctgggttcaagcgattctcctgtcttagcctcctgagtagctgcgattacaggcatgtgccaccacgcctggctaatttttgtatttttagtagagac

SEQ ID NO: 25443 - DNA, 201 bp, Homo sapiens
aatcatgagaatcatgattactgttgcaagagctcttgtaaaaccactttgatttcaggtatctgtcttcagtgcaaatttttcaaaaagactttttttaktgtgcaatttttaagaaggcacagtttttaggaatgcatatataatgtaatgtgaaatgtacattttataatttcagaaagtctagtaaaaattgaaatt

SEQ ID NO: 25444 - DNA, 201 bp, Homo sapiens
tatgcttgagacccggcagcattgccaaattttgcatggtgcttagtcatcttagtaatgagctgaagtagagcccaccttaaaatctagaaaagtgttcrttttagttcatgaataccaaatttggttaatctttaatcatttatcttgtagcttattatccttttattatatactaagacaaaaatttatgaaattgtt

SEQ ID NO: 25445 - DNA, 201 bp, Homo sapiens
tgcttgaacccaggaggtggtggttacagtgagcccaatcgtgtgtggatcgtgccattgcactccagcctgagtaacaagagcaaaactctgtctccagwaaaaaaaaaaaaaaggaaaaaaaaatcatctagttttgttttttactcagaactatacttttttaatgctttactttagatgacatttctttacatacat

SEQ ID NO: 25446 - DNA, 201 bp, Homo sapiens
aaactttaatgtgacatttttctccagacacagttgcaggttgcgttttgtcaggaatcattgtataggacgcttccagttacaagtgaaaccccaagtcstccttgctctgcttagataggtctgcccacttgagaaaactttcatctcagcaagtatttatagaaaagcttttggtgctgttaagtccacatgtatgat

SEQ ID NO: 25447 - DNA, 201 bp, Homo sapiens
tttctttatttttgtattgatgagagattgtatacattgtatagccagccatctaaataagtttacatgttgtgtatttttttgttagggacttatcttcygaagaggaaaggtttatgaaacctaaagtaacaatgatagcttggaatcaaaatgatagcattgttgtcacagctgtgaatgatcatgtcctcaaagtgt

SEQ ID NO: 25448 - DNA, 201 bp, Homo sapiens
aatttttttgtcttctatggagagaaacagttgaaagtaagtgttagcaataggtttgtattcagaagaaggaaataataggaaagaagtagggagaaaargcattgctttcataagcagtaatggtgtcctaaaatctgcccttattcagtctctgtactgtttctaaattatccctcccttcttcaggttttgccctca

SEQ ID NO: 25449 - DNA, 201 bp, Homo sapiens
acagagcgagactctctaaaaataaaagtcatagattttactttagagtttgtttcctgattttaactttgcactttttcatatcagtttttctgagaaaygtttccacattttgtcttctggaaatcatgtctgctttatttttatttaaaaaaaatggtttagggtctcactccatcgcccaggctggagcgccagtgg

SEQ ID NO: 25450 - DNA, 201 bp, Homo sapiens
ataacatgtactttttctatggttcaaagcattgacctccttcttagatgttgcatttaaaagcttctacaagtaaaaaagataaaattaactcaagtacrttaagagtggaaattatacttttctgtggataggatttttgaaaaaatttaaaagtagcttagagccaaggctgggaaatagggtaagcaaacatacttt

SEQ ID NO: 25451 - DNA, 201 bp, Homo sapiens
tgcttctgtagtaaccatatgcagtttactttgaatttaggaaaacagttttgtatgatgaaatattgtgcagaatctgtaaataaggtagcttaaaaatwaaaaaaaagtctaattagaatatgattaatccttaaaatgtagaaactagagattgtgttgagtcagaactgttatgtttgtatccaggtttctattcac

SEQ ID NO: 25452 - DNA, 201 bp, Homo sapiens
gctatagccatgtgaataagccattttggaagcagatccccctattcccagttaagcctttatgtgactgtggctcaggtcgacatcttgactgcatctckcagccttgagacactgagccagacctatctagctaagctgctgttgaattcttggaccatagagactatgagataatgaatatttattgttgtccagtgc

SEQ ID NO: 25453 - DNA, 201 bp, Homo sapiens
ttgacactgttttgttaagaaataaaaaattcatatacactttgctttataaccatgtaatgtataggtgggcagaaaaattaaaaaattaaaattacctyaatgtaattttacacattcgagtaaaattacacattggagtaattttagtacctcaatgtaggtactaaattactcgaatgtgatttttgtgatgatcat

SEQ ID NO: 25454 - DNA, 201 bp, Homo sapiens
gttaattgactgttcatgcaattggtgaggctttatcaatagttaagttttttgggagtcagaagttacgtgtggattttcaactgcctgggggggtttgrtaccctaacccctgcgttgttcaagggtcaactaactgtacttctaaataatccatacatcaaagaagaaaaatcacaatagacatttaagaatatttca

SEQ ID NO: 25455 - DNA, 201 bp, Homo sapiens
taagaccacatggacacacagaggggaacaacacacactagggccttttggagggtgacaggaaggagagaatcaagaaaaacaactaatgggtactaggyttaatacgtgggtgatgaaataatctgtatagccaacccctgtggcacaagtttccctgtgtaacaatcctgtacttgtacccttgaacttaaaagttaa

SEQ ID NO: 25456 - DNA, 201 bp, Homo sapiens
cattgaagaatgaaagtatattaaatgcatatttagacaagctgagaacttcttagcaatggaacaacattaaagggaattctaaataatattctttaggyggggatgtgatcccaggtggaaacttggagatgcaagaaggaatgaagacttaagacaaaaaaaaaaatgaatgtgtgggtaaatggaaataaacattgg

SEQ ID NO: 25457 - DNA, 201 bp, Homo sapiens
gctgtgataaaattattagagtgtggtgcttgagaacttgtgccccagttgctgtgctccaaggacacacaggatcaattacatctttacaggtaaacttstagcttagtgggcacattcctatatgtattttcacctttttctttaaaacagtttctttggaattgagaaatagtaagatgtgtattagttatgttttaa

SEQ ID NO: 25458 - DNA, 201 bp, Homo sapiens; identical to SEQ ID NO: 3209

SEQ ID NO: 25459 - DNA, 201 bp, Homo sapiens; identical to SEQ ID NO: 3211

SEQ ID NO: 25460 - DNA, 201 bp, Homo sapiens; identical to SEQ ID NO: 3214

SEQ ID NO: 25461 - DNA, 201 bp, Homo sapiens
ccatcatggccggctaattaaaaaaaatttttttttctagagactgtctcactatatggcctaggctcatcttgaactcttggactcaggcagtcctcccrccttggcttcccaaagtgctgggattataggtgtgagccactgtgccttgctcatttgtatttaacataattaaacataattgggtttaagtctacctgt

SEQ ID NO: 25462 - DNA, 201 bp, Homo sapiens
ttcggagaggtggtgaaggcgccgtgccgagctgggactgaggacgaagaggaggaggaggaggggcggagggagacgcccgaggacagggaggtgcgtcygcagctggcgcggaagaggtgaggcaccgggataagggcagcgcgctcaccgcagctggaaggtgcgcgggcctggcagccgcgacggcgcctaaggccg

SEQ ID NO: 25463 - DNA, 201 bp, Homo sapiens
tcggagaggtggtgaaggcgccgtgccgagctgggactgaggacgaagaggaggaggaggaggggcggagggagacgcccgaggacagggaggtgcgtctscagctggcgcggaagaggtgaggcaccgggataagggcagcgcgctcaccgcagctggaaggtgcgcgggcctggcagccgcgacggcgcctaaggccgg

SEQ ID NO: 25464 - DNA, 201 bp, Homo sapiens
ggatatattatattagagatgggcttgaataaagcagagaggggcacatttataagctgtgatgttgatagcttaagtagtagacaaaaagggtaggactrtttaataaaaagagatgttagtaatagcaaataaaacagttactgagctgtttctattaggaagtttttctaaatgttttccattaataagcagtttagt

SEQ ID NO: 25465 - DNA, 201 bp, Homo sapiens; identical to SEQ ID NO: 3221

SEQ ID NO: 25466 - DNA, 201 bp, Homo sapiens
agaagcagtttttacctgtactcatctgcccttcagtcagctttgtgacagaagggcaaacatcttcacagaagaaaaagttcagaaggttggcattggtrgtttcattgctacagaataatagtgttacttgatagtatctgactaaaagagctctcattttctagtacttagtagtaaaaagaatgtggtggagtcctc

SEQ ID NO: 25467 - DNA, 201 bp, Homo sapiens
ctttttaaaaagtgcttggcctaaacttattgtaactgcatgaaataagcatttgcttaaaacttaacattgtaaaattgttctctctgaaatgtgtgcaraatttaaatcatggccaaatgtattactattaccctatttacagtaatttgctttgcagaaaatatttcttcatcatggaactgtgaaatcaaattgaag

SEQ ID NO: 25468 - DNA, 201 bp, Homo sapiens
aaacttaacattgtaaaattgttctctctgaaatgtgtgcagaatttaaatcatggccaaatgtattactattaccctatttacagtaatttgctttgcaraaaatatttcttcatcatggaactgtgaaatcaaattgaagatcttactggtaaaaatgacaaattaacaaaaggactaagacaagtggtgcccaaacaa

SEQ ID NO: 25469 - DNA, 201 bp, Homo sapiens; identical to SEQ ID NO: 3174

SEQ ID NO: 25470 - DNA, 201 bp, Homo sapiens
gaatttaaatcatggccaaatgtattactattaccctatttacagtaatttgctttgcagaaaatatttcttcatcatggaactgtgaaatcaaattgaaratcttactggtaaaaatgacaaattaacaaaaggactaagacaagtggtgcccaaacaacctttttattctgcagttccatcatcataatagaccagtta

SEQ ID NO: 25471 - DNA, 201 bp, Homo sapiens; identical to SEQ ID NO: 9176

SEQ ID NO: 25472 - DNA, 201 bp, Homo sapiens
ttaacgtgaccaaccagttgtgttttatacttctgtgtcctcccgtcctcaatgctgaggtacagaagtataaaacacagttggtcctcagcattgaggayggtaggtcacagaagtataaaacacaattggattcctcccgcccatctttctttgtttacatcactttagatcttattaaaaggtaaaagggttcttaga

SEQ ID NO: 25473 - DNA, 201 bp, Homo sapiens
ataaaacataagtgatattgtgtccttcatgaatcatattaggaggcacatgatatttatttgtccccttactatggtgataattttttttttttttttttggagatggagtttctctcttgttgcccaggctggagttcaatggcacaatctggggtcgctgcgacctccgcctcctgggttcaagtgattctgctgcct

SEQ ID NO: 25474 - DNA, 201 bp, Homo sapiens
cattcttttatcagttcttggatttttgttagaaatactaagttttacccaggctgtgtcatctggtgtacacattcataaatgatgttaagacattgatytttctagttactgcagtttctttctttctttccttctttttttggacacaaggtcttgctctgttgcccgggctgaagggcagtggtgcaatcagagctc

SEQ ID NO: 25475 - DNA, 201 bp, Homo sapiens; identical to SEQ ID NO: 3177

SEQ ID NO: 25476 - DNA, 201 bp, Homo sapiens
gtgtcctcagttttgtctgatattttttcatgattagattgttatagttttttaaatgaaataaaacataagtgatattgtgtccttcatgaatcatattaggaggcacatgatatttatttgtccccttactatggtgataattttttttttttttttttggagatggagtttctctcttgttgcccaggctggagttca

SEQ ID NO: 25477 - DNA, 201 bp, Homo sapiens
tgcctcagcctgcctaaagtgtaggaattacaggtgtgagccaccatatctggccactgctgcctttttgtgtggtactacaagaaggtaaattttagatraagtccctaatcatcctcatctgacgtgaaagattgtcagggcgtgtggctcctctttatagattattctcctggtaacatctacacaagtaatcaagat

SEQ ID NO: 25478 - DNA, 201 bp, Homo sapiens
atgtattcacacaagtatatatacatataatatgtgcaatatatacatacaaacatatatacataaaatatatacatataatacattgatattcatacaartacatattctgatgtagtaacaagttttgtaattactgagttacatttatttgtttgatagagtaaaaaaaattacaaaataaatttgaaatctatttac

SEQ ID NO: 25479 - DNA, 201 bp, Homo sapiens
tgattttatgacaataatttattattattacattcagttgtaattaatgtttatgttaaattagggtattagagatttggataaaatcatggtgtggtttrtcttaaattgtaagtttaaagctatactagtctccttagatttctttcaggggctatggtttcaagtgattttgaagtaaaatatatgtaaaactcatgt

SEQ ID NO: 25480 - DNA, 201 bp, Homo sapiens
ttttgtctgatcattttaattattaacactctgtgatatgctttaatatctagtaggactagatctccaccttgttaaagtttttctggccagtcttgttyattctgaaaataggcttattgagatcatattacatataaatgaatgtggagaggttatgattttttcactacggtagtattacctatattttggatttca

SEQ ID NO: 25481 - DNA, 201 bp, Homo sapiens
cactgaaaagcctaggccaggcgttcaaatgctttgttcttcttttagtgttggtaagaacttcttcacatttttttcttagttttttttttttaaacatytattaaatgaccacttggttgctaagaacttttattagctacatggtaaatgacttctggtgtttatttcattaggttcaatttatgatgtttattttgt

SEQ ID NO: 25482 - DNA, 201 bp, Homo sapiens
tagaaccaaatgaggatcctactgtatctttttagaatttctccacataatcataattatagttactaatcagcaaatttaacatttataagatagcattrtctagtcaggtctatagtaacatctttttagatatattttgctccgtagaccagaatccagttcaggctcatgcgttgtgtttaagtggttgtatctttc

SEQ ID NO: 25483 - DNA, 201 bp, Homo sapiens
atacgtgtatgccatcatggccggctaattaaaaaaaatttttttttctagagactgtctcactatatggcctaggctcatcttgaactcttggactcagrcagtcctcccgccttggcttcccaaagtgctgggattataggtgtgagccactgtgccttgctcatttgtatttaacataattaaacataattgggttta

SEQ ID NO: 25484 - DNA, 201 bp, Homo sapiens
ttagggggccaaggcgggcagatcacttgaggtcaggagttcaagaccagcctgatcaaccttgtgaaacccgtctctactataaatagaaaaattagccrggcatggtggtacatgcctgtagtcccagctacttgggaggttgaggcaggagaattgcttgaatccaagaggcggaggttacagtgagcggagattgtg

SEQ ID NO: 25485 - DNA, 201 bp, Homo sapiens
ctctctgttacctaggttggagtgcagtggcatgatcttggctgactgcaacctctgcctcccgggtcaagcagttctcctgcctcagcctcctgagtagytgggactacaggtacatgctgccatgcctggctaattttttgtattttagtagagacagggtttcaccgtgttgcccaggctggtctcgaactcctgagc

SEQ ID NO: 25486 - DNA, 201 bp, Homo sapiens; identical to SEQ ID NO: 3195

SEQ ID NO: 25487 - DNA, 201 bp, Homo sapiens
aggccaggtgcggtggctcacacttgtaatcccagcacttggggaggctgaggcgggtggatcacaaggtcaagagatcgagaccatcctggccaacatgrtgaaacctcatctctactaaaaatacaaaaaattagccagacgtggtggcgggcgcctgtagtcccagctactcgggaggctgaggcaggagaatcactt

SEQ ID NO: 25488 - DNA, 201 bp, Homo sapiens; identical to SEQ ID NO: 3197

SEQ ID NO: 25489 - DNA, 201 bp, Homo sapiens
gcagtgagctgagatcacgccactatactccatcctgggtggtggagtgagaccctgtctaagcaattaaaaaaaaaaaaatatatatatatatatatatrtatatatatatttgtgggagctaaatgataagaccacatggacacacagaggggaacaacacacactagggccttttggagggtgacaggaaggagagaa

SEQ ID NO: 25490 - DNA, 201 bp, Homo sapiens
ttaaagatatctaggccaggtgcggtggctcacacttgtaatcccagcacttggggaggctgaggcgggtggatcacaaggtcaagagatcgagaccatcytggccaacatggtgaaacctcatctctactaaaaatacaaaaaattagccagacgtggtggcgggcgcctgtagtcccagctactcgggaggctgaggca

SEQ ID NO: 25491 - DNA, 201 bp, Homo sapiens
ttattggatatggctaccagaatctcagggtaagttgagattgttagaagtaggtgcatcataggtgttcgatctgtctctctctctctctctctctcgckctctgtgtctctcagtggttattttgttgaggggattatagctaccttctattacgaagagctgtggtataagtgaatagctgcgtactgcatatcaggt

SEQ ID NO: 25492 - DNA, 201 bp, Homo sapiens; identical to SEQ ID NO: 3199

SEQ ID NO: 25493 - DNA, 201 bp, Homo sapiens; identical to SEQ ID NO: 3200

SEQ ID NO: 25494 - DNA, 201 bp, Homo sapiens
tgcagcggtgcgatctcggctcactgcaagctccgcctcccggattcacgccattctccagcctcagcctcccgagtagctgggactacaggcgtccgccmccacgcccggctaatttttctgtatttttagtagaggcggggtttcactgtgttagccaggatggtctcgatctcctgacctcatgatccgcctgcctct

SEQ ID NO: 25495 - DNA, 201 bp, Homo sapiens
tttagtagagacagggtttcaccgtgttggccaggatggtctctatctcttgaccttgtgatccacccacctcagcctcccaaagtgctggaattacaggygtgagccactgcaccaggcctaatttttgtatttttagtagagatgggatttcaccataatggtcaggctggtgtctcaaactcctgacctcaggtgatc

SEQ ID NO: 25496 - DNA, 201 bp, Homo sapiens; identical to SEQ ID NO: 3202

SEQ ID NO: 25497 - DNA, 201 bp, Homo sapiens
agagtccatatccagattttctttttgttccctgggtgtcttttttttttttttttttttgagacggagtctcgctctgtcgcccaggctggagtgcagcsgtgcgatctcggctcactgcaagctccgcctcccggattcacgccattctccagcctcagcctcccgagtagctgggactacaggcgtccgccaccacgc

SEQ ID NO: 25498 - DNA, 201 bp, Homo sapiens
agcatttgaagtttttgtatctttttaatttaaaaattaagaagtactaagaatcaatgaagttcaaagctgatgacgtagtaaattctaaactgttcatrttgttgccatctggtagcataactgtagctgatgctaactttgttaacattgtacaaatgaggctgtggtgtgtatctatttctgtactgctctgagtgg

SEQ ID NO: 25499 - DNA, 201 bp, Homo sapiens
gaaaacagattgcagacagagatgggtatataaaagtgcttttgttcccttgccccaaagaaagacagcgcttttgtagcctaaatagcagccttaaaacyattcaacttcccatctaactttgggagaagggtatattttggggtttgtacatacagatgttagaataggcaaaaacagttgagattcactgacatatag

SEQ ID NO: 25500 - DNA, 201 bp, Homo sapiens
tggacatcttcaaacaaaaataatagaataaatgacccacccactaggtgcccattttccaacttcagtgattatcagagaatgttgcatattgtctgctsccttgtttttaagcaaattccagaaagccattcatttcactggttaatgtgttggaatgttttaaggcagattccagacactacatttcatctctaagtt

SEQ ID NO: 25501 - DNA, 201 bp, Homo sapiens
tagtcccagctactcgggagaccgaggcaggagaatggcgtgaacctgggagacggagcttgcagtgagccgagatcgcaccactgcactctagcctgggygacagagcgagactcttgactcaaaaaaaaaaaaaaagttcatatggtgagttttatgttatgtgaatttttatctcccctaggatgcatgagtgagcat

SEQ ID NO: 25502 - DNA, 201 bp, Homo sapiens
gctgcaatctcagcacattaggaggccgaggtgggaggatcacttgaggccaggagttcagaccaactcttgtctccacaaagaataagtaacagaaaatyaggcggctgtggtggtgcgtgcctgtagtcccagctatttcggaggctgaggcggaaggatcacttgactctgggagtttgaggctgcattgaactatcc

SEQ ID NO: 25503 - DNA, 201 bp, Homo sapiens; identical to SEQ ID NO: 5437

SEQ ID NO: 25504 - DNA, 201 bp, Homo sapiens
aaggaagactagaaataatctaaggctggaatagtggttccacagttaatcaggaacttagactcctgtgtttctcatccccatcgtggagcttggcttcwagtcctttttttttttttttttttttttttgagacagtttcgcttttgtcacccaggctggagtgcagtggcatgatctcagctcactgcagcctctcct

SEQ ID NO: 25505 - DNA, 201 bp, Homo sapiens
aaaactgaaagactgacactctacttggcattaagacttactgtaaatctgcagttttcaagacagtgatgctggtgaaagaacagatcaatggaacaacwtaaagagcccagaaacagactgacacaaatatattcaaacgatctttggcaaaggagcaaagagaacttggtggacaaatttatcattttcagccagtgg

SEQ ID NO: 25506 - DNA, 201 bp, Homo sapiens
ataagtaggtcaatagtggagccaggaaaataagtattacctaagtgttgtcattcacatgttacatatatggtgatagtttgtggtgtgtataaaacttacttgacaaaaagcgtggaacttgacttttcaggtttttctctgtcagtgcagttgctatgttgcagaagatcaacagtatcagtggctggaaaaggtaag

SEQ ID NO: 25507 - DNA, 201 bp, Homo sapiens
tcaaacgatctttggcaaaggagcaaagagaacttggtggacaaatttatcattttcagccagtggtagaataactggacattcacatacaaaataaatcytagacaccagtctttcacaaaaattaactcaaaatgaatcataagcttaatgtaaatgtaaaacaaaaaaaccataaaacttctagaagataacaaaggg

SEQ ID NO: 25508 - DNA, 201 bp, Homo sapiens
catggtgaaaccctgtgtctactaaaaatacaaaaaattaggcgggcatggtggcgtgtgcctgtaatcccagctacttgggaggctgaggcaggagaatygtttgaacccgggaggcagaggtttcactgagccaagattgcggctactgcactccagcctaggcgacagcgagactccatctcagaaaaacaaaacaaa

SEQ ID NO: 25509 - DNA, 201 bp, Homo sapiens
agatctagtgcagtttatttcactggttgaagtgttagagttgtaaaatacatctagaaatgcatttaatctaaaagttaaattttttatgccatattttycttggtttgtttaggagcgctgcttgcctgtttttgtattgtgcttttggcttttttttatctgtatcatatggtattttgtagattaaaaaaatgttaa

SEQ ID NO: 25510 - DNA, 201 bp, Homo sapiens
agctgttttataacactcattctatattctttttttttttttttttgaaatggagtggcacggtctcagctcattgcaaccttcgcctcctgggttcaagygattctccttcctcagcctcccaagtagctgggattacaggagcctgtcactacgcccagctaatttttgtattttttatagaggcatgatttcatcctg

SEQ ID NO: 25511 - DNA, 201 bp, Homo sapiens
acaaattgcttatctgtctggaaatttgatttagaacaggtgacttaaacatattctttcatggacagttaggtttagaattcctttttttttttttttttgtgacggagttccgctcttgttgcccaggctggagtacagtggtgcgatctcagctcactgaaatctctgccttccaggttcaagcgattctcctgcctc

SEQ ID NO: 25512 - DNA, 201 bp, Homo sapiens
tcttcattttgatttgtttgagggagaaaccaacttttttggtaaagagtatttaataggccgggcacggtggctcatgcctgtaatcccaggactttgcsaggccaaggtgggcagatgactcctgaggtcaggacttcaagaccagcttggccaacatggtgaaaccctgtctctactaaaaagacaaaatttagtttg

SEQ ID NO: 25513 - DNA, 201 bp, Homo sapiens
ttttaaaatcaattcaggattttagtttttgtctttgaaaagttatatcagtgtagatactgaatattttattagcaaaatgggagaaattactggaaagrtttagtgggagagttggaatttgtactgtattatcagagtgagatggagtaagaagaggccattcaaaaaatagaggctaccacaggaaagacaaaaaaa

SEQ ID NO: 25514 - DNA, 201 bp, Homo sapiens
acttttattgaagtgtactttatatacaaaattcaccaattttaagtgtacaattcaagtgtatgtgtgtttattttttgagacagggtcttactcgtttscccaggctggagtgcagtggtgcgatcttggctgactgcaggagggtcaagtgatcctcctacctcagcctcctgagtagctgggactgtaggcgtgtgc

SEQ ID NO: 25515 - DNA, 201 bp, Homo sapiens
atctgtatagccaacccctgtggcacaagtttccctgtgtaacaatcctgtacttgtacccttgaacttaaaagttaaaaaaaatatatttctgtaagcartggtctgaacaggtggtctcttcaggctttacttttgttgtgaagtctttaacacagtccaaaaagcaggtttctctaagtttattgtaggtcccaagaa

SEQ ID NO: 25516 - DNA, 201 bp, Homo sapiens
ccatttgtcatgtgggattattttatccattttgacttgactttttaaaaattttaatttaaaaattttaactgtatgtaagcttaaaattttgaatattrtcaggttcaatttgtgttttcagaggcctcagggttaagtttgcctccttgaagaaatagactgaaaactgcaatactggcactcttatttttaattttt

SEQ ID NO: 25517 - DNA, 201 bp, Homo sapiens
ctggcgctcccggctgcttcggcttccccggctccccgggctcccccggctcccctggccccgtccccctcccctccccgccggggcttgacctgactccytgtcttcccgcagagctgtacttccttatcgcccggtacctatcggcgggcccgtgtcggagagcggcccaggtgagtgcgggcccgcgggcggctgcgg

SEQ ID NO: 25518 - DNA, 201 bp, Homo sapiens
gtaggaaaatgtcagaattattctctaatgtttttactacattaaaggttttcagagccagtcttgcttcttttctttttttttttcgagacggagtttcrctctcgttgcgcaggctggagtgcggtggcatgatctcggctcactgcaacctccacctcccgggatcaagcgattctcctgcctcagcctcctgagtag

SEQ ID NO: 25519 - DNA, 201 bp, Homo sapiens
gactgcgccacggcactccagcctgagcatcagagcgagactcttgtttcaaaaaaaaaaaaaaccaaaaaaaaaagtatttaatactacagtgttaaaakttcctgactgagtaatgttttgaggaatgaagtattagatatgactgaaaagttcatttaattgtcttatgatgcagtaggttaataattaagcatgggg

SEQ ID NO: 25520 - DNA, 201 bp, Homo sapiens
agcattgttgtcacagctgtgaatgatcatgtcctcaaagtgtggaattcttacactggacaactgcttcataacttaatggtaggtaatttctggtacartgtaacaaatgagattttttgaaatatgattgtaattttgaagctataaaaataatatattgaacaagttgtttctctcatgtaaactatgaaatgatta

SEQ ID NO: 25521 - DNA, 201 bp, Homo sapiens
ccccgccctggcgctcccggctgcttcggcttccccggctccccgggctcccccggctcccctggccccgtccccctcccctccccgccggggcttgaccygactccttgtcttcccgcagagctgtacttccttatcgcccggtacctatcggcgggcccgtgtcggagagcggcccaggtgagtgcgggcccgcgggcg

SEQ ID NO: 25522 - DNA, 201 bp, Homo sapiens
tagtttggaaaatgcccatctaatgtgcattttctcatgttttctaaggaccttaaaagtaaaactactaagcttgagttaaaactgtatggcaaaaatgytaccttctttttaagcctttttttctttttgctttaaatccttctggaaacttgacggaatgcccattttgttgatattgtccttatttaggtgttgatt

SEQ ID NO: 25523 - DNA, 201 bp, Homo sapiens
acccaggaggcagaacttgcagtgagccgagatcgcgccactgcactccagcctgggcgacagatctcaaaaaaagaaaaaaaaaagttagcagcatgatytcagagcagaaaccctgccttaccgaagcatcagttcacttgaggatttggggaaattaaacttaaaaaaaaatttattgaatgcctcctatctgtcagg

SEQ ID NO: 25524 - DNA, 201 bp, Homo sapiens
ggaggcagagagctgagcgaggttcgcctccccgggcgggacacgagctccggtcctctcttggcgcaaacccccgccccccgcggagggactacttttcrtctcctgcggagggactacttcctcccccgcggaggcgtcggtccaggcggcgcgcacggtatggcggcggcggcggcggcggcggcgcgcgcctgagaa

SEQ ID NO: 25525 - DNA, 201 bp, Homo sapiens
ctgctttagaaatccccgctggataaaataatgttctactgtaatcttgagtgtgggctgtctggcgtacttagagaaaaatgcagtgttcttaaaaatcrgtttttatccttacagcatttactcttacactctgttgagtgtctagttataccttggaacatggccaagatttcagtataaatctttttcctttgagat

SEQ ID NO: 25526 - DNA, 201 bp, Homo sapiens
acccgcccgctgctgggccacccggcgtcgcgctgccgcctcacaaagcccgggcagccgcctcattgcgcgcagggattcggaccacgcgccctcccctmccccactcgctgctgcggcgcccaggtctttgcctccgcgtcactttctcctcatcgagtccccggaggcagagagctgagcgaggttcgcctccccggg

SEQ ID NO: 25527 - DNA, 201 bp, Homo sapiens
attgtatgtattgctttattgtcaaagggaaacatacagatatcaggtgggactttcatttggctgcaagctgaaaatctcgttatatggttccttaaacmcacataaagcagtgaaattgacaacctgtgaaaggttgagtctgctttagaaatccccgctggataaaataatgttctactgtaatcttgagtgtgggct

SEQ ID NO: 25528 - DNA, 201 bp, Homo sapiens; identical to SEQ ID NO: 5434

SEQ ID NO: 25529 - DNA, 201 bp, Homo sapiens
tagaagaaaagaagaaagatgttcagatgtcaaaaagggcatttctagtcaaaggaacttactttaagtagccatgtggcatttctgcttataactcattkaccagaatgttgtcatttgaccataataagctaaggaggagagtaggtaacacagtatctatttagagcagcaaagaacctggataaaaattggtattgt

SEQ ID NO: 25530 - DNA, 201 bp, Homo sapiens; identical to SEQ ID NO: 5435

SEQ ID NO: 25531 - DNA, 201 bp, Homo sapiens
tcaagaattggttaaaatagttggaatacgatatgaagttgggccccctacactctgttgcctaaaactagcatttatagatccagcaactggaaaacttmtggacaaatctttctctattaggtatgtattattttttaaaatggaattacttaaatttaaatttgccattttgctgattgaatgattagcatgcccttc

SEQ ID NO: 25532 - DNA, 201 bp, Homo sapiens
aggcgctccacctgcctcagcctcccagtgtgctgggattacaggcatgagccaccacgcccggctccgtctttttttgtccatgcacacacacacccacktttgtcctttcagtattattttgaaagaaattctagatgtaatattatttttgtccataagcgtataagtgtgtatttctaaagataagaaattttaaaa

SEQ ID NO: 25533 - DNA, 201 bp, Homo sapiens
gaagtctttgatggcaaagctgtggctcattccttttttttttttaatctccatcacttgttagtgcttgctgaattaacagatgtaaggagttaacttamtgttgcactagctcaaacatatttagattgttacctcacaaatagctttttttttttggagacggagtctcgccttgtcgcccaggctggagtgcagtgg

SEQ ID NO: 25534 - DNA, 201 bp, Homo sapiens
caagaattggttaaaatagttggaatacgatatgaagttgggccccctacactctgttgcctaaaactagcatttatagatccagcaactggaaaacttayggacaaatctttctctattaggtatgtattattttttaaaatggaattacttaaatttaaatttgccattttgctgattgaatgattagcatgcccttcc

SEQ ID NO: 25535 - DNA, 201 bp, Homo sapiens
tatgcctgcgttggcctcccaaagtggtgggattacaggcgtgagccacggagcctggctgagaaatattcagattctttcctcatttttaactgttatcyattagtttgggatatcataatttcttctgttcccttaaatggtctctgtatttcggggcttttctggattttttttgtttttttgctttattttctttta

SEQ ID NO: 25536 - DNA, 201 bp, Homo sapiens
caacttctgacatcatggtcccatcctctccaaagtcaccccaagtagtcatactaaacttctggttccttaaactagaaatcatattcatgtcttggccmtctgttgtttgtatgtgcgaaatccctttccacacattgtagcctggataacccaaacttccctaacatttcccccacgcacaggcaagctgatcttctg

SEQ ID NO: 25537 - DNA, 201 bp, Homo sapiens
cacctactctttgtttcctattcaccagtactccccttggttcaggttctgcttgctttcctggaactatttctgtagccacctaatatttcctttacctygtattgtcagtgtcctagttcagaagcagatactatatcattaatcttcttcaaagaaacctttgacgcctcttcattggcaatgggataaaaaccattg

SEQ ID NO: 25538 - DNA, 201 bp, Homo sapiens
ttaatcttacgcccttgttacaaaatgaaatgcacaactccttggtcaatcattgaaagtttaaattctcccctcttgatgtctttgtcatttggtaacaytggtaatcttgcagcatcagatcactgtcccacagtcatctatgcactgtaacttcaaataatcaagttgttgcaagcagttactcatcttaacaatcta

SEQ ID NO: 25539 - DNA, 201 bp, Homo sapiens
aactttcccacatttatataaaaagttagcagcatgggccgggtgcagtggctcatgcctgtaatcccagcactctgggaggccgaggtgggtggatcacragggcaggagatcaagaccatcctgggtaacacggtgaaaccccatctctactaaaaatacaaaaaattagccaggcatggtggtgggcacctgtagtcc

SEQ ID NO: 25540 - DNA, 201 bp, Homo sapiens
tttaggttcatccatattaccacaaacgacggaagaatattctgtttataatgttccattttgtgtgtgtgtatacacagacacacggcattttctttgtycattcatctgtagatgggtgtttaggttgattcatgtcttgactattgtgaatggcactgcagtaaacatgggagtgcaattatctcttcaatatactga

SEQ ID NO: 25541 - DNA, 201 bp, Homo sapiens
cttgattaaaacattgttaggcactactcccaaagtttctgatttcaaaacgtctggggcgagggtatgagtatttcatcactgatagagaattgatcatmttgggatgtaagttcttccatcagaaggcacaaaatgtctagtgttttttgtattactcactgatgatcattgccttacatccgttagttattagggaca

SEQ ID NO: 25542 - DNA, 201 bp, Homo sapiens
agtggttctctttaatgtgcatgagaatcacctggagggcttgattaaaacattgttaggcactactcccaaagtttctgatttcaaaacgtctggggcgrgggtatgagtatttcatcactgatagagaattgatcatcttgggatgtaagttcttccatcagaaggcacaaaatgtctagtgttttttgtattactcac

SEQ ID NO: 25543 - DNA, 201 bp, Homo sapiens
gccagttcttcttatctcataagcagagggagttttagtgttttatagtaggttgggtttctttctttctttttttttttttgtcattttgtaaacttaaraatttttgttaattgacttctttaactctttggggcatgcagtttcagtagaaggttactaaagttttgttaacatgttacacattgggtaacttttcaa

SEQ ID NO: 25544 - DNA, 201 bp, Homo sapiens
cgcctcccaggttcaagtgatttcatacctcagcctcctaagtagctgggattacaggcgcctaccaccacacccagctaatttttgtgttttttttttttagtagagatgggatgtcaccatttccgccaggctggtctcgagctcttgacctctagtgatccacctgcctcggcctcccaaagtgttgggattacaagc

SEQ ID NO: 25545 - DNA, 201 bp, Homo sapiens
tgaggtgtaagaggctctcatttttgccaacatgtccattaatttttttaaaactgaattatctacagttaaactctagagatggagtcccagatgcctcmtgtaatttagtggtttttgttttatttttgtggttgagaaattattggaccagacctgttatactacactttaattcattttgcttccccatttttgcgt

SEQ ID NO: 25546 - DNA, 201 bp, Homo sapiens
taacattggcataatttacacaattatactaggatctaaaatgatcagaaggttgaaaagtaatttcagatttcacactgaaaatgttctggtatacccarttattttacccttgatatcataacaacgtagacttaaatgggaagacttgacactgttttgttaagaaataaaaaattcatatacactttgctttataac

SEQ ID NO: 25547 - DNA, 201 bp, Homo sapiens
cttgcttaccatgtagctttcttgtggtgaaactctaaagttatttccatttacccaaaagcaaacctcagtgtgtacatatggaatggctgggattgaaytgtgtgaggaatacacagattcttgccttgtttggagaccacttctggtgggtacccactaaggagttgctcctggacagtgtatttctttttcctcctc

SEQ ID NO: 25548 - DNA, 201 bp, Homo sapiens
caaaaatagtcattctgaatggtgaaagtttcttttatttttcattcagacagtgcatgctgcccctttctaatctaagaaactttgttctcttccccttsgtagaatttgcggaggatgactccagcagagcttgcaaatatggagcatttatatgaatttcaccctccagtttggattactgacaccacacttagaaaa

SEQ ID NO: 25549 - DNA, 201 bp, Homo sapiens
tttccaacacttgcttaccatgtagctttcttgtggtgaaactctaaagttatttccatttacccaaaagcaaacctcagtgtgtacatatggaatggctkggattgaattgtgtgaggaatacacagattcttgccttgtttggagaccacttctggtgggtacccactaaggagttgctcctggacagtgtatttcttt

SEQ ID NO: 25550 - DNA, 201 bp, Homo sapiens
gtataccattttacatttccagcaacagtgtatgtgggttccaattttttcacatcctggatacttttgttttttttaacttataggaagtattattgtgrtttcgatttgcctttctctgatgcctaatgatactgaacattttttcctttgtttattggtcatttttatatctttgtagaaatgttcaatttctttttt

SEQ ID NO: 25551 - DNA, 201 bp, Homo sapiens
ttaccagctatatgcccttgggccatacttcctctgcgcctcagcttgagcctatcaatgacatctaagagctgtttatccagtcaggagttgcttgccayggcataagatgttggttcccttgaaaatgcaaccctatagcttaatgtcacccactgttaagattttccaacacttgcttaccatgtagctttcttgtgg

SEQ ID NO: 25552 - DNA, 201 bp, Homo sapiens
atgaaaagctaccaaaatatgtcacagggaattgaaaactagaacaacaattagatacatctattagaatagctaaagtccaaaatggaaaacatttacaytgactttttattaactttactcagaatggcctgttgtatcactttctttgctaatggtggtagtgttaaatcttacggatgttctctttttgtcttatgc

SEQ ID NO: 25553 - DNA, 201 bp, Homo sapiens
aatagtaactgtagtacctgtttcacaggtgtacaaatatatgttcagtgtgtaatgctatccagggagcttgtgtattgagttagaagtaggatggttcrttcttttatcagttcttggatttttgttagaaatactaagttttacccaggctgtgtcatctggtgtacacattcataaatgatgttaagacattgatct

SEQ ID NO: 25554 - DNA, 201 bp, Homo sapiens
agttcacttgaggatttggggaaattaaacttaaaaaaaaatttattgaatgcctcctatctgtcaggtgtaaattttttattttgatgtaatttcagacwtgaaagttctaagaataataaaaattcctttgtgtttaccaccctgactgttatcactctcctgtatgtatgaatatgttttaatccttttgagagtgag

SEQ ID NO: 25555 - DNA, 201 bp, Homo sapiens
atggtagtcacacctataatcctagcactttgggaagctgagccagaggattgcttgagcccaggagttcgagaccaacctggacaacatggtgaatcccygtctgtagaaaaaatgcaaaaactagccagttgtggtggtgggtgcctgtagtcccagttacctgggaggcagaggtgggaggatcaattgtgcctgaaa

SEQ ID NO: 25556 - DNA, 201 bp, Homo sapiens
atctctttatgggcatttaggttgtttcttatgctttgctgttataagtgatgtgataaataactttatgcatgttttcagattgttggagaataatgctrtgacttgggcagttaaatttagaatttatatttctcagttcaaaaatgtttcttcaatatatagtattttaatataaatgcttggtttactagcggggca

SEQ ID NO: 25557 - DNA, 201 bp, Homo sapiens
gttagagttgtaaaatacatctagaaatgcatttaatctaaaagttaaattttttatgccatatttttcttggtttgtttaggagcgctgcttgcctgttwttgtattgtgcttttggcttttttttatctgtatcatatggtattttgtagattaaaaaaatgttaatgaatgttagcagagaaatgcctcagacttgat

SEQ ID NO: 25558 - DNA, 201 bp, Homo sapiens
agattaacggcttgggtatggtagtcacacctataatcctagcactttgggaagctgagccagaggattgcttgagcccaggagttcgagaccaacctggrcaacatggtgaatccccgtctgtagaaaaaatgcaaaaactagccagttgtggtggtgggtgcctgtagtcccagttacctgggaggcagaggtgggagg

SEQ ID NO: 25559 - DNA, 201 bp, Homo sapiens
aatttcagaggctgctttcaggtttttgtggtatttagtcctctacaggaagacttttgttggctttgaatcttttctctgacttcttggtgaatatgtasagtatctttttaaactggttatttttcaaaaatgggaaattctgaccattgttaatgtattttaatttgtaccctaacgaaatttttttttgttttctgc

SEQ ID NO: 25560 - DNA, 201 bp, Homo sapiens
aaaaacctgttggaaacatattttattactttctttcctacttgataacatttctgctgtaaccaaaccttaagatcctgtgggaatggcttgtttgtcartgggcaaaatttgtatgttgctgattggtgtgtaaaatgttaaatgcaacaacctagagtttcagaaaggcagcttggcaatatatatattatcactctt

SEQ ID NO: 25561 - DNA, 201 bp, Homo sapiens
cagcaagtacaaataccctgaggcagccgtgggccaggtcacgccacagtgaggctggagcactatgagaaggggagcagtcaggtgagaggtaagacaarccagagagaggccagatcgtgtggacttggccttttcctctgggtctgatgggagcctctggaggattttgagagaggaaggacaagtccgtctttagtt

SEQ ID NO: 25562 - DNA, 201 bp, Homo sapiens
tagaattgggggctgattagcattttctgtttcattattctctttcattgtcagatggtgttagatgcctatgggtaggtgtgggtagggccaggcagaarattgactaccatatttcaccctcgtttttttttcagtgattatttccatatcactgaaattttacttttattccacttatttcagtaaactttcactggt

SEQ ID NO: 25563 - DNA, 201 bp, Homo sapiens
ggactcttggggcagagggagagctaaagtcttgttgaaggcttaaaaaaggtcttacctcccttttttcccctttcttaagacatagagaagaaattaartctcagggatttttctccacattggaaatgacccatagttgctctgttccagttagagactctggggaataagattttagtgaaatatatcgagtatggt

SEQ ID NO: 25564 - DNA, 201 bp, Homo sapiens; identical to SEQ ID NO: 3168

SEQ ID NO: 25565 - DNA, 201 bp, Homo sapiens
acacgatgccccgttcctgtagcatggggatcctctcctaaagcagcctccattgctcctcctgaaagtgtttccttccactcacccttccgctccagagwctttgactatcctgctgcctttgaggggagccttgagccaaggaggccgtatctccaggtatgttatgggtcaacgagtttctgcagattgtcttctgat

SEQ ID NO: 25566 - DNA, 201 bp, Homo sapiens
gactcttaattatagtatatacaaacatgtaaattccggaagagatataagtgacctataaatatattttgcttacggcttggtacttactgattatgcaractttcttggtaggggccgggggacggtgggcagggcaggcattttctccctaggtcacccaggctggagtgcaatggtgtgatctcagctcactgcaac

SEQ ID NO: 25567 - DNA, 201 bp, Homo sapiens
tctttgtgcctttttcctttttcttttttttttcttctttgggattgatgatttttttttgtgttccatatgacctccactaatgtcttactagcaatacstgtttatttgtatgtaatggttgctttagggcagaaattgtcaatgtgtggtttgcagacccataggtgtatctgcaacctttcatggagtctgcaaggt

SEQ ID NO: 25568 - DNA, 201 bp, Homo sapiens
aaacaggctgctgacagtgggttgaagcaggctggccacggagggcacggggcacctgggaaatatatggacacgatgccccgttcctgtagcatggggaycctctcctaaagcagcctccattgctcctcctgaaagtgtttccttccactcacccttccgctccagagactttgactatcctgctgcctttgaggggag

SEQ ID NO: 25569 - DNA, 201 bp, Homo sapiens
gttaatctttaatcatttatcttgtagcttattatccttttattatatactaagacaaaaatttatgaaattgtttataagaagtaaaagaagccttcacyttggattgggttgttagccttcattggagcacttggagaactaatgcttagaagaactttgaagacttttttctaggctagttgtatccaaaatcaattt

SEQ ID NO: 25570 - DNA, 201 bp, Homo sapiens
actcactgtagggttgataagataggcacatgggttggatttctttatttttgtattgatgagagattgtatacattgtatagccagccatctaaataagyttacatgttgtgtatttttttgttagggacttatcttccgaagaggaaaggtttatgaaacctaaagtaacaatgatagcttggaatcaaaatgatagca

SEQ ID NO: 25571 - DNA, 201 bp, Homo sapiens
ctttataacctctatatagtgagtcagaaaatgtaactgttgagataaacttagttttagggtaaatgatctttcttttttatattttaatatggaaattwgatttgttcaggtatttgttataaactggatgtttaaaccttaccatttttatttcaggtggtatgtttttagccacaggtagtactgatcatgtaatca

SEQ ID NO: 25572 - DNA, 201 bp, Homo sapiens
tatttcacttaacataatggcctttaggttcatccatattaccacaaacgacggaagaatattctgtttataatgttccattttgtgtgtgtgtatacacrgacacacggcattttctttgtccattcatctgtagatgggtgtttaggttgattcatgtcttgactattgtgaatggcactgcagtaaacatgggagtgc

SEQ ID NO: 25573 - DNA, 201 bp, Homo sapiens
ttttattggatatggctaccagaatctcagggtaagttgagattgttagaagtaggtgcatcataggtgttcgatctgtctctctctctctctctctctckctctctgtgtctctcagtggttattttgttgaggggattatagctaccttctattacgaagagctgtggtataagtgaatagctgcgtactgcatatcag

SEQ ID NO: 25574 - DNA, 201 bp, Homo sapiens
taaaatgttataagataatcttaaatgaatttggcttaattctttactttgaatgaatataccccaaatttatatgaaaacacagcattctgcagagattwatatgaaatttcacattttgaatgttaacaaaaacttttaatggctaagatagtcacatactgtatacttgtgcaatccagtggttttacatgttgagca

SEQ ID NO: 25575 - DNA, 201 bp, Homo sapiens
aagtaccttgaatttgcccaacacagtagacatgggatggtttcctttgggaaaactgttacgtaaggtcattctagaaaggctagggtggtatgtagtgscattatcattattgatgtggaaatacattaattactgtcaaggatatacaaaatcatacaatcaatatgtaaaaagtgctataaaagggctaaacattaa

SEQ ID NO: 25576 - DNA, 201 bp, Homo sapiens
ggtcttgatctcctgacctcgtgatccacccgcgtcgccctcccaaagatctgggattacaggcgtgagccaccgcgcccggcctccattttacttcttamtattattctaccctcaacaccaatcaatctagttagaattattctctcttctgtgtgttttttttttgtaattacatagatagctgttttataacactca

SEQ ID NO: 25577 - DNA, 201 bp, Homo sapiens
atagctaccttctattacgaagagctgtggtataagtgaatagctgcgtactgcatatcaggtgaacagagacatccaggtaaatttatccttacgttgtrtagcaaagaataacatgtactttttctatggttcaaagcattgacctccttcttagatgttgcatttaaaagcttctacaagtaaaaaagataaaattaa

SEQ ID NO: 25578 - DNA, 201 bp, Homo sapiens
gcactcgggcgagtcagcaagttttgatgctcctctcttttggtctttcctccccattctagggggagaagggtggagctgtattccagttaagcttcttscttcttagattaactgggttccctcttggctttttattacatcttgcctcttctttttcaatcaatactgtatattgctgtaagacaaatcgtttggctg

SEQ ID NO: 25579 - DNA, 201 bp, Homo sapiens
acatgtatatgtatgtatacgtatatatatacatgtatacatacatacatatatatatatattttttttggtaggtgaaggagtctcgctgtgttgtcccrgctggagtgcagtggcgccatctcagcctgctgcaacctttgcctcccggattcaagcgattctcctgcctcagcctcctgagtagctgggattatgggc

SEQ ID NO: 25580 - DNA, 201 bp, Homo sapiens
tcacaagtctgactaccaagaggtttgggcactattagcgggcatgtcagaagctgcctttcacatgtgcacctaggtggtttccttttttttttttttttgtgggagccttgctctgtcacccaggctggagtgcagtggcgccatcttggctcactgcaagctccgcctcctgggttcacgccattctcctgcctcagc

SEQ ID NO: 25581 - DNA, 201 bp, Homo sapiens
ttggctggcaaacaagcattaccacctgagttctgtctgctgtcagatccgtgggggcattcgattttcataggagcaggaacctttttgtaactgcatgygagggatccaggttgtgtgctccttatgaggatctaatgcctgatgatctgaggtggaacagttttgtcttgaactctgcccactcactggccccagtcc

SEQ ID NO: 25582 - DNA, 201 bp, Homo sapiens
gtctacatatatacacatgtatatgtatgtatacgtatatatatacatgtatacatacatacatatatatatatattttttttggtaggtgaaggagtctygctgtgttgtcccggctggagtgcagtggcgccatctcagcctgctgcaacctttgcctcccggattcaagcgattctcctgcctcagcctcctgagtag

SEQ ID NO: 25583 - DNA, 201 bp, Homo sapiens
ggctaattttttattttattttatatatatgtttatatacgtatgtgtatatgtccatatatacgtatacgtgtatatatacatatgtacatacatatacktatacatagacgtatatgttgacatatgtgtatatatacatatttatatacatgtatttatatgtatacatatatgtctacatatatacacatgtatatg

SEQ ID NO: 25584 - DNA, 201 bp, Homo sapiens
gtggtgcgatctcagctcactgaaatctctgccttccaggttcaagcgattctcctgcctcagcctcccgagtagctgggattacaggcgcccaccaccaygcatggctaattttttgtatttttagtagagacagggtttcaccatgttgatcaggctggtcttgaactcctgacctcaggtgatccacctgccttggcc

SEQ ID NO: 25585 - DNA, 201 bp, Homo sapiens
gtagagtgattgtatttctgagtaaaatctctctcctgttcctgttgcatcatttttttttgttttgtttttggtagagatggtttcttgctgtgttgccyaggctggtcttgcactcctgtcctcaagtgatcctcctgcctcagcttcccaaagagctgggattacaggtgtgagccacagcacctggtctgcactatc

SEQ ID NO: 25586 - DNA, 201 bp, Homo sapiens
cagagtaagagtctctgtgttttgtatgtataaggatcttaagtggattggaaacatagatcgagactgtaagaatattaaaagtaaaaaggaaaatctgrttgtgagactgctgacagcataagaacatttggatttgaagaaggaacacatgagctatcagattaagaccacaaataatgttacagagccagtggaggc

SEQ ID NO: 25587 - DNA, 201 bp, Homo sapiens
ttagaaatcatagttcatactgtttcttttatgcaggatttagctaatccatcttagaaaaaaaaagcaagactatttttaatatccagaaatacatattrtagtcattggcgactggccttgagggggcataacaaaacatggttgtatgtcagtgatactgcaattgatgaaatgttgctatttagaaacagtaaaagg

SEQ ID NO: 25588 - DNA, 201 bp, Homo sapiens
attttttccagtgtaattttccactgtgtaatagaggttagaacattaaagataagtgaataaattaagactattataaagaaaagagcttctgctactgytcatatagcttcagtttttgcctttcatcagttgatgtttatcataatctcctcaaattttataagcaagtggggattaatgggagtaggcatcaataga

SEQ ID NO: 25589 - DNA, 201 bp, Homo sapiens
cagaactggggttttagctgaaggcttgacgggaggaataggcttccaagctcatgtagttttggcaggattcggttcctggagggttgtttgactgagggcctcagtttctacctgactattggccactctcagttcctcgcccttttggtctttccagtgtgatagcttgagttatcaaaagatgaaagctgacgaggc

SEQ ID NO: 25590 - DNA, 201 bp, Homo sapiens
cctcccccagaggcaggttctctctctgttgcccaggctggagtgcagtggtgtaatcatagctcgcttggcctcaaacttatgagctcaagtcatcctcytgcctcagccttctgagtagctgggactataggtgtgtgccacgtcatctagttagttcttaattttttgtagagacagtgtcttgctatgtttcacaag

SEQ ID NO: 25591 - DNA, 201 bp, Homo sapiens
gagaggtcatggaatagcctttcactagataatgtgctcttgttagagtatgcttttcatagctaactttgtaatatttctgaaattggttaagttatatsaaaataacttatgtttcatgcatagtttaaaaatttcatttctggaaaaatgtgttgagagcaacatatatgacattattgtatttttatagaagacagt

SEQ ID NO: 25592 - DNA, 201 bp, Homo sapiens
aaaaaaaaaaaaaaacacacaaagctttttaacaaaggtttgttgacagtgacttcagtagctatggaattctgattcatagtcctttttttttttttttcggcacagtaaagatgttctactgccttatgccttcctaatgttggaaatttagcagtcttattgctcctttgaaaataatgttgtttttggtctggttgc

SEQ ID NO: 25593 - DNA, 201 bp, Homo sapiens
taagaacttcttcacatttttttcttagttttttttttttaaacatttattaaatgaccacttggttgctaagaacttttattagctacatggtaaatgasttctggtgtttatttcattaggttcaatttatgatgtttattttgttagccttgttcttccagtcctccagtctgcctttctctgatttctggtagtaat

SEQ ID NO: 25594 - DNA, 201 bp, Homo sapiens
aagtaaaacaagaaaggagaaaaaaacagtactaagatgatactgggatagtaaatgtcaatgtaaacataattatattacttgcaagtacattaaatggkctaaagcaagtctcaactgaaataattctaagtatattctctgacaacagtgtaattaagccagaaattactaacagccagaattaataacagataatcc

SEQ ID NO: 25595 - DNA, 201 bp, Homo sapiens
ttgaaaagttatatcagtgtagatactgaatattttattagcaaaatgggagaaattactggaaagatttagtgggagagttggaatttgtactgtattawcagagtgagatggagtaagaagaggccattcaaaaaatagaggctaccacaggaaagacaaaaaaagtagagaaatatggcatggcatgtccatagactg

SEQ ID NO: 25596 - DNA, 201 bp, Homo sapiens
tcaccacatttgccaggctggtcttgaactcctgaccattagtgatccacctgtcttggcctctcaaagtgctgggattacaggtgtgagtcactgcaccyggcctctttatttctttttagttatatatccttttattattcttttggtggtttccctagaggtttcaatatacattaccaatatacattactttacatt

SEQ ID NO: 25597 - DNA, 201 bp, Homo sapiens
aatagtttggcaaggtagcacacgcctgtagtctcggtactcctgaggttgagggaggattgcttgagccaggaggttgaggctgcagtgagccgttatcrcaccagtgcattccagcctgggtgacaaagtgagactgcctcaaaaaataaaaataaaaaaagagacttatgcctgaaacattgggaataagtgagacag

SEQ ID NO: 25598 - DNA, 201 bp, Homo sapiens
agtaatctgtttttcttagaaattttgttaagttgttagataactttattttttttctttgtatgtttaaatttctatttaactacatttaaaaataatayttatatagttaatacttggtctttttggcctttggaagattaatttcccagaggcactgactttttatctttggcttctagagcactggtaagtataaaa

SEQ ID NO: 25599 - DNA, 201 bp, Homo sapiens
ttttttttttttttttttggagatggagtctcgctctgttgcccaggctggggcgcagttgtgtgatcttggcttactgcaacctctgcctcctgggctcmagcgattctcctgcctcagcctctcaagtagctgagattacagtcacctgctaccatgcccggctaatctttgtagttttagtacaaatggggtttcacc

SEQ ID NO: 25600 - DNA, 201 bp, Homo sapiens
gaacaataagaccttctattttaattattcttggtaaatagtggttttgtttctccagtggttttcatttgccaaactcatgacagatggtttaacagggkggctactgctcccagggaactgtcagataaatcctcatttccagtgcagcagctgttggcagtctttcatcaaaagtccatccatctggagttacctatt

SEQ ID NO: 25601 - DNA, 201 bp, Homo sapiens
ctcccaaagtgctgggattacaggtgtgaactactgtgcctggctggctgtgctaccttaaaagagagtagttactagtttccataggctcacccaacaasaagaagttatttgtatctaagggataaaagttgagtgacttgtttattttcagatcatatgtatccttatggatttttgcaagcttactgtattgattcc

SEQ ID NO: 25602 - DNA, 201 bp, Homo sapiens
ccaactcattgctattttaaagtcaggtttaccgaagtgtaatttacatacaataaaattctctctttttagtaaacaggtcgatgagttttgacaaacayatcgatgtcatcacagtcaagatatggaatatttcaattaccccaaaacattatttgaaactactttgtactcagcccctccttccacctccagcccctg

SEQ ID NO: 25603 - DNA, 201 bp, Homo sapiens; identical to SEQ ID NO: 3165

SEQ ID NO: 25604 - DNA, 201 bp, Homo sapiens
agtattcattttcataattgtaaaaactaaaaaaaaaaaacaaaaaaaacccaaaaagctagaaacaacccagacatccaaccacaagagaatggattaakacattgtggtctttgtacccagtggcatattaaactacttaaaaatgaatgaatcacagccatgctcaacaggaatgaacgtttgaaacaattctgtatt

SEQ ID NO: 25605 - DNA, 201 bp, Homo sapiens
tgcaagtttgttatataggtaaattgcgagtcatagggttttggtgtatggattattttgttacccagataataagcattgtacttgataggtagtttccyggtcctcaccctttttccacgttgtgccctcaggtaggttctgatgtctgttgttcccttctgtactcaatgcttggctctcacttgtaagttagaatat

SEQ ID NO: 25606 - DNA, 201 bp, Homo sapiens; identical to SEQ ID NO: 3218

SEQ ID NO: 25607 - DNA, 201 bp, Homo sapiens
taagttttatatacccttaaaaattaatctgttttattggtctacctttttggctgtgggactcttaattatagtatatacaaacatgtaaattccggaaragatataagtgacctataaatatattttgcttacggcttggtacttactgattatgcagactttcttggtaggggccgggggacggtgggcagggcaggc

SEQ ID NO: 25608 - DNA, 201 bp, Homo sapiens
ttcaagaagtggaaaataatacaaatttacattagactttaagatgaagatgcattttgaaatctctagaataacagccaaaagtatagcaagagattgcrtaactactaggcttaatagaggtggggaaatatgtactaataaagaaagtaaaacaagaaaggagaaaaaaacagtactaagatgatactgggatagtaa

SEQ ID NO: 25609 - DNA, 201 bp, Homo sapiens
gattgatttttaataatcatatgtaagctatttgtcttcattttgatttgtttgagggagaaaccaacttttttggtaaagagtatttaataggccgggcwcggtggctcatgcctgtaatcccaggactttgcgaggccaaggtgggcagatgactcctgaggtcaggacttcaagaccagcttggccaacatggtgaaa

SEQ ID NO: 25610 - DNA, 201 bp, Homo sapiens
atatctttgattgatttttaataatcatatgtaagctatttgtcttcattttgatttgtttgagggagaaaccaacttttttggtaaagagtatttaatasgccgggcacggtggctcatgcctgtaatcccaggactttgcgaggccaaggtgggcagatgactcctgaggtcaggacttcaagaccagcttggccaaca

SEQ ID NO: 25611 - DNA, 201 bp, Homo sapiens
taccctgttttgtctgatcattttaattattaacactctgtgatatgctttaatatctagtaggactagatctccaccttgttaaagtttttctggccagycttgtttattctgaaaataggcttattgagatcatattacatataaatgaatgtggagaggttatgattttttcactacggtagtattacctatattttg

SEQ ID NO: 25612 - DNA, 201 bp, Homo sapiens
aatgtgcataactcatcaggtaggtgaacgttattacatgtgtgggatggagcacagggtgtgcagatgcactaaggaatcatgctgacacatatgtcacrtgatgagaggggcagataagcccctctgggcgaaggttttagtattacaatgaggctcagggttaggattggtccttctcctggccttgtgcacatatgg

SEQ ID NO: 25613 - DNA, 201 bp, Homo sapiens
tttgagacccggcctgggcaacttagtgagacccccccccccacccccacccaccccccacaaaaaatagtttggcaaggtagcacacgcctgtagtctcrgtactcctgaggttgagggaggattgcttgagccaggaggttgaggctgcagtgagccgttatcgcaccagtgcattccagcctgggtgacaaagtgaga

SEQ ID NO: 25614 - DNA, 201 bp, Homo sapiens
ggctaggcagacttcccagacaagatttattaagacttatgctgagatttattaagacttgtgcctagcgatggctcatgcctataatcccagcactttarggaggctgaggtgggaggatcacttgagctcacaggtttgagacccggcctgggcaacttagtgagacccccccccccacccccacccaccccccacaaa

SEQ ID NO: 25615 - DNA, 201 bp, Homo sapiens
ctactagtgactaagggcttatcaaaagatcagataccttcttcatttttactttgaaagtcctccaaaaatcgatcaaagtccaggtgtggtggctcacrcctgtaatcccagcactttggaaggccaagacaggagggtcacttaaggccaggcaatgcagtgagaccctgtctctaaaaaataaataaataaataaaa

SEQ ID NO: 25616 - DNA, 201 bp, Homo sapiens
gaatccaagaggcggaggttacagtgagcggagattgtgccactgcactccagcctgggcgacagagcaagactccatctcaaaaaaaaaaaaaaaaaaaatctccaaatatgactgtggatttgttgctctttttgtccttttttgaagctgttattaggtacattcaaatttaggatttttgttttcctattgaattga

SEQ ID NO: 25617 - DNA, 201 bp, Homo sapiens
aaagacaaaaaaagtagagaaatatggcatggcatgtccatagactgttaagggaactacacctgactggtgtagaggttggatgttgaagtgatcaaagwggctgtgtctggctgttatgattggggtagattatggtgatattgaaatccaaggatttcatttaaagtagagaatcaattgaacagccaaaatagataa

SEQ ID NO: 25618 - DNA, 201 bp, Homo sapiens
aaccccatctctactaaaaatacagaaaaattagccgggtgtggtggtgggcgcctgtagtcccagctactcgggaggctgaggtaggagaatggcgtgamcctgggaggtggagcttgcagtgtgcagaaatcgccccactgctctccagcctgggcgacagagcgagattccgtctcaaaaaaaaaaaaaaaaaaaaaa

SEQ ID NO: 25619 - DNA, 201 bp, Homo sapiens
ttactgcttgttgttttcatctctaaaagttggatttgggtgtgtgtttcatgtcttccatttatatatgtttttaatgaacatgcgtaatataataactrcattcatgtctttgctaattctaacatatgtgccaattctggttggttgattaataaatctcttcattatgggtatttcctaatatattacctgtgttat

SEQ ID NO: 25620 - DNA, 201 bp, Homo sapiens
agactcctcctgcattactgcctctggtctcaatttgagaactctttcttggattcaggatccacactgcttgctggatcagtttaacgttcaaggctaaygtttccaagcttggatttttgtcaaagtcaccatttgtaagactgttttttttcagcgacaaaataaatttcattcaagtcttccctgcgcccctcaaat

SEQ ID NO: 25621 - DNA, 201 bp, Homo sapiens
gtgaaaccccatctctactaaaaatacagaaaaattagccgggtgtggtggtgggcgcctgtagtcccagctactcgggaggctgaggtaggagaatggcktgaacctgggaggtggagcttgcagtgtgcagaaatcgccccactgctctccagcctgggcgacagagcgagattccgtctcaaaaaaaaaaaaaaaaaa

SEQ ID NO: 25622 - DNA, 201 bp, Homo sapiens
ttcaaggctaacgtttccaagcttggatttttgtcaaagtcaccatttgtaagactgttttttttcagcgacaaaataaatttcattcaagtcttccctgygcccctcaaatacatgtttgaggacacataccatacagttcaccattgaaagcttatagttcagtggtttttggtatagtacattgtcagttgttcaaaa

SEQ ID NO: 25623 - DNA, 201 bp, Homo sapiens
tcctggctaacacggtgaaaccccatctctactaaaaatacagaaaaattagccgggtgtggtggtgggcgcctgtagtcccagctactcgggaggctgargtaggagaatggcgtgaacctgggaggtggagcttgcagtgtgcagaaatcgccccactgctctccagcctgggcgacagagcgagattccgtctcaaaa

SEQ ID NO: 25624 - DNA, 201 bp, Homo sapiens
ataactacatcacatatttgtttcatacacatttcttgaatgcctaccgtttggggggcatcaagttaggcactaaatagacattatgagaaaagatttakttttttcccctcaatgatgatatacattcagaaatgaataacacatattgtgctcttttgaatttttttttttttttttttttttaagatgtagttttgc

SEQ ID NO: 25625 - DNA, 201 bp, Homo sapiens
gcttatagttcagtggtttttggtatagtacattgtcagttgttcaaaactatggttaactatatataacataacatttgccattttagccatttttatgwgtacaattcagtggcatcgtttataatctttctaaaaccttttcatcattccacacagaagctctgtaaccatcaagcagtaatttcccctcacccccag

SEQ ID NO: 25626 - DNA, 201 bp, Homo sapiens
aatccaaggatttcatttaaagtagagaatcaattgaacagccaaaatagataatacaatttgaaggataagaagatgtgtattaaaggagatgaattagsagtttattccaagaatatagggtgaaggatgggtacctagtcaaggatatttgcttggaatggagaggaaaggaaaattatgacacctttttagggaaaa

SEQ ID NO: 25627 - DNA, 201 bp, Homo sapiens
gataggactctgtgctgttttgaaagacagtgatttagagtagtcgttcttaaatgtgatatttaaggatgcttaaaaatagacatacctggccgggcgcrgtggctcacgcctgtaatcccagcactttgggcggccgagacaggcggatcacgaggtcaggagatcgagaccatcctggctaacacggtgaaaccccat

SEQ ID NO: 25628 - DNA, 201 bp, Homo sapiens
taggagtggcattgctgggttacgtggtaactctgtttaaccttttgagggctgacaaatggtttttttggagcaggtataccattttacatttccagcarcagtgtatgtgggttccaattttttcacatcctggatacttttgttttttttaacttataggaagtattattgtggtttcgatttgcctttctctgatgc

SEQ ID NO: 25629 - DNA, 201 bp, Homo sapiens
cttggaaaatcatgaagacgttttgaaaagctattatgggagattctgtttgaattggtcctgatagtaccaatcagaaaacgaatgaatatttttgcctstgatatgaaaaataggtttaactgcctctgagattttatttatattcatataaatttttaacatgttttaacttcagagattttgtgtatttttaaagta

SEQ ID NO: 25630 - DNA, 201 bp, Homo sapiens
ggtttttggtatagtacattgtcagttgttcaaaactatggttaactatatataacataacatttgccattttagccatttttatgagtacaattcagtgrcatcgtttataatctttctaaaaccttttcatcattccacacagaagctctgtaaccatcaagcagtaatttcccctcacccccagtccttggaaacctc

SEQ ID NO: 25631 - DNA, 201 bp, Homo sapiens
cgtgtttatctgttttgttaattcttgaccttagattccagcttgattttggctgtaccttaatagcttgctgtcgtttctcatgtaaccctgcattaaayttaactcctggctgggcgccatggctcacgcctgtaatctcagcactttgggaggccaaagcagatggatcacctgagatcaggagttcgagaccagcct

SEQ ID NO: 25632 - DNA, 201 bp, Homo sapiens
caattgaacagccaaaatagataatacaatttgaaggataagaagatgtgtattaaaggagatgaattaggagtttattccaagaatatagggtgaaggaygggtacctagtcaaggatatttgcttggaatggagaggaaaggaaaattatgacacctttttagggaaaactaactaggatttggtgactgaactttttt

SEQ ID NO: 25633 - DNA, 201 bp, Homo sapiens
attataattagtgtcccatggggatatatttatgtgctgcaaaaatcttgtttcttatgctgtttccactcactaattgtagcatccgttgataattcttscctcaaataatgattttttgttttcattgtcttacatgtgttagttggaattctactataagatacatcttctcctttcccatttatttatattagtatg

SEQ ID NO: 25634 - DNA, 201 bp, Homo sapiens
ttagaaaaaccagtaacattgctattcttgttttctataaattatcaaacatagcttgaataaatgtggagaaggcagactctgcttattttttctttagrgaaaggaattgcaatcttggaaaatcatgaagacgttttgaaaagctattatgggagattctgtttgaattggtcctgatagtaccaatcagaaaacgaa

SEQ ID NO: 25635 - DNA, 201 bp, Homo sapiens
attccacacagaagctctgtaaccatcaagcagtaatttcccctcacccccagtccttggaaacctctaactttcggtgtctgaatttgcctgtcctagayaatttcatataaaaattgagatcttaccatatttgtcctttgtgtccagcttatttatttcacttagtgtaatgccttaaaggcttatgcatgttgtagc

SEQ ID NO: 25636 - DNA, 201 bp, Homo sapiens; identical to SEQ ID NO: 3196

SEQ ID NO: 25637 - DNA, 201 bp, Homo sapiens
acagagttttgctctcgtccaggctggagtgcaatggcacgatcttggctcactgcaacctctgcctccgggttcaagtgattctcctgcctcagcctccygagtagctgggactacaggcatgcgccaccacgcctggctaattttgtatttttagtagagacggggtttctccatgttggtcaggcttgtcttgaactc

SEQ ID NO: 25638 - DNA, 201 bp, Homo sapiens; identical to SEQ ID NO: 3198

SEQ ID NO: 25639 - DNA, 201 bp, Homo sapiens
tccctccgtttttcactgtctttcatgactttaaggcttttgaagattactgggcagttattttatagaatttccattagtttgggtttgatgtttttctkgattaaatttaggttttgcattttttggcaaaaatgtcagaaaggtaatgtgtctttctcagtgcaattattttaggattttaataatttgatttagggg

SEQ ID NO: 25640 - DNA, 201 bp, Homo sapiens
ttcatgactttaaggcttttgaagattactgggcagttattttatagaatttccattagtttgggtttgatgtttttctggattaaatttaggttttgcattttttggcaaaaatgtcagaaaggtaatgtgtctttctcagtgcaattattttaggattttaataatttgatttagggggtatgtgtcaggtttctccag

SEQ ID NO: 25641 - DNA, 201 bp, Homo sapiens
acatgtgattggtaaatagagtgtggtacatagaagagtgcagaagttgcattcactcgtggatttttccctaggcaagaagagctggcacagctggagtmcagctccatagcctcccacaagaatcaatatcaccctcagtttttctgttgtgttagtagcaggagccccttcaccttctgttgtaagaaaatgagcact

SEQ ID NO: 25642 - DNA, 201 bp, Homo sapiens
ttttttgagacagggtcttgctctgttgcgtaggctgtagtgcatggtgcagtcatggctcactgtagcctcaaactcctgggctcaagctgtcctcctcyttcagcctcccaagtagctgggattaacaggcaccagccaccctgcctggctaaactattatattatgtaatgagaatgtttttacattctttttttttt

SEQ ID NO: 25643 - DNA, 201 bp, Homo sapiens
taaagccagcctgtcctccagtgctagcatcccactgctgttggccttccaagggcctggtacctacacttagctcatcccctccaacaattttaatttcytcctacctttctccagtcaggtttgaatatgtctcttagaccttacatttgacttcatgaagcatttttgttactgaattatttcccttttgcgaaactt

SEQ ID NO: 25644 - DNA, 201 bp, Homo sapiens
gttggtgaagcatagtgtgttctctaatgcacattggtacacatgtgattggtaaatagagtgtggtacatagaagagtgcagaagttgcattcactcgtrgatttttccctaggcaagaagagctggcacagctggagtacagctccatagcctcccacaagaatcaatatcaccctcagtttttctgttgtgttagtag

SEQ ID NO: 25645 - DNA, 201 bp, Homo sapiens
atagttctagcttttctttgctttaacattggtaatttttgaaaaactgtattgggtagagtatgatttttcttattgaatcagaaagtttgaaaacttartgagttttcagtgttgagtccttaaaagtacagtgtagaagtaaatacataacaatcaccagtctcccctcagttagttccactatttactttgtttcta

SEQ ID NO: 25646 - DNA, 201 bp, Homo sapiens
agattgaaatatccaactgtcacgtggaatttgtcatttctctcttcagtttactcagtttttactttatgtattttaaagttcattcattaggtgcatayacattttgaattgcttgtcttctggatgaaataattcttttctcatgaaatgtttctctgtatctctgaaaatattttttgttttgaagagtcttatttc

SEQ ID NO: 25647 - DNA, 201 bp, Homo sapiens
tcactctgtcacccaggcttgagtgcagtggagtacagtggtgcagtcttggctcactgcaacccctgcctccccggttcaaacgattctcgtgtctcagyttcctgagtagctgggactacagacgcacactgccacgcccggctaattttttgtatttttagtagagacagggtttcaccatgttgcccagggtggtct

SEQ ID NO: 25648 - DNA, 201 bp, Homo sapiens; identical to SEQ ID NO: 3204

SEQ ID NO: 25649 - DNA, 201 bp, Homo sapiens
tctagacaaaggacatgtaggcgtaaatatccaaattatggtagaagaaatcgtagctggcgtgagttatcttctggaaatgagtcttcaagctctgtaaracatgtgagtggaaaactttaaaatgttataagataatcttaaatgaatttggcttaattctttactttgaatgaatataccccaaatttatatgaaaac

SEQ ID NO: 25650 - DNA, 201 bp, Homo sapiens
ttgcagtgagctgagatcacgccactatactccatcctgggtggtggagtgagaccctgtctaagcaattaaaaaaaaaaaaatatatatatatatatatrtatatatatatatttgtgggagctaaatgataagaccacatggacacacagaggggaacaacacacactagggccttttggagggtgacaggaaggagag

SEQ ID NO: 25651 - DNA, 201 bp, Homo sapiens
ggctggagtgcggtggcatgatctcggctcactgcaacctccacctcccgggatcaagcgattctcctgcctcagcctcctgagtagctgggcttacaggygcccgccaccacacccagctaattttttatatttttagtagagacagggtttcaccatgttggccaggctggtctcgaactcctgacctcaggcgctcca

SEQ ID NO: 25652 - DNA, 201 bp, Homo sapiens
tatatgcattgtataaggatcaaatgagggtaattatatccatcactaagcatttatcatttatttgttgtggtaatattcaaaatcttctcttctagctrtcttgaaatgtctatcacattgttatttgctgtactcaccttactgtgtaatggaacaccagaacttattcttcctgtctgattgtaacttaatacccat

SEQ ID NO: 25653 - DNA, 201 bp, Homo sapiens; identical to SEQ ID NO: 3186

SEQ ID NO: 25654 - DNA, 201 bp, Homo sapiens
tggttataccatatcttattcattcatctatcgatggccagctcggctgtttctatttcttgaccattacgagtaatgctgcagcaaattttggaatacaygtatctctcagaaaccctgctcaattcccttgggtatagacctaagagtagaattgctgggtcatgggataattcatgtttaccttttccaggaaccact

SEQ ID NO: 25655 - DNA, 201 bp, Homo sapiens
gacacatgtatttttttgtctgtatatctgtcattgttatgcacgacttcacattattctgattttaatgatacccgtttgtacttcccttctgtacagaraaacctggctcctgttatttatttagatttttaaatctttttttttttttttttttttttttttttttttttttttttttactttggagatggaatcttg

SEQ ID NO: 25656 - DNA, 201 bp, Homo sapiens
cagacacatgtatttttttgtctgtatatctgtcattgttatgcacgacttcacattattctgattttaatgatacccgtttgtacttcccttctgtacaragaaacctggctcctgttatttatttagatttttaaatctttttttttttttttttttttttttttttttttttttttttttactttggagatggaatct

SEQ ID NO: 25657 - DNA, 201 bp, Homo sapiens
ttttccatattggctgcacctttttacattcccgctggcagtgtataaaagccacagtttgttcacatccttgccaacacttgttgtttttggagttttgkgtgtgtgtgtgtgtgtgtgtgtgtgtgtgtgtgtgtgtgtgtgtgttttcttttttttcttttttttttttgagcctgtctcactctgttgcccaggctg

SEQ ID NO: 25658 - DNA, 201 bp, Homo sapiens
acctgcctcggcctcccagagtgctgggattacaggcgtgagccaccacgcccagccggacgggctcttaaaatatgattttgtgactggcttctttgacrttgcataatgttttctctaatgattagtatgttgagcatttgtgtagcatgtatcaatacttcattctttttttactttttattgcctagtaattctccc

SEQ ID NO: 25659 - DNA, 201 bp, Homo sapiens
cgctggcagtgtataaaagccacagtttgttcacatccttgccaacacttgttgtttttggagttttgtgtgtgtgtgtgtgtgtgtgtgtgtgtgtgtgkgtgtgtgtgtgtgttttcttttttttcttttttttttttgagcctgtctcactctgttgcccaggctggagagcagtggtgagatcttggctcactgcaa

SEQ ID NO: 25660 - DNA, 201 bp, Homo sapiens
tgtgggagccttgctctgtcacccaggctggagtgcagtggcgccatcttggctcactgcaagctccgcctcctgggttcacgccattctcctgcctcagyctccccagcagctgggactacaggcacctgccaccacgcctggctaatttttttgtatttttagtagagacagggttttaccgtgttagccaggatggtc

SEQ ID NO: 25661 - DNA, 201 bp, Homo sapiens
gctggcagtgtataaaagccacagtttgttcacatccttgccaacacttgttgtttttggagttttgtgtgtgtgtgtgtgtgtgtgtgtgtgtgtgtgtgtgtgtgtgtgtgttttcttttttttcttttttttttttgagcctgtctcactctgttgcccaggctggagagcagtggtgagatcttggctcactgcaac

SEQ ID NO: 25662 - DNA, 201 bp, Homo sapiens
tcccagctacttgggaggctgaggcaggagaatcacttcaacctgggaggtggaggttgcagtgatccagcattggggccactacactccagcctggaccmcggagcaagactgtctcaaaaaaaaaaaaaaaaaaaaaaaacacacaaagctttttaacaaaggtttgttgacagtgacttcagtagctatggaattctg

SEQ ID NO: 25663 - DNA, 201 bp, Homo sapiens
gcagtgtataaaagccacagtttgttcacatccttgccaacacttgttgtttttggagttttgtgtgtgtgtgtgtgtgtgtgtgtgtgtgtgtgtgtgtstgtgtgtgttttcttttttttcttttttttttttgagcctgtctcactctgttgcccaggctggagagcagtggtgagatcttggctcactgcaacctcc

SEQ ID NO: 25664 - DNA, 201 bp, Homo sapiens
ttggctcctatgtccatttgacattttcttttgaatcgcctttgagtgttttcatagcttctggcaatatgcagtgttcaaggctcaccttgtactttccytacctcagctgtggaatcaggcagtttttcaggggccatggcctgtttgattggagaatggcatttagaaaccaagatatttcttgttattgatgaatca

SEQ ID NO: 25665 - DNA, 201 bp, Homo sapiens
gtgaccttggctcactgcaacttttacctcccagattcgtgattcttgtgcctcagcctcccaagtagctgggattacaagcatgtgccaccatgcctggstaatttttgtatttttagtagaggtggggtttcaccatgttagccaggctggtcttgaactcctgacctcaggtgatctgcccacttcagctttccaaag

SEQ ID NO: 25666 - DNA, 201 bp, Homo sapiens
catttgccagtgcacatggaacaaacatatttgtattctatgatcaatatattcaaattattacagtaactgaactttactgaaagaagacaacagcatcrtgtttatctgttttgttaattcttgaccttagattccagcttgattttggctgtaccttaatagcttgctgtcgtttctcatgtaaccctgcattaaact

SEQ ID NO: 25667 - DNA, 201 bp, Homo sapiens
tgttcacatccttgccaacacttgttgtttttggagttttgtgtgtgtgtgtgtgtgtgtgtgtgtgtgtgtgtgtgtgtgtgtgtgttttcttttttttcttttttttttttgagcctgtctcactctgttgcccaggctggagagcagtggtgagatcttggctcactgcaacctccaactcctgagcaatttgcctgc

SEQ ID NO: 25668 - DNA, 201 bp, Homo sapiens
atttcccaggctcaagcaatcttcccacctcagccctccacctcctgagtagctgggaccacaggcatgtgccaccacacctggctaagttttttttttttcccctagagaaaaagactcgctatgttgtccaggctggtctcaaatgctcctcccaaagttggaattacaggtgtgagccaccacaccttccctgatttt

SEQ ID NO: 25669 - DNA, 201 bp, Homo sapiens
ggcacaggtgatcctcccgattcagtgtcccaagtagctgggactacaggagggcgcagccacaccccgataaggttttttttttttttttctttttgagrcagtcttgcaccgtcgccaggctggagtgcagtggcgcagtcttggctcactgcaacctccgcctcctgggttcaagtgattctcctgcctcagccctcc

SEQ ID NO: 25670 - DNA, 201 bp, Homo sapiens
ctctttgtttcctattcaccagtactccccttggttcaggttctgcttgctttcctggaactatttctgtagccacctaatatttcctttacctcgtattrtcagtgtcctagttcagaagcagatactatatcattaatcttcttcaaagaaacctttgacgcctcttcattggcaatgggataaaaaccattgactgtg

SEQ ID NO: 25671 - DNA, 201 bp, Homo sapiens
ttgcgccaccatgcccggctaattattgtatttttagtagagatggggtttcaccatattggccaagctagtcttgaacccttgacctcaagtgatctgcytgcctcggcctcccaaagtactgggattataggcatgagccactgtgcctggcagaataaaatttatatatatgaaatactgaaaataactgtcaaagat

SEQ ID NO: 25672 - DNA, 201 bp, Homo sapiens
agaaaaaaagtttacaaaaccttggtttacaggtgtgagcctccgtgtccagctcccaagtttctagtctctacctgcactgctatattgctagactgtarctcatcaatcacactaccatgatcattaagtgtccccaagttacaaatgaaatacctatagaatgatagatctctatagtcaatgacaatacagaatcta

SEQ ID NO: 25673 - DNA, 201 bp, Homo sapiens
gagcgaggttcgcctccccgggcgggacacgagctccggtcctctcttggcgcaaacccccgccccccgcggagggactacttttcgtctcctgcggaggractacttcctcccccgcggaggcgtcggtccaggcggcgcgcacggtatggcggcggcggcggcggcggcggcgcgcgcctgagaagaggggacgccagc

SEQ ID NO: 25674 - DNA, 201 bp, Homo sapiens
tgttagataagcttcattcaggtatcagttaaatgtttgcaaatcaacaacatattaaataaggtacctttaaacggaaacacgcataaaaccaagttacktatgcactggtttactacagtgttgtgaccagaattttgcaggaacctatccctatatattctctatagcactgatttagtattttatttcagtgttcta

SEQ ID NO: 25675 - DNA, 201 bp, Homo sapiens
atatatgcaggttgtgctgtggcacaggtggctcctagaaggaccatgtgggtgaaaccatgttcttatgttttaatgatcagttggaggaaaaaaaatayataatatatatacacacacaattttttcctttttatgttaagagaatatgaattaatatgcacatcttattcagcaatcctctgaatatccgagtaactt

SEQ ID NO: 25676 - DNA, 201 bp, Homo sapiens
gagtctcactgtgtcacccaggctggagtgcagtggcatgatctctgcctcccgggttcaagtgattttcctgcctcagcctcccaagtagctgggactayaggcgcacaccatcacatctggctaatttttgtatgtttagaagagacagggtttcaccatgttggccacgctggtctcgaactcctgaccgcaggtgat

SEQ ID NO: 25677 - DNA, 201 bp, Homo sapiens
tctctgccctaaatcgtgtcattatttgcttacatctgtttcccctaagagacgctgaagtctttgatggcaaagctgtggctcattccttttttttttttaatctccatcacttgttagtgcttgctgaattaacagatgtaaggagttaacttactgttgcactagctcaaacatatttagattgttacctcacaaata

SEQ ID NO: 25678 - DNA, 201 bp, Homo sapiens
attgatgctgatgcattcttagacctttgattctcaggttcttagacctttgattctcaggttcttagacctttgattaaatgcattctaaaacattttamatagtatgatcaaagtacaaatagacaattaggcatctctgaaagctgcgtttctgtgtattcaaattattggaaaaagaactaaacattcttggacaat

SEQ ID NO: 25679 - DNA, 201 bp, Homo sapiens
ggtttttgtgtgcatttaatttcacctctaggtgctgatccagtttgtggtatagtgttctggaggtccaacgtcatctacttcctgcccttcagaggtakgctgatgttgtgtgtacatcaacatcagcacagcctcctgaatgaacctaaattcagttaacacaaatttgcattaaaactaatattaggctttggatta

SEQ ID NO: 25680 - DNA, 201 bp, Homo sapiens
tagagacagagtcttactctgtcacccaggctggagcgcagtggggcaatctcggctcactgcaacctccacctcccgtgttcaagcagttcttctgcctyagcctcccaagtagctgggactacaggcacacaccaccacgctcggttagtttttgtatttttcatagagacggggtttcaccatgttgaccagggtggt

SEQ ID NO: 25681 - DNA, 201 bp, Homo sapiens
tgtttctcattaaatttttacccacaagtattggatccattgaagattttccaatggcattattccttccatatttattagttggtgtctttgcacacagkggtatttttttttcctcctccaacttctaagttcaggggctacctgctgtgtgcaggatgtgcaggttggttacgtgggtaaatgtgcttgcacatagtt

SEQ ID NO: 25682 - DNA, 201 bp, Homo sapiens
tgcggtggctcacgcctataatcccagcactttgggaggctgaggtgggcggatcacctgaggtcaggagtttcgagaccagcctggccaccatggcgaarccttgtctctactaaaaatacaaaaaattagccaggcatggtgactggtgcttgtaatcccagctactcaggaggctgaggtaggagaatcgcttgcacc

SEQ ID NO: 25683 - DNA, 201 bp, Homo sapiens
cttgagttaaaactgtatggcaaaaatgctaccttctttttaagcctttttttctttttgctttaaatccttctggaaacttgacggaatgcccattttgktgatattgtccttatttaggtgttgattttcattcgcatgtttttctgtgtttcagtcggattcagtggttttggtatcacagtctagacaaaggacatg

SEQ ID NO: 25684 - DNA, 201 bp, Homo sapiens
acacttcatgaagtcacacataaactttttaaaaattatttttatttatttatttatttagagacagagtcttactctgtcacccaggctggagcgcagtkgggcaatctcggctcactgcaacctccacctcccgtgttcaagcagttcttctgcctcagcctcccaagtagctgggactacaggcacacaccaccacgc

SEQ ID NO: 25685 - DNA, 201 bp, Homo sapiens; identical to SEQ ID NO: 3210

SEQ ID NO: 25686 - DNA, 201 bp, Homo sapiens
aaaaagatacattccagttagaggcttttgattgttggtttaaatgattgttatattgttttatgattgactttgatacacttcatgaagtcacacataarctttttaaaaattatttttatttatttatttatttagagacagagtcttactctgtcacccaggctggagcgcagtggggcaatctcggctcactgcaac

SEQ ID NO: 25687 - DNA, 201 bp, Homo sapiens
agttaggcactaaatagacattatgagaaaagatttagttttttcccctcaatgatgatatacattcagaaatgaataacacatattgtgctcttttgaatttttttttttttttttttttttaagatgtagttttgctttgttgcccaggctggagtgcagtggcgcaatctccactcattgcaacctccacctcccagg

SEQ ID NO: 25688 - DNA, 201 bp, Homo sapiens; identical to SEQ ID NO: 3213

SEQ ID NO: 25689 - DNA, 201 bp, Homo sapiens
ggataacagtaaaaaagattctaaatcccatccctccattaagaggttagcttcccaaacataagctccttctgtattgtacttgtaattgttcattcagygtctgtattacccagtagactgtaagcttcttcagggccaggaatgcttctgcatctctcattgttgcttccccaggatctggtattaatatatcataac

SEQ ID NO: 25690 - DNA, 201 bp, Homo sapiens
ctcccaggttccaatgattctcctgcctcagccttctgagtagctgggaatacaggtgtgtgccaccacacctggctaatgttgtatttttagtagagacrgggtttcaccatgttggccaggctagtctcaaaccgctgacctcgtgatctgcctgcctcggtctcccaagatgctgggattacaggcgtgagccaccgt

SEQ ID NO: 25691 - DNA, 201 bp, Homo sapiens
ttatgctttttggcttaatttcaggtttaagtatctaaacaaagggttaagtaaaaataaagttttagttactttttgagagtaccttaagtcttggactygaatataggttatctttatcaaagcaaaagctgtggttttccccctcagctttaccttgtctcaaatgttgctttaatgtaattgtttcttaagctttcc

SEQ ID NO: 25692 - DNA, 201 bp, Homo sapiens
attaggccttccctaccccactgttgactactgtaatgcagagaccctttgcatatcacttttttattttttgagaacgtagtcttgctctgtcacccagkctggagtgcaatggtgcggtcttggttcactgcagactctgtctcccaggttccaatgattctcctgcctcagccttctgagtagctgggaatacaggtg

SEQ ID NO: 25693 - DNA, 201 bp, Homo sapiens
atcgttttctgaggatattagttatattctttataaaactaacgtgcattttatttattgtaaatcatacatatagtgcccttttgccatgatactgtttrtattgaagttgctttagtttcatcttgtttcttgtgttagggaagtgcggctccttcgaagacaaacaaaaacatctttggaagtttctttgctagaaaa

SEQ ID NO: 25694 - DNA, 201 bp, Homo sapiens
ttctctcttgttgcccaggctggagttcaatggcacaatctggggtcgctgcgacctccgcctcctgggttcaagtgattctgctgcctcagcctcccgartagctgggatttacaggcacctgccatcacatccagctaattttttgtatttttagtagagatggggtttcaccatcttggccaggctggtcttgaactc

SEQ ID NO: 25695 - DNA, 201 bp, Homo sapiens
ctatccccagctgtctcacttttagggatgctaagattggttcttgggtcaggtggacagcctgatcactattttagagttctccgtaaacacgtatgcartagttttatctgttggttatcattgtccgagtccatcgttttctgaggatattagttatattctttataaaactaacgtgcattttatttattgtaaatc

SEQ ID NO: 25696 - DNA, 201 bp, Homo sapiens
gtggtgtcacttaacgtttgtatcacctgcatgtcctgtaaaatgaatgttcatttggaggcttggtcagattctcattcaaagttttgtcggcaagaatscttctactaagtggtgctttctgtttcttattgcaggctatccccagctgtctcacttttagggatgctaagattggttcttgggtcaggtggacagcct

SEQ ID NO: 25697 - DNA, 201 bp, Homo sapiens
aaatcaaaaccacagtgagatactacctcaccccagtcagaatggctgttctcaaaaagacaaaggataacaaatgttgggaaggatgtggagaaaggggractcttatgcacttttggtgagaatgtaaattagtacaactattatgggaaacagtatggaggttctcccgcctcccccagaggcaggttctctctctgt

SEQ ID NO: 25698 - DNA, 201 bp, Homo sapiens
gacagggtttcgccatgtcacctaggctggtcttgaactcttggactcaagcaattctcactcctcggccccacaaagcgctgggattacaggcatgagcsacagcactcgggcgagtcagcaagttttgatgctcctctcttttggtctttcctccccattctagggggagaagggtggagctgtattccagttaagctt

SEQ ID NO: 25699 - DNA, 201 bp, Homo sapiens
ggagtttcaccatgtggtcaggctggtcttgaactcctgacctcaagtgatcggcccgcctcggcctctcaaagtgctgggattacaggtgtgagccaccrcgcccaggcttgtcttcagatctaaccaccacagtggctgaaagatttgaggaaatgttgaaagcataactatctcatatttgagggactgtctagttga

SEQ ID NO: 25700 - DNA, 201 bp, Homo sapiens
tctcattcacagacagattaaaaaaaaaagctttccatttttaggcaaattcttaaactttattagccttagttcctcattcttttttgagacagggtctygctctgttgcccaggctggagcacagtggtaccaccatagcttgtgacagccttaaactcctgggctcaagtgatctcctgcctcagtctccccaaatag

SEQ ID NO: 25701 - DNA, 201 bp, Homo sapiens
ctaggatcaagcagtccttcttcctccacctcccaaagtgctggaattataagcctgagccaccgtgccttgctgagatagtgttttattttggaagtttmagcaagatttttggtttgtgtacttacttttagttaagtatattgttctctggaagattttatagtttgaaaattaattcaaattcttgctaggtttcac

SEQ ID NO: 25702 - DNA, 201 bp, Homo sapiens
gacatgctgatgaagtatttgttctggagacacatccctttgattccagaattatgttatctgcaggacatgatggcagcatatttatatgggatattacmaaaggtaccaagatgaaacattattttaatatggtaagtgaagtgagatgtaccttgatacatgcttgataatttgtttagagtatttgggttatgcggc

SEQ ID NO: 25703 - DNA, 201 bp, Homo sapiens
cccttagaatttcactggaaaaacatgtgaatcacataagttagttggcaaaaggaactgatgtgtatgtggtggggttgctttgaataaagtatttcctmacctattctggggagaacgctcaactgatcttagagaagtgtgaaatcagtttcatagacttagggaaaaatctgaagtgcttgcactgtgagggcagag

SEQ ID NO: 25704 - DNA, 201 bp, Homo sapiens
tgagcttgcaagcaggttaacaaggatttcagctgttctacttgaaggcatgaacaaagagtaagttccaaatttttgcatctgctccctcttgtattaaggctctgcatgtgtctcagagaacaagaatgaccttggacatctggatgtgagattcaggactgtgctttagagaagcttatcttacacctttttctagaa

SEQ ID NO: 25705 - DNA, 201 bp, Homo sapiens
atcatttccatatgtggaaaacgagaatcagagaggctaaggaacttgcccaacgtcacagagctggtaagtgtatttgaacccaaggagtctaaccctgraatgtgtgtcatccatcaaaagtgtttctcagggccatgggcacactggctcacgcctataatcccagcactttgggaggctgaggcaggtggatcacct

SEQ ID NO: 25706 - DNA, 201 bp, Homo sapiens
agcttgcaagcaggttaacaaggatttcagctgttctacttgaaggcatgaacaaagagtaagttccaaatttttgcatctgctccctcttgtattaaggytctgcatgtgtctcagagaacaagaatgaccttggacatctggatgtgagattcaggactgtgctttagagaagcttatcttacacctttttctagaatt

SEQ ID NO: 25707 - DNA, 201 bp, Homo sapiens
acaactaccctgactcatggtcacctgctccaacttatgtcatagctcaaaacaatacttaaatccttacaaagctaacaaaggaagtaatgttgccatgygtcattgtcacagaattaccagaagtttgggggatttgggtgttcatctttctattgtggagtttttagggtggtgatggcagttgtgtggtggttgtca

SEQ ID NO: 25708 - DNA, 201 bp, Homo sapiens
tttggcaggaattgaaattggaggcttctgtcattctgattacttatccaacgaatgacacaaataagagcatgtttgtagggaagaactcaggtggggayagcaccttctatttaatctcttaacctgtattattaggttgtatattttaggagaagagaggaaagtggcaaaaggaggcacagatacaaatttatacag

SEQ ID NO: 25709 - DNA, 201 bp, Homo sapiens; identical to SEQ ID NO: 3245

SEQ ID NO: 25710 - DNA, 201 bp, Homo sapiens
gagcaaaagtaaataaaaactatttgtcatctaagtccgtggttctcaacgtggttctcttaggggtgatttttgccactgcccccgccccacaacatttkgccatgtctggagacacttgtatgtcccatcctggcagggcagggcgggaggctgaggaagggcatctagtaggtagagcttaggtatgctgctaaacat

SEQ ID NO: 25711 - DNA, 201 bp, Homo sapiens; identical to SEQ ID NO: 3247

SEQ ID NO: 25712 - DNA, 201 bp, Homo sapiens
cctcttacccctagttctttatggaccagcaatacagatttgtttgtggcatccagaatgtgacatctagaatgtgccatatgctgtcttttccagagcayttacagagctcttcctcttagattctttcctggacagcctctttcccacaattactagcattcattgtactctgttataattgttagtttacaggtctgc

SEQ ID NO: 25713 - DNA, 201 bp, Homo sapiens
tgatcatttattttctcatctaactgaaaagaccaggggtaggactggcttctggtacagcctaatgagagttccagctgtcactggcactagttttcccrcctccagctctcaacactaccttctcctgggccagctgccttcacaggcagacttttctcatgacagcaggatggctttagctccagcctacaaccttcc

SEQ ID NO: 25714 - DNA, 201 bp, Homo sapiens
actggcacgtcagtcagagctggagcgctgttgcttgctggcagagtggccagagtgtcagagtgtactctgtgacttttctttggataagggaaatgctygcagtatcagaaggaagagggaagctgagggctaggagattcctcttaaaatctggtaaagcaacttttgtccacccagctttccccagtccaactttcc

SEQ ID NO: 25715 - DNA, 201 bp, Homo sapiens
ttatgacatttaacccctaaggagttgtttttctcacttgttattatcaaacctaatggtttttaattttggtacaactccttaaagggttgaaggttgtracaataactgagggaactgatgttctgaataaatgatgtgaagtaaacacaattgtatttgaaatgtacaattacattttattaatgtgttaatagaaac

SEQ ID NO: 25716 - DNA, 201 bp, Homo sapiens
gactggaaccatagaggagtctgtgttgtaaccactgaacaactgactttctaccctgctttaaaatgttgcctgttgtttgttgttgttgtttttgaacrgtggtggccaatctgcctccacaatccagacataatttcggcactaaacagaaatactttagtctatacaaacttcatgtaagtagttcctgcatgaaac

SEQ ID NO: 25717 - DNA, 201 bp, Homo sapiens
ccagacccaggagaatcactaatgagttctgtagttgattggcaaagtgtgctataggaatggggagtacctcctttgtgcaacatatttgtgcttctcarttgcatctctcaagactaaagttcagcctgttctacctctggggatgttcaattccaaaaattttccactaattgttctgtaaaagcatgggactaagag

SEQ ID NO: 25718 - DNA, 201 bp, Homo sapiens
gccattctcctgcctcagcctcccgagtagctgggactacaggcgcccgccaccgcgcccagctaattttttgtatttttagtagagacggggtttcacchtgttagccaggatggtctcgatctcctgacctcatgattcgcccaccttggcctcccagagtgctgggattacaggcgtgagccaccgcgcccagcctag

SEQ ID NO: 25719 - DNA, 201 bp, Homo sapiens
ccgctcagcccccgctccccccgctcagcccccgctcagcccccgctcagcccccgctcagcccccgctcagcccccgctcagcccccgctcagcccccgctcagcccccgctcccccactcggccccgcccccagtgccctggcaggccccgcccccaacgccgggcgctcccgtcggctcggcggcctcagttccgtaa

SEQ ID NO: 25720 - DNA, 201 bp, Homo sapiens
cgctcagcccccgctccccccgctcagcccccgctcagcccccgctcagcccccgctcagcccccgctcagcccccgctcagcccccgctcagcccccgctcagcccccgctcccccactcggccccgcccccagtgccctggcaggccccgcccccaacgccgggcgctcccgtcggctcggcggcctcagttccgtaaa

SEQ ID NO: 25721 - DNA, 201 bp, Homo sapiens
tttggaatgggcctattatagcagtagtcagtgctagctaacattttgtatgagcacttactacatgctaagtccttactgtaccactttagtagtctatkcaagcatcacactagccctatgaggttggtactgttatcaccccctaatacaactgaggaaagtgaggttaaggtacttagtctagatgactactagtaa

SEQ ID NO: 25722 - DNA, 201 bp, Homo sapiens
tgtggcaactgtccacagcagcatttctctgagacttagtggttgctttcatttgtgtacctgtgtatgtaagcacatgtacaaatgcacccatatctttmatcaagatagcttggaatcttgagcaaattctctaatagggtgaattatgattttcttcatctcaaattatttgcctattttttttctgttttttttctt

SEQ ID NO: 25723 - DNA, 201 bp, Homo sapiens; identical to SEQ ID NO: 3250

SEQ ID NO: 25724 - DNA, 201 bp, Homo sapiens
atataccatattttctttatccagtccaccattgatggtcatctaggttgattccatgtctttgctgttgtgaatagtgctgcagtgaatatatgagtacrtgtgtctttttgatagagtgatttctattcctttgggaataaacccagtaatgggattgctcagttgaatggtagttctgttttaagttattttagaaat

SEQ ID NO: 25725 - DNA, 201 bp, Homo sapiens
ctaacctgctaggactaatctgcaaattttcaaagtacaacattgacggccttaagaatacaaatacattttattattgatttgaggctttcaaatggtgktgttcatccttatccctggggacatggaatgctggggatccaagcttcaactttgcccccagaaaggaacagtgttggtgtatacgacattgtgggctgc

SEQ ID NO: 25726 - DNA, 201 bp, Homo sapiens
tccccccaaagattgttttatgttctttagtattggccactctttttcaaaaaaggatcaagttcactggcagagtttccccctgcacctcctggagtagygtgaaggctggaaaaatagtgccatggacacagcttagggtgatgctaaagcgcagagactctggtttagtgacgggttctctctttaagtctctctttc

SEQ ID NO: 25727 - DNA, 201 bp, Homo sapiens
cttcatctcaaattatttgcctattttttttctgttttttttctttccttcttttttttcccccctgtttgtctttaagagacagagtctcactctattgyccaggctggggtgcagtggcatgatgataacttactctagcctccaattcttggactcaagggattctcctgtctcagcttcccaagtagctaggactac

SEQ ID NO: 25728 - DNA, 201 bp, Homo sapiens
gtttacttctaatgttttcctaacatggtctcattttgtaatgtaaatttgtattaaatgccatacacacattttcattcttctgctaaaacatgtattgkgtgcacttactaaattttaaagcattaaaaattatttcaaaatagccagtgtctctgttttctaaaccacttctgggtagcttggggctggaatattgga

SEQ ID NO: 25729 - DNA, 201 bp, Homo sapiens
aaatcatgtttattcacacattcattcattgagtcaacaaatacctattgagcatctgctgtgtgcctgccaagaagtatcccagtggttgtgatacatasatgataaaacatactgtcttcaagaagtttacaatctagtgagaaggacaaacttgtgaacagttacaataaagtgtaatgagggttaaaaaataaggcc

SEQ ID NO: 25730 - DNA, 201 bp, Homo sapiens
gctcagcccccgctccccccgctcagcccccgctcagcccccgctcagcccccgctcagcccccgctcagcccccgctcagcccccgctcagcccccgctcagcccccgctcccccactcggccccgcccccagtgccctggcaggccccgcccccaacgccgggcgctcccgtcggctcggcggcctcagttccgtaaac

SEQ ID NO: 25731 - DNA, 201 bp, Homo sapiens
ctcagcccccgctccccccgctcagcccccgctcagcccccgctcagcccccgctcagcccccgctcagcccccgctcagcccccgctcagcccccgctcagcccccgctcccccactcggccccgcccccagtgccctggcaggccccgcccccaacgccgggcgctcccgtcggctcggcggcctcagttccgtaaaca

SEQ ID NO: 25732 - DNA, 201 bp, Homo sapiens; identical to SEQ ID NO: 3255

SEQ ID NO: 25733 - DNA, 201 bp, Homo sapiens
ggcaggagaatctcttgaccccaggaggtggaggttgcagtgagctgagattgcaccactgcactccagcctggcaacagagtgagactccatctcaaaaaaataaataaataaataaataaataaataaataaataaatattacagttttaaaaatcagttatttcatattgagtttacttaatgagacttctgaattac

SEQ ID NO: 25734 - DNA, 201 bp, Homo sapiens
gcaggagaatctcttgaccccaggaggtggaggttgcagtgagctgagattgcaccactgcactccagcctggcaacagagtgagactccatctcaaaaaaataaataaataaataaataaataaataaataaataaatattacagttttaaaaatcagttatttcatattgagtttacttaatgagacttctgaattaca

SEQ ID NO: 25735 - DNA, 201 bp, Homo sapiens
caggagaatctcttgaccccaggaggtggaggttgcagtgagctgagattgcaccactgcactccagcctggcaacagagtgagactccatctcaaaaaaataaataaataaataaataaataaataaataaataaatattacagttttaaaaatcagttatttcatattgagtttacttaatgagacttctgaattacag

SEQ ID NO: 25736 - DNA, 201 bp, Homo sapiens
aggagaatctcttgaccccaggaggtggaggttgcagtgagctgagattgcaccactgcactccagcctggcaacagagtgagactccatctcaaaaaaataaataaataaataaataaataaataaataaataaatattacagttttaaaaatcagttatttcatattgagtttacttaatgagacttctgaattacaga

SEQ ID NO: 25737 - DNA, 201 bp, Homo sapiens
ttgcaaccctgaactagagtaagcaagctggaaaacgaatgaatacaaattattgtaacataaaaattcataaagtcttcgatagtcatacagatgcacamcaataaacaatgtgccgtgaaagtgctcagtgagcctgccataattattatttatttttgaactgtgtggtggtaggaggtgttccttaagaatttttgt

SEQ ID NO: 25738 - DNA, 201 bp, Homo sapiens; identical to SEQ ID NO: 3253

SEQ ID NO: 25739 - DNA, 201 bp, Homo sapiens
gtcatctgggggcctttccaacacagtgacacttgtggggacagttgtctacactggaagaagcattggtggtgcctgtggaagtaccacagaacattgaygcagggtctgtttgtctgtgcaggtgctacctttttacccacacttaagtgacgcaaaatgcccttcaatggcgagaagcagtgtgtgggagaggaccag

SEQ ID NO: 25740 - DNA, 201 bp, Homo sapiens
cagctactcaggaggctaaggcaaaagaatcgcctgagctcgggaggcagaggttgcagtgagccgagatcatgccactgaactccaatctggctgacagwgtgagactctgtctcaaaaaaaagaaacaacaaaaaaaaggtagtataattattaaagtcccatataactttgagaaaggacatttgtccagtttatcat

SEQ ID NO: 25741 - DNA, 201 bp, Homo sapiens
gggtgttcatctttctattgtggagtttttagggtggtgatggcagttgtgtggtggttgtcatttggcaggaattgaaattggaggcttctgtcattctsattacttatccaacgaatgacacaaataagagcatgtttgtagggaagaactcaggtggggacagcaccttctatttaatctcttaacctgtattattag

SEQ ID NO: 25742 - DNA, 201 bp, Homo sapiens
atccgaaacaccctcccatccgagctgttctcggcctctctggttcaaactgacgaagactgtttctctaataggttcagtctgtgagcgctcggctttcrgagactgaagggccctggatccccttgccccgtcgcgccgtcgtccccccgctatccggttttgtgatggccgcgccgtggctgcctccctagagtccct

SEQ ID NO: 25743 - DNA, 201 bp, Homo sapiens
cattaagcccaatattgtcattggcagagaaacccaagggtatgcagaaggctgcggttattgtccttgatgtcaacgtcaaaggctagcgacaaaacccwacatgttctaattccatttagtaatcaattatgacattatcctctatgatttacttcaatcttttaaaaggtatatttgtattatcatattgtgccctct

SEQ ID NO: 25744 - DNA, 201 bp, Homo sapiens
atgagattgctgtaaatgagaactttcaattgaaacaagaggctctcccagaaaagaggtaacctgggggcatttgttgtatataaactgctgaagattctgtgtgtgtgtgtgtgtgtgtgtgtgtgtgtgtgtgtgtgtgagagagagagagagagagacagagagagagatagacacatatttacactgattcctgga

SEQ ID NO: 25745 - DNA, 201 bp, Homo sapiens
tgagattgctgtaaatgagaactttcaattgaaacaagaggctctcccagaaaagaggtaacctgggggcatttgttgtatataaactgctgaagattctgtgtgtgtgtgtgtgtgtgtgtgtgtgtgtgtgtgtgtgtgagagagagagagagagagacagagagagagatagacacatatttacactgattcctggaa

SEQ ID NO: 25746 - DNA, 201 bp, Homo sapiens
gctctcccagaaaagaggtaacctgggggcatttgttgtatataaactgctgaagattctgtgtgtgtgtgtgtgtgtgtgtgtgtgtgtgtgtgtgtgtgagagagagagagagagagacagagagagagatagacacatatttacactgattcctggaagttcttgtataatatcctcaggggtaaacatttagttctc

SEQ ID NO: 25747 - DNA, 201 bp, Homo sapiens
ctctcccagaaaagaggtaacctgggggcatttgttgtatataaactgctgaagattctgtgtgtgtgtgtgtgtgtgtgtgtgtgtgtgtgtgtgtgtgwgagagagagagagagagacagagagagagatagacacatatttacactgattcctggaagttcttgtataatatcctcaggggtaaacatttagttctct

SEQ ID NO: 25748 - DNA, 201 bp, Homo sapiens
ccaggaggtggaggtttcagtgagccgagatcgcaccactgcactacagcctgcgcaacagagtactccgtctcaaaaaacaaaaacaaaaacaaacaaamaaaaaaattcccctaggatacatattacccataatctttagaactcagtttatatgtcacttcctgagggaagctttttctgacattggtgaacccccta

SEQ ID NO: 25749 - DNA, 201 bp, Homo sapiens
ctgccttgttaaacacagttaagaaacctaccaagtgtgctatccagctaaagtagaaaaatgaaatggacagttaaaactattaagctagttcataaatyctcatggctggaagctcttattcaatttcacttggaaaaacagccagagctcatttgagggcaaccgaagtagagaaaaattaagagcagagcatgcata

SEQ ID NO: 25750 - DNA, 201 bp, Homo sapiens
caaagtacagagttaggacacattgcctttgtttaaagataaagtcttagccgggcgcagtggctcacacctgtaatcccagcactttgggaggctgaggygagcagatcacctgaggtcaggagtttaagaccagcctgcccgacatggtgaaaccctgtctctactaaaagtacaaaaattagctgggtgtggcggtgc

SEQ ID NO: 25751 - DNA, 201 bp, Homo sapiens
ttagccgggcgcagtggctcacacctgtaatcccagcactttgggaggctgaggcgagcagatcacctgaggtcaggagtttaagaccagcctgcccgacrtggtgaaaccctgtctctactaaaagtacaaaaattagctgggtgtggcggtgcacgcctgtaatcccagctacttgggaggctgaggcatgagaatcac

SEQ ID NO: 25752 - DNA, 201 bp, Homo sapiens
gaggcgagcagatcacctgaggtcaggagtttaagaccagcctgcccgacatggtgaaaccctgtctctactaaaagtacaaaaattagctgggtgtggcrgtgcacgcctgtaatcccagctacttgggaggctgaggcatgagaatcacttgaacctgggaggcggaggccgcagtaagctgagactgcgccactgcac

SEQ ID NO: 25753 - DNA, 201 bp, Homo sapiens
agcagatcacctgaggtcaggagtttaagaccagcctgcccgacatggtgaaaccctgtctctactaaaagtacaaaaattagctgggtgtggcggtgcaygcctgtaatcccagctacttgggaggctgaggcatgagaatcacttgaacctgggaggcggaggccgcagtaagctgagactgcgccactgcactgcagc

SEQ ID NO: 25754 - DNA, 201 bp, Homo sapiens
aaagaaacagttaaactttggatttcttacccatataacttaactaccagatgtcttttgtgctgatgaaagctttaccgtgttatgaccaagatgccctyctaaggatcattatcatttgcctttttttttttttttttttttttttgagacgcagtctcactctgtcgcccaggctggagtgcagtggcgtgatctcag

SEQ ID NO: 25755 - DNA, 201 bp, Homo sapiens
attgaaagcattttcaaggtctaggggaaacaagacagaatgttaaatgaaaagtatatattttgtatatatgctcttagctatgttaaaataatgcattcaacaagaaaaatattaaaagattaatggattaaggacaattattctgtgttttttttacattttataagatttctacaatgaggatgtttcttttataat

SEQ ID NO: 25756 - DNA, 201 bp, Homo sapiens
caatgtacaaactttttttttttttaatgcatttaaaatgaagggcattctgcctttttttttttttttttttttttttttttaggggcaaagtcaatctyaatgtttcaagtctggatttaggcaactacatttactaggattttttaaattgtatcccttagcatgttgtttatttggtttttacttaaatgtttactt

SEQ ID NO: 25757 - DNA, 201 bp, Homo sapiens
gtgacagagtgagaccccgtcttaaaaaaaaagaaaagaaagaaaataatattattcaaaactccccattcccatcgctggtgtttgtaacctggggactrtcaatctggtaagagagaatgacaattgtttgtggacatgtgcacgtgattgtgcacattcactttgggaaaggcatatctccaattagttattaaaagt

SEQ ID NO: 25758 - DNA, 201 bp, Homo sapiens
gtaatgtgagtgaggcagaaaagaaggaaaactcaaggtgtcttatgaataggagtgtggcgtaattagttcatgcagctgtactcactgagctcctgctstagccctagcggtgttctaagctctagctggctcattagatgcagtgagtgtagcaatcagggaaggttacctcgtagttggtgacattaaatttcaaat

SEQ ID NO: 25759 - DNA, 201 bp, Homo sapiens
tgatttctttgccaaaaactcttcaatggttttcacttactcagagaccaaaaatctaagcattttcctatggcctggatggccccactcccctgaccccrtctcagtgctgtccctcctgcttgctgtgcttcagccacactggcttccttccttacctcagggttcaccaatctggatcttgtctcataaactttgttc

SEQ ID NO: 25760 - DNA, 201 bp, Homo sapiens
cctgtcatcttctcttttaaccttctatttggaaatactttcaaacttacagataaagtcgtgagaatagtataaggaataccatgttgtctacctttttstcagattcacctattaacattttgctctatgtgctttattattttttctctcttgcatttgaatcatttgagaaaaagttgtatatgtcatggcccttta

SEQ ID NO: 25761 - DNA, 201 bp, Homo sapiens
tgtggatcatagtcctcttggggatgttgttcatttaatattaacattttttaagcttgccatgtatcgtgggtgtatctgtttggtttcctttggtaactgcattttgccatgacccttgataccagctctactgctacagccctaggctaggccaccgtcatctgtggcctggaccctttcagtcctaactggttgccg

SEQ ID NO: 25762 - DNA, 201 bp, Homo sapiens
cagcaaaaggagatatctttttcccgtttttgcatgtagaaactagagatgggtaaagcagatgtgtttgcctttttttttttaattggcactttatttastaaatataacagctttaactggcaaagcaaatgcaggaaaaagcaactaatgtttaatatgctgaactgtccacttcttacaaattgcttcatttgtatt

SEQ ID NO: 25763 - DNA, 201 bp, Homo sapiens
gcaccaccagattcggcatctggtgagggctcactccctgattcatagatggtgccttcttgctgtgtcttcacgtggcagaaaaggcagagaagctcttyagggtctttttgttgttttgttttgagacggagtctcgctctgttgcctaggctggagtgcggtggcacaatctcggctcactgcaacctctgcctcccg

SEQ ID NO: 25764 - DNA, 201 bp, Homo sapiens
ggcattctatcagttaagacaacttagaatatttgatcccattcagaactttttcatttgttttaaagcaggaaaagtaaaggaagtcaatgtaataactyttcttctttaaaatgtggatcatagtcctcttggggatgttgttcatttaatattaacattttttaagcttgccatgtatcgtgggtgtatctgtttggt

SEQ ID NO: 25765 - DNA, 201 bp, Homo sapiens
attgattaatcactggacatttagtttccatttttttttttttttttttgctgttataaatagtgctttatgaacatcttactgcatgaagcctttctggraagacttttggatatcactggattattggaccaaagtatatagacatttttaaggagaatcttgagtcagacctggcaaaagaaattaacagcagccacc

SEQ ID NO: 25766 - DNA, 201 bp, Homo sapiens
ttctagttgtcgtattaccctagtaagatctcaaatctgtgatgttcatcatggtcatttgttgagcgcccactgggtgccactgccccctgcactttacrattgttatctcattgactgttcacaacatctctacaaggttgaggttgtcctctttcacagatgaggaaactgaggctcagagagactgatttacttgtg

SEQ ID NO: 25767 - DNA, 201 bp, Homo sapiens
tctcaggtgtttgaatgctggttggctatgggttggtctaggatggcctcagatggaacagctgggtttccctctccttggtctctcatcctccagcaagyccaggcctattctcatggtggtagtaggtagacggtggacatgaacaagagtggcctcttgaggccaaggcatgaaactggtactctggcatttccaccg

SEQ ID NO: 25768 - DNA, 201 bp, Homo sapiens
aagaaaagaaaaaagccaagttcccaaaaaagctcattttaaccaccccactgcttagcctactcactctttttattccacgggtgatcactttgtctgargcaactttgttaataaggcagctgttgtgtatcaggcagagaacctgactgggccctctagagacaataatccccgtctttaaaggttgtttacagagtt

SEQ ID NO: 25769 - DNA, 201 bp, Homo sapiens
aaatccaatgataaataccaattggcaaaactcagagtgaacctaagtgtttatactatactgcctatacatttaaaaattacagtttttggctgggtgcrgtggcttacacctgtaatcccagcactttggccaaggcaggcagatcatctgaggtcaggagttcgagaccagcctggccaacatggcgaaacaccgtct

SEQ ID NO: 25770 - DNA, 201 bp, Homo sapiens; identical to SEQ ID NO: 3241

SEQ ID NO: 25771 - DNA, 201 bp, Homo sapiens
tgcttttctatttaaacactgctacacaatttaatgattttaagcatttagaagtctgctacatcagaaggttggtggttgggaggagttactattttatragttcattctaatagaggttattattgtctgtataagagaaatttggtagacatctaaaacaagtctgtatattaaaaataataacttgatgaacaaaaa

SEQ ID NO: 25772 - DNA, 201 bp, Homo sapiens
gggcttgatcagtgttggccatggttttcctctgctaagggtacccacagtatgctttcttttgttctcagttgatgcgctatttatttactgaagggatyataatccccaattcccattacaattcttaaccttttgaaaagatattagaaagggatttttctgtcgaatacatactaagtaaaaattatggattacctg

SEQ ID NO: 25773 - DNA, 201 bp, Homo sapiens
ttccttgaagccaggagtttgagactggcctgggcagcaaagcaagaccccatctctgtaaaaaataaaaataaaaatattatccagcatggtggcatgakcctgtaattacaggtaccggggaggctgagtcaagaagatcatttgagcccaggagttcagggactgcagtgagctctcatcatgccactacactccagc

SEQ ID NO: 25774 - DNA, 201 bp, Homo sapiens
ggttggctatgggttggtctaggatggcctcagatggaacagctgggtttccctctccttggtctctcatcctccagcaagcccaggcctattctcatggyggtagtaggtagacggtggacatgaacaagagtggcctcttgaggccaaggcatgaaactggtactctggcatttccaccgcattctgtattggccaaag

SEQ ID NO: 25775 - DNA, 201 bp, Homo sapiens
aggctgagtcaagaagatcatttgagcccaggagttcagggactgcagtgagctctcatcatgccactacactccagcctgggtgacagagcaagaccctktctcaaaaaaaaaaaaaaaaaaattcctgtttgtgaccagcccggccaacgtggtgaaacctcacctctactaaaaacacaaaaattagccggccatggt

SEQ ID NO: 25776 - DNA, 201 bp, Homo sapiens
caggcaaggaaactgagatgccagaggttgcacagctgcaagaggctggctaactgctcattggcaaactcttgacaccagcctctggggtttaattaacyactatttaaggctgagttaggtggtttctgccgagataatcaacacaatggccttatataaaaaagacaaaacaggcgccacatttaaaggggccctggc

SEQ ID NO: 25777 - DNA, 201 bp, Homo sapiens
ctacagcaaggaacttatcaaacttgactcttgctcatgagattgctgtaaatgagaactttcaattgaaacaagaggctctcccagaaaagaggtaacckgggggcatttgttgtatataaactgctgaagattctgtgtgtgtgtgtgtgtgtgtgtgtgtgtgtgtgtgtgtgtgagagagagagagagagagacaga

SEQ ID NO: 25778 - DNA, 201 bp, Homo sapiens
ttgaaagcattttcaaggtctaggggaaacaagacagaatgttaaatgaaaagtatatattttgtatatatgctcttagctatgttaaaataatgcattcaacaagaaaaatattaaaagattaatggattaaggacaattattctgtgttttttttacattttataagatttctacaatgaggatgtttcttttataatc

SEQ ID NO: 25779 - DNA, 201 bp, Homo sapiens
tgtttttctttcagcaacaagccctccaagggttgtaacatttgatgaagtgatggctacagcaaggaacttatcaaacttgactcttgctcatgagattkctgtaaatgagaactttcaattgaaacaagaggctctcccagaaaagaggtaacctgggggcatttgttgtatataaactgctgaagattctgtgtgtgt

SEQ ID NO: 25780 - DNA, 201 bp, Homo sapiens
tgaaagcattttcaaggtctaggggaaacaagacagaatgttaaatgaaaagtatatattttgtatatatgctcttagctatgttaaaataatgcattcaacaagaaaaatattaaaagattaatggattaaggacaattattctgtgttttttttacattttataagatttctacaatgaggatgtttcttttataatca

SEQ ID NO: 25781 - DNA, 201 bp, Homo sapiens
gttcaagtaattctcctgcctcagcctcccaagtatctgggactacaggctcatgccaccatgcctggctaattttttgtattttattttattttattttwttatttttattttttttgagacggagtctcactctgtcgcccaggccggactgcggactgcagtggcgcaatctcggctcactgcaagctccgcttcccg

SEQ ID NO: 25782 - DNA, 201 bp, Homo sapiens
caagtaattctcctgcctcagcctcccaagtatctgggactacaggctcatgccaccatgcctggctaattttttgtattttattttattttatttttttwtttttattttttttgagacggagtctcactctgtcgcccaggccggactgcggactgcagtggcgcaatctcggctcactgcaagctccgcttcccgggt

SEQ ID NO: 25783 - DNA, 201 bp, Homo sapiens
aagtgctcagtgagcctgccataattattatttatttttgaactgtgtggtggtaggaggtgttccttaagaatttttgtttgcaaacatttcttccccartttaacctaccaccatggcagctgtcactcactgattcaccaaaaattgggtcaatcattatcttgtttttattaatttttcttgtatgtatagctcaca

SEQ ID NO: 25784 - DNA, 201 bp, Homo sapiens; identical to SEQ ID NO: 3244

SEQ ID NO: 25785 - DNA, 201 bp, Homo sapiens; identical to SEQ ID NO: 3246

SEQ ID NO: 25786 - DNA, 201 bp, Homo sapiens; identical to SEQ ID NO: 3248

SEQ ID NO: 25787 - DNA, 201 bp, Homo sapiens; identical to SEQ ID NO: 3249

SEQ ID NO: 25788 - DNA, 201 bp, Homo sapiens
ggattatctattttgccttttctggagggctctggcctatttcctgttttattctttaggcactgttcaagaaggacatcaggacaagtttgactgtctaraagagttcttgtaatagagtggtatttaagctatcacagcagtgggcacaatcagaatttcaaaactgcaagaggttggactgttctgaatttgaatctt

SEQ ID NO: 25789 - DNA, 201 bp, Homo sapiens; identical to SEQ ID NO: 3237

SEQ ID NO: 25790 - DNA, 201 bp, Homo sapiens; identical to SEQ ID NO: 3258

SEQ ID NO: 25791 - DNA, 201 bp, Homo sapiens
ctgtgccaggaactctacctccagtgaattgctggaagaaagtgtagtttcacattgttaagcatgactgccataagcacatttaatttctcagaacttctagtgatgcctcatggaactctgggtttggagcatcatatattccttgctgagagaaaccttatgactggcccaacctctcagaaaaatgtgcataaagtc

SEQ ID NO: 25792 - DNA, 201 bp, Homo sapiens
aagtataaaacctcatttccagtgatacatattttttatccagaagaattgaacttgataaacttgtctaaagtggaaggacaatctaactggacattgtytttaaggtcatagtctttaaggtcaaattaagtatgagactcaagttcagtgatttcttccttcctcactgcttccttctccctttcccatcttgacttc

SEQ ID NO: 25793 - DNA, 201 bp, Homo sapiens
caaaaaaaaaaaaaaaaaaattcctgtttgtgaccagcccggccaacgtggtgaaacctcacctctactaaaaacacaaaaattagccggccatggtggtrgggcgcgtgtaatcccagctacttgggaggctgaggcaggagaattgcgtgaacccaggaggtggaggtttcagtgagccgagatcgcaccactgcacta

SEQ ID NO: 25794 - DNA, 201 bp, Homo sapiens
cccgggttcaagtaattctcctgcctcagcctcccaagtatctgggactacaggctcatgccaccatgcctggctaattttttgtattttattttattttwtttttttatttttattttttttgagacggagtctcactctgtcgcccaggccggactgcggactgcagtggcgcaatctcggctcactgcaagctccgct

SEQ ID NO: 25795 - DNA, 201 bp, Homo sapiens
gatcaagttcactggcagagtttccccctgcacctcctggagtagcgtgaaggctggaaaaatagtgccatggacacagcttagggtgatgctaaagcgcrgagactctggtttagtgacgggttctctctttaagtctctctttcctgagtacttacagggtagtcataagaactaaatgaggtgacagttgtaatgtta

SEQ ID NO: 25796 - DNA, 201 bp, Homo sapiens
ctgtaatccagctactcgagaggctgaggcaggagaatctcttgaccccaggaggtggaggttgcagtgagctgagattgcaccactgcactccagcctgrcaacagagtgagactccatctcaaaaaaataaataaataaataaataaataaataaataaataaatattacagttttaaaaatcagttatttcatattga

SEQ ID NO: 25797 - DNA, 201 bp, Homo sapiens
gttctctctttaagtctctctttcctgagtacttacagggtagtcataagaactaaatgaggtgacagttgtaatgttagctaacatttacaagggcttgmtctattccaagcactagattgttcatttcttcttatcagaacactgtacagtagttgctcctgttattcttatttattaaaaatccaagttttctgactc

SEQ ID NO: 25798 - DNA, 201 bp, Homo sapiens
tgagattgcaccactgcactccagcctggcaacagagtgagactccatctcaaaaaaataaataaataaataaataaataaataaataaataaatattacrgttttaaaaatcagttatttcatattgagtttacttaatgagacttctgaattacagaataaaaataattttatcaatttcctatataatacatataata

SEQ ID NO: 25799 - DNA, 201 bp, Homo sapiens; identical to SEQ ID NO: 3240

SEQ ID NO: 25800 - DNA, 201 bp, Homo sapiens
gaggaaccgtcgaggaagctgggcatgttctgcttggtaacaaggagactcaggtgggccatggccccatccaccctccctgttgacagcaactcagagastggtgaaattctgtagggcagactaggattcatgagagggaggaagcagacagctggttttgaccttcctgatagttggagctgttttaactttggaatg

SEQ ID NO: 25801 - DNA, 201 bp, Homo sapiens
ggcatcttttgaagcaactctgtgtgagttgtttgtcatagaaactgctagcaagggaactctgctaataataactattaggcacctagtaacctatattrtagtaatatttaagtgccatatgcttaaaaatgaaatgaattcaagtataaaacctcatttccagtgatacatattttttatccagaagaattgaacttg

SEQ ID NO: 25802 - DNA, 201 bp, Homo sapiens
ccctaggctaggccaccgtcatctgtggcctggaccctttcagtcctaactggttgccgtgtctcctttcttagcccccaacagttcatcttccatatccmgtagccttaatgatgtttttaaagaatgagctatattagatgatttctttgccaaaaactcttcaatggttttcacttactcagagaccaaaaatctaag

SEQ ID NO: 25803 - DNA, 201 bp, Homo sapiens
agaaaggctttatttagacaatacgtcatatctgatcaaatgttttcatgaactttatttcatgttattctttaaaaaaattctgtgggacataaatatcrctttcagaatatttgaaactctattgtgattgccttcacctgtcacatgaggggttcaagaaatatttatggaatattttaaagaagagcaaactgatgc

SEQ ID NO: 25804 - DNA, 201 bp, Homo sapiens
taaatattcgtagcagccttatttgtataaccccaaactgaaacaaccaaaatggctttcaacaggtaagtagataaacagactgtggtatatccatacartagaataccactcagtaataaaaaggaatgaactattgatacatacaacttggatggatgcttagaaaacaaagccaatctcaaagggttattttgctgg

SEQ ID NO: 25805 - DNA, 201 bp, Homo sapiens
aacagactgtggtatatccatacaatagaataccactcagtaataaaaaggaatgaactattgatacatacaacttggatggatgcttagaaaacaaagcyaatctcaaagggttattttgctggtctgctcaggctaccataacaaagtaccacagactgggtagcttaatattagtttatttttcacagttctcaaggc

SEQ ID NO: 25806 - DNA, 201 bp, Homo sapiens
atgttttccagataacatctcctttaaagcattggcttttctttaaggagatctgctgagattctgctccctcaagctagcacgctaactggtatctacaraaagaaaagaaaagaaaagaaaaaagccaagttcccaaaaaagctcattttaaccaccccactgcttagcctactcactctttttattccacgggtgatc

SEQ ID NO: 25807 - DNA, 201 bp, Homo sapiens
actaaataactcactctttaattacctttacaactttctggactctatatattggagattatttatcagttacttgaataatgtgaaggagcttattatcyttggtcatgatcagccaaaagttctaggtatttgacctctgaatatcttcatttgttgtttttgattggtgttatagatttactgctcaggcatagatga

SEQ ID NO: 25808 - DNA, 201 bp, Homo sapiens
aagaaactgcaggcattttcagacatactatacatagttgtggtttcccattctggccgctttaaaagcactgcatccctcattgcatgggctggtttagstttaaaaggattcagtgaactcttcctctcattattgtccatccaggatttgaggtgcctttctccttgagcccgggtttccccttcagtgtcaggtgat

SEQ ID NO: 25809 - DNA, 201 bp, Homo sapiens
aggtgagtgtctccactccactccttgcccttcagcctgcacaagtggactctagtggttttctgcttgcaaaagtggtgggctcagcaaggatacatttytgtggcaggattgaagacggttgtttaggtgaggcaaggcgcaaatgaccttagacctttcacccttattagatccctctcagactcatccttgtcccca

SEQ ID NO: 25810 - DNA, 201 bp, Homo sapiens
agagcatgacaaggacctgagaatcttgaggtttaaatctaataagataggcttaagcagtagattctctgctctaaggcttgggctttggcagtaccagsctggttaacgtgtcatgatatcaggttgcaaatgttctggttgaagctgtaccaaatgagattcagggattctgatttagctgacactgaatgaatactt

SEQ ID NO: 25811 - DNA, 201 bp, Homo sapiens
gctacatagacgataacttccttgtgatccaagagggaagaagagtctgcaacactttttgccattgaagcagagttttcttttttgtgtatggtggccayattgagaattgagttttatgtaaatgttttggaaaggtaggagaaagactggtctgcatgtagtgggtaatttactttgcaatcttgggcaggttaatag

SEQ ID NO: 25812 - DNA, 201 bp, Homo sapiens
cacagtccaattcaggggtccttgatcagacaaccctccacgtgtcatccagggacccagcctcctcctgtgcttggctctacccttgctcaggtccttasagtcctctccattcagctggcaaatgggaaagagaccatggggaagacatatgcaatatatagccacctcagcccagaagtgacacattctctttgacca

SEQ ID NO: 25813 - DNA, 201 bp, Homo sapiens
gcagtgtgtgggagaggaccagccaagcgattctgattcttcccggttttccgaaagcatggcttcgctcagtgactatgaatgctccaggcagagctttrcaagtgactcctccagcaaatccagctctcctgcttgtgagccgatgggggagcaggggttgtgggtggcaggggtacttctagatatgtgttggatttg

SEQ ID NO: 25814 - DNA, 201 bp, Homo sapiens
tattcctaaatacaaaaccacagtacatttcaacttcagtatatttaacattggataacagacagtagattcaaatattgttaacagtgctattgattgactgatactgtcctttacagcatttttgcttcagtataggatccactctaggatcacctattgcactcagttatcaagtgtttttttttcatttggaacata

SEQ ID NO: 25815 - DNA, 201 bp, Homo sapiens
gactggcccaacctctcagaaaaatgtgcataaagtcacacggcacattaatgatgaacccaggccacaaaccctggactcctgactcccaattattttartctttgcacttttctgccttgttaaacacagttaagaaacctaccaagtgtgctatccagctaaagtagaaaaatgaaatggacagttaaaactattaag

SEQ ID NO: 25816 - DNA, 201 bp, Homo sapiens
tttatcagtcagctattgctgcataacaaaataccacaaaactcctgagcttaaaaaaaataagcatttattattactcaccagtctgtgaggcgaccggstggctcttttggtcttgctgaactcactaatgtatttgtggttcagctgtgactcaggatggaagctttgctgatcctggctggactttctcaggtgttt

SEQ ID NO: 25817 - DNA, 201 bp, Homo sapiens
atagatttactgctcaggcatagatgaattgagtctacttcatttatcaagtgcattttttaaaatgtgtgaatgaatccactcagaccaacaagtttaaraagtaaattggtgttttctgtccctttctgatagccctgcaatataaatggggttgcaggtgcatttttggggaccacattttctgcttatgcttttcta

SEQ ID NO: 25818 - DNA, 201 bp, Homo sapiens
gctttcaaatggtgttgttcatccttatccctggggacatggaatgctggggatccaagcttcaactttgcccccagaaaggaacagtgttggtgtatacracattgtgggctgctggagaggctgctcctaagaggggacagttgataacaataacagattatgaccactgtcacctgtggccaagcccttatctatata

SEQ ID NO: 25819 - DNA, 201 bp, Homo sapiens
acatggtgaccccatctgtaactaaaaatacaaaaattagctggatgtggtggtgcacccctgtaatcccagctactcaggaggctggggcaggagaatckcttgaacctgggaggcggagattgcagtgagccaagatcacaccactgcactccggcctggtgacagagcgagactccatctcaaaaaaaaaagaaaaga

SEQ ID NO: 25820 - DNA, 201 bp, Homo sapiens
tttttttgtagagatgaagtttcactatattgcccaggctggtctcgaactcctaggctcaatcagtctcccacctcggcctcccaaagtgctgggattayaggtgtgagccactacgcctggcaccatgtaatttattgttcaaccagggtacttttgagagtctctttttaaaattatgccaggacaacaggtgtaaat

SEQ ID NO: 25821 - DNA, 201 bp, Homo sapiens; identical to SEQ ID NO: 3256

SEQ ID NO: 25822 - DNA, 201 bp, Homo sapiens
tctaaggatcattatcatttgcctttttttttttttttttttttttttgagacgcagtctcactctgtcgcccaggctggagtgcagtggcgtgatctcarctcactgcaacctctgcctcctgggttcaagcaattctcctgcctcagcctcctgagtagctgggactacaggcgcccgccaccacgcccagctaatttt

SEQ ID NO: 25823 - DNA, 201 bp, Homo sapiens
tcaagtgctgggattacaggcgtgagccaccatgcccggcctcatttgccattcttttttttttttttttctttgagatggagtctcactctattgcccargctggagtgctgtggcacaatctcggctcactgcaacctctgcctcccggattcaagtgattctcctgcctcagccttccgagtagctgggattacaggc

SEQ ID NO: 25824 - DNA, 201 bp, Homo sapiens
ccattcttttttttttttttttctttgagatggagtctcactctattgcccaggctggagtgctgtggcacaatctcggctcactgcaacctctgcctccyggattcaagtgattctcctgcctcagccttccgagtagctgggattacaggcatgcaccaccatgcccagctaatttttgtatttttactagagacaggg

SEQ ID NO: 25825 - DNA, 201 bp, Homo sapiens
actattaagctagttcataaattctcatggctggaagctcttattcaatttcacttggaaaaacagccagagctcatttgagggcaaccgaagtagagaaraattaagagcagagcatgcatagcacagcggttacattacaggggaataactgggggaaaaatgacttaaagtggaaacaaactttaagatattcaaata

SEQ ID NO: 25826 - DNA, 201 bp, Homo sapiens
ctcaaactcctgacctcgtgatccgcccgcctcagcctcccaaagtgctgggattacaggcgtgaaccactgcgcccggcctcatttgccattcttgagcrttaaatcaaaccttgcaaagttgggcactagttgccactgagactttagagaaatctgcttatcctggaattactcttcttggagtgctgcgggaagcac

SEQ ID NO: 25827 - DNA, 201 bp, Homo sapiens
gacagttaaaactattaagctagttcataaattctcatggctggaagctcttattcaatttcacttggaaaaacagccagagctcatttgagggcaaccgwagtagagaaaaattaagagcagagcatgcatagcacagcggttacattacaggggaataactgggggaaaaatgacttaaagtggaaacaaactttaaga

SEQ ID NO: 25828 - DNA, 201 bp, Homo sapiens
ttcccgaaaataggtttaaaattatgtgcctgatctttctgaaagagggggtaactgaaagaggggaggatttgaaagccagacccaggagaatcactaakgagttctgtagttgattggcaaagtgtgctataggaatggggagtacctcctttgtgcaacatatttgtgcttctcagttgcatctctcaagactaaagt

SEQ ID NO: 25829 - DNA, 201 bp, Homo sapiens
acctaccaagtgtgctatccagctaaagtagaaaaatgaaatggacagttaaaactattaagctagttcataaattctcatggctggaagctcttattcamtttcacttggaaaaacagccagagctcatttgagggcaaccgaagtagagaaaaattaagagcagagcatgcatagcacagcggttacattacaggggaa

SEQ ID NO: 25830 - DNA, 201 bp, Homo sapiens
acacagtgatgggccattcgcttttggtttttgtctgtcaaacaagtgccaagagttctgttctatgttaactaccagccttgtttgtctgttgaagaatrtggtgttatcctgacataaaactgttcttccctccagagtgtttaattcctgaggcaatgatattaacaaaaaaaagcaaataatagaaaacatttgtat

SEQ ID NO: 25831 - DNA, 201 bp, Homo sapiens
taatcaagaggagccgggatcaagaacccagtccacctagctccagaggcaatgttcttatggcttcagtgacatgtattatcatcagtgtatctttgcarttctgaaccagtgcagaactatttgcagatagagttgctgcagaaaggaaatcaggaagtaaagctgcacacgagctgaggaatcacaagcaaattaaaa

SEQ ID NO: 25832 - DNA, 201 bp, Homo sapiens
cacttactaggagcttaagtacttgacagatactatttcagttaatcttcacaacacttctacaaggtggatactattattgtcccattttacaaatggcragttctctgtttctagtcagtaaataatcaagaggagccgggatcaagaacccagtccacctagctccagaggcaatgttcttatggcttcagtgacatg

SEQ ID NO: 25833 - DNA, 201 bp, Homo sapiens
ggtttttgctttgctgtggatgaataactttagtgctgctatttaagactgattctaaagcagcattttgcagaagatggaaatttttcacatcatctgcmatttttttctttagagcccagacttagtcctctgactcccttccctttactacacatatgtgaaggcttgtccttgcagctgacctcgatctagtgttga

SEQ ID NO: 25834 - DNA, 201 bp, Homo sapiens
ctcaccctcctccagacctccacctttaagtgtaggagccagtatctgttgttcccctttatgtccatgtttactcagtgtttagttcccacttataagcragaacatgtggtatttggttttctgtttctgaattaatttgcttaggataatggtctccagttttacccatgttgctgcaaagaacatgatcttattctt

SEQ ID NO: 25835 - DNA, 201 bp, Homo sapiens
tgagaacttaagatgattcaggtacagatgtgtggcacgtaatatgtactcaatgaatgctagctattaataactagtcattaaatcatcctctttataaytgtatctggttgtttatctggttgtttcattgtttaaatttttttcctgtgttaggaaatcaatacaatcaattctcaattatcctcattacggatgggg

SEQ ID NO: 25836 - DNA, 201 bp, Homo sapiens
cacgtgtatgagcttctatgaaacatgaccctaccaaatggcaattggaactttaaaaccattttggggatgtttattgttttcagcctggaacatagatmattgttagtgaatttcagcttcacttcttaatcatctctctattttaattctaaaatttttagacaaatattccatgtcctggacctcatgcaaatggac

SEQ ID NO: 25837 - DNA, 201 bp, Homo sapiens
actgaagggccctggatccccttgccccgtcgcgccgtcgtccccccgctatccggttttgtgatggccgcgccgtggctgcctccctagagtccctcagsgccctttaaataccgcgttgggggggacactggggctgggggggtttgttgggctggtgagttttcgaggtgactgtgctgtgctcggtgaggggacgcc

SEQ ID NO: 25838 - DNA, 201 bp, Homo sapiens
tttccctttagcctaagaactcactgattaaaagcaagaaaaatctagggcagtacattgtagtggataaaaagtcggaaggtaaaaattttattacaatsagtctatccttgggttacagaattccaacgtcaggtccagtgtgggcttataacaaattccagtcaaggcagaatgccaagaacttatttcttattgctg

SEQ ID NO: 25839 - DNA, 201 bp, Homo sapiens
cttttgaaaagatattagaaagggatttttctgtcgaatacatactaagtaaaaattatggattacctgctgtgtaaattatttgcatgcctacgtctactttttttttttttgagatggagtcttgctctgtcgcccagtctggagtgcagtggtgtgatcttggctcactgcaacctctgcctcctgggttcaagaaga

SEQ ID NO: 25840 - DNA, 201 bp, Homo sapiens
agctaatgagtggtaaaggccagaccgaagttgagactgcctggctcagaggccacggctcccaactactgcaccagccacttgctctgcatgggggagcytagcacaagttcttagtcacatgttgattgctttgatattaggttgcactaaattgagattcattcatctgcaatgcaaatttgactccccagtcaagct

SEQ ID NO: 25841 - DNA, 201 bp, Homo sapiens
tcttaatcctgtccccaggaaaagccgaggttgcaggtgcctcatgaggctgaccttgcttttggaaccagagagagcagtcaccgtgccagcctgtgagrgtgaagtctctgccgatccctaagagaagagccaacgtttcactctaaacgcatgctccttctgctttaccggtcattctcaagtctgactacaaattag

SEQ ID NO: 25842 - DNA, 201 bp, Homo sapiens
gatagcaaggctccattgtcacgatggttgatgtgggctgtaaacgtaggccatccctgaacactctcaccactcagatcccgggaaggagtcggctctgytgggcacgtgactctgctcggccagcccctggtcgggaagatggggcctctgaattgagactcacaaaagaaaacatggaaccagaggaaatggtttctc

SEQ ID NO: 25843 - DNA, 201 bp, Homo sapiens
gcaggtgctacctttttacccacacttaagtgacgcaaaatgcccttcaatggcgagaagcagtgtgtgggagaggaccagccaagcgattctgattcttyccggttttccgaaagcatggcttcgctcagtgactatgaatgctccaggcagagctttgcaagtgactcctccagcaaatccagctctcctgcttgtgag

SEQ ID NO: 25844 - DNA, 201 bp, Homo sapiens
tggccagcaggaaaacaatgtacaaactttttttttttttaatgcatttaaaatgaagggcattctgcctttttttttttttttttttttttttttttagkggcaaagtcaatcttaatgtttcaagtctggatttaggcaactacatttactaggattttttaaattgtatcccttagcatgttgtttatttggttttta

SEQ ID NO: 25845 - DNA, 201 bp, Homo sapiens
aagaatcattgaatctcttgaaacatgagaaggtcacaaacaaaatctatgttttggaaagattgccctgacaacacttgttgatgctagaatattcctaygtctagtgtatgtatgtttacatgcactcacacgtgaagacatgataccagcaatttaaatggactctggttaactgaagcagaaaaggagtttattgga

SEQ ID NO: 25846 - DNA, 201 bp, Homo sapiens
tgcctcatttgcttaagatctaaagtcccacatatcaagattcagttgagtgagtcttaagtgcccaggctttaatttgcaggggatggagtgagggaatwacgatccttacactcctgtggtcccaccaaagtcatccaattagagatttctcccaaattgagagggcatgccgagaagcagaaagagaaaaataaatcc

SEQ ID NO: 25847 - DNA, 201 bp, Homo sapiens
atttcatttgattttaaaactgagggcctgtgttcatccatgaacactttagaaaagcaatcatttagaaaatggttgattgcctgctggcctggagatgrgctaaagagagtgactggcttggtcagaggtctgagccatcacctgtttggcctcccataggtgttcctttgagcttcaactctctttggcccctcccac

SEQ ID NO: 25848 - DNA, 201 bp, Homo sapiens
gaaaccaggtctcccaaatccaagtccagattaaaccaagctgctactttttcagccttctttgaatttttcagttttgtgttatattacctgagttgtaytgcaaggaacagaaaccaactctagctgacttagccaaagggaagtgaatggaaggatggaggaagtttgcagaatcaaaggaaaagccaaaatgtcaga

SEQ ID NO: 25849 - DNA, 201 bp, Homo sapiens
tttctcaaagcatagttcaaagcaggggggtagagtggcgttggggggcgggtcttccatttagccatccagagacccaacgtcatccatgtcatgactcygctgccctctaaatcttcattcactcagctgatagggaaagaaaaagactgcccacttccactcatgttccattggccagaattcaataatgtggcctca

SEQ ID NO: 25850 - DNA, 201 bp, Homo sapiens
aggtagtataattattaaagtcccatataactttgagaaaggacatttgtccagtttatcatcaaagaaagggaaggttttagaggtcagagtttggggcmaaaaacatgtttaaaatgaaagcaaactccatgcactttggctatcgaagaatagggcttgaggagaagaacttaaaaagtaaagatcaatattccccca

SEQ ID NO: 25851 - DNA, 201 bp, Homo sapiens
aatatcctcagtgccttttgaatcaagtaggtttgtccccaggtgacttacttggaaactcaagaccgagaaaggtaagagcaggtatgaaggaacttgcrgaagaccattcacacagtgatgggccattcgcttttggtttttgtctgtcaaacaagtgccaagagttctgttctatgttaactaccagccttgtttgtc

SEQ ID NO: 25852 - DNA, 201 bp, Homo sapiens
agtcggctctgctgggcacgtgactctgctcggccagcccctggtcgggaagatggggcctctgaattgagactcacaaaagaaaacatggaaccagaggaaatggtttctcagagaaagccagcaccaaaagaagggaaagtgagatgttgccaggcaaaaaaaaaagatgtcatggataaggaaactacatttttccaa

SEQ ID NO: 25853 - DNA, 201 bp, Homo sapiens
aaattggaggcttctgtcattctgattacttatccaacgaatgacacaaataagagcatgtttgtagggaagaactcaggtggggacagcaccttctattyaatctcttaacctgtattattaggttgtatattttaggagaagagaggaaagtggcaaaaggaggcacagatacaaatttatacagatcaccagctaagt

SEQ ID NO: 25854 - DNA, 201 bp, Homo sapiens
aggctgagaggttgcaaatccaactgtaattacatttttagatttttgtcaatgatttattataatttaaaactcagatttcagatgtgtaaaaagaaaaygagtatttctatttcttcatcgaacaaaaattttgatctgcccttagtcttttgccaagagtgatagaccacatttagtctaccgtgtaatttacaggga

SEQ ID NO: 25855 - DNA, 201 bp, Homo sapiens
tggggccttgtgcaactgcccagactgcacgaacatgaagccagccgtgggaaagaagcttggaacataatgagaagctcagaaactcagataaacacagkaagagaagcctcacaactcccatagagagaaataggggacaagatcactggaagtatttaaattattctcttgtgttcctcatattctgtcctagatgag

SEQ ID NO: 25856 - DNA, 201 bp, Homo sapiens
aatctaccttatcttccaaatcacaggatatagaacaaaaaaaaattgcctaaaaggtgtggttaattttttttaatagaccttatttttagagctcacartaaaattgagtaggaggtatgcagttaatttttgaacattcagggcctaattctctagttggtgtattagccaaattcattttcttctttttgctttcta

SEQ ID NO: 25857 - DNA, 201 bp, Homo sapiens; identical to SEQ ID NO: 3239

SEQ ID NO: 25858 - DNA, 201 bp, Homo sapiens
aatgtgaactgagcccacctgtctagggttttctccaaaggtgaagacaaatagccgccaccaattccaatttgctttttgccattcctaatacttggcayttaggtaatctccctctcctactcttcatttaaatgtttacattctcccaaagtacctcaaatggtgtaatctggagaaaaataagtggcttaagatcac

SEQ ID NO: 25859 - DNA, 201 bp, Homo sapiens
gccgcgctgtggccctgcggggtcgaggagtctggtagcggacaggtttccagccttgtacaagccaccggcagcccgagagaagtcagtcggactcccaycgaacccggggcgcacgccagagggccggacgcagcgagtccttctgccccgcttcagcacgtgtcccatttcggttatctcattggctctattcagccc

SEQ ID NO: 25860 - DNA, 201 bp, Homo sapiens
ccagtgactattagcacacctatgtgccagatgccttacatatctaacctcatgcaagtcccaccaccaccctgccctttgttgattcaatagatacttgscaaaggcctgctctgtgcaagacggtggggccagtaagtatagcccctgccctcaaggagcttaagccccattttctgctgaaatggggagcagaggtgg

SEQ ID NO: 25861 - DNA, 201 bp, Homo sapiens
acctgcacgagtacatggagatgtgcagcatgaagcgaggcctggacgtgcagatggagacctgccgccggctcatcaaaggctccgcagacaggtacccrcccatcctcccaggggattcagctatggcatccttggaggggaattcccaaggctgcaactcggccatgtgtcatgctcccaacctgtctctctgtccgt

SEQ ID NO: 25862 - DNA, 201 bp, Homo sapiens
tgccttgcctggaggcagaaggagggggctctgggtttgactgggattgtggtccccaggggtccgtggcctttaaggctcttctctcttttctgtttccsccacctgtgttacagtcttaaaaatactgtacataaaagatatatgtagagagagagagagagcgtgagaatgtgttagtgactatgtgtgatgtaattt

SEQ ID NO: 25863 - DNA, 201 bp, Homo sapiens
tggcatttcccaccattccttagacattctctgctcttgaactcctccaaccagtggctggggcagtgcctttggcctggaatgtcctgctggccacctcrgtgagcccatccagtgctttgtggccttggcaaggcagcttctgtcccttcagtatcctcgtctgcaaaatggggatgattgtattaacagccacgtagc

SEQ ID NO: 25864 - DNA, 201 bp, Homo sapiens
tgatccgtttccccccgaggatcgaggtggtgcgctctggacggggttgtgcattctcgccgcgcccgggcggacgatccagcgaacagccccgcttctarcccgagatgctgctgccggcgcccgcgctccgccgcgccctgctgtcccgcccctggaccggggccgggtgagtgagcacggggcccggggcggcccgag

SEQ ID NO: 25865 - DNA, 201 bp, Homo sapiens
tctgagttaatcagtggccctctcccttcccccaagggatggcatggtggtgctctgagcacaagtgagttgcaacactgctgtgtgtcctctgtgggtgragaggggataggaaagggcgcaggaagaggacatgggacagaggggttcctcttctaggctgagactggggccacacttgccatactccctgtgtgatcc

SEQ ID NO: 25866 - DNA, 201 bp, Homo sapiens
ttgatgtccggaggcagggtcctgatggcatggtgtccaatggtggccttgatggcaccatccctgaggaatccaggaggagaggttgccgaggcttctgycacgaggatgacttgccctcacccttattcctcattggttcctcccagctcgagctggccacagccaaaagtgacatgaaccgacacctgcacgagtaca

SEQ ID NO: 25867 - DNA, 201 bp, Homo sapiens; identical to SEQ ID NO: 3285

SEQ ID NO: 25868 - DNA, 201 bp, Homo sapiens
ggagctaggtttggagaggtaggtgggacacagaccctgccccagaggggttcctagtctggtggggctgcccacctgtggatcagccccccctcccattkgaggtttgtttgcttgacccctggggctgttagtggcagtgtctttcctgatgagctgtgccctttctgagttaatcagtggccctctcccttcccccaa

SEQ ID NO: 25869 - DNA, 201 bp, Homo sapiens; identical to SEQ ID NO: 3282

SEQ ID NO: 25870 - DNA, 201 bp, Homo sapiens
agagaaaggtggaaggaagggaaggaggacacattttaattttttggggggatcgagtggcaaagttgaagggacaaggcactgtgaggggaaggcagagsctcactgtgtttaaactactatgcaaaaaacaaaacaaacaacaaaagcagcttgccttatatcattgtggaaggcaggacctctcctgggctcctggct

SEQ ID NO: 25871 - DNA, 201 bp, Homo sapiens
gtgacatgaaccgacacctgcacgagtacatggagatgtgcagcatgaagcgaggcctggacgtgcagatggagacctgccgccggctcatcaaaggctcygcagacaggtacccgcccatcctcccaggggattcagctatggcatccttggaggggaattcccaaggctgcaactcggccatgtgtcatgctcccaacc

SEQ ID NO: 25872 - DNA, 201 bp, Homo sapiens
cccagaggggttcctagtctggtggggctgcccacctgtggatcagccccccctcccatttgaggtttgtttgcttgacccctggggctgttagtggcagkgtctttcctgatgagctgtgccctttctgagttaatcagtggccctctcccttcccccaagggatggcatggtggtgctctgagcacaagtgagttgcaa

SEQ ID NO: 25873 - DNA, 201 bp, Homo sapiens
ttgggtccctgagacctcgtcatcagagaagacttcagaatccaagttttaaatagcattctagtgtttaccaagcacacaacattttgcaaagaaagctraaatttttacttgggggtaaaaggctcaggaacaactggttttgcggccaaaggctttaaatgaaaagctaagcgttggccagctcaggttttatcttgc

SEQ ID NO: 25874 - DNA, 201 bp, Homo sapiens
actaccgtgtcccctgcagtgatcctgggtggttttggactcttctcaggctacctgatggtttaattttcaaaatatcaaaagcacacaatgcttttccyagtctgcccagcccttggatgggcacagcttgccctgggtcgagggctggcatttcccaccattccttagacattctctgctcttgaactcctccaacca

SEQ ID NO: 25875 - DNA, 201 bp, Homo sapiens
ggtccctgagacctcgtcatcagagaagacttcagaatccaagttttaaatagcattctagtgtttaccaagcacacaacattttgcaaagaaagctgaawtttttacttgggggtaaaaggctcaggaacaactggttttgcggccaaaggctttaaatgaaaagctaagcgttggccagctcaggttttatcttgcatt

SEQ ID NO: 25876 - DNA, 201 bp, Homo sapiens
tctggtagcggacaggtttccagccttgtacaagccaccggcagcccgagagaagtcagtcggactcccatcgaacccggggcgcacgccagagggccggrcgcagcgagtccttctgccccgcttcagcacgtgtcccatttcggttatctcattggctctattcagcccctctctgctccgctttggaaggctgccgca

SEQ ID NO: 25877 - DNA, 201 bp, Homo sapiens
gctaggtttggagaggtaggtgggacacagaccctgccccagaggggttcctagtctggtggggctgcccacctgtggatcagccccccctcccatttgargtttgtttgcttgacccctggggctgttagtggcagtgtctttcctgatgagctgtgccctttctgagttaatcagtggccctctcccttcccccaaggg

SEQ ID NO: 25878 - DNA, 201 bp, Homo sapiens
gttagtggcagtgtctttcctgatgagctgtgccctttctgagttaatcagtggccctctcccttcccccaagggatggcatggtggtgctctgagcacawgtgagttgcaacactgctgtgtgtcctctgtgggtgaagaggggataggaaagggcgcaggaagaggacatgggacagaggggttcctcttctaggctga

SEQ ID NO: 25879 - DNA, 201 bp, Homo sapiens
gagcctgagagtcactgggcgtcccccgcgccgcactccctccctgccggacccccaagctgcctcggtcaacgccgggttcctcaggggctcccctccgwcccccacccaggcctttctcccactgagatcccttagcctcctccctcaggtagtcaccttcctttagcgaggggacccctcttcccgaatcctgcgacc

SEQ ID NO: 25880 - DNA, 201 bp, Homo sapiens
caaggagtaccaggaaacgataggtcagatcgaggtgagggctcgggacgtggagcccactcgtgaggctctcctgaggtccacatggttgagatcctggygatcaaacacccatgtgtcatgggcaggggctggtagagtggggcaggcgcaggatcgggagtcaggaggcctcggggcgagtaatgtctttcttagggc

SEQ ID NO: 25881 - DNA, 201 bp, Homo sapiens
gatctgtgtgcagggccgtagccttgcctttcagacctttaactcctcaaacccccagaacccagtgtggttatctccattatccagacagaagagcagaygctcaggcaggttaaacggtttgcccaagttcccccacccccagctcatccgagatagaatcagaactgcaccccagtgatgttaaccatatcccgcatg

SEQ ID NO: 25882 - DNA, 201 bp, Homo sapiens
ctgtgggtgaagaggggataggaaagggcgcaggaagaggacatgggacagaggggttcctcttctaggctgagactggggccacacttgccatactccckgtgtgatcccgtttgcaggccttccctgcactctgagactcaggaagatggagcttatagagtcctgtgtttactgagtgcctactgtgagctggtgctc

SEQ ID NO: 25883 - DNA, 201 bp, Homo sapiens
atacaaacagaggattggggagggataggaagactagcatccttttggctccctggttggttgtgaaatacacacacacacacacacacacacacacacactcgcactcctctgagactccgaacagagaaaaaaattattggcaaatcaacacatttttctttctcgtcttgagaaaatgtcttgaggtccctgaagggc

SEQ ID NO: 25884 - DNA, 201 bp, Homo sapiens
tatacaaacagaggattggggagggataggaagactagcatccttttggctccctggttggttgtgaaatacacacacacacacacacacacacacacacactcgcactcctctgagactccgaacagagaaaaaaattattggcaaatcaacacatttttctttctcgtcttgagaaaatgtcttgaggtccctgaaggg

SEQ ID NO: 25885 - DNA, 201 bp, Homo sapiens
gacacacgcaagccgctctcagcagttccctcgactggccagtcggggtattgatctgagccagcatcccccaagacttgaatggcttgagtgggactgcrttgaagggcactgtgtggcccccttccaaatctcagcttggagccagctgagcaggctttgctttattattattttttaagcctactgcagtgggtctgt

SEQ ID NO: 25886 - DNA, 201 bp, Homo sapiens; identical to SEQ ID NO: 7266

SEQ ID NO: 25887 - DNA, 201 bp, Homo sapiens; identical to SEQ ID NO: 3286

SEQ ID NO: 25888 - DNA, 201 bp, Homo sapiens
ctggcttccccctggagctgggagagaggccggggttagggtgatctgtgtggcagcactgactgggtagtgtgggtttggccgaggttggtcatgaggcyggggttcccgcaaggcactggcctccctgaccgcttgcttccttccggacctctgggttcagggcgggggcggagggatccttgatttccctgataactt

SEQ ID NO: 25889 - DNA, 201 bp, Homo sapiens
gtgatctgtgtggcagcactgactgggtagtgtgggtttggccgaggttggtcatgaggctggggttcccgcaaggcactggcctccctgaccgcttgctyccttccggacctctgggttcagggcgggggcggagggatccttgatttccctgataacttgatgttcttccctccctcgccagccaacaatagaggctta

SEQ ID NO: 25890 - DNA, 201 bp, Homo sapiens
agaagagcagacgctcaggcaggttaaacggtttgcccaagttcccccacccccagctcatccgagatagaatcagaactgcaccccagtgatgttaaccrtatcccgcatggcctccttttgagctctgagtcattcaggttttacttagcacctactatatgcccagacatgggttaggtgcttggagagtaacagcca

SEQ ID NO: 25891 - DNA, 201 bp, Homo sapiens
gtgggtttggccgaggttggtcatgaggctggggttcccgcaaggcactggcctccctgaccgcttgcttccttccggacctctgggttcagggcgggggyggagggatccttgatttccctgataacttgatgttcttccctccctcgccagccaacaatagaggcttagagatctgtaatttctctgtgagaaagtctg

SEQ ID NO: 25892 - DNA, 201 bp, Homo sapiens; identical to SEQ ID NO: 3283

SEQ ID NO: 25893 - DNA, 201 bp, Homo sapiens
gctcagccttcccactccttgacccttcagaggcccagggctgctctctgaatttccccactctcttgtgcttctcaggaattcaccgtcccccagctccrtggccagcagcgactcaggaagtacagatgagatccaggatgagttcgagcgcgaggcggatgtggagcccatggtcagctgatgactgaggccctgcga

SEQ ID NO: 25894 - DNA, 201 bp, Homo sapiens
cagtgtctttcctgatgagctgtgccctttctgagttaatcagtggccctctcccttcccccaagggatggcatggtggtgctctgagcacaagtgagttkcaacactgctgtgtgtcctctgtgggtgaagaggggataggaaagggcgcaggaagaggacatgggacagaggggttcctcttctaggctgagactgggg

SEQ ID NO: 25895 - DNA, 201 bp, Homo sapiens
ccctgcactctgagactcaggaagatggagcttatagagtcctgtgtttactgagtgcctactgtgagctggtgctctgccaaacaccctagagatgaggrgtacccagggaatttacatggggtggggcctttgaggagttttcggcttaataggggagaaatgcataggaaaaccctccaatatctagtagaaagcaat

SEQ ID NO: 25896 - DNA, 201 bp, Homo sapiens
cgtcttgagaaaatgtcttgaggtccctgaagggccaaatccatcgtggactaactctgtgggtagagctcagatgacctagggagaattaaaccacttamgcttggagtgggaggagagggggtggggtgggggagaatataagatgtaacttaagctaaatgtaatctatttataaagcaagagactctcatctatttt

SEQ ID NO: 25897 - DNA, 201 bp, Homo sapiens
tcctccttgtatacataggtcatttgtctttgaggactagggtactctagggagtttgaaaactgcaggagccagaaagagatcctggcctgagagtcccytctggctggcttttaatatctgctctcctcttgggagtgaggacttggggcaggtgggtaggagagggaaagccagagtgtgatgggcctgcctcctggg

SEQ ID NO: 25898 - DNA, 201 bp, Homo sapiens
aagctctggctctagaagagctctctcctggagtggggagtctggaggggactgggtgggtgcaggtaaagccagattctctctggaagggaattttctakgaatggatgatttccaggctcagggtgggctgtgtgttagttctgagcaaatccctcaccaagacccttccctcccaagccctcaaagaaatgaggcaaa

SEQ ID NO: 25899 - DNA, 201 bp, Homo sapiens
aagtgacttgcccaaggccttgcggccaggaagcagcattgaagtataattctctctggctccagaggctgtgcatgtgatcacttctataaacgatagtyattgctattatgcaggagaaagggaagcccagctccttccctagaggaagtatcacttgatagaggacaagagtcagaaacatgaaaaagccttcaggat

SEQ ID NO: 25900 - DNA, 201 bp, Homo sapiens
tccttgtatacataggtcatttgtctttgaggactagggtactctagggagtttgaaaactgcaggagccagaaagagatcctggcctgagagtcccttcyggctggcttttaatatctgctctcctcttgggagtgaggacttggggcaggtgggtaggagagggaaagccagagtgtgatgggcctgcctcctgggctg

SEQ ID NO: 25901 - DNA, 201 bp, Homo sapiens
ccctgcttgtcccctcaccatgagcccacagcttgccaagaaagaccccaacgctcgctggggcagcaccagtcctagctgggacgaattggtccatcctytgtaaagctgtaaatacttaattttgactttctatttctaagcccagtgtcatattgacactggtattttagaattttctcagatgggctctcctgcgct

SEQ ID NO: 25902 - DNA, 201 bp, Homo sapiens; identical to SEQ ID NO: 3281

SEQ ID NO: 25903 - DNA, 201 bp, Homo sapiens
tccgtttccccccgaggatcgaggtggtgcgctctggacggggttgtgcattctcgccgcgcccgggcggacgatccagcgaacagccccgcttctaaccmgagatgctgctgccggcgcccgcgctccgccgcgccctgctgtcccgcccctggaccggggccgggtgagtgagcacggggcccggggcggcccgagcgc

SEQ ID NO: 25904 - DNA, 201 bp, Homo sapiens
cttggacctcagctgctaaaaagattttccgtttcctcgagggcaggaaaacatccaccctcgtgggtctcctccgtccagggccgagggaggcattggayaatgtggtatgggagtttcgtgggcagcgtggaagccggccctgggttgttccccaaggtggtgggagggtgacagatatatctttagacttaagactgt

SEQ ID NO: 25905 - DNA, 201 bp, Homo sapiens
tgcaggagaaagggaagcccagctccttccctagaggaagtatcacttgatagaggacaagagtcagaaacatgaaaaagccttcaggatttttgtaatcrggtctggataaaggaacccaaagatgttgagttctcagaaccgggtggggtgcatcagagccaggctgctgctggggttgctaagcaaccattccccttt

SEQ ID NO: 25906 - DNA, 201 bp, Homo sapiens
gctgctggggttgctaagcaaccattcccctttggccagaaggagttctaggggaagtggacccatgtgcagagagcagagggtgagggaggttgatgtcyggaggcagggtcctgatggcatggtgtccaatggtggccttgatggcaccatccctgaggaatccaggaggagaggttgccgaggcttctgtcacgagga

SEQ ID NO: 25907 - DNA, 201 bp, Homo sapiens; identical to SEQ ID NO: 3284

SEQ ID NO: 25908 - DNA, 201 bp, Homo sapiens
ctattatgcaggagaaagggaagcccagctccttccctagaggaagtatcacttgatagaggacaagagtcagaaacatgaaaaagccttcaggatttttrtaatcaggtctggataaaggaacccaaagatgttgagttctcagaaccgggtggggtgcatcagagccaggctgctgctggggttgctaagcaaccattc

SEQ ID NO: 25909 - DNA, 201 bp, Homo sapiens
ctctgtgggtgaagaggggataggaaagggcgcaggaagaggacatgggacagaggggttcctcttctaggctgagactggggccacacttgccatactcyctgtgtgatcccgtttgcaggccttccctgcactctgagactcaggaagatggagcttatagagtcctgtgtttactgagtgcctactgtgagctggtgc

SEQ ID NO: 25910 - DNA, 201 bp, Homo sapiens
accatgagcccacagcttgccaagaaagaccccaacgctcgctggggcagcaccagtcctagctgggacgaattggtccatcctttgtaaagctgtaaatrcttaattttgactttctatttctaagcccagtgtcatattgacactggtattttagaattttctcagatgggctctcctgcgctgccctctgtctcctgt

SEQ ID NO: 25911 - DNA, 201 bp, Homo sapiens
cctgcggggtcgaggagtctggtagcggacaggtttccagccttgtacaagccaccggcagcccgagagaagtcagtcggactcccatcgaacccggggcscacgccagagggccggacgcagcgagtccttctgccccgcttcagcacgtgtcccatttcggttatctcattggctctattcagcccctctctgctccgc

SEQ ID NO: 25912 - DNA, 201 bp, Homo sapiens
ttcatgttttatttttggaacactggggattggcaaaaaaaaaaaaaacccatgtgaataaagccttctagggcaccactgtgccgattgtgaaccacacrtggacaaaacaagccgcgcttgatagcaactacctacatgaccagcactcccctggatgctgatgctgccatgcgagacgggacgttggcgcagcagcat

SEQ ID NO: 25913 - DNA, 201 bp, Homo sapiens
catgagcccctcactccagcagagcccctgaccaagccaggggagcaggacttttccagccaaggcaagaaccagggttttctgactccttgaagatctgrtgtttcatggagttgaactagatgctgttccaacatctgagtgcgggaaggggaggggagggtcaccaaggatcttcatggcatggggacgggcagcggg

SEQ ID NO: 25914 - DNA, 201 bp, Homo sapiens
ggaggtgtctcccagaggtcagcacatccacccaaccaacactgcctgatgcaggcagctgcagagcccacgcccagagcagctcctcaagggcccaggcrcctgctatggggcccctgaggcaggtctggggattagcagagcccgcagctgaagtcctcttcaagggaacagaggtgtcaccagaagccaaggagggct

SEQ ID NO: 25915 - DNA, 201 bp, Homo sapiens
ataagggccttgagagagaaggaaaaggcagcctagtcgatgctctctgctctccagtgctgactgggggctgggtcgaatgctcatctgcagccagctgwggacatcacaggctcctttcctccccttcccctaatggggaaaggtggtttccccatggcctgtgagggagtcagggagcttccagaaacaagctgacaa

SEQ ID NO: 25916 - DNA, 201 bp, Homo sapiens
ggattagcagagcccgcagctgaagtcctcttcaagggaacagaggtgtcaccagaagccaaggagggctcagccaggacttgagggtggtcactgggagsgggtcttgtgctttggatccttgaccttactcatttgaggtctgccatgattgaactggacccagttgcctggaagactatgagttttccaagatcgatc

SEQ ID NO: 25917 - DNA, 201 bp, Homo sapiens
cccttcccctaatggggaaaggtggtttccccatggcctgtgagggagtcagggagcttccagaaacaagctgacaaggtggggaagcatgtaaccaacayagcatgagagcaggtgggaaccaggggattgggcacctggggcggggtgggggcccttgactccagatcataggcagcccttgtgtctagagccctgtgt

SEQ ID NO: 25918 - DNA, 201 bp, Homo sapiens
gcagcccttgtgtctagagccctgtgttcccagccaggtccaggccaggtaccaccttggagtacatagctgctatgtggccaaagtgtgccctggagacrttgaggagctcagtctagcagaagggcctgtgccctgtccccaacacaactgacttcaagatcccaaactgagctggatatcccagagctatccttagct

SEQ ID NO: 25919 - DNA, 201 bp, Homo sapiens
aacagagcagagaatggaactcacttgcctggggtcatctagctggttggtggccacatccaaactggatatttgagctcaggactctcagtccagtgctmtttccatcctcccaacatcatcacccgtcattacaaatctggtctgagctagtcctctctggcttctcaagcttcagactctctctccagaaaaacacaa

SEQ ID NO: 25920 - DNA, 201 bp, Homo sapiens
gcaggtgaagggagtgcccttggggctggctgacactggcctgcctgtgcctgcagtttggagaatgcctgttcattgccatcaatggtgaccacaccgasagcgagggggacctgcggcggaagctgtatgtgctcaagtacctgtttgaagtgcactttgggctggtgactgtggacggtcatcttatccgaaaggagt

SEQ ID NO: 25921 - DNA, 201 bp, Homo sapiens; identical to SEQ ID NO: 7283

SEQ ID NO: 25922 - DNA, 201 bp, Homo sapiens
ttccttgtcattgagtagtaatctattgtatcaggatgccaccatttgttcattcatttacttgttgatggacatctgtgttattttcagtttttgactawtacaaataaagcaactatgaacatgcacgtacaagtctatgtatacatggatgctttcatgtccaaggacagatacttaggatagactggctaggtcatg

SEQ ID NO: 25923 - DNA, 201 bp, Homo sapiens
accccccccatggatgcccttcaggtgagtttctcctgtgcctgcctgggcgccagctgatctgagatgccgcagtgagtattgggggctctgagggtttygcctccagggtgactctacccgtgccagccctcctcctgcccaccccagggctggtcagtgcaggtgcctgtcctggtgccagagctcagcccagaggca

SEQ ID NO: 25924 - DNA, 201 bp, Homo sapiens; identical to SEQ ID NO: 7277

SEQ ID NO: 25925 - DNA, 201 bp, Homo sapiens
ctcaaccgtgctgctccctcagacaccatcacttgcgcctcccaagcaatggaagccctggcgatgctctcatgagcccctcactccagcagagcccctgrccaagccaggggagcaggacttttccagccaaggcaagaaccagggttttctgactccttgaagatctggtgtttcatggagttgaactagatgctgttc

SEQ ID NO: 25926 - DNA, 201 bp, Homo sapiens
tggatgtcacaagtcaagcctccttcccagggtggccgtgaggttcgggggtggggggaggtggggatttggggtgaaactggacagaaactggcgtgctrggcaaacgggagccccgcggcggcgaactgctgactcgctctctccagagactcaggggcagggccgggctccgaaggtgtgggaccccagaaggagctg

SEQ ID NO: 25927 - DNA, 201 bp, Homo sapiens
gggcatctgcctgccctcatattctctctgttttaagcatttgcaggaccagggatgctgtgctgctctcccatgagccagtcaccgagtcggtctgctgmagccctttctgaacctctggccgtctggatgctccactgtgcttgccaaggtagatgatcttgccccacctggggaggacagggaggcaggcagcatcca

SEQ ID NO: 25928 - DNA, 201 bp, Homo sapiens
agctcctcccagcccccaccaaggggtgagcactcattacctgacacccgcacctagatgaccgccttcatgaccttgacctgcccatctccagccagccrgtcacttctccgctcacaaccacagcctccattccatagcccactgctccctaacccatacactctggtcagctttgtcacatgtacctgggagtcccag

SEQ ID NO: 25929 - DNA, 201 bp, Homo sapiens
atggaggtgcaccagtgccctccgatccacaccaggcactaactggctgccgtgagcatggcctccctgggcattcggctccatgtctaggccaagacctsggtcccttcctgtgccagtctggttccagtaggccccgtggtgggtctgttgctgtgctgagagggaccagataccacagaggaaagggccccagccttg

SEQ ID NO: 25930 - DNA, 201 bp, Homo sapiens
gtcatacagtatgtgcttggatttagtttggttttggtttgactgctttcactcagcataattattttgtgattcatctgtgttgtggcatgtatcaatcrttcattccttgtcattgagtagtaatctattgtatcaggatgccaccatttgttcattcatttacttgttgatggacatctgtgttattttcagtttttg

SEQ ID NO: 25931 - DNA, 201 bp, Homo sapiens
tatcaggatgccaccatttgttcattcatttacttgttgatggacatctgtgttattttcagtttttgactattacaaataaagcaactatgaacatgcaygtacaagtctatgtatacatggatgctttcatgtccaaggacagatacttaggatagactggctaggtcatgtaggtgtatgtgtaactttttaataaac

SEQ ID NO: 25932 - DNA, 201 bp, Homo sapiens
agaccagggaccacgcagcccttctccagcttgtcctttctcaacgggcagcagtcaagaccagggcatctgcctgccctcatattctctctgttttaagyatttgcaggaccagggatgctgtgctgctctcccatgagccagtcaccgagtcggtctgctgcagccctttctgaacctctggccgtctggatgctccac

SEQ ID NO: 25933 - DNA, 201 bp, Homo sapiens
ttagaactcgagtttatccattttgcatttatggattatgcttttagtgttatatctaagaaatctttgcccaacttacaaagagttttctctacatattmttttgaaagttttatagttttaggttttatatcaggtctgatgatctactttgaatttttgtgtgtggtatgagctatggattgaagataattttttttt

SEQ ID NO: 25934 - DNA, 201 bp, Homo sapiens
taagttttacttgaacattttacgtgcggcattttgtaactcaatggatcagtaatttaaaacatttattttattttattttattttaattttttttgagrcggagttttgctcttgtcacccaggctggagtgcaatggcatgatctcggctcgctgcaacctctacttcccgggttcaagcaattctcctgcctcaatc

SEQ ID NO: 25935 - DNA, 201 bp, Homo sapiens
gggttacctctgagtccctgaaggcacactggcacctggccgccaccttgaagatgaatctcatttagtcatttgactaaatgtgcctgagagtgactgagggggcttgttaaaatggagattcctggccccatacctggtgacgagcattctgagggcgggaggtgtctcccagaggtcagcacatccacccaaccaaca

SEQ ID NO: 25936 - DNA, 201 bp, Homo sapiens
cagccgcctgcgggagcaggagcagtgcttcgccgtggaggtgactactgggcgcgggagtcctcaggacttgaagctgtcaggtcagagggggcgtccasctttaagaccatgttttaaccctaatgaatgaaggcacaagcagcccctgaaactcgtgtattcagagagagttgttctttctggccatatggagggttg

SEQ ID NO: 25937 - DNA, 201 bp, Homo sapiens
tttcagatatgtggtgggttcagtaggtttttgtgcgttatattaggaaggaaatccacctcaattcccagcacacagcaggtgctcagtaagagcttgcyggttgaataaatgaatgggcaaacgtggactgtgtgtgctgactcctgaggggcgggttgaggcctgaaggaatacaggggacagaacaaggaggggatt

SEQ ID NO: 25938 - DNA, 201 bp, Homo sapiens
ccacaccgagagcgagggggacctgcggcggaagctgtatgtgctcaagtacctgtttgaagtgcactttgggctggtgactgtggacggtcatcttatcygaaaggagtgagtcttcaaagctggtcccctctgtcctttgccgagcaccctcgctgggccaggcagcgtgtgcccagcccctgtgaagctgccattttt

SEQ ID NO: 25939 - DNA, 201 bp, Homo sapiens
gatgctgttccaacatctgagtgcgggaaggggaggggagggtcaccaaggatcttcatggcatggggacgggcagcggggagcacattcctcaaggactstctgtctgcccgcccgctgaccagtgatgttttccttccctgtcccgttttgttgcaggacacaacggactggtggctgtgagtacctccccacttgatc

SEQ ID NO: 25940 - DNA, 201 bp, Homo sapiens
ctctggcataacccagccagaagtttatacgctagcaggggctgcaatggaaagcccttccatctggcaggcaggcacctgggattccggtgctggctctkctgtgtggcctggggcaaatgcttgccttctctgggcttggatcttcccatggagaatgacaggaagactaggtgagctcaggggtttccctatatctct

SEQ ID NO: 25941 - DNA, 201 bp, Homo sapiens
atgggcaaggtgccaaaagaggagaactggccaggccttcaaaactaaaacaccagagaattacagacagcgaacttgcccctaagccctcgttgtgggtktgtgtttgagcatttaggagaggactccagtgctcctcagcgacagacacagctgcctctgcggtgtctgaaggccctggtcgtggtgacgctagatggc

SEQ ID NO: 25942 - DNA, 201 bp, Homo sapiens
tatttttttaaatagtctcagaagcataattcttaatggaaacattgtactccagtacatgaatcagtgtatcatcctttatttaaccattttcctcatayggacataaatattgctcctaatttgctatatcactcttgctttaagaaacatttgtgcttaaattttatctcatgtcagataaattcctaggataaattt

SEQ ID NO: 25943 - DNA, 201 bp, Homo sapiens
taaatagtctcagaagcataattcttaatggaaacattgtactccagtacatgaatcagtgtatcatcctttatttaaccattttcctcatatggacatawatattgctcctaatttgctatatcactcttgctttaagaaacatttgtgcttaaattttatctcatgtcagataaattcctaggataaatttaggataaa

SEQ ID NO: 25944 - DNA, 201 bp, Homo sapiens
accattttcctcatatggacataaatattgctcctaatttgctatatcactcttgctttaagaaacatttgtgcttaaattttatctcatgtcagataaaktcctaggataaatttaggataaattcctaaaaataaaaatgttgagtcaaaagccattcaaagatattgtactactttataattccgccaagtaatatat

SEQ ID NO: 25945 - DNA, 201 bp, Homo sapiens
agctttgaaatgatctcctttgactctatccacgtccaggtcacactgatacaagaggtgggctcccaaggccttgggcagccctacccctgtgcttctgyagggcacagtcctcttcccagctgttttcacaggctggtgttgagtgtctgcggcttttccaggtgcatggtgcaagctgtcggtggatctaccattctg

SEQ ID NO: 25946 - DNA, 201 bp, Homo sapiens
agctccaagttaggactgtgccttccccatatttcattcacgtctcctgaaatcttcttgggaagtctgctgttttcttcctttctttttattccactacrgagaatttgagttgtaactgttccactggctttatcccattttattcacacatttgcaacaaacttgtccagttcctttttgtttttgtttatttgtttt

SEQ ID NO: 25947 - DNA, 201 bp, Homo sapiens
aacattgtatcagaggaattttccatgtcattgaaacactctaatattttaagtggctatagacccttccataattttgatgtgctgctatttatttaacwatttccctgatactagatgttaacattttttttccagttgtttgctattataaattaggcagtagtgaacatctttgtgcatgtatctttgtcccaatct

SEQ ID NO: 25948 - DNA, 201 bp, Homo sapiens
tctctttttgctcccctccctaccaggacagtgataccctcccaggagggtctaacactatggaacccttgatatcaaggcctgatcttgtcccttccttwgttcttggtgtctggcccactctaagctgtgaaattttcccccatttttgcagctccctgccctggaggaccagctcagcaccctcctagccccggtcat

SEQ ID NO: 25949 - DNA, 201 bp, Homo sapiens
atgtcattgaaacactctaatattttaagtggctatagacccttccataattttgatgtgctgctatttatttaactatttccctgatactagatgttaayattttttttccagttgtttgctattataaattaggcagtagtgaacatctttgtgcatgtatctttgtcccaatctctgatcattttccttaggacaaat

SEQ ID NO: 25950 - DNA, 201 bp, Homo sapiens
ctaccccagcgagagcacagcagaggacgacattcaggtctcagggcagctttctgggcagagggaggccattagggaggtagttcagaaaacctgcctgragatggtgggcaggctccccctggggactccatgttttctaagtcacaattctgggtgtgtggttgggcgtgacttctttcccactgctttcagatgtaa

SEQ ID NO: 25951 - DNA, 201 bp, Homo sapiens
tttaagtggctatagacccttccataattttgatgtgctgctatttatttaactatttccctgatactagatgttaacattttttttccagttgtttgctrttataaattaggcagtagtgaacatctttgtgcatgtatctttgtcccaatctctgatcattttccttaggacaaattttccaaagtagacttattgcaa

SEQ ID NO: 25952 - DNA, 201 bp, Homo sapiens
ggatgcaaacctgccccctgtcttccttccagagcacctggctggagtttaaggccaaggctttctccaaaagtgagcccggatcctcctgggagtgagtsgtgggcctcaggacaaggggtgggtcgtgtgcccaggggactgttccctgggaggccacatctcctccaccactgcccttcatttatcagcaaaataatt

SEQ ID NO: 25953 - DNA, 201 bp, Homo sapiens
atagacccttccataattttgatgtgctgctatttatttaactatttccctgatactagatgttaacattttttttccagttgtttgctattataaattakgcagtagtgaacatctttgtgcatgtatctttgtcccaatctctgatcattttccttaggacaaattttccaaagtagacttattgcaaaaaacagcata

SEQ ID NO: 25954 - DNA, 201 bp, Homo sapiens
aataatcatctaatttctatacattctaaaatatattcagcatctgtagtttatactttgtttctccaaagtatgtgggtaaacaataaaaaaaaactatraatattcaaaatggttgaggtgtggtggctcacgcctgtaatcccagcactttgggaggccgaggcgggtagatcacctgaggtcaggagtttgagacta

SEQ ID NO: 25955 - DNA, 201 bp, Homo sapiens
tacctccaggaggccacagaaggcattcaaggccacaaaacaaatgtggaacatcttcttgaagcagcagcagctctagaacatcaatatagggggaaacygtggctgtgctaacggactgatgttaaaccttaatactttgcctgatgtctaagttttacttgaacattttacgtgcggcattttgtaactcaatggatc

SEQ ID NO: 25956 - DNA, 201 bp, Homo sapiens
ccagttgtttgctattataaattaggcagtagtgaacatctttgtgcatgtatctttgtcccaatctctgatcattttccttaggacaaattttccaaagkagacttattgcaaaaaacagcatagactttggtacatgctacaaacttccttccagctccccgttcagtgctccccacattccactgttgtaatgaggcc

SEQ ID NO: 25957 - DNA, 201 bp, Homo sapiens
cttaagcatcaccctggctctctctagctggctttgtatgacatgtgtttgtgtgacagaggctgaggagtgaggtgatttgctcagctgcctgccttcckgctccgtgcctatcccaccccactccacagttagagctcggccggaaacctggccccctttcccagctgtgtgggcaggtcacatgggctcaccaagctc

SEQ ID NO: 25958 - DNA, 201 bp, Homo sapiens
tcagctgcctgccttccggctccgtgcctatcccaccccactccacagttagagctcggccggaaacctggccccctttcccagctgtgtgggcaggtcayatgggctcaccaagctctgatgctgagctgagactgtggtcctttggttgggtgtgggggagaccagctttcttgtgatctctcccgccctctctggctc

SEQ ID NO: 25959 - DNA, 201 bp, Homo sapiens
ctttcccagctgtgtgggcaggtcacatgggctcaccaagctctgatgctgagctgagactgtggtcctttggttgggtgtgggggagaccagctttcttrtgatctctcccgccctctctggctctgcccccaggctgcggcccccagacctggcgcagcgtgtccagctgtgggagcacttccagagcctgctgtggac

SEQ ID NO: 25960 - DNA, 201 bp, Homo sapiens
gcctctcccctgccctgcacagccttccccgcggagggcccggagcagccagaacatccccgtgcagcaggcctggagccctcactccacgggcccaactkgggggagctctgcagagacggtgtgtgctgtgcacttcgtggagtcaggggcaggaggggatcggcctctgcaggcgaccaggcctttcccatccctcct

SEQ ID NO: 25961 - DNA, 201 bp, Homo sapiens
aaagttcctcagccgtgaagaggggtggatgtcacaagtcaagcctccttcccagggtggccgtgaggttcgggggtggggggaggtggggatttggggtkaaactggacagaaactggcgtgctaggcaaacgggagccccgcggcggcgaactgctgactcgctctctccagagactcaggggcagggccgggctccga

SEQ ID NO: 25962 - DNA, 201 bp, Homo sapiens; identical to SEQ ID NO: 3333

SEQ ID NO: 25963 - DNA, 201 bp, Homo sapiens
tgccacagcctcactcctgaatcccatcctccccttcctccccaggaagctcctgcgctactacagcaagaaccgcccaaccgaggctgtcaggtgctackagctgctggccctgcacctgtctgtcatccccactgacctgctggtgcagcaggccggccagctggcccggcgcctctgggaggcctcccgtatccccct

SEQ ID NO: 25964 - DNA, 201 bp, Homo sapiens
agaacatcaatatagggggaaactgtggctgtgctaacggactgatgttaaaccttaatactttgcctgatgtctaagttttacttgaacattttacgtgsggcattttgtaactcaatggatcagtaatttaaaacatttattttattttattttattttaattttttttgagacggagttttgctcttgtcacccaggc

SEQ ID NO: 25965 - DNA, 201 bp, Homo sapiens
gatgcaaacctgccccctgtcttccttccagagcacctggctggagtttaaggccaaggctttctccaaaagtgagcccggatcctcctgggagtgagtgktgggcctcaggacaaggggtgggtcgtgtgcccaggggactgttccctgggaggccacatctcctccaccactgcccttcatttatcagcaaaataattt

SEQ ID NO: 25966 - DNA, 201 bp, Homo sapiens
gtaatgccctcctctctcgtgctcaggctgctccaggcatgtgggaagctgaagcggcagctctgcgccatctaccggctgaactttctgaccacagcccscagcaggggaggcccacacctgccccagcacctgcaggaccaagtgcagaggctcatgcggtaagtgcagtgcggccccctgggtggccagggcagggtc

SEQ ID NO: 25967 - DNA, 201 bp, Homo sapiens
ggaaagaggcagtcctggccctcctgccaccatgactgggcacagctagaagcccaggacagaggcaggccgtccctagctcctggcttgtaagcaccttractcagaccttcacctacctagaagacttcccaggcttggtgcacttcatctatgtggaccgcaccactgggcagatggtggcgccttccctcaactgca

SEQ ID NO: 25968 - DNA, 201 bp, Homo sapiens; identical to SEQ ID NO: 7282

SEQ ID NO: 25969 - DNA, 201 bp, Homo sapiens
ggtttcaccatgttggccaggctggtctcgaactcctgacttcaggtgatccaccccccttggcctcccaaagtgctgggattacaggcgtgagccaccgygcccagccctggaactgtttttatctgagggagagatatctctggactgcccagagatggaggtgcaccagtgccctccgatccacaccaggcactaact

SEQ ID NO: 25970 - DNA, 201 bp, Homo sapiens
cctagcaaggcccagcctggggcagaaatggctgcaagtggccgaggtctctgcaaggctgtggccgcctctcccttcccggcgtggagacgagataacayggaagccaggggaggtctgaagcctgagtatgatgcggtggtgataggagcaggtaaagtggtaaagcaggccgggccagagctgaggggcgggaagaca

SEQ ID NO: 25971 - DNA, 201 bp, Homo sapiens; identical to SEQ ID NO: 3343

SEQ ID NO: 25972 - DNA, 201 bp, Homo sapiens
cccgtctcctgctgggcatgtgctgatgggtggccatgctcctgtgtctgcagccacagtgccagctccctgcgcccggccgacctgcttgccctcatccycctggttcaggacctctaccccagcgagagcacagcagaggacgacattcaggtctcagggcagctttctgggcagagggaggccattagggaggtagtt

SEQ ID NO: 25973 - DNA, 201 bp, Homo sapiens
ctgattgcctctctgtccctttctgctctaaggggtctcatcatccagccaatgagtgagctgactccacctcagggagtccatttaccatcaacatcacycgtgttctcatcacagtctttaggcaaacacaagatatcagagatcatagacattcaagtggttttatttaagctaactgttaggcttttttatttttta

SEQ ID NO: 25974 - DNA, 201 bp, Homo sapiens
ttaaaatcagatttggatactaacgtgtttcattatacttttttatttaaacatttttccatttcctaagcactcccacagtgtggtttgtaatgattggkagtccatcacatgcatatgttatttatctagcaaatccccaggaaaatcgcgtcatgtgtccagtgtttgctgttaggtatgacactgaagaggaatttt

SEQ ID NO: 25975 - DNA, 201 bp, Homo sapiens
gcctcttataaaaccattagatctcatgagaactcactgtcacaagaacagcatgggggaaactgctcccatgattcaattacctccacctggtttctccrttgacatatgaggattgtggggattatggggattacaattcaagatgagatttggatggggacacaaagcctaatcatatcattctgccccaggaccctc

SEQ ID NO: 25976 - DNA, 201 bp, Homo sapiens
catgcgagacgggacgttggcgcagcagcatgccagccacccattgcttctcctgcttgccaactcaaccgtgctgctccctcagacaccatcacttgcgyctcccaagcaatggaagccctggcgatgctctcatgagcccctcactccagcagagcccctgaccaagccaggggagcaggacttttccagccaaggcaa

SEQ ID NO: 25977 - DNA, 201 bp, Homo sapiens
tcatatcattctgccccaggaccctcccaaatctcatgtcccttttacatttcaaaaccaatcatgccttcccaacagttccccaaagtcataattcattycagcattaaccaaaaagtccaagactgaagtctcacctgagacaaggcaagtcccttccacctatgaccctgtaaaataaaaaacaagttacttccaaga

SEQ ID NO: 25978 - DNA, 201 bp, Homo sapiens
acaggagattcaggtgagacccaagttccagtcctccccacctggggaagaggcagggctggcagcagggtacatccggtccacagcagctgaggggccartgggcctgggttcctgtccgggctccacctcccccgggcctacgatccttgttttccctattatgaaatgatattgaaaacttagctgctttttggtttt

SEQ ID NO: 25979 - DNA, 201 bp, Homo sapiens
ccacacgtggacaaaacaagccgcgcttgatagcaactacctacatgaccagcactcccctggatgctgatgctgccatgcgagacgggacgttggcgcascagcatgccagccacccattgcttctcctgcttgccaactcaaccgtgctgctccctcagacaccatcacttgcgcctcccaagcaatggaagccctggc

SEQ ID NO: 25980 - DNA, 201 bp, Homo sapiens
tcattgtccatatcactatcagaattttgttcaaaagcattcaatgagtctctgggaagttccaaactttcccacatcttcctgttttcttctgagccctscatactgttccaacctctgcctgttacccagtttcaaagtcactttcacatttttgggtatctttatagtagcacctcactctctgtggtaccaatttac

SEQ ID NO: 25981 - DNA, 201 bp, Homo sapiens; identical to SEQ ID NO: 3295

SEQ ID NO: 25982 - DNA, 201 bp, Homo sapiens
taagtcagatgggaggaatgtttttaagattattgatggatgttgtcaaattactttcctgaaaagtacagtcaatccatggcagatttaatgagtaatcrcacggcgatgcagtttggagcagatcgcctgtccctcccgttaagggtagaggagagggctcctcgagtctcttcccagccctgagaggtggcagagagc

SEQ ID NO: 25983 - DNA, 201 bp, Homo sapiens
ggggattggcaaaaaaaaaaaaaacccatgtgaataaagccttctagggcaccactgtgccgattgtgaaccacacgtggacaaaacaagccgcgcttgayagcaactacctacatgaccagcactcccctggatgctgatgctgccatgcgagacgggacgttggcgcagcagcatgccagccacccattgcttctcctg

SEQ ID NO: 25984 - DNA, 201 bp, Homo sapiens
cctgcagaaaaagctatagtcatgccctgcttaatgatggtgatacattctgttaataacaaactcatcattaggtgatttccttgtcatgtgaacatcayagtgtgtgcttacacaaacctagatggtgtagccaactacacacctaggctgtacagtatggcctgttgctcctaggctgcaaacctacagcatgtgact

SEQ ID NO: 25985 - DNA, 201 bp, Homo sapiens
ttgtacggatggagacacaatgatccggagatcagacgccatggccagggccaccgaggctgtaagtgaggaagccggagcccaagctctgctcccccggsctgcaggctcccagctttcctccgtgccctcagaagtgcccaggacgtgtgtacaacagaagtgctagaaaattcctgtgacctttaccttcacttctag

SEQ ID NO: 25986 - DNA, 201 bp, Homo sapiens
tggggtatgggatggggagtgacagaggtggagggcggtagcctgaggtggccagaaaaaaaaaaatctgagctggaaccagaatgataagtaggagccaytgtgaaagctggacagactaactgtgggagctgggtacagtccttggttcccgaatgttggcaggaaaacctactccatagtgctgtgtcccacttgtac

SEQ ID NO: 25987 - DNA, 201 bp, Homo sapiens; identical to SEQ ID NO: 3297

SEQ ID NO: 25988 - DNA, 201 bp, Homo sapiens; identical to SEQ ID NO: 3299

SEQ ID NO: 25989 - DNA, 201 bp, Homo sapiens
cccctctgtcctttgccgagcaccctcgctgggccaggcagcgtgtgcccagcccctgtgaagctgccatttttcacatactgcccccagctgggtccctrggtcagagaaacagctcaagtgaaccttggagaccatctggtctgaccctctgactttatatctggtgaaacagagcagagaatggaactcacttgcctg

SEQ ID NO: 25990 - DNA, 201 bp, Homo sapiens; identical to SEQ ID NO: 3300

SEQ ID NO: 25991 - DNA, 201 bp, Homo sapiens
ctgcccccagctgggtccctaggtcagagaaacagctcaagtgaaccttggagaccatctggtctgaccctctgactttatatctggtgaaacagagcagrgaatggaactcacttgcctggggtcatctagctggttggtggccacatccaaactggatatttgagctcaggactctcagtccagtgctctttccatcct

SEQ ID NO: 25992 - DNA, 201 bp, Homo sapiens; identical to SEQ ID NO: 3301

SEQ ID NO: 25993 - DNA, 201 bp, Homo sapiens; identical to SEQ ID NO: 3302

SEQ ID NO: 25994 - DNA, 201 bp, Homo sapiens
ctgggagagtggtgatgcttgctgtcttttccccaggtctggtctctgatccagctggcgcgcagatacctgcagaagggctacaccacgctgctgttccrggagggggatttctactgctcctacttcctgtggttcgagaatgacatggtaggtgaggctgagtccctgggccaggacgggccacacacacttcccgct

SEQ ID NO: 25995 - DNA, 201 bp, Homo sapiens; identical to SEQ ID NO: 3292

SEQ ID NO: 25996 - DNA, 201 bp, Homo sapiens
cttgcctggggtcatctagctggttggtggccacatccaaactggatatttgagctcaggactctcagtccagtgctctttccatcctcccaacatcatcrcccgtcattacaaatctggtctgagctagtcctctctggcttctcaagcttcagactctctctccagaaaaacacaaacccatgcacattcatacagtct

SEQ ID NO: 25997 - DNA, 201 bp, Homo sapiens
cctgtctctgggcccacagtaaagaacttggggaaagagaatcatggttcagagtatacactgaggtgggagggaccccagaaaaggcttgtagttgaaaygtagacctagaaaagagaagttcgtagtatcaccaccccctgattctctaagatggattgggaagctgcggagtgtgaagctctgggactttagttttgt

SEQ ID NO: 25998 - DNA, 201 bp, Homo sapiens
aaaccaaattctctttcaagcagtggttttcatactccagtgtgtgtcagaatcctctgtagggcttgttaaatacaggttactgggcctcactttcagcwtttctcatttagcgagtctgggatgggggctctagaacttgcatttctttttttttttttttttttgagatggagtctcgctctgttgcccaggctggag

SEQ ID NO: 25999 - DNA, 201 bp, Homo sapiens
tttttttttttttttgagatggagtctcgctctgttgcccaggctggagtgcagtggagcaatcttggctcactgtgacctctgcttcccgggttcaagcrattctcctgcctcagcctcctgagtagctgggattacaggcacgtgccaccacgcctggctaatttttgtatttttagtagagacggggtttcactatgt

SEQ ID NO: 26000 - DNA, 201 bp, Homo sapiens; identical to SEQ ID NO: 3296

SEQ ID NO: 26001 - DNA, 201 bp, Homo sapiens
tggagtgcagtggagcaatcttggctcactgtgacctctgcttcccgggttcaagcaattctcctgcctcagcctcctgagtagctgggattacaggcacrtgccaccacgcctggctaatttttgtatttttagtagagacggggtttcactatgttggtcaggctggtctcgaactcctgacctcatgatctgcccact

SEQ ID NO: 26002 - DNA, 201 bp, Homo sapiens
tgccaccacgcctggctaatttttgtatttttagtagagacggggtttcactatgttggtcaggctggtctcgaactcctgacctcatgatctgcccactyggcctcccaaagtgctgggattacaggcatgagccacagtgcccggccctagaacttccatttctaaaaaattcccaggtgctgtttattgtgcttgtcc

SEQ ID NO: 26003 - DNA, 201 bp, Homo sapiens
tataaaataactatgaaatatttaaaaatatgaaatgtagaatcacaaaatgagataagaagaaactctaaattgaccaggcaaatttgaaaaagaacacrtacagatattttagaaaagaaaacatagttgttaaaatgaaaaactcaagggatgtgttaaatagcagatgagacatagctagagggagaattaatgagc

SEQ ID NO: 26004 - DNA, 201 bp, Homo sapiens
tgcagggcacagtcctcttcccagctgttttcacaggctggtgttgagtgtctgcggcttttccaggtgcatggtgcaagctgtcggtggatctaccattstgggggctagaggatgatggccctattcttacagctccactaggcaatgccccagtggggactctgtgtggaggtgtctgaccccacattcccttaatca

SEQ ID NO: 26005 - DNA, 201 bp, Homo sapiens
aactgtttctttttacttttttaatgtggtcactggaaacatttaaattatgcatagggcctttcttttatttctgttggacagcaccattgcaaactctstccccatctcatggcctctgaatatgcagtctccttgacttgcagtgttctctctctccctctttctctggtgggccatctggttgtttagatattagtt

SEQ ID NO: 26006 - DNA, 201 bp, Homo sapiens
tgggtggccatgctcctgtgtctgcagccacagtgccagctccctgcgcccggccgacctgcttgccctcatcctcctggttcaggacctctaccccagcragagcacagcagaggacgacattcaggtctcagggcagctttctgggcagagggaggccattagggaggtagttcagaaaacctgcctggagatggtggg

SEQ ID NO: 26007 - DNA, 201 bp, Homo sapiens
tttcttctgagccctccatactgttccaacctctgcctgttacccagtttcaaagtcactttcacatttttgggtatctttatagtagcacctcactctcygtggtaccaatttactgtgtcagtccgttttcgtaccactataaagaactgcctgagactgggtaatttataaagaaaaaaggtttaattgactcacagt

SEQ ID NO: 26008 - DNA, 201 bp, Homo sapiens; identical to SEQ ID NO: 3339

SEQ ID NO: 26009 - DNA, 201 bp, Homo sapiens
tatcccattttattcacacatttgcaacaaacttgtccagttcctttttgtttttgtttatttgttttgttccttcttttggagagctgagagaatggatggaggaagagcttatcaaagtcaatgcaggcttgttatggaaaataggaaaagtacagaaacatacttaaaaatagagggaaaaaaatcactcctaattcc

SEQ ID NO: 26010 - DNA, 201 bp, Homo sapiens
ccactctacattttaaaggagtaatttattttgaaaatgttttccagattaattttgggttaaaaatatttttactggggatgcagtggaaggtgttcttacatttctgcagcatgggctgattgcctctctgtccctttctgctctaaggggtctcatcatccagccaatgagtgagctgactccacctcagggagtcca

SEQ ID NO: 26011 - DNA, 201 bp, Homo sapiens; identical to SEQ ID NO: 3304

SEQ ID NO: 26012 - DNA, 201 bp, Homo sapiens; identical to SEQ ID NO: 3306

SEQ ID NO: 26013 - DNA, 201 bp, Homo sapiens; identical to SEQ ID NO: 3307

SEQ ID NO: 26014 - DNA, 201 bp, Homo sapiens
gctaagtaatgggcagagaacaaaggggctcctaattcaaggcaggcctaagggagggtcagaaagaactttagctggaggtatttacagatgtgacctcraatccttggggattcttggaaaatgggcaaggtgccaaaagaggagaactggccaggccttcaaaactaaaacaccagagaattacagacagcgaacttg

SEQ ID NO: 26015 - DNA, 201 bp, Homo sapiens
gctggaggtatttacagatgtgacctcgaatccttggggattcttggaaaatgggcaaggtgccaaaagaggagaactggccaggccttcaaaactaaaayaccagagaattacagacagcgaacttgcccctaagccctcgttgtgggtttgtgtttgagcatttaggagaggactccagtgctcctcagcgacagacac

SEQ ID NO: 26016 - DNA, 201 bp, Homo sapiens
cacggaagccaggggaggtctgaagcctgagtatgatgcggtggtgataggagcaggtaaagtggtaaagcaggccgggccagagctgaggggcgggaagrcagccctgctcagagcttggtggggagggggagggggagccaagccccactgctctctcctctggcataacccagccagaagtttatacgctagcagggg

SEQ ID NO: 26017 - DNA, 201 bp, Homo sapiens; identical to SEQ ID NO: 3288

SEQ ID NO: 26018 - DNA, 201 bp, Homo sapiens
ggcctccgggctgtcccctctgggggcggcgatcctccctccggagccccccttcaaccctcccggaagtgaggtagggtccctaggggtcccggagcggrcccactcctagcctcacccactccgggcgtgtggccgtgggccggtcgcttcctcgctcggggccaaagttcctcagccgtgaagaggggtggatgtcac

SEQ ID NO: 26019 - DNA, 201 bp, Homo sapiens; identical to SEQ ID NO: 3289

SEQ ID NO: 26020 - DNA, 201 bp, Homo sapiens
gtgtacatgtatatatatgtatatatacacacatatatgtgtatatatatgtatatgtgttacgtacatatatatacacatatacacatgcttattttaartattgaaataaaagatacactgcacacaattttacaaataaagatacaatactctcaatttaaatgcagtctacccgagtgattcttaccaaaggctttc

SEQ ID NO: 26021 - DNA, 201 bp, Homo sapiens
ccaaaggctttctttgatttttgccaaactcagtagccaacctatagttgcaaatgacaaatgagggtagctccaaagagaacggtgctccatattttctstaaagagtaggatgatcgtgaaacaaatgaaacaacaaagatttatgtcccaaccttactcctttattttttaaaatttatttttattttatttatttat

SEQ ID NO: 26022 - DNA, 201 bp, Homo sapiens
gattacaggcgtgagccaccgcgcccagccctggaactgtttttatctgagggagagatatctctggactgcccagagatggaggtgcaccagtgccctcygatccacaccaggcactaactggctgccgtgagcatggcctccctgggcattcggctccatgtctaggccaagacctgggtcccttcctgtgccagtctg

SEQ ID NO: 26023 - DNA, 201 bp, Homo sapiens
atcccattttattcacacatttgcaacaaacttgtccagttcctttttgtttttgtttatttgttttgttccttcttttggagagctgagagaatggatggaggaagagcttatcaaagtcaatgcaggcttgttatggaaaataggaaaagtacagaaacatacttaaaaatagagggaaaaaaatcactcctaattcct

SEQ ID NO: 26024 - DNA, 201 bp, Homo sapiens
ggaaaatgggcaaggtgccaaaagaggagaactggccaggccttcaaaactaaaacaccagagaattacagacagcgaacttgcccctaagccctcgttgwgggtttgtgtttgagcatttaggagaggactccagtgctcctcagcgacagacacagctgcctctgcggtgtctgaaggccctggtcgtggtgacgctag

SEQ ID NO: 26025 - DNA, 201 bp, Homo sapiens
attcaaaatgttaacaaaaaatggacaaccttgcttagagaagtagataaaccaaaatccagactgttgtggtcactatgaataaacattacatttatttytgaagttcttaggtaaaaaaaaaaaaaaaaaagggtcctgtggtccctccacatcatctgatggaagaaagaaggccagggtttcaggaggagaaaccta

SEQ ID NO: 26026 - DNA, 201 bp, Homo sapiens
tcccattttattcacacatttgcaacaaacttgtccagttcctttttgtttttgtttatttgttttgttccttcttttggagagctgagagaatggatggaggaagagcttatcaaagtcaatgcaggcttgttatggaaaataggaaaagtacagaaacatacttaaaaatagagggaaaaaaatcactcctaattcctc

SEQ ID NO: 26027 - DNA, 201 bp, Homo sapiens
attggaatcaccaggcagcttcagccagcccaattaagttacagtctgtgggcctgggacccaggtgtgaatacttctaggaaattttcccaggtgagttsagtgtgcctcgggtgcaaaccactgctgtgcacagatttaggttacagcatgctttgccccctggctgcatattgaactcacctggggatctttaacaat

SEQ ID NO: 26028 - DNA, 201 bp, Homo sapiens
cccattttattcacacatttgcaacaaacttgtccagttcctttttgtttttgtttatttgttttgttccttcttttggagagctgagagaatggatggaggaagagcttatcaaagtcaatgcaggcttgttatggaaaataggaaaagtacagaaacatacttaaaaatagagggaaaaaaatcactcctaattcctct

SEQ ID NO: 26029 - DNA, 201 bp, Homo sapiens
ccactgctgtgcacagatttaggttacagcatgctttgccccctggctgcatattgaactcacctggggatctttaacaattattgaagctgagcctgtayccggagatgctgactcagttggtctgagctatgccctgggcgtcaggattttgtaaaagtccccaaatgattttcgtgtgtagccaaggttgacaaccac

SEQ ID NO: 26030 - DNA, 201 bp, Homo sapiens
ctaatgaatgaaggcacaagcagcccctgaaactcgtgtattcagagagagttgttctttctggccatatggagggttgggtaccctgatgggctttcccrtggtaaaacagctcgatcctggataacacatacttttaatgcaatttttgggttcactgtaaattacaggaatctttgaagacagttccttcaaccctcc

SEQ ID NO: 26031 - DNA, 201 bp, Homo sapiens
caatagaattttttttttaagtgagcatgtatatttattgtagaaaaatcgggaaatacaaaagtaaactataaaaaagggaataaaaattactcttaatyccgtcctcaaaatgagattaacatcttggggtgtttccttctagtctttttttcctatgactttacacacacacacacacacacacacacacacacacta

SEQ ID NO: 26032 - DNA, 201 bp, Homo sapiens
ggagggttgggtaccctgatgggctttcccatggtaaaacagctcgatcctggataacacatacttttaatgcaatttttgggttcactgtaaattacagraatctttgaagacagttccttcaaccctcccctccttttcccacaaaattatattgagctggaactggaggggaaagcagtggagaaaaacacagcgcta

SEQ ID NO: 26033 - DNA, 201 bp, Homo sapiens
tagctgctttttggttttcagaatctttttatgtgtgtttggcagaatacgaattataattccccttttttaggtgtggaaactaaggcttagacaagttwtaacttggccaagattatgcagctcatgagcagtggagccagagcccggatgcagtgagcaagtgcagtcgggatccgcccgtcacgggcttcctctctg

SEQ ID NO: 26034 - DNA, 201 bp, Homo sapiens
tcacctctccagggaaaaatgtgtgatgtatgtgtgtgtgtacatgtatatatatgtatatatacacacatatatgtgtatatatatgtatatgtgttacrtacatatatatacacatatacacatgcttattttaaatattgaaataaaagatacactgcacacaattttacaaataaagatacaatactctcaatttaa

SEQ ID NO: 26035 - DNA, 201 bp, Homo sapiens
actcgtgtattcagagagagttgttctttctggccatatggagggttgggtaccctgatgggctttcccatggtaaaacagctcgatcctggataacacakacttttaatgcaatttttgggttcactgtaaattacaggaatctttgaagacagttccttcaaccctcccctccttttcccacaaaattatattgagctg

SEQ ID NO: 26036 - DNA, 201 bp, Homo sapiens
aaccttactcctttattttttaaaatttatttttattttatttatttattcatttattgagatggagtcttgctctgttgcccaggctggagtgcagcggygcaatctcggctcactgcaacctccgcctcctgggttcaagcgattctcttgcctcagcctcccgagtagctgggactacaggcgcccaccaccacgccc

SEQ ID NO: 26037 - DNA, 201 bp, Homo sapiens
acatctgagtgcgggaaggggaggggagggtcaccaaggatcttcatggcatggggacgggcagcggggagcacattcctcaaggactgtctgtctgcccrcccgctgaccagtgatgttttccttccctgtcccgttttgttgcaggacacaacggactggtggctgtgagtacctccccacttgatcccacttcactgg

SEQ ID NO: 26038 - DNA, 201 bp, Homo sapiens
cccccttaggtctttccatctgtctgtcctgggtgcaggagcagggtggtccacctgggagtgaggggctccccaggttggtctgtcctgggtacaagagyggggtggtccacaagggggaagggctccccaggtctgtctgtcctgggtgcaggaacaaggtggtccacacagggcgaggggctcccctaggtcccttct

SEQ ID NO: 26039 - DNA, 201 bp, Homo sapiens
cagagagagttgttctttctggccatatggagggttgggtaccctgatgggctttcccatggtaaaacagctcgatcctggataacacatacttttaatgyaatttttgggttcactgtaaattacaggaatctttgaagacagttccttcaaccctcccctccttttcccacaaaattatattgagctggaactggaggg

SEQ ID NO: 26040 - DNA, 201 bp, Homo sapiens
gaggagacactggtggtgtggctcggggccctggcctccaggccctgcactgcttcttctgggcctcactgttactgcagagtagggtccagtggggggarcttactatcattgtgtctccatccatacaacggggtcagggatccctgccccagccactgcacagggctgtgaggggtgcagtggctgggactcctctcc

SEQ ID NO: 26041 - DNA, 201 bp, Homo sapiens
tccggagatcagacgccatggccagggccaccgaggctgtaagtgaggaagccggagcccaagctctgctcccccggcctgcaggctcccagctttcctcygtgccctcagaagtgcccaggacgtgtgtacaacagaagtgctagaaaattcctgtgacctttaccttcacttctagggagggacaggagtctgtgtgct

SEQ ID NO: 26042 - DNA, 201 bp, Homo sapiens
ctggtgtttcatggagttgaactagatgctgttccaacatctgagtgcgggaaggggaggggagggtcaccaaggatcttcatggcatggggacgggcagyggggagcacattcctcaaggactgtctgtctgcccgcccgctgaccagtgatgttttccttccctgtcccgttttgttgcaggacacaacggactggtgg

SEQ ID NO: 26043 - DNA, 201 bp, Homo sapiens
cgcaatctcggctcactgcaacctccgcctcctgggttcaagcgattctcttgcctcagcctcccgagtagctgggactacaggcgcccaccaccacgccyggctaatttttgtatttttagtagagacggggtttcaccatgttggcgaggctgatctcaaactcctggccttgtgatccacctgcctcagcctcccaaa

SEQ ID NO: 26044 - DNA, 201 bp, Homo sapiens
ctacaggcgcccaccaccacgcccggctaatttttgtatttttagtagagacggggtttcaccatgttggcgaggctgatctcaaactcctggccttgtgwtccacctgcctcagcctcccaaagggctgggattacaggtgtgagccactgcgcccggcctccttctttaaatgacaggaatgatgttactcaaataaga

SEQ ID NO: 26045 - DNA, 201 bp, Homo sapiens
ttagtcatttgactaaatgtgcctgagagtgactgagggggcttgttaaaatggagattcctggccccatacctggtgacgagcattctgagggcgggagrtgtctcccagaggtcagcacatccacccaaccaacactgcctgatgcaggcagctgcagagcccacgcccagagcagctcctcaagggcccaggcgcctg

SEQ ID NO: 26046 - DNA, 201 bp, Homo sapiens
tgatgcaggcagctgcagagcccacgcccagagcagctcctcaagggcccaggcgcctgctatggggcccctgaggcaggtctggggattagcagagcccrcagctgaagtcctcttcaagggaacagaggtgtcaccagaagccaaggagggctcagccaggacttgagggtggtcactgggagggggtcttgtgctttg

SEQ ID NO: 26047 - DNA, 201 bp, Homo sapiens
cgtgtcaaatgtgcaagtgttgaggatcttacagcttttcaaggcctggggagcttggaggtagtgggggatctgaggaagcaaggatacagggggcttarctgaaatggaagctgctggaaagaggcagtcctggccctcctgccaccatgactgggcacagctagaagcccaggacagaggcaggccgtccctagctcc

SEQ ID NO: 26048 - DNA, 201 bp, Homo sapiens
gcaggtctggggattagcagagcccgcagctgaagtcctcttcaagggaacagaggtgtcaccagaagccaaggagggctcagccaggacttgagggtggkcactgggagggggtcttgtgctttggatccttgaccttactcatttgaggtctgccatgattgaactggacccagttgcctggaagactatgagttttcc

SEQ ID NO: 26049 - DNA, 201 bp, Homo sapiens
agagaattacagacagcgaacttgcccctaagccctcgttgtgggtttgtgtttgagcatttaggagaggactccagtgctcctcagcgacagacacagcygcctctgcggtgtctgaaggccctggtcgtggtgacgctagatggccgccctgggcgcctcctgtgggcgtagaggcatcaccactctgcactggcagac

SEQ ID NO: 26050 - DNA, 201 bp, Homo sapiens; identical to SEQ ID NO: 3334

SEQ ID NO: 26051 - DNA, 201 bp, Homo sapiens
tatgaacattttcaaaagcccatacaaataaagagtatgtcaaccagcactttttaagatgaactgtaaccaactagcttctcacatgcttctcatatggyaagagttaattttagctcatgaaacttttggttctgtgaaacacctgctgaacagactcctgggaagggggtctgtgggagtcgacatttatacaacctt

SEQ ID NO: 26052 - DNA, 201 bp, Homo sapiens
tctgtgagctgtgcatagaggcgctggagcggcacgtcatccaggctgtcaacaccagccccgagcggggaggcgaggaggccctgcatgccttcctgctygtgcactccaagctgctggcattctactctaggtgagctcaaggtctggcatgtggtggctaaaggctccctggccttctcactcccctatggcctctgc

SEQ ID NO: 26053 - DNA, 201 bp, Homo sapiens
taagagttaattttagctcatgaaacttttggttctgtgaaacacctgctgaacagactcctgggaagggggtctgtgggagtcgacatttatacaacctyccaggtgattctgagcttatcagagctggagaggcacttgctacccaggggcttggtgtggaacgtgagatgccaaagccaaattcaggcctctcagctc

SEQ ID NO: 26054 - DNA, 201 bp, Homo sapiens; identical to SEQ ID NO: 7280

SEQ ID NO: 26055 - DNA, 201 bp, Homo sapiens
gttctgtgaaacacctgctgaacagactcctgggaagggggtctgtgggagtcgacatttatacaaccttccaggtgattctgagcttatcagagctggaraggcacttgctacccaggggcttggtgtggaacgtgagatgccaaagccaaattcaggcctctcagctcaaggcaccctgaagcacagctagtcactcca

SEQ ID NO: 26056 - DNA, 201 bp, Homo sapiens; identical to SEQ ID NO: 7281

SEQ ID NO: 26057 - DNA, 201 bp, Homo sapiens
tccaggtgattctgagcttatcagagctggagaggcacttgctacccaggggcttggtgtggaacgtgagatgccaaagccaaattcaggcctctcagctsaaggcaccctgaagcacagctagtcactccagcacatgttgaagctgtgcatgtttacttcatgttgaactgttcatgttttatttttggaacactgggg

SEQ ID NO: 26058 - DNA, 201 bp, Homo sapiens; identical to SEQ ID NO: 7284

SEQ ID NO: 26059 - DNA, 201 bp, Homo sapiens
ggggcaaggttgttggtgatatggcttcctctcccttcctgccctggctaggccctggagcgactgattcacccccagctctgtgagctgtgcatagaggygctggagcggcacgtcatccaggctgtcaacaccagccccgagcggggaggcgaggaggccctgcatgccttcctgctcgtgcactccaagctgctggca

SEQ ID NO: 26060 - DNA, 201 bp, Homo sapiens
gggcgggaagacagccctgctcagagcttggtggggagggggagggggagccaagccccactgctctctcctctggcataacccagccagaagtttatacsctagcaggggctgcaatggaaagcccttccatctggcaggcaggcacctgggattccggtgctggctctgctgtgtggcctggggcaaatgcttgccttc

SEQ ID NO: 26061 - DNA, 201 bp, Homo sapiens
atcattgtatagtgtgtccaccatgcagatatgtacatagaggccagtgactgccagggcatgggcaacagtcaaatgtagtaaaacaaataggaggtagygtgttttgagtatttattacctttgtttttaatttatttaattgtaagcttatataatttagtttatatcaatggctgtttgacagccggctcacaaact

SEQ ID NO: 26062 - DNA, 201 bp, Homo sapiens
gtgtggctctcagcagcctgggaaggagtgtgaagaagcaggtgggataagggccttgagagagaaggaaaaggcagcctagtcgatgctctctgctctcmagtgctgactgggggctgggtcgaatgctcatctgcagccagctgtggacatcacaggctcctttcctccccttcccctaatggggaaaggtggtttccc

SEQ ID NO: 26063 - DNA, 201 bp, Homo sapiens
gtttttcatcaaaagctatggtggcacaagagatggagtggtaaactctttctgggacattaggaaagacttcttttaggaggtgacctaatgccattagyataaaatccaaactcttcccaagcctaccaggccctgtgtgatctatcgctgcctatttcactctagcttcatcttatgcctctcttgtccacgcttact

SEQ ID NO: 26064 - DNA, 201 bp, Homo sapiens
atcacaggctcctttcctccccttcccctaatggggaaaggtggtttccccatggcctgtgagggagtcagggagcttccagaaacaagctgacaaggtgrggaagcatgtaaccaacacagcatgagagcaggtgggaaccaggggattgggcacctggggcggggtgggggcccttgactccagatcataggcagccct

SEQ ID NO: 26065 - DNA, 201 bp, Homo sapiens
cattagcataaaatccaaactcttcccaagcctaccaggccctgtgtgatctatcgctgcctatttcactctagcttcatcttatgcctctcttgtccacrcttactgagtgctagtcacatgaaacttctttaagtttcaggaaaactctatatttagatctgtccaatatgatagtcattagctgcatgtggctgttga

SEQ ID NO: 26066 - DNA, 201 bp, Homo sapiens
agctggatatcccagagctatccttagcttatgcttctgtaacctgagtccagatacctccaggaggccacagaaggcattcaaggccacaaaacaaatgyggaacatcttcttgaagcagcagcagctctagaacatcaatatagggggaaactgtggctgtgctaacggactgatgttaaaccttaatactttgcctga

SEQ ID NO: 26067 - DNA, 201 bp, Homo sapiens
cacaaaacaaatgtggaacatcttcttgaagcagcagcagctctagaacatcaatatagggggaaactgtggctgtgctaacggactgatgttaaaccttratactttgcctgatgtctaagttttacttgaacattttacgtgcggcattttgtaactcaatggatcagtaatttaaaacatttattttattttatttta

SEQ ID NO: 26068 - DNA, 201 bp, Homo sapiens
ccacactttgaaaaccactgctagagcaggaaaggtaaagatcaaacaaacgtgaactcacaactgaagaaaatcagatatggaagaaaataagccaccaygagtgagagtcaggaaaatcaatcaccaacagatttagatcccaaggcacttgatacattggaactattaggtatagaatataaaataactatgaaatat

SEQ ID NO: 26069 - DNA, 201 bp, Homo sapiens
aaggaatttattatgtggctgcttttaacccaaccctggcacattggaatcaccaggcagcttcagccagcccaattaagttacagtctgtgggcctgggwcccaggtgtgaatacttctaggaaattttcccaggtgagttcagtgtgcctcgggtgcaaaccactgctgtgcacagatttaggttacagcatgctttgc

SEQ ID NO: 26070 - DNA, 201 bp, Homo sapiens
ggtacttacatcgttatgttattacctgtggcctgcaggtagcaccatctggctggaggggggcaccccccccatggatgcccttcaggtgagtttctccygtgcctgcctgggcgccagctgatctgagatgccgcagtgagtattgggggctctgagggtttcgcctccagggtgactctacccgtgccagccctcctc

SEQ ID NO: 26071 - DNA, 201 bp, Homo sapiens
catctggctggaggggggcaccccccccatggatgcccttcaggtgagtttctcctgtgcctgcctgggcgccagctgatctgagatgccgcagtgagtaytgggggctctgagggtttcgcctccagggtgactctacccgtgccagccctcctcctgcccaccccagggctggtcagtgcaggtgcctgtcctggtgcc

SEQ ID NO: 26072 - DNA, 201 bp, Homo sapiens
cctcttcgttactcagactgagctcatagatgttggggctggaggctgaccttgaccttgcctttccctggcagatgaagtgcgtcttggtggccactgasggcgcagaggtcctcttctactggacagatcaggagtttgaagagagtctccggctgaagttcgggcagtcagagaatgaggaagaagaggtgagtgcag

SEQ ID NO: 26073 - DNA, 201 bp, Homo sapiens
ttgtagagacagggttttgctatgttgcccaggatggtctcgaactcctgagctcaagcaatccacctacctcagcctcccaaagtgctaggattacaggygtaagccaccacactagcccagttcactaatttatggcatatgtgtatagtaaagttacacaaagcttttttacatatattttgcccccacgctaactgg

SEQ ID NO: 26074 - DNA, 201 bp, Homo sapiens; identical to SEQ ID NO: 7291

SEQ ID NO: 26075 - DNA, 201 bp, Homo sapiens
ttaggtcaccagctgccttggtgacttgcctacaagtgcgagtgagtctcagtgtgtgagcttttccttgacatgatttctttagttgctaaacataccayaaagcctggtttaaaggcatcttgggcctcagtgaggaacagaacggcatcttctgagacaagggttacctctgagtccctgaaggcacactggcacctg

SEQ ID NO: 26076 - DNA, 201 bp, Homo sapiens
ggccctcccttctcttcttccctttcctccccagcagagggtcagcagctgcccccagtgacagtgagaagggccagagagcagctgtggcctctcctagygaggggacatgactcctgcagaagtcctggctcaccgtccagtctgcatgcagggccaggccaggtgtgcccatgtccagttccttcctgcctgagcctt

SEQ ID NO: 26077 - DNA, 201 bp, Homo sapiens; identical to SEQ ID NO: 3444

SEQ ID NO: 26078 - DNA, 201 bp, Homo sapiens
gcttctccacgcttgtaatggagggatggatggatggatggatggatggatggatgaatggatggatgaaagggtggacagaagggtggatggatgggcamatgggtggatggatggttggatggatgatggatggatggaagaatggacagatgggtagatagatggacagatgggtggccgggtggatggatggatgga

SEQ ID NO: 26079 - DNA, 201 bp, Homo sapiens
gatgggcacatgggtggatggatggttggatggatgatggatggatggaagaatggacagatgggtagatagatggacagatgggtggccgggtggatggwtggatggatggactgagtcaagtaatgtcaattagagacctgagtgttctttcctctgtgctctactcacactatcatatttcctagcagtccatggcac

SEQ ID NO: 26080 - DNA, 201 bp, Homo sapiens
aggtggagctggcagggagggctgggcagggcttcacagaagaaagagcatataatctgggcctcagagaaaaagcaggtgttttccaggcagagaacgcrgggatgggcatcccaggcagaaaaactgctcaggaaggtgtgatgatggagaagagctcccagcacatctgaggtgagtcatcaatgtggctgggaccca

SEQ ID NO: 26081 - DNA, 201 bp, Homo sapiens
actaaaagggttcaccagaattctaccaaaacacagtctatccccagagcagattccaatctccgccctcaaaggcacagactccacgctatctagaggcktgatccccctgcccatttctgaggctgggagcctgcagtgtggcctttgggctaaagatggcgacagagatcaacgttggcgctgcctttttggggctag

SEQ ID NO: 26082 - DNA, 201 bp, Homo sapiens
cacagactccacgctatctagaggcgtgatccccctgcccatttctgaggctgggagcctgcagtgtggcctttgggctaaagatggcgacagagatcaaygttggcgctgcctttttggggctaggttctgaatgagctctaacatttaattcttcaaatacttagcagctactgtgtgtcagcccttgtgcctcaaatc

SEQ ID NO: 26083 - DNA, 201 bp, Homo sapiens
caaataaacaaacaagaaaacagaaagggcacttttcatgattagaaggtgagggcagcaggtattcaatggaaatattagatgggggggtcaggggaggttttttttttttgttgttgttgttgtttttttacttttttgaagaggtaacatctgcactgaggttatggacaggaaggaactgtgactagaaataatcaa

SEQ ID NO: 26084 - DNA, 201 bp, Homo sapiens
gtgatgacttcaggaagtccgggtgtccattctgttgggtaacaatttttgttagctcccccttgtcacgagggacacagcccctgctctctaggagtttrgagcttaggagggaaggtagatattagacacatactcatttcgacatttttcccacctatgtgaaggagcatcacacgaatgcttgatcccttctcccca

SEQ ID NO: 26085 - DNA, 201 bp, Homo sapiens
aaacaagaaaacagaaagggcacttttcatgattagaaggtgagggcagcaggtattcaatggaaatattagatgggggggtcaggggaggtttttttttkttgttgttgttgttgtttttttacttttttgaagaggtaacatctgcactgaggttatggacaggaaggaactgtgactagaaataatcaaggcaaaaga

SEQ ID NO: 26086 - DNA, 201 bp, Homo sapiens
tcttccacatgcctctccctgttcacaccctctgcttcagacactggtctcctcacaattctccaaagacacactctaggcacgatgctactccagagctycagcagtagccttgtgttttgaacacttgttccccaattacctgcctggcttgtttcctcagtgaggcctacgctggttacccccgtgaaaactgcaata

SEQ ID NO: 26087 - DNA, 201 bp, Homo sapiens
aatttttgttagctcccccttgtcacgagggacacagcccctgctctctaggagtttggagcttaggagggaaggtagatattagacacatactcatttcracatttttcccacctatgtgaaggagcatcacacgaatgcttgatcccttctccccatgacagagacgttgctgtgaatctgtctcctgtacactcattc

SEQ ID NO: 26088 - DNA, 201 bp, Homo sapiens
aataggattcccaaaagggtcctacttagaggtcatgctctgcagagactagcaccagggcccctgtccagatttattaggaaagactgtggcatcaggtgggagtagtgggaagagggtctagtctccagaaggagggctggtgaggggtggacaggatatcagggtttccagtcaatatctgaatcactttgcatggtg

SEQ ID NO: 26089 - DNA, 201 bp, Homo sapiens; identical to SEQ ID NO: 3443

SEQ ID NO: 26090 - DNA, 201 bp, Homo sapiens
gggcttgggggccagtggtgcataaagggaatgggccatcagcactgtcatactgtttcagaattaaatatgcagaccagaaggctctatacacaagagayggccagctgctggtgggagatcctgttgcagacaactgctgtgcaggtgagcttctggggcctccaccccatgctccatctgccataggccctcccttct

SEQ ID NO: 26091 - DNA, 201 bp, Homo sapiens
attctggcaggccaattatagacgaatggcctggggaacccgtgcagcccttggctgagtggttctaagccccagcacgtctgcctctggcttcacccagyctccttttctaactgcccttctctcctccccatcagtgaggaccagacaccactgattgcaggaatgtgttccctccccatggcaagatactacatgtaa

SEQ ID NO: 26092 - DNA, 201 bp, Homo sapiens
agccaatctactgcctcatctctgttccaaaaagtctgtaagtggagtgttattaaacccattttacagatctggaagctgaggctcaaagagggtaaatwacttcccccatgtcacacagctaccaaaaggcagagccaggaatcagacttcatgtcctctgtgctgctccatccgcctctctgaaatgtcagaaagttt

SEQ ID NO: 26093 - DNA, 201 bp, Homo sapiens
gaaaatgtgttatttttgataccttcttccacatgcctctccctgttcacaccctctgcttcagacactggtctcctcacaattctccaaagacacactcyaggcacgatgctactccagagctccagcagtagccttgtgttttgaacacttgttccccaattacctgcctggcttgtttcctcagtgaggcctacgctg

SEQ ID NO: 26094 - DNA, 201 bp, Homo sapiens; identical to SEQ ID NO: 3450

SEQ ID NO: 26095 - DNA, 201 bp, Homo sapiens; identical to SEQ ID NO: 3439

SEQ ID NO: 26096 - DNA, 201 bp, Homo sapiens
aaaattttaaggagtttatttgagcagagaatgattcatgaatcacaaggtgccaaattgcaagtgattcagggctccacccaggggctaccggaaaaccwtttataagttgttcaggaagcaaaaggaagaaaaaaattcattggttaagtggaaaatccttagttgcaggttagtcggcggttcctgattggctaagct

SEQ ID NO: 26097 - DNA, 201 bp, Homo sapiens
cacttcagggcatctaatctgggttctggtctccaaatagaatgctgctggcatgtgagttgtcacatctgggttgtcaaggtggcaaggggaatgccagwtagcacgcccaggatctttccggaagtttatttttattgtacaagtgaacctgctttaaatatgtacagtcattagctaagggtattatcgttagctgtt

SEQ ID NO: 26098 - DNA, 201 bp, Homo sapiens
ttcctgattggctaagcttaagtttcgttttcttagtcaatgaccattcactctgggttgggttttagtttacttaggcaggaacccaacacgctggagtyatctcagcctaataccttcccaattaattattttaacacatggtaactcatttctgctggcccttcccttgtgaactgtgcccatggaccacccaggcaa

SEQ ID NO: 26099 - DNA, 201 bp, Homo sapiens
ttccttctcctccctagaaaccacaccaaagtcttcactccaaaacctaaccaggctagagggttattattatgtgaattctagggagaggtacactttakgtcttatccactatttacatctcagaatgaactggtaggtccagagagagagcaaacaggcaattaaacacagtgtggccagctttcggtcaggtagcac

SEQ ID NO: 26100 - DNA, 201 bp, Homo sapiens
tctgccataggccctcccttctcttcttccctttcctccccagcagagggtcagcagctgcccccagtgacagtgagaagggccagagagcagctgtggcmtctcctagcgaggggacatgactcctgcagaagtcctggctcaccgtccagtctgcatgcagggccaggccaggtgtgcccatgtccagttccttcctgc

SEQ ID NO: 26101 - DNA, 201 bp, Homo sapiens
aattttcatctcgcgatcctaggcccacctctcgcatcacaatagcccctaggaataccggctcaaaacattgtacagaaaactccgcaggacacacaackcatgtcagttctagggaaatctaaactcagatttaaggaggaaacagtaaaagtgaaggaaaatgcagacaactttaatggatactaacttttccttgat

SEQ ID NO: 26102 - DNA, 201 bp, Homo sapiens
gtgctcataggtttatgtgagaaaatgtgttatttttgataccttcttccacatgcctctccctgttcacaccctctgcttcagacactggtctcctcacrattctccaaagacacactctaggcacgatgctactccagagctccagcagtagccttgtgttttgaacacttgttccccaattacctgcctggcttgttt

SEQ ID NO: 26103 - DNA, 201 bp, Homo sapiens
actcaaataggattcccaaaagggtcctacttagaggtcatgctctgcagagactagcaccagggcccctgtccagatttattaggaaagactgtggcatyaggtgggagtagtgggaagagggtctagtctccagaaggagggctggtgaggggtggacaggatatcagggtttccagtcaatatctgaatcactttgca

SEQ ID NO: 26104 - DNA, 201 bp, Homo sapiens
caaataggattcccaaaagggtcctacttagaggtcatgctctgcagagactagcaccagggcccctgtccagatttattaggaaagactgtggcatcagrtgggagtagtgggaagagggtctagtctccagaaggagggctggtgaggggtggacaggatatcagggtttccagtcaatatctgaatcactttgcatgg

SEQ ID NO: 26105 - DNA, 201 bp, Homo sapiens
gtccagatttattaggaaagactgtggcatcaggtgggagtagtgggaagagggtctagtctccagaaggagggctggtgaggggtggacaggatatcagrgtttccagtcaatatctgaatcactttgcatggtgtctcagttatctattgctgagtaacgaaccaacccacaatgcagtgatttaaaacatcagtgatt

SEQ ID NO: 26106 - DNA, 201 bp, Homo sapiens
agatttattaggaaagactgtggcatcaggtgggagtagtgggaagagggtctagtctccagaaggagggctggtgaggggtggacaggatatcagggttyccagtcaatatctgaatcactttgcatggtgtctcagttatctattgctgagtaacgaaccaacccacaatgcagtgatttaaaacatcagtgattcatt

SEQ ID NO: 26107 - DNA, 201 bp, Homo sapiens
cataattaagcttcatcatcaccacagtagcaacagctctttcctgaacgtctgcaagatgccagccaatctactgcctcatctctgttccaaaaagtctrtaagtggagtgttattaaacccattttacagatctggaagctgaggctcaaagagggtaaataacttcccccatgtcacacagctaccaaaaggcagagc

SEQ ID NO: 26108 - DNA, 201 bp, Homo sapiens
caccacagtagcaacagctctttcctgaacgtctgcaagatgccagccaatctactgcctcatctctgttccaaaaagtctgtaagtggagtgttattaamcccattttacagatctggaagctgaggctcaaagagggtaaataacttcccccatgtcacacagctaccaaaaggcagagccaggaatcagacttcatgt

SEQ ID NO: 26109 - DNA, 201 bp, Homo sapiens
caggcatctttgaaaccaactaggtgactgagctaataccctgcatgactttgaagcctttaaaatatctgaaaagcaaatcacacttcagtatacactcwatctctgtactaaagagaataaacatttataaacaattagggcaggcccaaaaaatttaagataaggtccactgtatcccaaagtcatctgagcctcact

SEQ ID NO: 26110 - DNA, 201 bp, Homo sapiens
tttacagatctggaagctgaggctcaaagagggtaaataacttcccccatgtcacacagctaccaaaaggcagagccaggaatcagacttcatgtcctctrtgctgctccatccgcctctctgaaatgtcagaaagttttgaatctcaatgacagcatcttgatggtggtccctgtggcctttactcccagtgtgggcttc

SEQ ID NO: 26111 - DNA, 201 bp, Homo sapiens
ctccatccgcctctctgaaatgtcagaaagttttgaatctcaatgacagcatcttgatggtggtccctgtggcctttactcccagtgtgggcttctaacamttacttacatttcatctcatttgagatttgcatccttccttatcttttactactttgttgtctgtgattttgtcataagctcctttcaggaaggaggtga

SEQ ID NO: 26112 - DNA, 201 bp, Homo sapiens
atccttccttatcttttactactttgttgtctgtgattttgtcataagctcctttcaggaaggaggtgaggcataagaaaaatcaaagaggactctgggaygcatttcctctgcccctcccatggaccctgtaatgtccagggctgtgtcctggacaaggtgggtggggagcagtcctggtctcaaggaggtgacagcctg

SEQ ID NO: 26113 - DNA, 201 bp, Homo sapiens
tttactactttgttgtctgtgattttgtcataagctcctttcaggaaggaggtgaggcataagaaaaatcaaagaggactctgggatgcatttcctctgcycctcccatggaccctgtaatgtccagggctgtgtcctggacaaggtgggtggggagcagtcctggtctcaaggaggtgacagcctggctgggaagcaaga

SEQ ID NO: 26114 - DNA, 201 bp, Homo sapiens
gcccaggatctttccggaagtttatttttattgtacaagtgaacctgctttaaatatgtacagtcattagctaagggtattatcgttagctgttattgagrtagaaaaatcccctggaggtggtggaatttgtccagaggttctgccctaaaaggttaatgagagctctccagccctgacagcagctgacaggcatctttg

SEQ ID NO: 26115 - DNA, 201 bp, Homo sapiens; identical to SEQ ID NO: 3432

SEQ ID NO: 26116 - DNA, 201 bp, Homo sapiens
ttacctgccaagagcctgcaacatggggttcccttgtcccttgactcttctctctcttccctcctagagaagatctgcatacttcctaacagaggcttggmccgcaccaaggtccccattttcctggggatccagggagggagccgctgcctggcatgtgtggagacagaagaggggccttccctacagctggaggtgaga

SEQ ID NO: 26117 - DNA, 201 bp, Homo sapiens
gtctcagttatctattgctgagtaacgaaccaacccacaatgcagtgatttaaaacatcagtgattcattattccttctgattctgtgagttgactaggtrgttcctctgctgatcttgccagggctctgttgcactcagctggaggctcaactcagctggaaagtccaagatagtctctcccatgtctggctgttggtgc

SEQ ID NO: 26118 - DNA, 201 bp, Homo sapiens
accacctcttcaagcctaggatggagccccacggggcaccaaagatgtctgaccccagcactgtttatctggctgcaaacccactaataacatagtcaacracagtcagtacagagcaggggccccataccttatttctgccaaggctttatggatgactctctcccccttcaacaaatgctcattaatgttcccaccatc

SEQ ID NO: 26119 - DNA, 201 bp, Homo sapiens
gtgggagtagtgggaagagggtctagtctccagaaggagggctggtgaggggtggacaggatatcagggtttccagtcaatatctgaatcactttgcatgrtgtctcagttatctattgctgagtaacgaaccaacccacaatgcagtgatttaaaacatcagtgattcattattccttctgattctgtgagttgactagg

SEQ ID NO: 26120 - DNA, 201 bp, Homo sapiens
ctaaagagaataaacatttataaacaattagggcaggcccaaaaaatttaagataaggtccactgtatcccaaagtcatctgagcctcactaagaaatttmtcaggaagccaggaacattttctttacccctctgtcagagggcattggctctccgttctcctctgaaggcctccccaagccatgagaaggcaggaagcac

SEQ ID NO: 26121 - DNA, 201 bp, Homo sapiens
cccaaaaaatttaagataaggtccactgtatcccaaagtcatctgagcctcactaagaaatttctcaggaagccaggaacattttctttacccctctgtcrgagggcattggctctccgttctcctctgaaggcctccccaagccatgagaaggcaggaagcacagcctctgaaaagcaagaacacaggagaccttccttg

SEQ ID NO: 26122 - DNA, 201 bp, Homo sapiens
tgcagacaactgctgtgcaggtgagcttctggggcctccaccccatgctccatctgccataggccctcccttctcttcttccctttcctccccagcagagkgtcagcagctgcccccagtgacagtgagaagggccagagagcagctgtggcctctcctagcgaggggacatgactcctgcagaagtcctggctcaccgtc

SEQ ID NO: 26123 - DNA, 201 bp, Homo sapiens; identical to SEQ ID NO: 3448

SEQ ID NO: 26124 - DNA, 201 bp, Homo sapiens
ttccaagtattaagtgtgacgggagctacacgataggctctgataatgtttaggttctttctctgagctgcctctccacagcctgtatgtgccccgggaamttgatcacctggctggcccattataactatgtgtttacatggtgggactcaattttatgtcagctgtggccagaacagctgctggtaaatgcagaagagg

SEQ ID NO: 26125 - DNA, 201 bp, Homo sapiens
gtgacgggagctacacgataggctctgataatgtttaggttctttctctgagctgcctctccacagcctgtatgtgccccgggaaattgatcacctggctrgcccattataactatgtgtttacatggtgggactcaattttatgtcagctgtggccagaacagctgctggtaaatgcagaagaggctgagtaaatgcaaa

SEQ ID NO: 26126 - DNA, 201 bp, Homo sapiens
agctgcctctccacagcctgtatgtgccccgggaaattgatcacctggctggcccattataactatgtgtttacatggtgggactcaattttatgtcagcygtggccagaacagctgctggtaaatgcagaagaggctgagtaaatgcaaaatcttaaacaagttaatggataatcacacttgattcctattcctcctcct

SEQ ID NO: 26127 - DNA, 201 bp, Homo sapiens
acttgctatagcagccatagaaaactactacagagccttattcgaccctgtgtccagtgtttgatgcaagagacttggtgagttcttagaaggctacctgmagcttctcctccagtccatctgctatggagcctctagaaacaaccaagaagccccaggcagaactcagtgtcctctgcacagggacaaagccctgggctg

SEQ ID NO: 26128 - DNA, 201 bp, Homo sapiens
gagccttattcgaccctgtgtccagtgtttgatgcaagagacttggtgagttcttagaaggctacctgcagcttctcctccagtccatctgctatggagcytctagaaacaaccaagaagccccaggcagaactcagtgtcctctgcacagggacaaagccctgggctgcttacaacttaaattctagctcaagtcttgtg

SEQ ID NO: 26129 - DNA, 201 bp, Homo sapiens
gccaggtgcttaagtagtagcaagggccagacaatatgtgtgtcctggatgtgttgagtttaaggttacagtggagtctctaagttgaggtgatttgatayagctgggagtacagggctggaattcagctgagagtttgcaattggaattcatactcatcctcagagctcaaacgcttctctgtttcatggaaaatatttg

SEQ ID NO: 26130 - DNA, 201 bp, Homo sapiens
aaaatatttgactgggatcaagctagagcagaaagcccatggtatcaggactcagagaaggcacaggctgctggcgctgtccctctgttgtataactactyaacattcacctagcgtgttctgagttccaaccatggggcagcaattttaagaacattctgttgtcatcctcagaatgactcttcaaggcaagcattttca

SEQ ID NO: 26131 - DNA, 201 bp, Homo sapiens
agaaacactaaacaagcaaataaacaaacaagaaaacagaaagggcacttttcatgattagaaggtgagggcagcaggtattcaatggaaatattagatgsgggggtcaggggaggttttttttttttgttgttgttgttgtttttttacttttttgaagaggtaacatctgcactgaggttatggacaggaaggaactgt

SEQ ID NO: 26132 - DNA, 201 bp, Homo sapiens
cagtcagcctgacccctgcttcatcttccctgaccagttcatcaccttcatgcatgtgttgaaagacaaactttggcatattaaaattttaaggagtttatttgagcagagaatgattcatgaatcacaaggtgccaaattgcaagtgattcagggctccacccaggggctaccggaaaaccttttataagttgttcagga

SEQ ID NO: 26133 - DNA, 201 bp, Homo sapiens
tgcccatggaccacccaggcaaatgcaggcctcctcctacttactagtggtgctgttccaagttgaatcatgttctctatataactaaaaaaaattttcagcatgtaaaatatgccaattctctaacagtgcacagaagaggaagaggacataaagacttagaagacatgtctctatgactgaaggacacatagtgcagat

SEQ ID NO: 26134 - DNA, 201 bp, Homo sapiens
acttcagggcatctaatctgggttctggtctccaaatagaatgctgctggcatgtgagttgtcacatctgggttgtcaaggtggcaaggggaatgccagayagcacgcccaggatctttccggaagtttatttttattgtacaagtgaacctgctttaaatatgtacagtcattagctaagggtattatcgttagctgtta

SEQ ID NO: 26135 - DNA, 201 bp, Homo sapiens
ctaataacatagtcaacgacagtcagtacagagcaggggccccataccttatttctgccaaggctttatggatgactctctcccccttcaacaaatgctcmttaatgttcccaccatcttattattcatgctgtaccaaagacattgtgaaatgcccaggctcttcttccttcatgtcctgcagccaattatagagattgg

SEQ ID NO: 26136 - DNA, 201 bp, Homo sapiens
tggataatcacacttgattcctattcctcctcctcctcctccccttcttcttcttcttcttcctcttcttcttcttcctcttcttcctcctctcctcctcytcttcctcctcttcttcttcctcctcctcctccttcttctccttctcctcctcctcctccttctcctcctcctcctcctcctcctcaggacagggtcttg

SEQ ID NO: 26137 - DNA, 201 bp, Homo sapiens
ttccctttcctccccagcagagggtcagcagctgcccccagtgacagtgagaagggccagagagcagctgtggcctctcctagcgaggggacatgactccygcagaagtcctggctcaccgtccagtctgcatgcagggccaggccaggtgtgcccatgtccagttccttcctgcctgagcctttacctgccaagagcctg

SEQ ID NO: 26138 - DNA, 201 bp, Homo sapiens
atcacacttgattcctattcctcctcctcctcctccccttcttcttcttcttcttcctcttcttcttcttcctcttcttcctcctctcctcctcctcttcytcctcttcttcttcctcctcctcctccttcttctccttctcctcctcctcctccttctcctcctcctcctcctcctcctcaggacagggtcttgctctat

SEQ ID NO: 26139 - DNA, 201 bp, Homo sapiens; identical to SEQ ID NO: 3437

SEQ ID NO: 26140 - DNA, 201 bp, Homo sapiens
cttgattcctattcctcctcctcctcctccccttcttcttcttcttcttcctcttcttcttcttcctcttcttcctcctctcctcctcctcttcctcctcytcttcttcctcctcctcctccttcttctccttctcctcctcctcctccttctcctcctcctcctcctcctcctcaggacagggtcttgctctatcaccca

SEQ ID NO: 26141 - DNA, 201 bp, Homo sapiens
ctcttcttcttcttcctcttcttcctcctctcctcctcctcttcctcctcttcttcttcctcctcctcctccttcttctccttctcctcctcctcctcctyctcctcctcctcctcctcctcctcaggacagggtcttgctctatcacccaggctggagtacagtggtgcaatcatggctcactgcagccttgacctcctg

SEQ ID NO: 26142 - DNA, 201 bp, Homo sapiens
ttcttcttcttcctcttcttcctcctctcctcctcctcttcctcctcttcttcttcctcctcctcctccttcttctccttctcctcctcctcctccttctyctcctcctcctcctcctcctcaggacagggtcttgctctatcacccaggctggagtacagtggtgcaatcatggctcactgcagccttgacctcctggat

SEQ ID NO: 26143 - DNA, 201 bp, Homo sapiens
tgctctatcacccaggctggagtacagtggtgcaatcatggctcactgcagccttgacctcctggatcaagccattctctgcctcagcctcttgagtagckgggaccacaggcatgcatcaccatgcccagctaggttttttttaattttttgtagagactggctctcgtcatgttgcccaggctggtcttgaactcctgg

SEQ ID NO: 26144 - DNA, 201 bp, Homo sapiens
cctggatcaagccattctctgcctcagcctcttgagtagctgggaccacaggcatgcatcaccatgcccagctaggttttttttaattttttgtagagacwggctctcgtcatgttgcccaggctggtcttgaactcctgggctcaggtgatcttcccacctcagccacccaaagtgttgggattacaggtgtgagctgct

SEQ ID NO: 26145 - DNA, 201 bp, Homo sapiens
aagccattctctgcctcagcctcttgagtagctgggaccacaggcatgcatcaccatgcccagctaggttttttttaattttttgtagagactggctctcrtcatgttgcccaggctggtcttgaactcctgggctcaggtgatcttcccacctcagccacccaaagtgttgggattacaggtgtgagctgctacatctgg

SEQ ID NO: 26146 - DNA, 201 bp, Homo sapiens
agctaggttttttttaattttttgtagagactggctctcgtcatgttgcccaggctggtcttgaactcctgggctcaggtgatcttcccacctcagccacmcaaagtgttgggattacaggtgtgagctgctacatctggccaatcacttggttcttatgggacattcatcatactgtgtgagaagagctatggtaccagg

SEQ ID NO: 26147 - DNA, 201 bp, Homo sapiens
gaggtggagctggcagggagggctgggcagggcttcacagaagaaagagcatataatctgggcctcagagaaaaagcaggtgttttccaggcagagaacgyagggatgggcatcccaggcagaaaaactgctcaggaaggtgtgatgatggagaagagctcccagcacatctgaggtgagtcatcaatgtggctgggaccc

SEQ ID NO: 26148 - DNA, 201 bp, Homo sapiens
gaattataataaggttgttagtttccagagaacattacacctaagcttctccacgcttgtaatggagggatggatggatggatggatggatggatggatgratggatggatgaaagggtggacagaagggtggatggatgggcacatgggtggatggatggttggatggatgatggatggatggaagaatggacagatggg

SEQ ID NO: 26149 - DNA, 201 bp, Homo sapiens
ccaatcacttggttcttatgggacattcatcatactgtgtgagaagagctatggtaccaggtagagacaccattgtagcctagaggtggagctggcagggrgggctgggcagggcttcacagaagaaagagcatataatctgggcctcagagaaaaagcaggtgttttccaggcagagaacgcagggatgggcatcccagg

SEQ ID NO: 26150 - DNA, 201 bp, Homo sapiens
tgcagttgggtttccctagatgttctgtcccatcaagctggtaccaactaattaaacccactgaaaagcagagactcccttctcgtctttccaaacagagycacactcacagtgctatcagccccttctcttattctggctgtctggccacagcctggattccggcatcagaatttgttctgtccttgggcttgccagaca

SEQ ID NO: 26151 - DNA, 201 bp, Homo sapiens
aatcacttggttcttatgggacattcatcatactgtgtgagaagagctatggtaccaggtagagacaccattgtagcctagaggtggagctggcagggagrgctgggcagggcttcacagaagaaagagcatataatctgggcctcagagaaaaagcaggtgttttccaggcagagaacgcagggatgggcatcccaggca

SEQ ID NO: 26152 - DNA, 201 bp, Homo sapiens
ggcagagaacgcagggatgggcatcccaggcagaaaaactgctcaggaaggtgtgatgatggagaagagctcccagcacatctgaggtgagtcatcaatgyggctgggacccagggcttggactgaggagtggctgcaaattcacatgagaagatgggtggctcctgattgctaatgccttgtgaaggagtttttatctgg

SEQ ID NO: 26153 - DNA, 201 bp, Homo sapiens
ttcagggcatctaatctgggttctggtctccaaatagaatgctgctggcatgtgagttgtcacatctgggttgtcaaggtggcaaggggaatgccagatarcacgcccaggatctttccggaagtttatttttattgtacaagtgaacctgctttaaatatgtacagtcattagctaagggtattatcgttagctgttatt

SEQ ID NO: 26154 - DNA, 201 bp, Homo sapiens; identical to SEQ ID NO: 3435

SEQ ID NO: 26155 - DNA, 201 bp, Homo sapiens
atccaggtatttcaggcaggacccagattttaatcctgggcccctcagatcagcactgggccaacacagatgctactgggtcctcagctcttctcagccaycccctccctccccttctccctccctgacttctgtttagcactgccccggggtcagcttccatgctgtgatttcacagtcagcctgacccctgcttcatct

SEQ ID NO: 26156 - DNA, 201 bp, Homo sapiens
tcaggcaggacccagattttaatcctgggcccctcagatcagcactgggccaacacagatgctactgggtcctcagctcttctcagccaccccctccctcmccttctccctccctgacttctgtttagcactgccccggggtcagcttccatgctgtgatttcacagtcagcctgacccctgcttcatcttccctgaccag

SEQ ID NO: 26157 - DNA, 201 bp, Homo sapiens
tctcagccaccccctccctccccttctccctccctgacttctgtttagcactgccccggggtcagcttccatgctgtgatttcacagtcagcctgaccccygcttcatcttccctgaccagttcatcaccttcatgcatgtgttgaaagacaaactttggcatattaaaattttaaggagtttatttgagcagagaatgat

SEQ ID NO: 26158 - DNA, 201 bp, Homo sapiens
agggcatctaatctgggttctggtctccaaatagaatgctgctggcatgtgagttgtcacatctgggttgtcaaggtggcaaggggaatgccagatagcamgcccaggatctttccggaagtttatttttattgtacaagtgaacctgctttaaatatgtacagtcattagctaagggtattatcgttagctgttattgag

SEQ ID NO: 26159 - DNA, 201 bp, Homo sapiens
ccttgtcccttgactcttctctctcttccctcctagagaagatctgcatacttcctaacagaggcttggcccgcaccaaggtccccattttcctggggatycagggagggagccgctgcctggcatgtgtggagacagaagaggggccttccctacagctggaggtgagaggcctctccccattctaggggacactgcaga

SEQ ID NO: 26160 - DNA, 201 bp, Homo sapiens
tgtgggcacctgtaatcccagctactcaggaggctgaggcaggagaatcacttgaacccaggaggcggaggttgcactgagccaagatcacaccattgcaycccagcctgggcaacaagagtgaaactccatcttaaaaaaaaataaaaataaaaaactaacctgagcccacttgttcctctcccagacccaggtctggaa

SEQ ID NO: 26161 - DNA, 201 bp, Homo sapiens
aattagccaggcatggttgtgggcacctgtaatcccagctactcaggaggctgaggcaggagaatcacttgaacccaggaggcggaggttgcactgagccragatcacaccattgcatcccagcctgggcaacaagagtgaaactccatcttaaaaaaaaataaaaataaaaaactaacctgagcccacttgttcctctcc

SEQ ID NO: 26162 - DNA, 201 bp, Homo sapiens
tcctaacactttgggaagctgaggcaggtggtaatcactttaggccaggagttcaagaccaacctaggcaagacccccaactctaccaaaaatttaaaaawtaaaatatatgtatagacttacccagacaccttcacccaccaggactgtaaggctgtgccttgttgcctcttcctcacccctttggcaccaagagtgtag

SEQ ID NO: 26163 - DNA, 201 bp, Homo sapiens
aggctctgcccgctctcagtgggggtggggcagctggggaggatttgctttgacctgcttcttcagcttccctccctcctccaaccccaccccaggggggmgggcggggttgaactccagaacacctcctgattgcactgacaagaggcccactctgctcttcgatgctgaagtctagctgggggtagggtgctgcccatc

SEQ ID NO: 26164 - DNA, 201 bp, Homo sapiens
aggcgggtagataacctgaggtcaggagttcgagaccagcctggccaacatggtgaaaccctgtctctactaaaaatacaaaaattagccaggcatggttrtgggcacctgtaatcccagctactcaggaggctgaggcaggagaatcacttgaacccaggaggcggaggttgcactgagccaagatcacaccattgcatc

SEQ ID NO: 26165 - DNA, 201 bp, Homo sapiens
agttcccctagctgtacaatgggatgagatgataagaggctggaaggggcgaataacatatgtggtgtgcttagcacaagcaataatttgcttgatccagrgaaagccttcgcaccgctggactgttgtgagctaccactgggagggactcccagtctggagaaggagggtccgttccctggggctggggaagccaggccc

SEQ ID NO: 26166 - DNA, 201 bp, Homo sapiens
cgggagcctacgaaggagaggggctgagccttataaaaacttgggcacataatctgtctaatcactttgaagatgaaaagttgctgtgaaatgccaaccgwgctgatgggaccagggctggagcagagatgaagagacacagcagggccaattgtgcaaaaataaaatgcatattttttaattgcttgagttcacatctca

SEQ ID NO: 26167 - DNA, 201 bp, Homo sapiens
ttagctacacaacttggcaaatttctcaaccactgggcctcagtttctccctctgtaaaatgggactatcagtccttgctccagaagatggaagtgaaaartaggagattctgagtgcctggtagatagaaggtattcagccaatagtggtggaaataaaataacttgctgccagaattctgggaagcaggaagcacagat

SEQ ID NO: 26168 - DNA, 201 bp, Homo sapiens
gtgtttttatgtcctctgtgtgtgtatgaggaaggtttatggtgtgtgtgcgtgtatgaggtcacgtgctgtgtgtgtgtgcgtgcgtgcgtgcgcgcgcrtgtgcacgcgcctgcttctgattagactctgatcgccatcttctcccacacacaggtagggggccctcacccccctcctggggttgggggcacagcctgg

SEQ ID NO: 26169 - DNA, 201 bp, Homo sapiens
gcagggcagggcctgggcctgggcaggtgtggtccccagctacctgtctgggcactagttggatccacattgagagctctgccatgccaaaaccccggttyttgctctttcttttccccttccctgtccctggtaaggagctgggagaagactcaggctgggcaggacaccgagggcttcagcctctgcagcccatcctgc

SEQ ID NO: 26170 - DNA, 201 bp, Homo sapiens
gaaattcctcctagaccctccgctgttctagattatccatgctccgttagcttgaattaccgcgcggcctctgtggcccagacacaagccagagctatgtratcagctcctggggctggatctgccctgcacctaggaagtgcttggaagcaacaggaggaaggagggcataggacctgcctgactcccatccaagccgga

SEQ ID NO: 26171 - DNA, 201 bp, Homo sapiens
tcaggcagggcagggcctgggcctgggcaggtgtggtccccagctacctgtctgggcactagttggatccacattgagagctctgccatgccaaaaccccrgtttttgctctttcttttccccttccctgtccctggtaaggagctgggagaagactcaggctgggcaggacaccgagggcttcagcctctgcagcccatc

SEQ ID NO: 26172 - DNA, 201 bp, Homo sapiens
gagcttaggtaacttgcccagggtcacgcagctagtaagtggcagagccaggattctgattccagaagtcaggccccatgtccgtgtttataccatgtggytgagctgcctctcttcctggcgggtggcagacaggtgatggaggaagaccatttcctaagcctggagtcctcacaagactttgcttccagaatctcttcc

SEQ ID NO: 26173 - DNA, 201 bp, Homo sapiens
atcctagctctttgcagagctctcctgggcccctacctgaaaaacataggactccaggaccagggcaggcaccacaggccagagtgaggatgctgattttygaggaaacaattgagctgtctgacacccattgtggagctttgaggctgcccatttttctgcaggctggcacagggcagcttagagaatccacacaaatgg

SEQ ID NO: 26174 - DNA, 201 bp, Homo sapiens
cagtccccgcgtcttgtggacaaatgctgtcaggtgctaggacaagggcagtggaggaggtgcctctggtcctagccagctctgccaccacgtcatgtggrtcccactgcaggggaggatggtggcacatcctcagtctgctgctccagtctgcccacactgctccttgggtgaatccacctaaagcacatctgagggggc

SEQ ID NO: 26175 - DNA, 201 bp, Homo sapiens
tacctaccagggggccggctggcagagacacatggcacttccccttatcctctgcagagatgatgatcctagctctttgcagagctctcctgggcccctamctgaaaaacataggactccaggaccagggcaggcaccacaggccagagtgaggatgctgattttcgaggaaacaattgagctgtctgacacccattgtgg

SEQ ID NO: 26176 - DNA, 201 bp, Homo sapiens; identical to SEQ ID NO: 3455

SEQ ID NO: 26177 - DNA, 201 bp, Homo sapiens
tgtgagtctgccctgctgtggaggaagggggactgaaggattgcgtgggctcgtggagtgcccctgtgagggcctgccagcagctggtctggggtacatgscccgggcaggactggggaggcagctgctgtgactgttctctgtgccccatgcaccttctccctcagtccccgcgtcttgtggacaaatgctgtcaggtgc

SEQ ID NO: 26178 - DNA, 201 bp, Homo sapiens
ccactctctccctgtgagcgccattcctgagcacctgtgtgccagttccgagcccggcatcctggatgcagtggaggtgacaggctgaacaggctgagccrcgcatctcattactctagcaataagctaccttgcattttccatgatcaatccttttgggatctcatgaagagtgtgggtggcagaggactttaccaataa

SEQ ID NO: 26179 - DNA, 201 bp, Homo sapiens
cgctattaaaacaggcagccgagggaggtggaggccctggtgggaaaggttaatgccttggttgctcagagctgctggagaggtgagtggggcagggggargtccaggatgacccctccagtgtctagagatgagatcacgtcacacagatcaaaaacactgtcccacaggaagagggcactgtcagctgtccccaggctg

SEQ ID NO: 26180 - DNA, 201 bp, Homo sapiens
gatacagtcccagagttgggcgagaactatgtaccctaaataatttggacagccagcaggataagggtgactccagaagttgatactagtctgtcactagkaaagaaagcagagggtcaaggctgagggtcccaggacaaagcgtccagcgagacagctggaacagagaaaaggagcaacacagctggagatagcactcag

SEQ ID NO: 26181 - DNA, 201 bp, Homo sapiens
actatcagagatgtaggattttgaaagtttccaaggcttttaaaaaagaatgtttgaaggcctattgtcatacattccctggagctcaagaggaagggttrgtgtgtatctggtctgccaggtgggggccctcctagaagaaatccctgttccggtggcctgggaggcactggagaggctgggacaggatgggtggagtca

SEQ ID NO: 26182 - DNA, 201 bp, Homo sapiens
aacaatggaacgttcctgggggccagggaagcagtgtcctggagcatctgtctctgggtatctgggctgagacatgggcagggcccctgaggtgtgagcayggagccctggggcacaggcaggcacagtgccagggtgtgggcctggcccggagcagagagcaggtgtggactagacagagcagcagacaggcacgggggc

SEQ ID NO: 26183 - DNA, 201 bp, Homo sapiens
aaaggcacactaacgcgtactccgagtgtgaaaggatgggcatgataaaggccactctctccctgtgagcgccattcctgagcacctgtgtgccagttccragcccggcatcctggatgcagtggaggtgacaggctgaacaggctgagccgcgcatctcattactctagcaataagctaccttgcattttccatgatcaa

SEQ ID NO: 26184 - DNA, 201 bp, Homo sapiens
gagcactttaccaggagtcccgagaattggctggagctcccatgctgctgcctgctagctgtggttccctggccttgaacctcaggtttcatctgttaagkgggaccggcacctacctagcctgcctatattcccatattatgatcaaatatgaaaagctgaataatataaaactaccaagtgaaagagattattattatt

SEQ ID NO: 26185 - DNA, 201 bp, Homo sapiens
gacagtccctgtctcagagctgctagctgaccaatgctcagcctggtctttcctcctgccccagactggtctcagcctgagttccctgtccctttgacttycctgtttatacacaaaattcacccacaatattttagttttccaatcaaatcattaattaccccagtaattaaatctaattagcagtggtaggggcctttc

SEQ ID NO: 26186 - DNA, 201 bp, Homo sapiens
ttcatgcatccctgcaatgttttatcttggtgatgagggtcagcatttcagccggtggcattccttttggatgcttattccatcagttcagtccacagcakacatttatagaaaacctggtgaaaggaaagagacagggctttagagtcaaactgaccttgatcaatcccttgttccaccacctatcagctctgcagacct

SEQ ID NO: 26187 - DNA, 201 bp, Homo sapiens
gtagggctgaaggagcagctggagagaggagttcagtgcacatggagggcaagatgcctgggggggcagcaggacacctgggttcaggccctcagcacagrggtatcattgagggcctgccctggagtggaccatgggccaaatcagcatccccatccccttctctcccctatttcttcctccagggttcccctccccaga

SEQ ID NO: 26188 - DNA, 201 bp, Homo sapiens
taactgatgacattgtcttgtgaaattccttctcctggctcatcctggctcaaaagctcccccactgagtaccttgtgacccccactcttgcccgccagakaacaacccccctttgactgtaattttcctttatctacccaaatcttataaaatggccccacccctatctcccttcgctgactctctttttggactcagcc

SEQ ID NO: 26189 - DNA, 201 bp, Homo sapiens
acctgagaagccaccaggcacccccatccctgagttggttctctgggatttgactctggctctcagttcatccagcagacctggatccagggcctactgcrtgccgggtgtcaggctgtgtgctgggacgtcgggggtgagcacatctgtcttcgtggcacagccaacactgtgtgccagggagagctgtttgagcaagga

SEQ ID NO: 26190 - DNA, 201 bp, Homo sapiens
ctaccactgtcactttcacccaaaaggtgccagcaccatgcttgacacattgtataggtgtagtaatgctttgtgaattaaagcaggggtagaagagtgtygaggtgatggatagcccagccctgatttgatattttgatacctgcctacaatgtataattatcaaatcagggctggaagctcatgtacccccaaaatatg

SEQ ID NO: 26191 - DNA, 201 bp, Homo sapiens
tgcatacaacaccttgaagggttgcaaaatccattctgtttcatatcccgccatgctgcgatcacatcctagaggtttcatttccgctgagctacaggacsctgggaatgtggaagtgaacactccccacccaccgtcccacccccaggcctgagagcttgttgccttccacaccggcagcctgttggagggtggctgcag

SEQ ID NO: 26192 - DNA, 201 bp, Homo sapiens
ggaaaggtggccgggcactctcagcctgtaacccatgaccctgaggagccccagcccaagctctggcctctcaggaggctgcctgggaagcagagctcccrggcctgctcttgtgagtggggctcagggaccggtagctgtctggtggcctgatggggagagcccccatgtgtgctcctgtgctgagcttaccctcattct

SEQ ID NO: 26193 - DNA, 201 bp, Homo sapiens
atgggtagagaatccctgctggggtcacctccttctcactggcagaaagtcccttcagcctcctgttacagactgaatccttttgcaaattgtcataataytgtctgtggcactctatagccacagtttcagctgagcctctcaggagccccatgtgaatggcattagtgttgtattagttccattttagagatgaggaga

SEQ ID NO: 26194 - DNA, 201 bp, Homo sapiens
cgtttccccatgatgcccaccgctgtccacagagaccaggtctgcagagccagcagcagatgtgctggctggggcaggaggtaacttaagatctgagcacrgatcaccttgcagagggaatgccctgagctggagataacaccctttagtccagttaactctttaagctctggattctctcgtgctgttgggggctaggag

SEQ ID NO: 26195 - DNA, 201 bp, Homo sapiens
gtggtccagacttgagaatgcctattttatgtgtcagagtgtcggtgagggtgactttgggagggcacccaggatttgcccttggttagctcttctaggayacactaccgggtcctttggggggtgggaagcctctatgatgcttcctttttctgttctgcccttggctttagactgggcctctgcctgctcgcagggaga

SEQ ID NO: 26196 - DNA, 201 bp, Homo sapiens
gcttcacaaatttgcatgtcatctttgcacagggccatgctaatcgtctctgtatcgttgcaattttagtacatgtgctgccgaagcaagcactgggatcrtgtgttactcatccccagtacccagcccagagctagcacagagtgggtgctcaacagaggctgaaccaaattgaactgatcaaaatgagagtcaaaagag

SEQ ID NO: 26197 - DNA, 201 bp, Homo sapiens
tatggttccaccctggcctgtgatgtgggctggcctcccgtagagccttatcatcctgcagagctttatggcatctacacagttctctcaccttatcttcytagcactctctgaggtcaggactatcaccctggtttacatttaagaaaagaaagttcagaggttaatgactaatttacttgaaaataacaccacatgtaa

SEQ ID NO: 26198 - DNA, 201 bp, Homo sapiens
ttattggttcccttctcagccactcacctttgtacaatgaatccaccttggctactgtttgacccccggactctgctgtatgttttcaggatggttgagcyggccagaaccctagtgctgatgactgagcaagtggaccaggcttggggggcagagggtcagttccagttgctgtctatgatactgccattgtttagcagc

SEQ ID NO: 26199 - DNA, 201 bp, Homo sapiens
ggcccaggatgggaagacagcttgtctgcagggagaaggagtgggctgccagctgtctcacctggaggggtgggagaggagggctccgtagaccttgatgmagcccctgccccgcctctggccttggggctccctccccagctctgcaggggccgccaagatgccccagatgattgcagtcgcctccaccagtctcccggc

SEQ ID NO: 26200 - DNA, 201 bp, Homo sapiens
agggaacctgggtctgggggtttgaggagaggaagagggaggggcctggagtgtgtgtgattgcccccaacttcaaaacactcccaatctggctattgaartgtaaacacagaagtatgttttcaacaacacagactttactaagcagtgtggtgaagccccaaaggcctctgtttcctgagatgacaatccacagtttct

SEQ ID NO: 26201 - DNA, 201 bp, Homo sapiens
ggctccccaaccacgaggcctcagtgaatccagtagagctgttcctggaagagcagagaagccccagtagcacgcggcctgcagcccccagaatgaacccrtctgtgtttaccccctaaccatggatttcactatctcagtctgagggacaggaaaaccagatgcactgtcaccatgtgacaggtgagagaactgaggccc

SEQ ID NO: 26202 - DNA, 201 bp, Homo sapiens
acaaaaacaaacctgtctaattgcctttaatcttgggctgtcggtccgctggtgttggtgctgaatagtaaaaggagatcatatctttccctttgagtgaraagttatttgatctctgtgtgtcagaggaaagcctgtgcccagggaagaggtggggacggaaggggaaggtggaagaagagaggagcgagggcctggctg

SEQ ID NO: 26203 - DNA, 201 bp, Homo sapiens
ccgtaatcaccgtcttggggtgggagacaacagccccagggggagggcgtcagtctcggagctgcgggtttggagtatggcgggggggcttcgtctctttsggcggcccctttgccagacggctcaggacgctcgggccccctcccgccccacaccgccccacagcgggcgcggagggtcggctgctgcggcagaggcggc

SEQ ID NO: 26204 - DNA, 201 bp, Homo sapiens
tccacctgagttcagaaccagagcaaattctgtgtggccaaggagaaaaggctttttgcactgaggggcccaccagaacagacacaaggctgaaatgcaasccagtccaggctagaggaagagaccgggagcccaactcaaggaaaaggccaggaggcaggggactcccagcagctccagcgcagagcccaccgaaggcca

SEQ ID NO: 26205 - DNA, 201 bp, Homo sapiens
ccagtttgaaggaatcaccaaggcccctgccctcttttgtgctgttgtctttgatgacatttccaagcgattagaagccctggtgggggcaatatcatgcygtttatttgaaatcgacttgaaagcaatcaatactatattttctagggggaaacacaaatttagcttccacccttactccaagggtgcaatgcgtgcaga

SEQ ID NO: 26206 - DNA, 201 bp, Homo sapiens
ctgacttctctggcagctccccgtcgccccgcgcaccgctgcctctccgtggaacgtccaagtggtgcagaggagagggatctccggagactgggttctgwtgcgagctataccacgttccgtcccgggcggaactcttctttgggcctttgtttcctcgtctgtgaaatggggccagggtgggagcagagggcttgcaga

SEQ ID NO: 26207 - DNA, 201 bp, Homo sapiens
ccagcatttattctcctgtgtgctgttaggacaaggtgacaaggaaggaagcagaggcccagggtctccagtttgaaggaatcaccaaggcccctgccctsttttgtgctgttgtctttgatgacatttccaagcgattagaagccctggtgggggcaatatcatgctgtttatttgaaatcgacttgaaagcaatcaata

SEQ ID NO: 26208 - DNA, 201 bp, Homo sapiens
cctgggagacagaggttgcagtgagctgagatggcgccactgcactccagcctgggcaacagagcaagactctgtctcaataaaataaaataaaataaaawaaaataaaataaaataaaataaaataaaataaaataaaataaagatggagaggatgggagggtaagagcagggaacaagaagacattggtacatctggga

SEQ ID NO: 26209 - DNA, 201 bp, Homo sapiens
ttctgcaacttggcatagcagggacaaggtggggtatgactggacctaggaactgcctacatgggcagttggagtggggagacggtggggaggtgttgttyaccctgttcgacagccttgtggagtgtcatggtggtcactagcatgagagatggggtggaaggtttggcagggatgggaggggaatggggaacggccata

SEQ ID NO: 26210 - DNA, 201 bp, Homo sapiens
gacaggagaaacacttgaacctgggagacagaggttgcagtgagctgagatggcgccactgcactccagcctgggcaacagagcaagactctgtctcaatraaataaaataaaataaaataaaataaaataaaataaaataaaataaaataaaataaaataaagatggagaggatgggagggtaagagcagggaacaagaa

SEQ ID NO: 26211 - DNA, 201 bp, Homo sapiens
cggtattcattagcagtcactccccattttccctcccccggcccctgacaaccactcatctactttctgtgtctatggatctgcctatcctggacatttcrtataaatggaatcatacagtatgtggccttttgtgactgacatcttctacttagcattccatgtgcctctttccaaagcacagatgtgaccatgtcacca

SEQ ID NO: 26212 - DNA, 201 bp, Homo sapiens
aaaattagccgggcgtggtggcacacacctgtaattccagctactcaggaggctgagacaggagaaacacttgaacctgggagacagaggttgcagtgagstgagatggcgccactgcactccagcctgggcaacagagcaagactctgtctcaataaaataaaataaaataaaataaaataaaataaaataaaataaaat

SEQ ID NO: 26213 - DNA, 201 bp, Homo sapiens
tatacgagtcagtggctttagtatattcacaataggccgtcaccactgcctaatccacagcattttcatcacctcggaaagaacctcggtattcattagcwgtcactccccattttccctcccccggcccctgacaaccactcatctactttctgtgtctatggatctgcctatcctggacatttcatataaatggaatca

SEQ ID NO: 26214 - DNA, 201 bp, Homo sapiens
gtcgacctgtgtgcataccgcagcgttcagctgcacatgtgtgcttgggtgcgcgtgtgtgcgtgcatgtggctctgtttcagcgcttctgtaaatggaargctgtggctgcccctccccaagctgacattccctcagcaccacgcccccacctttgaggactgaaggggtgactgggtggtgacttcccccaggcagctt

SEQ ID NO: 26215 - DNA, 201 bp, Homo sapiens
tacctcacagtcctttcattcatttaaaaaatgcattgagcacctctcaggtgcctggccccaagctgggtccctgctagagccagcaaagctaaaggctyagggtgcacttgtgccctccaagacagtcaccagtgtgggggatgccagaatgggggtgcatgggaactgaggagtcccaatccaactgggagtccatga

SEQ ID NO: 26216 - DNA, 201 bp, Homo sapiens
ttagtaaagacagggtttcaccatgttggccaggatgatctcgacctcctgaacttgtgatccacccacctcggccttccaaagtgctgggattataggcrtaagtcaccgcacctggccctaacaggcgtatttttaataagctacccaggagattccaatagacagccagcgtggaggaagaggccgccccaggtgtca

SEQ ID NO: 26217 - DNA, 201 bp, Homo sapiens
gatcttggctcactgcaacctccgcctccagggttcaagcaattctcctgtctcggcctcccaagtagctgggactacaggcccacactgccatgcctggmtaatttttttgtatttttagtagagacggggtttcaccatgttgcccaggcttgttttgaactcctgagctcatgcaatccacccgccttgacctcccaa

SEQ ID NO: 26218 - DNA, 201 bp, Homo sapiens
gagggggtaaaatgatagagccaagatggctgcttagcagaaaaccctcctgcccattgtgggcaaggccacatcctccacacccaggattggggctggaygggcagaagtaggcgtgcagaaggagaagccagcagctgttggcagctggctgagcccccgctggaaggccaaacccagcatcctagaaggggctgtgtt

SEQ ID NO: 26219 - DNA, 201 bp, Homo sapiens
ggctggaatgcaggacaaatcgatcctgggggtgggagtggcaggggcttcagagactgccccatcccagccatccctccgtcaccccccgcacccagtarcatctcctttcactgaaatccacaccaacgacccctgggaaagggagggggtaaaatgatagagccaagatggctgcttagcagaaaaccctcctgccca

SEQ ID NO: 26220 - DNA, 201 bp, Homo sapiens
tgggaggagggtagtgctcccaggcctcaggagtccagacagagacccccaaagcctgactgccaacagaaaccctctcctagtgaggggcaggtgggtgygccccaggtccccacacccacagggaggcttcacacactgcccagtaccggggatgccaggaggcaggcccctctgctgctgccactgctgccaacactg

SEQ ID NO: 26221 - DNA, 201 bp, Homo sapiens
caggatggcaagtgttggggaggagggaggcagaccactctgtgccccacgggcactgacccaccctgccataggtttctaaagggaggccaaaaccctcwcccctcccctcccctccctggtgctgctattgaaccccctgccagctccatttctgccctggcaaccctgggcccagcaggtgggtcgtcgttgtctggc

SEQ ID NO: 26222 - DNA, 201 bp, Homo sapiens
aagctcccccactgagtaccttgtgacccccactcttgcccgccagataacaacccccctttgactgtaattttcctttatctacccaaatcttataaaayggccccacccctatctcccttcgctgactctctttttggactcagccctcctgcacccaggtgaaataaacagccttgttgctcacacaaagcctgtttg

SEQ ID NO: 26223 - DNA, 201 bp, Homo sapiens
cagacaaaatcaggtgcagaacacctaggtggctcctggttctgggtcttggaagccaagttgatagtgttggggcagagtgactgccaggtgtctggcakaggggtatcagtgacatttgcacacgttctatgtgcaggagaagcaacgatgcatcattgctgggtggcctcaggcaagttctttaacctctgcaagcct

SEQ ID NO: 26224 - DNA, 201 bp, Homo sapiens
cccaccttgccctgcaggcccagaccacagccaagaaccacagccctagtttctggcaccttggcagctgattggcactcacggggcatctcctgagccartgcctgggaacctgttttccctgtgccctgcaggcagacaaaatcaggtgcagaacacctaggtggctcctggttctgggtcttggaagccaagttgata

SEQ ID NO: 26225 - DNA, 201 bp, Homo sapiens
tggcacagaaagccacccacccagccttctctcctgtcccacctgcttcctttctcttcttttcacctttcctgcctcctcattttggctgtgtccacggrgcatacagatttgcacactcatgttcatcatgtcggcacaggcatgcaggccctcccagcatgtgctctctgggtggcaggcttgctatgacggcaagcg

SEQ ID NO: 26226 - DNA, 201 bp, Homo sapiens
ccttgggccctgtgttttcgtcagcccttcccgcccaaattcctggaaggcctttcctctttcctagaatctccaccctgctgcagcctgccgagtgggayagcaccccacacacgccccaggaggagggagtgggctcagggaggagcatgattcccatggagtgagagatactgaatcagagagtgagctggcagcagt

SEQ ID NO: 26227 - DNA, 201 bp, Homo sapiens
gccctaacaggcgtatttttaataagctacccaggagattccaatagacagccagcgtggaggaagaggccgccccaggtgtcagtcatgaggaagaggtrggtcttgagacaggaaaataggactgaaggggtgggaagttgggttattccatgagttaacacacatagggtttgagtgccgaacaatgctatttattgt

SEQ ID NO: 26228 - DNA, 201 bp, Homo sapiens
agagtctggcaggccaagaaattgttcctgggcattgcaacttgaccatctgcatttgaaaataatccactactaaatgtaatgttgtatcctggattaarttgtggaacaaaaaatagacattagtgggaaaaaacctggggaaatctgaataaattctgtagttcagttaatagtattatattaacactaatttcttag

SEQ ID NO: 26229 - DNA, 201 bp, Homo sapiens
aacaacagcaacatgatccctgccctggaggagctgacagtctaatggggagtgaatcaggcactataaaccatcacgaaagtggtcccaagtatgcaaartctatagcaggggatgattagaaatcccagtggctcctccttgaagcctcagagcagggtgagatgaggctgcagaagcaggcatgggccccttaggcct

SEQ ID NO: 26230 - DNA, 201 bp, Homo sapiens
tccagagaggggaagtgattggcagaaagtggcacaggatgtgagttaatcaacacattttcattacaagcctatcaggtaccaggcatgttctaggtgcyagagatatagcagagaacaacagcaacatgatccctgccctggaggagctgacagtctaatggggagtgaatcaggcactataaaccatcacgaaagtgg

SEQ ID NO: 26231 - DNA, 201 bp, Homo sapiens
agaaaaccagcgcctccgcagcctgtggactgggacttgaaaagaacaacccccaaatctgttctctctgatttcagcctgacctgtgcgcagtccaagcycaacttgtccagagccacccttgtcctcttcttcccaagacacagccctccctgagctcttcccatttctgtgatgaaagcccagttctgctgtgcaccg

SEQ ID NO: 26232 - DNA, 201 bp, Homo sapiens
accctcccccacaggctgcttggatgcccctaaatattccctgctggaagggcaggcccccatggccacccagagagcgtctccaggtgccctccttgacrgtgccacccgccccacccattgactcacttggctgcaggtcctttctgctggccagaaggtgtcatggagcacctgtgggtaactgcccaaatgctttag

SEQ ID NO: 26233 - DNA, 201 bp, Homo sapiens
cattctttcctgtcacccccaaggctgggagtagcggttggtgttcagtagcagccaccagagcacctggagataagaggagataagggcaaggctgggcrgagacagtcacagtctggggtaagggtggggagggggcaggggaaggggggaggcggggcacgttggggagctcaacactctggaagctaggggaggcca

SEQ ID NO: 26234 - DNA, 201 bp, Homo sapiens
cgccctgggtgagggcccacagtgctgctgctggttcctccctgtcctttgagctaggaaacctgagactcacatggttcccatcccaagctgggctgggstccggggcagacacacctgggaaaggtggccgggcactctcagcctgtaacccatgaccctgaggagccccagcccaagctctggcctctcaggaggctg

SEQ ID NO: 26235 - DNA, 201 bp, Homo sapiens
agaggacatgactgcccctcaggtcatccaggccaagcttcctgccccaaataagtttcaatcactgcggtcccattctttcctgtcacccccaaggctgrgagtagcggttggtgttcagtagcagccaccagagcacctggagataagaggagataagggcaaggctgggcggagacagtcacagtctggggtaagggt

SEQ ID NO: 26236 - DNA, 201 bp, Homo sapiens
agggcctccccaccctgggggaccaggaactaaccctttggcaggaagagctgaccctcctgagtggtgattgctacgtgccaggcaccgccccagttcaraagggcttcataaagatgcattttatcctcacagcagctcagaggagcaggtgcatgattacaatccacgatttatagtgaggaaactgaggcacagaga

SEQ ID NO: 26237 - DNA, 201 bp, Homo sapiens
ctggcatcagacatctcactggcaagcaacgccgggcccaggactgtagccccaaacagtgcctcccctcgccgaactctgaggctaacccaggagagatrggagctgccctccagagggcggggggtgaggaggtgagaagtgaagactgggtgggccagaggacatgactgcccctcaggtcatccaggccaagcttcc

SEQ ID NO: 26238 - DNA, 201 bp, Homo sapiens
cttccctgtcttttgtttccagaaaagccccgcccccagaggggtctgggaagtgcagccaggctcctggcgggcaccgtggccgtgttcctcatcctagktgctgtgctcactgtcttcttcctgtacaaccggcagcagaagagcccaccggagacggatggggccgggtgagccaggcaggactctgcccactaaact

SEQ ID NO: 26239 - DNA, 201 bp, Homo sapiens
ctgactgcccccagctcccccttccccctgaagctccctcccattagtgttggaatcgcatggagctcatgtgatcctgcaggcatttacagacagcctcrgcccccgtctcacctctcctgagtctcacacacctcaccatctcaggtgctcccctcagatccccagtaacagctccatatgtgggctgccacgcccagg

SEQ ID NO: 26240 - DNA, 201 bp, Homo sapiens
gacggggtggggaccccatctcagcacctgctgcctgtccaggagataccctcacccttgttctacctccatgccccagatcccaggatcagagcagggtstggggttacagggtcatagggaactagaggaggagcctccatcccacaccggctgggagcccctcctagaactggagcaccatggggaggggagctgggg

SEQ ID NO: 26241 - DNA, 201 bp, Homo sapiens
catcctgtttggacgtgaagggacagtgacactaggcaggggcctgcattctccttcattctgcaaagatgtgttaaacacctgagcccactgggcacagyggctcatacctatagtcctagcactttgggaggccgaggcgggtagataacctgaggtcaggagttcgagaccagcctggccaacatggtgaaaccctgt

SEQ ID NO: 26242 - DNA, 201 bp, Homo sapiens
tctccgtgtttaattatatgtaatacggtagtggagaggaaggagtacataagtgtgtgattttctccttagtccctaccccccactccacgctggggtcrtaaaggtcagaggtgagaaatcgagcccagcagaaggaggaactggaagggccagctgtggcttcacagccaagcctggatcgctgagaagcagcatgtg

SEQ ID NO: 26243 - DNA, 201 bp, Homo sapiens
tagggccttgtgggtcaggcctcagtctctttaagccatcctgtttggacgtgaagggacagtgacactaggcaggggcctgcattctccttcattctgcmaagatgtgttaaacacctgagcccactgggcacagtggctcatacctatagtcctagcactttgggaggccgaggcgggtagataacctgaggtcaggag

SEQ ID NO: 26244 - DNA, 201 bp, Homo sapiens
ggagctgcaagtggtccaggctgggggcggcatggcgtttcctccaggaaccaggtcgtgaaaggcctcagcccttaacgctttgataaaggccacaaacygttggaggaactcttggaggaacttaagtagggaggtggcctgatctgatttgtagtttagaacgatcactctggagctaggcacggtggctcatgcttg

SEQ ID NO: 26245 - DNA, 201 bp, Homo sapiens
ggcctgggtggatggtggagagatggagctagggccttgtgggtcaggcctcagtctctttaagccatcctgtttggacgtgaagggacagtgacactagrcaggggcctgcattctccttcattctgcaaagatgtgttaaacacctgagcccactgggcacagtggctcatacctatagtcctagcactttgggaggcc

SEQ ID NO: 26246 - DNA, 201 bp, Homo sapiens
gagggacaggaaaaccagatgcactgtcaccatgtgacaggtgagagaactgaggcccagggagtgtcactggtgtgacccccagaggccatccttgcggygtgagccaggaccgagtgcgggctctcccagggaagccattgagaggagcccaggccctgatgactaacaggacagagacttcagtggtcaactggaccc

SEQ ID NO: 26247 - DNA, 201 bp, Homo sapiens
agtcggccttgctcaggttccttcttactcctaatgacaactcaaggtgtggagggcagggagtggtggggcaggggtgctggtgacattggagacagcaytccagatagagggaacatcctaggtgaagtgggaagtgacaatcctcaaccctttccaaagggggtcacagtcacacacacacacacacacacacacaca

SEQ ID NO: 26248 - DNA, 201 bp, Homo sapiens
gctatggaagatgattttgtagaacagaagtgatctggagaagttgtagaatacacagcactgggaaggagcacagacctctgtcaagcctctgagcccargctaagccatcatatcccctgtgacctgcacgtacacatccagatggccggttcctgccttaactgatgacattccaccacaaaagaagtgaaaatggcc

SEQ ID NO: 26249 - DNA, 201 bp, Homo sapiens
atgctatggaagatgattttgtagaacagaagtgatctggagaagttgtagaatacacagcactgggaaggagcacagacctctgtcaagcctctgagccsaggctaagccatcatatcccctgtgacctgcacgtacacatccagatggccggttcctgccttaactgatgacattccaccacaaaagaagtgaaaatgg

SEQ ID NO: 26250 - DNA, 201 bp, Homo sapiens
ccttgctctaagccccactggtccagagggaatgcatgagcgagagggataagtggaaatttaatttttcattctgggcattcgttcgggtaataactttrccctgggcacatctggaaagggaaatgaggagtgactggggcagggcagaaggtgggcagcagggggtgtgctggagggacacgcatatgcagaacacgt

SEQ ID NO: 26251 - DNA, 201 bp, Homo sapiens
tgtttgcatcacccccttttacttgtattaaaaaaaaatgatgggttgaaaatgtactgaggattaaaaatgtacttttttataaataaagtgtttaaaamaaactggtttgcatcccatcactgccctgctccatggcagtgggggcggggaaggcgtggagctggaggggatggcacagagggatagtgaggggaaggg

SEQ ID NO: 26252 - DNA, 201 bp, Homo sapiens
tgttcttgtgctctcaggcaatttccaagcagcagctgacctcaccaccctccattccacgtcggcccgtgcctgccacattctctggggagcccaccccrcagggcacagccatgcccttgctctaagccccactggtccagagggaatgcatgagcgagagggataagtggaaatttaatttttcattctgggcattcg

SEQ ID NO: 26253 - DNA, 201 bp, Homo sapiens
gactcagggagttggcctgagccttctcagggctgtttgttcttgtgctctcaggcaatttccaagcagcagctgacctcaccaccctccattccacgtcrgcccgtgcctgccacattctctggggagcccaccccgcagggcacagccatgcccttgctctaagccccactggtccagagggaatgcatgagcgagagg

SEQ ID NO: 26254 - DNA, 201 bp, Homo sapiens
ctggggttagaaccaaggcatctgtattattattttttttttttttctttgagacggattttcactctgtcacccaggctggagtgcaatggcgcaatctyggctcactgcaacctccgcctcccaggttcaagcagttcttctgcctcaccctcccgagtaactgggactacaggcgtgcaccaccacacccagctaatt

SEQ ID NO: 26255 - DNA, 201 bp, Homo sapiens
actgagctacagagaggtgaagtcatttggccaaggttgcacagctcatcaatggcagaggtggaatgcaaccccctactgcctggctcctaacagccccrccatgctgcctgaaagggtggtgacggaacagcccttcagaaggtgggagacgctagctcagctttcaggttgtcaaggctgcagtgtctggagaagctt

SEQ ID NO: 26256 - DNA, 201 bp, Homo sapiens
tcagcaaatatttgttgaatgaagttccagggagggaggcctgttgcttcatagatgaaagatgatggtgatgatgatgatggaagctagcatctaatgarcctttcatttgtcctaagtgctgctttctgagtttcccatggactccctcttttaatccttacgcagttttatagggcaggtattagctattataatccc

SEQ ID NO: 26257 - DNA, 201 bp, Homo sapiens
ataaactgagtttgcaggatccatatttggtgttaagtggagttgtcggagtcagatggggctcatcggggaagacttcctggaaaaggtgctatctgacrtggtttgaagaatgagaaggacatggattgggtgggaaagttggaggaggaaagccctctgaatgcttgaggggagtgccagctagacctgcttctgaaa

SEQ ID NO: 26258 - DNA, 201 bp, Homo sapiens
cacacacacacacacacacacccgggatccccaaagcccctgtttctgacctatcacctgacacccagtcaggtgacctgcagatgcaatggccaccccaktattgtagctggtgtttgtgccatttctcacaaggggcaatggaggcactgaggttatattctaggagggacaccacccagaaagaggccccagggagtt

SEQ ID NO: 26259 - DNA, 201 bp, Homo sapiens
atctcatatgctgaagaccgtgaaagaaggggaagagacaatttaatcacctgggtggggttttgtggagtaaaaccttgccagtgtcgggggtagttatracagcacccttcagctgggaaagtctagaggctcaggcccccaactctggtggggtatgacctctgtctgctgccaccttgccaaaagggtccagcatgg

SEQ ID NO: 26260 - DNA, 201 bp, Homo sapiens
tcccgggcagggtggccagccctgccgttgaggcaccctcctacccagcaacttcccagatttattccctgtctttatggtgcctggagagtcatcagtgycctgggccggcagagcactctgatggtctccactggcgtgatggataggcctttgggggaacgtgtgcgacagccccctgctcccggcctgcctctgccc

SEQ ID NO: 26261 - DNA, 201 bp, Homo sapiens
atcccctatgccttccctctcaatggtcctggcccctctgagtctgctactcgtgttcccttgagaaagagccactcagctgcctgcgcactgctgacctyacttcccgtgtccccagccaggtgctacttgggaagcgagtccctgcccccactcgggagcctggctgcctgtgggtaatgcacaggttcagctgaggtg

SEQ ID NO: 26262 - DNA, 201 bp, Homo sapiens
acttctatcccctatgccttccctctcaatggtcctggcccctctgagtctgctactcgtgttcccttgagaaagagccactcagctgcctgcgcactgcygacctcacttcccgtgtccccagccaggtgctacttgggaagcgagtccctgcccccactcgggagcctggctgcctgtgggtaatgcacaggttcagct

SEQ ID NO: 26263 - DNA, 201 bp, Homo sapiens
gcacccaggatttgcccttggttagctcttctaggacacactaccgggtcctttggggggtgggaagcctctatgatgcttcctttttctgttctgccctyggctttagactgggcctctgcctgctcgcagggagatgctgaagaccttgaccacaccgggagagatattcctctcttgtcagccttctgttgtctccct

SEQ ID NO: 26264 - DNA, 201 bp, Homo sapiens
gcatctatggggactaggagtagaaggtgtatgtgcttgtgtctgtgggtcactatgggactagggccataaatatataacatcgaatgtatagtcacatrtaactgactgcttagagttttctgactaggacctgtgagtggtccagacttgagaatgcctattttatgtgtcagagtgtcggtgagggtgactttggga

SEQ ID NO: 26265 - DNA, 201 bp, Homo sapiens
tgtgtgtgcatctatggggactaggagtagaaggtgtatgtgcttgtgtctgtgggtcactatgggactagggccataaatatataacatcgaatgtataktcacatgtaactgactgcttagagttttctgactaggacctgtgagtggtccagacttgagaatgcctattttatgtgtcagagtgtcggtgagggtgac

SEQ ID NO: 26266 - DNA, 201 bp, Homo sapiens
cgtggggcaggaatattagatcccgagttcctgcaatgtgctttgccgcagaatggccaggcagtttgttatcgagggaccagtctggctgcctagttccsgggctagggtgcactcctggaaggcagaagcctggcctcattcccttctatgcctcttctgctgccagccagctcactacgagggccccgccaatctcac

SEQ ID NO: 26267 - DNA, 201 bp, Homo sapiens
agtgtacagagaccatctcctcgtggggcaggaatattagatcccgagttcctgcaatgtgctttgccgcagaatggccaggcagtttgttatcgagggamcagtctggctgcctagttccggggctagggtgcactcctggaaggcagaagcctggcctcattcccttctatgcctcttctgctgccagccagctcacta

SEQ ID NO: 26268 - DNA, 201 bp, Homo sapiens
gcttccctgaagcctttacaccaaccccaccccgggctaaactgggcactttttctgtgacccaccaaacccacacaatcccatattaaatatttgtttaygacatccgtttctatgtctgtcttcccccacccttcaactagattgagttccttcaggacaatgatgatgtctctgtatccccaagccaggcactgtgtt

SEQ ID NO: 26269 - DNA, 201 bp, Homo sapiens
ataaaataaagatggagaggatgggagggtaagagcagggaacaagaagacattggtacatctgggattgccccttcaaaccatgccttcagctcctgcartgtgcctggcacagagctaaaggccatcacaatgaattcaattcaaccctggcccttaaagcactcagcagccagatgggagattcccagctgccacaaa

SEQ ID NO: 26270 - DNA, 201 bp, Homo sapiens
agtcttgactccattgatcagtagctgtgggaaagcattgtcacaatggccagctcagagcaagccctcacaccaacatcaaacaaccccacttacctacrgaccagtcgcagtgtgtcagtgtgtgttcaccaactaccacaaatggacgcctctggtgtagaatgttttttatttttagtacgggatttttaatagtgg

SEQ ID NO: 26271 - DNA, 201 bp, Homo sapiens
acgaaggcctcttccattccacagtgagtaaagacctccttggggatgactgacccagagactagctggccagggtcccccagcctgacctcctgctcacrcccaccatcccctcagtagccagcttcttttcattttgcaacactcctgggaccctcatccctgaaagcccccacggcatccagggcaaaaagggacagc

SEQ ID NO: 26272 - DNA, 201 bp, Homo sapiens
gaacgaaaatctagagaggaaactatgatttggcccacgaatgcgccaatcacgctcaagagcacagccacatcctgagagcagcaggaggggaggaaccyaggggaaggggtggcaccggcctgactcctggggggatgctagatctggtacaaacttctgttcccttacaaagtagcaagaacccccagtgggatataa

SEQ ID NO: 26273 - DNA, 201 bp, Homo sapiens
accacaacccttgcctccatccctccagcaccaccctcagcagagcagaggaccaaaggcctggaagcagcacctgtctgagtgtctaagttcccccctgrgatgtgcccaccatatccctatcttggctggtgggcccaggactaagctcctctctggagaccgtggaggcctttctctccgttcccaatcctacccact

SEQ ID NO: 26274 - DNA, 201 bp, Homo sapiens
gggagcaggtttgtccgccacaactgaggagtctttgtgttttgttgctgagctcaggcgtttgcaggtctgtgacgtctcagggggccggcctgaggccygtcatgctggctcagcacttctgggaagtgaggcagcctgaactgcccaacctgagatctagtggggaaactgaggcacttgagaacaagccccaggggc

SEQ ID NO: 26275 - DNA, 201 bp, Homo sapiens
agctccatggcaggcagggccttggggagcaggtttgtccgccacaactgaggagtctttgtgttttgttgctgagctcaggcgtttgcaggtctgtgacrtctcagggggccggcctgaggcccgtcatgctggctcagcacttctgggaagtgaggcagcctgaactgcccaacctgagatctagtggggaaactgagg

SEQ ID NO: 26276 - DNA, 201 bp, Homo sapiens
ccagaaaggaagtgggtgtcctgattgcacgctcctccacaccggcctctctcccaggcggagctggccttggcttcagaaggtatggagttggccagccytgggagttgacaatcagggaagcggctgcactgggaggagggggcctataacctttaggtcactgtgctgcctcagcagggtttcagatggaggccctgc

SEQ ID NO: 26277 - DNA, 201 bp, Homo sapiens
gaaggctagaggcaggcagggccaagagagaggctctgtgttcctggggtgccacgatggagtcagaggctggctcaggactggccccatgatgggccatrtggatggggcagccagcatgaaacaggcctgcaggacagaatccaggtgtcctcagccacctggtgggagaaggcaaaactcagctccctgactcatctc

SEQ ID NO: 26278 - DNA, 201 bp, Homo sapiens
ttcattcgtgccctgggggagtagcctcatcactgcaggggtctgctcaggatcacagggtgggcttagagccgggatgggaatcagggaaccagagcacrtgatttctaggtaggttctttctcctagcaaataatacaactgcttgtatagcatagctatgggccaagcactacgccaagagcaaaactgaattatttc

SEQ ID NO: 26279 - DNA, 201 bp, Homo sapiens
gtgcacttgggtagaggccagggatcttgctaaacttctgcaacacacaggacagccccccacaacaggacagtccccccctccaaaatgtcattggtgcrgagttcattcgtgccctgggggagtagcctcatcactgcaggggtctgctcaggatcacagggtgggcttagagccgggatgggaatcagggaaccagag

SEQ ID NO: 26280 - DNA, 201 bp, Homo sapiens
ccctggacaaacaaggacagttccccaccagagtgccccccaactatgtttcccactcctctctgcaccagcttgccacagccagccctgcatgtccctcrtgagctccaccatccctgcctgagctttactcccttcctctaggccagtggtcttacccggggatgattttgcctgccatgggagatgcagcaatgtctg

SEQ ID NO: 26281 - DNA, 201 bp, Homo sapiens
ttgaggggatggggtcgagagccctccatcccaatgttgctccagtggcccccacctgctgctctggcagtgcgcacggagctcctagccctgctgcctgkttggaatgtgcggggcacattcagaacttctgaacagtcaggttgccttctcctcattgccccttcagcagcagggccccacccacaccctgaagcctga

SEQ ID NO: 26282 - DNA, 201 bp, Homo sapiens
ttatgtctaacccagacgttacgtgcaatttgaatgcagtatcgctcattgggtccagaccagtgagttctgcccagaaatgaaatagcaggtttggtgcstatgcagataccttcttcttctcaagctgctttggaagcaggtggagggaagagattgctctggggccctggtcactgatccccactcgctgtccaagag

SEQ ID NO: 26283 - DNA, 201 bp, Homo sapiens
tcctccagcatcacagctccctttcctggcaccgcctaagtccaggtacagaagaggccctgagcaccttgtgccaaggcctggtgcagttcttgtatcayccatacagggaagggttcagcagaaggcccagccccacctgggaatgttatgtctaacccagacgttacgtgcaatttgaatgcagtatcgctcattggg

SEQ ID NO: 26284 - DNA, 201 bp, Homo sapiens
cccactacacattcaggcaagccttcattcattcaccacacttactgagcacttctgcatgccaggcactgtgcagggctggggagacaagtcagacgtgyaatcacagtctgtagaaaagagactgaaagaagccaggcacggtgactcacgcctgtaatcccagcactttgggaggccaaggcaggcggatcacgaggt

SEQ ID NO: 26285 - DNA, 201 bp, Homo sapiens
agctataccacgttccgtcccgggcggaactcttctttgggcctttgtttcctcgtctgtgaaatggggccagggtgggagcagagggcttgcagaagccytgccagctcccacgctgctagccgggattctccatcccgccctctcctccaccgccgcccccggcccggtcctaactccacccccacccgccgcgcctcg

SEQ ID NO: 26286 - DNA, 201 bp, Homo sapiens
tttcctttatctacccaaatcttataaaatggccccacccctatctcccttcgctgactctctttttggactcagccctcctgcacccaggtgaaataaamagccttgttgctcacacaaagcctgtttggtggtctcttcacacggacacacatgaaaccctcagtggccagaacttcatttcctcctgagtagcccaac

SEQ ID NO: 26287 - DNA, 201 bp, Homo sapiens
atgaccttagcaattgtcacaaccagaatgagaggtgcagaccattagtacataaaaattcgaaagagaaaaagatcacggtaaactggagaagagaaggytcctgaagaaggggctggagaagtgcaatcggtggggagggaggatgaggaaaggcactcctggcggggcaaactgcatgtgtaaaggcttgcagtaagg

SEQ ID NO: 26288 - DNA, 201 bp, Homo sapiens
cccagctctgcaggggccgccaagatgccccagatgattgcagtcgcctccaccagtctcccggcctgcgctccctcctgttcattctcagcagttgtcartggtcttgttgaaacaaagccgggtcacagatctcatccctctgctcgtggcctccaacagcatggtccagctcaggggagaggcctggcccctgcatca

SEQ ID NO: 26289 - DNA, 201 bp, Homo sapiens
gcaaggccctttgcctctctgattccatgacccctctctgcatgtggaacaaagggcctggcaaatggaagatgggcgcctagtggcctctcccaagttgytcctgaagacaaagcagcagggccaggtagcaggtccgccccagagctcttagacagccctgacagtgatgaatcaccgcaccccactccatctccatga

SEQ ID NO: 26290 - DNA, 201 bp, Homo sapiens
cgtgttaggtccctggggacggagaagagctgagagctttatcctttcatcttctatttcgaagctactgccccgccccatcccctgcaagctctccctgygacccacccctcctgtacccccccatttttctccagggggctggttgtttggagagaaggtcttcttgttcctcggttacctccccgctctccccaccag

SEQ ID NO: 26291 - DNA, 201 bp, Homo sapiens
aaaatctagagaggaaactatgatttggcccacgaatgcgccaatcacgctcaagagcacagccacatcctgagagcagcaggaggggaggaacccagggraaggggtggcaccggcctgactcctggggggatgctagatctggtacaaacttctgttcccttacaaagtagcaagaacccccagtgggatataaactga

SEQ ID NO: 26292 - DNA, 201 bp, Homo sapiens
atacaaatgctccgaaaaggctgttccagcatttattctcctgtgtgctgttaggacaaggtgacaaggaaggaagcagaggcccagggtctccagtttgwaggaatcaccaaggcccctgccctcttttgtgctgttgtctttgatgacatttccaagcgattagaagccctggtgggggcaatatcatgctgtttattt

SEQ ID NO: 26293 - DNA, 201 bp, Homo sapiens
aaccaagtggcttgagactgaggtttgtggtgagagaagtggcctgggggatgctgggaaaaaccagctaggtcctccccctcaaacccgctccgcctcgycctgccctctctccacaaacccggagttaaaataaagctgttccctgcctgagagttggggagtccccgagcatcactctcctctcccagcccccagccc

SEQ ID NO: 26294 - DNA, 201 bp, Homo sapiens
tgagggtggttttacattttttttcctcattggcccacagagagtggagttggcctagctctgacgcgtcccctctttatccccaatgtgccccctccatyaggggctccaggtgggctccagcccacacttgctctctgcctctgctgacacgtgcacacacacacacatgcacacactgctcctctctgcctgctttcc

SEQ ID NO: 26295 - DNA, 201 bp, Homo sapiens
ttccggcctgtttccatgacaaccaagtggcttgagactgaggtttgtggtgagagaagtggcctgggggatgctgggaaaaaccagctaggtcctccccytcaaacccgctccgcctcgccctgccctctctccacaaacccggagttaaaataaagctgttccctgcctgagagttggggagtccccgagcatcactct

SEQ ID NO: 26296 - DNA, 201 bp, Homo sapiens
gtccacggggcatacagatttgcacactcatgttcatcatgtcggcacaggcatgcaggccctcccagcatgtgctctctgggtggcaggcttgctatgayggcaagcgtgtatgcctgtgcatgtgcccacttgtgtgtactcgacattgccacgcacgcacacacgcacatgctttcacccccatttctgccgtccttg

SEQ ID NO: 26297 - DNA, 201 bp, Homo sapiens
tgggcagctgctggctgacctgcaccgaggatggtggtggcaggtggggagcggggtcctccatggcagtgctcctctgccagtgcccacgtgtataggarcccctggggggtcctggctcagccgcgtgaccttggatgagtgagtggcctccccttccttgggccctgtgttttcgtcagcccttcccgcccaaattcc

SEQ ID NO: 26298 - DNA, 201 bp, Homo sapiens
ctgggatttgaacccaggagcctggagtcagaggcttctctgctgtataactgagagaacggggatcttcagcaaatgcccctggtgaggtaggactagargggggcaagtggaagggccaggctaggcccaaccagaagcagaaggaacaatctgcttcttcccagcagcagagttagcctagcagtacacagatggcct

SEQ ID NO: 26299 - DNA, 201 bp, Homo sapiens
tacaggctttaccatgctatgtcagtatgtgattaatggaatgaccttagcaattgtcacaaccagaatgagaggtgcagaccattagtacataaaaattygaaagagaaaaagatcacggtaaactggagaagagaaggctcctgaagaaggggctggagaagtgcaatcggtggggagggaggatgaggaaaggcactc

SEQ ID NO: 26300 - DNA, 201 bp, Homo sapiens
caggacttgtatggggtcttctctcccatgaactcctctacacttcaaactcctctcacactgggcttatcccataagctctgacctttcagtccaccatrcctttgctgttcctgtctcctctgcctggaggaccctacttcaccagctggcaaactcctactcatccttcaaagcccagtgaaattttacctcctgtgg

SEQ ID NO: 26301 - DNA, 201 bp, Homo sapiens
aatagtgagcttatagactactgcaacacactgaaatgagtcaatcccaaatgatcatgaggctgccacttcctcaaaccctgtcctcattcctgcagaasagaagaactttagccatttgaaaactggcagaaggaccagagccagccatggtaacttctaatttgcatttatttgcaatttatacaggctttaccatgc

SEQ ID NO: 26302 - DNA, 201 bp, Homo sapiens
gggcagacctaggaccagagaggagagagaggcacaaagtatatggggggagccaaaaccctcaaccatcaggataaatcatattttaatgtgatattttwaaaaaatcaaaatgaaagcaaaaacccatgatgaacaaaacgtccacattgtaaataaagacaggattagaataactgacttttcctttcgcatcagaca

SEQ ID NO: 26303 - DNA, 201 bp, Homo sapiens
aaatagggtagttggggaaggtcttgatgagaaggggctatttgagctgtgtcccaaagagagtaaaggagtgaacctgggggccctggggaagtggcttycagggggcagggcagcccgtgcagtgtgtgccaggagtggggcaagcctgcaggaaagcgggaacagatgacttcagaggtggggcggggcgtagggcaa

SEQ ID NO: 26304 - DNA, 201 bp, Homo sapiens
gtggtgattgctacgtgccaggcaccgccccagttcagaagggcttcataaagatgcattttatcctcacagcagctcagaggagcaggtgcatgattacmatccacgatttatagtgaggaaactgaggcacagagaggttaaataatttgcaagagtttacgtgctcccagccgttgacaaggggtgagggcagaccta

SEQ ID NO: 26305 - DNA, 201 bp, Homo sapiens
tgtcaattccactttaggaaaattggctccatgatgtttactgcaaactgcaatttggcatctctattcaggtgctctccgtgtttaattatatgtaatayggtagtggagaggaaggagtacataagtgtgtgattttctccttagtccctaccccccactccacgctggggtcgtaaaggtcagaggtgagaaatcgag

SEQ ID NO: 26306 - DNA, 201 bp, Homo sapiens
gaggttacaacccttcaggaatagggacaagctgctccctttgtaagaggatgtgagggaggctggctgggcccctgccagcaaacacaaatgaccctgcrgcctggctcttctctctcctcccagctgcggcccttgcagctctgctcctggcacagagacaggagctactggctgagtgtaacagctggagggatggag

SEQ ID NO: 26307 - DNA, 201 bp, Homo sapiens
ccccccagctcggaggtctgtgatccaggagcagagctcatagggtggcaaggaagcaaggaagcctttattttttatttatttattttttttgttgttgwtggatggagacagccctgagccaggagacatggaaagagaggctggcctgctggggtctcagtccatggttgtgccacctgagacactgcagggtgacgt

SEQ ID NO: 26308 - DNA, 201 bp, Homo sapiens
tttgtgttgtggtctaggttggcactgatgttgagacctgggcgggggctactcttggggtttctgtgagtggttggggagaatgcttttggtggttaacrctggggcaagcacattgagttggggtattccagctcaggctggtgtcctgagaaagggtggatgagtttgggaggctcagcactagttgaacaaaaggcc

SEQ ID NO: 26309 - DNA, 201 bp, Homo sapiens
ctccggcccatttacaggtgaaaaggctgggtttcgggaaagttatgagacttgttcataggtcctactgctagttaagtgccaaggctgacattagcacyaggaaaaacaaggaagcctctgccttcccaccgcccctttcagccttctgggcactggggaaagggaaagcccagggacctggatgtgtccacaggccct

SEQ ID NO: 26310 - DNA, 201 bp, Homo sapiens
ggggtggggggatggtgcctgccctctctacaaggcactcccagcagccccatcgtcagcctcaggccagcactgccagcaggcaggggctgctcacccasgtctggttcagagggtgctggccgctcttttccccaggaaggggagagagggaggccgtggagctatgagtgtggtgaagaacgtcacctgtggagacag

SEQ ID NO: 26311 - DNA, 201 bp, Homo sapiens
acacatttggggtactggatagggtgaagttaggggagaaaattgtggagtctttccagccacagggcagagggaggtggaggagctgggctgcttttcccagcagtattagtgtcccccaggacaggggaccttttccacattacatcactgccccatcccaccttacaacactctggcccctctgcttggtcccctttt

SEQ ID NO: 26312 - DNA, 201 bp, Homo sapiens
cctgtagtcctgggggaggtggaggtgtcagctcagcctcccgcagaacgaaggaggagtggcaggggtggggggatggtgcctgccctctctacaaggcrctcccagcagccccatcgtcagcctcaggccagcactgccagcaggcaggggctgctcacccaggtctggttcagagggtgctggccgctcttttcccca

SEQ ID NO: 26313 - DNA, 201 bp, Homo sapiens; identical to SEQ ID NO: 3467

SEQ ID NO: 26314 - DNA, 201 bp, Homo sapiens
gcccagagtgggaggggctgagtgaaaaacgaggaaaagaataacagcaccttccactcctgggccttgggaaaggacagagcttggcagtcactctcctytcttggcccgaggctgaggggactccccactcggggtagttgtgaagattaaatgagattttacatgtaaatggatgacatcacaggtgcttgatgcgtg

SEQ ID NO: 26315 - DNA, 201 bp, Homo sapiens
ccccctgcgtgttttggaggctgagctgggcctcccaggaccccagtgccccaactcagggaggggtgtgaggagcctctgctgactcttcatgagcaccygctgccacttcctgggcttcatggtggtcatggcccagagtgggaggggctgagtgaaaaacgaggaaaagaataacagcaccttccactcctgggcctt

SEQ ID NO: 26316 - DNA, 201 bp, Homo sapiens
ggcagctccccgtcgccccgcgcaccgctgcctctccgtggaacgtccaagtggtgcagaggagagggatctccggagactgggttctgttgcgagctatrccacgttccgtcccgggcggaactcttctttgggcctttgtttcctcgtctgtgaaatggggccagggtgggagcagagggcttgcagaagccctgccag

SEQ ID NO: 26317 - DNA, 201 bp, Homo sapiens
gaaaacccaccctttcccagcattaaaaatgaaagcaggagtcagcgctgcaacatggagggcccctactaaagctgggcctcactcattaagctaatttkgtgtgctatcccagtagcctctgctggggaagcccggcttcaccgtccaacattagaggtgtgttggagccccctgcgtgttttggaggctgagctgggc

SEQ ID NO: 26318 - DNA, 201 bp, Homo sapiens
ggagagagaaaaagaaaacccaccctttcccagcattaaaaatgaaagcaggagtcagcgctgcaacatggagggcccctactaaagctgggcctcactcrttaagctaatttggtgtgctatcccagtagcctctgctggggaagcccggcttcaccgtccaacattagaggtgtgttggagccccctgcgtgttttgga

SEQ ID NO: 26319 - DNA, 201 bp, Homo sapiens
tctgagtgaggagtcattagctagggtgaaaatgcacgggggagagagaaaaagaaaacccaccctttcccagcattaaaaatgaaagcaggagtcagcgytgcaacatggagggcccctactaaagctgggcctcactcattaagctaatttggtgtgctatcccagtagcctctgctggggaagcccggcttcaccgtc

SEQ ID NO: 26320 - DNA, 201 bp, Homo sapiens
ccagcacaccactgtgatggatcctgtctttacttacaatgtggacgttttgttcatcacggatttttacgttgattttcatctttaaaatcttgcatcaygtgttatttcccgtgctggctaaggctgtcggtgccgcataccgtgcacctgaggcctcatgcccgccctgggtgagggcccacagtgctgctgctggtt

SEQ ID NO: 26321 - DNA, 201 bp, Homo sapiens
atcagctccagggagatggactggaagtcgggcaagggaggaaagagggcaggactgcagagctcagggcctccagcctccatccaggaggtctgaagaakgggacttcaagatgacctccacctgagttcagaaccagagcaaattctgtgtggccaaggagaaaaggctttttgcactgaggggcccaccagaacagac

SEQ ID NO: 26322 - DNA, 201 bp, Homo sapiens
actaaggaaagctgagagccagcacgagaaaggccaacaggcaggatgagatcagggatgcgagcctcagctgcttggcaggtctgccacaggagcaggcrtgtccctgccctcaggaaccaaccctcactaggcaccgactgtccacagccactatgctttaacatgcagtattacctcactcatggccgacaacagtcc

SEQ ID NO: 26323 - DNA, 201 bp, Homo sapiens
aattccacacttatcctcctgaagggtcgcaatccaaaggcagtcaaaacattatttcatccacagaattattaaagccactgtataaaattaccttcagsctatgtgtataaggtgtatatgaaatagaaatgaaatttcatgtttagacttgggtcccatccccaagataacatttcatgtatacagatattacaaaat

SEQ ID NO: 26324 - DNA, 201 bp, Homo sapiens
agagcagcagtggtcccaggccctggtggagggagagcagcagacagctcagttcctctccctacaacctgatgatcactccatcttggcagcccagcatmatgagattgcaaattggggcccactggcctgggttggaatcccacctctaccaattactagctgagtgaccttggtcaagtcactttacaggcctcagtt

SEQ ID NO: 26325 - DNA, 201 bp, Homo sapiens
ctgtaatcccagcactttgagaggccgaggcgggtggatcacttgaggtcaggagttctagaccagcctggccaacatgaaccctatttctactaaaaatrtaaaaattagctgggcgtgatggtgggtgcctataatcccagctacttgggaggctgaggcatgagaattgcccgcctgggaggtggaggttgcagtgag

SEQ ID NO: 26326 - DNA, 201 bp, Homo sapiens
agccccaacacacccacctgtgaaatgcgaggctcccagacaccagccccccttccccttctgtgttgtttagtatttactttctctcctcccctcacccmgcacctgagctctttgaaggataggacccagccttaaaatctctgcaggccctagctcagcaccttgcacacagtaggtgtcccataaatgtacagtaaa

SEQ ID NO: 26327 - DNA, 201 bp, Homo sapiens
ctttctgggaagcccttccctccagctctgggctctccatttcaagaaacacgggggtggactgcgtgcagtggctcatacctgtaatcccagcactttgrgaggccgaggcgggtggatcacttgaggtcaggagttctagaccagcctggccaacatgaaccctatttctactaaaaatataaaaattagctgggcgtg

SEQ ID NO: 26328 - DNA, 201 bp, Homo sapiens
tgcagtgagctgagatggcgccactgcactccagcctgggcaacagagcaagactctgtctcaataaaataaaataaaataaaataaaataaaataaaatwaaataaaataaaataaaataaaataaagatggagaggatgggagggtaagagcagggaacaagaagacattggtacatctgggattgccccttcaaacca

SEQ ID NO: 26329 - DNA, 201 bp, Homo sapiens
ccacccccaccccccgacactgattccagctctcccggctcacagccagacccagctgcctgcaggtgactgggcctgccctcaagcctgcggagctgggrgcgggggaaccaatttgtcacggtgtaaccagagagtgtctgggggctcaatgccagggttctggctggggccagcaccaggccccttcctcacagctgt

SEQ ID NO: 26330 - DNA, 201 bp, Homo sapiens
ggaacactgacatctggctgagaggggggtggtcgggagaagcaggtgaagattgctggctacttgggtgtgacccaaagctcctcgggctccccaaccaygaggcctcagtgaatccagtagagctgttcctggaagagcagagaagccccagtagcacgcggcctgcagcccccagaatgaacccgtctgtgtttaccc

SEQ ID NO: 26331 - DNA, 201 bp, Homo sapiens
ggtgcaggaacactgacatctggctgagaggggggtggtcgggagaagcaggtgaagattgctggctacttgggtgtgacccaaagctcctcgggctcccmaaccacgaggcctcagtgaatccagtagagctgttcctggaagagcagagaagccccagtagcacgcggcctgcagcccccagaatgaacccgtctgtgt

SEQ ID NO: 26332 - DNA, 201 bp, Homo sapiens
aaccctgctcagaaggccccctgctctgtgggaagagacctctcttgcagcatgaatcacaaaatagcatacttatttgcatacgtgtatgactcctccaktagccagggggcaagcccctcacaccgggcacaatgcctggcacatagaagtgtgaggcacacgtttgtctaactgaaggaggaacaacaggtagggcaa

SEQ ID NO: 26333 - DNA, 201 bp, Homo sapiens
tctgagcatgctctgccccctcctcccagccccctgattccttgtctgtctccctttgcagcccatttcccagccatatccaatacttggaatttccctcrtataccccacatttcacacacgtgccccggtagccctcctcactctgcctacaatgttcttctcgcggtgaactcctactatgctatcaaaaccctgctc

SEQ ID NO: 26334 - DNA, 201 bp, Homo sapiens
ccttgcctctctggtcattgggggaaaggtcagtccagcacacgtgggctggagacatggccaggcagactcagccactggatgggccctgggtggtaaartcagcccttcctccagccaatttgacctccaggcaccaagtccaaacacccagcctgctctgagctcctggctccccgcaaacacctgtgtggcctgcat

SEQ ID NO: 26335 - DNA, 201 bp, Homo sapiens
aggtcccctggctccagcctatgaagtcagaagcttcctgtccctgtggatggggtcctgggttctcacagttgggtttcaacgtaacaatgacattcagrtaagacttgggagccctcccagcagtgagaccgctggagtctgccccagaccttccgaacacaggagggttggccaggaagacttgcctccagcccttgc

SEQ ID NO: 26336 - DNA, 201 bp, Homo sapiens
ttccctcaccaccctggctcagaggaaagcagttgaaagagttccctcctgtatgagctaaactgaggaggagaggggtatgtcccctcctgagcaagggraggggagagtcccacaacccccacgtgtgacggtgcggcagccagcccagcttgcagttctgggacgatggaatggaaatgagatgttgagacggagaca

SEQ ID NO: 26337 - DNA, 201 bp, Homo sapiens
tcagagctgatgccagtgtgggacctgagtgttgaagggtgggtaggagttttccactggcagcggggactggtggggagggtggggacctgggaggggtkggagagggagatgggaatatgggcagggacagattgtgaaggcctgataagtagtttagatttaccccaaggcagtggagagcgaccggggacttgtgta

SEQ ID NO: 26338 - DNA, 201 bp, Homo sapiens
caggctctgcccgctctcagtgggggtggggcagctggggaggatttgctttgacctgcttcttcagcttccctccctcctccaaccccaccccagggggmagggcggggttgaactccagaacacctcctgattgcactgacaagaggcccactctgctcttcgatgctgaagtctagctgggggtagggtgctgcccat

SEQ ID NO: 26339 - DNA, 201 bp, Homo sapiens
tccctacccccctctctcggctgtgagtcaagaaccagttcccaccagtctttctggggttcaaagcgtctccccgccctaatcctcacctcgacctcccygccccccacatctattgtgggtgagagggcctttccctgagctgctcgcaggctgcccctcccaggcccggcctctgcccgctgcagcgggcagcacaca

SEQ ID NO: 26340 - DNA, 201 bp, Homo sapiens
gtgtccctcagggcagggctgggttgggatccccgcgccgggccaccctcctgcaggggacactgaggccagctgcaggaatgtgaggccacattcacccyggagcaaaggcttccagtgccttctacagtttaatccacagaaatgccccgggagccacctgacataggaagcgagaggataggtctcaaccgtgatcat

SEQ ID NO: 26341 - DNA, 201 bp, Homo sapiens
tgcaggggtggggcgggccgctgggacaggggcctctgctctccaggactcggggctgggcattgacagagctgggtgtggccggcctggggagaaggacrcagagagagggaggagctgggctagttggcgtctgctggccggggccgtgggaaagagtcccagagttcccttgaggacagtcggaactcttagactcca

SEQ ID NO: 26342 - DNA, 201 bp, Homo sapiens
cagggaaacagaactcgtcatggaaacaacatcaagaagtaagacacttgccaagttccaggtaggatcccagctctgtgccttcctggctacgtggtgckcaccactcctttattttctctctgattgacgtcgtctcgcaccacgacccaccagcctgttggaggggcgcgggtctggaggaacggggatgtgtccctc

SEQ ID NO: 26343 - DNA, 201 bp, Homo sapiens
tgggcaagagcctggatttgtttcgcagagttgatgccttttctcatataccccccatcccagaaaggggcccagccctggtttcagagagtcaccaactytaagaagcacctctcaacaggcgcaagaggcccttgacagagccacgccttgcatacaacaccttgaagggttgcaaaatccattctgtttcatatcccg

SEQ ID NO: 26344 - DNA, 201 bp, Homo sapiens
tcaatcctggtggttaaacttctgagggcaagagggggttggatggttggatggatggatggatggatggatggatggatggatggatggatgaatattcrgatgggcaagtaaacctttgagttgttttcatgtgtgccacctctaagcaggtcttcttcactctgtacttgggctgcctatttactccccaaatgtaat

SEQ ID NO: 26345 - DNA, 201 bp, Homo sapiens
ctctactaaaaatacacaaattagctgggcatggtggtgggcacctgtagtcccagctactcaggaggctgaggcaggagaattgcttgaactggggaggyggaggttgcagcgatctgagattgtgccactgcactccagcatgggcgactgagcgagattccatctcaaaaaaaaaaaaaggtgttcctgaagaaacac

SEQ ID NO: 26346 - DNA, 201 bp, Homo sapiens
cagggtggctcacgcctgtaatcccagcactttgggaggccgaggtgggtggatcacctgaggtcaggagttcaagaccagcctggccaacatggtgaaascccatctccactaaaaatacaaaaaattagccaggcgtggtggtgggtgcctgtaatcccagctactcaggaggctgaggccggagaatcgctagatccc

SEQ ID NO: 26347 - DNA, 201 bp, Homo sapiens
tctgcaaacacagtccgagggactgaggagtccatacaatgcctcacacacaaaggccattgtcaaagcctcgggcctggcagaaagtgaggggggtggggccgctaggccacctcctgctcagccacccctggtcctcattctgggatgaggggagggcctaggagaagccctccctttcagtgcagattcccttcttga

SEQ ID NO: 26348 - DNA, 201 bp, Homo sapiens
aacacttgaacctgggagacagaggttgcagtgagctgagatggcgccactgcactccagcctgggcaacagagcaagactctgtctcaataaaataaaawaaaataaaataaaataaaataaaataaaataaaataaaataaaataaaataaagatggagaggatgggagggtaagagcagggaacaagaagacattggt

SEQ ID NO: 26349 - DNA, 201 bp, Homo sapiens
tgagccgagatcgtgccactgcactccagcccaggcgatggagcgagactctgtctcaaaaaaaaaaaaaaaaaaaaaggacttaggaaaaagaattaaayagaaggcctggaggagaaaaaaagcctagtgtcatctggtcccaagccaccacaccactcctcctgtcacccactccagagaaacaaggtcccagtgggc

SEQ ID NO: 26350 - DNA, 201 bp, Homo sapiens
agacaggagaaacacttgaacctgggagacagaggttgcagtgagctgagatggcgccactgcactccagcctgggcaacagagcaagactctgtctcaadaaaataaaataaaataaaataaaataaaataaaataaaataaaataaaataaaataaaataaagatggagaggatgggagggtaagagcagggaacaaga

SEQ ID NO: 26351 - DNA, 201 bp, Homo sapiens
tccacgccagacagccccttctgcttgcaaatgagttagatccccatgcttctcctttcttctctccctcactcagtatcctcactcgaaagtctttgatrctggaaggtcatcccagccattctgctgctgctacacaggcccagccctaaacaaaataaccggggttctttggtcccaaaagatccccaggaaagagta

SEQ ID NO: 26352 - DNA, 201 bp, Homo sapiens
agttccagaccagcctggccaacatggagaaaccccgtctctactaaaaatacaaaaattagccgggcgtggtggcacacacctgtaattccagctactcrggaggctgagacaggagaaacacttgaacctgggagacagaggttgcagtgagctgagatggcgccactgcactccagcctgggcaacagagcaagactc

SEQ ID NO: 26353 - DNA, 201 bp, Homo sapiens
gcttgtcaaatacagattcccaggtctttgccccagtggttctgcttcaggagatctggggttagaaccaaggcatctgtattattattttttttttttttctttgagacggattttcactctgtcacccaggctggagtgcaatggcgcaatcttggctcactgcaacctccgcctcccaggttcaagcagttcttctgc

SEQ ID NO: 26354 - DNA, 201 bp, Homo sapiens
aatgtcactagactttatatatatatatataaagaatatatatatataaaggatatatatatatataaaggatatatatatatatctcaggggcatatcargggcatatcaatgtcactagactatatatatatatataaaggatatatatatatatatatatctcaggggcagaatcaacaaaattggaacatggtggtt

SEQ ID NO: 26355 - DNA, 201 bp, Homo sapiens
acatcggataaagactgccaccccccagctcggaggtctgtgatccaggagcagagctcatagggtggcaaggaagcaaggaagcctttattttttatttwtttattttttttgttgttgttggatggagacagccctgagccaggagacatggaaagagaggctggcctgctggggtctcagtccatggttgtgccacct

SEQ ID NO: 26356 - DNA, 201 bp, Homo sapiens
atggactagattaataacaggagaaatggagcaatgtcactagactttatatatatatatataaagaatatatatatataaaggatatatatatatataaaggatatatatatatatctcaggggcatatcaggggcatatcaatgtcactagactatatatatatatataaaggatatatatatatatatatatctcagg

SEQ ID NO: 26357 - DNA, 201 bp, Homo sapiens
ggctcacgcctgtaatcctaacactttgggaagctgaggcaggtggtaatcactttaggccaggagttcaagaccaacctaggcaagacccccaactctascaaaaatttaaaaaataaaatatatgtatagacttacccagacaccttcacccaccaggactgtaaggctgtgccttgttgcctcttcctcacccctttg

SEQ ID NO: 26358 - DNA, 201 bp, Homo sapiens
tgcatggactagattaataacaggagaaatggagcaatgtcactagactttatatatatatatataaagaatatatatatataaaggatatatatatatataaaggatatatatatatatctcaggggcatatcaggggcatatcaatgtcactagactatatatatatatataaaggatatatatatatatatatatctc

SEQ ID NO: 26359 - DNA, 201 bp, Homo sapiens
ctgaagtctagctgggggtagggtgctgcccatcctcaccttactctaggcagcctgagtcgctgagcactgtgcgggggacaccaacctgccctccaaaracagacttttacctttgggctgggttcagtggctcacgcctgtaatcctaacactttgggaagctgaggcaggtggtaatcactttaggccaggagttca

SEQ ID NO: 26360 - DNA, 201 bp, Homo sapiens
gttgtatcctggattaaattgtggaacaaaaaatagacattagtgggaaaaaacctggggaaatctgaataaattctgtagttcagttaatagtattataytaacactaatttcttagttttgatagatgtaccatggttctataagatgttaacattcagggaagatgaatgaagggcatatgaaaactctgtaccattt

SEQ ID NO: 26361 - DNA, 201 bp, Homo sapiens
agtcctgaggtgggtgagaaaggtgagcccaactgcctgctcttcaagtgggctgtcattcctgcagttatcaagtctcagggccaggagggaacatggamctcattgcatccatgctccatgccagggcaagaagcccatgcacagcatgcctgatgaacgggcttgcagcctgagtctgaaaagtgactgggaggtcaa

SEQ ID NO: 26362 - DNA, 201 bp, Homo sapiens
ggggacttcaagatgacctccacctgagttcagaaccagagcaaattctgtgtggccaaggagaaaaggctttttgcactgaggggcccaccagaacagayacaaggctgaaatgcaacccagtccaggctagaggaagagaccgggagcccaactcaaggaaaaggccaggaggcaggggactcccagcagctccagcgc

SEQ ID NO: 26363 - DNA, 201 bp, Homo sapiens
tgaggctcaaagggtttgagtgacttgcccaagattagacagctaagaaggtggccagctcaaccttgagctatcttcctctgcagataaactgagagatrgaggcagtggggggcatgaaaatggccccaggcactgcactgagaaccaggttgcctgggttcctccctcacctccctcatcagtgagctgtgtgaccct

SEQ ID NO: 26364 - DNA, 201 bp, Homo sapiens
tgtgatgaaagcccagttctgctgtgcaccggagccctggctccctccttcacccctgcctctgatttgctgtgagttcttatcccatttctgcaggaccyctccccaatcctagcaccaccacacccatccagccattcctgtgcagggtgacaataaaaagtgtcctcagacattgccgaatattccctggaggacaag

SEQ ID NO: 26365 - DNA, 201 bp, Homo sapiens
cagggtcagctctcagggctttgcttatagagctttatttaatcttccctacagcctttgagggagtgattattctctctccatttttatagacgagaaaraaaagtcacagagcttgcaagtggcagagctgggatttgaacccaggagcctggagtcagaggcttctctgctgtataactgagagaacggggatcttca

SEQ ID NO: 26366 - DNA, 201 bp, Homo sapiens
cacaggctgcttggatgcccctaaatattccctgctggaagggcaggcccccatggccacccagagagcgtctccaggtgccctccttgacggtgccaccygccccacccattgactcacttggctgcaggtcctttctgctggccagaaggtgtcatggagcacctgtgggtaactgcccaaatgctttaggtgaggtca

SEQ ID NO: 26367 - DNA, 201 bp, Homo sapiens
ccaccagagcacctggagataagaggagataagggcaaggctgggcggagacagtcacagtctggggtaagggtggggagggggcaggggaaggggggagrcggggcacgttggggagctcaacactctggaagctaggggaggccaggaattggggcctcaagtccaggagtcaaactggttaataattagtgactctgg

SEQ ID NO: 26368 - DNA, 201 bp, Homo sapiens
cctttttctgcatctgctcacctgcccggagagagcctcccggggtggagtggggcattctcacctccaccaaggcctgcttcataccccacggaggagakggagactcattctgagccctgccaacacttagaaaaccaagttacagatggggcggtagaagctgggagcacccagtggacctcttcctaccctcaggca

SEQ ID NO: 26369 - DNA, 201 bp, Homo sapiens
tgggttcaagtgattttcccgcctcagcatcccaagtagctgggacgacaggcgcacgccaccatgcccagctaatttttttgtgtgtttagttgagacgsggtttcaccatgttggccaggatagtctcgatctcttgacctcgtgatctgtccgcctctgcctcccaaagtgttgggattacaggcatgagccaccgtg

SEQ ID NO: 26370 - DNA, 201 bp, Homo sapiens
tttagtaaagacagggtttcaccatgttggccaggatgatctcgacctcctgaacttgtgatccacccacctcggccttccaaagtgctgggattataggyataagtcaccgcacctggccctaacaggcgtatttttaataagctacccaggagattccaatagacagccagcgtggaggaagaggccgccccaggtgtc

SEQ ID NO: 26371 - DNA, 201 bp, Homo sapiens
caggccctgccccacgccaataggttcagagcctctgggattgggattggggcctagacagactttttttttttttttttttttttgagacggggtcttgrtttgtcacccaggctggagtgcagtggcacaatcacagctcactgcagcctcgacctcctgggctcaagcaatcttcttgcctcagcctcccaagtaggc

SEQ ID NO: 26372 - DNA, 201 bp, Homo sapiens
taacccaggctacactccagaatcatctggggatttttaaaaatcaggccctgccccacgccaataggttcagagcctctgggattgggattggggcctasacagactttttttttttttttttttttttgagacggggtcttggtttgtcacccaggctggagtgcagtggcacaatcacagctcactgcagcctcgacc

SEQ ID NO: 26373 - DNA, 201 bp, Homo sapiens
ggccccattgagcgcagagaacttaacccaggctacactccagaatcatctggggatttttaaaaatcaggccctgccccacgccaataggttcagagccwctgggattgggattggggcctagacagactttttttttttttttttttttttgagacggggtcttggtttgtcacccaggctggagtgcagtggcacaat

SEQ ID NO: 26374 - DNA, 201 bp, Homo sapiens
tcacttcttacacttgcttctccactccctcactgtccactagctcttttccttctgactacaagatgctcagtagcttttgatttccgacgaaaaaggakaaaataagcctcttggtctgtcttgctaaccctctccgagcttctcatccaccttgctcattccgtccgccaccaaacttctcaaaagcagagaggatac

SEQ ID NO: 26375 - DNA, 201 bp, Homo sapiens
tcatataccccacatttcacacacgtgccccggtagccctcctcactctgcctacaatgttcttctcgcggtgaactcctactatgctatcaaaaccctgytcagaaggccccctgctctgtgggaagagacctctcttgcagcatgaatcacaaaatagcatacttatttgcatacgtgtatgactcctccattagccag

SEQ ID NO: 26376 - DNA, 201 bp, Homo sapiens
aagctgagagggcccccacaatgcattttgtccacttgcctagggttctgagccccagacaccccttggcattttacctctctgtgtttgtgtcacttcartgaaacagagtcagtgcccacctcattcagagttggtgggaggatggcctgcgacaagcactgctcagagaaaagtcagctctcattattttgagagaca

SEQ ID NO: 26377 - DNA, 201 bp, Homo sapiens
ggaaccagaatttacgtgttatcagaaacagccacttcccctctgctcctgcccgcctagagggctgggcaaagggtagagggagcagtgtccggccaggktctggggagaattcggctctccttagtgggaaactctgtctgtcttcctcccccagggggaggggatggggataggaggaccagagtaaggggaagaggg

SEQ ID NO: 26378 - DNA, 201 bp, Homo sapiens
ccccacaataccaaccccagagcagagaaggacagaagaggtgtcactcaaagggggtctgtggtcccgttctagggactgcaagctgagagggcccccayaatgcattttgtccacttgcctagggttctgagccccagacaccccttggcattttacctctctgtgtttgtgtcacttcaatgaaacagagtcagtgcc

SEQ ID NO: 26379 - DNA, 201 bp, Homo sapiens; identical to SEQ ID NO: 3451

SEQ ID NO: 26380 - DNA, 201 bp, Homo sapiens
gcaggagagagggcattactattacctaatatcacctattagaaatctaaacctctgagcatgctctgccccctcctcccagccccctgattccttgtctktctccctttgcagcccatttcccagccatatccaatacttggaatttccctcatataccccacatttcacacacgtgccccggtagccctcctcactctg

SEQ ID NO: 26381 - DNA, 201 bp, Homo sapiens
actcaaggcacgaagaatgaatgggccatggagaaagaggaaaaaaagaggaagagaccctgggaaggccctgcatctgccaaaggtgtgggggccacagygccaaaagctaccatctactgagccatcatatgccagggtcagctctcagggctttgcttatagagctttatttaatcttccctacagcctttgagggag

SEQ ID NO: 26382 - DNA, 201 bp, Homo sapiens
acaccctatttcacttcttacacttgcttctccactccctcactgtccactagctcttttccttctgactacaagatgctcagtagcttttgatttccgaygaaaaaggagaaaataagcctcttggtctgtcttgctaaccctctccgagcttctcatccaccttgctcattccgtccgccaccaaacttctcaaaagca

SEQ ID NO: 26383 - DNA, 201 bp, Homo sapiens; identical to SEQ ID NO: 3452

SEQ ID NO: 26384 - DNA, 201 bp, Homo sapiens
ttctgcagttggaagtccaggggccaccaccccacaggtggctcatgagtgccatccaggctctaacacaacccccaggcaggccctggctgcccctcaawaggggcccacccagaggctgccgctcctgcctctttgcttctttggtgggactgactgagttggggttcctgcagcaatggctgaaagaatctcttaccc

SEQ ID NO: 26385 - DNA, 201 bp, Homo sapiens
agggtttcaccatgttagtcaggctggtctcgaactcctgacctcaggtaatccacctgccttggcctcccaaagtgctgggattacaggcatgagccacygtgcccagcctcccgtgcccctttctttctgtttttggttttttttttttttggcaaccctatttaacccccatgccaagaaaggaaaacttctgatgct

SEQ ID NO: 26386 - DNA, 201 bp, Homo sapiens; identical to SEQ ID NO: 3453

SEQ ID NO: 26387 - DNA, 201 bp, Homo sapiens
gaggtacatcacagggatcctgcaggtggggtgacctggcagcctcccgtgtcacctgttgctgcttcgtgccatggtgcagtggctctgtggcatgtcayggccctgggagggcgagccacagcatgtgtcagggtgaggcaccccgcttttggcattgggatacagaggcacattctgcagttggaagtccaggggcca

SEQ ID NO: 26388 - DNA, 201 bp, Homo sapiens
ttttggccggtgcatcttggacaagtcaacagggctagtcccatcactctctctgcttcctcgcagccaaacccaccaattggatagagggtacccaggcwgtgcttcgagccaagaaggggcaggatgacaaggtcctggtggccacctgcacctcagccaatgggaagcctcccagtgtggtatcctgggaaactcggt

SEQ ID NO: 26389 - DNA, 201 bp, Homo sapiens
ccaagaagggtacaagacagcgtggtattgtgacttctgagggccagccagcctctgagctctggagatgcctgactgccccttgctgaaagacatttatstgtcccgttggtgccagcatgaaggcccttcctgactacttgggcctccagcacgtgggacacagagtggggccaggcagaagaaactcgtggtcagatc

SEQ ID NO: 26390 - DNA, 201 bp, Homo sapiens
tctggtggcctgatggggagagcccccatgtgtgctcctgtgctgagcttaccctcattctgtctccaggaccgaccagcccctctcccagaagccggagycttctcccagcaggcaaagctcccttgtgcctgaggatatccaggtgggcctgaggcagcagaggacaaggtccctggactgcggggagggagaaaaatg

SEQ ID NO: 26391 - DNA, 201 bp, Homo sapiens
ttcctcaagtcttaggctcaggctaaaccagtcaaccctttgtgggccccctactcacctgactattgcttaccttcattcctttgctcgtgctgaccctstaccttaaatccagtctcttttatgtctctgccctccagcacttaccttggtctgatagatgactcaccgagaccctgtgttcgcttccctgaagccttt

SEQ ID NO: 26392 - DNA, 201 bp, Homo sapiens
tggcccatcctgggtacacaggggatctgtgtgggaccagctactataatcctaccacttggacaagtccaaggcaaacaccaagaagggtacaagacagygtggtattgtgacttctgagggccagccagcctctgagctctggagatgcctgactgccccttgctgaaagacatttatctgtcccgttggtgccagcat

SEQ ID NO: 26393 - DNA, 201 bp, Homo sapiens
ggcgacagagtgagactccgtctcagatacaaaaaaaaaaggaaacactggggtggtcctggatgtagacccagaaggaggaagcagacagcccctgcccrcaggttcgtgtgcaggaaaatgatggtggggcgtgaggggtgcacccagctgtgtgaccttgggtgagccttttgaggcagcttcttgcccggagaaccg

SEQ ID NO: 26394 - DNA, 201 bp, Homo sapiens
tgggaaaggttaatgccttggttgctcagagctgctggagaggtgagtggggcagggggaggtccaggatgacccctccagtgtctagagatgagatcacrtcacacagatcaaaaacactgtcccacaggaagagggcactgtcagctgtccccaggctggtgccaccctcttcctgggaccctgtctgccccagccctg

SEQ ID NO: 26395 - DNA, 201 bp, Homo sapiens
ctaacccctctccttcctcacccagctccagggggagggagaattgagggacaggggcagatttgggttccctgccacatactagctttgtgcccttggaygccctacaccaacactctggtcctcagtttcttccgtgaatactgacccactgaggacaaaagtgggataatgatataaacccagagggagttcacgagg

SEQ ID NO: 26396 - DNA, 201 bp, Homo sapiens
gtgacttcccccaggcagctttctctacccacctgatgtccccctccaagaacggtgacccagggtttcccgtccatcctgggggctgagctctctgcggsctcgtcacatcacactcccttccctatccatctctgccctgtttaattggaatttggctagtggagaccatctgttctattccggcctgtttccatgaca

SEQ ID NO: 26397 - DNA, 201 bp, Homo sapiens
tgccctggaggagctgacagtctaatggggagtgaatcaggcactataaaccatcacgaaagtggtcccaagtatgcaaaatctatagcaggggatgattrgaaatcccagtggctcctccttgaagcctcagagcagggtgagatgaggctgcagaagcaggcatgggccccttaggccttgttgaggacttgacactgg

SEQ ID NO: 26398 - DNA, 201 bp, Homo sapiens
cagcttcttgcccggagaaccgtgttcctgggtaaagctggggagatttgccaggaggaaccattgtcttggagaagaggtggcaaaaaggcacactaacrcgtactccgagtgtgaaaggatgggcatgataaaggccactctctccctgtgagcgccattcctgagcacctgtgtgccagttccgagcccggcatcctg

SEQ ID NO: 26399 - DNA, 201 bp, Homo sapiens
aattgtcacaaccagaatgagaggtgcagaccattagtacataaaaattcgaaagagaaaaagatcacggtaaactggagaagagaaggctcctgaagaargggctggagaagtgcaatcggtggggagggaggatgaggaaaggcactcctggcggggcaaactgcatgtgtaaaggcttgcagtaaggaatcaacttgg

SEQ ID NO: 26400 - DNA, 201 bp, Homo sapiens
ccagcctgtcctgctggagggaggtgggacttgccagagcacccccatcactgctgccacgccggggcagcagagcagggccagcctggcctgtctggaaratcctgggctcctgcgctgcctccttctcggggcttttcccaggccgccgtgccccctcctctcccacgcactgtgctcacccgcccaaggcgccgggcg

SEQ ID NO: 26401 - DNA, 201 bp, Homo sapiens
tgatggtctccccacacctcaggggctggggtggtggtggttcccactttaagagggggaacagagacccagagaggttgtgatttttccacagagctagrcctggaaagcagccccatcttctgaggccttggagagaaagggtgagctggtggggtacacactacacttggagtcaggagacctggctttgaatcctgg

SEQ ID NO: 26402 - DNA, 201 bp, Homo sapiens
gccggcgggcatagagggagataattgggagtggtttgacagcttaatgtctggggctggcttcctggagcagtggagggacagggacggggcgggagccmgtgaggcggaggcaggtggatttgggctgcccctgtcttgagaatgaccaccccccaccacctttcccctccatttccctagcagcagcttgttgggcag

SEQ ID NO: 26403 - DNA, 201 bp, Homo sapiens
  misc_feature (185)..(201): n is a, c, g, or t
cccctgtcttgagaatgaccaccccccaccacctttcccctccatttccctagcagcagcttgttgggcaggaaaataaagcaccgggaaggaaatgagayctggagaataaattaggctttctttattaatttgtcagaactaattaacatctcccctaggtttgtctcctctccagatgcccnnnnnnnnnnnnnnnnn

SEQ ID NO: 26404 - DNA, 201 bp, Homo sapiens
agaggaggaaccccattccagtggaggaggcagggagggctctctggaggaagcacgtccagcttaaacctgcaggctggattggcctggcaaagaaggggaagaaagagagaccctggcagacagagtggctcctactagctacctgaggatgagaggaagcaggggctccctgtctgggagctgcaagtggtccaggct

SEQ ID NO: 26405 - DNA, 201 bp, Homo sapiens
tcccccagcctgacctcctgctcacgcccaccatcccctcagtagccagcttcttttcattttgcaacactcctgggaccctcatccctgaaagcccccayggcatccagggcaaaaagggacagcaagtaacagaacggcacaagctgccttccaacctaggctggcagccccttgaggactgggatcttgtctttttct

SEQ ID NO: 26406 - DNA, 201 bp, Homo sapiens
cagagttggtgggaggatggcctgcgacaagcactgctcagagaaaagtcagctctcattattttgagagacagaacttcagtaaagctctggaaggttcygagttctttcatactcatgaggtcactttggtttgaccctagcaataatcccaagagctataacaagcaataattggtgttcccatttcacagatgacac

SEQ ID NO: 26407 - DNA, 201 bp, Homo sapiens
ctgccagcctgggctgagggtgggcatgaggcaggagtcagcacttggacctagggatgtgaggttttctgtgccccaagtttgtgggaaggtgggcactrctgctgggcccacagacacagccagctggcaaaagggaggtctagcccagcagagagatgaggacattttgcttctccttcatgcccacagcatgagctg

SEQ ID NO: 26408 - DNA, 201 bp, Homo sapiens
cagaggggtttcctttgtgatctgcttccctccctcttcctaataaagagttttgtcgttttcctttggtgattcagtctgagtcactcccaccccaaccycccagtatttatttttatcaaggtgtccccagggaagccagtgttctggagcatctcagctctttctttgtccctattccttctctctggcacccccaga

SEQ ID NO: 26409 - DNA, 201 bp, Homo sapiens
cctgcaaagctgatgctaaccccccagccactgagtaccactggaccacgtaagtgctgcagggctgaccagtcaccttggaagacagctgactggaccaygggtgatgaggggcaaccatcctacctccaggagcctttaggcagggaagaaattagggtctgggctcagtaagaagcggggccatgagagaacaacccc

SEQ ID NO: 26410 - DNA, 201 bp, Homo sapiens
ccccagacaccccttggcattttacctctctgtgtttgtgtcacttcaatgaaacagagtcagtgcccacctcattcagagttggtgggaggatggcctgmgacaagcactgctcagagaaaagtcagctctcattattttgagagacagaacttcagtaaagctctggaaggttctgagttctttcatactcatgaggtc

SEQ ID NO: 26411 - DNA, 201 bp, Homo sapiens
ggtgtgccccaggtccccacacccacagggaggcttcacacactgcccagtaccggggatgccaggaggcaggcccctctgctgctgccactgctgccaamactgcccagcttgtgaggccaggaggagcccctgtcccactcggtgctgctgctcttctgacccctgctgtgaggaatgggattcttggtcgaaaaaatt

SEQ ID NO: 26412 - DNA, 201 bp, Homo sapiens
ggtacccaggcagtgcttcgagccaagaaggggcaggatgacaaggtcctggtggccacctgcacctcagccaatgggaagcctcccagtgtggtatcctrggaaactcggttaaaaggtgaggcagagtaccaggagatccggaaccccaatggcacagtgacggtcatcagccgctaccgcctggtgcccagcagggaa

SEQ ID NO: 26413 - DNA, 201 bp, Homo sapiens
ccaccacacccagctaatttttgtacttttagtagagatggggtttcaccatattggccaagctggtctcaaactcctgaccatgtgatctgcctgcctcrgcctcccaaagtgctgggattacaggcgtgagccaccacacctggctggcatctgtattattaaccagctgcccaggagaccaaggaccaacaaccatga

SEQ ID NO: 26414 - DNA, 201 bp, Homo sapiens
agggcactggtatgccctacctatgatcctccacttcctggaataaaaagtgcttctgaaggtgtgagtgggcagagcctgctggctggtttcagctctgyggacccaggagctgctaggttcaacagaatagctttgtggcctttgagggtcaggaggaaggaagaagatcctttgtccttggcaaatttgcaagtcact

SEQ ID NO: 26415 - DNA, 201 bp, Homo sapiens
ctgtctcccctatctcctccctttgctcgttttctctcctccttccctgtcgccctcctgtttccactcccgggctctgtgattgccaccctcccacccayacttccctctctcctggctgtttccatgccactgctccttccatcccttcctggctgaagttcccttgttctaagtcccgctctcctgacctcaccctct

SEQ ID NO: 26416 - DNA, 201 bp, Homo sapiens
gcctaagctcgatgacagggatatgactagtagggcagggaggacataacgttagacatgatgaacttcctgcaagaggttctgggacagtctttggtgcmgcacagctgagaggcagggatggccaaggggacctgaagacaaggcctgacggatgccacgcccttttggccggtgcatcttggacaagtcaacagggct

SEQ ID NO: 26417 - DNA, 201 bp, Homo sapiens
acttctcccatcgtattcccaacccatggggcctctgcccagggagcatcagctccgaagcaccccacaggctggcagagggaacagctggaggagtgagrgtggggataggcctgatggaccttgagggctgtgtggatgtgaatcagcacagagaagggggaacctcagggaaactttcagaacacggtagggcctggc

SEQ ID NO: 26418 - DNA, 201 bp, Homo sapiens
gagacaggattgcaggggctcagagggccgtgtcccgttgcaggtccaccatgcatggcaccaatccatgcatggcaccaatcccaaaatggctcctggakcccacaccccttccctgcgctctcacctggggcccaagccctcccaactggcttttcctgttcctagctttgtgtggtgcaagttccccaattatgccca

SEQ ID NO: 26419 - DNA, 201 bp, Homo sapiens
aactcaacccaaggccaggcctgctcctttcatctcctgcaggggcttacaattggttgggagacaggctagacacatatgccaggaagtagaaaataaargggtacaggtcagtgttacatgttattggggtattaatagaactgtcagctgagtaggaagagatgacagtcacaagggcgtcctggaagaggggcgcct

SEQ ID NO: 26420 - DNA, 201 bp, Homo sapiens
atccaaggcaaaggcacagctgggtcagagtgagctggacaggtcatgtccaaagtgcagtcccccaaggtcatcagagccaatattccccattttacagsaaaggaaaccaccctatccaaggccatacagaaaaacaatgagcaagtagtggggaccagagctcgcctctctcagtgtccaggtgagcagagcaaaggt

SEQ ID NO: 26421 - DNA, 201 bp, Homo sapiens
ggaagacaaagcagccagtgcatggctcctaggctggggctctgctcgaaaagcaaccaaaaatgagggtgcagacgtatgtttactaacacagagtgatrtttataatctatccctaagtaaaaaagcagcttatgggataatatgtacagcatgattctgactttttaaaatagatagatggttatgtggatatacaca

SEQ ID NO: 26422 - DNA, 201 bp, Homo sapiens
acgctgtgggatgctggcatggtggggataggtttgcaggtggagctcatctcctccaagctctgcacctgtggtcaaggacctcttcatgggccagaaartgaggcttacctcaagcagggagactggagagaaagcgaagatgtagcccaaagccatagtgctttgtgtgccctgcaactgagctttccctgcagcttt

SEQ ID NO: 26423 - DNA, 201 bp, Homo sapiens
ggcctgcctgatagaggcatttcctgtccctgtctcctcctgcatctcctttatcctgcactgccaccctctattccccattctgtgttggactttgaagkccccaagcccagccaaagcactgagttcccccttaagacacctccacaccctccccacaagcaaagcacaaattttggggtccatgtagcatgggccacg

SEQ ID NO: 26424 - DNA, 201 bp, Homo sapiens
gtgtaaatgggaatctccttacccatttataaggcagcactgtggagtgccttggaattggattctaggcctccgtagtcaaggctggaggggaagaggasatactgcagagcttgggcccagttgccctggctgagtggcccggaaggcatctcttgaacctgaacttcagagcatatgggacaggtagcccttgttgcc

SEQ ID NO: 26425 - DNA, 201 bp, Homo sapiens
atggcgggggggcttcgtctctttgggcggcccctttgccagacggctcaggacgctcgggccccctcccgccccacaccgccccacagcgggcgcggagrgtcggctgctgcggcagaggcggctcctcgctcacctgcggttcctttcctggagggtgaggccggggcagcctcctcccggcctggcgcgggaccgggc

SEQ ID NO: 26426 - DNA, 201 bp, Homo sapiens
ggaccctgttctctctacctgtctcccccaaacacaactcactgcccctcctacagagcccagactctccagccctgttcccagccacttctggaccctcygtccctggacaaacaaggacagttccccaccagagtgccccccaactatgtttcccactcctctctgcaccagcttgccacagccagccctgcatgtccc

SEQ ID NO: 26427 - DNA, 201 bp, Homo sapiens
ccactcgctgtccaagagttcaaggtcaccactgtgctgtggctacaaagtattatttcaggggtcattgcggtggggattggtgagaccaagaccttctygaggggatggggtcgagagccctccatcccaatgttgctccagtggcccccacctgctgctctggcagtgcgcacggagctcctagccctgctgcctgtt

SEQ ID NO: 26428 - DNA, 201 bp, Homo sapiens
ccacctgagacactgcagggtgacgtttcaccaaggaggggctgcgaggaaaggagctccggctgtctcctccagcatcacagctccctttcctggcaccrcctaagtccaggtacagaagaggccctgagcaccttgtgccaaggcctggtgcagttcttgtatcatccatacagggaagggttcagcagaaggcccagc

SEQ ID NO: 26429 - DNA, 201 bp, Homo sapiens
cagatgctactcagacataagcctgaacatctgggcacgggctggtctcccctctgtggggtttgggttctctcatcagccaagggaacacagggccgggrttttgcctcttaccccagcagtcctgaggccctgatctgctggtgcctgggggacctgccctcctggcctacctccggcagcgctgctggagaccctttg

SEQ ID NO: 26430 - DNA, 201 bp, Homo sapiens
ttgtgctgggctgccggggttgctagcccctgtagtcctgggggaggtggaggtgtcagctcagcctcccgcagaacgaaggaggagtggcaggggtgggrggatggtgcctgccctctctacaaggcactcccagcagccccatcgtcagcctcaggccagcactgccagcaggcaggggctgctcacccaggtctggtt

SEQ ID NO: 26431 - DNA, 201 bp, Homo sapiens
tctctgcccctccatttccccctctgtgaatggggagtcaagagcagacagtccctgtctcagagctgctagctgaccaatgctcagcctggtctttcctyctgccccagactggtctcagcctgagttccctgtccctttgactttcctgtttatacacaaaattcacccacaatattttagttttccaatcaaatcatt

SEQ ID NO: 26432 - DNA, 201 bp, Homo sapiens
tgccagctcctgcttcccctgattcccactaactgcttggcaatcttggaagagctctccttctctgcccctccatttccccctctgtgaatggggagtcragagcagacagtccctgtctcagagctgctagctgaccaatgctcagcctggtctttcctcctgccccagactggtctcagcctgagttccctgtccctt

SEQ ID NO: 26433 - DNA, 201 bp, Homo sapiens
tctggctctcagttcatccagcagacctggatccagggcctactgcgtgccgggtgtcaggctgtgtgctgggacgtcgggggtgagcacatctgtcttcrtggcacagccaacactgtgtgccagggagagctgtttgagcaaggagccaggtgctgtgggaacctgaggtcagagctgatgccagtgtgggacctgagt

SEQ ID NO: 26434 - DNA, 201 bp, Homo sapiens
gggatttgactctggctctcagttcatccagcagacctggatccagggcctactgcgtgccgggtgtcaggctgtgtgctgggacgtcgggggtgagcacrtctgtcttcgtggcacagccaacactgtgtgccagggagagctgtttgagcaaggagccaggtgctgtgggaacctgaggtcagagctgatgccagtgtg

SEQ ID NO: 26435 - DNA, 201 bp, Homo sapiens
cccttacaaagtagcaagaacccccagtgggatataaactgagtttgcaggatccatatttggtgttaagtggagttgtcggagtcagatggggctcatcrgggaagacttcctggaaaaggtgctatctgacatggtttgaagaatgagaaggacatggattgggtgggaaagttggaggaggaaagccctctgaatgct

SEQ ID NO: 26436 - DNA, 201 bp, Homo sapiens
tggaggctctgcccccacatcctctagacactatgccgagcagcacgatgcagagcagtccttgggttctacctagttgttggcttcttggaccccagacyctattctctccccgggtttaccggcttgatggcagagccaggccaagtcctgctctatgggggactgcggttccactccccatccccagaactactccca

SEQ ID NO: 26437 - DNA, 201 bp, Homo sapiens
ggggctcatcggggaagacttcctggaaaaggtgctatctgacatggtttgaagaatgagaaggacatggattgggtgggaaagttggaggaggaaagccytctgaatgcttgaggggagtgccagctagacctgcttctgaaaccacctctgtaccggtgcccacagctggaggctctgcccccacatcctctagacact

SEQ ID NO: 26438 - DNA, 201 bp, Homo sapiens
ccttttatcagaagggtctgaaaagcagcagcacagagtaggtgaacacaggcctgcaagtgcgaccacctcagacccagtacgtgtgcccacagtggacmcactcacacctccaacacacccacgcgcaggcatgtgtacacgcatgtacacacgcatgcatgcacagccagatggccactcagcacagatgtggcagag

SEQ ID NO: 26439 - DNA, 201 bp, Homo sapiens
cttgccttgccttcgccttctcccctccagccggctctgacagctggggccaaggctcttcccagagaagagctggatggaacacacagaaagacagggaygtggggaaccaaggagaaggttgatatgggtggccaggagacagctgcccagaaggagtctgccttctttttctggggagcagagggcactggtatgccc

SEQ ID NO: 26440 - DNA, 201 bp, Homo sapiens
gatgaggcgctgcagtcaatgtcctcaccccagcctcccttctgccaagcatacctcccacagcacacacacagcacatacacactccaggagctggggcytcatctatgctggcccctctggcaactctgcatccaagctcatcttgagctccatggagaaaagcacatggctggccgctcggcttgagaaccagccgca

SEQ ID NO: 26441 - DNA, 201 bp, Homo sapiens
cagtgagttctaattgtaccattgcaccccaggataagcgacagagtgagatcttgtgtcttaaaataaataaatcaaaataaaagagacctttcaggtgktgaagcccaaccttccccaagacaggggttttccttcaaatgtgcccagcctctggtgctgggcaattcattacctctcaaagtaagccctgatgccaca

SEQ ID NO: 26442 - DNA, 201 bp, Homo sapiens
agaaatactaagaccccacagcctgaggcagggagaacagcacacaggcgcagatcccagtgccctcagccactgactatctggacgatcctgaacgaatkacttaacctctctgagctttatcttgctcatcagggataacattatctcattttgcaggctcaatacgaggatcaaatatgccccaaatcagcaaaggca

SEQ ID NO: 26443 - DNA, 201 bp, Homo sapiens
ggaaagcagcaacccctgcacatgtattgctggagggcagaagctgacctcactggcattaactgatgtgccctacctgttcagcccccatctgggcctcrggcttcatgttgcctcagtgaggagggcggaagtctccctgagcaagaagctggtgatggggctggagggcaggcagaggtaggggatcaggggactgtt

SEQ ID NO: 26444 - DNA, 201 bp, Homo sapiens; identical to SEQ ID NO: 3473

SEQ ID NO: 26445 - DNA, 201 bp, Homo sapiens
tctccaattctatagaatatcaagtcatcgttaaagaacagcagcaggtgtttgatattttgtgctattaagtgtagtttgcgctcatctaattatgcagrgtttcgtggtgtttctcgattttgttgaacctacctgatgcatttggcactgtagataaggactaacagtaagagagatttagagtcttcatgttagtcc

SEQ ID NO: 26446 - DNA, 201 bp, Homo sapiens
gggttggatatgttctatactttgctcagctccccaaagccctaatcaattgataaaatacaaagacaagaatgcaggagattttctgaagcaacaaaatkatgcattctttttaattcctagcatgatgtagaagagaagtgatggcaggtgtaataatttcttttctttttctttctttctttctttttttttttttga

SEQ ID NO: 26447 - DNA, 201 bp, Homo sapiens
tgccattcctgcaggtgatgagaagctaagctgaggagagcacgaagcccagcatctgaccatttagacatgctcaccaaagttcttagaagaagcagagkaaggagaaagctcacaaaagaaaacaaatgctattttatctgacttctcacttctacggatagttgttttcacttaaaaacaaatccccaaactgtttca

SEQ ID NO: 26448 - DNA, 201 bp, Homo sapiens
agacagagtgagatgacactgctctgccattcctgcaggtgatgagaagctaagctgaggagagcacgaagcccagcatctgaccatttagacatgctcamcaaagttcttagaagaagcagaggaaggagaaagctcacaaaagaaaacaaatgctattttatctgacttctcacttctacggatagttgttttcactta

SEQ ID NO: 26449 - DNA, 201 bp, Homo sapiens
aaccagataatgtctacaaaaagttttctatgaactatttaaaaaggtaaggaattatcactcgaatgtattctgatttaaactgaattgtgttcgaattrgccttgagtgacgatttggcctagaaagcctatcttcagaacatcacacacacacaaaaatccaattacttacaatgatttttttgagacggaatctcgc

SEQ ID NO: 26450 - DNA, 201 bp, Homo sapiens
tgttcgaattggccttgagtgacgatttggcctagaaagcctatcttcagaacatcacacacacacaaaaatccaattacttacaatgatttttttgagayggaatctcgctctgtcgcccaggctggagtgcagtggcgcaatctcggctcactgcagcctccgccactgggttcaagctattctcccgcctcagcctcc

SEQ ID NO: 26451 - DNA, 201 bp, Homo sapiens
ccaggctggagtgcagtggcgcaatctcggctcactgcagcctccgccactgggttcaagctattctcccgcctcagcctccaagtagctggaattacagsctcgcaccaccatgcctggctaatttcaaatttttagtagagacgcggtttccccaggctggtctcaaaatcctagcctcaagcaatccaccgactcggc

SEQ ID NO: 26452 - DNA, 201 bp, Homo sapiens; identical to SEQ ID NO: 3480

SEQ ID NO: 26453 - DNA, 201 bp, Homo sapiens
acagccaaggtgtttcagctttaataaaagctgaaaatttggcaataccaaacaggtcaccaagccacagtccgcttcttggcctcctctgtggtatcagmgttcggctggcggcttcctgtggcctcttaaacaaggacctcattttgggagccattcgagagattttttctcatcatctaaagtagcattctcgccttg

SEQ ID NO: 26454 - DNA, 201 bp, Homo sapiens
ctggattgtactaaaccagttccaagattctgtttttcggctgtggcgtccggcgctgcatccactacggagtcgccttggaagccaccggaagtccttcracggagaaacaggatgtcccgcctcttcctcccaaagggaagacggtgagccggaggagtcagtcagaggggcgagcaggagcgattccgtcgccaaaca

SEQ ID NO: 26455 - DNA, 201 bp, Homo sapiens; identical to SEQ ID NO: 3481

SEQ ID NO: 26456 - DNA, 201 bp, Homo sapiens; identical to SEQ ID NO: 3482

SEQ ID NO: 26457 - DNA, 201 bp, Homo sapiens; identical to SEQ ID NO: 3483

SEQ ID NO: 26458 - DNA, 201 bp, Homo sapiens; identical to SEQ ID NO: 3484

SEQ ID NO: 26459 - DNA, 201 bp, Homo sapiens
ttcagcatgtctcctgtaacatttttagcttcagatgggtgagaaatgtagtgaaagggaaacttgaaattagttagcctaaagcagaactcctggaggargaggatcacttgggaatgagagtatataccataagctatcattcactgctcttggccttggaagaaaagattctggtttacattcttggctgaagaggca

SEQ ID NO: 26460 - DNA, 201 bp, Homo sapiens
tgaaaaatctcttattgctcctgcatctttgtgaccttttttgccaagccactgtagttgtcagggagcagagagatggagagagatggtctttatccctygcaaagacccacacctcaaaggagtcctactaaatagaaggaagcttgggctgtgggtagccctaaaagcaaaaatgtccagcataaccactgaacctgg

SEQ ID NO: 26461 - DNA, 201 bp, Homo sapiens
ttaaagaggttagggaggaataccaagagggaatggcgaccagagaatgaacaggaactcactgggcaaagagataaagagcggttagggaatccagtttyggatagaagacttccaagcgtcaaaaggtaatgtggaacatttcaagaattaaaaggtgtttaggatggctggatcacggagtataagaggaggtgtgga

SEQ ID NO: 26462 - DNA, 201 bp, Homo sapiens; identical to SEQ ID NO: 3485

SEQ ID NO: 26463 - DNA, 201 bp, Homo sapiens; identical to SEQ ID NO: 3486

SEQ ID NO: 26464 - DNA, 201 bp, Homo sapiens; identical to SEQ ID NO: 3487

SEQ ID NO: 26465 - DNA, 201 bp, Homo sapiens; identical to SEQ ID NO: 3471

SEQ ID NO: 26466 - DNA, 201 bp, Homo sapiens
tgcaccgaaatcgggctgttctcgcgtgcccgggttgctctcaagtggaaaacagatgctcccctagctgcacagctgcaagctttagcgtctggtttccwgcaggggctccctggaccgcccgcccactctcgtgtcacccccaggtgccctggctgcgccgctgctactcgcgccttcttccgttaagcgacgctggtg

SEQ ID NO: 26467 - DNA, 201 bp, Homo sapiens
tcttggcctcctctgtggtatcagcgttcggctggcggcttcctgtggcctcttaaacaaggacctcattttgggagccattcgagagattttttctcatyatctaaagtagcattctcgccttgcacagctgaaagtcatttctcgaaatcggagcgccagaagcgacaggagccactccaggcccgggggaagcgagca

SEQ ID NO: 26468 - DNA, 201 bp, Homo sapiens
ccagccccctcttccgagaatcaggcccacccatcttcctgcccatttcacatctgaaactctactcacctagtatgaaaacttccatccattcctcgagmctgttacccctctggtgctccctaccttggtaagtggaccatcggctagttgatagcagagccctgcatcgtcttccacacttccctctctttccaatgc

SEQ ID NO: 26469 - DNA, 201 bp, Homo sapiens; identical to SEQ ID NO: 3474

SEQ ID NO: 26470 - DNA, 201 bp, Homo sapiens; identical to SEQ ID NO: 3475

SEQ ID NO: 26471 - DNA, 201 bp, Homo sapiens
aagctggtggaggcggggtgcagtggccgctgacctctgtcggttgcgctgggttttgagtagccatttatttcattggggagttttggaataggacatcycacatccgtggacacacatgtagaatacttttataagtaattacagtcttaatagtgatttgagttacagctttgcagtctatgcctggtgacatcctag

SEQ ID NO: 26472 - DNA, 201 bp, Homo sapiens; identical to SEQ ID NO: 3476

SEQ ID NO: 26473 - DNA, 201 bp, Homo sapiens; identical to SEQ ID NO: 3477

SEQ ID NO: 26474 - DNA, 201 bp, Homo sapiens; identical to SEQ ID NO: 3478

SEQ ID NO: 26475 - DNA, 201 bp, Homo sapiens
aggcttcaagccatcacatctccaattctatagaatatcaagtcatcgttaaagaacagcagcaggtgtttgatattttgtgctattaagtgtagtttgckctcatctaattatgcagggtttcgtggtgtttctcgattttgttgaacctacctgatgcatttggcactgtagataaggactaacagtaagagagattta

SEQ ID NO: 26476 - DNA, 201 bp, Homo sapiens
agtaaacgctttggagctattttagtttggatagaattgaaaaaaatgtcattatgtggacaaattttatttaaaaacattattctagtgtaattccttakgcagaatgaaaaaagatgtcagataaattatgcctttgactataacagaaaatctgaagctttaaatcatctcacctcccacactgaaattcaccaaaac

SEQ ID NO: 26477 - DNA, 201 bp, Homo sapiens; identical to SEQ ID NO: 3479

SEQ ID NO: 26478 - DNA, 201 bp, Homo sapiens
aaattcaccaaaacagcattcgagaagaacttagatttaaaattctagtgtgggtggttaagtgttcatagcatattcttattgccattgtaagtaggcayttgaatggaatgacaaaaaatgttaatttaaaggaaatgaaactttaaatgacacttagtcatcaaaaatgactagtcaccaaaaatgaccaatgcttcc

SEQ ID NO: 26479 - DNA, 201 bp, Homo sapiens
tatatatcacattttctttatccactcgttggctgatgggcagaaataataaattaattagctaaaaatacatttacatagtcatcatcaaaccaggtgtwcatttaggttaataaaactgtagttcctgatagctttctttgagacaaacagacttacatcaatttttctcaacaattgaatcctaggcattctctgtgt

SEQ ID NO: 26480 - DNA, 201 bp, Homo sapiens
atgcattcaggaaacatttaccgcatgcttgctttgtgccagccattgcactagagtaaaatgatgaacaagatagtggggaatatagacaagcaaatgcrcattggcagtgcagtctgatggcctgcccacagagtgtcacagtgccattcatgattcttggttgtcaaccatggcaatggacttggctgacttaagcag

SEQ ID NO: 26481 - DNA, 201 bp, Homo sapiens
tttaaatgacacttagtcatcaaaaatgactagtcaccaaaaatgaccaatgcttccttcaaattttaaataattataaccaaataaaggaagccatctayagtttatttaaaatcccactttcaaccccagaaggcagagttcagggatactttagcaggtgaagtaaagtaaggggaggcggctctgaaaaggagagat

SEQ ID NO: 26482 - DNA, 201 bp, Homo sapiens
tttggcactgtagataaggactaacagtaagagagatttagagtcttcatgttagtccattaacataagtttattataaaatacactgtaagcatttctgrctaatgtaccatcagatttaagaagttacccaacaatatgtattcgctgatcttcattcctgctgaatctgagaccagcagtgtctcaattattacgttg

SEQ ID NO: 26483 - DNA, 201 bp, Homo sapiens
taaatctatgaataggcgaataaattaagctgtatgtttctaattgatagttgtgactctttcgactgtagttgagattggttttttaggaatgcactgtrgtcctccactgagcgttttccttgctttccaactctgatgactagtggaattaagtaatgcattcaggaaacatttaccgcatgcttgctttgtgccagc

SEQ ID NO: 26484 - DNA, 201 bp, Homo sapiens
gacacataaataaatatatataatacctttttctgcttactaaaatagagatgtgggagcacagtggaagttacggctgattgatggtggggagtggtgaragcttcttgcaggatatgtgatttgagataggtctcaaggactagtgggtattcacctggttgaagggacattttccccaacattcattccgattaggtt

SEQ ID NO: 26485 - DNA, 201 bp, Homo sapiens
aacgttttaaacagccaaggtgtttcagctttaataaaagctgaaaatttggcaataccaaacaggtcaccaagccacagtccgcttcttggcctcctctktggtatcagcgttcggctggcggcttcctgtggcctcttaaacaaggacctcattttgggagccattcgagagattttttctcatcatctaaagtagcat

SEQ ID NO: 26486 - DNA, 201 bp, Homo sapiens
caaacaataggacagttccattggtaccttttaagcagagcaaagtggctccacttcaaaaacactggttcttgctttatgccaaacacccttctaggtgytggaaatagtaatatacttccctagaggattttgagatctggttgaatagacacataaataaatatatataatacctttttctgcttactaaaatagaga

SEQ ID NO: 26487 - DNA, 201 bp, Homo sapiens
gtgtttcagctttaataaaagctgaaaatttggcaataccaaacaggtcaccaagccacagtccgcttcttggcctcctctgtggtatcagcgttcggctrgcggcttcctgtggcctcttaaacaaggacctcattttgggagccattcgagagattttttctcatcatctaaagtagcattctcgccttgcacagctga

SEQ ID NO: 26488 - DNA, 201 bp, Homo sapiens
aatcttgtgtagtaggaattattccctttttacaaactgagactcactttgctatatacaaaattactgctactggtaaaaggtaaagctttcttcttgcrtgacatgtaaggcaggtgtgataattgctcacaacacagttgctactggtgcatttttttttaaactttatttcggaataaattaagatttacagaaaag

SEQ ID NO: 26489 - DNA, 201 bp, Homo sapiens
agtgtggctggcttcgagcaagtcttgatcccaggggttcctggtgtcattgtaaccacccaacgggttcatcttgcccgctgcccagacagtggattcaycaagacaaaggaattgcaataaagagtttaattcacacagagctggctaaacaggagaccagagttttattattacttaaagcagtctcctgaaaattca

SEQ ID NO: 26490 - DNA, 201 bp, Homo sapiens
actgtgcttcatttagtacagcaatcttgtgtagtaggaattattccctttttacaaactgagactcactttgctatatacaaaattactgctactggtamaaggtaaagctttcttcttgcatgacatgtaaggcaggtgtgataattgctcacaacacagttgctactggtgcatttttttttaaactttatttcggaa

SEQ ID NO: 26491 - DNA, 201 bp, Homo sapiens; identical to SEQ ID NO: 3488

SEQ ID NO: 26492 - DNA, 201 bp, Homo sapiens
tctcatactgaatttgctttatcccattctcttttttcttttatcatctttctgtcctgcgtaaattttggtttgtcagttatggtatggcatttaagtayttttatttgattgtcttaaagcagtcaaaaataagagtgttagccaattagatatcattcctgaccttctattagattaagcaaattatctacagaagag

SEQ ID NO: 26493 - DNA, 201 bp, Homo sapiens
gcacttagtattcattaaacattaaaccactctctgtcacttccttttcttagagctcctgcttcctttcttatttaagagtttgtgtctaaaacgtggtratacaatcttttgtaaaagtctgttgtaagctcttagcactgataaactcaacttaaaccacacatcatctctataaggtatagttaatgactaggaaaa

SEQ ID NO: 26494 - DNA, 201 bp, Homo sapiens; identical to SEQ ID NO: 3492

SEQ ID NO: 26495 - DNA, 201 bp, Homo sapiens
gctggaattacaggcacacaccaccacacctggctaattttgtatttttagtagagatggagtttggccatgttggccaggctggtctcgaactgctgacmtcaagtgatctgtccacctcggcctcccaaagtgcagggattacaggcgtgagccaccgtgcccagcctgacctctgtcttttaatgaatgttatgccta

SEQ ID NO: 26496 - DNA, 201 bp, Homo sapiens
ttaaaccttctaaaaacaactctcttggctttactccctccccccacacccctcccgccaacacacacacacacacacacacacacacacacacacacacwctctctctctctctctctctctctctctctctctcgcgcacgcgcgcgcgctctctctctctctgttccttttgcttactttggatttggtttgctgttc

SEQ ID NO: 26497 - DNA, 201 bp, Homo sapiens
ttttttttcttgagatggagtctcgctctgttgcccaggctggagtgcagtggtgtgatcttggctcactgcagcctccatctcctgggttcaagcgattstcctgcctcagcctcccgagtagctggaattacaggcacacaccaccacacctggctaattttgtatttttagtagagatggagtttggccatgttggcc

SEQ ID NO: 26498 - DNA, 201 bp, Homo sapiens; identical to SEQ ID NO: 3499

SEQ ID NO: 26499 - DNA, 201 bp, Homo sapiens
acaaatatgagattgtatagcttgataaatttttagaaaatatatacatctgtgtagtcattcagatcaagatacagaatatttccagcaccctggaaggktcccttatgcctctacctcctccctgtaaaaccccaaataccctgacctcttttttttttttttttcttgagatggagtctcgctctgttgcccaggctg

SEQ ID NO: 26500 - DNA, 201 bp, Homo sapiens
gtattttctacaatccaaactgtattaaatatagtcatgggttgagtacacatgtggtttgtgggggtgttttgtttttgattaccaggaaatgattgggygagaggtaatactatataaatgagaaatttctagcaagttatagtcttaccactcattcataattagggaatatacttattcacttagcctaggcaactt

SEQ ID NO: 26501 - DNA, 201 bp, Homo sapiens
cttttgtttgctgaccttggtagtttctgagaatttctggagggagtaatagcaccagcaacagtacatgtgagaatcttaagttacttcaggaaggaacwttgaagggcagattttacctttcaccaggttattggggtctctagtttggtgttccatagtccatagttctcatggttttgtttgtttgtttttttgtct

SEQ ID NO: 26502 - DNA, 201 bp, Homo sapiens
gatgtatcatattaaattgtgaagtcatttaggtcaagtgatgaaatataatctgatctgaagtagaaacaatttcccataaaacctgttgtgaattttawctgaacatggcactttcaccttttactttgtttatgcatgtgtctttgtggtagacacaggtcagaatctgtgttttgatttttttttttttttaatctc

SEQ ID NO: 26503 - DNA, 201 bp, Homo sapiens
tgatgtatcatattaaattgtgaagtcatttaggtcaagtgatgaaatataatctgatctgaagtagaaacaatttcccataaaacctgttgtgaattttmtctgaacatggcactttcaccttttactttgtttatgcatgtgtctttgtggtagacacaggtcagaatctgtgttttgatttttttttttttttaatct

SEQ ID NO: 26504 - DNA, 201 bp, Homo sapiens
tttgaggaagaatgatttggggtgcattgattaggaaactttccagcaggtacttaaccctctcggagctgattacccttaggtaaggactccttaaccakgactagcttggctggttagtacacttgaactcaaaaatagagactataaactctcctttagatctcgctcgtcttctaattcgctgggctgccattttgg

SEQ ID NO: 26505 - DNA, 201 bp, Homo sapiens
gatgagaagcaggacaatgaggtaaatttgagttaccatttctgttttctgtgtttcaagttatgataccagatactattctctcttaagagagtgttatrctttcatcaaacgtattaaagtatatttgaaagttagggatgggccgagcacacacctgtggtctcagctactcaggaaactgaggcaggaggattgctt

SEQ ID NO: 26506 - DNA, 201 bp, Homo sapiens
ctgttttgatgtatcatattaaattgtgaagtcatttaggtcaagtgatgaaatataatctgatctgaagtagaaacaatttcccataaaacctgttgtgmattttatctgaacatggcactttcaccttttactttgtttatgcatgtgtctttgtggtagacacaggtcagaatctgtgttttgatttttttttttttt

SEQ ID NO: 26507 - DNA, 201 bp, Homo sapiens
cagaattctgttttgatgtatcatattaaattgtgaagtcatttaggtcaagtgatgaaatataatctgatctgaagtagaaacaatttcccataaaaccwgttgtgaattttatctgaacatggcactttcaccttttactttgtttatgcatgtgtctttgtggtagacacaggtcagaatctgtgttttgattttttt

SEQ ID NO: 26508 - DNA, 201 bp, Homo sapiens
gttttagcttacctagattgaattctgacaccgattaaaagggtaaaaaattaaaatggttttcttaagtttctaattgtgaaagtatagaggccattatratacattgatttaataatttttacttactcatttcaggaatatgtcaagataagggggtggtattttgtcattgaatctaggaagagtttgttaatggat

SEQ ID NO: 26509 - DNA, 201 bp, Homo sapiens
cctccactattgtcctatgaccctgccaaatccccctctgcaagaaacacccaagaatgatcaattaaaaaaaaaaaaaaaagcctaaaaaaataaaaatwaaaaaagattttacaagaaaaacattgacaaaacaaattgtttgacttgaaaattgattaagggcttctattagaaatagttaatgagttcattactgat

SEQ ID NO: 26510 - DNA, 201 bp, Homo sapiens
gaccttccctccactattgtcctatgaccctgccaaatccccctctgcaagaaacacccaagaatgatcaattaaaaaaaaaaaaaaaagcctaaaaaaawaaaaataaaaaaagattttacaagaaaaacattgacaaaacaaattgtttgacttgaaaattgattaagggcttctattagaaatagttaatgagttcat

SEQ ID NO: 26511 - DNA, 201 bp, Homo sapiens
aaaagattttacccccgtccgggaggtgaggggtgcctctgcccggctgcccctactgggaagtgaggagcccctctgcccggccagccgccccgtccggraaggaggtgatggggtcagccccccacccggccagccgccccgtccgggagggaggtaggggggtcagccccccgcccagccagctgccccatccgggag

SEQ ID NO: 26512 - DNA, 201 bp, Homo sapiens
gtcattatctttaaggtatatttgtatacaaaacatatcaaacctattgtaaaaaaagattttacccccgtccgggaggtgaggggtgcctctgcccggcygcccctactgggaagtgaggagcccctctgcccggccagccgccccgtccgggaaggaggtgatggggtcagccccccacccggccagccgccccgtccg

SEQ ID NO: 26513 - DNA, 201 bp, Homo sapiens
gtgttagagttaactgaaattgacagtcaccacattttttttaacctattggagttctagtgaatgttttatcttaaacctaggacaagggtaaataacasgttctccccttttcctcagaattttatttccttttttattcttttttctcactgcctaagtttcatacttaataagcctgtttctttagaatgacttttt

SEQ ID NO: 26514 - DNA, 201 bp, Homo sapiens
tttttaagactgacaaatgctggtacttcatcttctataagtggactataatttcttttctcaagacaactacataagcagacaaaattgcaaagatctgmcctgtgtcgagtatgacagccacgactcgtggctctccggtcggagggaatgacaaccagggccaggctcctgatggacagtctcagccccccctccaac

SEQ ID NO: 26515 - DNA, 201 bp, Homo sapiens
tgattcagcaactctacatgattccttccattaggaacggtattcttgccattgaaggcacaggtagtgatgtagatgatgatatgtctggggatgagaarcaggacaatgaggtaaatttgagttaccatttctgttttctgtgtttcaagttatgataccagatactattctctcttaagagagtgttatactttcatc

SEQ ID NO: 26516 - DNA, 201 bp, Homo sapiens
aaatgtatgggtgcagcaaaccaacatggcacatgtatacatatgtaacaaacctgcacgttgtggacatgtaccctagaacttaaagtataatttaaaaraaaaaggcaaatgtagtttacattaagtccataactaaaatgtttacaaaactaagggataaatcctttttttaaatcgtttttaggtacgaatgtgaag

SEQ ID NO: 26517 - DNA, 201 bp, Homo sapiens
tggcaaatgtatgggtgcagcaaaccaacatggcacatgtatacatatgtaacaaacctgcacgttgtggacatgtaccctagaacttaaagtataatttwaaaaaaaaaggcaaatgtagtttacattaagtccataactaaaatgtttacaaaactaagggataaatcctttttttaaatcgtttttaggtacgaatgt

SEQ ID NO: 26518 - DNA, 201 bp, Homo sapiens
acaccttctttttatagatgttgaagaatatcctacttttgaagtgtagtctaagatctaacttttttccctctatgggctgttccctgattatatagtaraaatttgcttaatacctgctttatattccattcatataatttataaatgcctttgtgtaccttttttccggagtttaaaattccttaaataagggactat

SEQ ID NO: 26519 - DNA, 201 bp, Homo sapiens
ctggttttctttggcaagtgaaatgtcaaaagattatggtcttgaaatcagatccttatacctgatcaacagctaaactagtcttatttttttaactagckgggcatgggggtggactcctgtagtcccagctgcttgggaggctgagtcaggaggatcgcttgagcccaggagttagaagttccagtgaactgtgatcat

SEQ ID NO: 26520 - DNA, 201 bp, Homo sapiens
tcatttctgtcctcaaaatattactatgtaagtctacaaattatttacacttgacctttgactgctttactgaaatgacagtgaattaggatgtgtggctstttgtactcagtaaaattttacctagtaaaatcttcattcataatccttcaggtaaaaattaccatttcattaatattgtacttctgaaataaactgtct

SEQ ID NO: 26521 - DNA, 201 bp, Homo sapiens
ttttcattccctcccttcagttgccagaactgattttgctctgaagaagtagtttatcaattggagcttctgaaacatctacttgcctcaactcttccctrgacctgctgtgccagatggtctagggattgggttctgagcactttcactttataaaaaaaagcttcataaaggacacttatacccatacctgattaaaaa

SEQ ID NO: 26522 - DNA, 201 bp, Homo sapiens
aatacttatgtacatttcccaatgaaattcagataaacataaaaattaagtaactcttctgatactcccagtgatagtgttgactctttattcttccattyatcccctcggggccaatagattgttagagctagacaagcaatctaaatgttaggcagctgatgaggaacagacagtgatcttagcattttagtcttaggt

SEQ ID NO: 26523 - DNA, 201 bp, Homo sapiens
ccttacaactgtagcataatctttgtgatgctagtcttgcaaaaaatgtttctattttataattttgggaataattacataacataagtgctttggtacarttatagtatagacattagtcattgaggtatactcccatttggtgaagttggagaatagtgatggatgctttttgtgtaaaataataatgtaataaatgtc

SEQ ID NO: 26524 - DNA, 201 bp, Homo sapiens
gccttgagtataaattatttcattaaaccaagggtccttctgaggagtcttgaaatcagagcagtacatttgctatcagggcttttaactagtaacttctyttttaaatatctattagtatcagtgcctggcatagtgatgtacacattcattcatgaatagttactgagtttcactgaatttagtagactgttgcctttt

SEQ ID NO: 26525 - DNA, 201 bp, Homo sapiens
ttgagaagggaacaagcaagctgctagtctccgaatgagcataggacaaaaacataaactttctgagtggtgtgatagcagcctccaagccacacagacakgcagtggtaaagggtaaaaatctactagtcaaggaggcttaaacacagcgtttggccaataaggggcttatactgatgcaggggcaactcctaggtaggc

SEQ ID NO: 26526 - DNA, 201 bp, Homo sapiens
acaaagcattgggtgaataataagctaccccgactcaggggcaactcttaggaagccagacatgaaaattacatgtatccctggcagtctggaagacttgstgcatccttgctggagtgattgagaagggaacaagcaagctgctagtctccgaatgagcataggacaaaaacataaactttctgagtggtgtgatagcag

SEQ ID NO: 26527 - DNA, 201 bp, Homo sapiens
aggcttgagccctcaccagggaccccaccctcatacctcttgtccttattcttacagtgtaatgaatgcatcagcaaattgaaaacagatagtttttgccrtttcttaatttaattaaaatgacagttaagtactttgatatattgcctttggagtcatttccaggaggctatatttgtttgttttcttggtataatggcc

SEQ ID NO: 26528 - DNA, 201 bp, Homo sapiens
aaaacaagggttatagatgtcggttaaacatagaaatttgaaaggaagagaagtaattccctttgattgttggtgcataaaaccggaataggcaaaattcmcaagtcaagattaatttccaagtcaagataatttccatgtttgagcttaaggatgatctatcaaattgttttctaagaaactcatttcactttgatgtcc

SEQ ID NO: 26529 - DNA, 201 bp, Homo sapiens
gttgtgatattttcattaaaagaagtaaatgtacaaaagtataatttttaagtttttacatcagtagctaagaatttagatagtacgaactcttctggttrcaacagagtttaattgcctaattatattgttaagttcttctcgtttcagtcaaactcagcgaagtccccatgtgttttatcgccatgacttaatcaatca

SEQ ID NO: 26530 - DNA, 201 bp, Homo sapiens
taatacaaagcttttataacagtgctgggctttttggagttctggtagtaagtgtgaaataaaaacaaacttaaagcttttattatttaaattaaactctytactgtaattacaacatgatgcttgtattgctaatcttaaaagaaaagcttttattttataattctcaaaataatttgaaaataaaattctcctgagtat

SEQ ID NO: 26531 - DNA, 201 bp, Homo sapiens
attacccttatataagtcagaaccattttgcccctctcttccctgaaacttgcatgcagtgcggtaatgtactgtagaaagcatgttatctcattatgtcmccatattgtctgcaataatagggagggcgttctaagttaggatctttttgagttttaagtacctgattttttataaatatctgaatacctatgtaggttc

SEQ ID NO: 26532 - DNA, 201 bp, Homo sapiens
ctttttgtgacttttccccttcagttaggttggcttagttacaggatagttctgttactctgacattgttagtttttaaatgatcttccggagttgacttyttttgttcattagtctgctttccttaggatctgtacatcaaggttttgtgactcatctgaaaagcattttagtctccttgggagaaagtataaacagaac

SEQ ID NO: 26533 - DNA, 201 bp, Homo sapiens
tggagcttttggtaggtcttctgttctacttcaaattctctctacacctcctaccctcctgggacattgaacctctgtggcctcaacttttgacccatgayaaagctaaagctgtcaggactatctctcagagtgtttcctaatccccatcttcccccaagatgtttgaagatgtttaaatgagatcatttattcaaacat

SEQ ID NO: 26534 - DNA, 201 bp, Homo sapiens
gtagtgaggtctggcgccctctactggtgaaggctaagtatagcttgtgttgtacagttaggtctcttgtctctagtgagtcaaatattttaatggaaaamcaagggttatagatgtcggttaaacatagaaatttgaaaggaagagaagtaattccctttgattgttggtgcataaaaccggaataggcaaaattcacaa

SEQ ID NO: 26535 - DNA, 201 bp, Homo sapiens
cgtcacacctcaacttcccaaagtgttgagatgacaggcgtgagccactgcgcctggcctactcttacattcttttacagaagattattcctgaggaaatraaatggcattttgcatatagctacaggtgttatttataaatttgccctttatcttagaacttgagtgattataatagtgtaaatacagtaagtttagaag

SEQ ID NO: 26536 - DNA, 201 bp, Homo sapiens
tttttaaagtagttcttattaggtaagtaaaaagacagcttcttgttaggataaaaacagatttttgtcatgatccctgacacagatacttaatgaagtamacagaaaacaattacatgtttccactttcacctttcttcagtatttattcagagaatgtgccactatggatacagaggtacataataacctctaatctca

SEQ ID NO: 26537 - DNA, 201 bp, Homo sapiens
ctatcatagtaaaaaatgatctctcatgttctcatgtatttttcatcatgtttagtgcaataccataaaccttgaataacattacgggactcatgaagtgycactagtggtgctggcgaacaggctcccaagaagcagagaaaagtcatgacgttataatgttctgcaaagtttcttataagaaaaagttgaattgcttga

SEQ ID NO: 26538 - DNA, 201 bp, Homo sapiens
attctacagggaaagcacattctttttttcctactttttccatgtaattgaggaataaaatctcggttttatatactgttgtttgtggtcttgttgctttyttttcccctgaaaaatatagttgtacatattgttctgtgaatgttacatgttacatgttttatttcattcatttcttaggctttggggtgagcctgttaa

SEQ ID NO: 26539 - DNA, 201 bp, Homo sapiens
ttggtagctaatgcttaattgtattttgggattatcttatttttcccccactgtgtcttttcaccgtaatttaaaattatgttttaatattatgacaaaargacaaaagctctgcttgctttgaggtgaatgtacataggcacttaccctttttcgatgtttgctttttagggttcattttcttggatatcactacattcc

SEQ ID NO: 26540 - DNA, 201 bp, Homo sapiens
tggcgttaaacataagtttcatagtttattagagcttccttatccttagaactgggataatgataacttttttgtgtaattgcagggattaaatgaaacartgtatggaaaacccctagcctagggactggcacttagtattcattaaacattaaaccactctctgtcacttccttttcttagagctcctgcttcctttct

SEQ ID NO: 26541 - DNA, 201 bp, Homo sapiens
taccccactacattctacagggaaagcacattctttttttcctactttttccatgtaattgaggaataaaatctcggttttatatactgttgtttgtggtyttgttgcttttttttcccctgaaaaatatagttgtacatattgttctgtgaatgttacatgttacatgttttatttcattcatttcttaggctttggggt

SEQ ID NO: 26542 - DNA, 201 bp, Homo sapiens
ctatgaggctcactctcttaccccactacattctacagggaaagcacattctttttttcctactttttccatgtaattgaggaataaaatctcggttttakatactgttgtttgtggtcttgttgcttttttttcccctgaaaaatatagttgtacatattgttctgtgaatgttacatgttacatgttttatttcattca

SEQ ID NO: 26543 - DNA, 201 bp, Homo sapiens
gccgctagagtactagttttactatgaggctcactctcttaccccactacattctacagggaaagcacattctttttttcctactttttccatgtaattgwggaataaaatctcggttttatatactgttgtttgtggtcttgttgcttttttttcccctgaaaaatatagttgtacatattgttctgtgaatgttacatg

SEQ ID NO: 26544 - DNA, 201 bp, Homo sapiens
ttgtggcagttctttgccgctagagtactagttttactatgaggctcactctcttaccccactacattctacagggaaagcacattctttttttcctactytttccatgtaattgaggaataaaatctcggttttatatactgttgtttgtggtcttgttgcttttttttcccctgaaaaatatagttgtacatattgttc

SEQ ID NO: 26545 - DNA, 201 bp, Homo sapiens
tataatacaaagcttttataacagtgctgggctttttggagttctggtagtaagtgtgaaataaaaacaaacttaaagcttttattatttaaattaaactmtttactgtaattacaacatgatgcttgtattgctaatcttaaaagaaaagcttttattttataattctcaaaataatttgaaaataaaattctcctgagt

SEQ ID NO: 26546 - DNA, 201 bp, Homo sapiens
cgagtagctgggactacaggcgcctgccaccaatgcccagctaattttttgtatttttagtagagacagagtttcattgtgttagccagggtggtctcgawctcctgacctcgtgatccacccggctcggcctcccaaaatgctaggattacaggcgtgagccaccgcgcccggccttttttcttaagttgatagtgaagt

SEQ ID NO: 26547 - DNA, 201 bp, Homo sapiens
ctcagcctcccgagtagctgggactacaggcgcctgccaccaatgcccagctaattttttgtatttttagtagagacagagtttcattgtgttagccaggrtggtctcgaactcctgacctcgtgatccacccggctcggcctcccaaaatgctaggattacaggcgtgagccaccgcgcccggccttttttcttaagttg

SEQ ID NO: 26548 - DNA, 201 bp, Homo sapiens
tccagaacttttttttttttgagagggagtctcactctgtcacccaggctggagtgcagtggcgcgatctcggctcactgcaagctccgcctcccgggttyacgccattctcctgtctcagcctcccgagtagctgggactacaggtgcccgccaccatgcctggctaattatttgtatttttagtagagacggggtttca

SEQ ID NO: 26549 - DNA, 201 bp, Homo sapiens
tagctagggttaacaggggttacaggcgtgggccaaccatgcccggccaagttttgtatttttagtagagacggggtttcaccatgttggccagtctggtytcgaactcctgacctcaggtgatctgcctgcctcccaaagtgctggattataggcatgagctactgctccctggcctttttttttttttttttttttttt

SEQ ID NO: 26550 - DNA, 201 bp, Homo sapiens
gtcagtgtctaatgatgagaagagggcaaacaggatgaatattgagaagcagttatttgatttgtcagtaagtagaacattgatctgtggaccttcttctyatgcgtcccctaatgcacatactcaaaagctttgtatgtaatttttaggggaattaatcttgaagcccatccctacgtctcgattaagaccttctggctt

SEQ ID NO: 26551 - DNA, 201 bp, Homo sapiens
tcaggtggtggcaggggttaaaatgtacgtcaacttttttttgacaatgatagagaacttgaagaggaagaagtcttagagtcagatgtgaattagagtcygctctgcataacttaggcaagcccctgctgtctcttatttttgactctgtaaaatggagataatactcaatttctgtgctgcatagactgggtatgagaa

SEQ ID NO: 26552 - DNA, 201 bp, Homo sapiens
tgggggaatcggaggacaaatagtttagcatgtaaattttcccacagtctgaattttgttgatggaatccctgtggtcgtttattattttctgtttttctwggtcacctgcatcttctataaacaccttatgagatctagaggcttgatcagattgtggtattatttttctttttgtggaatggataggcaacgctacttc

SEQ ID NO: 26553 - DNA, 201 bp, Homo sapiens
gaaccagtcctagataggacagagaatggcattaagtgtttagaaactttcattgcagtttgacattgcgacatttttattgtgttttacaaaattatctrtggctctgcagtggctcacgcatgtaatcccagcactttgggaggccgaggagagattgcttgaggccaggagtttaagaccagcctgggcaacaaagcg

SEQ ID NO: 26554 - DNA, 201 bp, Homo sapiens
accagaccttagtttttaattgacaattgactctcaggctattagttactgtgtttatagggaaattttaatgttttacaactaaacaagaagtagattcraaattcattaccaagtagcttcttcttaactctcttgaagtctttctgcctcctgaaaattattttaatataaaagactttacagtaattagaaggtatt

SEQ ID NO: 26555 - DNA, 201 bp, Homo sapiens
aacttaagttgagattttctgatatttcctagttcatatagttgccactagatggcttatttttgcttgagtagatcaggttactatctaaataatggcartcttcaaaatgaaaattttaatctatacctgtatttctttttaaattttactttttttttttctctatgtgccagtaatccacaacttaagagattcaca

SEQ ID NO: 26556 - DNA, 201 bp, Homo sapiens
tttatttgatcaaacacagaatagtataaggatattgatgctaaatgaatgatttatgaacaaaataagattttaaaaattgggaaatgcttttaaggtcraagacttattttcagggagcaaaatactatttaaatttgcctcttcttgtggtgctgctgatcaccattttgtgtttaaggctagtgccataatttgtaa

SEQ ID NO: 26557 - DNA, 201 bp, Homo sapiens
tcggcctcccaaagtgttgggattacaggtgtgagccacttcacacggcctatacctttaacttgaaatttactttttaaaaaataggacaaaataatttwaaaatgtggtaggattctgttgtaatgcaatggaataacagctatatcagtaaaactgttgaggctgttcatttatttaaaaacctaagcaattgtggtg

SEQ ID NO: 26558 - DNA, 201 bp, Homo sapiens
gctaagaggcaaaattgaggacattgggtaaaatttttattggtgaaataaaaaatataattaaatacagttatgtataacttaggtctaatgagaaaaacaatttggtgtgtgtgtgtggaggggaggtaatacagtattttgctttattgggtaaagttcagtgttccctgtcatcaaattgattgcagacgttctgtg

SEQ ID NO: 26559 - DNA, 201 bp, Homo sapiens
ggctaagaggcaaaattgaggacattgggtaaaatttttattggtgaaataaaaaatataattaaatacagttatgtataacttaggtctaatgagaaaaacaatttggtgtgtgtgtgtggaggggaggtaatacagtattttgctttattgggtaaagttcagtgttccctgtcatcaaattgattgcagacgttctgt

SEQ ID NO: 26560 - DNA, 201 bp, Homo sapiens
aaaaagatacctggagttagaacatcatctgttgtcggcctgtctgctatgttgcagtatatgcattgttgaaaacctcatagtctgcaaaaatcaggtascaaaaactaacaatgtgtatagggaaaaatgggcttaagagtaaactgatcacttcaaagctatgttactttgtaattagagcactaacaaaacaataaa

SEQ ID NO: 26561 - DNA, 201 bp, Homo sapiens
tgtgggctcaactattaaaaataacttactgtatttcagactccttaacatgaacctcctcatttaacacactctgtcagagggagagatccccagacttytcagccactcctgcctgtttgagaaggattctcaaacaccccctcccccagagaaggggcctcattttgttgcccaggctggcctcaaactcctgggctc

SEQ ID NO: 26562 - DNA, 201 bp, Homo sapiens
gacaatttccagaggcttttagtgttttttgttttttaaaaaaataattttcaccagttaacgattgtttcactggggagagcatttacggagcctttgakggcaccattccaaaagttatttttaatgtaaaattactcaaattgcctacagccacttaaaaatttgtgtttgagaatgctttggaaaagatgctgaagt

SEQ ID NO: 26563 - DNA, 201 bp, Homo sapiens
ttcatccatattgtagcatgtcaaaatttccttgctttctaaagctggattattttccattgtttgtatgtatattttattgacacattcatctgtcaaayggatacatatgcttccacattttggctattgtgactaatgccgctatgaacatgggtgtacaagtatttgttcaagtccctttcagttcttttgagtgta

SEQ ID NO: 26564 - DNA, 201 bp, Homo sapiens
ggggagggttggggtgactgacttagagagacaaagctaagatgcataaatatcaggtggaactgcgtacatacttctgagacagagcatgtggcctgackaagccaagaagaataatgtggggctaggaggtggtggtgatgagcatctggttcagacctataacccccaaccccatgctgcattcagcttctgttactt

SEQ ID NO: 26565 - DNA, 201 bp, Homo sapiens
gtggatttctgtagcgactagaacttacacgagaatttgcaaaatttctagtagaacctgcttaaattaagcatgttattttttggaagttccatagttayaacgttaattgaatttacacggtgcagtttacaggtgtatataattgcttcagattgtcttttagtttaaataagcaagttgtaggtatagattaaatat

SEQ ID NO: 26566 - DNA, 201 bp, Homo sapiens
aagtgctggaattacaggtgtgagccaccgcacctggcccagacttaaaactttaagttgcatgtattggaaaacctttcaggtcttcacttagaagttcygtaacgttatgagttcgaagaaaatctggctttgaagattagaacgtgagaagttaccattttggtgcaccttatttatgttctcatttaatgcccacac

SEQ ID NO: 26567 - DNA, 201 bp, Homo sapiens
cgtaatgaaattaatctgtcactgatttaacaacttgattatagcattaagtaaaaactagggtacctttcatacattagtcctcttactgctttttcagwattccttaatttttcttttttttttccaaagaaaaatgtggtaacaatggggaatacaagcagggtctgcccaaggcatgtacataaaagatgtacaata

SEQ ID NO: 26568 - DNA, 201 bp, Homo sapiens
tgaagtgggtgctttcttcatgttttatataatgaaactagaatacctaaatttgaaacagccagcttttgaaaaagctggtaatggttgtattgcagcaraaaatcataggctttggactcaaatggacttgagttccaatcctgcttctaattgctactctatggcgttaaacataagtttcatagtttattagagctt

SEQ ID NO: 26569 - DNA, 201 bp, Homo sapiens
ttttgctgttgagttccttatatattctggatattaaccccttgtcagatgcatagtttgcaaatattttctccaattctgtagatttgtctttttgtggkcttatttcctttgttgggtagaagctttttagtttaatgtaatttcgtttgtctgtttttgtgtttgttgcctgtgcttttgaagtcttagccaaaaagt

SEQ ID NO: 26570 - DNA, 201 bp, Homo sapiens
attttttgctgttgagttccttatatattctggatattaaccccttgtcagatgcatagtttgcaaatattttctccaattctgtagatttgtctttttgkggtcttatttcctttgttgggtagaagctttttagtttaatgtaatttcgtttgtctgtttttgtgtttgttgcctgtgcttttgaagtcttagccaaaa

SEQ ID NO: 26571 - DNA, 201 bp, Homo sapiens
attttaaaaatcggattttttgctgttgagttccttatatattctggatattaaccccttgtcagatgcatagtttgcaaatattttctccaattctgtaratttgtctttttgtggtcttatttcctttgttgggtagaagctttttagtttaatgtaatttcgtttgtctgtttttgtgtttgttgcctgtgcttttga

SEQ ID NO: 26572 - DNA, 201 bp, Homo sapiens
cttcttttgagaaatatctattcaagtcttttgcccattttaaaaatcggattttttgctgttgagttccttatatattctggatattaaccccttgtcaratgcatagtttgcaaatattttctccaattctgtagatttgtctttttgtggtcttatttcctttgttgggtagaagctttttagtttaatgtaatttcg

SEQ ID NO: 26573 - DNA, 201 bp, Homo sapiens
cctcggcctaccaaagtgctaggattacaggtgtgaaccacagtgcccctgccaagtcatccttatttcattctaattgtggtaaggtgatacctcattgkggtttggatttgcatttccttaatgattagttatgttgagtgtgctttcatgtacatgttggccatttggatgtcttcttttgagaaatatctattcaag

SEQ ID NO: 26574 - DNA, 201 bp, Homo sapiens
atatctgcaaactgagagatgtgagtctgcatagttgcctaggtctgaaacatgacccaaacatattagctgtatgactgtgggcaggttatttatgctakaataatgtctggcacatagtaaattcccctctgaattttaacatcatacctttttttcctcctaaccttggtaccttttcttcttccaatttattacact

SEQ ID NO: 26575 - DNA, 201 bp, Homo sapiens
aacagatttcccaagtagttgtaccagtttaaactcctactagcagtaggtcgtgttgctcttccttatcaatacttagtattattatcagtcagtgtttstaattttagccctcttggtggaagtttaggaatatctggtggcttaaatttgtatttgtgtctagtgtttagaatactttcacatgctcaccagtcattt

SEQ ID NO: 26576 - DNA, 201 bp, Homo sapiens
tactgtctgagtttgaatcctggctcctaccactttgacagcctgtagtcctctgtcccagtttttttactcatgaaattgggctgataatagggttgttmtaaggattaacttgcttagaatagtgcctgagacaaatacttaaatgttagctattgtcactattaatgaggaaaatgttatttaaaatttgaggtgtgt

SEQ ID NO: 26577 - DNA, 201 bp, Homo sapiens
cgacctcaggtgatctgcctgccttggcctcccaaagtgctgggattacaggcgtcagccactgcgcccagccagtctttgaagatttttaagcagtgctrtgacatattttgcatttcagtaaaactcatagtgatgatttttaataccgaaagaacaaaacaattgtaggaatggatgcaggcctgacagtcactgctt

SEQ ID NO: 26578 - DNA, 201 bp, Homo sapiens
tgacttggagcatgctgagctgaggcaagagggattgtggggccagactgagtgttggaggaggaacctactgtagtgactacaggtgtatttcttttttytttttttttttttttgaaatggagtttcactcttgttgcccaggctacagtacaatggcgtgatctcggctcactgcaacctccgcctcctgggttcaag

SEQ ID NO: 26579 - DNA, 201 bp, Homo sapiens
cagctacttgggaggctgaggcttggacctgggaggcggaggttgcgttgagccgagatcatgccactgcactccagcctgggcgacagcgagattctgtytgaagaaaaaaaaaagtattttgtgcagaggtactttgaaaatatttatactgttcctcatcagacattttattcattcgtttatatctgtatgaaatca

SEQ ID NO: 26580 - DNA, 201 bp, Homo sapiens
catttatttggagtttctgtctcttaatccccttggtccattggaccaaattctgcatggtgggggcatggcagcagggaagcctataggagtttaggatytatgagggtttttttttttttttttttttttttttgagacagattctcactctgtcactgaggctggagtggtcacggttcactgcagcctccacctctc

SEQ ID NO: 26581 - DNA, 201 bp, Homo sapiens
actttttaaaatatatatcagattccaaatgggattttcatttgaagaagggtctatgccatctttagaaaaaaacaaaaaaatggaaaacctttgaaaakttaagcagttttaactcataaatattgatggattagttatttgtgaaagtcacttgattgaatacctcatttttcaatgatgccatataagcaggctgct

SEQ ID NO: 26582 - DNA, 201 bp, Homo sapiens
caacattcctaaaaggtgtagaaactatgcatttgtctcctagtaatttatttaaatgatcccacaaattaccgtttagtgtcacatgaaattctgttatytcagtttgagaatttagagttttatttgtcttagtcaaaatcagtttgattttgattaagcgttttgaattttgtgttgttttgggattgatgtataatt

SEQ ID NO: 26583 - DNA, 201 bp, Homo sapiens
ggtgatccacccacctcggcctaccaaagtgctaggattacaggtgtgaaccacagtgcccctgccaagtcatccttatttcattctaattgtggtaaggkgatacctcattgtggtttggatttgcatttccttaatgattagttatgttgagtgtgctttcatgtacatgttggccatttggatgtcttcttttgagaa

SEQ ID NO: 26584 - DNA, 201 bp, Homo sapiens
tgacctcaggtgatccacccacctcggcctaccaaagtgctaggattacaggtgtgaaccacagtgcccctgccaagtcatccttatttcattctaattgkggtaaggtgatacctcattgtggtttggatttgcatttccttaatgattagttatgttgagtgtgctttcatgtacatgttggccatttggatgtcttct

SEQ ID NO: 26585 - DNA, 201 bp, Homo sapiens
gcctttatatttgtcatatatgatcactcttatgggtttattttattcattgggttataaccattgtaatggttatttattttgatgctcaattgtcctaratatggtcagtggaagcccctataggttagacccagacatacaacctcaatttttttaaggtactttattgtactttattattttctggtatgagaagat

SEQ ID NO: 26586 - DNA, 201 bp, Homo sapiens
gttgacagatgacagcccacaagccacatcaagccccctgcttgtttttgtgcatcccaagagctatatttttaagtggctacaaaaaaaaaatctagaakaataatattttgtgatacatgaaaattatatgaagtttaaattttagtgtccatgatcaaaaccaggctcatttgtttacattcagtctacatgactgct

SEQ ID NO: 26587 - DNA, 201 bp, Homo sapiens
tttgtcatcctttctacatttattagttgacattctataaggtagtgctttgttttctcgcctttatatttgtcatatatgatcactcttatgggtttatyttattcattgggttataaccattgtaatggttatttattttgatgctcaattgtcctagatatggtcagtggaagcccctataggttagacccagacata

SEQ ID NO: 26588 - DNA, 201 bp, Homo sapiens
ggttgcaaaatggtaattttgttttaattttgtcatcctttctacatttattagttgacattctataaggtagtgctttgttttctcgcctttatatttgkcatatatgatcactcttatgggtttattttattcattgggttataaccattgtaatggttatttattttgatgctcaattgtcctagatatggtcagtgg

SEQ ID NO: 26589 - DNA, 201 bp, Homo sapiens
atggttgcaaaatggtaattttgttttaattttgtcatcctttctacatttattagttgacattctataaggtagtgctttgttttctcgcctttatattygtcatatatgatcactcttatgggtttattttattcattgggttataaccattgtaatggttatttattttgatgctcaattgtcctagatatggtcagt

SEQ ID NO: 26590 - DNA, 201 bp, Homo sapiens
tcctctaaaggagagagatgctttgtgtagagagatgctttgagacttcgtaactatctttttcctcatcaaacatttgttttatcatctattgtgattgytgcctaaatgtttttactatgatggttgcaaaatggtaattttgttttaattttgtcatcctttctacatttattagttgacattctataaggtagtgct

SEQ ID NO: 26591 - DNA, 201 bp, Homo sapiens
ggtttctcctctaaaggagagagatgctttgtgtagagagatgctttgagacttcgtaactatctttttcctcatcaaacatttgttttatcatctattgkgattgttgcctaaatgtttttactatgatggttgcaaaatggtaattttgttttaattttgtcatcctttctacatttattagttgacattctataaggt

SEQ ID NO: 26592 - DNA, 201 bp, Homo sapiens
tattttgacactttcctcagtattggactttataacaatgttttctggttgaggatctaaatccaggttcatacattgcataattattcggtatctctttyagttgtctttaatctggaatagttcctcagtctttgtcttttgtgactttgtttttgaatggcacatgtcagttgcgctgaatatctctcattgggtctt

SEQ ID NO: 26593 - DNA, 201 bp, Homo sapiens
cagttaggcaccagataatgacgtttcagtcagtgatagaccacatatacaatggtggttctataaaattataataccatatttttactgtaccctttctmtgtttaaatacacaaataccattgtgttataattgcctacagtattcagtacagtaacatgcttgtatgggtttatagcctaggagcaataggctatacc

SEQ ID NO: 26594 - DNA, 201 bp, Homo sapiens
ttttctttggtccttcagcctcacaagtgctatatctaacagaggttagtttttggggttttttgttgttgttgttttctttgtttttccttttaaatttrttctgtgttctttaaatttgacctttcatatggtaaggtgaatgatttgggtaaaattgtaatgaagtagttttgaaatgaaatattaatttgaaataaa

SEQ ID NO: 26595 - DNA, 201 bp, Homo sapiens
  misc_feature (101)..(101): n is a, c, g, or t
tatggtgctttttataagaagtggaatcagtggatttggtgatgggatattcagagaaggaggggacagggaagagatgtgaagaatgatgcccaaaattntaacatgaacaactgtgagtggatagtggtaccatttactgaggggaaacacaggaggagaaacatgtatgtatgggaagaaaggggtgagttcagtttg

SEQ ID NO: 26596 - DNA, 201 bp, Homo sapiens
tttcattaaaccaagggtccttctgaggagtcttgaaatcagagcagtacatttgctatcagggcttttaactagtaacttcttttttaaatatctattastatcagtgcctggcatagtgatgtacacattcattcatgaatagttactgagtttcactgaatttagtagactgttgccttttttcaacttcaactttca

SEQ ID NO: 26597 - DNA, 201 bp, Homo sapiens
gattgatgtataattgttttatggaacgaatgaaataacaataacagacatttatttggagtttctgtctcttaatccccttggtccattggaccaaattytgcatggtgggggcatggcagcagggaagcctataggagtttaggatctatgagggtttttttttttttttttttttttttttgagacagattctcactc

SEQ ID NO: 26598 - DNA, 201 bp, Homo sapiens
ttttaaagtaaactgaaattgggaggtgttttgattgatttataactctgttaatcctgagaactttttgaaataacatagtttattatttggtagtgatrtgggtagctttaaaacatctttgataaacttagtgatgaatgtggcgttttgaagtaattattagtttgttggagagtgggaagttggttgaaatggagt

SEQ ID NO: 26599 - DNA, 201 bp, Homo sapiens
tctacttagcagactctattgagtgttttcagttatctccttcacagcaaaaagatatagttcaaactcagatatagtcagccctccatatacatgggttmtggatctatggattcaaccaactgtggattgaaaatgtttgggggaaaaaacattgttgaaagttccaaaaagcaaaacttgaatttgccacatgctgag

SEQ ID NO: 26600 - DNA, 201 bp, Homo sapiens
gaagtttaaattttagtgtccatgatcaaaaccaggctcatttgtttacattcagtctacatgactgcttttgtcttaaaatagcaccgcccaggagttgkggcagaggccatatggttcacaagcctaaactgcttaactttcctggccctttacagaaaatgtttgcctatacctggactataatatgggtcatgtgtc

SEQ ID NO: 26601 - DNA, 201 bp, Homo sapiens
ctaatgaagcaaatggaggaagatgtaaacaattggtgaatacaggtaaagagtataagagaattcttgcctttttttttttttttttttttttttttggkgacggagtctcgttctgttacccaggctggagtgtagtggcacaatcttggctcactgcaacgtccacctcccgagttcaagcaattctcttgcctcagc

SEQ ID NO: 26602 - DNA, 201 bp, Homo sapiens
cagtgagataatgctacttcatacctactagggtgacaaaaaagacaacagtaaatgttgatgaggctatggagaaattggagcattcatatagtccttgkgggattgtagagtggcacccaccttgcaaaatattaatcgtagaatttaccatattacccattcccagttacatacccaagtaaaatgtatacataaatc

SEQ ID NO: 26603 - DNA, 201 bp, Homo sapiens
cttgaaaagatgcttagtattattagttattaggggaatgaaaatcagaaccacagtgagataatgctacttcatacctactagggtgacaaaaaagacamcagtaaatgttgatgaggctatggagaaattggagcattcatatagtccttgtgggattgtagagtggcacccaccttgcaaaatattaatcgtagaatt

SEQ ID NO: 26604 - DNA, 201 bp, Homo sapiens
tctgaatagaaatttctgcaaagaaggcatacaaatggccaatgagcacttgaaaagatgcttagtattattagttattaggggaatgaaaatcagaaccmcagtgagataatgctacttcatacctactagggtgacaaaaaagacaacagtaaatgttgatgaggctatggagaaattggagcattcatatagtccttg

SEQ ID NO: 26605 - DNA, 201 bp, Homo sapiens
agtgatggatgctttttgtgtaaaataataatgtaataaatgtcttatcttttgaagagtttaagttggttgtgatattttcattaaaagaagtaaatgtmcaaaagtataatttttaagtttttacatcagtagctaagaatttagatagtacgaactcttctggttacaacagagtttaattgcctaattatattgtta

SEQ ID NO: 26606 - DNA, 201 bp, Homo sapiens
gagagattctggaacatagggcaaattttagcagagttgggataatgactgggtaagaaaggataattctttgttctaaaagggatttctctggtattaargccctgtgtgaaagctgctggagaaattcagttctgcaaagtttaaagtaaatggtttgctgtttatggagtactagattacttaatgcagtccagcctt

SEQ ID NO: 26607 - DNA, 201 bp, Homo sapiens
gactatgtttacttgtgacagttcggtaagtatttattcagcaaattaaatagtaataagggccttgagtataaattatttcattaaaccaagggtccttytgaggagtcttgaaatcagagcagtacatttgctatcagggcttttaactagtaacttcttttttaaatatctattagtatcagtgcctggcatagtgat

SEQ ID NO: 26608 - DNA, 201 bp, Homo sapiens
aggtagtgtgctcagtgtgctccttcagccctcctgaagacataggaaaataatggaattagactttattttctattatagtcatttccagactattccaraggggcctcaagagttaacatgcagccatggagaggctgaggccaggtggtttaagtgagcagatgagttttaagcactaactagaagttgtgtgagatt

SEQ ID NO: 26609 - DNA, 201 bp, Homo sapiens
actgtgccactgcactccagcctgggcagcagagcaagaccctgtctcaaacaaaaccaaagattacaagatgagactgaaaagtgtaagctacttatgamatttattaggttttagcttacctagattgaattctgacaccgattaaaagggtaaaaaattaaaatggttttcttaagtttctaattgtgaaagtataga

SEQ ID NO: 26610 - DNA, 201 bp, Homo sapiens
tactgtttagactctagaattgctgcctctcgtgtacaaattccacagagaaaaaatagtaacttgcatcttacctgtggacgtagagcaggaatagatawcttatggtgcctcttgtattttttaagccatagcaaatggcttttgaaagtaccatataaattatgaagtaaacaaattctaatttgtcctttgataatc

SEQ ID NO: 26611 - DNA, 201 bp, Homo sapiens
aaaaaactgcttacatgtaatggcgtttacttaaaccctcctcccggtgagtatcaagagagtttagcttcttagtaataaagaataatttatagtaggcrtcaacatgtttaagttcataaaattaatgttttcactttaaatgagtctaatttgctgggtgtggtggttcacgcctgtaatcccagcactttgggaggc

SEQ ID NO: 26612 - DNA, 201 bp, Homo sapiens
tgtgattactagttttcatcttttaaggttcagtagtacacacttgagaaggttgtaaggattcggtatgtttttacttgtgcggcacttagtatatattrcctggcatctgaattacccaacaaatattagctactcttattgttattgtagttctttggtttgtgcataggaaaccaccttcgtgggaacaacagtaaa

SEQ ID NO: 26613 - DNA, 201 bp, Homo sapiens
aagttaaagagttatacagcaggtgtgtagatggcttcttaaattatttgtgtggatttctgtagcgactagaacttacacgagaatttgcaaaatttctmgtagaacctgcttaaattaagcatgttattttttggaagttccatagttataacgttaattgaatttacacggtgcagtttacaggtgtatataattgct

SEQ ID NO: 26614 - DNA, 201 bp, Homo sapiens
taaataatttgtgaagcaactgttattttaagttttgattaacaaaagtgaacacgttgggcgcagtggctcacatctgtaatcccagcactttgggaggytgaggcaggcggatcacaaggtaaggagttcgagaccagcctggccaatatggtgaaaccccatctctactaaaaaatagaaaaagtagctgggtgtggt

SEQ ID NO: 26615 - DNA, 201 bp, Homo sapiens
tttggtttattttttttttaagttttgtttgtttgtttgtttgttttttgtttttttgagatggagtctcgctctgtcgcccaggctggagtgcagtggcrtgatctcggctcactgcaagctccccttcctgggttcacaccattctcctgcctcagcctcccgagtagctgggactacaggcgcctgccaccaatgccc

SEQ ID NO: 26616 - DNA, 201 bp, Homo sapiens
agtagttttgaaatgaaatattaatttgaaataaataatagtgagatggtcaagagtttcttggcactgacaatagtacaaatagaagttatttttttttwaaatcttttaatacagccctctccccctcttctctatttttccaggtagtctatgccttgttaatgcctgctggtgcacctctggctgatgattcctctg

SEQ ID NO: 26617 - DNA, 201 bp, Homo sapiens
gcctgcctcagcctcccaaagtgctgggattacaggtgtgagcccccatgcccggcctctgttcttttgtatactatggaaatggtcataagttgtcaagsagataatatttttgtggcctataacctatttcccaaatatgaccatagcataaaaattccacattttctgatttaacatgtaattgtataggtgtagaaa

SEQ ID NO: 26618 - DNA, 201 bp, Homo sapiens
ctgtaccccttaagcaataactccccatccccccagcccctggcaaccatcattctactttctgtttctgcaagcgtgactaatctgggtacccgtgtacktggaattatgcagtattgttcttttgtgaatgacttatttcacttagcatgatgtcctcaaggttcacccatatcgtagcacctgtcagaatttcctttc

SEQ ID NO: 26619 - DNA, 201 bp, Homo sapiens
cacaggggttccagtttctccccttatccttgctatcacttgtgttttctgcctttttgattatagccatcctagtgatatctcatagtggttttggtttrcatttccctgatggctaataatgttgagtatcttttcatatgcttattgaccatttgtatgtcttacacattcagatcctttgcccatttttcaattgag

SEQ ID NO: 26620 - DNA, 201 bp, Homo sapiens
taggcgcccgccaccacgcctatagcaaagatcgcactactgcactccagcctgggcgactgagcaagactccgtctcaaaaaaaataaattaaaaaaaawaaataaataatgactttagaggatacttcttctcagatctttcttagtggaatttgtgtatgtaaaactattacagaaacaacccaaatgtccattgtcc

SEQ ID NO: 26621 - DNA, 201 bp, Homo sapiens
tgagctcagcgagagccccagcctgaggggagaaggggaagagggccgtcgccggccaaggaggaggaggaggcgggcgcggcgaggagcgagttccggcsccggtgtgcagccttttggttgagacgcccgcagccccgagcccggccgccgcagcctttcgatacactttgttgccggtcacccccgggcctgggatgc

SEQ ID NO: 26622 - DNA, 201 bp, Homo sapiens
gtaccaatgatcagttttaagttaaatgtagtattaatgaaacttcagctttttactttctcttcttgtttgtatagcccctttttcctgattagattcaytggtgatactaaattcgaacagttccataattcatgttttttatatctaaaaccaattactttttcccctttctatttgtaggttatgcaatggtctctg

SEQ ID NO: 26623 - DNA, 201 bp, Homo sapiens; identical to SEQ ID NO: 3490

SEQ ID NO: 26624 - DNA, 201 bp, Homo sapiens; identical to SEQ ID NO: 3491

SEQ ID NO: 26625 - DNA, 201 bp, Homo sapiens
agttgaatatggtttgaaagtaaatagaacggactggtgtaatttccagtaatgaaacaagctgatttttaacaaataatatatttgattttaaacttacygtatacaaatttttacttgtgtaaaatataatagagatcagattatttgctatgtagaaaaggtttttacaaaagtataaacagacagttcttgcatact

SEQ ID NO: 26626 - DNA, 201 bp, Homo sapiens
agtccaatgagattataatgtcgtatttttactgtaccttttctatttttagatgcacagattcaccgttggtttgcagttgtctacagtatgtagtacartaacatgctgtacaagtttacaacctaggagcaattggctataccatctaggtttataggtacactatgatgttcacatgacaaaatacctaatgatgca

SEQ ID NO: 26627 - DNA, 201 bp, Homo sapiens
tgtttagtgcacatcagattgacctaaagagtttattaacacattgctgggccccacctccagtatttctgattcaggaggtctgcattggagcctgagarttggcatttctaacaagttcccagataatgctgatgttgctgctctggggaccgtgcttttggaactgccagtacggtatacggcagcagtccccaaccc

SEQ ID NO: 26628 - DNA, 201 bp, Homo sapiens
agtttttttactcatgaaattgggctgataatagggttgttctaaggattaacttgcttagaatagtgcctgagacaaatacttaaatgttagctattgtyactattaatgaggaaaatgttatttaaaatttgaggtgtgtcaacctggctgcactagtattgaagttgggaaatgagagacaaagttggaaaaataagt

SEQ ID NO: 26629 - DNA, 201 bp, Homo sapiens
acccagtctcaaaaaaaatttttttttagctggatgtggtagcatgcacatgtagtcctaactagtcaggaggctgaggtgggaagattgcttgaacccargagtttgaggttacagtgagctaggatgatgccactaaacagcctgggtgacagagggaaaccctgtctaaagtaaaagggactgactgttgtgaagata

SEQ ID NO: 26630 - DNA, 201 bp, Homo sapiens
tctccctgcttcagcctccctagtagctgggattataggcgcccgccaccacgcctatagcaaagatcgcactactgcactccagcctgggcgactgagcragactccgtctcaaaaaaaataaattaaaaaaaataaataaataatgactttagaggatacttcttctcagatctttcttagtggaatttgtgtatgtaa

SEQ ID NO: 26631 - DNA, 201 bp, Homo sapiens
gtaaaataataatgtaataaatgtcttatcttttgaagagtttaagttggttgtgatattttcattaaaagaagtaaatgtacaaaagtataatttttaaktttttacatcagtagctaagaatttagatagtacgaactcttctggttacaacagagtttaattgcctaattatattgttaagttcttctcgtttcagtc

SEQ ID NO: 26632 - DNA, 201 bp, Homo sapiens
ttgatggattagttatttgtgaaagtcacttgattgaatacctcatttttcaatgatgccatataagcaggctgctaagtcttttttctggttgttgttgkgagacagggtctcacccaggattctctacttaaatatgactgttgttaattgagtgctacaattaaattagccattgccatctttaattggagtgcagcg

SEQ ID NO: 26633 - DNA, 201 bp, Homo sapiens
taacttttttattgctaacattctatgacttacgggtttcgcattataaaaatggcaaatgtatgggtgcagcaaaccaacatggcacatgtatacatatrtaacaaacctgcacgttgtggacatgtaccctagaacttaaagtataatttaaaaaaaaaaggcaaatgtagtttacattaagtccataactaaaatgtt

SEQ ID NO: 26634 - DNA, 201 bp, Homo sapiens
cttaccccactacattctacagggaaagcacattctttttttcctactttttccatgtaattgaggaataaaatctcggttttatatactgttgtttgtgrtcttgttgcttttttttcccctgaaaaatatagttgtacatattgttctgtgaatgttacatgttacatgttttatttcattcatttcttaggctttggg

SEQ ID NO: 26635 - DNA, 201 bp, Homo sapiens
ttcaatgtttcaaagttgttttcctgtttttctttcagaaaatatttccaacttacgtatttctttcagtaactagtttaacatttttagtgagtgaatgwacagttaagaccattataggccgggcacggtggctcaggcctgtaatcccagcactttgggaggccaaggtgggtggatcacctgaggtcaggagtttga

SEQ ID NO: 26636 - DNA, 201 bp, Homo sapiens
ccactgagtgttaactttgattcagatctctcaaatgagtaaactataattcaagaccattaaatgatttgcttagaattcactacttctgaccgggtcaygctggtaatcccagcacttcaggaagccaaggtgggaggattgcttgagcccctggagtttgagatcagcctgggcaacatggcataactctgtctctac

SEQ ID NO: 26637 - DNA, 201 bp, Homo sapiens
ttatatttactccgaagcaacacagtgcagcaggtgttactcccatctgatcagtaagaaacccaagattccaatggcttaaggtagcttgtttgaaataycacagccagtatacgatggaattgcactactcaactaggtctcttttacttaagtctgtgctcttcctattagaccggtagtttttcaaacttacgtagg

SEQ ID NO: 26638 - DNA, 201 bp, Homo sapiens
aactcctggcctgaagcaatactactgcctgggttgggcttcccaaattgctgggattacaggcatgagctaaaacttgattttctttccagtttcttaaraaaacctcttgaagtagtcctttaagtcccaatctctgatgaaatatgcattcctgaaagtagagtgtttatgcctgtttgcatattccaatatatgtgg

SEQ ID NO: 26639 - DNA, 201 bp, Homo sapiens
ttcgtcaggtggcacaggagcagttctttttaatgtgcaccagatgttgcatgggacaccggcctctacttttcttcattactctactctttactgttttrggggtgagactttttaaaatatgcttatcaatgtgattcattctttaagcaagaaacattcagaaatttgtggttttagcttgcattaaagttaggacag

SEQ ID NO: 26640 - DNA, 201 bp, Homo sapiens
taggccagttggacaaatgcgagtaaaaagcaacgtgaaaagctacttgagctgatacgtcgtcttgcagaagatgataaagatggtgtgatggcacacaragtgttgaaccttctgtggaatctggctcacagtgatgatgtgcctgtagatatcatggacctggctctcagtgcccacataaaaatactagattacagt

SEQ ID NO: 26641 - DNA, 201 bp, Homo sapiens
ctaataaacactgatcagcaacttagtgcatttgctgctgctataacagaacaccacagactgggtaatttataaagaacagaattttatttggcttatgrttctggaggttgggaagtacaagaggcatggtgccagcttaaccgtgagttttgggggggacattcgaaccatagcagtaactttactcataaaactttt

SEQ ID NO: 26642 - DNA, 201 bp, Homo sapiens
tgtgcttgtgcttttagtttttatatcccttgatcaataatgagattgagtatctttctgtatattttttgagctatttgccttttttttttttttttttttggtgaatgcctgttccccccctccccccaccgtggcattatttgtatattttttggattgtagttcttgatatattttgaatgctaatccttgtcagtt

SEQ ID NO: 26643 - DNA, 201 bp, Homo sapiens
ctcttactaggattgtttggaaaattaaagagataatggataagcaataatagtgcctagcacatgataattgttaataaataaaagtaaaaaatagagagcctttttacccaaggtcaaaacataattctgtggcaaaattgggataaagaatccaaagatcctaaaattggtcctgtactcaccctaccatggtgattg

SEQ ID NO: 26644 - DNA, 201 bp, Homo sapiens
tctcttactaggattgtttggaaaattaaagagataatggataagcaataatagtgcctagcacatgataattgttaataaataaaagtaaaaaatagagagcctttttacccaaggtcaaaacataattctgtggcaaaattgggataaagaatccaaagatcctaaaattggtcctgtactcaccctaccatggtgatt

SEQ ID NO: 26645 - DNA, 201 bp, Homo sapiens
atctcttactaggattgtttggaaaattaaagagataatggataagcaataatagtgcctagcacatgataattgttaataaataaaagtaaaaaatagagagcctttttacccaaggtcaaaacataattctgtggcaaaattgggataaagaatccaaagatcctaaaattggtcctgtactcaccctaccatggtgat

SEQ ID NO: 26646 - DNA, 201 bp, Homo sapiens
gacttaggtagcagcctaaatatgccaccccttagagatggagcaagagtacttatgaaacttatgccgccaggtaagaatttttaaatgatgatcaagtrcttgctggacaataaaggagtatattagcaaattctgtttctaaatggaccgtgctttttggtatagactataacaagagttgacagatgacagcccaca

SEQ ID NO: 26647 - DNA, 201 bp, Homo sapiens
tctttcggattttttggttggtatatcactaagttttgtgttttgtgtaagtatttttccttgtttttgatattaacatagtatataattttcagcttatyacagccaaacttacacagataagttccaatatgccttcaagccctgatagctcttctgattcctccactggatctcctggaaaccatggtaatcattaca

SEQ ID NO: 26648 - DNA, 201 bp, Homo sapiens
aacaggtaaacaggagtcagtttatgcttttatcccctagaactgggttttatgcttaattttagaggatggctcaattgtttgttgtgactacaaagtamgaagtaggattatctagactagctttgggagcatgatccagaagagggatggtttggagtgggggtcatggtgtaacatgtttgaacttaaccactgtag

SEQ ID NO: 26649 - DNA, 201 bp, Homo sapiens
taaatgataactttttctttctgaaaccaaaatgtgactaaatcagctcttgtgaggcagtggtactcaaacttgcacaggcgtgagtctccctggaaggsttgctccagcagagagctagatgctaccctaaagtgtcttatttcataggtcttcaaggggctggaaaatgtacatttctagcaagttcccaagtgatgc

SEQ ID NO: 26650 - DNA, 201 bp, Homo sapiens
ctgctttgctcactttttgtgacttttccccttcagttaggttggcttagttacaggatagttctgttactctgacattgttagtttttaaatgatcttcyggagttgactttttttgttcattagtctgctttccttaggatctgtacatcaaggttttgtgactcatctgaaaagcattttagtctccttgggagaaag

SEQ ID NO: 26651 - DNA, 201 bp, Homo sapiens
gcagatcacctgagcccggagaggatgaggctactgtgagccctgatcgtgccactgcactctagcctgggtgacagaacgagacccagtctcaaaaaaawtttttttttagctggatgtggtagcatgcacatgtagtcctaactagtcaggaggctgaggtgggaagattgcttgaacccaagagtttgaggttacagt

SEQ ID NO: 26652 - DNA, 201 bp, Homo sapiens
taaaaactgaagaaatacagtagctgtcatgaaatggatgcaggcttgtattgtttgactttgagaacgtttaaatgcttgttaccctgccaggaatcttyttgaaataaccaataatcttttaaaaataaaaatattcttttatctgtatttgataaaggttgagaatttgtcagtggttttaaataaagatgcaaacag

SEQ ID NO: 26653 - DNA, 201 bp, Homo sapiens
atctcggctcactgcaagctctgcctcccaggttcacgccattctcctgcctcagcctctccaggtagctgggactacaggtgcccgccaccacgcccggstaattttttgtatttttagtagagacggggtttcgccatgttagccaggatggtcttgatctcctgacctcatgatccgcccgcctcagcctcccaaagt

SEQ ID NO: 26654 - DNA, 201 bp, Homo sapiens
aagcttaatgctggaattaatcttttttttcccccaatgactttggtctactttaggtgcagttgaattatctaacagaggactaccattgtaataacttycaattcattttttaagatattgcagattaaaaagcagtaacatttcattttctgaaataggatagctatggatgtgttataactaacagtaggcactatc

SEQ ID NO: 26655 - DNA, 201 bp, Homo sapiens
ggtcttgaactcctgggttcaagtgatcctcccaccttggccttccaaagtgctgggattgcaggcgtgagctactgtacccagcctatttttttttttttattaatacacaggaaaggtgtgatttttctcttaaagaatcggaagatgaagtctcagtttttgtttaaccagcaaaaggaaatctggtgtttttactca

SEQ ID NO: 26656 - DNA, 201 bp, Homo sapiens
tagacaaaaatcaaacctttaatttaaccttactcttattttaaggtgtacttgatgatttttagagctcttgggtttgtgatattcaacctaatattctrtgtctacattgtgttctttttcttctaaaaactttacatttttaaagatgactggtaatttaaaataacaaaggaatgaaacaaattacattatccctca

SEQ ID NO: 26657 - DNA, 201 bp, Homo sapiens
caaggttcacccatatcgtagcacctgtcagaatttcctttctttttaaaaaatactaaataatccactgaacataggtaccacattttgttcgtccttgkattgcttcctggaaagacttttaaaagagacacagtattggcttagtagacaaggtgatctccctggccccctacttgccccacacttgggaatatatag

SEQ ID NO: 26658 - DNA, 201 bp, Homo sapiens
acttttcaacaccagaatttccgtttggttctttttgttgttaaattctgttagtctctgtttgtttagaaattgtcatattttacttctttaagcatggyttcctttagttcattgaacataagcataagagctgtttttgaggtctctgctaagtctggaccttctcaaagtcagtttcttttgcctactttttttctg

SEQ ID NO: 26659 - DNA, 201 bp, Homo sapiens
atttgtctcctagtaatttatttaaatgatcccacaaattaccgtttagtgtcacatgaaattctgttatctcagtttgagaatttagagttttatttgtyttagtcaaaatcagtttgattttgattaagcgttttgaattttgtgttgttttgggattgatgtataattgttttatggaacgaatgaaataacaataac

SEQ ID NO: 26660 - DNA, 201 bp, Homo sapiens
cagtgttatttcactgagtttgtgtcttgtcatgctcctccggttgtcatactggaagtatatttctgaattaatttttttttttttttttttttttttttagacagagtcttgctctgtcactcaggctggagtgcaatggcgcgatcttggctcactgcaacctccacctcctgggttcaagcacttctcctgcctcaa

SEQ ID NO: 26661 - DNA, 201 bp, Homo sapiens
agttctcatgttttatctatggaatgctcaagtaggatttactttagatcttttttcttccagagtcttgtttttaatatcttaaggtatgagatttcttygctatcttctcagagatttttctttgacatggtggtaataatgcagcttatggttttgaaatggatgtttgtcatgaatttgctaatcatccagttcttg

SEQ ID NO: 26662 - DNA, 201 bp, Homo sapiens
aaattggtttttttggttcatcctcacaagtcaccctatttttattttctcctactttggtatagtggtagcagagaagtagtcaatatgataactaataraaggtttggcaaggaaggaaaaaaagtagtgccaaaggggctaggtaaataagataaaaataggtaaataagagtgaataattttaaaagtcataacgtg

SEQ ID NO: 26663 - DNA, 201 bp, Homo sapiens
tatctcttactaggattgtttggaaaattaaagagataatggataagcaataatagtgcctagcacatgataattgttaataaataaaagtaaaaaatagagagcctttttacccaaggtcaaaacataattctgtggcaaaattgggataaagaatccaaagatcctaaaattggtcctgtactcaccctaccatggtga

SEQ ID NO: 26664 - DNA, 201 bp, Homo sapiens
aagtttcctgtgatttcaacagatcctgattgtaagtcttagcctgccatgtgtggagccctgtgtcagtgctcttttgccctttgacagttatgtcagtstgtgtgtgcaagagtagggatggcttctcagtatatactgttcctcttctgtcttatgacaaattcatacccctttccccactgatactttgttgtttca

SEQ ID NO: 26665 - DNA, 201 bp, Homo sapiens
gtacataaatgtaagttttctatattggtgtaaacagactgtacactttaaaaaatttttccctaaacgctgcttcttttaataaatattatataattttmaaattttagattttagggagacatttttaatattataggtcttgtacaaatttccctttttctatccagccagaaagattttaagtcatacattatggag

SEQ ID NO: 26666 - DNA, 201 bp, Homo sapiens
ctccgcctcccaggttgaagtgattcttctgcctcagcctcccgagtagctgggactacaggcgtgcgccaccacgcctggctaatttttgtatttttagkagagatggggtttcaccatgttggccaggctggtctcgaactcctgtcctcaagtgatccgcctgcctcagcctcccaaagtgctgggattacaggtgtg

SEQ ID NO: 26667 - DNA, 201 bp, Homo sapiens
gcaacctccacctccccggttcaagcgattctcctgcctcagcctcccgagtagctgggattacaggcgcccaccaccatgcccggctaatttttgtattyttagtaaagacggggtttcaccatgttggccaggctagtctcgaactcctgacctcaggtgatccacccgccttggcctcccaaagtgctgggattatag

SEQ ID NO: 26668 - DNA, 201 bp, Homo sapiens
tcaagtgttcagttgcctgaagatgaactctttgctcgttctccagatcctcgatcaccaaaggtgtgttggtttgttattttcaaaattaaataatacarttgttttgttctgacacagaatcttcagtgatctgtatttaaagtgtgacaatgaaataacactttaaatgaaaatacacacaaccaggagcctttttcg

SEQ ID NO: 26669 - DNA, 201 bp, Homo sapiens
aaaccttctaaaaacaactctcttggctttactccctccccccacacccctcccgccaacacacacacacacacacacacacacacacacacacacactcwctctctctctctctctctctctctctctctctcgcgcacgcgcgcgcgctctctctctctctgttccttttgcttactttggatttggtttgctgttctt

SEQ ID NO: 26670 - DNA, 201 bp, Homo sapiens
ctcgaactccttaccttgtgatccgcctgccttgggcctcccaaaatgctgggattacagacatgagccacggtacccggccgatccatttttttttttttaagtggaggaattttttaatttttagtgtcttttggtaaattatggttttcaaggaattggtttatttcatctggattttcaaatttgaggtaaagttgt

SEQ ID NO: 26671 - DNA, 201 bp, Homo sapiens
ggtgtactttttcagattctttacatttatgatttaaccaatctggttttggaagatacaggcagaaagaacacccagtggaggcacataaaaaatgttaytagactgggtgcagtggctcatgcctgtaatcccagcactttgggaggtggaggtgggcggatcacttgaggtcaggagttcaagaccagcctggccaac

SEQ ID NO: 26672 - DNA, 201 bp, Homo sapiens
ctaagaggcaaaattgaggacattgggtaaaatttttattggtgaaataaaaaatataattaaatacagttatgtataacttaggtctaatgagaaaaacaatttggtgtgtgtgtgtggaggggaggtaatacagtattttgctttattgggtaaagttcagtgttccctgtcatcaaattgattgcagacgttctgtgt

SEQ ID NO: 26673 - DNA, 201 bp, Homo sapiens
acagggtggaaccctgtctctactaaaaatacaaaaattagccgggcgtggtagcatgcacctgtaatcccagctacttgggaggctgagacaagagaatygcttgaacctgggaggccgaggttgcagtgagctgagatggcgccaccgtactccagcctgggtgacagagcgagtctctgtctcaaaaacaaaaacaaa

SEQ ID NO: 26674 - DNA, 201 bp, Homo sapiens
attagccatcttgagagagaaaaaaaaaagatacctggagttagaacatcatctgttgtcggcctgtctgctatgttgcagtatatgcattgttgaaaacytcatagtctgcaaaaatcaggtaccaaaaactaacaatgtgtatagggaaaaatgggcttaagagtaaactgatcacttcaaagctatgttactttgtaa

SEQ ID NO: 26675 - DNA, 201 bp, Homo sapiens
ttgtttagaggtcaccttttatcattacctttcagagcaaagtaataatccatgtgactcatggagaaagtatattttaagcagaaaaaacaacagatgtrtatgtccaggcatgtcaggaacatgcctgacatgtgaaagaacagcagggaaactggagtggatggaacagaggcggtaggggacggggacagttgtagg

SEQ ID NO: 26676 - DNA, 201 bp, Homo sapiens
tatttttttctgctgtttccacagcctgttgttttattccctgcctagttaactcacttatgttacctctctgatccgagaaagcatttgactttgccackcctgggatagtgctttcagagcagagctgagtatttggttaaatgtttagaaaaggagtcaaggataatactgtacaggaggttagtgggagtcagtttg

SEQ ID NO: 26677 - DNA, 201 bp, Homo sapiens
accaaatccacaaggaaggttaacttcctttgaccctgagaaagctcttatgttaatcatgcctggttactttatcatcttgaacattgttctgtttttartcagcattattgtgagttcagggttactgctcctatatatcttacatcatggttagtcaatcggatttagcatgtggaagagtcaatagatgctcataga

SEQ ID NO: 26678 - DNA, 201 bp, Homo sapiens
ttgtgactcatctgaaaagcattttagtctccttgggagaaagtataaacagaacagattatacagtggtggcattatcaagtgtatggttctgaaatgcygtttcgaatagaattcgaatgttaaagctgatagggacttcagagggaagagaaattaggttttctttgctcatagggaagttaagaaaaattaatagaa

SEQ ID NO: 26679 - DNA, 201 bp, Homo sapiens
ctgtctccatattaaaaacatatgtgtatatatgtagaataacataaaaacaaatatctgcaacagattagacattaaaaactggctcattatcagctgaracatgtacttctctagcacattttgggcctaactactttttattctcagctaaatactgcaaaatcatatagtgtggattactccctgtttgtatcatga

SEQ ID NO: 26680 - DNA, 201 bp, Homo sapiens
ctttaagtcccaatctctgatgaaatatgcattcctgaaagtagagtgtttatgcctgtttgcatattccaatatatgtggaattagaaagtagtttggtygtaatatatggggcttttttctttaccaaagcatcaaaaccaaatatgtttccagacattatgaatgtcccatctttataacacatcaggagtttgttca

SEQ ID NO: 26681 - DNA, 201 bp, Homo sapiens
ttgagcccaggagttcaaggctgtagtgagctatgatcacaccactgtactctagactgggtgacagagccagagggccctccgcccccaccttttttttyttttttttttaagacaaaggcaacttgggaatttaaaaacaatggtactacacagtaattcctatttcctttacaaagtgaaacatttttgtttttctaa

SEQ ID NO: 26682 - DNA, 201 bp, Homo sapiens
ggtctaccctgatctaagcagtctggacccattgcctggacaatcatagtatccttgatcttcccacctgtagtgttgtactcttctaatctgttgactayacggcaagcagagtgatctctagaaaatatgagcatgttgctttcctgcttaaaatctttccatgtcttcccgttatctttgaattaagttcaaactttt

SEQ ID NO: 26683 - DNA, 201 bp, Homo sapiens
tgatcatttcaatgtttcaaagttgttttcctgtttttctttcagaaaatatttccaacttacgtatttctttcagtaactagtttaacatttttagtgartgaatgaacagttaagaccattataggccgggcacggtggctcaggcctgtaatcccagcactttgggaggccaaggtgggtggatcacctgaggtcagg

SEQ ID NO: 26684 - DNA, 201 bp, Homo sapiens
tgaaacagggtcttgctctatcactcaggctggagtgcagtggtgtgatcacagctcagtgcagccttgtccttccaggctctagcgattcctcccacctytgcctcttgagtagctgggaccacgaccacatgccataatgcccagataattgttttttttttttttttttttttttttaaacagagatggagtctcact

SEQ ID NO: 26685 - DNA, 201 bp, Homo sapiens
acaggacgcttcaccccttcatacttcaacatatatcttataagagatcatatatcagaataaggcaattttcctacttatgtatgatacagttatatccmagtaatataataacgatttttaatctctaatattcatcagtatatattccgatttcccaaaagtggtctttataacttatctctctatcccaatctgata

SEQ ID NO: 26686 - DNA, 201 bp, Homo sapiens
ctttacttaaggcatggcaggctgagaatattgggctctgattatccccaacctggcttgctcacagggtggacattatatgtcagggagtgcaatctgaraaaatcagagtttgatcccacacacccaacaccagcacctgctcttaaggcagggatataattttgggagaagttagctgctgtcctccctctatctcct

SEQ ID NO: 26687 - DNA, 201 bp, Homo sapiens
ggcaagaaacttgaagtgggtgctttcttcatgttttatataatgaaactagaatacctaaatttgaaacagccagcttttgaaaaagctggtaatggttrtattgcagcagaaaatcataggctttggactcaaatggacttgagttccaatcctgcttctaattgctactctatggcgttaaacataagtttcatagtt

SEQ ID NO: 26688 - DNA, 201 bp, Homo sapiens
gttgaggggtgggtagaagcctggaatgttactaagtaacctatagtgcagtcctagacagaacagtcctgtacaacgaagattacctggccaaacgtcartaacggaaaccctgggttagatgatggtagtattttactagtgtagttttcttgttatttggaaatactcattgaagtatttaagggtaaaaggacatat

SEQ ID NO: 26689 - DNA, 201 bp, Homo sapiens
tgggtttagtatattatgattataatctcttcctggtggtacacagccctcatggttgccaaggagggccttcccccagagtggagacatataattcataygtgctttaatgctaatttttatttacttcatttgcatgtggtgtttaatttcattgtcagaggtcaggaacccggctgtctcactagggttttttctgct

SEQ ID NO: 26690 - DNA, 201 bp, Homo sapiens
gaatttagtagactgttgccttttttcaacttcaactttcatttattgtttgggaaaaaatttttaaaagtcattttccaactgtcaccttttcccttctrcttgccaaaactgttgtcaaagtgtacatttgatcataaatgttttcatggccttaaaaatgtacacactattaaacccaacaattctacttagagaaat

SEQ ID NO: 26691 - DNA, 201 bp, Homo sapiens
cgccgcagcctttcgatacactttgttgccggtcacccccgggcctgggatgcacccagggtaggtctcgtcccgggaccgagccccaccgtcgcctggtrcctcccgcctccgtgtgccctggttgtgagaagacgtctgtgtcgtgcggtgagtggccagctgcactggggcgacgctctttcccggggccaacagctg

SEQ ID NO: 26692 - DNA, 201 bp, Homo sapiens
tggtctaccctgatctaagcagtctggacccattgcctggacaatcatagtatccttgatcttcccacctgtagtgttgtactcttctaatctgttgactrcacggcaagcagagtgatctctagaaaatatgagcatgttgctttcctgcttaaaatctttccatgtcttcccgttatctttgaattaagttcaaacttt

SEQ ID NO: 26693 - DNA, 201 bp, Homo sapiens
gcttccccttctgtttttatgttcttttgagtttatgtatttttatattcattcattctcattttagtggggtttggggatgaagtactgataaatatagygcagtacaccatatttagttgacataatttttaaagctgtcttctgcttttattacctccattttctaaattaaacaccttgttgggcttctcatcttgc

SEQ ID NO: 26694 - DNA, 201 bp, Homo sapiens
ttgccatgaacacttttgtatatgtcttttggtggtcttttgctgcatatccaggattggaattgctggtttataggatacatatgtgtttagctttagtyaatactgccaaacagatttcccaagtagttgtaccagtttaaactcctactagcagtaggtcgtgttgctcttccttatcaatacttagtattattatca

SEQ ID NO: 26695 - DNA, 201 bp, Homo sapiens
tattacacaacattcctaaaaggtgtagaaactatgcatttgtctcctagtaatttatttaaatgatcccacaaattaccgtttagtgtcacatgaaattytgttatctcagtttgagaatttagagttttatttgtcttagtcaaaatcagtttgattttgattaagcgttttgaattttgtgttgttttgggattgatg

SEQ ID NO: 26696 - DNA, 201 bp, Homo sapiens
tatatagaggaacatttccagcctgttccaagaaagaggtgttagaaggtggtatccctcaaactcttagtgtcaatttgaggttatagtcctggacatasagcttaagttcatgtattatgtggtgttggcttgagtgcttgttgtgtgtaggtagggtaatcctgtatccttactattaatttatttcccttttatact

SEQ ID NO: 26697 - DNA, 201 bp, Homo sapiens
agtagctgggactacaggcgcccgctattgtatgtttattagaggtggggtttcaccgtgttagccaggatggtctcaatctcctgacctcgtgatccgcmcaccttggcctccagaagtgctgagattacaggcatgagccaccacgcccggcccttttttcttcttttttgagacggagtctcactctgtcatccaggc

SEQ ID NO: 26698 - DNA, 201 bp, Homo sapiens
tgccctcttggagcattttattctagtgagatctatatagtacataacagtttttaaaaaagatagatccatgattcccagatctgagaatcatgagacarggttttcccaagggtcatcagagagaaaatatggtattgtgattctcaatctttcttttttctttcttttttttggagatggattcttgctctgtcacca

SEQ ID NO: 26699 - DNA, 201 bp, Homo sapiens
ttctcaataatgaaattgattggcttaaaagaattagggtaagttttagttaatactccatttatatgtcattattagtaaatagaatgttttattgatgrtttatattttttgagcattttggttaaatggaaaactccaaagattgataaaagggaccaaagaatgtactctgcatcagtggacgttagtaatctgtga

SEQ ID NO: 26700 - DNA, 201 bp, Homo sapiens
ctagtgagtcaaatattttaatggaaaaacaagggttatagatgtcggttaaacatagaaatttgaaaggaagagaagtaattccctttgattgttggtgyataaaaccggaataggcaaaattcacaagtcaagattaatttccaagtcaagataatttccatgtttgagcttaaggatgatctatcaaattgttttcta

SEQ ID NO: 26701 - DNA, 201 bp, Homo sapiens
tttttttttttggtgaatgcctgttccccccctccccccaccgtggcattatttgtatattttttggattgtagttcttgatatattttgaatgctaatcyttgtcagttcaagagttacaaataatttctcccaatttggttatctttttcattcacttaatggttgtactggttgaatagatgttcttaatttctcctt

SEQ ID NO: 26702 - DNA, 201 bp, Homo sapiens
aaagactttacagtaattagaaggtattcattcttatatggtgggatatctgaaataggagcatgtcttctaattcctgttcaccacttacattggtacaracagacagaactatgccccagtgatttaatctatacttactacgtatactgcttctgtctcacagatggaattactatgaacaaaatgcaatgttttgtg

SEQ ID NO: 26703 - DNA, 201 bp, Homo sapiens
tctctcttcctctccctcctcctgccactgatgttccttttgtcttagcttagtatctgtgtattccatagatgtgcactaaacatacaaatctttcattmctcccccgtggatattaatgttccttcccgagttttcattcagtgtcgatctgtttcctcctcttcaatgtttaacactaaaatagaggacagaagagag

SEQ ID NO: 26704 - DNA, 201 bp, Homo sapiens
agtaaataaactagtaaatagcaaaagaaatgagatgaagaaacattctaaatgataactttttctttctgaaaccaaaatgtgactaaatcagctcttgkgaggcagtggtactcaaacttgcacaggcgtgagtctccctggaagggttgctccagcagagagctagatgctaccctaaagtgtcttatttcataggtc

SEQ ID NO: 26705 - DNA, 201 bp, Homo sapiens
gaggccgaggcaggcggatcacgaggtcaggagattgagaccatcctggctaacacggtgaaaccccgtctctactaaaaatacaaaaaattagctgggcrtggtggcacgtgcctgtagttgggctgaggcaggagagaggcgtgaacctgggaggcaggacttgaagtaagccgagatggcgccactgcactccagccc

SEQ ID NO: 26706 - DNA, 201 bp, Homo sapiens
cagctatatgacctcggcaagctgtgtaactctgtgccaattttctcacctgttaaaagttttaataataaggccaggcgcagtggctcatgcctgtaatyccagcactttgggaggccgaggcaggcggatcacgaggtcaggagattgagaccatcctggctaacacggtgaaaccccgtctctactaaaaatacaaaa

SEQ ID NO: 26707 - DNA, 201 bp, Homo sapiens
aaaatgctttgcctgccatgtattctcattattagaattcaaatactgtacctccaaattatgtcactgaatcctaacttgccttcagagatgcagttttrtaaaaggtattgatgtgtagcaaattaccctcaactacagcagtcataaacttagttataacttttttaaagtttgcattactctcgagtgtcctgaatt

SEQ ID NO: 26708 - DNA, 201 bp, Homo sapiens
taccatgtttatgaaatagtttaagaattaactttttaggctgggctcagtggctcatgcctgtaatccctatgctttgggggaggccaaggcaggagaakcacttgagctgaagagtttgagcctgggcaacatagcgagacttcatctctactaaaaattaacaacaaaaaagttggctgggtgtggtggtgtgcacct

SEQ ID NO: 26709 - DNA, 201 bp, Homo sapiens
ctgtagaggaaagaagagaggcaggcaatttataaaagagtttttgcttctcatttaatgtagttattttgttgttttcatcctccttacaaatgagggtygcagtgttggttagtccctttagactctccaggctgtagaaagtgttcgtcttctggtcgggcgtggtggctcataatcccagcactgtggaaggccaag

SEQ ID NO: 26710 - DNA, 201 bp, Homo sapiens
tttcaccatattggccaggctggtctcgaactcctgatttcaggtgatccacccaccttggcctcccaaagtgctgggattataggcatgagccaccataygcggccaaattttttgaggaactgttttctagagtgactgcaccattttacattcctaccagcattgcacaagagctccaatttctccatatccttgcca

SEQ ID NO: 26711 - DNA, 201 bp, Homo sapiens
gtcttgaaatgtttttgaatcatctgaatgaagatatctagaacattaaagccgtgagcgtgggctagatcatccagggaaatcagtgtgagaagatagcstggcatgggaacttggagaaacatcagtttttaagagacaaggaggagtcgcaaataagaacaaaaagaggtagaaagaaaatcaggaatccagggagga

SEQ ID NO: 26712 - DNA, 201 bp, Homo sapiens
agaaagaaaccaaaatcgtcataaactctggatgacaagattatgactggcttaaatttttctggcttccattttttataaaatgtaacatgatataatcrgggatgaatatgagagctggaatggccactgagtgttaactttgattcagatctctcaaatgagtaaactataattcaagaccattaaatgatttgctta

SEQ ID NO: 26713 - DNA, 201 bp, Homo sapiens
catttatatgaaaatagattagcatgggactgaggggaggttggagggaagggagaatgctattaatggtatgaagtttctttttgggggtgatgaaaaartaatctgagatcgattttggtgataattgtgcaactctgaatatactgagaacctttgacttgtacactttaaatggacgatttgtatggtatgtgaatt

SEQ ID NO: 26714 - DNA, 201 bp, Homo sapiens
ggtgtgaaccacagtgcccctgccaagtcatccttatttcattctaattgtggtaaggtgatacctcattgtggtttggatttgcatttccttaatgattrgttatgttgagtgtgctttcatgtacatgttggccatttggatgtcttcttttgagaaatatctattcaagtcttttgcccattttaaaaatcggatttt

SEQ ID NO: 26715 - DNA, 201 bp, Homo sapiens
actgtgctcagcctgacatactgtttagactctagaattgctgcctctcgtgtacaaattccacagagaaaaaatagtaacttgcatcttacctgtggacrtagagcaggaatagatatcttatggtgcctcttgtattttttaagccatagcaaatggcttttgaaagtaccatataaattatgaagtaaacaaattcta

SEQ ID NO: 26716 - DNA, 201 bp, Homo sapiens; identical to SEQ ID NO: 3532

SEQ ID NO: 26717 - DNA, 201 bp, Homo sapiens
tattttttttttaagttttgtttgtttgtttgtttgttttttgtttttttgagatggagtctcgctctgtcgcccaggctggagtgcagtggcgtgatctyggctcactgcaagctccccttcctgggttcacaccattctcctgcctcagcctcccgagtagctgggactacaggcgcctgccaccaatgcccagctaat

SEQ ID NO: 26718 - DNA, 201 bp, Homo sapiens
catcccagatacatctcttttctttggcaagttgcagacttaggtagcagcctaaatatgccaccccttagagatggagcaagagtacttatgaaacttaygccgccaggtaagaatttttaaatgatgatcaagtacttgctggacaataaaggagtatattagcaaattctgtttctaaatggaccgtgctttttggta

SEQ ID NO: 26719 - DNA, 201 bp, Homo sapiens
tgcagtggcgtgatttcggctcactgcaccctctgcctcctgggttcaggtgattctcctgcctcagcctcccgaatagctgtgattacaggcacctgccmtcatgcccggctaattattatatttttagtagagacgaggtttcaccatgttggccaggctggtctcgaacgcttgacctcaggtgatccacccacctcg

SEQ ID NO: 26720 - DNA, 201 bp, Homo sapiens
caaggggtaaccttgagtgccatgttaggacatttgccttttactgttaaggtaatgagagatgtactttgaagtttaagtgaaaggagacattagatttstgtttgtttttgaaagataattctgatggcattcgtggcagatgtgttggagagttgagtgtcgggggattgagatggtattttaaccgttcttctgaaa

SEQ ID NO: 26721 - DNA, 201 bp, Homo sapiens
ctggatttaataatttcccttttattttcctgattgtacacctatcacttattcttcccacatacttttttttgagatattttttatctgaatgtgggcaractatcacgtttgattaatggtttgtgtatagaatcctaggtttgaaaatatattccttctggctggtggcattgctgatgagaagaccaaagtcctctt

SEQ ID NO: 26722 - DNA, 201 bp, Homo sapiens
tgtgcacctgtaatcccagctactcaggaggctgaggctggagaatcccttgaacccaggaggtggaggttgcagtgagcccagatcgcggtactgcactscgtctagcctgggtgacagagcgagactccgtctcaaaaaaaaaaaaaaaagttcagattttggagcattttggattccagatttttcagataagggatg

SEQ ID NO: 26723 - DNA, 201 bp, Homo sapiens
gcaactcaaccatatggatgagtctaataaacagaaggttgaagaaaggaataaagccacacagtaattaatacaccttgattacattaatgtaaagttcygaaatgggcacagctggtttctgggatgttacttgccgtgtattattttttacctgggtactagttacacaggtgttcacattgtgtactgtaataatgg

SEQ ID NO: 26724 - DNA, 201 bp, Homo sapiens
tcagattccagagatcttaaaaagtgaaaaaagtatatgtctcagactgataaaatgccataactactctaagtctctgttgcttttgttttttgtgtgtmcccccgcaagacggagtctcactctgtctcccaggctggagtgtagtggtgcgatctcagctcactgcaacctccgcctcccaggttgaagtgattcttc

SEQ ID NO: 26725 - DNA, 201 bp, Homo sapiens
ccgaaagaacaaaacaattgtaggaatggatgcaggcctgacagtcactgctttcaaaagaaagctcaatcccttttccctgttgtttccttttctccccrtttgaatttatagagaacaacagattctgtagagaaccttcatggtatagttggaagagccaagggttttagagtcttaacggaaattattgtgatcttg

SEQ ID NO: 26726 - DNA, 201 bp, Homo sapiens
tgcaaacagtaaaatcataaggaatgtctattgaaagagagtaaagacatctgtaattggtttcttcatagatttaatagaaagcaaaaacctccagtgtyaggagaattaattcacttgattatttataaagacctgtaataattattccagagaatttataactcttcagaaggattagtaacctttttagtttttgag

SEQ ID NO: 26727 - DNA, 201 bp, Homo sapiens
tttcatatacgtctgggacaccaaagggtcagtatagaggtaaatgagaaatgaacttgctatgcagaaagggacagcaaaaaatcctgcatatctcaacyttggcacttggtggagggagggattaaaaaaaaaagtgaaaatctaaaccacaagccagtatttaaacagtttcgtagtctgaattcaaattatagttgc

SEQ ID NO: 26728 - DNA, 201 bp, Homo sapiens
ctggttagtacacttgaactcaaaaatagagactataaactctcctttagatctcgctcgtcttctaattcgctgggctgccattttggtttcagcaaatrccttcaaattcttgaagaattatgtattaaatataaaaaagtgtcaacattcgttttctcaatttttaaactcatgtgctgtgtcatacatctaacttta

SEQ ID NO: 26729 - DNA, 201 bp, Homo sapiens
aagcaaagaatgactatactgatataggtatattttattgacagatctgagcattttatatacaacagctacacaaaggatatattacccccattcacacrtaaagaaacttgaagcctagaaagtttaagtagtttttacttgctcaaagttacttggtttataagtggtagagcctgcatttatgtctagttcagtcta

SEQ ID NO: 26730 - DNA, 201 bp, Homo sapiens
aaccttcatttttgataatagttttaaatttttacttttctatttctaaattttaattttctattttatgccaagttatacagtatctgccaatttcactktctgtgcttacttttaggttattctttgaatttcccttagatcatagctcttcttgattaggaaacaaactttccctactttaaatagtctcacgtagtc

SEQ ID NO: 26731 - DNA, 201 bp, Homo sapiens
tttctcagaatttatccctgtcattaagcaaagaatgactatactgatataggtatattttattgacagatctgagcattttatatacaacagctacacaraggatatattacccccattcacacataaagaaacttgaagcctagaaagtttaagtagtttttacttgctcaaagttacttggtttataagtggtagagc

SEQ ID NO: 26732 - DNA, 201 bp, Homo sapiens
gaaccttcatttttgataatagttttaaatttttacttttctatttctaaattttaattttctattttatgccaagttatacagtatctgccaatttcacygtctgtgcttacttttaggttattctttgaatttcccttagatcatagctcttcttgattaggaaacaaactttccctactttaaatagtctcacgtagt

SEQ ID NO: 26733 - DNA, 201 bp, Homo sapiens
ccttcatttttgataatagttttaaatttttacttttctatttctaaattttaattttctattttatgccaagttatacagtatctgccaatttcactgtstgtgcttacttttaggttattctttgaatttcccttagatcatagctcttcttgattaggaaacaaactttccctactttaaatagtctcacgtagtctt

SEQ ID NO: 26734 - DNA, 201 bp, Homo sapiens
atgagtctgatagagcagaactttctaccataacatctgatactttttacttaggcaaaatgatacaagaatttatttctgaagagatttgtagtttttarccttcaaattagcatttcttctagtagttcataaagccaatttctagaaagttctgaagaaaacaaagttgtttgaatggaaagacttaaggaaattatc

SEQ ID NO: 26735 - DNA, 201 bp, Homo sapiens
ccttgtctctaaagaaaatagaaaaaataagccgggtatggtgaacatgcctgtagtcccaactactcaggaggctaaagtgggcagatcacctgagcccrgagaggatgaggctactgtgagccctgatcgtgccactgcactctagcctgggtgacagaacgagacccagtctcaaaaaaaatttttttttagctggat

SEQ ID NO: 26736 - DNA, 201 bp, Homo sapiens
tgtccaggcatgtcaggaacatgcctgacatgtgaaagaacagcagggaaactggagtggatggaacagaggcggtaggggacggggacagttgtagggartaaagtcagagaggataacaaacaccctgtgagggtttttataggtcattgtgaagacattgaccctaagtgagatgggaatctttcagagggttttaag

SEQ ID NO: 26737 - DNA, 201 bp, Homo sapiens
tagaggtcaccttttatcattacctttcagagcaaagtaataatccatgtgactcatggagaaagtatattttaagcagaaaaaacaacagatgtatatgyccaggcatgtcaggaacatgcctgacatgtgaaagaacagcagggaaactggagtggatggaacagaggcggtaggggacggggacagttgtagggagta

SEQ ID NO: 26738 - DNA, 201 bp, Homo sapiens
ggtgccataaaaggtaaaatactttgagaattggaaaggccataacttactttctacctggaaggagcaaaagtgaaggttttgtgcaggatgtagcatgygagctcatgtttgggcaggatttatatgtgcataaaagtagaagatggtcattgccagtgcgctctctctctccctttctcactcccagttatgtggctt

SEQ ID NO: 26739 - DNA, 201 bp, Homo sapiens
aattcaaaatccgaaatttggggccaggcgcggtggctcacccctgtaatcccagcactttgggaggctgaggcgggcagatcacttgaggtcaggagttygagaccagcctggccaacatggtgagacccccgtctctactaaaaatatgaaaattagccaggcatggtggtgtgcacctgtaatcccagctactcagga

SEQ ID NO: 26740 - DNA, 201 bp, Homo sapiens
gctaactgccattggctatggtcatgttcgagctgtggcagaagcttgtcagccaggtgtagaaggtgtgaatcccatgacacaggtaatacagacttttyaaaaatccttttataatagtagatagcaatttttaaagtaaaactaattagtattttaagtgtagagttcaaggttgactcaatgttcaaagtgccttat

SEQ ID NO: 26741 - DNA, 201 bp, Homo sapiens
tcgaactcctgacctcaggtgatctgcctgcctcccaaagtgctggattataggcatgagctactgctccctggcctttttttttttttttttttttttttggagatagagtcttgctctgttgcccaggctgaagtgcaatggctcgatctcagctcactgcaacctctgcctcccaggttcaagcaattcttcagcctc

SEQ ID NO: 26742 - DNA, 201 bp, Homo sapiens
tggagagtgggaagttggttgaaatggagtaggtagagttgatctagaaaatggattgggtagtatctagtaccttataaagtggcctattgttcatttgmccatttacagttaaacgttttaaaacaggaaataaaattactagaataagatctatacaaattgttttatcacgattttgagaattttattttgaaagcc

SEQ ID NO: 26743 - DNA, 201 bp, Homo sapiens
tgaagtttccagttatttattaccttttattgtatattggacaatgtaaaaacaaccagatgaacattttgtttgcattaatttttctccctttttcttasgccttgatgttaaaagtgaagcatgtcagcgatttttccgtgatgggctaacaatatcattcactaaaattcttacagatgaagcagtgagtggctggaa

SEQ ID NO: 26744 - DNA, 201 bp, Homo sapiens
ttttttgccctctaccctttatgaaaattacccttatataagtcagaaccattttgcccctctcttccctgaaacttgcatgcagtgcggtaatgtactgyagaaagcatgttatctcattatgtcaccatattgtctgcaataatagggagggcgttctaagttaggatctttttgagttttaagtacctgattttttat

SEQ ID NO: 26745 - DNA, 201 bp, Homo sapiens
acatggtaaagtgaacattgctgagtaatttctcacatgttaataaaactatttgttacactgatgaactggtatttaggtaagagccaagaaaagctcargaaggtgtattaatgtagatactactcaggttttgactatgtttacttgtgacagttcggtaagtatttattcagcaaattaaatagtaataagggcctt

SEQ ID NO: 26746 - DNA, 201 bp, Homo sapiens
aacagggttttttgccctctaccctttatgaaaattacccttatataagtcagaaccattttgcccctctcttccctgaaacttgcatgcagtgcggtaawgtactgtagaaagcatgttatctcattatgtcaccatattgtctgcaataatagggagggcgttctaagttaggatctttttgagttttaagtacctgat

SEQ ID NO: 26747 - DNA, 201 bp, Homo sapiens
tggtgctggttcttgaaccagtcctagataggacagagaatggcattaagtgtttagaaactttcattgcagtttgacattgcgacatttttattgtgttytacaaaattatctgtggctctgcagtggctcacgcatgtaatcccagcactttgggaggccgaggagagattgcttgaggccaggagtttaagaccagcc

SEQ ID NO: 26748 - DNA, 201 bp, Homo sapiens
cttgatttaacatggctaaatgtaaaatttttagatgacttctggttgaagatagttttatatctttgaaatatagttcttgctattaaacttataaagtrtagcgattgtgagagtgttagcctttcaaagccttcaagagtacaatttttaaaaatatagcccaaaatatagttgcgaatcaaggagaagcatattcta

SEQ ID NO: 26749 - DNA, 201 bp, Homo sapiens
aaagtttgatttatcttttaataattcccctcttttgtttaaagaacgtgtccttatgcctcattaatcttgtagaaataatatcccaaagtgaaaatacratacgcggacaggttacagttgttttcaccactcagaattttttgttcttttatacgttcactaattcatcaaaattttttaaagaaaatatcttttttt

SEQ ID NO: 26750 - DNA, 201 bp, Homo sapiens
ctcctgcctcggcctcccaaagtgctgggattagaggcgtgagccactgctcccgggcaaccctgtctcttaccaaaaaaaaaaaggggggtggcggggcratgaagaggtttatcataatgtctcctttgatctgaatcctgaaagagcacttccctatgaattttaacaaaaatatccatgatacctaattagttaata

SEQ ID NO: 26751 - DNA, 201 bp, Homo sapiens
ggaaaagataaataggtttagtaagtctaattccatttaatgatgcatacgtgtgggaatggtgaggataggaaagatgattagccaacagttttaatgaygtcaaacctggagggtagcaagtttgttattctatgttgaatttttaaaatcttaaattaggaacttatttcatctcttagtctactaactattaaggaa

SEQ ID NO: 26752 - DNA, 201 bp, Homo sapiens
agtagagatggggtgtcaccacgttggccaggctggttttgaactcctgacctcaagtgattcgcttgcctttggcctcccaaagtgctagaattacaggygtgagccactgcgcctgattttaaacatattcctctagcactttctatagttgtttacattttcctcattaatctgcctgtaatttgtgtgtatgtcagg

SEQ ID NO: 26753 - DNA, 201 bp, Homo sapiens
tgagaagagggcaaacaggatgaatattgagaagcagttatttgatttgtcagtaagtagaacattgatctgtggaccttcttctcatgcgtcccctaatrcacatactcaaaagctttgtatgtaatttttaggggaattaatcttgaagcccatccctacgtctcgattaagaccttctggcttaaagcagttttagtt

SEQ ID NO: 26754 - DNA, 201 bp, Homo sapiens
tacgaactgccactctacccctttccttggaagagaagtggacgggaaacctggagtccaggattatataagccaaggaagctcagagtttcaagaagggrgaggtggtcagtgtctaatgatgagaagagggcaaacaggatgaatattgagaagcagttatttgatttgtcagtaagtagaacattgatctgtggacct

SEQ ID NO: 26755 - DNA, 201 bp, Homo sapiens
tttcataagtaaaagtatagggattaacacagagaaacttacttgggcttttataaaacgggagtaaataatttagaggtaattattttgtgtattttatrttctagataatgtcactgcatcccagatacatctcttttctttggcaagttgcagacttaggtagcagcctaaatatgccaccccttagagatggagcaa

SEQ ID NO: 26756 - DNA, 201 bp, Homo sapiens
caataatggtctgaatataataataattcttcatgttcttccccctttggcttaacatatgtttattgagcacttgtcatttggtaacaagcacttttttyccaaggtgttggtaaatctggcaattcttatggagtgttgaaagtttctgctaaagatgattttgaaaggaagcaatgaagtctgagtcaccttgtggtt

SEQ ID NO: 26757 - DNA, 201 bp, Homo sapiens
gtgatctcagctcagtgcaacgtctgcctcctgggtttaagtgattctgctgcctctgcctctcaagtagcttaggattacaggcaccaccacccacggckaatttttgtattttttgtagagatgggattttactatgttggccaggctggtctcaaactcctgacctcagctgatcagcctgccttggtcccccaaagt

SEQ ID NO: 26758 - DNA, 201 bp, Homo sapiens
gcagccttttgttatgtccagagtctaaattgtatatatgagagaaatggtttaatagaacaggagaggagctatcacaaaaaaatgactggaagtgactwgatgatgtatttgatctgcactattaaggatttgtagggattaaaagatgggaaagtcagactatttcaaagagtagaaatttcataagtaaaagtatag

SEQ ID NO: 26759 - DNA, 201 bp, Homo sapiens
cccagtgatagtgttgactctttattcttccatttatcccctcggggccaatagattgttagagctagacaagcaatctaaatgttaggcagctgatgagsaacagacagtgatcttagcattttagtcttaggttccttctaagcagtgtaatagaatgatcaaggcaatacaaccatgtgatttatgttctataccaaa

SEQ ID NO: 26760 - DNA, 201 bp, Homo sapiens
ttgaaagcttccttcagagtagattttaatgaaatctaacttttactattttcttttttaaaaatgctgtatttctgggcacagtggcttacccctgtaayaagcactttgggaggccaaggcaggagaattgcttgagaccaggagttcaaggccagcttgaccaacatagcaagatcttgcctctatttttttaaaaaa

SEQ ID NO: 26761 - DNA, 201 bp, Homo sapiens
ttacgattgatcgctaccttcttaggaatgtacttggctcattttcaacctttatgtcctttaccaccacctttagctttttaaaaggaaacttgttttgkctaagtctgttcttactttatagttcttttataatgccaagcctatgttttgtaagtgcttcaagactccatgaatttaaaaaacataagagtagagatg

SEQ ID NO: 26762 - DNA, 201 bp, Homo sapiens
cgagatgttgccattgcacaccagcctgggcaacaagagcgaaactctgtgtcaataaataaataaaaataaatttggttctgagttatctagtaactagyacaaagacagaaatgtagttatccatgaaatgcagtttgtgatgtctataagatattcacaaatgcttagcaggtacttgttgagcatcttccatgtgtc

SEQ ID NO: 26763 - DNA, 201 bp, Homo sapiens
ccccattctctttgttaaatagatttttgttctctgctttgggagctctgcctgccttttttacgattgatcgctaccttcttaggaatgtacttggctcmttttcaacctttatgtcctttaccaccacctttagctttttaaaaggaaacttgttttgtctaagtctgttcttactttatagttcttttataatgccaa

SEQ ID NO: 26764 - DNA, 201 bp, Homo sapiens
tgaaataattttgagtttataacatttttaatttttaagtttatatctgcctctgtcctttttctctccttgtacgtgtgtttctttattttgattttggygattatttttaaatgtagttgtcattctatttattttcttagtcaaatatacattttttgtgttcttcactgtactaaaagatggcccatttagagtaag

SEQ ID NO: 26765 - DNA, 201 bp, Homo sapiens
agtttcttaagaaaacctcttgaagtagtcctttaagtcccaatctctgatgaaatatgcattcctgaaagtagagtgtttatgcctgtttgcatattccratatatgtggaattagaaagtagtttggtcgtaatatatggggcttttttctttaccaaagcatcaaaaccaaatatgtttccagacattatgaatgtcc

SEQ ID NO: 26766 - DNA, 201 bp, Homo sapiens
ggggacattcgaaccatagcagtaactttactcataaaacttttcccatattgcttagcagcatccctggtctctactcactaaatgccattagtaccctrcccttccccaagcatgataaccatgttgtattacaataccattttagaggttttaaaaaaatgtattttagagtttttaattgggtgtcttctaaattga

SEQ ID NO: 26767 - DNA, 201 bp, Homo sapiens
tcaccatgttggtcaggctggtcttgaactcctgatttcaggtgatccacctgcctcagcctcccaaagtgctgggattacaggcgtgaaacaccgtgctsggctgattttaaccatttttaagtttgcagttcagtggcattaagtacattcacattgtgggatgcttaccatcatccatttccagaacttctcttcttt

SEQ ID NO: 26768 - DNA, 201 bp, Homo sapiens
aactcatttcactttgatgtccagtaaaggaaataatctggtagggggttggagttgctgttgcttgtttattgtctctatccccagtctgtaatgttccrcaaaagcagagatatttgatgcactgtgtacttccatatattctcctatgattagaacaatatgtgacccattgcagatgctcagtacacaatttttgaa

SEQ ID NO: 26769 - DNA, 201 bp, Homo sapiens
cagactatccttactgagatatggtagattttcttaaataaattattttttcatttggtatatgcccttaggacaatttccagaggcttttagtgtttttkgttttttaaaaaaataattttcaccagttaacgattgtttcactggggagagcatttacggagcctttgatggcaccattccaaaagttatttttaatgt

SEQ ID NO: 26770 - DNA, 201 bp, Homo sapiens
ttgaagaatgccatcccactgccttctggccttcaagttttctggtgagaaatcagctgttggtcttactgatgatcctttgtatgtggtgatggatgcastttttgctgcattcaagattgtctttgtatttggcttttgacagttgatgatgtttctcagtctggatcttgaatttatcctacttggaatttgtcgaac

SEQ ID NO: 26771 - DNA, 201 bp, Homo sapiens
acctcctgggttcaagcacttctcctgcctcaacctccaagtagctgagattacaggtgcctgccaccacgcccagctacttttttgtatttttagtagaratggggttttgccatgttggctaggctggtctcaaattcctgacctcaggtgatccaccagtctcggcctcccaaagtgctgggattacaggcgtgagcc

SEQ ID NO: 26772 - DNA, 201 bp, Homo sapiens
ccacctcctgggttcaagcacttctcctgcctcaacctccaagtagctgagattacaggtgcctgccaccacgcccagctacttttttgtatttttagtaragatggggttttgccatgttggctaggctggtctcaaattcctgacctcaggtgatccaccagtctcggcctcccaaagtgctgggattacaggcgtgag

SEQ ID NO: 26773 - DNA, 201 bp, Homo sapiens
ctgtcactcaggctggagtgcaatggcgcgatcttggctcactgcaacctccacctcctgggttcaagcacttctcctgcctcaacctccaagtagctgarattacaggtgcctgccaccacgcccagctacttttttgtatttttagtagagatggggttttgccatgttggctaggctggtctcaaattcctgacctca

SEQ ID NO: 26774 - DNA, 201 bp, Homo sapiens
gcctcagacttaagcagggagaacaaagggagagggtggtttgtacagggtttcttcttggggtgaggaaaaatgtagacttagattgtgatgatgattayacaactgtactaaaaaaattgaattgtatttaaatggatagattttatggtactttatgactcgatgttttttttttaaatgaacttttaaaataagttc

SEQ ID NO: 26775 - DNA, 201 bp, Homo sapiens
tcttataattgcataattgtatttaccagtgttatttcactgagtttgtgtcttgtcatgctcctccggttgtcatactggaagtatatttctgaattaawttttttttttttttttttttttttttagacagagtcttgctctgtcactcaggctggagtgcaatggcgcgatcttggctcactgcaacctccacctcct

SEQ ID NO: 26776 - DNA, 201 bp, Homo sapiens
aatttgtgtatgtaaaactattacagaaacaacccaaatgtccattgtccatcaagtgatgaatgcataaataaaatatacaatggaatattatctgtcartgaaaagaaatgaagtactgatacatgctacaacttggatgaactttgaaaatgttatgcttaagtgaaataaaccagtcacaaaagacctcatatcaca

SEQ ID NO: 26777 - DNA, 201 bp, Homo sapiens
ttttagtagagatggggtttcgccacattggccaggctggtctcgaactgctgactgcctgcctcagcctcccaaagtgctgggattacaggtgtgagccmccgtgcccagccaacttcgtctttttcattactgtatagtattgtattaaatccatgatttatttatccattctgttggattgaggtgggtttttttcat

SEQ ID NO: 26778 - DNA, 201 bp, Homo sapiens
tgggtgtggtggtgtgcacctgttgtcccagctactcaggagactgaagtgggagaatcacttcagcccaggagatcaaggctgcagtgagctgtggtcaygccactgcactccagcctaggtgacacagtgagaccctgtgtccaaaaaaaaaattaactttttatatttagattttgtatttttatatcttggtatatc

SEQ ID NO: 26779 - DNA, 201 bp, Homo sapiens
gtgcttgtgcttttagtttttatatcccttgatcaataatgagattgagtatctttctgtatattttttgagctatttgcctttttttttttttttttttkggtgaatgcctgttccccccctccccccaccgtggcattatttgtatattttttggattgtagttcttgatatattttgaatgctaatccttgtcagttc

SEQ ID NO: 26780 - DNA, 201 bp, Homo sapiens
gaggccatgggtctggctctatgatgccagaccggatagtgggaggtacagggctctggccctggcactactctaagttagggaaggattggagttagtasccaaacacagtcctttcctgagtctctggatatttttcctatttgtcaactatatgccaggcaccatcttagacactaaggatgaaggaagccaaatggt

SEQ ID NO: 26781 - DNA, 201 bp, Homo sapiens
catggcgcaggtcaagggggcactggaaggaagccactggtcaaacatctcaaagactgctctctaggaaaagcacatatcccttgttagagcagctagtstacccattttcactatagttctgaaacaggatagcagcagcccagtgtgacagaaaaacaaaaataaaagcaaaaactgaaaaaagagaatatagcagtg

SEQ ID NO: 26782 - DNA, 201 bp, Homo sapiens
aaactcctggcctcatgtgatccgcctgccttggcctcccaaagtgtgattacaggcgtgagccaccacacttggcccaatagtagcttattctaatcccwgctctgccactgacttgctatggcactgctgttccttaagtatctctcatctaatgggatcagttatctgtgttcaccaaacagaactaagcgcaagact

SEQ ID NO: 26783 - DNA, 201 bp, Homo sapiens
ttgagtacttaattttctattttatttatttacttatttttaggatggagtcttgctttgtcactcaggctggagtgcagtggtgtgatctcggctcactrgagcatctggctcctgggttcaggcaattctccttgaatcgcttgtagtcccaagtagctgggactacaggcgcatgccaccacacccagctaagttttg

SEQ ID NO: 26784 - DNA, 201 bp, Homo sapiens
ctcacgcctgtaatcccagcactttgggaggccgaggcaggtggatcacgaggtcaggagatcgagaccatcctggctaacatggtgaaaccccgtctctwctaaaaatacaaaatattagccaggcgtggtggcaggtgcttgtagtcccagctactcgggaggctgagacaggagaatggtgtgaacccaggaggcgga

SEQ ID NO: 26785 - DNA, 201 bp, Homo sapiens
cagggttcacttgcaaagggaccaggagtgataaggaaacaacaactcattcaggcagctgcttttgacctctaactcccaaacctgcctgttgcatgagsggaagccatctcccatgggagcgaagttaatggggtgggaggctatattctcactattgagtctttccaggagtctcaaggcacaaggctcctggtttct

SEQ ID NO: 26786 - DNA, 201 bp, Homo sapiens
cgcagatctgccagcagccattagcccagccccagctctccatcattgcattacaagggccacataaggagtcagttctagttcctggccacacagtcctygagaggaggccctatgtgtgagggctgcgaccttgagtcagaaatcatcttttccccctcctcctctcctggcacctgttccaacagtgagatcaccaag

SEQ ID NO: 26787 - DNA, 201 bp, Homo sapiens
actgcactccagcctgagtgacagagtgagactctctccaaataaataaataggccaggcgtggtggctcatgcctgtaatcccagcactttgggaggccraggcaggcggatcacttgaggtcaggagttcaaggccagcctggccaatatggtgaaaccccgtctctactaaaaatataaaaattagcctggcgcggtg

SEQ ID NO: 26788 - DNA, 201 bp, Homo sapiens
atggtataagggaaggaaaaacactcaggatcttgaccaaattacttcctctctaaaggctcgttttttccaaatctctaaaataagaattacaatgcctrtcttaaggatttgctgtgcatatcagaaaaaaaaaattatgtatgtatacacacacacacacacacacacacacatacatacatatagccggcacatagt

SEQ ID NO: 26789 - DNA, 201 bp, Homo sapiens
taacacagagtttggcactatttccactttgttctctctcaaagatgaaggctcaggaggagggaagataaaaacaaatcactggagagtcctggcatgcyggaacatggactctagctagcaagaagggctcaaggaggtggccttctcctagacctcaactttgatgcaaaagctgttttgcagcctgaacaaagacaa

SEQ ID NO: 26790 - DNA, 201 bp, Homo sapiens
gtgtcccctcaaggtacaaaaaggtcagaatggctgcagtgtgtgtggaaagctgggagaggcaggtaggggctagagtgtgtgggctgtgatgcttaggytgtggctatggggtcatgtcaaagaaagtgggtcttgtgctaaggaccacaggcagccaaggaaggaggctggaagagaaaaaacataaaccaggtacgc

SEQ ID NO: 26791 - DNA, 201 bp, Homo sapiens
ggcctcctgccatccctcagaaattcatttatacctcacttcctttgagaagtctacattgggccctcaggtcaggacaggacaggactccctttagaggmaccacgctagttttatgtctggctgcccagaggtgaatgtgtgtcttgttccctgttgtctctctccaaagcagggcctggcacaaagtaggtgctttat

SEQ ID NO: 26792 - DNA, 201 bp, Homo sapiens
cccagacatggccaatgaccctgacaaactatttccagtgttgccagctgacaggcaggaagagctatgttccgtgatagggcattcaccttgtcatgaaygtgtttgcagtgtcttcccaccaagccttagcccctcctcccagggttctatcaccctgcagtggctgtcttggcagcttgcctcagccttccaggccag

SEQ ID NO: 26793 - DNA, 201 bp, Homo sapiens
gtagaatgctcgcaatggtgttcctggctccaccccccatctcactctgtctttccttccagacactcacccacggcactgcagtttgcactcgcacttaygagaaagaggcatgacctgactgcactgttgctgactactactctgccaatcggctacccctcgactcagcaccacattgcctcatttcttcctctgcat

SEQ ID NO: 26794 - DNA, 201 bp, Homo sapiens
ggcaggcagaggcagaaagagccccaccatcattcccagcaaatgggaaaagttcccagttgcagatattaggggtgggatggggcgggggtagtcagcawccatagacttagaccctgaagaggcaaaaaaggagggccatgttcttgggtcagcagagcttctactcagcttcttcagcctctagctctttcctggtgc

SEQ ID NO: 26795 - DNA, 201 bp, Homo sapiens
ttcagaagaacaggaagaactaaatgagataacatgtacagttcttactacacaaaaagctcatagtacttaatagtagctttttttttttttttttgagrtggaatctcactctgttggctaggctggagtgcagtggcacaatctcgactcactgcaacctccacctcctaggttcaagcaattctcagcctcagcctc

SEQ ID NO: 26796 - DNA, 201 bp, Homo sapiens
gagcaagccgcggggctcaggatgttggcttggggactggctggtggcgtgcctagccccacgcagcactcctgccgcatccctcctggttaagactgggsaataggggagcgcggagatggcagcctggcctagagcaggtggggcctgttcagagggggctttggtggtccaaatctggttagagaccacggtagggag

SEQ ID NO: 26797 - DNA, 201 bp, Homo sapiens
taagagacagtgtatgcacagcacaaagcatcactgattgaggaacacagcaggtgctccatgtcctttgtttgctcttcctgtgtttctaccttgcctcmcctcaggaagaagtagaaaacagggccaaatctgatcccaggccctctaggaggggctcccattgcctatctcagcattccctttcctctcctccctagg

SEQ ID NO: 26798 - DNA, 201 bp, Homo sapiens
tgtcgagtagagctcctcaaagccccgtgctgctcaatttggacaggcccaagagagggagcaaatggattttctggcagtgaccccaccccaacccattytgaaaaacctctatagcccctttttcagttgaagccctttctaatcctgtcccagaaataataaaactgaggattaaagaagcaaagcaatctgcctcag

SEQ ID NO: 26799 - DNA, 201 bp, Homo sapiens
caaggggcaaagaggtcccgtctagtaccagtgaccacaggcacaactgctggcctggattgagtatgtgctggacagaatcgcccagtgaaaatagtcawcagttttggagccgaggttcaaatctatgtcagtagtttattctctttgaatttcgacaagacacttcgcactcttcattgtaaactggggataatctac

SEQ ID NO: 26800 - DNA, 201 bp, Homo sapiens
gaagtgaggagagtaataatactgccttacacctaaacagtgctttagtttatcaagctttttgcatccttatcttacaataatagtctgtagagtcaaamttcatgagttattattcccattttacagatggaaaaactgcaactcagaaatgtaaagtgagtcgaccaaggctaaagcggcaaaaccactatactttat

SEQ ID NO: 26801 - DNA, 201 bp, Homo sapiens
aggcagccttatgctccagccttgggaggtagtatagctgagcacttaagcaagctctggactcagacaattctgggcttcaatctcagatttgtgacccygggctttacctctgtttttgtatctgtaacgtggaaacagtcttcagaagaacaggaagaactaaatgagataacatgtacagttcttactacacaaaaa

SEQ ID NO: 26802 - DNA, 201 bp, Homo sapiens
aggatgctatgaggtttaaacaagataagcactaactatagtgcctgacacattataggcacttagtgggagctatatgtatttttctctcattaactccyaggatgttctgacagcctggccaagcatctacaggagacaagtcaaagttttaagagaagatgaaataacaattcttccttggcatctccaatggagtag

SEQ ID NO: 26803 - DNA, 201 bp, Homo sapiens
ccctagcttctcagagtccttgggaggctggctaggtgagaatagtgataatgctctttgcagatttagaaactgagacccagtgagatcatgacttgccygaggtcacacagctgttgtatacatatggcaagactggaacccaagtctcactccagagcccctaaaactagggaggtagatagattctctccttcactc

SEQ ID NO: 26804 - DNA, 201 bp, Homo sapiens
agtctatctagaaacagtgactcacatatccaaggtcaaagaataggagtaaaagatttagaactcctgactgctattctggtttctattagatcctggtrccaggggaaataactgccatcaaataataagcctgtacttgctacccttgaatattcatcatctctaactttacagccacctcacaagattatactcata

SEQ ID NO: 26805 - DNA, 201 bp, Homo sapiens; identical to SEQ ID NO: 3568

SEQ ID NO: 26806 - DNA, 201 bp, Homo sapiens
tattctccgccagaaactcttcttaaaaaggatttcagcaacaaattagaccaaggaaatagatgagaccaggctatacagtctgggctttcttctgtcarcaacagggagaggatggcttctgagaaggcagattgcccctccccactgaggtaccccctgtcccccagggcagggagggtcattgttctcatttcaggg

SEQ ID NO: 26807 - DNA, 201 bp, Homo sapiens; identical to SEQ ID NO: 3571

SEQ ID NO: 26808 - DNA, 201 bp, Homo sapiens
gatgcgagggctatttaaagcggcagcccgggcagggagccgccgtcggagcccttgcacgcctgctctcttgtagcttctctcagcctagcccagcatcrctatggtggacgctttcctgggcacctggaagctagtggacagcaagaatttcgatgactacatgaagtcactcggtgagcaagccgcggggctcaggat

SEQ ID NO: 26809 - DNA, 201 bp, Homo sapiens
gggtgaatgaatgggtgagctgcagggttcacttgcaaagggaccaggagtgataaggaaacaacaactcattcaggcagctgcttttgacctctaactcmcaaacctgcctgttgcatgaggggaagccatctcccatgggagcgaagttaatggggtgggaggctatattctcactattgagtctttccaggagtctca

SEQ ID NO: 26810 - DNA, 201 bp, Homo sapiens
gtgcctttggctctgtacctctgctgggcatctctccaaggtctaaggtaacatattaaatgtttttgtcagctaatgcaggctcagtgactttaagtctrtaagttacccaggaagaaggattataggaaaaataactcagtaagtttaaaaccaaacacatttccatttagtgacaggaatttaagcaaggacctgaag

SEQ ID NO: 26811 - DNA, 201 bp, Homo sapiens
ctagtggacagcaagaatttcgatgactacatgaagtcactcggtgagcaagccgcggggctcaggatgttggcttggggactggctggtggcgtgcctakccccacgcagcactcctgccgcatccctcctggttaagactggggaataggggagcgcggagatggcagcctggcctagagcaggtggggcctgttcaga

SEQ ID NO: 26812 - DNA, 201 bp, Homo sapiens
tgcctgttgcatgaggggaagccatctcccatgggagcgaagttaatggggtgggaggctatattctcactattgagtctttccaggagtctcaaggcacraggctcctggtttcttactctcaaccaccccctacactctttatactctcactccttgtgcttcttcttgtgcttcttcttctttttcttcttctttgct

SEQ ID NO: 26813 - DNA, 201 bp, Homo sapiens
attgagtctttccaggagtctcaaggcacaaggctcctggtttcttactctcaaccaccccctacactctttatactctcactccttgtgcttcttcttgkgcttcttcttctttttcttcttctttgctgccttgctgtcttttgatgtgtgccttgccctcttgcctgtatcactctcagagtctgagctgtcagagtc

SEQ ID NO: 26814 - DNA, 201 bp, Homo sapiens
caagtatcttattactttcattttttaaagtgcaggacattaaagctgaaaggcgcccctaaagactagccagtctatctagaaacagtgactcacatatycaaggtcaaagaataggagtaaaagatttagaactcctgactgctattctggtttctattagatcctggtgccaggggaaataactgccatcaaataata

SEQ ID NO: 26815 - DNA, 201 bp, Homo sapiens
ccctgcgagtgggaagaaaagtagaaactgcttagctaatgattgacctcagcccttcttctactgctttgggcttagatggagaggtcaaagctctcaayggcctctaccctatcttgggcgctatgcccagtaattctaggcaggcagtcattcttagaggagcagcccccagcccccacgaacacagcccagcagcta

SEQ ID NO: 26816 - DNA, 201 bp, Homo sapiens
ttttttttttttttttgagatggaatctcactctgttggctaggctggagtgcagtggcacaatctcgactcactgcaacctccacctcctaggttcaagmaattctcagcctcagcctcctgagtagctgggattacaggcacataccaccacatctggctaattttttgtatttttagtagagacgggtttcaccatat

SEQ ID NO: 26817 - DNA, 201 bp, Homo sapiens
actacagccgaactcacctccacaacagtctctgtggctctagcctggactcctttacaggaatccagctctggcagtggcagctggagagggtaataggrcctcctgctgaatgaaggaagttgggtgaatgaatgggtgagctgcagggttcacttgcaaagggaccaggagtgataaggaaacaacaactcattcagg

SEQ ID NO: 26818 - DNA, 201 bp, Homo sapiens
atctttaagtgccaacaagaaaaaaatagctaaaacatgttaagtaaaagaaccaagacataatatgtattgtaggttccagtgcgtataacatatacatktgtatttatatatatatgcacatgatataaactgtgtatgttacacacacttgtgtatatttagtatacacagagaacactgaaaaggatacatcaaact

SEQ ID NO: 26819 - DNA, 201 bp, Homo sapiens
cccattctgaaaaacctctatagcccctttttcagttgaagccctttctaatcctgtcccagaaataataaaactgaggattaaagaagcaaagcaatctscctcaggtaactaactcagtaggtagtggcagagctcagactaggtcttaggtgtctgcactatccctggagacaataacaatagcagcaggaggagcag

SEQ ID NO: 26820 - DNA, 201 bp, Homo sapiens
tagacctggacctgagttctggctctgccatttactattctgcatccgtgggcaagtcatctgaactcactgaggcctgttcccttcaaatgtaaactggrgataagaataacatctactggctgggcgcggtggctcatgcctgtaatcccagcactctgggaggccaaggcaggtggatcatgaggtcaggagatcgag

SEQ ID NO: 26821 - DNA, 201 bp, Homo sapiens
tgagaccaggctatacagtctgggctttcttctgtcagcaacagggagaggatggcttctgagaaggcagattgcccctccccactgaggtaccccctgtsccccagggcagggagggtcattgttctcatttcagggagcattctgccacaggcagcagtttcttagaagcaaattggtgttgagtaaacctctaccttc

SEQ ID NO: 26822 - DNA, 201 bp, Homo sapiens
tgaggcaggagaattgcttgaacccggaggcagaggttggggtcagccaagattgtgccattgcactccagcctgggcaacaagatggaaactccgtctcaaaaaaaaaaaaaaggttgtagttcaaaagcaaagttgggagttggggtgggggaagactgagagccagaagatgaaccaagcttctgctctctcaacttc

SEQ ID NO: 26823 - DNA, 201 bp, Homo sapiens
ggctggctaggtgagaatagtgataatgctctttgcagatttagaaactgagacccagtgagatcatgacttgcccgaggtcacacagctgttgtatacayatggcaagactggaacccaagtctcactccagagcccctaaaactagggaggtagatagattctctccttcactcactcatttgttcattcattcaatat

SEQ ID NO: 26824 - DNA, 201 bp, Homo sapiens
ctgcaacctccacctcctaggttcaagcaattctcagcctcagcctcctgagtagctgggattacaggcacataccaccacatctggctaattttttgtakttttagtagagacgggtttcaccatattggccaggctggtcttaaactcctggcctcatgtgatccgcctgccttggcctcccaaagtgtgattacaggc

SEQ ID NO: 26825 - DNA, 201 bp, Homo sapiens
atatcccggggaaaagaactggaaggaggaaaggagaaaggagttactattccttcaatattagtgcacggtaggctttccatttgttatctcttttaatygtcctaacaaccctgagaagttgatggccttcctctatttgggagaaaacaagactcagaagggggaaagggagcttgttctaggtctctagctagtaaa

SEQ ID NO: 26826 - DNA, 201 bp, Homo sapiens
ctggccctggcactactctaagttagggaaggattggagttagtagccaaacacagtcctttcctgagtctctggatatttttcctatttgtcaactataygccaggcaccatcttagacactaaggatgaaggaagccaaatggtataagggaaggaaaaacactcaggatcttgaccaaattacttcctctctaaaggc

SEQ ID NO: 26827 - DNA, 201 bp, Homo sapiens
cttttctagtctcatctctgctctgacgctaagctcaaagagggactgggggacgggaagatatccaccatggcatgcgccctagctctcgggctggtgtyggctgcttccttctcagattccagagtgcctagaggccaggaaagggagaaggtcctaccagcctggggtagggactcgggggccaggcactggcgctga

SEQ ID NO: 26828 - DNA, 201 bp, Homo sapiens
agaaccaagacataatatgtattgtaggttccagtgcgtataacatatacatgtgtatttatatatatatgcacatgatataaactgtgtatgttacacayacttgtgtatatttagtatacacagagaacactgaaaaggatacatcaaactggtaataagtgttacacattgggaatgaactgaatgggggaaaggata

SEQ ID NO: 26829 - DNA, 201 bp, Homo sapiens
tcgcttgagcccaagagctggaagttgcagtgagccataatcctgccactgcactccaggctgggcaactgagcaagaccctgtctcaaaataaataaatraataaataaataaataaataaataaataatctccccctctccccaaaaaaaacacctatggtgacaagttaatgagatagtatctaaggcttggacaagt

SEQ ID NO: 26830 - DNA, 201 bp, Homo sapiens
gaggctggaggtgaactagatgtcttgcagggatagctgggaggcggattgcctgagctcttgtcctcacaccatcactagtttgggtcaaaggctgtgtsctctgtggcccagtgtccagaccccaccctgcccctcaattcctgactaagatcacagctcaggcctctaccctctttccacagtccattgtgacactgg

SEQ ID NO: 26831 - DNA, 201 bp, Homo sapiens
aggcacttagtgggagctatatgtatttttctctcattaactcccaggatgttctgacagcctggccaagcatctacaggagacaagtcaaagttttaagrgaagatgaaataacaattcttccttggcatctccaatggagtagagagaaggcaacaaagcttctcagacccacattaccgagctataacaaccatggct

SEQ ID NO: 26832 - DNA, 201 bp, Homo sapiens; identical to SEQ ID NO: 3573

SEQ ID NO: 26833 - DNA, 201 bp, Homo sapiens
ttccccctaccctcaggtgtgggttttgctaccaggcaggtggccagcatgaccaagcctaccacaatcatcgaaaagaatggggacattctcaccctaaraacacacagcaccttcaagaacacagagatcagctttaagttgggggtggagttcgatgagacaacagcagatgacaggaaggtcaaggtaagtcaggga

SEQ ID NO: 26834 - DNA, 201 bp, Homo sapiens
aagcctgtccctatagctttggcagaaatgagcctctgagtcttctggcaactggaccgtccaaaggaatcaagatcttagggtggggagagggctcttcytccctggccttgttctcagaacagtccagggaagggaggcagggtttgcacatggagaaacagagtcccaggaaggagggcctgccatactctacgcacg

SEQ ID NO: 26835 - DNA, 201 bp, Homo sapiens
tactcgggaggctgaggcaggagaatcgcttgagcgtgggaggcggaggttttggtgagccaagatcgcgccactgcactccagcctgggcaacaagagcraaactctgtctcaaaacaaaacaaaacaaaacacgcacacacaaaaacaaaattagccgggcgtggtggcacatgcctgtaatcccagctactcgggagg

SEQ ID NO: 26836 - DNA, 201 bp, Homo sapiens
ttgaggaaattcaggattagaggtgacccagcttaaagtcacataaccagtcattgacagacctaggacttgaacccaagtcaatgtgagtctgaatcctrtgcttcctccaaagtgcttggtcagaggtaagtcatcacagtgccaactgagggggcagtatcatgtggtggaatgagaaacgaacacagttgttatact

SEQ ID NO: 26837 - DNA, 201 bp, Homo sapiens
aatccatgcataaattattaattgaatagaattgtttaatgtagtagttcccaaagcatgatcgatgaaacaccatcagcagcatcaccttggaatagatmagaaatgcaaattctcagctgctgaatcagaaaccttgggatggatttagttatatggttcttaagctctccagatggtgctgatgcctgctcaagttta

SEQ ID NO: 26838 - DNA, 201 bp, Homo sapiens
acactcttatgaagcagtccagtagagcttagtcttcccatttaatgaagaagcgtactgaggccaacgatctaagcatggtcacagcaagtcagaagtayaagggctacagctcagaccttttgtctcttgggctttgcaagggatgcctaatgctagtgtctaaactggcctttgaggaatggcttagtatagtatttc

SEQ ID NO: 26839 - DNA, 201 bp, Homo sapiens
tacaacaagtatttggcaaatgcttgctgagatgatctcaaggcatgagaccctgcttgggctcaaggtcatggaaaagagaaacaaagagttttatagcwgccatcgactcattgactggaaggctgcctttaatagtaacctttgattatttagcagattggaaacaccttaatataccaaaaactgcaaacagcacaa

SEQ ID NO: 26840 - DNA, 201 bp, Homo sapiens
atttatatctatctatctatccatccctatatcagacctcaaggaaatatattcaaaactacatgttgaaaaaattaagcagagagaagtagatgggaaggtactaaaaatgcaagacttagcaaaagaaggctgtatatatacagcaaaaggggacacacaacaacccctcccactagcaaatgcagcccaatcattgcc

SEQ ID NO: 26841 - DNA, 201 bp, Homo sapiens
ctgctctggtccaaggtccaggtgataccatcttcttcaggggtgtcacaggtgaggaccaccatttctccaggggcatccggataccaatccaattctaygacataaactggaatgcacataaagtggagaaccaggctgtaagctccaggaactctgggactgtgttttattaacccttcgggcatccccattgcctaa

SEQ ID NO: 26842 - DNA, 201 bp, Homo sapiens; identical to SEQ ID NO: 3576

SEQ ID NO: 26843 - DNA, 201 bp, Homo sapiens
aaaacatatgggttgggttatccacttcaatgactgcacattaagcaagagtatagtgtaccatgttttatttaaccattcctctgctgattatgtctttwtgcacttggagaaacatttctttagtaagcattttccttttaaagatgaaaaagtgagaccccaatgcttaatttactcagtgaaataatggtaaagtca

SEQ ID NO: 26844 - DNA, 201 bp, Homo sapiens
gctcatttgctgttgagcagtgggagcaacttgttggccaagttactcgctgagcctcagtctctttgtctataaaatggacctaatacttatctcaaagrcttgttgggaaaggcaatgagataacatattatagaaggcaaccaataacatattaacttgaacctagaggaagaggtaagggaacaattcggtatctgt

SEQ ID NO: 26845 - DNA, 201 bp, Homo sapiens
tccactgagtactcatactccttgttgtcccctctgactctctctgcagagagtgtagcagctccgcacgtcaccccttgggggtcagaagagctgaagtsaaagacagaaattagcctgtgttacacattggggagagagttcctagtgattgtagccagtaaggcaggtaaggcctcaactgttgtctgaggacacagt

SEQ ID NO: 26846 - DNA, 201 bp, Homo sapiens
cctatgtgaactagaccccacccaccaagtacaaaccctccataagttttgaagcaagttctctggttctattacactttatcatgctgcctggtcaatgmataaatagtaaaggaaatgacttatggtgaaatccctatctgccaattaaaaaaaaagatgtccattttggaagggtttatattctaagaaagaagtccc

SEQ ID NO: 26847 - DNA, 201 bp, Homo sapiens
atgacagtgaaagggatctgccctaactgtccccatcttgcttctgggtatctttgctcattcctgggtgtgggccaagctaactttgggagaaatttagytaaattataatggcccttcccagatactaaattgcccttgtaaaactaatgaaaggccaccaagttaggaggatgagaggggcctgaattctgttaggaa

SEQ ID NO: 26848 - DNA, 201 bp, Homo sapiens
actccttcctcaattaggtcttctagataagaggaggcagagacatgctagggtgtgtggttgggctctgtaggcctggcactgctccacacaaagatcayggctcctagcaggtgcttcgcacatatgcttccctctgctcttaacacaactgacatctttccttttggtgtcagctaaatgtcacctcctcagagaggc

SEQ ID NO: 26849 - DNA, 201 bp, Homo sapiens
taaaaatctggttagtgttgttcattaaatgtccgttaagtactttggtaactgcagatgaaagaccctgtagggggacaaacacttgttattaacaaccrtatgctgtcaagtgtgggcttataacacgggaccatatgctccaaaggttggcaaagaatgacagaagccacccaccattcctccaggccaggagcagag

SEQ ID NO: 26850 - DNA, 201 bp, Homo sapiens
cttttgtcttttcatagcttttggtgcggacatgtcttggagcagttacagtcaattgtctctatgctcaatttgcttgtttattccatgaatactgagcrcccattatgttccagccactggactgtgcatgaaggatacagcagtgagtttcacaaagactccttcctcaattaggtcttctagataagaggaggcaga

SEQ ID NO: 26851 - DNA, 201 bp, Homo sapiens
gtagtggctagatttacaataaaaaggacagtcctggagactatctttaaagaagaaaaactctgcattgcatgcactgaaattaatcgaatgctaagagrtcatgtcgcaaaagcactgggcatggtgggagccagaacatctcacctctgccccaggctggccagaaatttggggaaaggtcccagttctcagtgctta

SEQ ID NO: 26852 - DNA, 201 bp, Homo sapiens
tcacaagtctgttatgtaaccatagttgggactggagtctgctcctctgattcccagtcctaagatctttggcttagacatttagtacattttgtagtggstagatttacaataaaaaggacagtcctggagactatctttaaagaagaaaaactctgcattgcatgcactgaaattaatcgaatgctaagaggtcatgtc

SEQ ID NO: 26853 - DNA, 201 bp, Homo sapiens
ttaatggttatgggccatgcattgaaggaccaccctgtctgtgctaatccctcactttgcactgaacatggaactaagctgagcctctccctggggatgaratgatagattttctatttactgccctttcttttgtcttttcatagcttttggtgcggacatgtcttggagcagttacagtcaattgtctctatgctcaat

SEQ ID NO: 26854 - DNA, 201 bp, Homo sapiens
ctgtagtggagtggatctggatttgaacggctagctgtaagatctgagatctggggcaagttgcttaacttttctaagactcaatttcctcttccttaaartgcagataacagtatctacatcgtattttgtttttggatgcagaataaaagagatgatgcttgtcaaccacctaccccacagtgcatggggcattgtgaa

SEQ ID NO: 26855 - DNA, 201 bp, Homo sapiens
aatatctgattgtgttacttccttgctgaaaacccttcagtgggtttcagggcccggggcccccagaacaagattctgagtcctgcaagcttgcaagtcckccatgctctgcctcctggctacctctctcttttctttgcctttctctttaggaggccagaaccccggtctgttttctttcctgcaatatccctgtggcca

SEQ ID NO: 26856 - DNA, 201 bp, Homo sapiens
gcaatgctcaactgtttcagtcaaataccttaaaaatgagcattcctgggttgggtgacggaatattgacaaattacagctttgtcagaactgctactaastctaggcggaccttgctatgtactttattcccttataaagtttgtgagtggcagagacaggcctagaagtcaagccttcttggacactgctcagtgctgt

SEQ ID NO: 26857 - DNA, 201 bp, Homo sapiens
gctgatggtgagagagagacagatttgctctagccatccctgagatattgagaaataccatatcctgatcatttcatcagaaaacttgccttcaaattctrgcactgctacttaatagctgtgtaacttcaggaaaatgtcttaggttctctgtgtctgtttcctcacttataaatagggataacaataatgcctacttca

SEQ ID NO: 26858 - DNA, 201 bp, Homo sapiens
acggcatccaccatgacctcaatgggcagactctcctcagcagctgggcaggcactgtcctcctggcactccactgagtactcatactccttgttgtcccytctgactctctctgcagagagtgtagcagctccgcacgtcaccccttgggggtcagaagagctgaagtcaaagacagaaattagcctgtgttacacattg

SEQ ID NO: 26859 - DNA, 201 bp, Homo sapiens
tatctgccttacatttgactgaggattaaatgaaaaaaaaaaaaagcacgtaaagtacttagcacagtgtctgccacacagtaaattcggtgttagttatygttacttatagactgaggagtcagccaactgtacagagaaactctcttaacaattttccatggatatttaaggatttcgttccctctgttttaaatcacc

SEQ ID NO: 26860 - DNA, 201 bp, Homo sapiens
aagacctctgctttaatggttatgggccatgcattgaaggaccaccctgtctgtgctaatccctcactttgcactgaacatggaactaagctgagcctctscctggggatgagatgatagattttctatttactgccctttcttttgtcttttcatagcttttggtgcggacatgtcttggagcagttacagtcaattgtc

SEQ ID NO: 26861 - DNA, 201 bp, Homo sapiens
gcctaaagatgaatttctcagaatgtatccctgttgttaagtgatacatggatgtcattgttattatcatcattcatcttctcactttatggtgggcctcygtaaaactgaccaaggaatatactgcacctgaatcacttcttaccttttctctcttgctcttgccctggacctgaacgcagaatgtcagggagaagtagg

SEQ ID NO: 26862 - DNA, 201 bp, Homo sapiens
ttggttatgtcatttcctagctgggtgaccttggtaaagtcacttaacctctctgagtcttcaatcacttgtgaaatgatgataatactactggctaccarccatccttttcttggggttgggctactgtccaatgagcacgtagtgagggcagtgctgctaacacctacacaaaattcctgcatcagctacagctttact

SEQ ID NO: 26863 - DNA, 201 bp, Homo sapiens
gtatcacctacatttgaaaccacagagcactgtccaggagaggtgatggtggtgggtctcctcctttggctctctggcccatcagctgatactagggagcrctatccctcagcccacatttctcagcatggtaagtctgagagtcttgatgattaaaacacatttttgtgtgtgcaatttcataggttttctaaactcttg

SEQ ID NO: 26864 - DNA, 201 bp, Homo sapiens
tcaggactaattctgagtgccaagatcaatgaccaacatcagaggtagtggagtggttaggtgcatggcctttctgtctggcagattgagtttatgtcttsgttatgtcatttcctagctgggtgaccttggtaaagtcacttaacctctctgagtcttcaatcacttgtgaaatgatgataatactactggctaccaacc

SEQ ID NO: 26865 - DNA, 201 bp, Homo sapiens
caacagcagggaaaacagctgcaggaggaaagctgaagaggagcatcaagaacctggcacttagcctcactgcatcgtctgccctcctaagtcacacctcrgagagtttctcacactgattttctggaatttctgtggtttaccaaatcagaagtcactaaggggtcaaatatgccaggaccaaggttcctgagctcgcta

SEQ ID NO: 26866 - DNA, 201 bp, Homo sapiens
ctgtgtgcccagcacttcctctgcatgcctcagatgcatttgacaatctcaggtgaactgcacttcagggtcaagggaaccccggccatggttctaagaarcaactcccattttagtatcacctacatttgaaaccacagagcactgtccaggagaggtgatggtggtgggtctcctcctttggctctctggcccatcagc

SEQ ID NO: 26867 - DNA, 201 bp, Homo sapiens
tcacttataaatagggataacaataatgcctacttcatagaattatagttcaaggtaaaaatcacgttaaactcttagcaagtctttagcacataggaagyactcaatatcacctattagtcatacagatcttaaatagggaaagtacttgccaagatgtaaaataatatttaggtaaatatctattccaggatagcctcc

SEQ ID NO: 26868 - DNA, 201 bp, Homo sapiens
tgtttcctcacttataaatagggataacaataatgcctacttcatagaattatagttcaaggtaaaaatcacgttaaactcttagcaagtctttagcacawaggaagcactcaatatcacctattagtcatacagatcttaaatagggaaagtacttgccaagatgtaaaataatatttaggtaaatatctattccaggat

SEQ ID NO: 26869 - DNA, 201 bp, Homo sapiens
tttctagcacaattgccttgcctcaagaccccatggccactcacccagtcctgagctgatggtgagagagagacagatttgctctagccatccctgagatwttgagaaataccatatcctgatcatttcatcagaaaacttgccttcaaattctggcactgctacttaatagctgtgtaacttcaggaaaatgtcttaggt

SEQ ID NO: 26870 - DNA, 201 bp, Homo sapiens
ccctaaattgctttatcaacaccatctccaggaagtcttcacagacatgggaactagcatcttgttctcctggatcttctcaacaggtttgcattgtcagrtttccatgtaagtatctcttgcgttcccatccatcacaagtgtatgatggcactggtatcagaacactgcattcttcctgattgtcataaaactgatgta

SEQ ID NO: 26871 - DNA, 201 bp, Homo sapiens
accctgtagggggacaaacacttgttattaacaaccatatgctgtcaagtgtgggcttataacacgggaccatatgctccaaaggttggcaaagaatgacrgaagccacccaccattcctccaggccaggagcagagtggcatagggctccaggggacactgaaaatcaggaatgtaaacaaacacccctattataattac

SEQ ID NO: 26872 - DNA, 201 bp, Homo sapiens
atgcactgaaattaatcgaatgctaagaggtcatgtcgcaaaagcactgggcatggtgggagccagaacatctcacctctgccccaggctggccagaaatytggggaaaggtcccagttctcagtgcttatgaaatgtgattagttatttattttttaaaaatctggttagtgttgttcattaaatgtccgttaagtactt

SEQ ID NO: 26873 - DNA, 201 bp, Homo sapiens
ttcatggagccatattttctggtcataattgtgtatcaggttcattcatgctaatgagaaagggattccagattttctttgcatctgtctgcttctcacakggctgttaagaagccacctgccattctgacaatttcatgtccttagccataactacttgtcctctctcttgaatcttaagatctttttgccttccagaca

SEQ ID NO: 26874 - DNA, 201 bp, Homo sapiens
tgtcattttctctctaatttttggctttgaaaatttatctgtctatctgtctatctatctatctatctatctatctatctatctatctatctatctatctttattcttgatggtactttaaaaaagtaactcatgcctctagtttaaaataaactatgctgggcatggtggctcacacctgtaatcccagagctttgggag

SEQ ID NO: 26875 - DNA, 201 bp, Homo sapiens
gttcaaagactactctctcccatatagagaacctagtggttctaaaatttgagtgactgtcaggataacctggaagcactgctacaacagacggctgagtmccacccccagagtgtctgattcagcaggcatgagggcctgagaatatgcatttctagaaagtttccaggggaagcagatgctgctggcgctaagaccaca

SEQ ID NO: 26876 - DNA, 201 bp, Homo sapiens
ctgtcattttctctctaatttttggctttgaaaatttatctgtctatctgtctatctatctatctatctatctatctatctatctatctatctatctatctttattcttgatggtactttaaaaaagtaactcatgcctctagtttaaaataaactatgctgggcatggtggctcacacctgtaatcccagagctttggga

SEQ ID NO: 26877 - DNA, 201 bp, Homo sapiens
tctcaaggcatgagaccctgcttgggctcaaggtcatggaaaagagaaacaaagagttttatagctgccatcgactcattgactggaaggctgcctttaayagtaacctttgattatttagcagattggaaacaccttaatataccaaaaactgcaaacagcacaagactctttgccaaaggtctgggggagagaaacttc

SEQ ID NO: 26878 - DNA, 201 bp, Homo sapiens
cctgtcattttctctctaatttttggctttgaaaatttatctgtctatctgtctatctatctatctatctatctatctatctatctatctatctatctatctttattcttgatggtactttaaaaaagtaactcatgcctctagtttaaaataaactatgctgggcatggtggctcacacctgtaatcccagagctttggg

SEQ ID NO: 26879 - DNA, 201 bp, Homo sapiens
tgtatgttggtcgtgggaaggaggaagctcaccgaacactgtggcttacccaagatttgtccctcgactttccctcttcaccaaaccccagagccactggmggaatgttcagttccttggaatcccacatgcccgggttagctccttttgcaagcagcctgatggatagaagtgaagggatggtgctccttatgaaaggag

SEQ ID NO: 26880 - DNA, 201 bp, Homo sapiens
agacggagtcttgctgttgttggcccgggctagagtgcaatggcatgatcttggctcatggcaacctctgcctcccgggttccagcaattctcctgcctcrgcctcccgagtagctgagtttacaggcacctgccaccatgcccggctaatttttgtattttttattagagacagggtttcaccatgttggctaggctggt

SEQ ID NO: 26881 - DNA, 201 bp, Homo sapiens
cctcggagagtttctcacactgattttctggaatttctgtggtttaccaaatcagaagtcactaaggggtcaaatatgccaggaccaaggttcctgagctygctaacaatcccagggttggaagggatctgccatatacccctggctcaggcctttgcctttacttaagagagtgtctaaatctctcaaattctcatggag

SEQ ID NO: 26882 - DNA, 201 bp, Homo sapiens
tgtgtgctggagcacccagaactgaaggacttgggttagggacaggaacggtaatacagaggcgaactttcaggttctggcaacgacctggtcaccagccmttgctgtaggggtttagcttctcttgttttccaagttcaaagactactctctcccatatagagaacctagtggttctaaaatttgagtgactgtcaggat

SEQ ID NO: 26883 - DNA, 201 bp, Homo sapiens
tcactactgaatttcattatcccagtgggcatttttggcctgctcaactggactgactgcagagcaagtgttccaccttgaccttgattttgccatttgcrtatggaaaccttttttttttttttcctttctaaattcaactctttggtaatcccagtgaaagaaatgggtgtgtgggcaactggaaggaagtgggtgtgt

SEQ ID NO: 26884 - DNA, 201 bp, Homo sapiens
acagacctagttagaccatagtccatatttcaaatataattacatgtgctcatagctgagaaccttctcctgggatggatgcatttcaccaggtcactgcygaaatgttgtacttttatggatggtgatgaggaagcatctgttttaggtgtggtatttcctggaggcagaaaactgcttgagttagctcattcagttttt

SEQ ID NO: 26885 - DNA, 201 bp, Homo sapiens
attagtagcatgaaggaatgtacggaaatcatacaatttcagattccagtaaactaaactctaagaggttacccacattccatctagtatcttgcaattcyttgtttgaaaaagtgggtcatcacctggggtttagtaatccctttgttaaaatgacattgttgttgcacacaattttacctgggcaagtaaaaaaacctt

SEQ ID NO: 26886 - DNA, 201 bp, Homo sapiens
aggtgacccagcttaaagtcacataaccagtcattgacagacctaggacttgaacccaagtcaatgtgagtctgaatcctatgcttcctccaaagtgcttkgtcagaggtaagtcatcacagtgccaactgagggggcagtatcatgtggtggaatgagaaacgaacacagttgttatactttgcaaatcctctactttgg

SEQ ID NO: 26887 - DNA, 201 bp, Homo sapiens
aataacagtaatatactaataaatacataaattacttaaatatttaaatagcatgaaggcccatggcaacttgagagctggaaaatctatacataaattakctgattgtttcaatgagcatttagcatctaactatacaaatacagcaaagatatcattgtgatcctaaaaaaacgttttaaagcaaatcagatagaaatt

SEQ ID NO: 26888 - DNA, 201 bp, Homo sapiens
ttacatttgactgaggattaaatgaaaaaaaaaaaaagcacgtaaagtacttagcacagtgtctgccacacagtaaattcggtgttagttatcgttacttrtagactgaggagtcagccaactgtacagagaaactctcttaacaattttccatggatatttaaggatttcgttccctctgttttaaatcaccagtggaga

SEQ ID NO: 26889 - DNA, 201 bp, Homo sapiens
atctcaaaggcttgttgggaaaggcaatgagataacatattatagaaggcaaccaataacatattaacttgaacctagaggaagaggtaagggaacaattyggtatctgtgttttatatatcatggatagtcaagaaagtcattctaggcagtagggaaatgtgcacagaggtactgcaattacatgcgcctgtaaaaccc

SEQ ID NO: 26890 - DNA, 201 bp, Homo sapiens
cagtttcatagagaatacggcagggcacaatattcagcagagtaacatagtggttaaaagctcagggtgtcgagaacaacgaaccaagactgtcatcctgkctccactaaccagctgggggatttggaacaaggtatttcattatcatgagcctcagtttcctcatctgtaaaatgataataataacagtatctgccttac

SEQ ID NO: 26891 - DNA, 201 bp, Homo sapiens
ccctgtcattttctctctaatttttggctttgaaaatttatctgtctatctgtctatctatctatctatctatctatctatctatctatctatctatctayctttattcttgatggtactttaaaaaagtaactcatgcctctagtttaaaataaactatgctgggcatggtggctcacacctgtaatcccagagctttgg

SEQ ID NO: 26892 - DNA, 201 bp, Homo sapiens
cacaatttcagtttcatagagaatacggcagggcacaatattcagcagagtaacatagtggttaaaagctcagggtgtcgagaacaacgaaccaagactgkcatcctgtctccactaaccagctgggggatttggaacaaggtatttcattatcatgagcctcagtttcctcatctgtaaaatgataataataacagtatc

SEQ ID NO: 26893 - DNA, 201 bp, Homo sapiens
gccctgtcattttctctctaatttttggctttgaaaatttatctgtctatctgtctatctatctatctatctatctatctatctatctatctatctatctatctttattcttgatggtactttaaaaaagtaactcatgcctctagtttaaaataaactatgctgggcatggtggctcacacctgtaatcccagagctttg

SEQ ID NO: 26894 - DNA, 201 bp, Homo sapiens
ttctggaaatctgctctggaaaataactatgacccctggtcttctgccctgtcattttctctctaatttttggctttgaaaatttatctgtctatctgtcbatctatctatctatctatctatctatctatctatctatctatctatctttattcttgatggtactttaaaaaagtaactcatgcctctagtttaaaataa

SEQ ID NO: 26895 - DNA, 201 bp, Homo sapiens
gtctgtttcctcacttataaatagggataacaataatgcctacttcatagaattatagttcaaggtaaaaatcacgttaaactcttagcaagtctttagcmcataggaagcactcaatatcacctattagtcatacagatcttaaatagggaaagtacttgccaagatgtaaaataatatttaggtaaatatctattccag

SEQ ID NO: 26896 - DNA, 201 bp, Homo sapiens
tgcagtgctcttgcccataatcccagcactttgggaggccaagacgggaggactgcttgagcctaggaggtcaagaccaacctgagcaacatagtgagaamccccagctctacaaaacaaaaatactgtactcccattaaaaaaggtttaaaaaggtgaaattaatgttaataatactttaaacttgatatatattatttt

SEQ ID NO: 26897 - DNA, 201 bp, Homo sapiens
tagagcacaaaatttaacagtgtatatatgagtggtatgagggcgaattatttttgttttctttttaatgatctcttaaattttccagaatgtctacaatsaccttgtattacttttctaatcagaaaaaaagaaaaaagttaccgaagaagagataagtgaagcacacacaaaaggcagaatatatagtgcatcaagaat

SEQ ID NO: 26898 - DNA, 201 bp, Homo sapiens
tagtttgagggccaggcagacttctagaactgtgtgactctgggtgagtcacttggcccctttaagccccacactcctgatctataaaatgggcatgctaytgtggtaaggagttagtgacataattcacgtgaagtgtcatggtgcctagatgaagtcaggacccactatttgctcccctccttccacagcatttactac

SEQ ID NO: 26899 - DNA, 201 bp, Homo sapiens
tgaagcagtccagtagagcttagtcttcccatttaatgaagaagcgtactgaggccaacgatctaagcatggtcacagcaagtcagaagtacaagggctayagctcagaccttttgtctcttgggctttgcaagggatgcctaatgctagtgtctaaactggcctttgaggaatggcttagtatagtatttcagagtgtgt

SEQ ID NO: 26900 - DNA, 201 bp, Homo sapiens
cttaacaattttccatggatatttaaggatttcgttccctctgttttaaatcaccagtggagattttcattctctctgcattattattattattattattwtttttagctatcttacactcttatgaagcagtccagtagagcttagtcttcccatttaatgaagaagcgtactgaggccaacgatctaagcatggtcaca

SEQ ID NO: 26901 - DNA, 201 bp, Homo sapiens
gaaatatattcaaaactacatgttgaaaaaattaagcagagagaagtagatgggaaggtactaaaaatgcaagacttagcaaaagaaggctgtatatatayagcaaaaggggacacacaacaacccctcccactagcaaatgcagcccaatcattgcccctaaaacagaaccttgcacttgcttctcctttcctgaaatgc

SEQ ID NO: 26902 - DNA, 201 bp, Homo sapiens
ggttgacaagaattgcatgctgggttctggacaggaatatagttataattaagcattgattaggttgcacgttggcccacttccttgttgctcaaagtcaygtagcactagatcctgaccatttgcatctgcattattcctgtagataggatttctgacattagggtcataagattgtgtaggaattgatttgtatcccta

SEQ ID NO: 26903 - DNA, 201 bp, Homo sapiens
ttgactgaggattaaatgaaaaaaaaaaaaagcacgtaaagtacttagcacagtgtctgccacacagtaaattcggtgttagttatcgttacttatagacygaggagtcagccaactgtacagagaaactctcttaacaattttccatggatatttaaggatttcgttccctctgttttaaatcaccagtggagattttca

SEQ ID NO: 26904 - DNA, 201 bp, Homo sapiens
cctgggcccgcacgctaatgctggcatttttgcggcagatgaacgtggctgaggtcttgtccgtgaagactctatctttctgcaaaagagaaggaaagctrtgaagaccccttggcaacatagtcacagggtaagctgagcctgtttctgcaatgcatactctcccaaaacaagcccatcttggtcttagggcactgtgct

SEQ ID NO: 26905 - DNA, 201 bp, Homo sapiens
gaacccaaatttaatcatgaagaaacatgagacaaatgtcacttgagggacattttacaaaataactgctcctagctcttcaaatgtgtcaaggtaatgcrtggttaaggaagaccaaggaaccttcccagacttgaggtgattatagggcatgaaactaaattcagtgttgtgtcttagattgtatcctggacgaggaaa

SEQ ID NO: 26906 - DNA, 201 bp, Homo sapiens
caactgaggctcggaagccctagaagatgtttgctcaacagcagggaaaacagctgcaggaggaaagctgaagaggagcatcaagaacctggcacttagcytcactgcatcgtctgccctcctaagtcacacctcggagagtttctcacactgattttctggaatttctgtggtttaccaaatcagaagtcactaaggggt

SEQ ID NO: 26907 - DNA, 201 bp, Homo sapiens
ggtacagccaacggtcagaatgcacatttactgagtgtgagatactagaaggatgggcagaactccttattttaccattaactattctattagtctactawtaatttttactgatcattgggataataaaaagtatctcttgaatcatgaaagatattttaaacaaccaaaatagtaatactagctgacatttactttcac

SEQ ID NO: 26908 - DNA, 201 bp, Homo sapiens
accaaggccaggtaaaaaccaccccttcatcccctaaaccttgcaagaagcacagggtccagaattatgcttctttcaggttctaaatagcacaataaaaytaataacaataagcttttagttattagatcaggtacattttactttacagtaagcttttacttattggatcaggtacattttaaagcaatttttgaacat

SEQ ID NO: 26909 - DNA, 201 bp, Homo sapiens
gagaaacttccagcacaatttcagtttcatagagaatacggcagggcacaatattcagcagagtaacatagtggttaaaagctcagggtgtcgagaacaaygaaccaagactgtcatcctgtctccactaaccagctgggggatttggaacaaggtatttcattatcatgagcctcagtttcctcatctgtaaaatgataa

SEQ ID NO: 26910 - DNA, 201 bp, Homo sapiens
catgatcttggctcatggcaacctctgcctcccgggttccagcaattctcctgcctcagcctcccgagtagctgagtttacaggcacctgccaccatgccyggctaatttttgtattttttattagagacagggtttcaccatgttggctaggctggtctcgaactcctgacctcaggtgatccacccacctcggcctccc

SEQ ID NO: 26911 - DNA, 201 bp, Homo sapiens
aataacaataagcttttagttattagatcaggtacattttactttacagtaagcttttacttattggatcaggtacattttaaagcaatttttgaacattrtttcatttgatcctcacaaccacactatgaggtaggtactatcattccatttgaaggatgagaaaactgaggctcgaagatgttaaataacttgttcaag

SEQ ID NO: 26912 - DNA, 201 bp, Homo sapiens
atgaggaagcatctgttttaggtgtggtatttcctggaggcagaaaactgcttgagttagctcattcagtttttcagtggcctttctaatgcatgttttgytttgttttaatgctttgcaaaagattcctagagtggaaattgcctttgcaaaaattataacagtgagaaaattatgacagtgaaagggatctgccctaac

SEQ ID NO: 26913 - DNA, 201 bp, Homo sapiens
ctgttgcaactcccctgtctggataattcagctctgtctgagcagtggttcaaggagaacccgctgggtggttagaatcagcttcactttcaaagggcctrcaatgtcctcattaatttcttccccttcaaagatgactgtgatcacatgttttcaatatcgtccttccacccttggcccatgataagggcagagggtggt

SEQ ID NO: 26914 - DNA, 201 bp, Homo sapiens
tacccacattccatctagtatcttgcaattccttgtttgaaaaagtgggtcatcacctggggtttagtaatccctttgttaaaatgacattgttgttgcayacaattttacctgggcaagtaaaaaaacctttttttcccccttctcacagatttaaaaactctttaggaagcaataatagcttttcattttttaactggg

SEQ ID NO: 26915 - DNA, 201 bp, Homo sapiens
ctcagatccacatgtattgcaggatctgagagatgctcagaatcctcatcactgaacaatcagatgggaccgcacagtgagaagacctctgctttaatggytatgggccatgcattgaaggaccaccctgtctgtgctaatccctcactttgcactgaacatggaactaagctgagcctctccctggggatgagatgatag

SEQ ID NO: 26916 - DNA, 201 bp, Homo sapiens
tactacaggggagaacactggtggacagacacaacctaaacaaagtgatcaaagttaatttcaccagtactgagagacattgatttcatgcccctcctgaygagattcactgagaagggcacagtattactgctgtaggatgcttgacaaaaatgtagaacccaaatttaatcatgaagaaacatgagacaaatgtcactt

SEQ ID NO: 26917 - DNA, 201 bp, Homo sapiens
ggacagtagaggtgctttcctgtgggatccccaatctctccccgccttcaggtgagtcctgctgatgctcaggctgcccttggaacagggaccttggccayagtttccttatctgtaataatgggatgagaattcctcctgcacagggttgttagggacctcgtgaggcagcttctatggctgcctttggtgcttagtttt

SEQ ID NO: 26918 - DNA, 201 bp, Homo sapiens
gtatttcattatcatgagcctcagtttcctcatctgtaaaatgataataataacagtatctgccttacatttgactgaggattaaatgaaaaaaaaaaaaagcacgtaaagtacttagcacagtgtctgccacacagtaaattcggtgttagttatcgttacttatagactgaggagtcagccaactgtacagagaaactc

SEQ ID NO: 26919 - DNA, 201 bp, Homo sapiens
ggcatccccattgcctaaacacaaccttgtttacaacaagtatttggcaaatgcttgctgagatgatctcaaggcatgagaccctgcttgggctcaaggtcatggaaaagagaaacaaagagttttatagctgccatcgactcattgactggaaggctgcctttaatagtaacctttgattatttagcagattggaaacac

SEQ ID NO: 26920 - DNA, 201 bp, Homo sapiens
aggaaagtggttctgaaaccactgttttaaactatatgaagggcaatgctcaactgtttcagtcaaataccttaaaaatgagcattcctgggttgggtgayggaatattgacaaattacagctttgtcagaactgctactaactctaggcggaccttgctatgtactttattcccttataaagtttgtgagtggcagagac

SEQ ID NO: 26921 - DNA, 201 bp, Homo sapiens
ggcctgagaatatgcatttctagaaagtttccaggggaagcagatgctgctggcgctaagaccacaccttgagaaccactggtttaacccatgttcagggyccagaacccctgaaaatcaaagtgttcattgggaaaagaccacaacatattgatatatccaccatgaaatagtaaaatgcataattttatgttaaataag

SEQ ID NO: 26922 - DNA, 201 bp, Homo sapiens
cttgcatgaaggacaaagggaccccacgttacacactcctacttcctggagtatgctaagggcttcccaacactggtgccaacatcagcatgccaatgacrcttgggtgggcatctcttttttaagttttgtttgttacctttaattagaaaagggagttattattaaagaataaaaagatatagtcacagatggcatggg

SEQ ID NO: 26923 - DNA, 201 bp, Homo sapiens
tggagcacccagaactgaaggacttgggttagggacaggaacggtaatacagaggcgaactttcaggttctggcaacgacctggtcaccagcccttgctgyaggggtttagcttctcttgttttccaagttcaaagactactctctcccatatagagaacctagtggttctaaaatttgagtgactgtcaggataacctgg

SEQ ID NO: 26924 - DNA, 201 bp, Homo sapiens
aggtttaaaaaggtgaaattaatgttaataatactttaaacttgatatatattattttatcatacaatcaacttaaaaattattattattattattatttytgagacggagtcttgctgttgttggcccgggctagagtgcaatggcatgatcttggctcatggcaacctctgcctcccgggttccagcaattctcctgcc

SEQ ID NO: 26925 - DNA, 201 bp, Homo sapiens
ggttttctgacaccaaaccccaggtttcttcctgtgctggcatgggtcctttttctgacttggccagcagcctctcatagatgggggtctgattaaatagytctggtgatgggtggagtgatggttgcacaacaatatgaatgtatttaatgccactgaactgtacacctgaaaatggttaaaatgttacattttatgtta

SEQ ID NO: 26926 - DNA, 201 bp, Homo sapiens
gcttcccaacactggtgccaacatcagcatgccaatgacgcttgggtgggcatctcttttttaagttttgtttgttacctttaattagaaaagggagttaytattaaagaataaaaagatatagtcacagatggcatgggtggcacatgcaaagatccctagtttgagggccaggcagacttctagaactgtgtgactctg

SEQ ID NO: 26927 - DNA, 201 bp, Homo sapiens
tatgaaacattccatacatcctggcagacaaacgttaaataacagtaatatactaataaatacataaattacttaaatatttaaatagcatgaaggcccakggcaacttgagagctggaaaatctatacataaattagctgattgtttcaatgagcatttagcatctaactatacaaatacagcaaagatatcattgtgat

SEQ ID NO: 26928 - DNA, 201 bp, Homo sapiens
aattacttaaatatttaaatagcatgaaggcccatggcaacttgagagctggaaaatctatacataaattagctgattgtttcaatgagcatttagcatckaactatacaaatacagcaaagatatcattgtgatcctaaaaaaacgttttaaagcaaatcagatagaaattatctttttgggtctattccgttgtgtctt

SEQ ID NO: 26929 - DNA, 201 bp, Homo sapiens
ctcttatttttaagatgagaaacttaaagcttagagaaggaatgtgactttctggatcaacatctagcagttgtttatttagtgcttactacataaagagmactgggctagaagcagttgagagagaaaaaaagggcttacctggatcccgcttcctaggagcaaatacttttactcaataaatatttattaagtcagtgt

SEQ ID NO: 26930 - DNA, 201 bp, Homo sapiens
atcagatagaaattatctttttgggtctattccgttgtgtctttaaacattttgcttaatatcttccacttttcctccaaattttcatcctggatcagaayctggaagagaatgccaaaagttgatgtggggtgacattgtaacagcaatgtctcttcttatttctcacaacatatgatcctgggcaactgggtttcaggg

SEQ ID NO: 26931 - DNA, 201 bp, Homo sapiens
ggaaaatgtcttaggttctctgtgtctgtttcctcacttataaatagggataacaataatgcctacttcatagaattatagttcaaggtaaaaatcacgtyaaactcttagcaagtctttagcacataggaagcactcaatatcacctattagtcatacagatcttaaatagggaaagtacttgccaagatgtaaaataat

SEQ ID NO: 26932 - DNA, 201 bp, Homo sapiens
ggctttgtccagtgattttaaaagtggggtgaaaggagtctggggcggtacaaaagggcctctggaaccttgcaacaggcaaaggaattctgctgtaaggygaggaagctgggaagccaatatcttagcctctataagtgtagacattctgtttagtaaaataattttataatatctggaacagccaggagctatccattt

SEQ ID NO: 26933 - DNA, 201 bp, Homo sapiens
atgctttattttcctaataaggctttggagttcagtggttttggcttatgatctcacttgcacctttgatcagctgtgagtccactggatagttacttaasttctgtgagcacctggctggcaaatgtgaggcacctctgccgcaggtgctcacgctggtgcctcgggaaggcagtcattatcaatggccacatctcagat

SEQ ID NO: 26934 - DNA, 201 bp, Homo sapiens
cccctctgactctctctgcagagagtgtagcagctccgcacgtcaccccttgggggtcagaagagctgaagtcaaagacagaaattagcctgtgttacacmttggggagagagttcctagtgattgtagccagtaaggcaggtaaggcctcaactgttgtctgaggacacagtttctccaactgggctgatttctacccag

SEQ ID NO: 26935 - DNA, 201 bp, Homo sapiens
aatgaacagaaaatggaagtgaggtacagagacagcttggttggttacagctaggtgtttgctttatttgagcatggtctgatcagttggtaacctataaytgattggaggtttgctgctgtgttttactgctgaggctcagctattagctacaaaaatatattaaattagctttcagtcagttcataccaagttaggttg

SEQ ID NO: 26936 - DNA, 201 bp, Homo sapiens
gtctgcttcagggcccctaagatctacgccctggagctcttgtttttatttttgactcaaggtgcaatttcagcaagtcatttgtagctttgaattctccktttatccctttctttggtgctatgaggcttcaggaagcatggccaggcaatttggatgagtgggttcaaacacagcagagactattctcagttcccaata

SEQ ID NO: 26937 - DNA, 201 bp, Homo sapiens
gctgaggtcttgtccgtgaagactctatctttctgcaaaagagaaggaaagctgtgaagaccccttggcaacatagtcacagggtaagctgagcctgtttytgcaatgcatactctcccaaaacaagcccatcttggtcttagggcactgtgcttgcaattcacaggggtgtgcatagaacttgcaccacctactggcaga

SEQ ID NO: 26938 - DNA, 201 bp, Homo sapiens
tggaggttaacatcaattaacatcaataagagacttgatgttaattcattacactcaccatgacttggcttttcaatttgttgttgttgttgtttttaacycttatgagcgaaagagaaaattgatactatccaagggtatagaattacctttctggtcctttaaaatatcagtggaccaaattccatcttcctttttgtg

SEQ ID NO: 26939 - DNA, 201 bp, Homo sapiens
gagttaggatttcaggtgtgagccactgtgcctggccagaactttttcaatgaatattcaagataattgtatacacattttatatatatatatatatatayacacacacacacacacacatatgtatacacacattatatatataatccatgttatatacatctctacattatatatatccactatatatattttacttat

SEQ ID NO: 26940 - DNA, 201 bp, Homo sapiens
agctgccatcgactcattgactggaaggctgcctttaatagtaacctttgattatttagcagattggaaacaccttaatataccaaaaactgcaaacagcmcaagactctttgccaaaggtctgggggagagaaacttccagcacaatttcagtttcatagagaatacggcagggcacaatattcagcagagtaacatagt

SEQ ID NO: 26941 - DNA, 201 bp, Homo sapiens
ctcacctaactgcagggcacagatgcccattcgctccaagatgagctatagtagcggtcctgggcccgcacgctaatgctggcatttttgcggcagatgamcgtggctgaggtcttgtccgtgaagactctatctttctgcaaaagagaaggaaagctgtgaagaccccttggcaacatagtcacagggtaagctgagcct

SEQ ID NO: 26942 - DNA, 201 bp, Homo sapiens
ttctggcaactgggtgctggccactccatccccctttcctctccaacacagcccccaatcatatccctgcatccaggtgcactgagagtgcaggcctgggstggcctttgagggcctgctcacctaactgcagggcacagatgcccattcgctccaagatgagctatagtagcggtcctgggcccgcacgctaatgctggc

SEQ ID NO: 26943 - DNA, 201 bp, Homo sapiens
acaaatatgagtcatatatttaattaaaaaatttaatgtagccaggtgcagtgctcttgcccataatcccagcactttgggaggccaagacgggaggactrcttgagcctaggaggtcaagaccaacctgagcaacatagtgagaacccccagctctacaaaacaaaaatactgtactcccattaaaaaaggtttaaaaag

SEQ ID NO: 26944 - DNA, 201 bp, Homo sapiens
ggctcggaagccctagaagatgtttgctcaacagcagggaaaacagctgcaggaggaaagctgaagaggagcatcaagaacctggcacttagcctcactgyatcgtctgccctcctaagtcacacctcggagagtttctcacactgattttctggaatttctgtggtttaccaaatcagaagtcactaaggggtcaaatat

SEQ ID NO: 26945 - DNA, 201 bp, Homo sapiens
atgggcgaggaaggtctgctgacaaacagagggcgtgctgagctgcaaggttaatgtgtctgatgattaagctgtgacatggaggcaaccccctaaaaacsaaaaataacttaaagaatttttttggccacaaaaacttattttctcctagaagaatgctttgatcatctagtacacatttcaaataaaggagaagccatg

SEQ ID NO: 26946 - DNA, 201 bp, Homo sapiens
tgcaaaagattcctagagtggaaattgcctttgcaaaaattataacagtgagaaaattatgacagtgaaagggatctgccctaactgtccccatcttgctyctgggtatctttgctcattcctgggtgtgggccaagctaactttgggagaaatttagttaaattataatggcccttcccagatactaaattgcccttgta

SEQ ID NO: 26947 - DNA, 201 bp, Homo sapiens
ctgtatgcccagcaaagggctggtggctggaaggacatagctttctgagttaggactggaaggcttctgtacatgtccaaagtcaaccttcatattcatgrggagggaaaaagaagtgggctttaggattgcctctccttgttggcctgctctgagaaaaacaatcgcgggagggtgaggcgggagaatcgcttgagccca

SEQ ID NO: 26948 - DNA, 201 bp, Homo sapiens
gagatgtccatggctgtaccaggttagagttttatttcatgattcttgggataccagtagagtcgattccaggatagagggtggaataagtgagagcttcyacccctaaaaaaggcacaatgcagttcagtgcccttgcaaaggatccttccttgtcagattacagggacatcccctgagctcaggaagacactgactttg

SEQ ID NO: 26949 - DNA, 201 bp, Homo sapiens
agtgctaggattacaggcatgagccaccgcgcccagcctgttttcttttttatataaaaacaaaatgatgccatgcttgttgccctgtagatttttcttttaatttacaataacatgaagatttttttcagttcaactctacatcactctttttaatgcctgtataaattccacataatggccagatcataatgtcataag

SEQ ID NO: 26950 - DNA, 201 bp, Homo sapiens; identical to SEQ ID NO: 3845

SEQ ID NO: 26951 - DNA, 201 bp, Homo sapiens; identical to SEQ ID NO: 3586

SEQ ID NO: 26952 - DNA, 201 bp, Homo sapiens; identical to SEQ ID NO: 3674

SEQ ID NO: 26953 - DNA, 201 bp, Homo sapiens; identical to SEQ ID NO: 3593

SEQ ID NO: 26954 - DNA, 201 bp, Homo sapiens; identical to SEQ ID NO: 3814

SEQ ID NO: 26955 - DNA, 201 bp, Homo sapiens; identical to SEQ ID NO: 3758

SEQ ID NO: 26956 - DNA, 201 bp, Homo sapiens; identical to SEQ ID NO: 3804

SEQ ID NO: 26957 - DNA, 201 bp, Homo sapiens
atgatagttaacggggcatggtggcacacacctttaaccccaacatttcgggaggccgaggcaggaggattgcttcagtctagtagtttgagaccagcttrtgcatcttttgtagagactttgtaaaattagctatgcatggtgatgcatgtctgtagtttcagctactcaagaaactgaggtgggaggatcacttaagcc

SEQ ID NO: 26958 - DNA, 201 bp, Homo sapiens
ttgtagtttcttttgaagatttattttttactaccattttttttgttggacttttaaaatgagtttggaagtgttccctctccttcaatttttttttttttggaagagtttgaaaacaattatcattgattcttctttaaaagtttggtagaattctccaggaaagatatctggttttgggcttttgttgttgttgttgtt

SEQ ID NO: 26959 - DNA, 201 bp, Homo sapiens
tctgttggctgcataaatgtcttcttttgagaagtgtctgttcatatcctttgcccactttttgatagggttttttgtttttttcttgtaaatgtgtttargttctttgtagattctggatattagccctttgtcagatgggtagattgcaaaaattttctcccattctgtaggttgcctgttcactctgattgtagtttc

SEQ ID NO: 26960 - DNA, 201 bp, Homo sapiens; identical to SEQ ID NO: 3852

SEQ ID NO: 26961 - DNA, 201 bp, Homo sapiens
ttatattagagatttggggatgaaattaccctaaattttcaggtgggggctaattccagtgaaaagtttgttttgttttttaaataagagatagaagatgagaaaacagacacagaggaaaaggccatgcgaagatggagacagagattggagtgatgtcaacagccaccaacacctggaaaaggcagaaacagattctcc

SEQ ID NO: 26962 - DNA, 201 bp, Homo sapiens; identical to SEQ ID NO: 3853

SEQ ID NO: 26963 - DNA, 201 bp, Homo sapiens; identical to SEQ ID NO: 3878

SEQ ID NO: 26964 - DNA, 201 bp, Homo sapiens
gcaagttccccctggccctgggcaggcccagagatgctacttgggagtcagggattggagtcaaaatacttagaaatttgcctgatattttatttgactayggctaagctggcactcaaaccacaagacaaagtctttcccattcttccctcccctttccacaggcagaggtgcctctccctgtggccagtactaccactg

SEQ ID NO: 26965 - DNA, 201 bp, Homo sapiens
gatttatggagggttgaacttaagtatgattacctaggatatccagtggaagaaatttctttcttcttttttttttttttttttttttgaggcggagtctygctctctagcaggctggagtgcagtggcacaatctcggctcactgcaagctccatctcccgggttcatgacattcttctgtctcagcctcccgagtagct

SEQ ID NO: 26966 - DNA, 201 bp, Homo sapiens
gaggagcccaaaaagtgtcccggtgtcaatcttaatttccagtttaatggaatcgtggttgtgtcttctggtggcagcattcctccctctggaactaagamctctaggccagcagaacataatgtcacagggacagtaagcaaaaattttactagtgggtcactaggggtgatggtaagtggtgccacttccacttccacc

SEQ ID NO: 26967 - DNA, 201 bp, Homo sapiens
ggtttataaaatgatttgcaaacattttcttttgttccctctaacaccgctagtagataatggaaactcctttgatttggtctgtagataattttatgctktgttatatggaatatccacagcattttgtgaacttgaaaacaaaggaggaagcagcttgcatatgcatatcttgctagcagattggtagaatagagagag

SEQ ID NO: 26968 - DNA, 201 bp, Homo sapiens
gaaagacactgttaccctccctctcctgactcaaagcttggggcaatttgatacataaactatttctgtcttacactgacctgtatattaatatgtacttyggtacacaaacatttaatctagggagaaaattatttcagaaagtgcttgcttttgggagattttgccaggagagtgcatgactttaataaaggcaaattt

SEQ ID NO: 26969 - DNA, 201 bp, Homo sapiens
taaaatttccattggcttttttatattttcctttttttctgataagatttcctttattttcattccttaccaataagttttcctttatcttattgaatatdtagtagctactttaaagtcattgtccgctaattcccacatctgtgtcatctcaggtttggattcttgatggtctttacctttaggaatgcatcacatttt

SEQ ID NO: 26970 - DNA, 201 bp, Homo sapiens; identical to SEQ ID NO: 3841

SEQ ID NO: 26971 - DNA, 201 bp, Homo sapiens; identical to SEQ ID NO: 3759

SEQ ID NO: 26972 - DNA, 201 bp, Homo sapiens; identical to SEQ ID NO: 3846

SEQ ID NO: 26973 - DNA, 201 bp, Homo sapiens; identical to SEQ ID NO: 3761

SEQ ID NO: 26974 - DNA, 201 bp, Homo sapiens; identical to SEQ ID NO: 3762

SEQ ID NO: 26975 - DNA, 201 bp, Homo sapiens
gagaatctgacttcgacttgttttatacttatccctatacaatgcttcttcaatatcttttgccacttttcatttggacttcctactacctgttagtacaratgttacttgctcattttatgagttcacctaatgcttataactccctattgattatgcttttccaccttcagtctcaaaaattagatcattacacctgtt

SEQ ID NO: 26976 - DNA, 201 bp, Homo sapiens; identical to SEQ ID NO: 3612

SEQ ID NO: 26977 - DNA, 201 bp, Homo sapiens
tgctgcgtcaaatggtatttctgcctctagatctttgaggaatcgccacacagtctcccacaatgagtgaactaatttacaaccccaccaacagggtaaargtgttcctttttctccatctgttgtttctggacttgttaataattgccattctgactggtgtgagaagatatttcattgtggttttgatttgcatttacc

SEQ ID NO: 26978 - DNA, 201 bp, Homo sapiens
tttgttttatgagtaacacggagatagcatacaaacattccattgactaatacagaaaaaactcaaaagttttaattagatatgtttaaatagagatgagraaagtcaaaactttaactcttaaaagttatttttatcagtttggaaatatataaactcctccctatataaaatacaccagcacaaatttctctagtaagg

SEQ ID NO: 26979 - DNA, 201 bp, Homo sapiens
actgaaattgaaagagaggtttattaataggtaggttattctcaaattattttttaaatatatctttgcattagatttacatttttcttttgactatggaytatataaagattctcagtacgtgtctctgatattgcgattcaatatccatatgatttttgttgtaatatgacaatgtttggtcttgataagaaaaaagca

SEQ ID NO: 26980 - DNA, 201 bp, Homo sapiens
gtagctatgggattctgattatgaattggactgaaattgaaagagaggtttattaataggtaggttattctcaaattattttttaaatatatctttgcatwagatttacatttttcttttgactatggattatataaagattctcagtacgtgtctctgatattgcgattcaatatccatatgatttttgttgtaatatga

SEQ ID NO: 26981 - DNA, 201 bp, Homo sapiens
tttaaagtttgcttcacttttagactaagagaatattcatgtatcttatgttgctctatcttttgtaataaagtaattactacattgaactgttaaaatayataaactgcttgttaaaaataaaatagctccatgttttgtctatatcttaattatcaagtaaacaaggatttaggctttctgattatgaagacatactgg

SEQ ID NO: 26982 - DNA, 201 bp, Homo sapiens; identical to SEQ ID NO: 3736

SEQ ID NO: 26983 - DNA, 201 bp, Homo sapiens
gcatgcttttttttttgagctttttgcatcagtacccaataatgtttctggttgttggcttcttctggtccaagtctggaatagataaggcaaaaacccasagatttcaccactgtgtcagtcttcaaaatttataacactttaaagtattttgcacttccaaatgttgacaatgttctctaaatctgctaacctttagaa

SEQ ID NO: 26984 - DNA, 201 bp, Homo sapiens
gaatcatgggggcaattatcccatacagttctcatgatagtgagtgagttctcattaggtctgatggttttataagggctttttcctttttgcttggcacytctccttcctgccaccatgtgaagaaagacgtgtttgctttcccttccaccatgattctaagtttcttgaggcctccccagccatactgaactgtgagtc

SEQ ID NO: 26985 - DNA, 201 bp, Homo sapiens; identical to SEQ ID NO: 3623

SEQ ID NO: 26986 - DNA, 201 bp, Homo sapiens
aaactgaagttttaagcaaacgtaatttaaaatacatttattggctgggggcggtggcttatgcctgtaatcccaaaactttgggaggccgaggagggcgkatcacctgagatcaggagtttgagactagcctggacaacatggtgaaaccccgtctcaactaaaaatacaaaaacattggccaggcctggtggtgggcgc

SEQ ID NO: 26987 - DNA, 201 bp, Homo sapiens
ctcaatgtttccactcctctggaaatacattaatagttaagtatgaattatgtgattcataattagacttttccagttttgtggttttgtggttaaaacgstaagatttttgttgctaatttttgaaccaaatcagcagtaagttatgatatccacacttgtaattttgttttgttattaggtgcagtagtagaattattt

SEQ ID NO: 26988 - DNA, 201 bp, Homo sapiens; identical to SEQ ID NO: 3854

SEQ ID NO: 26989 - DNA, 201 bp, Homo sapiens; identical to SEQ ID NO: 3811

SEQ ID NO: 26990 - DNA, 201 bp, Homo sapiens; identical to SEQ ID NO: 3634

SEQ ID NO: 26991 - DNA, 201 bp, Homo sapiens
caagaatatacaatggaaaaaggacagcctcttcaataaatggtggtgggacaatttgatatccagatgcagaaaaatgaaactagacccttatctcacastgtatacaaaagtcaactcaaaatggattaaagacttaaacatagacctgaaattgtaaaactaacaaagaaaacacagtgggaaagatgaaagatcaat

SEQ ID NO: 26992 - DNA, 201 bp, Homo sapiens; identical to SEQ ID NO: 3746

SEQ ID NO: 26993 - DNA, 201 bp, Homo sapiens; identical to SEQ ID NO: 3760

SEQ ID NO: 26994 - DNA, 201 bp, Homo sapiens
gtactagtcttttctcacactgctataaaaacacctgagactggataatttagaaagaaaagaggtttaactggctcgcagttctgcaggctgtacaggargcatgatgctggccatctgcttgtcttctggggaggcctcaggaaacttacaatcatggtggaaggcaaaggggaatcaagctcatcttacatggcatga

SEQ ID NO: 26995 - DNA, 201 bp, Homo sapiens
ctgttcactctgattgtagtttcttttgaagatttattttttactaccattttttttgttggacttttaaaatgagtttggaagtgttccctctccttcawtttttttttttttggaagagtttgaaaacaattatcattgattcttctttaaaagtttggtagaattctccaggaaagatatctggttttgggcttttgt

SEQ ID NO: 26996 - DNA, 201 bp, Homo sapiens
gttggccaggctggtctcgaactcctgacctcaggtgatccgcctgcctcggcctcccaacatgctgggattacaggcgtgagccactgtgcctggccaawgtactgcattttatttatccagtgcaccattgatgggcatttaggattattctctgtctttgctattgtgaatagtgccatgatgaacatacacatacat

SEQ ID NO: 26997 - DNA, 201 bp, Homo sapiens
ctaaaacatagctgatagctccatagcagtgttttgtaactgctttggagtttttgcttacacaaaaactgtaagcctctctcataacatctatttatacwgataggagatcatattgttggatataggacttgacaaccttttgttttgtgtttctattgataatattttacaaagaggaaagatgagtaatttttatgt

SEQ ID NO: 26998 - DNA, 201 bp, Homo sapiens
ttaccttcctgtaagtcaatatagaagtatgaaaaaataacaataaaaggaaattctctataccatttcttcaagagagaaaaaatagcctcttcctgctrcaaaatcaaggaagatttgattactgatgattgtgtaaaggttgagaaatatactgggcagcacgttttatagcagttttgcaaaacccacggaaatatc

SEQ ID NO: 26999 - DNA, 201 bp, Homo sapiens
gttcagttcctgcagctgctctcatgggttggtgttgaatgcctgcagcttttccaggcacagtgtgcaagctgcttagaactgctggtggattcccattytggggtcttgagggtggtggccctcttctcacagccattgcactccagcctgggcaacaagagtgaaactccatctcaaaaaaaaaaaaagaaagaaaga

SEQ ID NO: 27000 - DNA, 201 bp, Homo sapiens
tgtccttaagctggagaaactagggattatctgtcagagttttaacttcctcatgctgtgtcacaaccttgatcagctattaggccaaagcaacaaaaacrggaaactcacttcatgctgattcttttctccaagttttagtgccctgctctcccaaaactgcctccttttgtttattccccagagtccttagatatttgc

SEQ ID NO: 27001 - DNA, 201 bp, Homo sapiens
tcctcatgctgtgtcacaaccttgatcagctattaggccaaagcaacaaaaacaggaaactcacttcatgctgattcttttctccaagttttagtgccctsctctcccaaaactgcctccttttgtttattccccagagtccttagatatttgctttatgtattttggccagaagctatagttgttatctctggaagggtc

SEQ ID NO: 27002 - DNA, 201 bp, Homo sapiens
gattcttttctccaagttttagtgccctgctctcccaaaactgcctccttttgtttattccccagagtccttagatatttgctttatgtattttggccagragctatagttgttatctctggaagggtctgtttattatgagcttactttgatctactagactgagcttcagacattgtgttttgaaatttttgcttaaca

SEQ ID NO: 27003 - DNA, 201 bp, Homo sapiens; identical to SEQ ID NO: 3737

SEQ ID NO: 27004 - DNA, 201 bp, Homo sapiens
taaaacactgtaattagtcaatttaagtaaaataaattcaaggaagtggtctgaatttctcagtgagcatttagatatttatgggagtcatataaaataawttataaatgtgactgagggctttttattaaggaaaatgaaatattgctatggacatgattctgtgtgtttctttactacactatgaactaaaaattttgg

SEQ ID NO: 27005 - DNA, 201 bp, Homo sapiens; identical to SEQ ID NO: 3738

SEQ ID NO: 27006 - DNA, 201 bp, Homo sapiens
agaataaacacacagacatatacatgcacacactttcagaaatgcacttaaatattcaatcatggagtaaaaattaattatgaaatatctagacaatgaayattatgtagtttttattaagaaagaagcagaattatatatactgacatgaaaggatgttcattatatatgttaagtaaaaactaagttcatcatatatgt

SEQ ID NO: 27007 - DNA, 201 bp, Homo sapiens; identical to SEQ ID NO: 3739

SEQ ID NO: 27008 - DNA, 201 bp, Homo sapiens
acaccattctgttttaatttttatatcttaaagttatcattccagtgtctttggtttactgggtttataaaagaattgaccagtagctatataatagatayagaaaagtctgcctgggtgtggtggctcatacttgtaataatattatattataattgttctattttattattagttattgttgctaatcttttactgtac

SEQ ID NO: 27009 - DNA, 201 bp, Homo sapiens; identical to SEQ ID NO: 3740

SEQ ID NO: 27010 - DNA, 201 bp, Homo sapiens
tatatcttaaagttatcattccagtgtctttggtttactgggtttataaaagaattgaccagtagctatataatagatatagaaaagtctgcctgggtgtrgtggctcatacttgtaataatattatattataattgttctattttattattagttattgttgctaatcttttactgtacctaatttatacattaagcttt

SEQ ID NO: 27011 - DNA, 201 bp, Homo sapiens
ttcagaaatcttccaggtagtccctcccatcacagatccagagacctaggaggagagaatgagtttgaggaccaggcccaaggccctgctggcatgtgaarccttgggacactgctcccaggatcctgactgccttggctccagctggtacaggtacaggccacaggtacagctctggccactgcgctggagagtgcaggc

SEQ ID NO: 27012 - DNA, 201 bp, Homo sapiens; identical to SEQ ID NO: 3632

SEQ ID NO: 27013 - DNA, 201 bp, Homo sapiens; identical to SEQ ID NO: 3834

SEQ ID NO: 27014 - DNA, 201 bp, Homo sapiens
tcaagcatgagcagaatgtgttagctgcagccctggcttcatagttgtaagcaatttctgagggtggaagaagagatgggaaagaatttatgatctaaccrttatctgggtctgtgtgtttattcagctctgtgcacctagaggaggctggcattctacgggctggtccaggagggcctgatcagcagtggccaacagtat

SEQ ID NO: 27015 - DNA, 201 bp, Homo sapiens; identical to SEQ ID NO: 3717

SEQ ID NO: 27016 - DNA, 201 bp, Homo sapiens
taaaaataagtaaagcctgccctgtacagaaaatctaataaagcaaatttgttggtgatgttccaagaaggttcaccagcttgggctttcaaccagcattracccaatcttgtgtccagagctgttgctgtaggtggtatcatgtatcaagctgaatagtgaggtgacattccccaagtcttctctcttgtcttttttgac

SEQ ID NO: 27017 - DNA, 201 bp, Homo sapiens; identical to SEQ ID NO: 3720

SEQ ID NO: 27018 - DNA, 201 bp, Homo sapiens
aaaagactctgaaagtacagtcgttcatctttatattaagataatattttctgataggaaacgactatttaacatggattatcactggcgaggagagctgrgatcctggcgactactactcttgcttctgctcctcgcagcctggaaggtggggagcggccagctccactactccgtccccgaggaggccaaacacggcac

SEQ ID NO: 27019 - DNA, 201 bp, Homo sapiens
tttgaaataaaacttttcatctgattaatagtttgtaatggtttgtaattcttacttacatgatggccacatgatgtcgctctttaccgcaaattctttcrtaatcagcaaaaggaagtcattccttttcgcactggaaagacgctccactctctttcactctttggatgcacaacaatggccacacatcgagattgaaat

SEQ ID NO: 27020 - DNA, 201 bp, Homo sapiens
gggttattacgttttcattttccttttgtgctttatgaataatattttctcttaccgcattttctcaaatatgtatcagaatatttcatttttgtctacawtccatttatgcttgaatatttctagtgatacctttgtaatataatttattccaggagttttaaaatttttttatcctacccagtgtgtcagcctttgatt

SEQ ID NO: 27021 - DNA, 201 bp, Homo sapiens; identical to SEQ ID NO: 3722

SEQ ID NO: 27022 - DNA, 201 bp, Homo sapiens; identical to SEQ ID NO: 3723

SEQ ID NO: 27023 - DNA, 201 bp, Homo sapiens; identical to SEQ ID NO: 3725

SEQ ID NO: 27024 - DNA, 201 bp, Homo sapiens; identical to SEQ ID NO: 3726

SEQ ID NO: 27025 - DNA, 201 bp, Homo sapiens; identical to SEQ ID NO: 3727

SEQ ID NO: 27026 - DNA, 201 bp, Homo sapiens
aacaattacaaaatcacctaactacactgtcttgcagctgcctttctttttttgtcttgtccacgtgagtatattgggagactttgtttaatgtctccacraattctagatagactgttcctgcagcatttctttttttaaattttgttttgataagcatttattttggcaatgattctagtaaatgaaactaaagtgccc

SEQ ID NO: 27027 - DNA, 201 bp, Homo sapiens
tgtttgatatctaaagggccatgctacatatagactgccaactaaggttttatctgatgataataaattgttgtatttcatgacgacagcaacaacaacartaatgtacttaactagtcactgtgcaaattgctttacatacattttctcatgtaatcataataataaccgtatgagttttgcttactattgttttcctta

SEQ ID NO: 27028 - DNA, 201 bp, Homo sapiens
ggctaagtaacatgtccatagccaaacagttagtcactggcaggagtgtgactgactccaaagtctatattcctaattactgtgttctactttttaatagrgagctcttgaaggtccaaggaaaggaatgcataatggtgtggtcaaggcattagtgttaatatttgtagaaagggtaattaacaacagtctgagcaatca

SEQ ID NO: 27029 - DNA, 201 bp, Homo sapiens; identical to SEQ ID NO: 3687

SEQ ID NO: 27030 - DNA, 201 bp, Homo sapiens
cctgattgagagtagatttttctcatggacatttcagatagatttattcatttatcagaagtgcctggtgttagtcaatgctgagaaaccatgggaggcakattgtagattaagaaaaatgggggaataaatcaaagagtttccagaagtctttagatcgtagcatttgaaagcacgtaaaagggtttagctttaaataag

SEQ ID NO: 27031 - DNA, 201 bp, Homo sapiens
cttagttccttggcatataagcaccatcagttcctttctggccttccagggtcagaactctgggctccaaggaggtacaactgtgagtgagagagtagctrctgtgctagcaggctatgcatccagaactaaacagacctagcactttctgttgtactggaacccattaggtatgttctaaagttatgtttattttacttt

SEQ ID NO: 27032 - DNA, 201 bp, Homo sapiens
ctaggagggtctttaagagtatcacactgtgcctgctgagaatcatcgaattaacaagacctggcttcaaatttaatagataaataaaggtaagtatcctrcataaatacgatgatagtaaaagcaagaatattgtaagaggtgctagaaaggtacatcatagtgttattggaattggaaaaaaatctttgcctttttccc

SEQ ID NO: 27033 - DNA, 201 bp, Homo sapiens
ttaggtctctgtaatacttaaaacctgtgttgaaaaaattatttctactgaagtaaaagttgcccctatggcgaaactaaggaccacactcaatcaatcastggtacaatgtgtaccacagtagtacaaaatgtattcctattctccgaaacgactgaaataataaataaaaccaagtagtttacagtagagtgtgtgggg

SEQ ID NO: 27034 - DNA, 201 bp, Homo sapiens
tccaatagatgtccactgttaaaacaggaatcacaatattttagtgtatgtcatgaattagcacaattgatagtgaattagtataaaagttctaaggaaakatttagataaaatataaggactttgaggagtgaccgaaggatattacaattgaaactagaaattttgggaaagttcaaacgacatgcaaggaaaagaaga

SEQ ID NO: 27035 - DNA, 201 bp, Homo sapiens; identical to SEQ ID NO: 3718

SEQ ID NO: 27036 - DNA, 201 bp, Homo sapiens; identical to SEQ ID NO: 3774

SEQ ID NO: 27037 - DNA, 201 bp, Homo sapiens; identical to SEQ ID NO: 3776

SEQ ID NO: 27038 - DNA, 201 bp, Homo sapiens; identical to SEQ ID NO: 3770

SEQ ID NO: 27039 - DNA, 201 bp, Homo sapiens; identical to SEQ ID NO: 3771

SEQ ID NO: 27040 - DNA, 201 bp, Homo sapiens; identical to SEQ ID NO: 3772

SEQ ID NO: 27041 - DNA, 201 bp, Homo sapiens
gtatctttataataggatgatttatattcctttgggtacatacccagtaatgggattgctgcgtcaaatggtatttctgcctctagatctttgaggaatckccacacagtctcccacaatgagtgaactaatttacaaccccaccaacagggtaaaggtgttcctttttctccatctgttgtttctggacttgttaataat

SEQ ID NO: 27042 - DNA, 201 bp, Homo sapiens; identical to SEQ ID NO: 3684

SEQ ID NO: 27043 - DNA, 201 bp, Homo sapiens; identical to SEQ ID NO: 3582

SEQ ID NO: 27044 - DNA, 201 bp, Homo sapiens; identical to SEQ ID NO: 3583

SEQ ID NO: 27045 - DNA, 201 bp, Homo sapiens
ctctggaaccccattaactttctcaagtataattaacaatttcttcttctggagtcccacaatactttacatatactttagttattgcatgtattaagttrgtttctagttgcttgagtgtatgtccaactagactgtgagcacactgagggaaggaatttggcttggaaagtaaaattggctcccagtgttttatctaaa

SEQ ID NO: 27046 - DNA, 201 bp, Homo sapiens
tcgaaaagggaagtaaatgcagcattttttttaattgttaaataaagggctgggcttggaaatgttcttaggtaatcctggtggatttggtatatcatgtytgagaaaatgtggagagtgaagggcaggtttaaaatttgtctcatgttagtttctgaagggagatagcctggcattgcacagtgcctcacatttctatcg

SEQ ID NO: 27047 - DNA, 201 bp, Homo sapiens; identical to SEQ ID NO: 3741

SEQ ID NO: 27048 - DNA, 201 bp, Homo sapiens
cacaagtgatgccaggagatggggcaacacatattgcctgccttgtatgcatctagcgtctgtgtctaagtgaaagcagattatatccagaacttccctgraaaatagaagaaagagcctgattggtgtgtatgtgtgtgttaggggttgaggggtgggtaatgttcctgccagtattcgtaaatcccacctgcttttcct

SEQ ID NO: 27049 - DNA, 201 bp, Homo sapiens
ctgaaattgtctatctccaagggcgtgggctaggcaaaggatgggagaagtcagtcctgaagatggtaatacttaaaggaaataagggggacaaaggatgyttgtgctactattgaaacaggaaattgagagctctgtagaagtcagactcaagaggcataataatagaaagttagggtatgaaaaggtgacttttaagaa

SEQ ID NO: 27050 - DNA, 201 bp, Homo sapiens
agggtctttcatggcaatattttaaaagaaactctgcccagatttcaaaggaacgtgaaaattttatcttcagaggcagtcagctttgcagttgaaaaggycattgcctaatctggagaaacatattcagttcaagcactggctagagactagaggcccccaggaaagggccataagattggtcactgccaggaagcctgt

SEQ ID NO: 27051 - DNA, 201 bp, Homo sapiens
tgaatggatttcccattggtagttaaagttcttgctccattccaaatcttcatatagttaacacaactttcaacaggtttatctttcttcacaagatttcwtccacaaactagtaaggtatcatttgagggaccttagagacttgtggtcagtgaaggatgcaaatagatgaaaatgagaaatagtttatattgctagcca

SEQ ID NO: 27052 - DNA, 201 bp, Homo sapiens; identical to SEQ ID NO: 3594

SEQ ID NO: 27053 - DNA, 201 bp, Homo sapiens; identical to SEQ ID NO: 3595

SEQ ID NO: 27054 - DNA, 201 bp, Homo sapiens
cagtgggctcatgcctgtaatcttagcattttgggaggctaaagtggacagattgcctgagctcaggagttcgagaccagcctgggcaacatgatggaacmccatctctactaaaatacaaaaaaaaaaaaaaaaaaaaaaattagccaggcatggtggcatgtgcctgtagtcccagctactcaggaggctgaggcacga

SEQ ID NO: 27055 - DNA, 201 bp, Homo sapiens
agaaggattgttgagctgaaggcaagttaaaagaagcagatacaggctgggtgcagtgggctcatgcctgtaatcttagcattttgggaggctaaagtggrcagattgcctgagctcaggagttcgagaccagcctgggcaacatgatggaacaccatctctactaaaatacaaaaaaaaaaaaaaaaaaaaaaattagcc

SEQ ID NO: 27056 - DNA, 201 bp, Homo sapiens; identical to SEQ ID NO: 3682

SEQ ID NO: 27057 - DNA, 201 bp, Homo sapiens
gtgaataaacagatacattttttgcctttgtgaatcttacagtggtagagaataataggccaagggggtgctgcttggctaggaatgtcatagaatgcctktccaaggaggttacatttaatacagacttgaagagtgaggagtcatgctaagaatggatgagaggctcacgcctgtaatcccagcactttgggaggccga

SEQ ID NO: 27058 - DNA, 201 bp, Homo sapiens
caaattctttcgtaatcagcaaaaggaagtcattccttttcgcactggaaagacgctccactctctttcactctttggatgcacaacaatggccacacatmgagattgaaatgaagggataaaaacattcctataaattcgaaggcaagttttgctgactagaaaaacaagccaataatttgaaatggtgtgcccgaatgg

SEQ ID NO: 27059 - DNA, 201 bp, Homo sapiens
aggatagttacatttaatctataaatcaaccctatggggcgggcactcttatgaactttttttacggatgaaaactgaggcccagagatatgaaataattwgccaaacatcaccataatttacatgatgtagccaggtttaagcctactattctgattacagagcctaagatcctacagagaacagggagtatatttttac

SEQ ID NO: 27060 - DNA, 201 bp, Homo sapiens
tctcccttcccagcctcaaaggaatacagtgagtagattttccttagacagaaaggaaaagaaccttccatttttggctgtgccaagaagctcagaaaggygataatataaaaaatatatagttaattgggaattgaatttacaaaatacattgtgtggtgatgcaatagaaagctcataattggaacgagattgagatgg

SEQ ID NO: 27061 - DNA, 201 bp, Homo sapiens
gtgagtagattttccttagacagaaaggaaaagaaccttccatttttggctgtgccaagaagctcagaaaggtgataatataaaaaatatatagttaattsggaattgaatttacaaaatacattgtgtggtgatgcaatagaaagctcataattggaacgagattgagatggtatattcccggagaggaagtctgggatc

SEQ ID NO: 27062 - DNA, 201 bp, Homo sapiens
taactctttgagaacagggtacttgtcctaatattattcatatttatatccctaattcctaatttaatgtctaatttattgtaaataagttttttttttttgagacagagttttgctcttgttgcccaggctggagtgcaatggcacaatctcagctcactgcaacctctgcctcctgggttcaagtgattctcctgcctc

SEQ ID NO: 27063 - DNA, 201 bp, Homo sapiens; identical to SEQ ID NO: 3820

SEQ ID NO: 27064 - DNA, 201 bp, Homo sapiens
gcctgcctttcatctttccttttttttaaaaaaagaagtgattacagtagaaacctacctttctgcactttttggttttccactttaagttatattatatwgtgtgtgtgtgtgtgtgtgtgtgtgtgtgtgtgtgtgtgtgtgtgtgtgtgtttgacagagttttactctgtcgccctctctggagtgcagtggtgcaat

SEQ ID NO: 27065 - DNA, 201 bp, Homo sapiens
ccaatttgctgttggtatctatgttttctaaacaatacaatatacattcttatacatatttcttatgcatgcttgctagtatttatacaggataaatttcmagaagtagaattacagaatcataggatataaaaatatcaaattggcaaattggcattcacgtacctgtggttggactgcacttgttacatacttccctct

SEQ ID NO: 27066 - DNA, 201 bp, Homo sapiens; identical to SEQ ID NO: 3821

SEQ ID NO: 27067 - DNA, 201 bp, Homo sapiens
agcctgcctttcatctttccttttttttaaaaaaagaagtgattacagtagaaacctacctttctgcactttttggttttccactttaagttatattatakagtgtgtgtgtgtgtgtgtgtgtgtgtgtgtgtgtgtgtgtgtgtgtgtgtgtttgacagagttttactctgtcgccctctctggagtgcagtggtgcaa

SEQ ID NO: 27068 - DNA, 201 bp, Homo sapiens
aatgggacccagggtctgtctatgttataatcaattcaaaccctaggtaaataaggtaagctaggctgcctttcttgagacagtccccagattgttttcayagggcccaaacactctcagcaaccatgaacagtggatgttgtgggacctcagaagatggaattggaaattcaggggactaagtcagagattatttgacat

SEQ ID NO: 27069 - DNA, 201 bp, Homo sapiens; identical to SEQ ID NO: 3824

SEQ ID NO: 27070 - DNA, 201 bp, Homo sapiens
ttccttccttccttcctttctttctttctttcttcctttttctttcattctttttcttttttctttcttctttcaagacacgctctcactccatcacccargctgctgaaatgcagtggtgggattatagcccactgcaacctgaaagtcctgggctcacaggatcctcccatctcagcctctggagtagctgggaataca

SEQ ID NO: 27071 - DNA, 201 bp, Homo sapiens
cttaccctttcatccacatgatgtcgctggacaccggaaggtttttctcccttcccagcctcaaaggaatacagtgagtagattttccttagacagaaagraaaagaaccttccatttttggctgtgccaagaagctcagaaaggtgataatataaaaaatatatagttaattgggaattgaatttacaaaatacattgtg

SEQ ID NO: 27072 - DNA, 201 bp, Homo sapiens
ctcatgccttgctatttaacaaactattttctaggagtcagcatgtataggtgaaagtgacaattagaaacatagaaagaagggatgcagatatggatttktaaatacctcaataaaagtcttattcaaaacttggaagtgagtgagaacaattaaaggaaaggatatgggacagggttgaagttgagagagaaaaacgag

SEQ ID NO: 27073 - DNA, 201 bp, Homo sapiens
cctgaaactcctgggctcaagtgatcctcctatctcagccgcccaagtagctggactacatgcacatgctaattaaagttttttttttttttttttttttwttttctgtagagataggggtcttgctactttgcccaggctggtcttgaactcctggtttgaagccatgctcccgtctcagcctcccgaagtactaagatt

SEQ ID NO: 27074 - DNA, 201 bp, Homo sapiens
aatgtgtgaaaagttagatatcaatgaatgaatattcttaaatgtataaactttaatcttgctggatataggataaaatttacattaaaacactgtaatthgtcaatttaagtaaaataaattcaaggaagtggtctgaatttctcagtgagcatttagatatttatgggagtcatataaaataatttataaatgtgactg

SEQ ID NO: 27075 - DNA, 201 bp, Homo sapiens
ttctaattcaattgtaatatgtttgtaatcattactaaaagaaaatactggattacacactctccaatgagatttgaaatgtcctgggtcttaaaaggacrtaaaattgaaaatgattgcatttaacaaattgcagacagatatagattgcattttgaaaatcaacgaatggatctaaaatttacattggccacatgatgt

SEQ ID NO: 27076 - DNA, 201 bp, Homo sapiens; identical to SEQ ID NO: 3607

SEQ ID NO: 27077 - DNA, 201 bp, Homo sapiens
tgtgtaaaaggttttttcccaaaaataatcagatgcctttcaaattattaagtaacatgcagctaagggcccatttttactggcaactttaagggcattcrttgattctaatcagccaggatttgctatttatggatgttgcacaattcaactaaaagtcacatttgtccaaaaaatatacgagttgaagcaattcattag

SEQ ID NO: 27078 - DNA, 201 bp, Homo sapiens; identical to SEQ ID NO: 3812

SEQ ID NO: 27079 - DNA, 201 bp, Homo sapiens; identical to SEQ ID NO: 3862

SEQ ID NO: 27080 - DNA, 201 bp, Homo sapiens
caccgagtttaatgtaaagttccccagttgctgtgctttacttcctccaagtgcgcagactccccacgttgctcagctgctgctgggggatatgggagggstgatggtggtgatcccagagtgtctctccaaccctcttcaatgcctcttttagtgatacgttgttaaatctaggtactacgattgctcacctgatgtttg

SEQ ID NO: 27081 - DNA, 201 bp, Homo sapiens
gtctctccaaccctcttcaatgcctcttttagtgatacgttgttaaatctaggtactacgattgctcacctgatgtttggtttttgtaatgacgcttttcygtgtgcagatagttgttacaatttggtgttcatgtggcgggggaggggggggatggtgtaggcttctgttccactatcttgctccacctcaatagtctga

SEQ ID NO: 27082 - DNA, 201 bp, Homo sapiens
aaatctaggtactacgattgctcacctgatgtttggtttttgtaatgacgcttttccgtgtgcagatagttgttacaatttggtgttcatgtggcgggggrggggggggatggtgtaggcttctgttccactatcttgctccacctcaatagtctgatgtgcagaagctctttagtttaattaggccccatttgccaattt

SEQ ID NO: 27083 - DNA, 201 bp, Homo sapiens; identical to SEQ ID NO: 3690

SEQ ID NO: 27084 - DNA, 201 bp, Homo sapiens
ggcttctgttccactatcttgctccacctcaatagtctgatgtgcagaagctctttagtttaattaggccccatttgccaatttttgtttttgctgcaagwgcgtttggcatctttgtcatgaaatctttgccagggcctatgcccagaatgatattttctaggttttattctacggtttgtatagttttaggttttacat

SEQ ID NO: 27085 - DNA, 201 bp, Homo sapiens
caatattatcttttttttttttttttgagacagattctcattctgttgcccaggctggagtaaagtggtacaatcttggctcactgcaatctctgcctccygggttcaagcgattctcccacctcagcctcccgagtagcggggattacaggcacccaccaccacacccggctaatttttatacttttagtagagacaggg

SEQ ID NO: 27086 - DNA, 201 bp, Homo sapiens
ttaagtcatgagggcagagccctcatgaatgggattggtgcccttataaaagaggcccagagaggtgccttgcctctttcaccatgtgaggacacagcaaraatgtgacatccatgaaccaaaaagtggcccctccccagacactaaatctgctggtgcctgaatcatgaactttcaagcctctagaacagtgaaaaataa

SEQ ID NO: 27087 - DNA, 201 bp, Homo sapiens
gcgcatgtatacatatgtaacaaacctgcacgttgtgcacatgtaccctagaacttaaagtataataataataataataataataataataataataataaagcgagggtgggtatctagcctattcttatcctgcctcatggtgttttctaaatatttacagaaagaaaatttacagagtagtttcctggtcaaactcta

SEQ ID NO: 27088 - DNA, 201 bp, Homo sapiens
tggtgcctgaatcatgaactttcaagcctctagaacagtgaaaaataaatctctcttgtttattaactacacagcatatggcattttgttataatatcctkaacagactaagacagatatcgtttaggttagttggtttttagtgttgttcacatctttcatttcctagtgatcttctgcctagttgttgtccattattgg

SEQ ID NO: 27089 - DNA, 201 bp, Homo sapiens
ggcgcatgtatacatatgtaacaaacctgcacgttgtgcacatgtaccctagaacttaaagtataataataataataataataataataataataataataaagcgagggtgggtatctagcctattcttatcctgcctcatggtgttttctaaatatttacagaaagaaaatttacagagtagtttcctggtcaaactct

SEQ ID NO: 27090 - DNA, 201 bp, Homo sapiens
agctctattatgttatagtagagctcatactatattatggtttcaaaggtaataagaaaaatatcatcagatcatcattatggtagctattttaagggaayttaataaaaatttaacagttatcatcaaacactggccacctcaattttaaacagtaaacacacgaattactcccataaaaattataagcataacaggaca

SEQ ID NO: 27091 - DNA, 201 bp, Homo sapiens
tggcgcatgtatacatatgtaacaaacctgcacgttgtgcacatgtaccctagaacttaaagtataataataataataataataataataataataataataaagcgagggtgggtatctagcctattcttatcctgcctcatggtgttttctaaatatttacagaaagaaaatttacagagtagtttcctggtcaaactc

SEQ ID NO: 27092 - DNA, 201 bp, Homo sapiens
atatatacagtatatatataagattttagaaaggaggataaatatatattacatgataaaacttatagtcaatataattttacacttgtaaaatcccagaraaccaaaggaaaaaatagaactaaaaaagagttcaatgaaatgattagtttaaaaaaataaatataaaaaatgtaattttcccacataccttcaaaatgt

SEQ ID NO: 27093 - DNA, 201 bp, Homo sapiens
atggcgcatgtatacatatgtaacaaacctgcacgttgtgcacatgtaccctagaacttaaagtataataataataataataataataataataataatawtaaagcgagggtgggtatctagcctattcttatcctgcctcatggtgttttctaaatatttacagaaagaaaatttacagagtagtttcctggtcaaact

SEQ ID NO: 27094 - DNA, 201 bp, Homo sapiens; identical to SEQ ID NO: 3767

SEQ ID NO: 27095 - DNA, 201 bp, Homo sapiens
ctgcctagttgttgtccattattggaagtggagtattaaagtctccagttatgactattgaattgtctatttctcccttcatttctgccagtttttgcttcatgtgttttggggctctattattagatgcaagtatgtttttagttgctatatcttcctgattggtccttttgtcattataaaatgtccttcttgatttct

SEQ ID NO: 27096 - DNA, 201 bp, Homo sapiens
ctagggcctggaatgcgggcctcatgactctactcaatgccctatcctactgtggctgagctggtatccaagatgcaagacaaagtcctctttactctttkctctcctctccttaagcagaaggaaggagtgacttttgttgctgcaagcttcactgcctgggattaggggaggggtggcacaagcactcccttagctgcc

SEQ ID NO: 27097 - DNA, 201 bp, Homo sapiens
ctcatttcaacagtagacacctggcaaggctgtgcatgcacctttcattgcaggtcagccactggtatgataagaacttgtgtccaatttcccgcaatttyagctctttctctacaggagataagactctcactcagggcaatcttagcaggtttgaggttcagtatctgcttctgaagctaggaattagaatccctaagt

SEQ ID NO: 27098 - DNA, 201 bp, Homo sapiens
gtggaaaggctgatggcagtgtgggttggggaggacatgttgccactactggggatgagaaagctgtttcttctggcaaaaaaagtttcatcagaatttayaatctcagtgtccccagcttcatcagggtccttttacatatccccattccaagtttcaggatcccattcttttccaatcaatgccctcatttcaacagta

SEQ ID NO: 27099 - DNA, 201 bp, Homo sapiens
tgggtcatatggctcgagaaacagagcaacttgcacacagcctggacgtgttgtagagtcttctcctgttctgtactacattaaaaagtgagagccttttkggttactcgataaatgggctggagtaacatacccaaatgaggaatgtgttgcctccaaaatccaatagtcccaaataagcctctttcgtggttgtaggag

SEQ ID NO: 27100 - DNA, 201 bp, Homo sapiens
gagaaggaggtgtgtagaaattaaggaaggaaaatgaagcattccttgttttactattctaggcaataaggggaaaagtggcttgtaagttattcttcctsaagtaatgatgttaactgcaaataaaataaatttacatatgttaaaattttctgtacttaatattttcacaatataatagaatccagcatataagatatg

SEQ ID NO: 27101 - DNA, 201 bp, Homo sapiens
cccttttctaagagcaaagatggaaatgtggagagaggagaaaaatggttcccattacattattgtgttctggacttagagatattgttctgccccaggtytaagaatattgttccaagagttgggagcaggcagcagaggacagtactctttagatcacccagaggccaatctgtaaggattcaatcctggggcatggta

SEQ ID NO: 27102 - DNA, 201 bp, Homo sapiens
aattaaagctcataagaattaagtggctttcttacattcacacagctagtaaaaatgttttttgctcaccattgtattcccattgtcaagcaggatgcctrgcacacaatgatgctcaataaattttgttaaattcattaataaatgcagtggtaaaggcagtatttgaactcatgtctgcttgctgctgaactctataca

SEQ ID NO: 27103 - DNA, 201 bp, Homo sapiens
gagtgggtcgttgctgggtcaagttttataagtctttaaatcccatactgttgcctcctggactgtagaaatagtctcttagaacaagagaaaggaagacratagctaccatttattgagaactgtgataagcactttacatatgttgcatacttaactttgagagaagtacattattattcccatgtttcagataaaaaa

SEQ ID NO: 27104 - DNA, 201 bp, Homo sapiens
taagacatagtttggagtcattctcaaagtttcagtttatgactacatgaaaatttattttattttattgttattttttagagaccctttgttgcttagtytgcagtgatctgatcatagctcaccgaagcctgaaactcctgggctcaagtgatcctcctatctcagccgcccaagtagctggactacatgcacatgcta

SEQ ID NO: 27105 - DNA, 201 bp, Homo sapiens; identical to SEQ ID NO: 3816

SEQ ID NO: 27106 - DNA, 201 bp, Homo sapiens
cttagtacacaaatattgtggtacacaattattgcactaattcatgtattatatgctttttatgaggcttttctgctggggtaatagattcatcagctttytgtgatattaagtgtttttaaaataatattttatattagcatttgaattttgcatctctaaaaatgtaggataataattgtaagacatagtttggagtca

SEQ ID NO: 27107 - DNA, 201 bp, Homo sapiens; identical to SEQ ID NO: 3819

SEQ ID NO: 27108 - DNA, 201 bp, Homo sapiens
gacaacgtgagttttctaatattaacatccatctttccctcccaattttcaaatattaaatgtcacattcacccactttttttgtatttaaaaattatgtyttagtacacaaatattgtggtacacaattattgcactaattcatgtattatatgctttttatgaggcttttctgctggggtaatagattcatcagctttc

SEQ ID NO: 27109 - DNA, 201 bp, Homo sapiens; identical to SEQ ID NO: 3822

SEQ ID NO: 27110 - DNA, 201 bp, Homo sapiens
acagagggtgtgctctggggaagctccacccaaaacagacctcatggccttcagtccaagccttcctcagggtcccacctctacagacaacgtgagttttytaatattaacatccatctttccctcccaattttcaaatattaaatgtcacattcacccactttttttgtatttaaaaattatgtcttagtacacaaatat

SEQ ID NO: 27111 - DNA, 201 bp, Homo sapiens; identical to SEQ ID NO: 3825

SEQ ID NO: 27112 - DNA, 201 bp, Homo sapiens
tagtatgtcatatagacaatattaggattttgacttgttatgtaagtacaaaggtatgtattttacaatttttaataattgctttatcagtaatagcaacktgaagaaatgctatctagatgcttctaatttgaaaatagtgcaaagacgatttaccaaagtcgttctattatgcttttgatttctagaaagctgaaatat

SEQ ID NO: 27113 - DNA, 201 bp, Homo sapiens; identical to SEQ ID NO: 3827

SEQ ID NO: 27114 - DNA, 201 bp, Homo sapiens; identical to SEQ ID NO: 3835

SEQ ID NO: 27115 - DNA, 201 bp, Homo sapiens
ctctcagccaaagtgagtaatttttatttattctttccaaaatgtctttgtttttcattcctcaatgtttccactcctctggaaatacattaatagttaaktatgaattatgtgattcataattagacttttccagttttgtggttttgtggttaaaacgctaagatttttgttgctaatttttgaaccaaatcagcagta

SEQ ID NO: 27116 - DNA, 201 bp, Homo sapiens; identical to SEQ ID NO: 3836

SEQ ID NO: 27117 - DNA, 201 bp, Homo sapiens
cctcaatgtttccactcctctggaaatacattaatagttaagtatgaattatgtgattcataattagacttttccagttttgtggttttgtggttaaaacsctaagatttttgttgctaatttttgaaccaaatcagcagtaagttatgatatccacacttgtaattttgttttgttattaggtgcagtagtagaattatt

SEQ ID NO: 27118 - DNA, 201 bp, Homo sapiens
tgcagtttgtaaaagaagaaaaaatacctgttcaattggtttgatcatgacattcttcatgggtcagggaagttttaagtggttataaaatggggtaaatwggctttagaagagtttagaaatgatgtggattacttatagacaggacaaaatgaacatgcttgtttattaaaaaaagctattggaagcaggaaatattca

SEQ ID NO: 27119 - DNA, 201 bp, Homo sapiens
atattatgttgtgtgttttttaaccagagtaaaaaagggtaaaaaggtaatatattttagggcttaaaatagttatttttttccaagatgaaagctatgartaaacttaaaccagaaaatcgactagttttaaatctacagaataaacagtagagccttccttttagccacatgatgtcgctgtccaccatagagtgttct

SEQ ID NO: 27120 - DNA, 201 bp, Homo sapiens; identical to SEQ ID NO: 3849

SEQ ID NO: 27121 - DNA, 201 bp, Homo sapiens
aaatttaaaatgtcatagatattccttcttttttcttgcttagcatccactccccttgttgtttttttcttctggggtcttctagtagttttgtgaaagaytaggttgaaggttttgcaagaatgagtgcttggacatgtaaacgttaagggatatacagttccatagataggtgcaaagggtataattttagcaatgggt

SEQ ID NO: 27122 - DNA, 201 bp, Homo sapiens; identical to SEQ ID NO: 3850

SEQ ID NO: 27123 - DNA, 201 bp, Homo sapiens; identical to SEQ ID NO: 3851

SEQ ID NO: 27124 - DNA, 201 bp, Homo sapiens
aagctgatcttatagaagcagagagtataacagtgattaccagagatgggtagggcagtagtaaggaggagagattgaggagaggttggtcaatgggtacraagttacaattagataggaagaataagttctggtgttttattgaacagtagagtgtagttaagaataatgtatatttcaaaatattatagaatagaggat

SEQ ID NO: 27125 - DNA, 201 bp, Homo sapiens
caggcacagaaagacaaatactgcatgatctcattcatgtggaatgtaaaaaagctgatcttatagaagcagagagtataacagtgattaccagagatggrtagggcagtagtaaggaggagagattgaggagaggttggtcaatgggtacgaagttacaattagataggaagaataagttctggtgttttattgaacagt

SEQ ID NO: 27126 - DNA, 201 bp, Homo sapiens
ggcagcctcagggcgttgtcctagaaaacaccgtttaaggagagaagtgttagtgtctcggggcgtctcccaggctccgccctgcgcccgcagccagcgtkgtggtcgagaccccagcccgctgctactggagacagcacctctcgcgcccgggcgggcggcctcgtctctgcacccctaggcggcgctgcgctcctcaac

SEQ ID NO: 27127 - DNA, 201 bp, Homo sapiens; identical to SEQ ID NO: 3626

SEQ ID NO: 27128 - DNA, 201 bp, Homo sapiens; identical to SEQ ID NO: 3627

SEQ ID NO: 27129 - DNA, 201 bp, Homo sapiens
cttgaaaaaaacctcaaatttgctgaatgccattgtattaagagctaatctgtctggtccaatcacataatatatttgcctatattcaagtttcatatttmtacatatttgataaacattcacactagattttcctctgtgctgcagacaaaaattttcttcaatggtgtctgaaaagggaggcctgcaaccactaccaaa

SEQ ID NO: 27130 - DNA, 201 bp, Homo sapiens; identical to SEQ ID NO: 3629

SEQ ID NO: 27131 - DNA, 201 bp, Homo sapiens; identical to SEQ ID NO: 3630

SEQ ID NO: 27132 - DNA, 201 bp, Homo sapiens
acaagaaaggaaataaaatgaagatattttcttagtacaaatgtataaatgcacaaacatgtttttaacaaagaaggaggaaatactcacgacaattaaartcctcatttctgcaactggttgtgtggttcatagctggtattgatgactaccttcctctactactcattctgtattccctttgccttcagcaagcacctc

SEQ ID NO: 27133 - DNA, 201 bp, Homo sapiens; identical to SEQ ID NO: 3898

SEQ ID NO: 27134 - DNA, 201 bp, Homo sapiens
tcacccccttcccaccctttccccctaagtccccaaagtccattgtattatacttatgcctttgcatcctcatagcttagctcccacttatgaatgagaamatgtggtgtttggttttccattcctgagtttcttcacttagaataatggtctccagttccatccaggttgctgagaatgccattatttcattccttttta

SEQ ID NO: 27135 - DNA, 201 bp, Homo sapiens
aagaagggagaaagggaacataagagaacatttgagtgaggaggaaggagtcagagaaggctttgtgatagagatcacagatttagttggatctttaataygatataccatttaataaaaaacagtgtattctctagcctatacttttaatgaataccattttggtgaaggtgtcttctttgggaatgacaccctaaaaca

SEQ ID NO: 27136 - DNA, 201 bp, Homo sapiens
gacagcatttttattgaggaaaggatgcattttaaaaaacaagtttttcaaaaatatagggaggattgtggttacttctagaaacagtagtgcagtcaggraaaattcagcacaatatgtatcagtggaattcatctgatcaaacttaaaatattattccttgcattatagttctgagcaggtaccatagataatagttct

SEQ ID NO: 27137 - DNA, 201 bp, Homo sapiens
atgcttttgcattatcaatgcaagtgtaaatatagtgaaaaatgcaaataatgttttaacattattttgaaaattatattcacctcataaacacccaaagsgtccatagaccacacttcgagagctaccgttctaattctatcatttcttcttttttttaattaattgtaacatttctgtaatgggtcttcaactatttga

SEQ ID NO: 27138 - DNA, 201 bp, Homo sapiens
caactatttgattagcctgaggtacagttcacacaggaaaggcaggataaatgtttgattcttcccctttgtttagcagtattcaaaacaatgaattgatkcctggccatcttacaaaaaggaccaaggccttttttaggtgtcattatgaactcattgacttaaacatatttgatatggcccaatccatgtcaattatct

SEQ ID NO: 27139 - DNA, 201 bp, Homo sapiens
tttgtcaaaggtcttttctgcatctattgagataatcatgtggtttttgtctttggttctgtttatatgctggattacatttattgatttgcatatattgyatcccagggatgaagcccacttgatcatggtggataagctttttgatgtgctgctggattcggtttgccagtattttattgaggacttttgcatcaatgt

SEQ ID NO: 27140 - DNA, 201 bp, Homo sapiens; identical to SEQ ID NO: 3745

SEQ ID NO: 27141 - DNA, 201 bp, Homo sapiens
tcttacattcctatttctcccatacgtcaaatcccagttttcattaacgtcaacagaattactcatttgttatcccacgggactcaaacaatggacttagraaacaatttcagcactacagaaataatatgatactgtagcagtttaagtttttgtcattcttttcatttataaggcacatccttacaaatgcccagtagg

SEQ ID NO: 27142 - DNA, 201 bp, Homo sapiens
ttttgtcaaaggtcttttctgcatctattgagataatcatgtggtttttgtctttggttctgtttatatgctggattacatttattgatttgcatatattscatcccagggatgaagcccacttgatcatggtggataagctttttgatgtgctgctggattcggtttgccagtattttattgaggacttttgcatcaatg

SEQ ID NO: 27143 - DNA, 201 bp, Homo sapiens
ttcttcctacccatgagcatggaatgttcttccatttctttgtatcctcttttatttcattgagcagtggtttgtagttctccttgaagaggtccttcacrtcccttgtaagttggattcctaagtattttattctctttgaagcagttgtgaatgggagttcactcatgatttggctctctgtttgtctgttattggtgt

SEQ ID NO: 27144 - DNA, 201 bp, Homo sapiens
tctctgatggccagtgatgattagcattttttcatgtgtcttttggctgcataaatgtcttcttttgagaagtgtctgttcatatcctttgcccacttttkgatggggttgtttgtttttttcttgtaaatttgtttgagttcattgtagattctggatattagccctttgtcagatgagtaggttgcgaaaattttctcc

SEQ ID NO: 27145 - DNA, 201 bp, Homo sapiens
aataggaagcatagagaaaatggattgtcagtgtaactgcgtgttggaggctaaaaagaatgttagaggagtaatataaataggtgaatgactctagagtrtctggaagggcatattttaaatggttgactatgtagtctaattatgtgaagaggtaaataaagaaatgtagggccagatagaaagaattagaagagaaat

SEQ ID NO: 27146 - DNA, 201 bp, Homo sapiens
taagtagagacagggtttctccatgttggccaggctggtctcgaactcctgacctcaggtgatccgcctgcctcggcctcccaacatgctgggattacagrcgtgagccactgtgcctggccaatgtactgcattttatttatccagtgcaccattgatgggcatttaggattattctctgtctttgctattgtgaatagt

SEQ ID NO: 27147 - DNA, 201 bp, Homo sapiens
atgtcgctgtcgtccacaaaatagctttttagaacaaaggcatcagccagtttctcaaggactaggaagtagcgtcattctgagatctcagccatttcgayaaaaaatagatataagaaataggacagaaaatgtcagatcgtatgtgcgttctagaccgctgattcgtcgatttgtaaaacaagagaaggataagatggt

SEQ ID NO: 27148 - DNA, 201 bp, Homo sapiens
aacatcctaccgtgcacaggacagccgcccaacaataaagaattagctcaaaatgtcagtagttccactgttgagaaactctgctttaaagagtcttggacttagttctgacgtgaagttaagttgctcagtaccaatttattcctttcaaggcttcattttaagatttgttagtacacattcagagcagcttttagtgta

SEQ ID NO: 27149 - DNA, 201 bp, Homo sapiens
ctcacaacagcatatgtattgaggtcccactgccattaagctaatatgaaccagataaattttaagaggggggcatttttttttacaacaggaaatacaaytgtaggagaacattattgttgacactttttactaagacatctgaccgttaagcagattagataacttgaattccatggaaaaaatctactgtgttttgat

SEQ ID NO: 27150 - DNA, 201 bp, Homo sapiens; identical to SEQ ID NO: 3855

SEQ ID NO: 27151 - DNA, 201 bp, Homo sapiens
cagattcagtattttctatttttcttttagtttccttattctcttttttgaccactccattcttctatttgggtttttattttggttattgtacttttttycaaaattttcatttggttcttttcatcatctatttatttgctgagactttctgtttcattgctgagggtttctatttttttatttgtttcaagcatattt

SEQ ID NO: 27152 - DNA, 201 bp, Homo sapiens; identical to SEQ ID NO: 3856

SEQ ID NO: 27153 - DNA, 201 bp, Homo sapiens; identical to SEQ ID NO: 3857

SEQ ID NO: 27154 - DNA, 201 bp, Homo sapiens; identical to SEQ ID NO: 3858

SEQ ID NO: 27155 - DNA, 201 bp, Homo sapiens
gctggctaattttttttttttgtatttttttagtagagacagagtttcaccgtgttagccaggatggtctcgatctcctgacctcgtgatccacccacctyggcttcccaaagtgctgggattacaggcataagccactgcgcccagccaggtggaagaaatttctaagcagtgaagcattcaagatgtgtcatggctgct

SEQ ID NO: 27156 - DNA, 201 bp, Homo sapiens
cgtgcattacgtattcagatactgctttgcttcatcctctctaaaatttaacaccgaggagtttaagaaatgaagataaggaactcgaattatttttaaaytttggatcaatgtaaaggcaatctaatatttggaaaatacttgcaatgttgttctcctggcgagaagatcctggagcccagtgcctgctgctttctcttc

SEQ ID NO: 27157 - DNA, 201 bp, Homo sapiens; identical to SEQ ID NO: 3870

SEQ ID NO: 27158 - DNA, 201 bp, Homo sapiens; identical to SEQ ID NO: 3872

SEQ ID NO: 27159 - DNA, 201 bp, Homo sapiens; identical to SEQ ID NO: 3873

SEQ ID NO: 27160 - DNA, 201 bp, Homo sapiens
ctcccgagtagctgagactaccggcgcccgccaccacgccctgctaattttttgtatttttagtagagatggggtttcatcttgttagccaggatagtctygaactcctgacctcgtgatccacctggctcggcctcccaaagtgctgggattacaggtgtgagccaccgcgcccggctctttatctcatttttatttttg

SEQ ID NO: 27161 - DNA, 201 bp, Homo sapiens; identical to SEQ ID NO: 3874

SEQ ID NO: 27162 - DNA, 201 bp, Homo sapiens; identical to SEQ ID NO: 3876

SEQ ID NO: 27163 - DNA, 201 bp, Homo sapiens; identical to SEQ ID NO: 3764

SEQ ID NO: 27164 - DNA, 201 bp, Homo sapiens
ttccatacaatacacattcttccccactttgagttttttcacttaaaaatataaacgagattatttcatagtagtatagtatttacacatattccatactkcttaatggtgtcttttgattagcaattaatgagctccaatttatcaatattatcttttttttttttttttgagacagattctcattctgttgcccaggct

SEQ ID NO: 27165 - DNA, 201 bp, Homo sapiens
gcaatatacaaattcaatacaattcgtatcaaaatttcaatgaattttttacagaaatataaaaaacttccctaaaatttgcatggaaccacaaaacaccycaaatacccaaagcaatattgagcaaagtaaataaataaataaaacaaaacatacaaacaaaaaaataaagctgaagacatcatactacctggcttcaaa

SEQ ID NO: 27166 - DNA, 201 bp, Homo sapiens
ttcttgtgtgtccaacatgctattaaaagtattccttgagttgttaattttggttattgtgtttttcattttaaaaattataattattactgatcaagtcwgccatgatattttttataggtttctgttccctgcaattttttttttcaagacaagtcttgctccgtcgctcaggcgtgatcatagctcactgcaatcttg

SEQ ID NO: 27167 - DNA, 201 bp, Homo sapiens
aaccctggaggtggaggctgcagtaagccaagatcatgccactgcactccagcctgggtcacagagtgagactctgtctcaaaaaaaaaaaaaaaaaaaaraaagaaagaattaaattttgggaagtcattattagcaatattgtgtagtatccattggacaggatgagagtagaggaaaggagatcattaaaatatacag

SEQ ID NO: 27168 - DNA, 201 bp, Homo sapiens
tgggagatacagtaaaataataaatagatgctatcaaggttcatggaaatgttgagttcagtatgcaaaatgtcatgtaaatagacgtagacaataatcaktttaatttgttgatctgagtggggctgaattctaaatatagactttgattcatctgcataaggaagctggattatggataaaaccatctatgaacaatgt

SEQ ID NO: 27169 - DNA, 201 bp, Homo sapiens
gcttgaacccgggaggtggaggttgcagtgagatgagatcatgctactgtactccagctctgggtgacagagcaagacttcgtcttgaaaaaaaaaaaaaraaaaaagaaaggtcttcccaactcctatattgaacattcattaattaaatgcatttaataaatacttattgagtgttctctatgtgccaggcatgttcta

SEQ ID NO: 27170 - DNA, 201 bp, Homo sapiens
gaattaaagagttaaagtaattaagaaaacagagacagaactactgagtaccccccaaaagcaattatcttcaaaatatggaaaaccagattgggatacaraaaggtttcttgttaaagataaaggaggcctgagtaagtttatatctcatgggaaaatggtaccagagaagaaaaggttgaagattagaagagttgaaaa

SEQ ID NO: 27171 - DNA, 201 bp, Homo sapiens; identical to SEQ ID NO: 3692

SEQ ID NO: 27172 - DNA, 201 bp, Homo sapiens
taagtttatatctcatgggaaaatggtaccagagaagaaaaggttgaagattagaagagttgaaaattaaagggccaaggctggttttttgttggtttgtwttgttttgttttgtttttaaagagggttttactctgtcgctcaggctggagtgcagtgatgtgatcactgctcactgcagccttgacaccccgggctcaa

SEQ ID NO: 27173 - DNA, 201 bp, Homo sapiens; identical to SEQ ID NO: 5647

SEQ ID NO: 27174 - DNA, 201 bp, Homo sapiens
gttttgttttgtttttaaagagggttttactctgtcgctcaggctggagtgcagtgatgtgatcactgctcactgcagccttgacaccccgggctcaagcratcctcctacctcagcctcctgagtagctgggattacaagcacgtgccaccacacctggctaatttttaattttttatagagatggagtctcactgtgtt

SEQ ID NO: 27175 - DNA, 201 bp, Homo sapiens
attttttatttttttgagacggagtctcgctctgttgcccaggctggagtgcagtggcacgatctcggctcactgcaagctccgcctcccaggttcacgcyattctcctgcctcagcctccggagtagctgggactacaggtgcccgccaacacgccaggctaattttttgtatttttagtagagacgaggtttcaccgtg

SEQ ID NO: 27176 - DNA, 201 bp, Homo sapiens; identical to SEQ ID NO: 3879

SEQ ID NO: 27177 - DNA, 201 bp, Homo sapiens; identical to SEQ ID NO: 3713

SEQ ID NO: 27178 - DNA, 201 bp, Homo sapiens
actccacaaaaacactcttggaactaataaacaaaataaagttgaaagataaaaaatcaacgtacaaaaatcaatagcatttctatacactattgaactayctgaaaaataaatcaagaaaaccatgctatttacaatagctatgagaaaataaaaatacttaggaataaatttaaccaagaggatgaaagacctgcaagt

SEQ ID NO: 27179 - DNA, 201 bp, Homo sapiens
taacaacaagggaaaatgtcacaaatatctttattctaacagttaaagtatcagaaaatgatgaagttgttcataccacattaaaggaattttacatgtgytcagaaattttccaaaaatgtcatctgtaagtacctgataactatatatacatgtgcatatgtacgtgtgtgtgtataatatcatttaaaaaaaaacacc

SEQ ID NO: 27180 - DNA, 201 bp, Homo sapiens
cataattatctttggtcttatataaagaaaaccctacagactccacaaaaacactcttggaactaataaacaaaataaagttgaaagataaaaaatcaacktacaaaaatcaatagcatttctatacactattgaactacctgaaaaataaatcaagaaaaccatgctatttacaatagctatgagaaaataaaaatactt

SEQ ID NO: 27181 - DNA, 201 bp, Homo sapiens
atagactaatggattgcatcaaactaaaaagctcctgcacagcaaagaaaacaagagtgaagggacaatccacagaatgggagaaaatatttgcaaaccayagatctgataaggagttaacataccaaatatataaggaactcaaacaactcaatagtaagaaaacaaataacacgatttaaaagatgggtaaaggatgtg

SEQ ID NO: 27182 - DNA, 201 bp, Homo sapiens
tgtcttgtgctggttttcaaggggaatgcttccaggttttgcccattcagtgtggtattggctgtgggtttatcatatatatggctcttattattttgagrtatgttccttcaatacctagtttattgagcatttttaacatgaagggatgttgaattttatcgaaggccttttctgaatccattgagataatcatgtggg

SEQ ID NO: 27183 - DNA, 201 bp, Homo sapiens
gacattcttgccttaaccctgatcttatgagaaaagtgttccatattttacaattaagtatgtgctactcataggtttttcccaaatactttattaaattkaggaagtacccttttctggtttgctcagagttttatcatgattcattgttgaatttcatcaattttcttttaatctattgatatgagcatatgatttttc

SEQ ID NO: 27184 - DNA, 201 bp, Homo sapiens; identical to SEQ ID NO: 3590

SEQ ID NO: 27185 - DNA, 201 bp, Homo sapiens
ttgttagatttaacttgtattttagtaaatatttttacatctgtgttcatgtagaatatctgtaaataattttgtaaagaatatcttttcttcttgagggrtaatgttttcattaggttttagtatttctaacctaataaaatgacttaggaggtgttccttcctctattttctgaaaggttgtgtaatattggtgttatt

SEQ ID NO: 27186 - DNA, 201 bp, Homo sapiens
ataatctgtagtgataacatctttttcatttttgatattggtgatttgtgttctatcctcttttttatcaataagtctagctgagaatttatcaattttgytgatttttttcgaatagccagcttttggctttgttgatatattttctattgtttggtttctatttcattaatttctgcttttgtctgtattatttgcctt

SEQ ID NO: 27187 - DNA, 201 bp, Homo sapiens
gtgtgatattaatgtggccattctagtctcatgttttctgttttcatggcatattgctttttgttcattttacttttgtttctttaaagtatgcccttgtwgaagcgtattgttggatcttgctgttttacccattttgataatatctgctttttaactgaagtgcttagcccattcacattagtgtaatatttgatatgt

SEQ ID NO: 27188 - DNA, 201 bp, Homo sapiens
tctgtttacctagtcatttaccatttctagtgccattaatttgttcctaaagagctgagtttatccataatgtctttttgcttcaacctgaaaaactttayttagcagtttttgtaatgcatatatgctgcagtgatttatcttagttttcctttatctgaagatctatttatcttccatttgaatgatatagaattctgg

SEQ ID NO: 27189 - DNA, 201 bp, Homo sapiens
tgcagtgatttatcttagttttcctttatctgaagatctatttatcttccatttgaatgatatagaattctgggggattgacagattttattttcttccayttaaaaaaaatgttattctactgtcttctaatgctcatagtttctgatgagaagtgtgtagtcatttaagtcattattccctgtgtgcgatatgattgtt

SEQ ID NO: 27190 - DNA, 201 bp, Homo sapiens
gcagtgatttatcttagttttcctttatctgaagatctatttatcttccatttgaatgatatagaattctgggggattgacagattttattttcttccacktaaaaaaaatgttattctactgtcttctaatgctcatagtttctgatgagaagtgtgtagtcatttaagtcattattccctgtgtgcgatatgattgttt

SEQ ID NO: 27191 - DNA, 201 bp, Homo sapiens
ccaaagtgctaggattacaggcatgagccaccgcgcccagcctgttttcttttttatataaaaacaaaatgatgccatgcttgttgccctgtagatttttyttttaatttacaataacatgaagatttttttcagttcaactctacatcactctttttaatgcctgtataaattccacataatggccagatcataatgtca

SEQ ID NO: 27192 - DNA, 201 bp, Homo sapiens
cattgacttttgcctcttttagctccatttttcccaagatcaggcagtgagttttaatttcaaatattatatttttattgctaaaatttccattggctttyttatattttcctttttttctgataagatttcctttattttcattccttaccaataagttttcctttatcttattgaatatatagtagctactttaaagtc

SEQ ID NO: 27193 - DNA, 201 bp, Homo sapiens
tttaacgagtttttactttgcaccatgcacttatgctatgtgctgtataaggatagttacatttaatctataaatcaaccctatggggcgggcactcttakgaactttttttacggatgaaaactgaggcccagagatatgaaataatttgccaaacatcaccataatttacatgatgtagccaggtttaagcctactatt

SEQ ID NO: 27194 - DNA, 201 bp, Homo sapiens
atgcaagtccgaaatccagtagggcagttattaaatcttaaagctccaaataatcttcattgactccatgtctcacatccagggcacactcgtgtgagggrtgggctcccaaggccttgggaagctccactcctgtggctttgtggggttcagttcctgcagctgctctcatgggttggtgttgaatgcctgcagcttttc

SEQ ID NO: 27195 - DNA, 201 bp, Homo sapiens
tttttttgagacagagttttgctcttgttgcccaagctggagtgcaatggtaagatctcggctcactgcaacctccttctccagggttcaagtgattctcmtgcctcaaactcccgagtagctgggattacaggtgcctgccaccatgcccagctaatttttgtatttttagtagagacagggtttcaccatgttgggcag

SEQ ID NO: 27196 - DNA, 201 bp, Homo sapiens
gatcccagcactttgggaggctgaggcgggtggattgcctgaacccaggagtttgagaacagcctgggcaacatggcaaaaccccatctctacaaaaaaaatataaaaattagccgggtgtggtggcatgcacttgtagtctcagctacttgggaggctgaggcacgagagtcacttgaacctggaaggtggaggttgcag

SEQ ID NO: 27197 - DNA, 201 bp, Homo sapiens
agtcattttggtggggccattattctgcctaccacccggtctttcatgttcaggcagaggtggctctgtgtgtgtgtgtgtgtgtgtgtgtgtgtgtgtgtgtaagttaatttcagtagagaatgagctagagtagagaaagagaattaaggtgagatgtgtcatggaagaacagtgactgatgatgctaactttgctcaa

SEQ ID NO: 27198 - DNA, 201 bp, Homo sapiens
cagtcattttggtggggccattattctgcctaccacccggtctttcatgttcaggcagaggtggctctgtgtgtgtgtgtgtgtgtgtgtgtgtgtgtgtgtgtaagttaatttcagtagagaatgagctagagtagagaaagagaattaaggtgagatgtgtcatggaagaacagtgactgatgatgctaactttgctca

SEQ ID NO: 27199 - DNA, 201 bp, Homo sapiens
ctttaattcttgatctgtgttcagattttgcctttcaaatgtttcattattggggctttggacatattgcacctgtattaaaagaaggatttgagtgaggratttagtgcttcatagtcaatagtcaatgagtctccttttggctcgcctccttcttagggaaaggaactggttgtagggtgttaggcagaatttgggtgt

SEQ ID NO: 27200 - DNA, 201 bp, Homo sapiens
gtgcgagactctgtctcagaagaataaataaatgaataaaataacataacttccttatcccattttcaaattgaaaaaaaaaagccaaatgtgctcctatkcgggtttcaattaagatattatgagatttgagtagggtaagaaataaaataaaaattgaaattaaaatgccatttcttttttgcattgtaatacattgaa

SEQ ID NO: 27201 - DNA, 201 bp, Homo sapiens
atctgtgtgaggaccctgatgaactaattttcttctaaagtgctatatatgtagatatcatcatagagttacacatgaaatggctcattcaatacttttttagatgcctggaaatatttaagggagtaactaatcaattagcagcattcctgggagaacattgtcttgtcattttaacagaaaactctctttgtgattttg

SEQ ID NO: 27202 - DNA, 201 bp, Homo sapiens; identical to SEQ ID NO: 3865

SEQ ID NO: 27203 - DNA, 201 bp, Homo sapiens; identical to SEQ ID NO: 3837

SEQ ID NO: 27204 - DNA, 201 bp, Homo sapiens; identical to SEQ ID NO: 3609

SEQ ID NO: 27205 - DNA, 201 bp, Homo sapiens
acataattatctttggtcttatataaagaaaaccctacagactccacaaaaacactcttggaactaataaacaaaataaagttgaaagataaaaaatcaaygtacaaaaatcaatagcatttctatacactattgaactacctgaaaaataaatcaagaaaaccatgctatttacaatagctatgagaaaataaaaatact

SEQ ID NO: 27206 - DNA, 201 bp, Homo sapiens; identical to SEQ ID NO: 3842

SEQ ID NO: 27207 - DNA, 201 bp, Homo sapiens
aaacttttcatctgattaatagtttgtaatggtttgtaattcttacttacatgatggccacatgatgtcgctctttaccgcaaattctttcgtaatcagcmaaaggaagtcattccttttcgcactggaaagacgctccactctctttcactctttggatgcacaacaatggccacacatcgagattgaaatgaagggata

SEQ ID NO: 27208 - DNA, 201 bp, Homo sapiens; identical to SEQ ID NO: 3765

SEQ ID NO: 27209 - DNA, 201 bp, Homo sapiens
ctggtgggtctacttctgtaacggttgtgggtcatgaattattttttactcagacataattatctttggtcttatataaagaaaaccctacagactccacmaaaacactcttggaactaataaacaaaataaagttgaaagataaaaaatcaacgtacaaaaatcaatagcatttctatacactattgaactacctgaaaa

SEQ ID NO: 27210 - DNA, 201 bp, Homo sapiens
tgtcctgggtcttaaaaggacataaaattgaaaatgattgcatttaacaaattgcagacagatatagattgcattttgaaaatcaacgaatggatctaaartttacattggccacatgatgtcgctgtacaccacaaagtcttgtcaatagaagggagctactgatcactaaaagtgaaggaggaagctccattttgtcac

SEQ ID NO: 27211 - DNA, 201 bp, Homo sapiens
aattccacaaacttctctttatattggtttatgccttctttagatgattgtgaataagagtattatcttaacctctctggtgggtctacttctgtaacggwtgtgggtcatgaattattttttactcagacataattatctttggtcttatataaagaaaaccctacagactccacaaaaacactcttggaactaataaac

SEQ ID NO: 27212 - DNA, 201 bp, Homo sapiens
tcacatctgtaagttatttcagtgccttggaagatcatttatctggccacagataattgacttacttacatcagttttttttttttttgagatggagtctygctctgttgcccaggctggagtgcagtggcatgatctcggctcactgcaacctccgcctcctgggttcacgccattgtcctgcctcagcttcccgagtag

SEQ ID NO: 27213 - DNA, 201 bp, Homo sapiens
tcacaggaccctagtgaggttggtattgatgaagaaactgggtcccaaaaaggtgatggaatttatccgaagctccaggaagcttctttttaccatggctstgtttcttgaggttaaagaacatgatttaccaggctctgtttcttgagagaccaagagtggatccctgtagtccccattagaattctccttctagtttga

SEQ ID NO: 27214 - DNA, 201 bp, Homo sapiens
gagttggcatattatttcagtacatatctaaccttatgtactcctcacaggaccctagtgaggttggtattgatgaagaaactgggtcccaaaaaggtgayggaatttatccgaagctccaggaagcttctttttaccatggctgtgtttcttgaggttaaagaacatgatttaccaggctctgtttcttgagagaccaag

SEQ ID NO: 27215 - DNA, 201 bp, Homo sapiens
gtataaatagaatcagtactagattttttgtttcaattctatcagccaagtataacatgcttttcttgcttgtgatagaaaaaaagagagaaaaaacacaraagcaaaattgaagaatttgtaaatcatttctaaataatttcaataaaatgagctttgaaagggaaaatttttagataacattatctcatcaaaatgcct

SEQ ID NO: 27216 - DNA, 201 bp, Homo sapiens
atagaattcagtattatccttggtttcggacattcagcaggggtccgaaggtgggcgaggtgagcccactttgggaggccaaagtgggcagattgcttgaycccaggagttcaggaccagtctgggcaacatggtgaaatgctgtccttacaaaaaatacaaaaattatctgggcatgatagtgcatgactgtagtcccag

SEQ ID NO: 27217 - DNA, 201 bp, Homo sapiens
tttactgggtttataaaagaattgaccagtagctatataatagatatagaaaagtctgcctgggtgtggtggctcatacttgtaataatattatattataattgttctattttattattagttattgttgctaatcttttactgtacctaatttatacattaagctttatcatgggtatgtatgtataggaaaaaatgcag

SEQ ID NO: 27218 - DNA, 201 bp, Homo sapiens
ctctcttcctatttgaataccctttatttctttctctttcctaattgccatagccagaacttccaatactatgctgaataggagtggtgaaagagggcatmcttgtcttgtgctggttttcaaggggaatgcttccaggttttgcccattcagtgtggtattggctgtgggtttatcatatatatggctcttattattttg

SEQ ID NO: 27219 - DNA, 201 bp, Homo sapiens
cttgaggcctccccagccatactgaactgtgagtcaattaaacctctttcttttataaattacccagtctcaggcagttctttatagcagtgtgagaacarattaatacacatatgaattttaacatagttttttcgaaatctgtgatgaatgtcaatggaagtttaataggaataccattgaatctataaattactttga

SEQ ID NO: 27220 - DNA, 201 bp, Homo sapiens
cccagtgggaggtaattgaatcatgggggcaattatcccatacagttctcatgatagtgagtgagttctcattaggtctgatggttttataagggcttttycctttttgcttggcacctctccttcctgccaccatgtgaagaaagacgtgtttgctttcccttccaccatgattctaagtttcttgaggcctccccagcc

SEQ ID NO: 27221 - DNA, 201 bp, Homo sapiens
gtggggcctgttcctttcttttggctgttttctcccttttagaatggaaatgtttacccaatgcaatgcctgtaccaccattgtatctttttttttttttwaaatcttacaggctcttaggtagaaggaacttgccttgagtctcagatgggacttgggacttttgattgagttggtgctggaacaagttaagactttggg

SEQ ID NO: 27222 - DNA, 201 bp, Homo sapiens
ctagttataggtctagaagcaaacaggggtggtggggggtgggtcctgaggagaatcaacattatcttgcctggcaactgcctcaggggaagccatcactrttgcctcaggcagtgcagggtttttctcctcagacaaatgtggaaaggctgatggcagtgtgggttggggaggacatgttgccactactggggatgagaa

SEQ ID NO: 27223 - DNA, 201 bp, Homo sapiens
tccaatcagcaaaatgtcatcaaggtaatgaaccagtgtgatatcttatggaagggaaaatcaatcaagttctctccaaacaagattatgacacaaagccrgagagttgatatacccctgaggtaggatggtaaagatatattgctggccttgctgactgaaggcaaattgcttctggtgggccttatggacaggaatgga

SEQ ID NO: 27224 - DNA, 201 bp, Homo sapiens; identical to SEQ ID NO: 3625

SEQ ID NO: 27225 - DNA, 201 bp, Homo sapiens
cacactctccaatgagatttgaaatgtcctgggtcttaaaaggacataaaattgaaaatgattgcatttaacaaattgcagacagatatagattgcatttygaaaatcaacgaatggatctaaaatttacattggccacatgatgtcgctgtacaccacaaagtcttgtcaatagaagggagctactgatcactaaaagtg

SEQ ID NO: 27226 - DNA, 201 bp, Homo sapiens; identical to SEQ ID NO: 3587

SEQ ID NO: 27227 - DNA, 201 bp, Homo sapiens; identical to SEQ ID NO: 3588

SEQ ID NO: 27228 - DNA, 201 bp, Homo sapiens
acagtgatctttgccccataattgtaaaatgagatattagaatcatccttatttatcttaaccacctactccactgtacagttcctataattccacaaacwtctctttatattggtttatgccttctttagatgattgtgaataagagtattatcttaacctctctggtgggtctacttctgtaacggttgtgggtcatga

SEQ ID NO: 27229 - DNA, 201 bp, Homo sapiens
atggaaaaaatgctgggtttattcctcctgttattgtattttacaagtctgtcgagggtccacagtgatctttgccccataattgtaaaatgagatattaraatcatccttatttatcttaaccacctactccactgtacagttcctataattccacaaacttctctttatattggtttatgccttctttagatgattgtg

SEQ ID NO: 27230 - DNA, 201 bp, Homo sapiens
gttgtaagccagtgtggattgggagtccataccccttatttatctattctgtgtatcctattaataacagtaattatcaggttattttgcctttgaacacsttagtaagtctgagcatttacatggaaaaaatgctgggtttattcctcctgttattgtattttacaagtctgtcgagggtccacagtgatctttgcccca

SEQ ID NO: 27231 - DNA, 201 bp, Homo sapiens
gagtcatgatgttttactggttataaaatggaaagagttttccctgggagaatatggagactaacaggtattcatgagaagagagtaacttaagtgagtayacagaaaattccaaatgtacctagaaatgaggaatagtccactttgggtaaagcacatggttcccataagagagagtgtgatataaagcaagaaaagtaa

SEQ ID NO: 27232 - DNA, 201 bp, Homo sapiens; identical to SEQ ID NO: 3847

SEQ ID NO: 27233 - DNA, 201 bp, Homo sapiens
gatttacattagatgcacaccaagctgctttcggagagtccagatttatggggataagagcatcactaggtatatcaacagccctagggtggatacctttragcctgtaaatttggctctgtgttggacgatgaaccatggaatacagaagaagctcccttctctcagctaaagcctattagcaaaaatagagccctgagg

SEQ ID NO: 27234 - DNA, 201 bp, Homo sapiens
gttttttttatggctgaatagtactccattgtgtatatgtaccacactttcttttctgtttttttagacagtctcacttttgtcgcccaggctggagtacygtggcgcaatcttggctcaccgcaacctctgcctcctgggttcaagcgattctcctgcctcagcctcccaagtagctgggattataggcacgtgccacca

SEQ ID NO: 27235 - DNA, 201 bp, Homo sapiens
ctatttcttgtacattaatacttttcactattctaattatggtgatgcctttagctattaagaatttctgggattgaaatgtgtcagaagttagttattargtattgtggattctgaagctctctaaatcaagtcctccctttaccaatttttgtatgtgtagccattggtaaaggatttgttattcagttccttggcatt

SEQ ID NO: 27236 - DNA, 201 bp, Homo sapiens; identical to SEQ ID NO: 3754

SEQ ID NO: 27237 - DNA, 201 bp, Homo sapiens
ccatattgatatggtttggctgtgtccccacccaaatctcaccttgaattgtagttcccataatccccacatgttgtgggagggacccagtgggaggtaaytgaatcatgggggcaattatcccatacagttctcatgatagtgagtgagttctcattaggtctgatggttttataagggctttttcctttttgcttggca

SEQ ID NO: 27238 - DNA, 201 bp, Homo sapiens; identical to SEQ ID NO: 3596

SEQ ID NO: 27239 - DNA, 201 bp, Homo sapiens
ctataaaggctcttttttggttccatattgatatggtttggctgtgtccccacccaaatctcaccttgaattgtagttcccataatccccacatgttgtgrgagggacccagtgggaggtaattgaatcatgggggcaattatcccatacagttctcatgatagtgagtgagttctcattaggtctgatggttttataagg

SEQ ID NO: 27240 - DNA, 201 bp, Homo sapiens
cgacgtgaacgacaatgctccggcgttcgcgcagcccgagtacacggtgttcgtgaaggagaacaacccgccgggctgccacatcttcacggtgtctgcgygagacgcggacgcgcaggagaacgcgctggtgtcctactcgcttgtggagcggcgggtgggcgagcgctcgctgtcgagctacatttcggtgcacacgga

SEQ ID NO: 27241 - DNA, 201 bp, Homo sapiens
gtgtgtggtgttatttctgagttctctattctgttccactggtctacacgtctgtttttgtaccagtaccgtgctgttttggttactgtagttttgtggtrtatatgaagtcaatcaagtagcatgatgcctccagctttgttcttttgcttaggatcggcttggctataaaggctcttttttggttccatattgatatgg

SEQ ID NO: 27242 - DNA, 201 bp, Homo sapiens
gaggatcacttaagccagggaggtccaagctgcagttatcatgccactgaactccagcctaggtgacagagcaataccttgcctcaaaaataaaataaaaygaaataataaaataaaataaaataaaaacccagaactgacaattttcactgttcctaatattctaatatactttagtaaattattttaggatatgttact

SEQ ID NO: 27243 - DNA, 201 bp, Homo sapiens
aggcacttttgtcatgaaatctttgcctgtgcctatgtcctgaatggtattgcctagcttttcttctagggtttttatagtttcatacttttatgaattamgtctttaattaatcttgagttaatttttgtataagatgtaaggaaagggtccagtttcaattttctgcatatggctagccaattctcccagcaccattta

SEQ ID NO: 27244 - DNA, 201 bp, Homo sapiens
tgggattgctgcgtcaaatggtatttctgcctctagatctttgaggaatcgccacacagtctcccacaatgagtgaactaatttacaaccccaccaacagkgtaaaggtgttcctttttctccatctgttgtttctggacttgttaataattgccattctgactggtgtgagaagatatttcattgtggttttgatttgca

SEQ ID NO: 27245 - DNA, 201 bp, Homo sapiens; identical to SEQ ID NO: 3844

SEQ ID NO: 27246 - DNA, 201 bp, Homo sapiens
taggatgatttatattcctttgggtacatacccagtaatgggattgctgcgtcaaatggtatttctgcctctagatctttgaggaatcgccacacagtctyccacaatgagtgaactaatttacaaccccaccaacagggtaaaggtgttcctttttctccatctgttgtttctggacttgttaataattgccattctgac

SEQ ID NO: 27247 - DNA, 201 bp, Homo sapiens
ctctgcctccctgagagcaggcatgcacaggtatgtatttccctcctcattcactcagaagtaaccttaacttggtatggctcagataaactgcatctccmtaggccagaagcagctgtcaaaactaaaaagctttaggtactttgccaggaaaatgcaattattttgtccccatgtttattccttgaaagatcgcaaatg

SEQ ID NO: 27248 - DNA, 201 bp, Homo sapiens
aggaaacttacaatcatggtggaaggcaaaggggaatcaagctcatcttacatggcatgagcaggagcaggagcaagagagagagaagggggaagtgatamacacttttaaacaacaagatctcatgagaactctctcactattatgagaacaacattaagggggaaatccacccccatgatccaatcacctctcacaggc

SEQ ID NO: 27249 - DNA, 201 bp, Homo sapiens
gcctgcagcttttccaggcacagtgtgcaagctgcttagaactgctggtggattcccattttggggtcttgagggtggtggccctcttctcacagccattkcactccagcctgggcaacaagagtgaaactccatctcaaaaaaaaaaaaagaaagaaagaaatttcctctgccagataccctaaactcatcattctcaaa

SEQ ID NO: 27250 - DNA, 201 bp, Homo sapiens
tggattatatcttgatattattaatgtgttattcttgagattcatcattctgtttgtattagtccattattgcactgttataaagaaacacccaagactcrgtaatttataaagaaaagaggtttaattggctcacagttccacaggctgtaggaagcatgatgccggccatctgcttggcttctggggagccttcaagaa

SEQ ID NO: 27251 - DNA, 201 bp, Homo sapiens
ctaaaatttccattggcttttttatattttcctttttttctgataagatttcctttattttcattccttaccaataagttttcctttatcttattgaatawatagtagctactttaaagtcattgtccgctaattcccacatctgtgtcatctcaggtttggattcttgatggtctttacctttaggaatgcatcacattt

SEQ ID NO: 27252 - DNA, 201 bp, Homo sapiens
aggctgggaggctaagccagtctaatctctccacgttcttctgtctgcttttattctggctgcactggcagctgattagatcgcacccacccagactgagrgtaagtgtgtctttcccagtccactgacacaaatgttagtctcctttgataacaccctcacagacacacccaggaacaatactttgcatccttcaatcca

SEQ ID NO: 27253 - DNA, 201 bp, Homo sapiens; identical to SEQ ID NO: 3691

SEQ ID NO: 27254 - DNA, 201 bp, Homo sapiens; identical to SEQ ID NO: 3610

SEQ ID NO: 27255 - DNA, 201 bp, Homo sapiens; identical to SEQ ID NO: 3611

SEQ ID NO: 27256 - DNA, 201 bp, Homo sapiens
cctgatcttatgagaaaagtgttccatattttacaattaagtatgtgctactcataggtttttcccaaatactttattaaatttaggaagtacccttttcyggtttgctcagagttttatcatgattcattgttgaatttcatcaattttcttttaatctattgatatgagcatatgatttttcttcgttttactaatatg

SEQ ID NO: 27257 - DNA, 201 bp, Homo sapiens
tgtgaaatatatatatatatatatataccaatggaatactcatcagccattagaaagaatgaaatcctgtcattcgtgacaatatggatgaatctggaggwcattatgtttagttaaataagccaggcacagaaagacaaatactgcatgatctcattcatgtggaatgtaaaaaagctgatcttatagaagcagagagta

SEQ ID NO: 27258 - DNA, 201 bp, Homo sapiens
atatatccaaaggaaatgaaatcagtatgtcaaagacctatccgcactcccatgttcattgcagcattattcatgatagttcagatatagaatcaacttargtgttcatagtggatgaatagataaagaaaatgtgaaatatatatatatatatatataccaatggaatactcatcagccattagaaagaatgaaatcctg

SEQ ID NO: 27259 - DNA, 201 bp, Homo sapiens
acactgatctgagcaatgatgttttttatatgaccctgaaagcacaggcaataaaagcaaaaatagactaatggattgcatcaaactaaaaagctcctgcrcagcaaagaaaacaagagtgaagggacaatccacagaatgggagaaaatatttgcaaaccatagatctgataaggagttaacataccaaatatataagga

SEQ ID NO: 27260 - DNA, 201 bp, Homo sapiens
tgcatttattaaaatatatgttgttctgattttaaaatatatccctaccaattgtgaagatatcggctaatccaataaaaaagcaaaaccatattttgtakaattatggtcgtattctgttaaataaacttttaaatcctattgggttgtaatctgtagtctgggaagggctctgcctaacgattcagacccctaccagat

SEQ ID NO: 27261 - DNA, 201 bp, Homo sapiens
aagatgaaagatcaataacactgatctgagcaatgatgttttttatatgaccctgaaagcacaggcaataaaagcaaaaatagactaatggattgcatcaractaaaaagctcctgcacagcaaagaaaacaagagtgaagggacaatccacagaatgggagaaaatatttgcaaaccatagatctgataaggagttaaca

SEQ ID NO: 27262 - DNA, 201 bp, Homo sapiens
tccctaaaatttgcatggaaccacaaaacaccccaaatacccaaagcaatattgagcaaagtaaataaataaataaaacaaaacatacaaacaaaaaaatraagctgaagacatcatactacctggcttcaaaatatacttcaaagctataataatcaaaacagcatggtactggcataaaagacatgtagaccaatggag

SEQ ID NO: 27263 - DNA, 201 bp, Homo sapiens
tttatgttcatagcttggaaaaattaatactgtttaaaatgtccatattacccaaagcaatatacaaattcaatacaattcgtatcaaaatttcaatgaaktttttacagaaatataaaaaacttccctaaaatttgcatggaaccacaaaacaccccaaatacccaaagcaatattgagcaaagtaaataaataaataaa

SEQ ID NO: 27264 - DNA, 201 bp, Homo sapiens
ttctttctcttttttttttttttcagatggagtctcgctctgttgcctaggctggagtgtagtgacaggattttggctcactgcaacctccgcctcccggrttcaagcaattctctgcctcagcctcgggagtagctgggattacaggcgcccaccaccacgcctggctaattttttgtatttttagtagagacgaggttt

SEQ ID NO: 27265 - DNA, 201 bp, Homo sapiens
ttgaatctataaaaatatgaagcttgttaacattgacaatattgagacagacaaccgattaacaaggtatattcttccatttatcttttttttttttttttgagacggagtctcgctctgtcgcccaggctggagtgcagtggcgcagtctcggctcactgcaagctccgcctcccgggttcatgccattctcctgcctca

SEQ ID NO: 27266 - DNA, 201 bp, Homo sapiens
tactaaaagaaaatactggattacacactctccaatgagatttgaaatgtcctgggtcttaaaaggacataaaattgaaaatgattgcatttaacaaattrcagacagatatagattgcattttgaaaatcaacgaatggatctaaaatttacattggccacatgatgtcgctgtacaccacaaagtcttgtcaatagaag

SEQ ID NO: 27267 - DNA, 201 bp, Homo sapiens; identical to SEQ ID NO: 3631

SEQ ID NO: 27268 - DNA, 201 bp, Homo sapiens
agttgttacaatttggtgttcatgtggcgggggaggggggggatggtgtaggcttctgttccactatcttgctccacctcaatagtctgatgtgcagaagytctttagtttaattaggccccatttgccaatttttgtttttgctgcaagtgcgtttggcatctttgtcatgaaatctttgccagggcctatgcccagaat

SEQ ID NO: 27269 - DNA, 201 bp, Homo sapiens; identical to SEQ ID NO: 3751

SEQ ID NO: 27270 - DNA, 201 bp, Homo sapiens
atttctaccaactatagataaatgaaaattcacctttaaatgtctcttatcctccatgaaactcatcaaaaacaacaaaaagtacagcagacaaaaaaaaagtcttatctttaatgaaactttgtaaaacatttgaacctcaaccatgatgtgtatgaagataagttactaagtgccatgaagattggaccaagatatgaa

SEQ ID NO: 27271 - DNA, 201 bp, Homo sapiens; identical to SEQ ID NO: 3600

SEQ ID NO: 27272 - DNA, 201 bp, Homo sapiens
tattgattttttgaataggaaacacatatacatggtttactgttctaaaggtgcaaaagaatacagttaaattttccctttcacctccttcatgaagccaraacattctctggtatccttctagagatttttttcatatacaaataaacttccctacccccttaaaaaacatatgagtattgattttaatcttgctttttt

SEQ ID NO: 27273 - DNA, 201 bp, Homo sapiens; identical to SEQ ID NO: 3763

SEQ ID NO: 27274 - DNA, 201 bp, Homo sapiens
tagaaagctgaaatatccccattacagtttttgagtcaatacaaaaagtagataggtgttatagataaagaaataggttttcatcgatttgaaaattagamctccgagaagaaactcaggtaagaatgccattaaaatagttttagttgtttttgaaaataacatcaacaaaatgtcactattaaacagtgaaattggaat

SEQ ID NO: 27275 - DNA, 201 bp, Homo sapiens
taaattttcttgtgttagtatatttctaaaggcttttagtgaattaaatggagacactttaatatactacacagttttaaatctaaatttttttctcaagraagaacttctgtttacacaatgatgcttaaacatgactgaaatatctaaaggagaggttaactggatcagtcaagaaaataatctgtaacatttgattga

SEQ ID NO: 27276 - DNA, 201 bp, Homo sapiens; identical to SEQ ID NO: 3833

SEQ ID NO: 27277 - DNA, 201 bp, Homo sapiens
gtttggagtctcaatccttattttttacttgaatatgattcattttaggccttgtgctctaatttggcaataccgtttattgtttcttgatttcccagttkggaaaaaaatcgagaataacaattgcatttagaattgcatctttgttcatctttagtttatcactactttatttaatactactttaataatactactgta

SEQ ID NO: 27278 - DNA, 201 bp, Homo sapiens
ttcttcctgatgttctccctcccattgctcccccaacaggccccagtgtgtgttgttccccttcatattttcatgtgtactcatcattcagctcccacacrtagtgggacgatgtggtatttggttttctgttcctgcattattatgctgaggataatggcttccagctccatccatgtccctgcaaaggacaagatcttg

SEQ ID NO: 27279 - DNA, 201 bp, Homo sapiens; identical to SEQ ID NO: 3633

SEQ ID NO: 27280 - DNA, 201 bp, Homo sapiens
catcccagggatgaagcctacttgatcatggtgaataagctttttgatgtgctgctggatttggtttgccagtatcttattgaggatttttgcattgatgyttatcagggatatcagctggaagttttcctttttgttgcatctctgccaggttttggtatcaggatgatgctggccttaaaggagttagggaggagtacc

SEQ ID NO: 27281 - DNA, 201 bp, Homo sapiens
tggacttcctactacctgttagtacagatgttacttgctcattttatgagttcacctaatgcttataactccctattgattatgcttttccaccttcagtytcaaaaattagatcattacacctgttgtcttttatggaacctcttttattctcttattcacttgtttggagtctcaatccttattttttacttgaatatg

SEQ ID NO: 27282 - DNA, 201 bp, Homo sapiens
gatatcagctggaagttttcctttttgttgcatctctgccaggttttggtatcaggatgatgctggccttaaaggagttagggaggagtacctccttttcyattgtttggaatagcttcagaagaattggtaccagctcctctttgtacctctgatagaattcagctgtaaatctgtctggtcctgggctttgtttgcttg

SEQ ID NO: 27283 - DNA, 201 bp, Homo sapiens
tacagcacacacacacttttaaatacttcaacatctcaatgttttgatgatcataaatctgaaaggatctgatttttctataaaatgtaacttgggtggtraagaggttaatggtaagttgtcttgaatcagattgaaatcccatcgtaccaagagataatatcgttttacttaacctctatgtgtttataaaaagcgaat

SEQ ID NO: 27284 - DNA, 201 bp, Homo sapiens
caggtcatcaaacattatcactgatgcttggaaagaagcactttttataatttaaaaataccttttattcttcaacttctgctggcttaaagagcactaartccacatatcctaggaggcatggctgtccaatatatactatgtgtacattgatttatgaaccaataaatgtttcatacacagttgagattttaaatgagc

SEQ ID NO: 27285 - DNA, 201 bp, Homo sapiens
gtgatttgctgtttctgggaaggtaaacatttaatcttcaattacatatttgcagtgaaaatgtcaggaaatgcaaggggcaaaaaaatactacatcaatrgaaaatatgaagactgagtcatacttacacttacacgttcatgcgcatggtgtcgctcttcactgagcacgtttccgcgaagaaagccgccgtttctttc

SEQ ID NO: 27286 - DNA, 201 bp, Homo sapiens
tccatattcctaatgaaattggaatttttccaaaagatgaggcctggtcttggatgactacattttcacttgaaacatttattttgggtaattataacacygaactcgacaagtaaatgttacacttggaaagaacttttttagcttttccaaccaaaggcagatgtattgcaataaaataactgtcttaaacggtcctct

SEQ ID NO: 27287 - DNA, 201 bp, Homo sapiens; identical to SEQ ID NO: 3768

SEQ ID NO: 27288 - DNA, 201 bp, Homo sapiens; identical to SEQ ID NO: 3769

SEQ ID NO: 27289 - DNA, 201 bp, Homo sapiens
tacagtggaagaaatttgtgaaagcaaattattaaaaaatctgcttaaggtcaaagtaaaagatcaagagaaaggtgggagtcattatttcaaaaatcaascctaggctgagtgaaaatcccaatacttaccttcctgtaagtcaatatagaagtatgaaaaaataacaataaaaggaaattctctataccatttcttcaa

SEQ ID NO: 27290 - DNA, 201 bp, Homo sapiens
ttgtgatagaaaaaaagagagaaaaaacacagaagcaaaattgaagaatttgtaaatcatttctaaataatttcaataaaatgagctttgaaagggaaaawttttagataacattatctcatcaaaatgccttaaagtatattttaatattcagtaagaacagtgtatattaacatggctaatttagaggatttatatttt

SEQ ID NO: 27291 - DNA, 201 bp, Homo sapiens
atgttatttcaggatctcaagaaacagagccatggtaaaaagaagcttcctggagcttctgataaattccgtcacctttttgggacccagtttcttcatcmataccaacctcattagggtcctgtgagaagtacatgaggtgagatatgtactgaaataatatgccaactcttaagtgccaagacattaggatgcaagggg

SEQ ID NO: 27292 - DNA, 201 bp, Homo sapiens; identical to SEQ ID NO: 3577

SEQ ID NO: 27293 - DNA, 201 bp, Homo sapiens
tttttgaaatatatttttaaaacccctatccaaatcaatgaatgctttggctaaaacctacttgggaatgagggtgttctttagtgccaaatactcatctkattttagtccatggctaaaatcccaagagttacagaggagaaatagggccaaacaaggtttctattaaaataagaggtcccaagtgatgaatggaaactt

SEQ ID NO: 27294 - DNA, 201 bp, Homo sapiens; identical to SEQ ID NO: 3617

SEQ ID NO: 27295 - DNA, 201 bp, Homo sapiens; identical to SEQ ID NO: 3793

SEQ ID NO: 27296 - DNA, 201 bp, Homo sapiens
ttatttggatgaatttaaaaatgacacatgccatcttacagatatgctgtagactgtgaaaatgaaaaaaaaaacctcgtgtttagagtagacactgtttsatggattaggtaggttttcatctggactttgaaatgtatgtaagattttataaggaggagagaaaataagaagctgtttgtattagaattacacagataa

SEQ ID NO: 27297 - DNA, 201 bp, Homo sapiens; identical to SEQ ID NO: 3578

SEQ ID NO: 27298 - DNA, 201 bp, Homo sapiens; identical to SEQ ID NO: 3796

SEQ ID NO: 27299 - DNA, 201 bp, Homo sapiens
agtcactggcaggagtgtgactgactccaaagtctatattcctaattactgtgttctactttttaatagagagctcttgaaggtccaaggaaaggaatgcrtaatggtgtggtcaaggcattagtgttaatatttgtagaaagggtaattaacaacagtctgagcaatcacattctaacaactagtaaggttggcaggagc

SEQ ID NO: 27300 - DNA, 201 bp, Homo sapiens
ttatatcattcttatgtctttgcattctcatagcttagctctcacttgtatgtgagaatatacaatatttggttttcgatttctgagttacttcacttagraaaatggcgtccaggtccacccaagctgctgcaaaagctattattttatttagtttatggctgagtagtattgcatggtgtatatataccacattttctt

SEQ ID NO: 27301 - DNA, 201 bp, Homo sapiens; identical to SEQ ID NO: 3908

SEQ ID NO: 27302 - DNA, 201 bp, Homo sapiens
acaaaatgaactaatacagaaaattggtaccaaagactggggtgttcctataaagatatctgaagatgtggaagcagctttggagctgggtaacgggctgmgattggaagaatctggaggtctcagaaaagacaggaagatgagggaaagtttggaacttcttagagacttgttaagtggttgtgacaaaaatgctgatag

SEQ ID NO: 27303 - DNA, 201 bp, Homo sapiens; identical to SEQ ID NO: 3798

SEQ ID NO: 27304 - DNA, 201 bp, Homo sapiens; identical to SEQ ID NO: 3799

SEQ ID NO: 27305 - DNA, 201 bp, Homo sapiens; identical to SEQ ID NO: 3800

SEQ ID NO: 27306 - DNA, 201 bp, Homo sapiens; identical to SEQ ID NO: 3801

SEQ ID NO: 27307 - DNA, 201 bp, Homo sapiens; identical to SEQ ID NO: 3581

SEQ ID NO: 27308 - DNA, 201 bp, Homo sapiens
cagaagctctttagtttaattagatcccatttgtcaattttggcttttgttgccattgcttttggtgttttagacatgaagtccttgcccatgcctaagtyctgaatggtaatgcctaggttttcttctagggtttttatggttttgggtctaacgtttaagtctttaatccatcttgaattaatttttgtataaggtgta

SEQ ID NO: 27309 - DNA, 201 bp, Homo sapiens
gtgcagaagctctttagtttaattagatcccatttgtcaattttggcttttgttgccattgcttttggtgttttagacatgaagtccttgcccatgcctawgttctgaatggtaatgcctaggttttcttctagggtttttatggttttgggtctaacgtttaagtctttaatccatcttgaattaatttttgtataaggt

SEQ ID NO: 27310 - DNA, 201 bp, Homo sapiens
aaacacttcttcctggaaataatttggggcttataacattttctttctccagaatggattttaattgacttttgccaggcatcttggggcactagcaatcrtgggtaatcttaatctatttcaagcttcaggtattctagataaaacctcattatctaaaatttacatgtattctttaagtacggttattcagtttcctag

SEQ ID NO: 27311 - DNA, 201 bp, Homo sapiens
tatcccatctatttctaccttttattttaacaccttttgctctttgggctttattgtggatagttcacccaccttaaagtttaataattctctcttcttgytgttgtctgaatttgtacccccaaattcatgtgttgaaaattcaatcccttatacaacagtgttgggaggtggggaatttcaggaaatgtttagattatg

SEQ ID NO: 27312 - DNA, 201 bp, Homo sapiens
caccccccactcttgcccccaagtccccaacgtccattgtataggatttttgaatttgtgaattaatgcctttacatcactttgagcatatcctcagctayaatgttctccaatgttgcttctgttccattgtatttctatagtattattttagtactctaattaaacatattttaatcttattactctatcccatctatt

SEQ ID NO: 27313 - DNA, 201 bp, Homo sapiens
ttcttttgaaatgactgagtactttttattgttccatttccttctgtattatttggaagcccttttccgaatagctagtgcttaccctagaaaattaagcwtgtatccttgatatatcaaaatcaaaagttaactgaaacccttcctccttctgggaaatgcagggaccttacatttttaaaatctttttaatcccttttg

SEQ ID NO: 27314 - DNA, 201 bp, Homo sapiens
ccactaccaataatttagcgtgcatcttcagaattctttatatgcctacattttaatgtatttttaaataaaatagaattacattgttgaagtaaatattwaaaaatatagcatttttgcatagaaatatttatttccctcaatcccactcccctttggtgaagcaaccactgttaacaattttgtgtgtatcctccaata

SEQ ID NO: 27315 - DNA, 201 bp, Homo sapiens
ttcctcacgttgtgagaacttaaacatttagaaaatgtttgttttaatgaggctaatcgtaatcttaaatttaaaaaatttttagtttaatgtatacatayacccacaagatattattttaaagagccccataacttttcacataaatgctttttttaagtgcacttttctttctttctttttttaaactgttttgattgt

SEQ ID NO: 27316 - DNA, 201 bp, Homo sapiens; identical to SEQ ID NO: 3673

SEQ ID NO: 27317 - DNA, 201 bp, Homo sapiens
ttctttaggaatattcttcagttgataagtataatgataatagtaataatgaattagactgagtggctgtttcctgtaaatgagaaagttaaatcttaccrgaaggatcatgatgaataatgatccttatgagaaggtcaaatcttctcaattttgaagcaagttctttattcctattcattttcttattctgatttgtgt

SEQ ID NO: 27318 - DNA, 201 bp, Homo sapiens; identical to SEQ ID NO: 3742

SEQ ID NO: 27319 - DNA, 201 bp, Homo sapiens; identical to SEQ ID NO: 5646

SEQ ID NO: 27320 - DNA, 201 bp, Homo sapiens
ggaagcatccatattcctaatgaaattggaatttttccaaaagatgaggcctggtcttggatgactacattttcacttgaaacatttattttgggtaattrtaacactgaactcgacaagtaaatgttacacttggaaagaacttttttagcttttccaaccaaaggcagatgtattgcaataaaataactgtcttaaacg

SEQ ID NO: 27321 - DNA, 201 bp, Homo sapiens
gtggagactacccagtctttatgttaatggttgataaatcatcctttcagtatcattatcattaggccaatgtgtgcaggcctcccactgcagagattgaytacttttttctggcatctaattctatgcgtgggaatacattttccattaatgtgagctcactcaattttacctggaagcatccatattcctaatgaaatt

SEQ ID NO: 27322 - DNA, 201 bp, Homo sapiens
ttaatttgaaaatattaacatttaaaaatcacactggggtttttcaggtggtgggactttttcttcatttaagtggagactacccagtctttatgttaatsgttgataaatcatcctttcagtatcattatcattaggccaatgtgtgcaggcctcccactgcagagattgactacttttttctggcatctaattctatgc

SEQ ID NO: 27323 - DNA, 201 bp, Homo sapiens
gttatcaggcaaaaatagagagtattgagaaaagagaccctctcaattttgtttaatttgaaaatattaacatttaaaaatcacactggggtttttcaggyggtgggactttttcttcatttaagtggagactacccagtctttatgttaatggttgataaatcatcctttcagtatcattatcattaggccaatgtgtgc

SEQ ID NO: 27324 - DNA, 201 bp, Homo sapiens; identical to SEQ ID NO: 3877

SEQ ID NO: 27325 - DNA, 201 bp, Homo sapiens
gatctcatatcaagatcctcatctttgttacatctgcaaagacctttattccaaataaggtcacttatttaaacctcagaaaagtgatgtcttttggggtrtctttgacccaaaacaggtaccaagagatatcaagtgcagtgggaggaaggatatttgctgagcatggcttcttaatctcttttccccgttgtgggggaa

SEQ ID NO: 27326 - DNA, 201 bp, Homo sapiens; identical to SEQ ID NO: 3693

SEQ ID NO: 27327 - DNA, 201 bp, Homo sapiens
gaggcagtcagctttgcagttgaaaaggtcattgcctaatctggagaaacatattcagttcaagcactggctagagactagaggcccccaggaaagggccrtaagattggtcactgccaggaagcctgtcaatgagtgtgtggactggagaggaatctttctctgcctcagcacttggagtctccgttattcacaatcaga

SEQ ID NO: 27328 - DNA, 201 bp, Homo sapiens
tgggccgcatttcttctgaagactttaggggaaatttttttcttggatcttccagcttctggtagctcttggcattgcttggcttgtggcagcataactcyagttcctgcctctgtcttcacatttccttctttcctgtgttactatatgccttctctttttctgtcttttataaggggcaaccatcattggatttatggc

SEQ ID NO: 27329 - DNA, 201 bp, Homo sapiens; identical to SEQ ID NO: 3694

SEQ ID NO: 27330 - DNA, 201 bp, Homo sapiens
aagaaaatgtcccagttcctcaaaatatgagacaaactttgcaggattataaaattggaaaaaatagatcagaaaatcacaaaataatttctctttccaaytcacattactgtgtccccaaagcttcatttgctaacagtattaatggccaggcttaggattgcctttacatacattcaatatttctttatttagttttct

SEQ ID NO: 27331 - DNA, 201 bp, Homo sapiens; identical to SEQ ID NO: 3696

SEQ ID NO: 27332 - DNA, 201 bp, Homo sapiens; identical to SEQ ID NO: 3591

SEQ ID NO: 27333 - DNA, 201 bp, Homo sapiens
ttactgatgattgtgtaaaggttgagaaatatactgggcagcacgttttatagcagttttgcaaaacccacggaaatatccttgatgtagacatcattgtrtttggtagtcattcagtcaagggcataatgttaaattttatttcctatgtttgcttctgaagttacttaaatattaaatgaatatatttttgtttgtcaa

SEQ ID NO: 27334 - DNA, 201 bp, Homo sapiens; identical to SEQ ID NO: 3699

SEQ ID NO: 27335 - DNA, 201 bp, Homo sapiens
gtcacctttcttggcatactctgaattcattgtaagaggatttccctgaatttagcttaaatgcagcctgtaatcttctgattttctgttgacagtttctrtggttttgatgagatgtaaagtagccttttcaagtccttcatgtctttaagttaaatgacagtacttccaaagcatgcattcattttctggatctaaaat

SEQ ID NO: 27336 - DNA, 201 bp, Homo sapiens; identical to SEQ ID NO: 3749

SEQ ID NO: 27337 - DNA, 201 bp, Homo sapiens
aagcacctcccattcctcccattcactcacaaatgttctaaaaccctttacttttttagctcattcgatccttccaacgattttatgaagtgaagactttmgtcacattttgtggataaaggtgctgaggctcgcaaaacctaagttcagtattattactaagttttcttcaaatttcccgaggatatccaaaaacttgct

SEQ ID NO: 27338 - DNA, 201 bp, Homo sapiens; identical to SEQ ID NO: 3791

SEQ ID NO: 27339 - DNA, 201 bp, Homo sapiens
gagacagagtcttggcctgtcacccaggctggagtataggtgtgaatatggctcactgcagcctcgaccttctgggctcaagcaatcctcacacatcagcytcctgagtagcttggaccatagatgtgcgccaccgtgtctgactagtttttaggtgttttttttttttggaagagatgggggtctcactatgttgcacat

SEQ ID NO: 27340 - DNA, 201 bp, Homo sapiens; identical to SEQ ID NO: 3750

SEQ ID NO: 27341 - DNA, 201 bp, Homo sapiens; identical to SEQ ID NO: 3792

SEQ ID NO: 27342 - DNA, 201 bp, Homo sapiens; identical to SEQ ID NO: 3813

SEQ ID NO: 27343 - DNA, 201 bp, Homo sapiens
gttgcttattaaacatcagcatttaaccccagactctaatctgttggtagattttacccccagtgagcttatttcataaatcacttgtgcagtgaggattytgaagtaactatttggcaatagggcagaatttctctttggaaatttctgaacttgatactgaatgttgttggcactcccttcagagtctccataaaaaga

SEQ ID NO: 27344 - DNA, 201 bp, Homo sapiens
cattttaaaaacctcccagatgccagaagcctgctagactctgactatatagctacgcttttatgaatatctgaagatatgcatgtgtctaatgagcaaarcagatataatccctttcatagagtttactgtctgacaaagaaagaattaggatacatgcaacagtatgtaataaagtgcaaaatctagtactgtgtagct

SEQ ID NO: 27345 - DNA, 201 bp, Homo sapiens; identical to SEQ ID NO: 3795

SEQ ID NO: 27346 - DNA, 201 bp, Homo sapiens
agagtttactgtctgacaaagaaagaattaggatacatgcaacagtatgtaataaagtgcaaaatctagtactgtgtagctacttaaaacatattatatgytttcttcctttccttttccctgcctgatcttactgccataagaaatcttgtaactgtgattctgtcaaatgaatctaagaaggatgttgttgctgatgga

SEQ ID NO: 27347 - DNA, 201 bp, Homo sapiens; identical to SEQ ID NO: 3797

SEQ ID NO: 27348 - DNA, 201 bp, Homo sapiens
agtgagaccctatttcaaaaattgaaaaaagcaaaagcaatagtaacaccattatcctgcaaatatgatctttttcatattaattcacgtgataatacagktggtgcagtagtactttatttaggatgtctacatacaagataaaactcttcatggaattctgatttgtaagacaaacccacctttgaagaggtactgatc

SEQ ID NO: 27349 - DNA, 201 bp, Homo sapiens
aaaaatttattaattctagtgttaccaaacaccaatgccatgaatttgtcatcttgcctatggctcttagcaattacttttttctttcctttctctttgastatggagattgaatttgttactcagtacgtgcttcacaaatagcttcaaataaaattaaaattattgttcaagtttaggaacaccaaaaaaaaattgtgg

SEQ ID NO: 27350 - DNA, 201 bp, Homo sapiens
cccatgatttcatttttaaaaaaaatttattaattctagtgttaccaaacaccaatgccatgaatttgtcatcttgcctatggctcttagcaattactttyttctttcctttctctttgagtatggagattgaatttgttactcagtacgtgcttcacaaatagcttcaaataaaattaaaattattgttcaagtttagga

SEQ ID NO: 27351 - DNA, 201 bp, Homo sapiens; identical to SEQ ID NO: 3608

SEQ ID NO: 27352 - DNA, 201 bp, Homo sapiens; identical to SEQ ID NO: 3838

SEQ ID NO: 27353 - DNA, 201 bp, Homo sapiens
aaaacacctgagactggataatttagaaagaaaagaggtttaactggctcgcagttctgcaggctgtacaggaagcatgatgctggccatctgcttgtctwctggggaggcctcaggaaacttacaatcatggtggaaggcaaaggggaatcaagctcatcttacatggcatgagcaggagcaggagcaagagagagagaa

SEQ ID NO: 27354 - DNA, 201 bp, Homo sapiens
aggcttagcattgcatgtatttgctatttcggggatccagttaggaaacacttattaagcacctcccattcctcccattcactcacaaatgttctaaaacsctttacttttttagctcattcgatccttccaacgattttatgaagtgaagactttcgtcacattttgtggataaaggtgctgaggctcgcaaaacctaag

SEQ ID NO: 27355 - DNA, 201 bp, Homo sapiens; identical to SEQ ID NO: 3724

SEQ ID NO: 27356 - DNA, 201 bp, Homo sapiens
atggcattctttcagtgttaatactctccatgccctgtctccagctcttagaaattatagatgctaagttaatgcagagtttagaagtgtatttgttattwtatcaaataggtttatgaaatatatacttccccctctgatattttgaaaaaaaatcttccttaatgtcttatattataagtaatataaaaaacttagtaa

SEQ ID NO: 27357 - DNA, 201 bp, Homo sapiens
cgacatagggatatcttgtactgtgtgtgtgtgtatatatatgtatatatgtgtatatatatatgtatatatatatgatgggctctccttacatatatatmtatatatgtacttatgtatatataagccaggcatggtggtacatgcctttagtccctactgtagtgctacttgggagggtgaggtgggaggacggcttga

SEQ ID NO: 27358 - DNA, 201 bp, Homo sapiens; identical to SEQ ID NO: 5645

SEQ ID NO: 27359 - DNA, 201 bp, Homo sapiens
tattgttggctgggaagctcataacaactgacaaatgatttgtgaccaaataactgtttttacttgactaagccatgatagagcagaattagcatcacggrataaatcctataattttgttaatacagtggttggataatgtaattctaatctgttggttttggagaacctcctggggttctgacaacggtgtcaaaattt

SEQ ID NO: 27360 - DNA, 201 bp, Homo sapiens
aaattttgttgcatcttctttttttcctcctaaatcctaagggtatatgaaaagacaaagaaaattcaagcaagttacaacttcaggcaaagaaaactctsataagcaattcctgtattttacttagcattttctatgaaattccatttccacaagcactaaggtaatttaccatttagttgaattgtttgattaattttc

SEQ ID NO: 27361 - DNA, 201 bp, Homo sapiens
cattcctgattgagagtagatttttctcatggacatttcagatagatttattcatttatcagaagtgcctggtgttagtcaatgctgagaaaccatgggargcagattgtagattaagaaaaatgggggaataaatcaaagagtttccagaagtctttagatcgtagcatttgaaagcacgtaaaagggtttagctttaaa

SEQ ID NO: 27362 - DNA, 201 bp, Homo sapiens; identical to SEQ ID NO: 3695

SEQ ID NO: 27363 - DNA, 201 bp, Homo sapiens
ccacttttgaaaatgaaaaataggaaagaaacttggtgatgatattagacaatttaaataattagcctgatgacatcaaaattcaaatatgtttttaattrcttaacgttttatagtttatttaagttatcttatacttgtagagccattcttggttactctttcctggtgttgtaaaggtgtcatatttcagttgccttt

SEQ ID NO: 27364 - DNA, 201 bp, Homo sapiens
ttacttaacgttttatagtttatttaagttatcttatacttgtagagccattcttggttactctttcctggtgttgtaaaggtgtcatatttcagttgccyttattattatatgcagtaggaatgaatggcaacaaattattggtttaaagattttgacttgagtattaatagacttacaaaatctatgtgtacttgttca

SEQ ID NO: 27365 - DNA, 201 bp, Homo sapiens; identical to SEQ ID NO: 3866

SEQ ID NO: 27366 - DNA, 201 bp, Homo sapiens; identical to SEQ ID NO: 3580

SEQ ID NO: 27367 - DNA, 201 bp, Homo sapiens; identical to SEQ ID NO: 3730

SEQ ID NO: 27368 - DNA, 201 bp, Homo sapiens; identical to SEQ ID NO: 3732

SEQ ID NO: 27369 - DNA, 201 bp, Homo sapiens; identical to SEQ ID NO: 3735

SEQ ID NO: 27370 - DNA, 201 bp, Homo sapiens
ttctgtttttaatttttaattaattttacaaaattacatattttcattttattgtgtttcttattttaatctctttgcttctttaatattcataatttaastgaaattagaaatcactgtccacaatctgcacctcagaatttttgtcttcaaaccaaaatattcttggatatgtcgttttctgttgcattttaattcaga

SEQ ID NO: 27371 - DNA, 201 bp, Homo sapiens; identical to SEQ ID NO: 3589

SEQ ID NO: 27372 - DNA, 201 bp, Homo sapiens
attctctcatttttctttatgattctatcctttaaactatcgaatgtctcatctttcttggtcattcttactcattttgaacttttatgtatttgtctaayattaatgaaggaaatatgtaggtacaatggaggccatggagcaccacacttaatatttttctttttctataatattttatatgactgatgaaccttgaaa

SEQ ID NO: 27373 - DNA, 201 bp, Homo sapiens
gcactggcaaagtagaagcagccagataatgacagactcaatacaaatgataagagaaaaacaaaagtagaagttgactctcacttttttagtttgttcarctgagaagatgacattgccattaaccaacctgcagaacaaggttggagaaacagtttgtgtgtatttgagcaggtagggaatggagatgaacatttaaga

SEQ ID NO: 27374 - DNA, 201 bp, Homo sapiens
aaattaaatcacaaaacaacagtatatatacacatatattttcaatggactaaaatacctttgattactatgttcttcatttgaagaaatagtgaaaaatrctaatatatccaaaagaattgaaagcagggtctcaaagaaatatatgcacacccatgttcatggcagcactgttcacaacagtcaagaaatggaagcaac

SEQ ID NO: 27375 - DNA, 201 bp, Homo sapiens; identical to SEQ ID NO: 3744

SEQ ID NO: 27376 - DNA, 201 bp, Homo sapiens; identical to SEQ ID NO: 3677

SEQ ID NO: 27377 - DNA, 201 bp, Homo sapiens
tgaacccgggaggtggaggttgcagtgagatgagatcatgctactgtactccagctctgggtgacagagcaagacttcgtcttgaaaaaaaaaaaaaaaaraaagaaaggtcttcccaactcctatattgaacattcattaattaaatgcatttaataaatacttattgagtgttctctatgtgccaggcatgttctacac

SEQ ID NO: 27378 - DNA, 201 bp, Homo sapiens; identical to SEQ ID NO: 3752

SEQ ID NO: 27379 - DNA, 201 bp, Homo sapiens
ccgtaagttattgggggtacaggtggtatttgattacatgagtaagttctttggtggtgatttgtgagattttggtgcatccatcacctgagcagtatacrttgcaccatatttgcaatcttttatccctcgccaccccccactcttgcccccaagtccccaacgtccattgtataggatttttgaatttgtgaattaatg

SEQ ID NO: 27380 - DNA, 201 bp, Homo sapiens
gtgagattttggtgcatccatcacctgagcagtatacattgcaccatatttgcaatcttttatccctcgccaccccccactcttgcccccaagtccccaaygtccattgtataggatttttgaatttgtgaattaatgcctttacatcactttgagcatatcctcagctataatgttctccaatgttgcttctgttccatt

SEQ ID NO: 27381 - DNA, 201 bp, Homo sapiens
aagaaaaaaaaagcagttgtagaactcctttaagtatttcttgtaggacttatctagttgtagtgtacttcctcagtttttgcttgtttgggaaatacttyatttctccttcatttctgaagtatagctctgcttggtatagtatttttggctgatagttttaaaaaatttcagcactttggatatatcatctcattctat

SEQ ID NO: 27382 - DNA, 201 bp, Homo sapiens
ccaatcatatcattactgagtctctctaattctgatttgtgtattcttgcatagcttttcattattttctaaaaatgtttaagttgttttcaaatattacrtagcaatttgtggaattttttttcttgtgtgtatttatttcctttagtgtaattatttgtcctctcctttaaaaataattttatatcagatttgcccata

SEQ ID NO: 27383 - DNA, 201 bp, Homo sapiens; identical to SEQ ID NO: 3598

SEQ ID NO: 27384 - DNA, 201 bp, Homo sapiens; identical to SEQ ID NO: 3601

SEQ ID NO: 27385 - DNA, 201 bp, Homo sapiens; identical to SEQ ID NO: 3602

SEQ ID NO: 27386 - DNA, 201 bp, Homo sapiens; identical to SEQ ID NO: 3603

SEQ ID NO: 27387 - DNA, 201 bp, Homo sapiens; identical to SEQ ID NO: 3605

SEQ ID NO: 27388 - DNA, 201 bp, Homo sapiens; identical to SEQ ID NO: 3606

SEQ ID NO: 27389 - DNA, 201 bp, Homo sapiens
acagtagaaacctacctttctgcactttttggttttccactttaagttatattatatagtgtgtgtgtgtgtgtgtgtgtgtgtgtgtgtgtgtgtgtgtgtgtgtgtgtttgacagagttttactctgtcgccctctctggagtgcagtggtgcaatctcagctcactgcaaaatccgcctctctggtacaagcagttct

SEQ ID NO: 27390 - DNA, 201 bp, Homo sapiens; identical to SEQ ID NO: 3702

SEQ ID NO: 27391 - DNA, 201 bp, Homo sapiens; identical to SEQ ID NO: 3705

SEQ ID NO: 27392 - DNA, 201 bp, Homo sapiens; identical to SEQ ID NO: 3706

SEQ ID NO: 27393 - DNA, 201 bp, Homo sapiens; identical to SEQ ID NO: 3710

SEQ ID NO: 27394 - DNA, 201 bp, Homo sapiens
tgggcaaggcaaagccaaaggtggcctttacaagattattaaatctggtcttccagggtatctaatctgtgtgaggaccctgatgaactaattttcttctmaagtgctatatatgtagatatcatcatagagttacacatgaaatggctcattcaatacttttttagatgcctggaaatatttaagggagtaactaatcaa

SEQ ID NO: 27395 - DNA, 201 bp, Homo sapiens; identical to SEQ ID NO: 3766

SEQ ID NO: 27396 - DNA, 201 bp, Homo sapiens
ttcatttacttatccagaataatttcatgggagcttcatttcatccaaagacttctccattcaatcacagattgaaatgtatgtatgaaagaagaagtctsaaagacaattcaaatacttgcttagacctgtgatattttaatataatctggttgaacattgggtagaaagcagtctaacttttttctaggttgttacatg

SEQ ID NO: 27397 - DNA, 201 bp, Homo sapiens; identical to SEQ ID NO: 3869

SEQ ID NO: 27398 - DNA, 201 bp, Homo sapiens
tggatcacttggtagctctatttttggctttttgaggaaactccaaactgttctccatagtgcttgtactaatttacattcccaccaacaatgtacaaagkttccctttttttcacctctccagcattttttattgcctgtcatttggataaaagccattttaactgtggtaagatgatatctcattgtagttttgatttg

SEQ ID NO: 27399 - DNA, 201 bp, Homo sapiens
ctgagaatgccattatttcattcctttttatggctgagtagtattccatggtgtattatatatataatacatatattttatatatatgtatattacaattyctttatacacttgttgattggtggctatttggtctgattccaaatttttacaattgtgaattgtgctgctataaacttgtgtgttcaagtatctttttca

SEQ ID NO: 27400 - DNA, 201 bp, Homo sapiens
agtgtttcttgtgggcaacagatcattgggtcatgttttttcatccattcagccactttatttctttttattggagagtttagtccatttacattcaatawtttcatttaagtaggaacttcctcctgccattttgtaatttgttttctcgtggtttcatggtcatctctcccttctttccatcttctttttcatgaaaat

SEQ ID NO: 27401 - DNA, 201 bp, Homo sapiens; identical to SEQ ID NO: 3728

SEQ ID NO: 27402 - DNA, 201 bp, Homo sapiens; identical to SEQ ID NO: 3839

SEQ ID NO: 27403 - DNA, 201 bp, Homo sapiens; identical to SEQ ID NO: 3729

SEQ ID NO: 27404 - DNA, 201 bp, Homo sapiens; identical to SEQ ID NO: 3843

SEQ ID NO: 27405 - DNA, 201 bp, Homo sapiens
tgccttggtgtggagtctttggagttcactcacctctctatattgtttatcaaatttgggaactttttagccattttttgagttatttttagccttgtctyctttgccttttctttcagtactccactgacatgaatgttggagcttttgttaagttcccacatgtccccaaggtactgttcttttttattcttttagtct

SEQ ID NO: 27406 - DNA, 201 bp, Homo sapiens; identical to SEQ ID NO: 3620

SEQ ID NO: 27407 - DNA, 201 bp, Homo sapiens
tacggtttggagccacatgatgtcgctctttaccacaaaatacatgagagaaggaggaagaagggaaaattccttctattcttactggaaggaaccatatrcactctttggagtctgaaatatggaggatgcagctgcacttgactgaccgattaaaagatttcccttgactttgagaaacgatatttaatcagaacaaaa

SEQ ID NO: 27408 - DNA, 201 bp, Homo sapiens
actttgaggagtgaccgaaggatattacaattgaaactagaaattttgggaaagttcaaacgacatgcaaggaaaagaagatacgtttacgtatttaatasttacacgtttagccacatgatgtcgctgtccaccacaaggtctttctccacaaaagaaataacagcgtgcattacgtattcagatactgctttgcttcat

SEQ ID NO: 27409 - DNA, 201 bp, Homo sapiens
caattattttgaatactttgtcaagtaattcacatagctctatttctttaggtttggtttctggaggtgtgtttgtgtgtgtgtgtgtgtgtgtgtgtgtgggcacgcactatttgattgggccatgtttcctgttttctcatattccttattactttgtgttgatatctatacatttcaaaaaaacaaaaaacaacaaca

SEQ ID NO: 27410 - DNA, 201 bp, Homo sapiens
acaattattttgaatactttgtcaagtaattcacatagctctatttctttaggtttggtttctggaggtgtgtttgtgtgtgtgtgtgtgtgtgtgtgtgtgggcacgcactatttgattgggccatgtttcctgttttctcatattccttattactttgtgttgatatctatacatttcaaaaaaacaaaaaacaacaac

SEQ ID NO: 27411 - DNA, 201 bp, Homo sapiens
gtaaaagcgttactatttctccacatcctctccagcacgtgttgtttcctgactttttaatgattgccattctaactggtgtgagatggtatctcattgtrgttttgatttgcatttctctgatgaccagtgatgatgggcattttttcatgtgtctgttggctgcataaatgtcttcttttgagaagtgtctgttcatat

SEQ ID NO: 27412 - DNA, 201 bp, Homo sapiens
ccttgaggaatcgccacactgtcttccacaatggttgaactagtttacactcccaccaacggtgtaaaagcgttactatttctccacatcctctccagcaygtgttgtttcctgactttttaatgattgccattctaactggtgtgagatggtatctcattgtagttttgatttgcatttctctgatgaccagtgatgatg

SEQ ID NO: 27413 - DNA, 201 bp, Homo sapiens
ggtatcttttatttcattgtttacattacatctacaatccatttggaatatacatatttttatcattgttgtgaggtaggggtcaagatttatttttattycttcttattatttttattatactttaagttctaggatacatgtgcacaacgtgcaggtttgttacataggtatacatgtgtgccatgttcgtttgctgca

SEQ ID NO: 27414 - DNA, 201 bp, Homo sapiens; identical to SEQ ID NO: 3701

SEQ ID NO: 27415 - DNA, 201 bp, Homo sapiens; identical to SEQ ID NO: 3714

SEQ ID NO: 27416 - DNA, 201 bp, Homo sapiens; identical to SEQ ID NO: 3829

SEQ ID NO: 27417 - DNA, 201 bp, Homo sapiens; identical to SEQ ID NO: 3704

SEQ ID NO: 27418 - DNA, 201 bp, Homo sapiens; identical to SEQ ID NO: 3831

SEQ ID NO: 27419 - DNA, 201 bp, Homo sapiens; identical to SEQ ID NO: 3709

SEQ ID NO: 27420 - DNA, 201 bp, Homo sapiens; identical to SEQ ID NO: 3832

SEQ ID NO: 27421 - DNA, 201 bp, Homo sapiens
aattagttggactcccatttaagtttccctaccactggagagaaatagtaaccaactgaaacctggttaatactcattgacagtgtgggaggtctaacacrtaaaatagatatttttcttgactcctctccttcccctcacttccattttctttatttccttttttggcactatcctttgttgctcccttgtccatgaagt

SEQ ID NO: 27422 - DNA, 201 bp, Homo sapiens
gagtcccacaatactttacatatactttagttattgcatgtattaagttggtttctagttgcttgagtgtatgtccaactagactgtgagcacactgaggsaaggaatttggcttggaaagtaaaattggctcccagtgttttatctaaacaaataggctcaatttacaacaggattccatcctcttacgctgtgtattcc

SEQ ID NO: 27423 - DNA, 201 bp, Homo sapiens
taaagtggacagattgcctgagctcaggagttcgagaccagcctgggcaacatgatggaacaccatctctactaaaatacaaaaaaaaaaaaaaaaaaaawaattagccaggcatggtggcatgtgcctgtagtcccagctactcaggaggctgaggcacgagaattacttggacctaggaggcagagactgcagtgagct

SEQ ID NO: 27424 - DNA, 201 bp, Homo sapiens
ttttctcaaggcagtagaaagcttaagcagaggagtgatataatctgatttatatttttaaaagagtttgctatatgtatgttatgcctcatttttttttwaattttttatttttagatggagtcttgctctgttgcccaggctggactgcagtggcacgatctcagctcactgcaagctccacttcccgggttcatgcca

SEQ ID NO: 27425 - DNA, 201 bp, Homo sapiens; identical to SEQ ID NO: 3712

SEQ ID NO: 27426 - DNA, 201 bp, Homo sapiens
aggccaggagttcaagaccagcttgggcaacacagcaaggccctatctctctctctgtctctctctgtctctctctctctctctctctctctctctctctmtatatatatatatatatatatattttttttttttttttttttttttgagacagagttttgctcttgttgcccaagctggagtgcaatggtaagatctcgg

SEQ ID NO: 27427 - DNA, 201 bp, Homo sapiens
tgaggccaggagttcaagaccagcttgggcaacacagcaaggccctatctctctctctgtctctctctgtctctctctctctctctctctctctctctctmtatatatatatatatatatatatattttttttttttttttttttttttgagacagagttttgctcttgttgcccaagctggagtgcaatggtaagatctc

SEQ ID NO: 27428 - DNA, 201 bp, Homo sapiens
cttaggtcaggccaggctctgttctaggtgatgcagatataatattaaatataacacagtcctgcccttataaatctaatggtgaagggagaaatgtaaakaaatatgatggaaatattacattgtcatgtgataagggcgacaataatgccctacgtaggtagggtcaacgaaggggaaggaagctgggacaaaccacca

SEQ ID NO: 27429 - DNA, 201 bp, Homo sapiens
tggtgtctaccttatagggttcttggaagaattagatgagataatgcacacatattgcagaatctgaagaacaatcagggtttagtaaatagtagctattyttaaatgatttttccaggtatgagtctatcctacagcttcaaaatttagacccaggttgttctgagtattctctgtgggaagaatctgctatagagaaga

SEQ ID NO: 27430 - DNA, 201 bp, Homo sapiens
catgaaaacgcatctagaggagtgtcacaagtttttcacagtgacatttttgcttactgatacaagacagtgatggtgactgatgatgtcccagtgatttytgagtagcttctaaccagcacataactcccccaacagtctttaagtctttaggtgcccatattttcctctttgttctcccccttcagactgagagtttgt

SEQ ID NO: 27431 - DNA, 201 bp, Homo sapiens; identical to SEQ ID NO: 3698

SEQ ID NO: 27432 - DNA, 201 bp, Homo sapiens
tccccaaggcttcacaagaagtaaacaaaacaaacaaaaactatttgattattgagccaaggagtcaatgtgagaatagtttttcaccttcattatcaaawgcctgtgtggagctgaatgtggtggctgacacctgtgatcctagcactttggggaggcagaggtgggaatattgcttgaggccaggagttcaagaccagc

SEQ ID NO: 27433 - DNA, 201 bp, Homo sapiens; identical to SEQ ID NO: 3616

SEQ ID NO: 27434 - DNA, 201 bp, Homo sapiens; identical to SEQ ID NO: 3753

SEQ ID NO: 27435 - DNA, 201 bp, Homo sapiens; identical to SEQ ID NO: 3773

SEQ ID NO: 27436 - DNA, 201 bp, Homo sapiens
attttgataatcaatacctataaatgttatagtaaacaaatttaatatatatgttacctaatattttattctatgtattgtcctcattttataaaatatasctgtgtcaaaatcatctgttcaattttgcctttttatctttagtctagaacttgaattttaagcatttcttttacatctatttatcttctttttatcata

SEQ ID NO: 27437 - DNA, 201 bp, Homo sapiens; identical to SEQ ID NO: 3756

SEQ ID NO: 27438 - DNA, 201 bp, Homo sapiens
tccattgggaaatgcctgctgacgtatgaaatcttaaaagttttttgcctaataaagtctatcaccttgtctttgaacttaagctcctctgagctggacastagtaaatttactttcataatatgagtctagtttgcataaagaaataagaaagagtaggtagtgaaaaacataaagtccagcattttgttaggttacaca

SEQ ID NO: 27439 - DNA, 201 bp, Homo sapiens; identical to SEQ ID NO: 3597

SEQ ID NO: 27440 - DNA, 201 bp, Homo sapiens
tttggggctctattattagatgcaagtatgtttttagttgctatatcttcctgattggtccttttgtcattataaaatgtccttcttgatttctagtaacrctttttgtcttgtctgttttgtctgatattagtgtagtcactccagctatcttgtggttgctgtttgtacaatatatgttttcccattcttttactttca

SEQ ID NO: 27441 - DNA, 201 bp, Homo sapiens
gcccttagaacttaaagtcatattttggttctcaaatcagttccaagagtaggtgatctagccctttcattctaaacactacacatgtagtactagagtayaatattgtatttgcttattttttcagagtcagggtcttgctatgttttctagactggggtgcagtggggcaatcatagctcactctaaccttgaactctt

SEQ ID NO: 27442 - DNA, 201 bp, Homo sapiens
caggactaaatctgagagtgagcagatgcaccattatttcaagattgaacctaaggatgtggcaaggtaaggagaaaagtcaggatgacaagttgccctgyagccgccagttctcatcagttgaagatatattaaaactatggtacacataagccactccatcaaacagtaaatatggctatactgcaagcagtaaaaaag

SEQ ID NO: 27443 - DNA, 201 bp, Homo sapiens; identical to SEQ ID NO: 3621

SEQ ID NO: 27444 - DNA, 201 bp, Homo sapiens; identical to SEQ ID NO: 3859

SEQ ID NO: 27445 - DNA, 201 bp, Homo sapiens
aaatatcttgtgattctgctttcaattttttatttgcattcagataattactcatacatgtatatatacatatatagagagagacctggtaggctttttgytattatttcttttccaaagtttgaagggatttccaaaaggtactggtgactgaaagtaccttttggcagtccctgcaaatctaatggttttaatagctgt

SEQ ID NO: 27446 - DNA, 201 bp, Homo sapiens; identical to SEQ ID NO: 3891

SEQ ID NO: 27447 - DNA, 201 bp, Homo sapiens
aaatataaggactttgaggagtgaccgaaggatattacaattgaaactagaaattttgggaaagttcaaacgacatgcaaggaaaagaagatacgtttacrtatttaatacttacacgtttagccacatgatgtcgctgtccaccacaaggtctttctccacaaaagaaataacagcgtgcattacgtattcagatactgc

SEQ ID NO: 27448 - DNA, 201 bp, Homo sapiens
ggatagtgtttggaataacctatatcctggacatttcttagattgttctttggatcaacaatgcccttgtctatgcaatagttaataagctacattttttktttgtttgtttgtttttgttgagacagtcttgctctgtcacctaggctggagtgcagtggtgtgatctcagctcactataacctctgccacccgggttca

SEQ ID NO: 27449 - DNA, 201 bp, Homo sapiens
ggcttgtaagttattcttcctcaagtaatgatgttaactgcaaataaaataaatttacatatgttaaaattttctgtacttaatattttcacaatataatrgaatccagcatataagatatgcttagtaaatgctgactgaatgaataaatatgtgcatatatgaattggatggtaacactgttcaacacagagggaaaaa

SEQ ID NO: 27450 - DNA, 201 bp, Homo sapiens
aaggaattataaatgtggagattattttccttatggaattatggaagggtgtagacccagctctgtctgaaaccagtaattaattacccatttccatgtaygagtcagtacaggattctctggtttatttttgcttaaatcggttaacttgggatttactgttagagtatgattaacataaatacacatttccatagatgg

SEQ ID NO: 27451 - DNA, 201 bp, Homo sapiens; identical to SEQ ID NO: 3830

SEQ ID NO: 27452 - DNA, 201 bp, Homo sapiens
ttaagtagatcttaaagtttctaattcaattgtaatatgtttgtaatcattactaaaagaaaatactggattacacactctccaatgagatttgaaatgtyctgggtcttaaaaggacataaaattgaaaatgattgcatttaacaaattgcagacagatatagattgcattttgaaaatcaacgaatggatctaaaattt

SEQ ID NO: 27453 - DNA, 201 bp, Homo sapiens; identical to SEQ ID NO: 3708

SEQ ID NO: 27454 - DNA, 201 bp, Homo sapiens
tctacttaattacctgttgacttaattgctgctgtcctccagtttaagttgttgagctcttctactattttgggaagatttctttgagcaccgattatacycatttttctttcatttttggtacctggctgtatgaaaatattttagggtaggaaaattcacacttatttgggctttaagtataagagagtcttcccatac

SEQ ID NO: 27455 - DNA, 201 bp, Homo sapiens; identical to SEQ ID NO: 3688

SEQ ID NO: 27456 - DNA, 201 bp, Homo sapiens
tctcttccttaagtgcctatgattttttcacagtcacaggtctatgcctggtcaatacccagtggccaggtctctgagctgcgtgcagagatggcagcgayttggagggctgggaggagataaggggaggaaagatcacttttcatgacaacttacaacttgattccacttataagccatttattttcagaaacaagtaat

SEQ ID NO: 27457 - DNA, 201 bp, Homo sapiens
cacaaattaagagaaagtgttaattgatttgagagtttgtgtatttttttttcctattttgtgctgaaaagctgaagttggcatcaaccaaggcatattgktatctatgtatcaagctaaataatttaaagatctttaagactattaattcagagatgctgtataaatagaatcagtgccagattttttgtttcaattcta

SEQ ID NO: 27458 - DNA, 201 bp, Homo sapiens
tcatgggttggtgttgaatgcctgcagcttttccaggcacagtgtgcaagctgcttagaactgctggtggattcccattttggggtcttgagggtggtggmcctcttctcacagccattgcactccagcctgggcaacaagagtgaaactccatctcaaaaaaaaaaaaagaaagaaagaaatttcctctgccagataccc

SEQ ID NO: 27459 - DNA, 201 bp, Homo sapiens
tcttttaatctattgatatgagcatatgatttttcttcgttttactaatatgttggattacactaattgatttttgaatgttggaaaaaaccttccattcytagggtaaatcccacttagtcatgatatattatcttttcaaacattgttagatttaacttgtattttagtaaatatttttacatctgtgttcatgtagaa

SEQ ID NO: 27460 - DNA, 201 bp, Homo sapiens
tctttctttctttctctttctttctttctttccttccttcctttctctttctttctttctttttcttctttctcttttttttttttttcagatggagtctygctctgttgcctaggctggagtgtagtgacaggattttggctcactgcaacctccgcctcccggattcaagcaattctctgcctcagcctcgggagtagc

SEQ ID NO: 27461 - DNA, 201 bp, Homo sapiens
gcttctttttttttctttctttctttctttctttctttctttctttctttctttctttctttctttctttctttctctttctttctttctttccttccttyctttctctttctttctttctttttcttctttctcttttttttttttttcagatggagtctcgctctgttgcctaggctggagtgtagtgacaggattttg

SEQ ID NO: 27462 - DNA, 201 bp, Homo sapiens
atggagtgaggaggatttattagttgctgcctgaagaaaagggaaatgctccaaaaaatttggttgtttccagactcaaatagagcctgcctttcattgaytctgttgcccttaaagcttcacggtgaagatgcagttgcttccaaaaggcttctttctggtgcctaagcctccttatacttgcttcagagccctttccgt

SEQ ID NO: 27463 - DNA, 201 bp, Homo sapiens
tagtcctttgaagttccagcttaatgtagtttggaggccccataagactccccatcttgaacatcctgcttctttttttttctttctttctttctttcttyctttctttctttctttctttctttctttctttctttctttctctttctttctttctttccttccttcctttctctttctttctttctttttcttctttct

SEQ ID NO: 27464 - DNA, 201 bp, Homo sapiens
  misc_feature (101)..(101): n is a, c, g, or t
gctgggtgagcatagacaaactgcctgaattcatattttcttaattaccctttctgtaaattgggtgtagtaataataataacacctattttattgagttnccatgagaactaaaggagaaaaaaagaactgagcatagtgcttgacatatagttaataaatgtctaatcttttttttttgagacagagtctcgctctgtc

SEQ ID NO: 27465 - DNA, 201 bp, Homo sapiens
atagaaaatagcagcatgacaaattaaatgtgtcattggggaagtgagattgtataatgaactgagtttcctggtcagtcctgctggaactgtgcctttcrgcaaaatgagtttgatgatttcattccaaagatcaagttgcagcaattttcatcatgaatgttacccaatcatagaaaaattggcaacatttctcagcag

SEQ ID NO: 27466 - DNA, 201 bp, Homo sapiens
tactggaaagattagtcctttgaagttccagcttaatgtagtttggaggccccataagactccccatcttgaacatcctgcttctttttttttctttcttyctttctttctttctttctttctttctttctttctttctttctttctttctttctctttctttctttctttccttccttcctttctctttctttctttctt

SEQ ID NO: 27467 - DNA, 201 bp, Homo sapiens
gctactcgggaagctgaggcaggagaatggcatgaacctggaaggcggaacttggagtgagccgagatcgcgccactgcactccagcctgggcgacagagygagactccgtctcaaaaaaaaaaaaaaaagtttaatttgataattggcttttgttgaaagtatatagaaataatactgattttatgttaactttgtatcc

SEQ ID NO: 27468 - DNA, 201 bp, Homo sapiens; identical to SEQ ID NO: 3681

SEQ ID NO: 27469 - DNA, 201 bp, Homo sapiens
ctctctgatatttgaatttggggttgtgctttcacagtgagaaagtctaaacctatttcttgtacattaatacttttcactattctaattatggtgatgcytttagctattaagaatttctgggattgaaatgtgtcagaagttagttattaagtattgtggattctgaagctctctaaatcaagtcctccctttaccaat

SEQ ID NO: 27470 - DNA, 201 bp, Homo sapiens
ctgggagatgaagagaaaggacgttttagtgagtgctttttttgcacatgaggcaatagatttcaaattcctgtggaagaaatgtgagaacctgggaagastgaatattcagaactgagcagcagaggcaatgacacagcatggaaagatttcctctgatccttctaccttctcttttactgaagtgaatttgttgtctct

SEQ ID NO: 27471 - DNA, 201 bp, Homo sapiens; identical to SEQ ID NO: 3579

SEQ ID NO: 27472 - DNA, 201 bp, Homo sapiens
ttttggcatgttatttaaacaattacaaaatcacctaactacactgtcttgcagctgcctttctttttttgtcttgtccacgtgagtatattgggagactytgtttaatgtctccacgaattctagatagactgttcctgcagcatttctttttttaaattttgttttgataagcatttattttggcaatgattctagtaa

SEQ ID NO: 27473 - DNA, 201 bp, Homo sapiens
gtttgttacccaggtaaacatgtgccatggtggtttgctgcacagatcaacccatcacctaggtattaagcccagcatccattaggtattcttcctgatgytctccctcccattgctcccccaacaggccccagtgtgtgttgttccccttcatattttcatgtgtactcatcattcagctcccacacgtagtgggacgat

SEQ ID NO: 27474 - DNA, 201 bp, Homo sapiens
accagggcctgcctacaaaattggggattacaatgtgacatgagctttgggcggggacacagatccaaaccatgtcattctgccactgccctcaccctccrcgaaatctcatgacgttcttacattgcaaaatacaattatcccttcccaatggtccctcaaagtctgaactcattccagcattaagccaaaagtccaaag

SEQ ID NO: 27475 - DNA, 201 bp, Homo sapiens; identical to SEQ ID NO: 3619

SEQ ID NO: 27476 - DNA, 201 bp, Homo sapiens
aaaaactttacttagcagtttttgtaatgcatatatgctgcagtgatttatcttagttttcctttatctgaagatctatttatcttccatttgaatgatayagaattctgggggattgacagattttattttcttccacttaaaaaaaatgttattctactgtcttctaatgctcatagtttctgatgagaagtgtgtagt

SEQ ID NO: 27477 - DNA, 201 bp, Homo sapiens
aggaatgcatcacatttttctggtattctatgttaggtaattttggattatatcttgatattattaatgtgttattcttgagattcatcattctgtttgtrttagtccattattgcactgttataaagaaacacccaagactcggtaatttataaagaaaagaggtttaattggctcacagttccacaggctgtaggaagc

SEQ ID NO: 27478 - DNA, 201 bp, Homo sapiens
tttgtttagattttttatgattatgtcttggtagtttgtatgtttctaggaattaatcaatttcttctaggttattgaattttttggtatatgattttaawagcctcttataattgtggcatcaggtgtaatgccacctcttttgtttctgacttccagtctttttgtttttttcttagtctagctaaggggcttgtcagt

SEQ ID NO: 27479 - DNA, 201 bp, Homo sapiens; identical to SEQ ID NO: 3733

SEQ ID NO: 27480 - DNA, 201 bp, Homo sapiens
ttccagtattgatttctagttttattccactgtggtcagaaaagatatttagtaggatttcaaccttcttgaatttgttaagacttgttttgtgacctgaygtgtgatttatcctggaaaatgctctgagtgtgcttgagaagactgtatatttgctgctgttgggtggaattttctgtatatgtctgttagttccatttc

SEQ ID NO: 27481 - DNA, 201 bp, Homo sapiens
atgccggccatctgcttggcttctggggagccttcaagaatcatggtggaaggcaaaaggaaagcggctcatcttacatggccggtgcaggagcaagggasggggggaagtgctacgcacttttaaacaaccagatttcacgagatctctctcactgttatgagaatagcaccaagggggaaacctgccccatgatctaat

SEQ ID NO: 27482 - DNA, 201 bp, Homo sapiens
ttagtctagaacttgaattttaagcatttcttttacatctatttatcttctttttatcatatttgtgtagcactgacttctttttaacttactttgttgaratgtatttgccatgttcatgaagaattaatatgaacaatttaaaatagtttaaatggcagtttaatagtattttttattttgttccttgtttgtataaga

SEQ ID NO: 27483 - DNA, 201 bp, Homo sapiens
catctgcttggcttctggggagccttcaagaatcatggtggaaggcaaaaggaaagcggctcatcttacatggccggtgcaggagcaagggagggggggawgtgctacgcacttttaaacaaccagatttcacgagatctctctcactgttatgagaatagcaccaagggggaaacctgccccatgatctaatcacctccc

SEQ ID NO: 27484 - DNA, 201 bp, Homo sapiens
cacaggcataatacagccaggctctttgctaaagcataaggaaagtgacctttgctccagtcctcagtaagttcctcatctccatctgagacctcctcagmctggacttctttgtccatttcactatcagcacttcggtcccaatcattcaagtagtctctaggaagttctaagctctccctcatcttccctccacactat

SEQ ID NO: 27485 - DNA, 201 bp, Homo sapiens; identical to SEQ ID NO: 3584

SEQ ID NO: 27486 - DNA, 201 bp, Homo sapiens; identical to SEQ ID NO: 3585

SEQ ID NO: 27487 - DNA, 201 bp, Homo sapiens
aaaaaaaaaaaataataaataaagaaagaaagacattctcaggaatgggacccggcagtctatgttttaacaagccttctatgtgataccaatgtactgtraagttttaagaactggtctaaggtaaatattcctgaggttgtcttatatcattacagggtcagaatgcatgcaaggaagccatctgtttatggttcttgt

SEQ ID NO: 27488 - DNA, 201 bp, Homo sapiens
gattccatcctcttacgctgtgtattcccatctcttccatgctgcatcccaccacccttcaatgttattacaataaaattaagatcaaataatttattcarctaatttttcttgttttggacaaaatagacatcctaatacatttatagccaaagtttaatctagacactaaaaggagcatattttgcctttaggctctgt

SEQ ID NO: 27489 - DNA, 201 bp, Homo sapiens
cagtagctggtcttagagcagagctaaaacaattggcacccgaagcataaatatatgggagactgacacaacagttctcgttttagagtttgctttcactrgacttactttatttagttttatgtgaaattgaatttttattataaaaggtaatacgtgttctttaaaataaatcaaataaaccagagatatataaagaaa

SEQ ID NO: 27490 - DNA, 201 bp, Homo sapiens
ctcaaaaccaaaaatagcacttgttcacaattataaatttagcacctgagctttataaaacctggtctaggtgtattacaaaaaggacgtttggaagactrttatgaactttatgtgactccctccacaataatcacattcctttactggaactcactcagttctagtattcaacgttgaattgtggctctatttgtagat

SEQ ID NO: 27491 - DNA, 201 bp, Homo sapiens
cctggtgttagtgtcacctctcatttttcttgactagacttggaagtagtttattaatgatattagtctttccaaggctaacttttggtgttttgggttckctttgttgtatgtttgctttctattttattaattttcatactttattaatttatttccttccttatatgtttatatttcagtgtgcaacagaagtactct

SEQ ID NO: 27492 - DNA, 201 bp, Homo sapiens
atccaatctgtcggatagtgtttggaataacctatatcctggacatttcttagattgttctttggatcaacaatgcccttgtctatgcaatagttaataarctacattttttttttgtttgtttgtttttgttgagacagtcttgctctgtcacctaggctggagtgcagtggtgtgatctcagctcactataacctctgc

SEQ ID NO: 27493 - DNA, 201 bp, Homo sapiens
gatgccaggtgcggtggcatggggctcacacctgtaatcccagcactttgggaggccgaggcaggccaatcacttgaggtcaggagttcgagaccagcttktgcaacatggcgaaacctcacctctaataaaaatacaaaaattaaccgagcatggtggtgcgcgcttgtagtcctagctacttaggaggctgaggcaaga

SEQ ID NO: 27494 - DNA, 201 bp, Homo sapiens
aaggtggaatataaaaaaaattatagaaagataaatttttgttcagatgcatctactgcagcaatttgggaggctaaggtgaaaggatcgtttgagcccaraagtttgagaccagctgggcaacatagtgagaccttgtctctacaaaaaattaaaaattagctgggcgtgggggcgcttggcctagaagttcaaggacag

SEQ ID NO: 27495 - DNA, 201 bp, Homo sapiens
cagcaatggaaatccagtttgtcttcagccagtggcatatctcagacaataggcaagccatgagaatggttgttggactgcagtttcggactctattactwcatgtatagtatttagaataaaagagctaggtctcctcatgtcagcacttatttgaccaatgggagtatgattttaagtttttagggtcacactttgaag

SEQ ID NO: 27496 - DNA, 201 bp, Homo sapiens; identical to SEQ ID NO: 3743

SEQ ID NO: 27497 - DNA, 201 bp, Homo sapiens
gccctttcattctaaacactacacatgtagtactagagtataatattgtatttgcttattttttcagagtcagggtcttgctatgttttctagactggggwgcagtggggcaatcatagctcactctaaccttgaactcttgggctcaagagaatcctcctgcctcagtctcctaagtagctaggactacaggtgcacacc

SEQ ID NO: 27498 - DNA, 201 bp, Homo sapiens; identical to SEQ ID NO: 3747

SEQ ID NO: 27499 - DNA, 201 bp, Homo sapiens
gttctgaatggtaatgcctaggttttcttctagggtttttatggttttgggtctaacgtttaagtctttaatccatcttgaattaatttttgtataaggtrtaaggaagggatccagtttcagctttctacatacggctagccagttttcccagcaccatttattaaatagggaatcctttccccattgcttgtttttctc

SEQ ID NO: 27500 - DNA, 201 bp, Homo sapiens
tagtcccaattactcaggaggctgaggcgagagaatcgcttgagcctgggacattgaggctgcagtgaactgtgatggcacaactgcatttcagcccgggwgacagcaagattctgtctcaaaaaaaaaaaaaaaaaaaagagtagtttaactactccctactttttattcaatattggacatctacattgggatatttat

SEQ ID NO: 27501 - DNA, 201 bp, Homo sapiens; identical to SEQ ID NO: 3592

SEQ ID NO: 27502 - DNA, 201 bp, Homo sapiens
aagttctgaatggtaatgcctaggttttcttctagggtttttatggttttgggtctaacgtttaagtctttaatccatcttgaattaatttttgtataagstgtaaggaagggatccagtttcagctttctacatacggctagccagttttcccagcaccatttattaaatagggaatcctttccccattgcttgtttttc

SEQ ID NO: 27503 - DNA, 201 bp, Homo sapiens
agctctaattggtcttcctattttgtcttttccatcataatagccctcactctaccagtcagggagccaatgtgggggttctgctagctgctaagtatacstatgccaattatgcattctggcactggggaaatgaccacaggatgagtccagggacccactggacccactctaagtcagacttcagctaaaactccataa

SEQ ID NO: 27504 - DNA, 201 bp, Homo sapiens
ccatgcctaagttctgaatggtaatgcctaggttttcttctagggtttttatggttttgggtctaacgtttaagtctttaatccatcttgaattaattttkgtataaggtgtaaggaagggatccagtttcagctttctacatacggctagccagttttcccagcaccatttattaaatagggaatcctttccccattgct

SEQ ID NO: 27505 - DNA, 201 bp, Homo sapiens
attttgtgcgtggagatgattgatcaatggcaaacttattttacgctccagatagctaaaacaaacgttgatattttgatacataactcattacattttamttcagggtttataaaaaagtaatctctaaaatcagaatttgaatgaattttgatgcaagaggcattccagaggagtagagaagtatagaaacagaattta

SEQ ID NO: 27506 - DNA, 201 bp, Homo sapiens
ccttgcccatgcctaagttctgaatggtaatgcctaggttttcttctagggtttttatggttttgggtctaacgtttaagtctttaatccatcttgaattratttttgtataaggtgtaaggaagggatccagtttcagctttctacatacggctagccagttttcccagcaccatttattaaatagggaatcctttcccc

SEQ ID NO: 27507 - DNA, 201 bp, Homo sapiens; identical to SEQ ID NO: 3715

SEQ ID NO: 27508 - DNA, 201 bp, Homo sapiens
cctctaggccagcagaacataatgtcacagggacagtaagcaaaaattttactagtgggtcactaggggtgatggtaagtggtgccacttccacttccacyccttgattcctggacctgtgaattccggctatgggagaaacagtaccatatattggatgctgattcagagcatacacaaccttctggagaattttgcccc

SEQ ID NO: 27509 - DNA, 201 bp, Homo sapiens
attgcttttggtgttttagacatgaagtccttgcccatgcctaagttctgaatggtaatgcctaggttttcttctagggtttttatggttttgggtctaamgtttaagtctttaatccatcttgaattaatttttgtataaggtgtaaggaagggatccagtttcagctttctacatacggctagccagttttcccagcac

SEQ ID NO: 27510 - DNA, 201 bp, Homo sapiens; identical to SEQ ID NO: 3716

SEQ ID NO: 27511 - DNA, 201 bp, Homo sapiens
gaaggtggaatataaaaaaaattatagaaagataaatttttgttcagatgcatctactgcagcaatttgggaggctaaggtgaaaggatcgtttgagcccrgaagtttgagaccagctgggcaacatagtgagaccttgtctctacaaaaaattaaaaattagctgggcgtgggggcgcttggcctagaagttcaaggaca

SEQ ID NO: 27512 - DNA, 201 bp, Homo sapiens
ttgttgccattgcttttggtgttttagacatgaagtccttgcccatgcctaagttctgaatggtaatgcctaggttttcttctagggtttttatggttttrggtctaacgtttaagtctttaatccatcttgaattaatttttgtataaggtgtaaggaagggatccagtttcagctttctacatacggctagccagtttt

SEQ ID NO: 27513 - DNA, 201 bp, Homo sapiens
actttcttacatatctttagtttaggatctggaatatagtatatgttcaatcactttttaaaaacatatgggggtcttgctatgttgcacaggctggactwgaacttctgggttcaactgatcctccatttcagcctttcaagtagctgagactacaggcaggctccaccactcccagcttcaatcaataattttaaataa

SEQ ID NO: 27514 - DNA, 201 bp, Homo sapiens; identical to SEQ ID NO: 3719

SEQ ID NO: 27515 - DNA, 201 bp, Homo sapiens
tcccatttttatttaaagtaattattgatagggcataacttactgttgcctctttgttaattgttgtttgcagcttgtagactttttgctcctctttcctyctcttactgtcttcctttgtgttttattgagaattgtaatgctatgtttttgttcctttcctgttttcttttgtatatcttccataggtattttctttgt

SEQ ID NO: 27516 - DNA, 201 bp, Homo sapiens
tctactttcttacatatctttagtttaggatctggaatatagtatatgttcaatcactttttaaaaacatatgggggtcttgctatgttgcacaggctggwctagaacttctgggttcaactgatcctccatttcagcctttcaagtagctgagactacaggcaggctccaccactcccagcttcaatcaataattttaaa

SEQ ID NO: 27517 - DNA, 201 bp, Homo sapiens
tataacacacatccttgacttattacctcaattaaatcaataattttaataattccaggcaacgctaagaccttgaatcattataccatttacttgtaccmtactttttgttactgatatgcctttcaattatttatatgttctagacacacagtacattattatcattgttttgttaacacctatatatgtttctttctg

SEQ ID NO: 27518 - DNA, 201 bp, Homo sapiens
ttctgtcatatcattgattctgttacataaagtgctaaattttgatatctcatattatgctactatggcttacattagaaataatatatgtcaaataaaawctcatctagatcaatagacttttcctttgtggattcttttttaaaactaccaagtttgagaatatgaatatatttgtttttcatattgttctgcaatgaa

SEQ ID NO: 27519 - DNA, 201 bp, Homo sapiens
caaatggataacattaaggttaaattaagggcgaagttgatatttggccctgacttttatatgaaggtaacatttttgcaagtaaattgtagacgtaattwaaaaaacccagctaaaacaaaggtggtattgagaaagaggaagagcaagtggtctatattgtcagaaaaataagattcatattggagagtaattgaaaat

SEQ ID NO: 27520 - DNA, 201 bp, Homo sapiens
ttatttattttataaaatgataataaaatttattttatagttgaaaagcctatttctgtcatatcattgattctgttacataaagtgctaaattttgatayctcatattatgctactatggcttacattagaaataatatatgtcaaataaaaactcatctagatcaatagacttttcctttgtggattcttttttaaaac

SEQ ID NO: 27521 - DNA, 201 bp, Homo sapiens
acacttttattaagctaacgctttgattttatccattttgtgtaagaactctgatcatcatagtttttatctgtggttcccttttcagacttgtgattccrggaggcaatagtgttcatttattgtcccccttttaaaccattgaggaataaaggacaaaaacaatagttatcagcctgaatacttctggttgttatggtt

SEQ ID NO: 27522 - DNA, 201 bp, Homo sapiens; identical to SEQ ID NO: 5644

SEQ ID NO: 27523 - DNA, 201 bp, Homo sapiens; identical to SEQ ID NO: 3676

SEQ ID NO: 27524 - DNA, 201 bp, Homo sapiens
aggaataaaggacaaaaacaatagttatcagcctgaatacttctggttgttatggttattgatttatttactaccgatctaaataatggaaaaatagtgaytcaacagaatttagaccttgtgatcaagtaaatttatatgaaaactgcattcctctggcattgcggctctcttatttctgtttgaatttcacttgatggt

SEQ ID NO: 27525 - DNA, 201 bp, Homo sapiens
tctcaaatatgtatcagaatatttcatttttgtctacattccatttatgcttgaatatttctagtgatacctttgtaatataatttattccaggagttttraaatttttttatcctacccagtgtgtcagcctttgattggtacttaaatttttttaaataacaatttattctgaatacactaatattttccaatacaaat

SEQ ID NO: 27526 - DNA, 201 bp, Homo sapiens
gcattgcggctctcttatttctgtttgaatttcacttgatggtcttctcttcatggagtctaaatctatttctttgtattagtgttttcattgtttctacmcagtaatttaaactattcactattttgtatgtgtgtgtgtgtgtgtgtgacagggtcttgctctgtcacccatgctggagtacagtggtgcaataatggc

SEQ ID NO: 27527 - DNA, 201 bp, Homo sapiens
aaagtcaaaaacctgtctgataatcaatagaattatttaccattaagccataatatgtcattcacataagcagaccaagtttgctgctcttgttgaaagaatattcagttttgtggaaaaatctataaatatctttgaccttcaaagatggtaactgtaatctgtttttattgctttgtttttatgcttacatgcatgtat

SEQ ID NO: 27528 - DNA, 201 bp, Homo sapiens
taatatgtcattcacataagcagaccaagtttgctgctcttgttgaaagaatattcagttttgtggaaaaatctataaatatctttgaccttcaaagatggtaactgtaatctgtttttattgctttgtttttatgcttacatgcatgtatatttaaaaccttcctagcatattattaaagttttaaatatcctatttata

SEQ ID NO: 27529 - DNA, 201 bp, Homo sapiens
ttttaagagatggggtttctccatgttgcccaggctggtctcaaactactgggtgcaagtgatctgcccaccttggcctcccaaagtactaagattatagrtgtgagccactatgcttggctagtcattatttctttgaatgaaaagcagcaaaaagtagtgattaagtgtgagttttggtgttatcctcccttgcctaaa

SEQ ID NO: 27530 - DNA, 201 bp, Homo sapiens
gtttgctgctcttgttgaaagaatattcagttttgtggaaaaatctataaatatctttgaccttcaaagatggtaactgtaatctgtttttattgctttgyttttatgcttacatgcatgtatatttaaaaccttcctagcatattattaaagttttaaatatcctatttatattgggaaatacctgaagttgatagggga

SEQ ID NO: 27531 - DNA, 201 bp, Homo sapiens
agttgctgggactataggcacacaccaccatgcccaactaatttttgtattttttgtagagatggggtcttaccatgttgcccaggctggtctcaaactcytgagatatcgagaaatactattttctttacaaattgtttgctactatttagagtcaactacagagatttttttgggtaaataatgtgatgacaaatttaa

SEQ ID NO: 27532 - DNA, 201 bp, Homo sapiens; identical to SEQ ID NO: 3678

SEQ ID NO: 27533 - DNA, 201 bp, Homo sapiens
tccgcacccacattccaatcattcacggaataggatcgactccataatgactgtgatgctggaaaaaatttactaaatatgtacttacagaaaagggtgaytgctcataaaatacctcaggcaagcgatcccttaaaactgattgtcccaactcagaggccctcattttctgcaatggtgattatcggaccaagaggcccg

SEQ ID NO: 27534 - DNA, 201 bp, Homo sapiens; identical to SEQ ID NO: 3671

SEQ ID NO: 27535 - DNA, 201 bp, Homo sapiens
aaatatggtaagtataatgtagaggaaaatacaaaatacaacttttatcccccatttttttcattcaactatacctcaatattcagtgacagggccacctyaatctccgcccatgaaaacgcatctagaggagtgtcacaagtttttcacagtgacatttttgcttactgatacaagacagtgatggtgactgatgatgtc

SEQ ID NO: 27536 - DNA, 201 bp, Homo sapiens; identical to SEQ ID NO: 3868

SEQ ID NO: 27537 - DNA, 201 bp, Homo sapiens; identical to SEQ ID NO: 5649

SEQ ID NO: 27538 - DNA, 201 bp, Homo sapiens
attcatggtatactacacagccttaaaaaaagaaaatcctgtcatttatgacaggaaaaaaaaataagataatccaatgtaccatttgttgaaaatacttkttctttttattgcattatcttgacatctttgtaaaaagtcggttgaccataaatgtgtgggcttaattctggactctatttcactcctttgatctatatg

SEQ ID NO: 27539 - DNA, 201 bp, Homo sapiens
gttttggagaacctcctggggttctgacaacggtgtcaaaatttatttatgtgttttcaagaaataatagcactaggtctgttagaatatcagtggatgaygtgcactagtaagacattaaactatgcactctaatacttatatgactaacaggacatacaggcagattgtatgtcctgactgatatagtaaaagtcaggc

SEQ ID NO: 27540 - DNA, 201 bp, Homo sapiens
ttttgaaattttctttccacgtagtatcatcccatctgaagatttgagcaaagatcatttacttctgagtcattcttcatatttagttattcttactacaygtagagtggtggtattacagactttcttgagaatcatatctagctatttcccccccgtatagaggcataacataccatttggcacaatattcaaagagtc

SEQ ID NO: 27541 - DNA, 201 bp, Homo sapiens
agactcaaaagtgattaaaccatcataccacttatgaaactttataaatataataaaggtgaatattagatagggcatacattactcatctccagatgaartttttggaataactgaagatcttttaaagacttgggaatgttttcagtacaggttaaaattttgtaaattattattttatatcacataaataacaaattt

SEQ ID NO: 27542 - DNA, 201 bp, Homo sapiens
taccacttatgaaactttataaatataataaaggtgaatattagatagggcatacattactcatctccagatgaagtttttggaataactgaagatctttkaaagacttgggaatgttttcagtacaggttaaaattttgtaaattattattttatatcacataaataacaaatttgcattttagataattcaaattactt

SEQ ID NO: 27543 - DNA, 201 bp, Homo sapiens
agtagaagttgactctcacttttttagtttgttcaactgagaagatgacattgccattaaccaacctgcagaacaaggttggagaaacagtttgtgtgtayttgagcaggtagggaatggagatgaacatttaagaaaatgttactttgaagtcctaagagaataccgttgtgattggaaatatgggtctggatctcagaa

SEQ ID NO: 27544 - DNA, 201 bp, Homo sapiens
ttacaaattgtttgctactatttagagtcaactacagagatttttttgggtaaataatgtgatgacaaatttaaatcatttcacagaaaatacccttattygcctttcctatttaacctacgtttttggtaagaattttgtagaaatttggaggagctcttaattgcctactatgaaggcattcatgatgaatccatggag

SEQ ID NO: 27545 - DNA, 201 bp, Homo sapiens
tataaatatcttatctacatctcaagtcacattgagggaaatttattaatatgatgtgcttattcaaaatctgatatatcagttaccaatatttttcaccytcaccgattttattcttatgtgattgttatgtttccttttggagtcaatggctgttgtgtgaggaggtcttgaaaaatattacaggaagaggacagtacc

SEQ ID NO: 27546 - DNA, 201 bp, Homo sapiens
aaatgcaaggggcaaaaaaatactacatcaatggaaaatatgaagactgagtcatacttacacttacacgttcatgcgcatggtgtcgctcttcactgagmacgtttccgcgaagaaagccgccgtttctttcttcctgcagaaaatatagcagaaagcggaatacctcttgcgaatccttccgcactaggaagccataaa

SEQ ID NO: 27547 - DNA, 201 bp, Homo sapiens
caagcatagctttaaaaacagaaattgccccgagtactaaggatgagcaataatgaaattaaaacatattgtaataacattacacaaactatattggagaytacaaagaagagattattcatagattataaagcttggaaagaatcaaaacaacacatttctggaaacagattgtataaatgctacaaaagagaaaaatat

SEQ ID NO: 27548 - DNA, 201 bp, Homo sapiens
ggtttactgggtttataaaagaattgaccagtagctatataatagatatagaaaagtctgcctgggtgtggtggctcatacttgtaataatattatattataattgttctattttattattagttattgttgctaatcttttactgtacctaatttatacattaagctttatcatgggtatgtatgtataggaaaaaatgc

SEQ ID NO: 27549 - DNA, 201 bp, Homo sapiens
tatgttaagtaaaaactaagttcatcatatatgttaagtaaaaaaaagtcacaaattaagagaaagtgttaattgatttgagagtttgtgtatttttttttcctattttgtgctgaaaagctgaagttggcatcaaccaaggcatattgttatctatgtatcaagctaaataatttaaagatctttaagactattaattca

SEQ ID NO: 27550 - DNA, 201 bp, Homo sapiens; identical to SEQ ID NO: 3731

SEQ ID NO: 27551 - DNA, 201 bp, Homo sapiens
ggtaccagctcctctttgtacctctgatagaattcagctgtaaatctgtctggtcctgggctttgtttgcttggtgggctatttattattgcttcaatttstaatttaatatttttaaatcttgggttaaatggttgaatgaatgtgtgaaaagttagatatcaatgaatgaatattcttaaatgtataaactttaatctt

SEQ ID NO: 27552 - DNA, 201 bp, Homo sapiens; identical to SEQ ID NO: 3734

SEQ ID NO: 27553 - DNA, 201 bp, Homo sapiens
tgtacattagtagaaattgagtttagtttttattattttgtgcgtggagatgattgatcaatggcaaacttattttacgctccagatagctaaaacaaacrttgatattttgatacataactcattacattttaattcagggtttataaaaaagtaatctctaaaatcagaatttgaatgaattttgatgcaagaggcatt

SEQ ID NO: 27554 - DNA, 201 bp, Homo sapiens
ctggctaatgtcaaaagaaactttcctcccacaaagttttcactcacttgatcttggattttaaaatcagatataacctgagagattatcatttttctccrtttaataatgaatcaggccaggcatggtggctcatgcctataatcccaacacctgtgtgggccatgacaggaggattgcttgagcccaggagttcaagat

SEQ ID NO: 27555 - DNA, 201 bp, Homo sapiens
ggccaaattgaggcctgagaatagtttccatttatgaagcactcattctccttaaggtactattgcaagcacttactatattataattcactcaaccaccrtattactattaggccaaagttataaaattggaacatgagggagggagaggttaaacgattttcccaagtcatgtggctagtgagtaggataataggaatc

SEQ ID NO: 27556 - DNA, 201 bp, Homo sapiens
tgtctgatgttgaagctaatgatctctaaattctagtgatgactagatcttcggagttataaacacctcacagatagttgatgcttgacattagtgtctarataaaccttattaaatctcaaaataatgagaaagagaagtaagttaagtgtcagaacttaaatggaactaaagttgtcatttaataaaatattagtatac

SEQ ID NO: 27557 - DNA, 201 bp, Homo sapiens
ggtaagcttatattttaaaaaattgtcttagtaaacactttagccttccttgcagttgtttgtttaagacatctttcctgccaatttcaaattattctttwctttaattttaattttgctagttgttatcgaatttaacaactctgctgtggacattatgtgttggattatccttcagagtgaaatcttaactcacaaacc

SEQ ID NO: 27558 - DNA, 201 bp, Homo sapiens
gtatcactgttatatttctatgaagggtgttgacatttttgttttagtagagaataaacttgattagactaaaaatgcaaaatctttcttgcttctgcttrgtagcagttcaaacttcagtttagttcttttagctttagcctttgctctttatatgtgattcagggacggcagagatgtgggaagaatttgatcatagaa

SEQ ID NO: 27559 - DNA, 201 bp, Homo sapiens
ctctaggcacatcagtgttcccctctcatatatcccatgaaaaatatcttgtgattctgctttcaattttttatttgcattcagataattactcatacatrtatatatacatatatagagagagacctggtaggctttttgttattatttcttttccaaagtttgaagggatttccaaaaggtactggtgactgaaagtac

SEQ ID NO: 27560 - DNA, 201 bp, Homo sapiens
tcctgtctaatttacttttcttcagaattctgctttctgatttttgtttttgctttgaaatatttttatattaattatactgattcatttctcttcttttyatttgtgtttgcaggagatgtcctcttcccagccttttattttaaaccttttagtattatgggcatattccacaagttctttgctactgtctcactgagt

SEQ ID NO: 27561 - DNA, 201 bp, Homo sapiens
ttcttcacaaaaaagaaaaaaaaagcagttgtagaactcctttaagtatttcttgtaggacttatctagttgtagtgtacttcctcagtttttgcttgttkgggaaatactttatttctccttcatttctgaagtatagctctgcttggtatagtatttttggctgatagttttaaaaaatttcagcactttggatatatc

SEQ ID NO: 27562 - DNA, 201 bp, Homo sapiens
ttttcttaaaaagaagtatacaataatgttttgatgatgatttaaagtcaatttatgttgtagttctatgaattaagtaaaccatttatgtagagtgttgkaaatagccttttaaagtgctttctcttttttcttttcttttctttctttttttttttttttttttttgagacggagtctcgctctatctcccaggctgga

SEQ ID NO: 27563 - DNA, 201 bp, Homo sapiens
cctacctcttgtatagaaacaacccagatccaaagtggccagaaagttactttaccttctgaatttgtggtctttttcagaatctctacctgttaattctscatgactttattagtcattagatacttttataattttaaaatatctccaattgtatggttggttcaaattaccagttctgcatactggtaatgtaagtcc

SEQ ID NO: 27564 - DNA, 201 bp, Homo sapiens
tcctttaacctcagcctccaaaagtgctgcagttacaagcatgcgccaccatacctggccttgttttgatttttaggtaccacaaataagtaagaacataygatatttgtctttctgtgcctggtttatgtcacttataatgacatccagtttcatccaggttgttgcaaatgactggatcttgttttttttatggctgaa

SEQ ID NO: 27565 - DNA, 201 bp, Homo sapiens
ttattgtacttttttccaaaattttcatttggttcttttcatcatctatttatttgctgagactttctgtttcattgctgagggtttctatttttttattygtttcaagcatatttgcaattgctcattgaagcattttcatggtgactgctttaaaatttttatcacagaattctaacagctctttcatctcattgttgg

SEQ ID NO: 27566 - DNA, 201 bp, Homo sapiens
gataccctaaactcatcattctcaaatttaatgttccgcagattcctacagcacaggcataatacagccaggctctttgctaaagcataaggaaagtgacmtttgctccagtcctcagtaagttcctcatctccatctgagacctcctcagcctggacttctttgtccatttcactatcagcacttcggtcccaatcattc

SEQ ID NO: 27567 - DNA, 201 bp, Homo sapiens
atattccgaagtgtattagtcagggttctctagagggacagaattaataggctagatgtgtatataaaggggagtttattaaggagtattaactcacacamtcacaaggcccaacaataggccatctgcaagctgaggagcaaggaatccaatctgagtcccaaagctgaagaacttggaatccgatgttcaaggggagga

SEQ ID NO: 27568 - DNA, 201 bp, Homo sapiens
tgaaggtggaatataaaaaaaattatagaaagataaatttttgttcagatgcatctactgcagcaatttgggaggctaaggtgaaaggatcgtttgagccsagaagtttgagaccagctgggcaacatagtgagaccttgtctctacaaaaaattaaaaattagctgggcgtgggggcgcttggcctagaagttcaaggac

SEQ ID NO: 27569 - DNA, 201 bp, Homo sapiens
ggtggccctcttctcacagccattgcactccagcctgggcaacaagagtgaaactccatctcaaaaaaaaaaaaagaaagaaagaaatttcctctgccagrtaccctaaactcatcattctcaaatttaatgttccgcagattcctacagcacaggcataatacagccaggctctttgctaaagcataaggaaagtgacct

SEQ ID NO: 27570 - DNA, 201 bp, Homo sapiens
ttgaaggtggaatataaaaaaaattatagaaagataaatttttgttcagatgcatctactgcagcaatttgggaggctaaggtgaaaggatcgtttgagcmcagaagtttgagaccagctgggcaacatagtgagaccttgtctctacaaaaaattaaaaattagctgggcgtgggggcgcttggcctagaagttcaagga

SEQ ID NO: 27571 - DNA, 201 bp, Homo sapiens
ttttatgtatatcttaaaatatttgaattacttttgttttgaaaacaatagtatctttactttccctaaaccttgataagggattcatatctcttattatyaattttgggaaaaaataattcataaacctggtctattatgaaatgtttgctaattgagccaagagagcacatgcattcatctaaaacattcatataatca

SEQ ID NO: 27572 - DNA, 201 bp, Homo sapiens
gtatctttagaaaatcatagaggctattgaaacaccacattttcccaactagatatgcgatcaccttaaattaatacattttattaggcaatggaaggaarcaaacattttctgcagggtaaatatttaggaaatattaggtaagtccctctgagctattaaacaattaagatacaactattccctttaaaatatatattc

SEQ ID NO: 27573 - DNA, 201 bp, Homo sapiens; identical to SEQ ID NO: 3604

SEQ ID NO: 27574 - DNA, 201 bp, Homo sapiens
ggggaaatgtctagagactttttttgtatctttagaaaatcatagaggctattgaaacaccacattttcccaactagatatgcgatcaccttaaattaatrcattttattaggcaatggaaggaaacaaacattttctgcagggtaaatatttaggaaatattaggtaagtccctctgagctattaaacaattaagataca

SEQ ID NO: 27575 - DNA, 201 bp, Homo sapiens
tgtctttatatattaaatttctttatgtaagaaaatgtattgtggtttatttattgggaagtcttcattccccattaatacccaggatgattcaaagatcrtgattaccaagaattagaataaaaattaagctaaaacccaagttttcaacattgaacttgaaatacatcttaattggggaaatgtctagagacttttttt

SEQ ID NO: 27576 - DNA, 201 bp, Homo sapiens
gtgtttgtgtgagtgtagttcttcaatagagagggagcgtaaagctattttcactagattgattttttgtttagacaaacaggatgaaaataactttatgratataggaggcaaggaaagtttttaaatggctaccattatgtctttatatattaaatttctttatgtaagaaaatgtattgtggtttatttattgggaag

SEQ ID NO: 27577 - DNA, 201 bp, Homo sapiens; identical to SEQ ID NO: 3840

SEQ ID NO: 27578 - DNA, 201 bp, Homo sapiens
tgttttgtttccattagcaaggaatatcttttcccatgtctttattttccagtctatgtgtatcttcataggtgaagtgtttcttgtgggcaacagatcaytgggtcatgttttttcatccattcagccactttatttctttttattggagagtttagtccatttacattcaataatttcatttaagtaggaacttcctcc

SEQ ID NO: 27579 - DNA, 201 bp, Homo sapiens
tttttaaatatacaactaaattatttagaccatagtcaccctattctgctgtcaaatactatgtcttattcattttttctattttttatcctcattaaaartctccactttctgtccacaccccactaaactttctagcctttgttaaccattcttctactgtctatctccatgggttcaaaaaatatatttttttattat

SEQ ID NO: 27580 - DNA, 201 bp, Homo sapiens; identical to SEQ ID NO: 3613

SEQ ID NO: 27581 - DNA, 201 bp, Homo sapiens; identical to SEQ ID NO: 3614

SEQ ID NO: 27582 - DNA, 201 bp, Homo sapiens
ttcttcatgatagatttttatacaccttccagtgagtgaatactactgctagtaaaccactttaaatcaagttcaagacttgaagctccttggctacttaractacgtattctcagataaaaatatgcaggatatctggtatctagttacaagtttataggattaaattttcctttcctattttccttctggcctttttgg

SEQ ID NO: 27583 - DNA, 201 bp, Homo sapiens
tttatgtgtgccaacttttatttgacttttgatggtccatatcctgaaaatgatatttgccaggatatcctgagatcttggatggaaatacctttcttcaygatagatttttatacaccttccagtgagtgaatactactgctagtaaaccactttaaatcaagttcaagacttgaagctccttggctacttaaactacgt

SEQ ID NO: 27584 - DNA, 201 bp, Homo sapiens
ttttcactagactagaaaggaaacataagtaagcgataggaaggctgatgaatctagaagttagaaggaaaattagctatttaaaaggaaaaatataggaatgacagaggaaaaaacaacccttcaaaccaaatttttaaacatatatgaatgattaacaaaataatagagatatactgttcatatgtgcaggaatattgt

SEQ ID NO: 27585 - DNA, 201 bp, Homo sapiens
gattggtgcccttataaaagaggcccagagaggtgccttgcctctttcaccatgtgaggacacagcaaaaatgtgacatccatgaaccaaaaagtggcccctccccagacactaaatctgctggtgcctgaatcatgaactttcaagcctctagaacagtgaaaaataaatctctcttgtttattaactacacagcatatg

SEQ ID NO: 27586 - DNA, 201 bp, Homo sapiens
cttgttctttttgcttaggattgctttgactatttgggctcttttttttttccatatgaatgttaggatagtttgtttttctaattctatgaaaaataatrttggtagtttgataggaacatcattgaatctgtgaattgctttggacagtatggttatcttaacaatgttgtttcttcctacccatgagcgtggaaggtc

SEQ ID NO: 27587 - DNA, 201 bp, Homo sapiens; identical to SEQ ID NO: 3848

SEQ ID NO: 27588 - DNA, 201 bp, Homo sapiens
atttctctttggaaatttctgaacttgatactgaatgttgttggcactcccttcagagtctccataaaaagaaaccaaattttttttttttttttttttttgagatggagtctcactctgttgccaggctggagtgcagtggcgtaatcccggctcactgcaacctccgcctcccaagttaaagtgattcttctgcctcag

SEQ ID NO: 27589 - DNA, 201 bp, Homo sapiens
tgtgataggatcctctggaaatgcatgtcacaagtgataaagctgtagtatttagacatcatactgaagctaaagtttgctttggctgtatgatgtggcarctcttctgtagagggctgtcagagggagtggatgatggtgaggcagagagattaagtaccaatttgtctggttggtccagggaggtattagaatgagtgg

SEQ ID NO: 27590 - DNA, 201 bp, Homo sapiens; identical to SEQ ID NO: 3875

SEQ ID NO: 27591 - DNA, 201 bp, Homo sapiens
ggctgggaggagataaggggaggaaagatcacttttcatgacaacttacaacttgattccacttataagccatttattttcagaaacaagtaatgggtgargacacaggccaggtccacaatttgtgcacttgagagattaaggcctccgagatcaaattaccacagcaaactgagacagaattattgtagggatgtttgg

SEQ ID NO: 27592 - DNA, 201 bp, Homo sapiens
gcttaattctggactctatttcactcctttgatctatatgtttatcctttcactaaaagtagactgtcttgatattgtagctttataaatttgaaaatcasctgtgaaatcctccaaccttgttctacttgtaaacattgttttggctattataggtcatttaaattttcatataaattttagaatcaacttttcaatttc

SEQ ID NO: 27593 - DNA, 201 bp, Homo sapiens; identical to SEQ ID NO: 3755

SEQ ID NO: 27594 - DNA, 201 bp, Homo sapiens; identical to SEQ ID NO: 3757

SEQ ID NO: 27595 - DNA, 201 bp, Homo sapiens
cttatacaacagtgttgggaggtggggaatttcaggaaatgtttagattatgagggatctgccctcatgaataaattaacggcactgtaaaaggacttgayggaaggagcctgtccctctcttatgcttttggctctgtcatgtgacgatgcagcaagaagatcttcaccagatgctggtgccttgatcttggacttcccc

SEQ ID NO: 27596 - DNA, 201 bp, Homo sapiens
ctcagggcgttgtcctagaaaacaccgtttaaggagagaagtgttagtgtctcggggcgtctcccaggctccgccctgcgcccgcagccagcgttgtggtsgagaccccagcccgctgctactggagacagcacctctcgcgcccgggcgggcggcctcgtctctgcacccctaggcggcgctgcgctcctcaacacccgg

SEQ ID NO: 27597 - DNA, 201 bp, Homo sapiens
tttcctgttttcttttgtatatcttccataggtattttctttgtggttaccatggggcttacattttaaaactcttataaaaatgtattttaaactgatarcatctttactacaatcacaaaacaaaactcattatgtttacttctcccctacccaaattttatgttattgatgtcataaatacatctttttatattgtgt

SEQ ID NO: 27598 - DNA, 201 bp, Homo sapiens; identical to SEQ ID NO: 3828

SEQ ID NO: 27599 - DNA, 201 bp, Homo sapiens
cgatccaaatattagtgaaaagtcatgataatagagatagtaaaaatcttataagggaactggtaaatatatctttaaagattgtatcagaaacaattctrtgacaatatcttgtttctttacaagtttgaattccagaaatcaagtgaatttcctctgactttgcattttctggtaatttcttttttcttatcaagctat

SEQ ID NO: 27600 - DNA, 201 bp, Homo sapiens
ttttattctctttgtagcaattgtgaatgggagttcattcataatatggctgtctacttgcttgttgtttgtgcataggaatgctagcaatttttgcacaytgattttgtatcctgagactttgctgaagttgcttatcagcttaagaagcttttgggctgagacaatggggttttccagatataggatcatgtcatctgc

SEQ ID NO: 27601 - DNA, 201 bp, Homo sapiens
tgcatttacctgaattagagttctagtgttatgacaacattgggaaaagagtaaatatgaaaaaagtagaacaaaatctcaaattaatagttgaatatatrtataaaatattagcatacacatatgataactttttcatatgcccttgcagtatttttagattggagataaaccatcaaaactatagaacaaaatatttaa

SEQ ID NO: 27602 - DNA, 201 bp, Homo sapiens
tttttctatttgtttgtgtccactgtgatttccttgagcagtggtttgtcattctccttgaagaggtccttcacttccctttttagctgtattcctaggtrttttattctctttgtagcaattgtgaatgggagttcattcataatatggctgtctacttgcttgttgtttgtgcataggaatgctagcaatttttgcaca

SEQ ID NO: 27603 - DNA, 201 bp, Homo sapiens
ctccatccatgtccctgcaaaggacaagatcttgttcctttttatggatgcatagtattccatggtgtatatgtaccacattttctttatccagtctatcwttgatgggcatttgggttgatcccatgtttttgctattgtgaatagtgctgcaatgaacatacacatgcaggtatctttataataggatgatttatattc

SEQ ID NO: 27604 - DNA, 201 bp, Homo sapiens
tgggacgatgtggtatttggttttctgttcctgcattattatgctgaggataatggcttccagctccatccatgtccctgcaaaggacaagatcttgttcstttttatggatgcatagtattccatggtgtatatgtaccacattttctttatccagtctatcattgatgggcatttgggttgatcccatgtttttgctat

SEQ ID NO: 27605 - DNA, 201 bp, Homo sapiens; identical to SEQ ID NO: 3775

SEQ ID NO: 27606 - DNA, 201 bp, Homo sapiens
gagtttctgaattaccctcccttctagctttctttatacaccattctttgtagctgaagttttaagccccttgtcaaaagggagattcaagtttctgctgrggacatctcagtgtcacaaagggccaaggaagtagggtctcaccaactttgccacctgactcagctcaaaggtgataggtcacctgtgtgactgagagct

SEQ ID NO: 27607 - DNA, 201 bp, Homo sapiens; identical to SEQ ID NO: 3683

SEQ ID NO: 27608 - DNA, 201 bp, Homo sapiens
aagttctaaggaaagatttagataaaatataaggactttgaggagtgaccgaaggatattacaattgaaactagaaattttgggaaagttcaaacgacatrcaaggaaaagaagatacgtttacgtatttaatacttacacgtttagccacatgatgtcgctgtccaccacaaggtctttctccacaaaagaaataacagc

SEQ ID NO: 27609 - DNA, 201 bp, Homo sapiens
aagaaaatactggattacacactctccaatgagatttgaaatgtcctgggtcttaaaaggacataaaattgaaaatgattgcatttaacaaattgcagacrgatatagattgcattttgaaaatcaacgaatggatctaaaatttacattggccacatgatgtcgctgtacaccacaaagtcttgtcaatagaagggagct

SEQ ID NO: 27610 - DNA, 201 bp, Homo sapiens; identical to SEQ ID NO: 3803

SEQ ID NO: 27611 - DNA, 201 bp, Homo sapiens
tcaaagtcttttctctgacagcatctgtctctaaaggccgaacaacgggagatgcagcggaattggattaaaagactctgaaagtacagtcgttcatcttyatattaagataatattttctgataggaaacgactatttaacatggattatcactggcgaggagagctgggatcctggcgactactactcttgcttctgct

SEQ ID NO: 27612 - DNA, 201 bp, Homo sapiens
cacctcctgggttcaagcggttctcctgcctcagcctcctgagtagctgggactgtgcaggcacacaccacaaagcccagctatttttcttttttttttttgtattttaagtagagatggggttttgacgtgttggccaggctggtctcgaactcctggtcttaagtgatccacctgccttggcctcccaaagtgctagta

SEQ ID NO: 27613 - DNA, 201 bp, Homo sapiens; identical to SEQ ID NO: 3867

SEQ ID NO: 27614 - DNA, 201 bp, Homo sapiens
tccactttgggtaaagcacatggttcccataagagagagtgtgatataaagcaagaaaagtaatatgagaaaaaccttttgtataactttgagtactagaygagtaattttgacactcttcaaagtcatttgaaagctgtcaaaaagtgtgaagcaatacgaataaaaagtattaacggaagatgactgcaaggattaaat

SEQ ID NO: 27615 - DNA, 201 bp, Homo sapiens; identical to SEQ ID NO: 3864

SEQ ID NO: 27616 - DNA, 201 bp, Homo sapiens
ggtggaatataaaaaaaattatagaaagataaatttttgttcagatgcatctactgcagcaatttgggaggctaaggtgaaaggatcgtttgagcccagamgtttgagaccagctgggcaacatagtgagaccttgtctctacaaaaaattaaaaattagctgggcgtgggggcgcttggcctagaagttcaaggacagtt

SEQ ID NO: 27617 - DNA, 201 bp, Homo sapiens
aggtggaatataaaaaaaattatagaaagataaatttttgttcagatgcatctactgcagcaatttgggaggctaaggtgaaaggatcgtttgagcccagwagtttgagaccagctgggcaacatagtgagaccttgtctctacaaaaaattaaaaattagctgggcgtgggggcgcttggcctagaagttcaaggacagt

SEQ ID NO: 27618 - DNA, 201 bp, Homo sapiens; identical to SEQ ID NO: 3861

SEQ ID NO: 27619 - DNA, 201 bp, Homo sapiens
ctaggaatgcagtaactggttaggactgtgggcgccgctgttcactaatctggtagatacaggcagtacacacaggtcaggaggaggaaaaaaaaaaaaaagaaaaagaaaaaagctctcgtgcctcttagaacctccataaccgccagattgaaaactgactgtccaagactgcctaaatcctacttctggatgactctc

SEQ ID NO: 27620 - DNA, 201 bp, Homo sapiens
ggggtaaagataagtaagtcactctaagcctgagacattttaattagtaaccctttgctaatagtgcagtgattaaaaaaaaaagaaggccacatcctcaactggttaaaaaatactgttaagagaaaaccaacttctcttggagaaaatattaagtgcgattatagaggaatacatattataagagcctatctaaaaata

SEQ ID NO: 27621 - DNA, 201 bp, Homo sapiens
agataatgtgatgtggcagtcctctgcctatcactaaggcctaaggcctctgccacatcacattatcttaatgtctactgataaatccccagttttttttwaaaaaaaagttccattagacattcagaaaaactctgaattgatgaattacactcctgtggttgttccatggaatatctgtgataccagtgaacaaaagat

SEQ ID NO: 27622 - DNA, 201 bp, Homo sapiens
ctcacgtctgtatttccaacaatttgagaggctgaggcggaaagatccttggagccctggagttcaagaccagccggacagggcggcctgcgactgtagtyccagctacgcggggcggggaggggcggggcggggcggggcaggagctgacgtgggaggatcccttgagcccaggaagtcaaggcttcagcgaaccgtgat

SEQ ID NO: 27623 - DNA, 201 bp, Homo sapiens
gatgtggcagtcctctgcctatcactaaggcctaaggcctctgccacatcacattatcttaatgtctactgataaatccccagtttttttttaaaaaaaakttccattagacattcagaaaaactctgaattgatgaattacactcctgtggttgttccatggaatatctgtgataccagtgaacaaaagatttggggaga

SEQ ID NO: 27624 - DNA, 201 bp, Homo sapiens
agatccttggagccctggagttcaagaccagccggacagggcggcctgcgactgtagtcccagctacgcggggcggggaggggcggggcggggcggggcargagctgacgtgggaggatcccttgagcccaggaagtcaaggcttcagcgaaccgtgatcgcgccactgccctccagcctgggcgacagagccacaccctg

SEQ ID NO: 27625 - DNA, 201 bp, Homo sapiens
caagagcccagttttatttttttcaaaatatattgcctttggtgaatcttaagaattttttaaaaacccacataatgcaaagacacttcaaaaaaaaaaaagaggaaaaataaggatagggttaaaccatgctcttcaaaatcccaaggtttctgataaatattcaaatcataatgggaaggaaatgggatggtatgattt

SEQ ID NO: 27626 - DNA, 201 bp, Homo sapiens
tccaacttaaagaaaggaaatttgccctgttcctacaacgtatgtgtggttttagatatttttaaaatcttaatttctttaactcaagaaacagctttgarccaggtattctctgcagtgccagcaatgaagctttgttttatttttgtttttgtagaaacggggttcactatattgaccaagctggtctcaaactcctgg

SEQ ID NO: 27627 - DNA, 201 bp, Homo sapiens
ttaaaaaaaaaagaaggccacatcctcaactggttaaaaaatactgttaagagaaaaccaacttctcttggagaaaatattaagtgcgattatagaggaawacatattataagagcctatctaaaaataaagatgagaccatttttcttttcagctgtgaagaataatatcatagactttgtctctgaaatttgaaatcta

SEQ ID NO: 27628 - DNA, 201 bp, Homo sapiens
gaggaaatagcaaataccacagaaaagccagcttacatattgctatatcaccatatattttaaagataaaaaggttaactaaaaatatttagcagttcttktatctagtaggatgttttctataggaaaacattaaaatctaatttatgctggtttaaacagtaagaaaatctatgatcccaaaatacaggtagtctagca

SEQ ID NO: 27629 - DNA, 201 bp, Homo sapiens
atacaggtagtctagcacagctttgtcctatagaaatatgatgtgggccacagatggtcagccacagatgtgattttagattatctagtagccacattcamatagcaaaaagaaacaagtgaaatttcaataattttaatccaatatatctaagatataattgcaacatatttttacaataatgtaaagatattaataata

SEQ ID NO: 27630 - DNA, 201 bp, Homo sapiens; identical to SEQ ID NO: 4099

SEQ ID NO: 27631 - DNA, 201 bp, Homo sapiens
atgcagactatctttgagctgactctgcaggccagtgaccagggttcaacttgctcagtgtcatcctgaacctgcatgtgatggtggatgaccattgcaamaatgcaaggacactatgccaggagttgcagccaagtggggccctctttgatgctgcaccactcacaatgcaacccagctatcccatcaccaaagtggaca

SEQ ID NO: 27632 - DNA, 201 bp, Homo sapiens
ttaggggaggaaattatattgaccctaaatatttttttaaattggatttatcagtagacattaagataatctgctgggtgcagtggctcatgcctgtaatmccagcactttgggaggccaaggcggatggatcatctgaggtcaggagttcgagaccagcctggccaacatggtgaaaccccatttctactaaaaatacaa

SEQ ID NO: 27633 - DNA, 201 bp, Homo sapiens
gcaataactggagaactttcttcattgtccgtgacaagagagttactctccccaaacagtctatctttcaatccaactggaccaacttaggccatgttccyattcttagctcagtaatactagggaaataccctaagcctgtgtttctgaaaatggttggggagaggtgaggtgacatttggtaatgtctggagacattta

SEQ ID NO: 27634 - DNA, 201 bp, Homo sapiens; identical to SEQ ID NO: 4474

SEQ ID NO: 27635 - DNA, 201 bp, Homo sapiens; identical to SEQ ID NO: 4473

SEQ ID NO: 27636 - DNA, 201 bp, Homo sapiens
tggtggggatggggcagaacagctcagggcaagacacaggccttggatgccaatgccagccgtcagatattgagcaatgtgtaagtggggttagcctgcakgagaacctgctcgccacctcctcctcttcattctttaggtgatccccattgacctagacaatatctttaatatagagttctcctgatttttctacacaat

SEQ ID NO: 27637 - DNA, 201 bp, Homo sapiens
aggctgaggcaggagaatggcgtgaacccaggaggcagagtttgcagtgagccgagatcgcgccactgcactccagcctgggcaatagaggggactccttytcaaaaataaaacaaaaacaaaaacaaaaacaaattagccaggcttggcggcgggcacctgtaatcccagctactcgggagactgagggaggagaattgc

SEQ ID NO: 27638 - DNA, 201 bp, Homo sapiens
tgaacccttgagacggaggttgcagtgagccatgatcgtgccactgcactccagcctgggtgacaaagcaagactctgtctcaaaaaaaaaaaaaaaaaaaattaagaattttaataaaacgttagaactaaattttgtgaaatgatcattttgctaatattttatcaaaaacaatgatttgtacccttcttagtaaagca

SEQ ID NO: 27639 - DNA, 201 bp, Homo sapiens
tttaattagtaaccctttgctaatagtgcagtgattaaaaaaaaaagaaggccacatcctcaactggttaaaaaatactgttaagagaaaaccaacttctyttggagaaaatattaagtgcgattatagaggaatacatattataagagcctatctaaaaataaagatgagaccatttttcttttcagctgtgaagaataa

SEQ ID NO: 27640 - DNA, 201 bp, Homo sapiens
cttgaacccgggaagcgaaggttgcagtgagccaagattgcaccattgcactccagcctgggcaacactggagcaaaattccatctcaaaaagaaaaaaaraaaaaaagataatgtgatgtggcagtcctctgcctatcactaaggcctaaggcctctgccacatcacattatcttaatgtctactgataaatccccagtt

SEQ ID NO: 27641 - DNA, 201 bp, Homo sapiens
gaaagtatatatctatttttaaagtatggataagcatcgaatgtaaattctttatatcagtagttacataatgcaattattcataattttacatttttatyagtattttctaccttttatagtgaaattttctcctttaatatattgaatttacagtgagaattttttataatttttttacagtggataatttcttgagta

SEQ ID NO: 27642 - DNA, 201 bp, Homo sapiens; identical to SEQ ID NO: 4102

SEQ ID NO: 27643 - DNA, 201 bp, Homo sapiens; identical to SEQ ID NO: 4212

SEQ ID NO: 27644 - DNA, 201 bp, Homo sapiens; identical to SEQ ID NO: 4280

SEQ ID NO: 27645 - DNA, 201 bp, Homo sapiens; identical to SEQ ID NO: 4481

SEQ ID NO: 27646 - DNA, 201 bp, Homo sapiens; identical to SEQ ID NO: 4423

SEQ ID NO: 27647 - DNA, 201 bp, Homo sapiens; identical to SEQ ID NO: 4480

SEQ ID NO: 27648 - DNA, 201 bp, Homo sapiens
gacagacgttcatacaagagatctttcacctttactacttaggaatcaaaaattatttttgaaaagataagaatcattggtaactgcagcaggggacaccwgatctttggtgttaaaagacctgaataacattcctgtaactatctgttatttacttgggccagttacaatcgccattatcttccaattaaaattaagatt

SEQ ID NO: 27649 - DNA, 201 bp, Homo sapiens; identical to SEQ ID NO: 4511

SEQ ID NO: 27650 - DNA, 201 bp, Homo sapiens
aatatccagtattggaatttgaatctttttgacactaagaccttactctcgatcatataatacattcactttctattttaaagttatattatagccgggcrcagtggctcacacctgtaatcccagcactttgggaagccgaggcaggcagatcacgaggttgggagatcgagaccatcctggctaacacggtgaaacccc

SEQ ID NO: 27651 - DNA, 201 bp, Homo sapiens; identical to SEQ ID NO: 4441

SEQ ID NO: 27652 - DNA, 201 bp, Homo sapiens
aggccgaggcgggcaaatcacgaggtcaggatttcgagtccatcctggctaacatggtgaaaccccatctctactaaaaatacaaaaaattagccgggcayggtggcaggcacctgtagtcccagctactcgggagggtgaggcaggagaacggcatgaacccaggagacggagcttgcagtgagctgatatcatgccact

SEQ ID NO: 27653 - DNA, 201 bp, Homo sapiens
attgcttgatttcaggaggcggagattgcagtgagctgagattgcgccactgcactccagcctgggctacagagcgagactccgtctaaaaaaaaaaaaaagcaaaaaaaaaaactccattgtatgtgcacatatcattatctgttcaacccatctatgacttgtcatttaggtagtttccatccaatatttttgcaatat

SEQ ID NO: 27654 - DNA, 201 bp, Homo sapiens
ttatggctatctttatatagatagtgcatgtttgaagattggggaaagcttatgtcaataaatgtttatgtacttaatctacatgatttgcctaaaaatcytcaaagttgggatgaaggcattcctaagagtacatttttagacgtcattaaatatacagacgtatccacgtagtttttgttctttcagttaggcacacaa

SEQ ID NO: 27655 - DNA, 201 bp, Homo sapiens
ttttcgtggctgagtaatattccatggtgtatatatatatatgtgtgtgtgtatatatatgtattatgtatatatatatgtgtgtgtgtgtgtgtgtgtgtatatatatatatgtgtatatatatataccacattttctttatccactcattagtcgatggggacttaggttggtttcacatttttgcaattgtgaattgt

SEQ ID NO: 27656 - DNA, 201 bp, Homo sapiens
cttttcgtggctgagtaatattccatggtgtatatatatatatgtgtgtgtgtatatatatgtattatgtatatatatatgtgtgtgtgtgtgtgtgtgtrtatatatatatatgtgtatatatatataccacattttctttatccactcattagtcgatggggacttaggttggtttcacatttttgcaattgtgaattg

SEQ ID NO: 27657 - DNA, 201 bp, Homo sapiens
gccttttcgtggctgagtaatattccatggtgtatatatatatatgtgtgtgtgtatatatatgtattatgtatatatatatgtgtgtgtgtgtgtgtgtrtgtatatatatatatgtgtatatatatataccacattttctttatccactcattagtcgatggggacttaggttggtttcacatttttgcaattgtgaat

SEQ ID NO: 27658 - DNA, 201 bp, Homo sapiens
acatatatacacacttaaagtaatggcctccagttcgatccaagttgctgcaaaggacattatttcatgccttttcgtggctgagtaatattccatggtgkatatatatatatgtgtgtgtgtatatatatgtattatgtatatatatatgtgtgtgtgtgtgtgtgtgtgtatatatatatatgtgtatatatatatacc

SEQ ID NO: 27659 - DNA, 201 bp, Homo sapiens
aaaagttaactccactatgtttgaagcaatattggtggcattaaggttagtgcatggattcccaagaaagataacttgaggtgacactgtttaacatatakcgattcaattatgttcaatcaacactagtcctcttatctctgacaagaaggatttcagatcttggataattcaaaaataataatgtgtctgagaggatgc

SEQ ID NO: 27660 - DNA, 201 bp, Homo sapiens
agactgcaccactgcactccagcctgggcaacagagtgagacttcatctaaaaaataataattatacatgtaattatatatgatttttatatatgtaatayatatattcttgatgtgagctctttgtcacatacatattttgtggatattttatcccagactatgacttgtcttttcattttcttagttgtgtcttttgaa

SEQ ID NO: 27661 - DNA, 201 bp, Homo sapiens
ctccaaattttgttcacagtagtataccttacttgattattaaaggccataaatagtttaaaataagtttcctttcccagtccatgcaccaaaatgatacrgctctgatgagtggaggaacaacagggttcctggtcctcatgctggtttagataaaatgacacagacacatgtggagtggttttaaggagtggagagttt

SEQ ID NO: 27662 - DNA, 201 bp, Homo sapiens
ggctctgcatgtcaagcttgattccttaaagggaaacacaccctttcagttaaagccttggcaaaataaccggtttttccaattgtgttctgttgacaaaraaaaatggattcttgctgcactgatgcgaacaactatattgccgtaagttaagagtacttacagatagtctccaaattttagaggaaccaggcagagaaa

SEQ ID NO: 27663 - DNA, 201 bp, Homo sapiens; identical to SEQ ID NO: 4521

SEQ ID NO: 27664 - DNA, 201 bp, Homo sapiens; identical to SEQ ID NO: 4549

SEQ ID NO: 27665 - DNA, 201 bp, Homo sapiens
gcttgccattcaagaagtaagataaaaaacatacaatgagtatatactaaaataaaatgatggaaaaaataacaaagagttacatttttgaaatgcaaccrtggaagagttctgaggatgaaataatggaagcagacaataaatgtaataaaaccagtggggagaaaatgaaaattctgtcaagtctaacgttaggactca

SEQ ID NO: 27666 - DNA, 201 bp, Homo sapiens
cagtctgcggctccgctgaggagctgccgcggtcacaggacccacattagcttgcacggccaaccaactccttggcttcctcaaggattgtggggaatgtytcactgttcttggacaccttggcaggaacagcagccatggcatcatccttggtcagctccgaagctagcagagatgtgactgcacacccggccttcctgt

SEQ ID NO: 27667 - DNA, 201 bp, Homo sapiens; identical to SEQ ID NO: 4163

SEQ ID NO: 27668 - DNA, 201 bp, Homo sapiens; identical to SEQ ID NO: 4199

SEQ ID NO: 27669 - DNA, 201 bp, Homo sapiens; identical to SEQ ID NO: 4203

SEQ ID NO: 27670 - DNA, 201 bp, Homo sapiens; identical to SEQ ID NO: 4255

SEQ ID NO: 27671 - DNA, 201 bp, Homo sapiens; identical to SEQ ID NO: 4429

SEQ ID NO: 27672 - DNA, 201 bp, Homo sapiens
aatcccagctaattgggaggctgaggcaggagaatcgcttgaacccgggaggcagaggttgcagtgagccgagatcgcaccactgcactccagcctgggcmacagagcaaaactccatctcaaaacaaaacaaacaaacaaacaaacaaaaactgcattactaaatccaataaaaagtcctagtagactcagtgatagtaa

SEQ ID NO: 27673 - DNA, 201 bp, Homo sapiens
cccaaggaccccttttcctgtctatctgcataaaataatttcttttattatttatttatttatttatttatttatttatttatttatttatttatttattttgagacggagtctcgctctgtcgcccaggctggagtgcagtggcgcgatctcagctcactgcaagctccgcctctcgggttcatgccattctcctgcctc

SEQ ID NO: 27674 - DNA, 201 bp, Homo sapiens
tcccaaggaccccttttcctgtctatctgcataaaataatttcttttattatttatttatttatttatttatttatttatttatttatttatttatttattttgagacggagtctcgctctgtcgcccaggctggagtgcagtggcgcgatctcagctcactgcaagctccgcctctcgggttcatgccattctcctgcct

SEQ ID NO: 27675 - DNA, 201 bp, Homo sapiens
ttcccaaggaccccttttcctgtctatctgcataaaataatttcttttattatttatttatttatttatttatttatttatttatttatttatttatttattttgagacggagtctcgctctgtcgcccaggctggagtgcagtggcgcgatctcagctcactgcaagctccgcctctcgggttcatgccattctcctgcc

SEQ ID NO: 27676 - DNA, 201 bp, Homo sapiens; identical to SEQ ID NO: 4528

SEQ ID NO: 27677 - DNA, 201 bp, Homo sapiens; identical to SEQ ID NO: 4278

SEQ ID NO: 27678 - DNA, 201 bp, Homo sapiens
cttcccaaggaccccttttcctgtctatctgcataaaataatttcttttattatttatttatttatttatttatttatttatttatttatttatttatttattttgagacggagtctcgctctgtcgcccaggctggagtgcagtggcgcgatctcagctcactgcaagctccgcctctcgggttcatgccattctcctgc

SEQ ID NO: 27679 - DNA, 201 bp, Homo sapiens
agagccggggctttaaaagaaacttttccggagatgctttaaaaaatgaaaacttcccaaggaccccttttcctgtctatctgcataaaataatttctttyattatttatttatttatttatttatttatttatttatttatttatttatttattttgagacggagtctcgctctgtcgcccaggctggagtgcagtggcg

SEQ ID NO: 27680 - DNA, 201 bp, Homo sapiens
gttataggatgaaaagaggccaaactaatcttgacatgttttttacaaggaaataatcctccatggttctaatttttttttttttttttttttttttttttgagacagagtcgcgctctgtcacccaggctggagtgcagtggcacgatcttggctcactgctagcaccgcctcccgggttcacgccattctcctgcctca

SEQ ID NO: 27681 - DNA, 201 bp, Homo sapiens
tgttataggatgaaaagaggccaaactaatcttgacatgttttttacaaggaaataatcctccatggttctaatttttttttttttttttttttttttttttgagacagagtcgcgctctgtcacccaggctggagtgcagtggcacgatcttggctcactgctagcaccgcctcccgggttcacgccattctcctgcctc

SEQ ID NO: 27682 - DNA, 201 bp, Homo sapiens; identical to SEQ ID NO: 4434

SEQ ID NO: 27683 - DNA, 201 bp, Homo sapiens
atgttataggatgaaaagaggccaaactaatcttgacatgttttttacaaggaaataatcctccatggttctaatttttttttttttttttttttttttttttgagacagagtcgcgctctgtcacccaggctggagtgcagtggcacgatcttggctcactgctagcaccgcctcccgggttcacgccattctcctgcct

SEQ ID NO: 27684 - DNA, 201 bp, Homo sapiens
tatgttataggatgaaaagaggccaaactaatcttgacatgttttttacaaggaaataatcctccatggttctaatttttttttttttttttttttttttttttgagacagagtcgcgctctgtcacccaggctggagtgcagtggcacgatcttggctcactgctagcaccgcctcccgggttcacgccattctcctgcc

SEQ ID NO: 27685 - DNA, 201 bp, Homo sapiens; identical to SEQ ID NO: 4484

SEQ ID NO: 27686 - DNA, 201 bp, Homo sapiens; identical to SEQ ID NO: 4206

SEQ ID NO: 27687 - DNA, 201 bp, Homo sapiens
gcccaactatgcggacacgctcatcagccaggagagctgtgagaaaaaggattttttatcagcgcctcaatctctactcgaagaagaaagagaagaaacgytttctcaggtaatctatcttttcacaacatacgtactagctagtttgctgaagtaattcacttacttgtttactatatctattttgttccccatatttcc

SEQ ID NO: 27688 - DNA, 201 bp, Homo sapiens; identical to SEQ ID NO: 4252

SEQ ID NO: 27689 - DNA, 201 bp, Homo sapiens
tgccatgttgcccaggatggtctccaactcctgacctcaggtgatccgcccgccttggcctcccaaagtgccgggattacaggcatgagccaccgtgcccrgacctcatgattgtatttatttatttatttaatattattattattatttttttttttttgagatggggtcttgctctgtcacccaggctggtgtgcagtg

SEQ ID NO: 27690 - DNA, 201 bp, Homo sapiens
tttcactgtaagaaacatccagcacccagggaaatttgctgtctaattcatactccactcttcagactagtcctagtgttcagttttgttttgttttttttctgtgtctggaattctattaaaatgtgtcaggctgttttaatttttgttgtttaattttctttcacatgattatatgtgctccatggatttttttgtttg

SEQ ID NO: 27691 - DNA, 201 bp, Homo sapiens
ctgcctcagcctctccagtagctgggattacaggcgcctgtcaccatgcccagctaattttttaaaatatttttagtagagacagagtttcatcaagttgkccaggctgctcttgaactcctgacctcaggtgatccacctgccttggcctcccaaagtgctgggattataggcatgagccaccgcaccctgccaactgtc

SEQ ID NO: 27692 - DNA, 201 bp, Homo sapiens
cctaataagaggcagctgtctgatatacatacatacatacatacatatatatatatatatatatatatatatatatatatatatatacacacacacacacatatatgtatatatatatttggagtaggggatggagtcttgctctgtcacccaggctggagtgcaagtggtgtgatctcagctcactgcaacctctgcctc

SEQ ID NO: 27693 - DNA, 201 bp, Homo sapiens
ccctaataagaggcagctgtctgatatacatacatacatacatacatatatatatatatatatatatatatatatatatatatatatacacacacacacacatatatgtatatatatatttggagtaggggatggagtcttgctctgtcacccaggctggagtgcaagtggtgtgatctcagctcactgcaacctctgcct

SEQ ID NO: 27694 - DNA, 201 bp, Homo sapiens
ctctatatctaagccctaataagaggcagctgtctgatatacatacatacatacatacatatatatatatatatatatatatatatatatatatatatatacacacacacacacatatatgtatatatatatttggagtaggggatggagtcttgctctgtcacccaggctggagtgcaagtggtgtgatctcagctcact

SEQ ID NO: 27695 - DNA, 201 bp, Homo sapiens
cctctatatctaagccctaataagaggcagctgtctgatatacatacatacatacatacatatatatatatatatatatatatatatatatatatatatatacacacacacacacatatatgtatatatatatttggagtaggggatggagtcttgctctgtcacccaggctggagtgcaagtggtgtgatctcagctcac

SEQ ID NO: 27696 - DNA, 201 bp, Homo sapiens
cctcggcctcccaaagtgctgggattacaggcttgagccactgcgcccggtgggtctaatgttttaaattacactgtgttaaataaatattagtttgttgkttttttttttagtttttttatttctctacaaatttacaaccaataagagtttttaatgctttgacaaaaaatgttaaaggtcatagtacaatcgcatttc

SEQ ID NO: 27697 - DNA, 201 bp, Homo sapiens; identical to SEQ ID NO: 4374

SEQ ID NO: 27698 - DNA, 201 bp, Homo sapiens
caactcttgtaatgggcactgtaatgaattggttcaaaatgtgtttgtgtagcatatgcctgtagtcccagctactcgggaggctgaggtgggaggatccyttgatcccaggaggtagcagctgcaatgagctataattgtgcccctgcactctagcctgggagacagagcgagactttgtctccaaaaaagtgtttgtgg

SEQ ID NO: 27699 - DNA, 201 bp, Homo sapiens; identical to SEQ ID NO: 27626

SEQ ID NO: 27700 - DNA, 201 bp, Homo sapiens; identical to SEQ ID NO: 4165

SEQ ID NO: 27701 - DNA, 201 bp, Homo sapiens
atgctaatgactggcttgctgttaataaatatgtgggtaaatctctgttcagggctctcagctctgaaggctatgagacccctgattccccacttcacacytctaaaaaaaaaaaaatttttttttctgagcttggagaaatatatcccttagtacacttggcatttataaagcagacatcaataaatttatatatatgtg

SEQ ID NO: 27702 - DNA, 201 bp, Homo sapiens
ctttgcctccggtgtaacagggactacaggtgcaagccacctactgtctgcctatctatctatctatctatctatctatctatctatctatctatctattwctttcttgtacagacaggagtctcactatgttgagcaggctgatctgaaacttgggctcaggctagcctcctgcttctccctcccaaactgctgggatta

SEQ ID NO: 27703 - DNA, 201 bp, Homo sapiens
acaaacttttaaattctctttgctgggttaatgactgttctatagattcccatctctaaggaatcttctttggtagtaaacactggaaaacagtcactacsaaaactcataaaatgtctagtttcctatacattagtccaacacatcagtctaattctgaatcccattgaattagcaaaggcttccggctgcagttttcta

SEQ ID NO: 27704 - DNA, 201 bp, Homo sapiens
ccaacaacagaaaagaaaaccagctcccacacagaggctcccggctgcgcagaccttgcccagcacaccagattgccagctccgagacccgggactcctcmtgtcctgggccgaatgctcttttagcgcggtagagtgcactttctccaactggaaaagcggggacccagcgagaacccgagcgaacgatgggagggagct

SEQ ID NO: 27705 - DNA, 201 bp, Homo sapiens
aagattggtttttactttgaagtttgcggcatgatggtggaaagtgtaaatgctaaaacactgatgagtagaatttgatgtttattaaggttttttttttktttttttttttttttttttttactttctggtaaaattcacctagtctcaatcaaggcctatatatcataaggctttgttatgattagctttgcagaacct

SEQ ID NO: 27706 - DNA, 201 bp, Homo sapiens
aaaaaaaagattggtttttactttgaagtttgcggcatgatggtggaaagtgtaaatgctaaaacactgatgagtagaatttgatgtttattaaggttttktttttttttttttttttttttttttttactttctggtaaaattcacctagtctcaatcaaggcctatatatcataaggctttgttatgattagctttgca

SEQ ID NO: 27707 - DNA, 201 bp, Homo sapiens
ccacccacctcagcctcccaaagcactgggattacaggcgtgagccactgcgcctggcccttaactttctattatagttagctttctctttaactgtctgtacttaaggtagtataagttgatatcagtgtgtttctcatcacttttcactgggcctaattgttgctccaacactgaaaggaggcatttattagttatatt

SEQ ID NO: 27708 - DNA, 201 bp, Homo sapiens
tccacccacctcagcctcccaaagcactgggattacaggcgtgagccactgcgcctggcccttaactttctattatagttagctttctctttaactgtctgtacttaaggtagtataagttgatatcagtgtgtttctcatcacttttcactgggcctaattgttgctccaacactgaaaggaggcatttattagttatat

SEQ ID NO: 27709 - DNA, 201 bp, Homo sapiens
atccacccacctcagcctcccaaagcactgggattacaggcgtgagccactgcgcctggcccttaactttctattatagttagctttctctttaactgtctgtacttaaggtagtataagttgatatcagtgtgtttctcatcacttttcactgggcctaattgttgctccaacactgaaaggaggcatttattagttata

SEQ ID NO: 27710 - DNA, 201 bp, Homo sapiens
ttcttatgtcctattcaaaaactccttgcctactgaaaacttatgatgattttctcctatattttcttttagaagttttatagttttaccatttataattkggtctatgaatccttttgagttgatgtttatgtatggtgtatggtgtgaggtaacaatgaagattcatatttttttccaaaggaatatccaattgtctct

SEQ ID NO: 27711 - DNA, 201 bp, Homo sapiens
cagttactcaggaagctgagacaggaggatcgcttgagcccgggaggtggagattgtagtgagccaagagtgtgccactgcactccagcctgggtgatggragggaaactgtctaaaaaaacaaacaaacaaaaattatatattgcattttcttctcattggtgtataagtaattttgattttctttcattgttctagtga

SEQ ID NO: 27712 - DNA, 201 bp, Homo sapiens
ttatatttgcatcactaactttgagtcaatattattcccactctataatttcagtcaatgatatttcataattttcttaaccattcctaaattatttgttyttatgctctttctattttgtctctattaaaacaaagaatgtaatgaacatttgggtttataaagcgttttccatacttcttgtttctttagtgtagattt

SEQ ID NO: 27713 - DNA, 201 bp, Homo sapiens
gtatgcttgcaatgccgttgtgcctatgagacagtgtgcgattgtgtgcctatggatctgtgtaccgtgtgccattgtgtgatcggtccgctgtgggggtrgggatctgagtgcggcgtgtcagtgtgcagtggagtgtgcagtctaagcttgcggctgtctccaggcagaagaggagaccccggcgcgggcgggggcggg

SEQ ID NO: 27714 - DNA, 201 bp, Homo sapiens
gctgaacgtttctgtataagcgatggaagctcctggcatgtgtgcatgaagtgatgagctgaggtgggtgctggaagaagggcggaatcgggaggccactytgtgtcattgcgcgtctagatgtttccgaattgcgtgtgtgtgtgtgactgtgcaatatggttgtgtatgcttgcaatgccgttgtgcctatgagacagt

SEQ ID NO: 27715 - DNA, 201 bp, Homo sapiens
ggatgcccagttacagttgaatgtcagataaacagcaagtactatttcagcataagtcagtctcaaatgttgcatgagacataatgtactaaaaaaaaaaatgctcattgtttacctgaaattcaaatttaactgggagccctgtacttttatttactaaatctggcaactctaccccagatgtctgtgaggttaagtggg

SEQ ID NO: 27716 - DNA, 201 bp, Homo sapiens
gatccacccacctcagcctcccaaagcactgggattacaggcgtgagccactgcgcctggcccttaactttctattatagttagctttctctttaactgtctgtacttaaggtagtataagttgatatcagtgtgtttctcatcacttttcactgggcctaattgttgctccaacactgaaaggaggcatttattagttat

SEQ ID NO: 27717 - DNA, 201 bp, Homo sapiens
actcattcacttaagaagtagctacccgtccatactggtaattttgctattgtttgtttgtgtgtgtgtgtgtgtgtgtgtgtgtgtgtgtgtgtgtgtgtatcccaaactagaacttcagaaaattatcaagaagtctaaagccttgttattagcttagcaaaagtaaaatatatctcagaatttttagggttatgttta

SEQ ID NO: 27718 - DNA, 201 bp, Homo sapiens
cactcattcacttaagaagtagctacccgtccatactggtaattttgctattgtttgtttgtgtgtgtgtgtgtgtgtgtgtgtgtgtgtgtgtgtgtgtgtatcccaaactagaacttcagaaaattatcaagaagtctaaagccttgttattagcttagcaaaagtaaaatatatctcagaatttttagggttatgttt

SEQ ID NO: 27719 - DNA, 201 bp, Homo sapiens
gttcaaccattttaagccttccagtattttattcctattatcactcattcacttaagaagtagctacccgtccatactggtaattttgctattgtttgtttgtgtgtgtgtgtgtgtgtgtgtgtgtgtgtgtgtgtgtgtgtatcccaaactagaacttcagaaaattatcaagaagtctaaagccttgttattagctta

SEQ ID NO: 27720 - DNA, 201 bp, Homo sapiens
tgttcaaccattttaagccttccagtattttattcctattatcactcattcacttaagaagtagctacccgtccatactggtaattttgctattgtttgtktgtgtgtgtgtgtgtgtgtgtgtgtgtgtgtgtgtgtgtgtgtatcccaaactagaacttcagaaaattatcaagaagtctaaagccttgttattagctt

SEQ ID NO: 27721 - DNA, 201 bp, Homo sapiens; identical to SEQ ID NO: 4196

SEQ ID NO: 27722 - DNA, 201 bp, Homo sapiens; identical to SEQ ID NO: 27641

SEQ ID NO: 27723 - DNA, 201 bp, Homo sapiens
tggtgctggagcgggtgctggaccgggaggaagagcgggttcaccacctggtcctcacagcctctgatggcggcgacccgccccgatccagcaccgcccacatccaggtgacagtggtggatgtgaatgaccacacgcctgtcttctctctgcctcagtaccaagtaactgtccccgagaatgtgccagtgggtacaagac

SEQ ID NO: 27724 - DNA, 201 bp, Homo sapiens
gacactgagcaacttttcatgtgttgtctatttgtatatcttcttgaagcattcgttcatctttaactgagctgaacgccttcttaaaattgagctatggragttttaaaatatatccttgtagctgggcgtgatggcaggtgcctgtaatcccagctactcaggaggctgagacaggagaatcgcttgaacccaggaggc

SEQ ID NO: 27725 - DNA, 201 bp, Homo sapiens; identical to SEQ ID NO: 4397

SEQ ID NO: 27726 - DNA, 201 bp, Homo sapiens
agtctggagtaaaaatccacctgtaactgctgcttatagagtgtgtatccagggcaacttgaatctatgttcctgggttgcaatcctaaagcttggctcawataagctctacttatattattttttaaaacaagactttccttatctatctgactcaaattctaagaaaataattttataactttttttcaaactctaaag

SEQ ID NO: 27727 - DNA, 201 bp, Homo sapiens
ggattgcttaagtccaggggtatgaggctgcagtgagatataattgtgtcactgcaccctagcctgggagacagaatgagactttttctctctctctctcmaaaaaaaaaaaagattttgttttttctcagtgttacttgataactataaacgacagacgttcatacaagagatctttcacctttactacttaggaatcaa

SEQ ID NO: 27728 - DNA, 201 bp, Homo sapiens; identical to SEQ ID NO: 4232

SEQ ID NO: 27729 - DNA, 201 bp, Homo sapiens
atcactctggaatcctggctctttgaagccagatctgggcccccctcccctaccccttccattcccaggctgggaaaggctgaagaggctgacggctggasgggagggggcggggcggtggcggatctggcttccttttggagttaattagggaaaacagagaaatgtcagcggaatgaaagggctgggggtgggggccag

SEQ ID NO: 27730 - DNA, 201 bp, Homo sapiens; identical to SEQ ID NO: 4523

SEQ ID NO: 27731 - DNA, 201 bp, Homo sapiens; identical to SEQ ID NO: 4275

SEQ ID NO: 27732 - DNA, 201 bp, Homo sapiens; identical to SEQ ID NO: 4421

SEQ ID NO: 27733 - DNA, 201 bp, Homo sapiens; identical to SEQ ID NO: 4284

SEQ ID NO: 27734 - DNA, 201 bp, Homo sapiens; identical to SEQ ID NO: 4208

SEQ ID NO: 27735 - DNA, 201 bp, Homo sapiens
tttttgtagtcatacttatcctttggcttcttagtaagtattatatagtcattactttttgcagttttttagatcaaagtgttaatgtaggtaaagttaaytttagaatatatgtaaaagtcaagtctgctttaaatttaatcatctctttggtgaaagggatgggatggagctttgctttttatcatatattcatctgta

SEQ ID NO: 27736 - DNA, 201 bp, Homo sapiens
ttccataaatataattgggtttcaattcattgatttagagataaaaagaatacagattaaatattccctgattacattattttattgattttctggtgtaragtagggtgtctaggaaattctttgtagaatttcctgtagaatatctgtgttgcagttgttctttcatagaaagcctccttttgatagtcttgaaacttt

SEQ ID NO: 27737 - DNA, 201 bp, Homo sapiens
tccagcctggatgacagagtaagaccctgtctaaaacaaaaagaaaaaagcatcggaggcagcaaagagctggtttgagggactgacttgtgggattctgkcttctgaaggattgtagaagtgcctcctaccttgctgagagaaacaggtcttgggcatggggtagggttagggtactaggtttgggagccctgggagagg

SEQ ID NO: 27738 - DNA, 201 bp, Homo sapiens
tgtacaaactcaccgaatagtgaatgcatccaaagagtaacaagagaatctatacagtaggtgtcgacattattcactcctatgtgaaaacttgcttttcmattttttttaaaagaaaatgttatatgcttcttagggtaaggtgtttgggaaaaaagtaaaggttatagatttgggtacatttcttctgagttaaatgtt

SEQ ID NO: 27739 - DNA, 201 bp, Homo sapiens
ttgcagtaagccgagatcgcgccactgcactccagcctgggagacagaacgagactccgtctcaaaataaataaataaataaataaataaataaataaatwtcagaaaagtagataaaatttatattaatgataacatgtagcattctaaagtctggaaagtttgtgttaagccatgtagttattggatatgtgggcttgt

SEQ ID NO: 27740 - DNA, 201 bp, Homo sapiens; identical to SEQ ID NO: 4197

SEQ ID NO: 27741 - DNA, 201 bp, Homo sapiens; identical to SEQ ID NO: 4292

SEQ ID NO: 27742 - DNA, 201 bp, Homo sapiens
gtccagcccaacctcagggcaccccccacgaggtgggcgggggatggctttgtcacttgcacccactcggggtgctactcagagatcttgggtgcacatargacgtgggtgggccgagcttctagctactccgtcaggcccttcctgtcattctgtctctgcctcccttctccctgcttctccgtgttcctcctcattctt

SEQ ID NO: 27743 - DNA, 201 bp, Homo sapiens; identical to SEQ ID NO: 4294

SEQ ID NO: 27744 - DNA, 201 bp, Homo sapiens
ccaccttcacagtcctctggagaaggtctgatctccctcactatgacaggaagccaggctctctcatggtgggtgggggaatgcactatgttcaatgcatyggaccagcctggccaacatggtgaaaccccgtctgtactaaaaatacaaaaattagcctggcacagtggcaggtgcctgtcatcccagctacttgggaga

SEQ ID NO: 27745 - DNA, 201 bp, Homo sapiens; identical to SEQ ID NO: 4298

SEQ ID NO: 27746 - DNA, 201 bp, Homo sapiens
accatctgcccaggattcacagcaagagggaacttgagggataggaaagtgcaccttggaaaaggtttgatgatagagtgtttgagggcggggggtggggrttcttgtaaaataggaggggcaggttcttctatggccgtggattttactctgagggcttaggaagccattgaattttagaaatttcttctccctgctcca

SEQ ID NO: 27747 - DNA, 201 bp, Homo sapiens
cttcttttaagttatgactcttactctatatttgaatctgtatatgaacagtgaaacatgttagttggctagttctttctcattcagtcttaatacatttytttcagtttggcagcaaaattgttttccttaacttgcatgcccttccctgttaaaaatatggaaatttagaaatatacattccttacagtgtttcaggaa

SEQ ID NO: 27748 - DNA, 201 bp, Homo sapiens
aggctgaggcaggagaatcacttgaacctgggaggcagaggttgcagtgagccgagatcgcgccactgtactccagcctgggtgacagagcgagactccakctcaaaaaaaaaaaaaaaagaaaaaagaaaagaaataattattgaatcaatggaaacagaattacaactcttcccacttttgggaaggagaattgagatt

SEQ ID NO: 27749 - DNA, 201 bp, Homo sapiens; identical to SEQ ID NO: 27619

SEQ ID NO: 27750 - DNA, 201 bp, Homo sapiens; identical to SEQ ID NO: 27620

SEQ ID NO: 27751 - DNA, 201 bp, Homo sapiens
agttttttgagcatgatgtagggagtattttattatagtccagtctatgggatattcccttatacacacacacacacacacacacacacacacacacacamaccccaaactcaatagggcaagaaccatattcatcatctcttaaatcctaggtcctgtcacaggccactgcttggaaaatagttgactaaatgtagtcca

SEQ ID NO: 27752 - DNA, 201 bp, Homo sapiens
acgcactcctcgcacgtgggcttacgcgaataccagctttcactgccactcgctcgcggccagattcacaggcctgttccggtccactcgcagctcccctmtgccgctccctccgccgggctcaggagtactcgtagctgattgtgcgcgcctgagggtcccagatcgcggccgcccaggaccaggcgaggactccggagc

SEQ ID NO: 27753 - DNA, 201 bp, Homo sapiens
gctgaggcaggaggatcccttgagaccaggagtttgagaccagcctgggtgactctgtctctaccaaaaagaaaaaaaagtagccagatgtgtggcgtacrcctgtagtcccagctactcgagaagctctgataggaggattgcttaagtccaggggtatgaggctgcagtgagatataattgtgtcactgcaccctagcc

SEQ ID NO: 27754 - DNA, 201 bp, Homo sapiens
tatcatttgtccttaagagcacagcctaagctgggcgtggtggctcacgcctgtaatcccagcactttgggaagctgaggcaggaggatcatgaggtcagsagttcgaaaccggcctggccaacatagtgaaaccctgtctctactaaaaatacaaaaattagctgggcatggtggtgcgtgcctgtagtcccagctactt

SEQ ID NO: 27755 - DNA, 201 bp, Homo sapiens; identical to SEQ ID NO: 4170

SEQ ID NO: 27756 - DNA, 201 bp, Homo sapiens
aggcgaaaagataggctgggttttttggggggtgggggagcgtggaggatagggtgggctttttcccctccaatgctgcgacgcattaaccctgctgctgttgggacgttctctgctcagcctattggctgagcccgggagccgctgtctgccaatcgggtggtgaaaggcagacaaatctaccccgccaccagcaaaaac

SEQ ID NO: 27757 - DNA, 201 bp, Homo sapiens; identical to SEQ ID NO: 4485

SEQ ID NO: 27758 - DNA, 201 bp, Homo sapiens
tcacataattggcagcccacccacctgtttggccctcaaccttcaaccatttcccaggacgcctccttacactcctgatcatcatggttccaaccccactkttccactcagctttgttccctcaacaccactgctccctgtgacaggtcatcctcctaacctctggcatctggtcccgttgtctccctgacaacccgcatg

SEQ ID NO: 27759 - DNA, 201 bp, Homo sapiens; identical to SEQ ID NO: 27638

SEQ ID NO: 27760 - DNA, 201 bp, Homo sapiens
attaagtgtctgatgattcaataatttaaaggcagattttgaaggtaaatgcaaagccatcaaccataaacgttcaaaatatataaccttagaagaaaacrtagctaacgtttcttaattgatcttactgcttctgattatacaataagagatggaagatgtttggagcaagggcagtggtggcattgattaatgccttga

SEQ ID NO: 27761 - DNA, 201 bp, Homo sapiens
aaggcgaaaagataggctgggttttttggggggtgggggagcgtggaggatagggtgggctttttcccctccaatgctgcgacgcattaaccctgctgctgttgggacgttctctgctcagcctattggctgagcccgggagccgctgtctgccaatcgggtggtgaaaggcagacaaatctaccccgccaccagcaaaaa

SEQ ID NO: 27762 - DNA, 201 bp, Homo sapiens
ttagcatccctatgtgccagacactgtaaacaattaaaagttatcattctggtacccagagtacagtatgagacagacatgcaaaaaaaaaaaaaaaaaaagataatggagatctgcatagcataagatgcagtgggaccaaacgggaaaaaacacctaaatgagcctggagaaaggaagaaatgatagaggtggtgatgc

SEQ ID NO: 27763 - DNA, 201 bp, Homo sapiens
cgcttgatggtggaggttgcagtgagccgagatcgcgccactgcactccagcctgggtgaaagagcgaaactccatctcaaaaaaaaaaaaaaaaaaaaaatcagccagatgtggtggcaggtgcctgtagtcacagctacttgggaggttgaagcaggagaatcgctttatctcaggaagcagaggttgcagtgagccaa

SEQ ID NO: 27764 - DNA, 201 bp, Homo sapiens
tcgcttgatggtggaggttgcagtgagccgagatcgcgccactgcactccagcctgggtgaaagagcgaaactccatctcaaaaaaaaaaaaaaaaaaaaaatcagccagatgtggtggcaggtgcctgtagtcacagctacttgggaggttgaagcaggagaatcgctttatctcaggaagcagaggttgcagtgagcca

SEQ ID NO: 27765 - DNA, 201 bp, Homo sapiens
gaattgcttgagcctgggaggttgaagctacagtcagctgtgattgcaccactacacttcaaccatggcaatagagtgagaccctgtctcaaaaaaaaaaattatcagctattactataattatttttattagttcctcactcacctaaaatctcaaacacaccttagaaatacacatatgagaacaaccaaaaatgacaa

SEQ ID NO: 27766 - DNA, 201 bp, Homo sapiens
gaggttctaccatttaccaactaggagtctgtggccaagttactcaatctcctttctaagcctcttcctcatatgcaaaaagggaataataagtgttttayaagattcatgcatgatataatgtatgcaaagtgtttagcatggtgcctggcatatcataactgttaaacaattattagccagctcctagcattttgggag

SEQ ID NO: 27767 - DNA, 201 bp, Homo sapiens
tgcagctcagccagctgtgttccagctaatcagcctccttgggctactctggagttgctgccttggccctgggatggggtaggttaagaggacagagggakgtcagggagctgggggctgagtttccctgagtagaggctggcacaggagagaaggcatcacccccacctcgtccaggccagaagatgtccagcttcttga

SEQ ID NO: 27768 - DNA, 201 bp, Homo sapiens; identical to SEQ ID NO: 4148

SEQ ID NO: 27769 - DNA, 201 bp, Homo sapiens
ttgatcaatccactgtctgcactaagttcagcatgaatacagtgacctcttgggagggcaggaccatcaggttgcctaaagaggggtgaactggcccaggytggaagtggagaaggtcaaaactgctgtgctatccagtagtgggatgacatctgtgaatagccactgcactccagcctaggcaatatagggaaaccatgt

SEQ ID NO: 27770 - DNA, 201 bp, Homo sapiens; identical to SEQ ID NO: 4244

SEQ ID NO: 27771 - DNA, 201 bp, Homo sapiens; identical to SEQ ID NO: 4237

SEQ ID NO: 27772 - DNA, 201 bp, Homo sapiens; identical to SEQ ID NO: 4248

SEQ ID NO: 27773 - DNA, 201 bp, Homo sapiens
ggtggtgaaatgtgatgataattcaaaatttacagaagattgtaatattatttctgttccccaaggtcctaagagatattttcataaaaatgaatggtaarcttcagagaacatttaaaattattcaaaataatctcttacactcttctaaatgcttcattatcttggggagggaaatattatgagtgtcatctctgcaga

SEQ ID NO: 27774 - DNA, 201 bp, Homo sapiens
acggtcataaacaacgctacacagttaaacattaaggatatggcaacattattagaaataaaattataactaaacttaggagaaataaaaatggaatttgrtgcagtcactggttaggactctgagtgtcgctgttgaccaaagtgggaaagaagctgccgcagaggcgacccgactctgctccctccatactaaacacac

SEQ ID NO: 27775 - DNA, 201 bp, Homo sapiens; identical to SEQ ID NO: 4122

SEQ ID NO: 27776 - DNA, 201 bp, Homo sapiens
cttatatattatttctggctcaattctccaacttttgagtctagaaatgaacttgcatatcagatataatttaagaaaatattctcaggaactgctgggawgattctaaaactattttactgtttttagctataaggaagagaataatgtattatttaatgttattttaaacatagtgttgtttcaaatagtaaataacat

SEQ ID NO: 27777 - DNA, 201 bp, Homo sapiens; identical to SEQ ID NO: 4476

SEQ ID NO: 27778 - DNA, 201 bp, Homo sapiens
aggttagtgcatggattcccaagaaagataacttgaggtgacactgtttaacatatatcgattcaattatgttcaatcaacactagtcctcttatctctgrcaagaaggatttcagatcttggataattcaaaaataataatgtgtctgagaggatgcagtaaacggttaggcctcttagtgtcgctgttgaccactcaag

SEQ ID NO: 27779 - DNA, 201 bp, Homo sapiens
agaagcaagtcggagagtggccaagacttgggctttctgctcctgcaaatctgattccatacggattggggtgccctcaaactgggagcattgagttttcyatgtatggaagtaaatattttaaaagcactttgtgaaacattttctcttaacgtcggagactgcagcaacgcatgggaaggatgggaaacagggtgaagc

SEQ ID NO: 27780 - DNA, 201 bp, Homo sapiens
cagcgggtaggtgactgattctccagcccaccctcttctctgcggcattttctcagggatgacgtgggaggagatgggggagggcccagcatttgctacasatggcttctccctcagtttgagatcccagggaggtcttggtgtgcggggggctggcacacagaccccggaaggaagaggcgactgccctgactgttcagg

SEQ ID NO: 27781 - DNA, 201 bp, Homo sapiens
ctggctctttgaagccagatctgggcccccctcccctaccccttccattcccaggctgggaaaggctgaagaggctgacggctggaggggagggggcgggkcggtggcggatctggcttccttttggagttaattagggaaaacagagaaatgtcagcggaatgaaagggctgggggtgggggccagctggggtaggagag

SEQ ID NO: 27782 - DNA, 201 bp, Homo sapiens
gagacccggcaccagcgggtaggtgactgattctccagcccaccctcttctctgcggcattttctcagggatgacgtgggaggagatgggggagggcccascatttgctacagatggcttctccctcagtttgagatcccagggaggtcttggtgtgcggggggctggcacacagaccccggaaggaagaggcgactgccc

SEQ ID NO: 27783 - DNA, 201 bp, Homo sapiens
cccctaaatcactctggaatcctggctctttgaagccagatctgggcccccctcccctaccccttccattcccaggctgggaaaggctgaagaggctgacsgctggaggggagggggcggggcggtggcggatctggcttccttttggagttaattagggaaaacagagaaatgtcagcggaatgaaagggctgggggtgg

SEQ ID NO: 27784 - DNA, 201 bp, Homo sapiens
gcccaacacggactggcgtttctctcaggcccagagacccggcaccagcgggtaggtgactgattctccagcccaccctcttctctgcggcattttctcasggatgacgtgggaggagatgggggagggcccagcatttgctacagatggcttctccctcagtttgagatcccagggaggtcttggtgtgcggggggctgg

SEQ ID NO: 27785 - DNA, 201 bp, Homo sapiens
tttataaagatattttaaaatatttgtgaaaatataagtaatctgtggatgatactttgagataggcagcaacccttcatgcaattttagtattccctgakgatccttgcctgtatctgtttttacatcagtgattacaaagcggtgatgttctgtcattccttctacatgtatttgctggtattcttctgaaaattacct

SEQ ID NO: 27786 - DNA, 201 bp, Homo sapiens; identical to SEQ ID NO: 5484

SEQ ID NO: 27787 - DNA, 201 bp, Homo sapiens; identical to SEQ ID NO: 4376

SEQ ID NO: 27788 - DNA, 201 bp, Homo sapiens; identical to SEQ ID NO: 4152

SEQ ID NO: 27789 - DNA, 201 bp, Homo sapiens; identical to SEQ ID NO: 4483

SEQ ID NO: 27790 - DNA, 201 bp, Homo sapiens; identical to SEQ ID NO: 4154

SEQ ID NO: 27791 - DNA, 201 bp, Homo sapiens
acatggtgaaaccccatctctactaaaaatacaaaaaattagccgggcatggtggcaggcacctgtagtcccagctactcgggagggtgaggcaggagaayggcatgaacccaggagacggagcttgcagtgagctgatatcatgccactgcactccagcctgggcaacagagtgagactccagctcaaaaaaaaaatcaa

SEQ ID NO: 27792 - DNA, 201 bp, Homo sapiens; identical to SEQ ID NO: 5480

SEQ ID NO: 27793 - DNA, 201 bp, Homo sapiens
ttctgaaacgtgcacagattccaagtgttttctgagaactttatgcttattgtagagtggttacagacactgaatgctaaagtgtattactctttgaaaakcattgcttgatttcttttggtgaattctgtaaaggtgcagggaaacataacgtcccaattattttttctttcttctttgtttgctgcctatctactttga

SEQ ID NO: 27794 - DNA, 201 bp, Homo sapiens; identical to SEQ ID NO: 4251

SEQ ID NO: 27795 - DNA, 201 bp, Homo sapiens; identical to SEQ ID NO: 4116

SEQ ID NO: 27796 - DNA, 201 bp, Homo sapiens; identical to SEQ ID NO: 4175

SEQ ID NO: 27797 - DNA, 201 bp, Homo sapiens; identical to SEQ ID NO: 4150

SEQ ID NO: 27798 - DNA, 201 bp, Homo sapiens
ggtagaattgtatctggtggtgtgggcgtataatagggatttgatttagggagcaggaggacatcctggaaatgaagttgtgctgagatctgaaagacaawtacaaattaaccagctaaagaaaagaaggaagagcattccagatggtcaggcataccagcttcaaagcagggctggtgttgagttcttcagtaaacttgg

SEQ ID NO: 27799 - DNA, 201 bp, Homo sapiens; identical to SEQ ID NO: 4176

SEQ ID NO: 27800 - DNA, 201 bp, Homo sapiens; identical to SEQ ID NO: 4246

SEQ ID NO: 27801 - DNA, 201 bp, Homo sapiens
catgggaatgttcacactgctactttcaagaatctctagaagggcagctaaaggagcttagtgaaggtgaatttattgacatgaatgagaaaagtaattgygatgaaaaggatgaagatgtcccagagaaagtaatgccagcaaaaacttcacattaaaggaactctcagatatttcaaagcattgaaacctccaagaata

SEQ ID NO: 27802 - DNA, 201 bp, Homo sapiens; identical to SEQ ID NO: 4177

SEQ ID NO: 27803 - DNA, 201 bp, Homo sapiens
tccgttttcttctctgtgcccactcccctccttctctcccggcccatccctaggggctcgggtgacattctaacttctcacgggtactcagcccctttccmtctgttttctccacagcaagccccgcccaacacggactggcgtttctctcaggcccagagacccggcaccagcgggtaggtgactgattctccagcccac

SEQ ID NO: 27804 - DNA, 201 bp, Homo sapiens
gcatttctgcatttctaacaagctccccggtgatgcctagaccattggtcctcacactttgagtagcaagtgattgggctatactctttattctaaattcyaaatgtattctatcttctaatgcctatcagccctcttgctggtctggctaattatcaaacttgagcatttaaaactgggggttttcagagattaattgaa

SEQ ID NO: 27805 - DNA, 201 bp, Homo sapiens; identical to SEQ ID NO: 4178

SEQ ID NO: 27806 - DNA, 201 bp, Homo sapiens
gtgatttatctcttggtttctggtacctcagacctctgagacctgaggtgtattttgtctttggagatgagtccacccctgccccctcttagtccgttttmttctctgtgcccactcccctccttctctcccggcccatccctaggggctcgggtgacattctaacttctcacgggtactcagcccctttccctctgtttt

SEQ ID NO: 27807 - DNA, 201 bp, Homo sapiens; identical to SEQ ID NO: 4179

SEQ ID NO: 27808 - DNA, 201 bp, Homo sapiens
atgtcctagagagtactggcctctcagtaagtgcccatagtgatgtcaccatttttgtaagaggtaactatgtggtagacgctgtgctttgtaactgtttygtgaattaaccagagttgtcacagtttagcattgggggcgggtcatgcctatatctgagtaagaaatgaaagtaattggtgatcaagagccaggctgttg

SEQ ID NO: 27809 - DNA, 201 bp, Homo sapiens; identical to SEQ ID NO: 4180

SEQ ID NO: 27810 - DNA, 201 bp, Homo sapiens
gggggctgaatcaacctgcagcacgaagtgagtggggaggtaggaagcttctgtgacacagatttgcagcctgtgttcccaaggtttccaggattgaggaractccataattggttgagagcacacagactttttggccaatcagactcagagctgaggtgggagatctgctcttccagcccgcctctcctcctccagctc

SEQ ID NO: 27811 - DNA, 201 bp, Homo sapiens; identical to SEQ ID NO: 4425

SEQ ID NO: 27812 - DNA, 201 bp, Homo sapiens
agcccaaggagctggaagttacagtgagctatgattattccactgtactccagcctggatgacagagcgagatcctgcctcagaaacaaaaaccaaaaaayaaacaacaacaaaaacaacaacaacgaaaatctcagaaaactacaggccttattatcaagaaaatgacaggccttattattgagaaaactacttacattt

SEQ ID NO: 27813 - DNA, 201 bp, Homo sapiens
actgcactccaggctgggcgacagagcaggactccatcttaaaaaaaaaaaaaaaaaaatgctgttttgaaatggaggcttggaagagcactcttcacccycaccccacacacttactaacggaactaccgaatctctactcgtgccaggccttgcttggcaaaggctaggggcatgtaaagccatggtttcatggctgct

SEQ ID NO: 27814 - DNA, 201 bp, Homo sapiens; identical to SEQ ID NO: 4174

SEQ ID NO: 27815 - DNA, 201 bp, Homo sapiens; identical to SEQ ID NO: 5481

SEQ ID NO: 27816 - DNA, 201 bp, Homo sapiens
gaaaacaggcttgagccacgcagagacttgaccaagctcacacagttccttagtggcagagcagagcaaatattctctttcttttacattctggatttccrtatcttctctccctcctggtccagcccaacctcagggcaccccccacgaggtgggcgggggatggctttgtcacttgcacccactcggggtgctactcag

SEQ ID NO: 27817 - DNA, 201 bp, Homo sapiens
gaacaactatattgccgtaagttaagagtacttacagatagtctccaaattttagaggaaccaggcagagaaaaatgaacatgctccaaattttgttcacwgtagtataccttacttgattattaaaggccataaatagtttaaaataagtttcctttcccagtccatgcaccaaaatgatacggctctgatgagtggagg

SEQ ID NO: 27818 - DNA, 201 bp, Homo sapiens
gtgatccgcccgcctcggcctcccaaagtgctgggattacaggcttgagccactgcgcccggtgggtctaatgttttaaattacactgtgttaaataaatrttagtttgttggttttttttttagtttttttatttctctacaaatttacaaccaataagagtttttaatgctttgacaaaaaatgttaaaggtcatagta

SEQ ID NO: 27819 - DNA, 201 bp, Homo sapiens
ggaaggcgaaaagataggctgggttttttggggggtgggggagcgtggaggatagggtgggctttttcccctccaatgctgcgacgcattaaccctgctgctgttgggacgttctctgctcagcctattggctgagcccgggagccgctgtctgccaatcgggtggtgaaaggcagacaaatctaccccgccaccagcaaa

SEQ ID NO: 27820 - DNA, 201 bp, Homo sapiens
tctgaaggctatgagacccctgattccccacttcacacttctaaaaaaaaaaaaatttttttttctgagcttggagaaatatatcccttagtacacttggmatttataaagcagacatcaataaatttatatatatgtgacagataccaacaacaatccagtccccttccctcataccttatttatgtacatatattttat

SEQ ID NO: 27821 - DNA, 201 bp, Homo sapiens
tttttggcagccagtgtaacctaggtaaggacttggttgaattaagaaatttcatgtccagatcaggatggatttttctatttctctgagctctggtgtgwttcccactcagattgcaggtcgtaggtacctacggtgtgaattgtgttgtgtttctgtgcttgtgcaagggagtagctaggttgctgggaggtctggatg

SEQ ID NO: 27822 - DNA, 201 bp, Homo sapiens
caaaaccaataaaatatgtcaaataaaatgtcattttaagtgttgtaattggcatttgtgacataggcaattacatgttttaacagagaattccagtatgytgttttagtggtacagccagatgaagtgtgtctgtgggctatcaaagtgggagattggggatactggctttgtttcaactgtctcacgtactcaaacctt

SEQ ID NO: 27823 - DNA, 201 bp, Homo sapiens
gtgtgtgtgtgtgtaaaagaacacagaaagccagattcctctttttgacaccagaatattggttcccaccatagtcaaaaggatattcctgaggatcgagscttggaaaaatattggggaaggataagaactccagttgttgctgctttttttggcagccagtgtaacctaggtaaggacttggttgaattaagaaatttc

SEQ ID NO: 27824 - DNA, 201 bp, Homo sapiens
gtagtagcttgtcagacagtaaaggggaaaggacagggcagggaggggccattgcaagaaattccatgcagagggattatggtatttcattatcactgaamcttaaactgtgtgtgtggccgggtacggtggctcatgcctgtaatcctagcactttgggaggccaaggtgggcagatcacttgaggtcaggagtttgaaa

SEQ ID NO: 27825 - DNA, 201 bp, Homo sapiens
tgcttgaacccgggaggcagaggttgcaatgagctggtgtcaggccactgcactccagcatgggcaacagagagagactccatctcaaaaaaaaagtgtgygtgtaaaacagacagtctttgtaggagatgaggtgaagcaagtaggcaggagttagatcctgagttacctttgggccaagccaaggagtttttattttat

SEQ ID NO: 27826 - DNA, 201 bp, Homo sapiens
ggcataaaaaggtcaagtcaaagatatgtaagattaaggctttacgatgctccagttctagtaaaacagaccaggtacttgttttggtgtgaaattgccartataagtatagtactgtacatattagttgtttagcttaggtaagtcttttaatctctttaaactccagtttcctcatctataaaataaagagaatatcta

SEQ ID NO: 27827 - DNA, 201 bp, Homo sapiens; identical to SEQ ID NO: 4282

SEQ ID NO: 27828 - DNA, 201 bp, Homo sapiens
tctcaggaagcagaggttgcagtgagccaagatcatgctgttgcattccagcctgggcaacaagaacaaaactcactccatctcaaaaaaaaaaaaaaaawatctagagatgggagaatcatatggctggcataaaaaggtcaagtcaaagatatgtaagattaaggctttacgatgctccagttctagtaaaacagacca

SEQ ID NO: 27829 - DNA, 201 bp, Homo sapiens
atctcaggaagcagaggttgcagtgagccaagatcatgctgttgcattccagcctgggcaacaagaacaaaactcactccatctcaaaaaaaaaaaaaaaatatctagagatgggagaatcatatggctggcataaaaaggtcaagtcaaagatatgtaagattaaggctttacgatgctccagttctagtaaaacagacc

SEQ ID NO: 27830 - DNA, 201 bp, Homo sapiens; identical to SEQ ID NO: 4185

SEQ ID NO: 27831 - DNA, 201 bp, Homo sapiens
ttatctcaggaagcagaggttgcagtgagccaagatcatgctgttgcattccagcctgggcaacaagaacaaaactcactccatctcaaaaaaaaaaaaawaatatctagagatgggagaatcatatggctggcataaaaaggtcaagtcaaagatatgtaagattaaggctttacgatgctccagttctagtaaaacaga

SEQ ID NO: 27832 - DNA, 201 bp, Homo sapiens; identical to SEQ ID NO: 4123

SEQ ID NO: 27833 - DNA, 201 bp, Homo sapiens; identical to SEQ ID NO: 4172

SEQ ID NO: 27834 - DNA, 201 bp, Homo sapiens
ccagctccactcaaattcagctcccctcccccctgcccacccccgccactcggtgactaagaactgctgcaagcaggcaaacctccgagcagtttttaagmggctggaaggagacataagagacttcagctgctgcattccaagccctgggtctaccttggagacaggacagcacagacttactctccacaaagggacttc

SEQ ID NO: 27835 - DNA, 201 bp, Homo sapiens; identical to SEQ ID NO: 4354

SEQ ID NO: 27836 - DNA, 201 bp, Homo sapiens
cttacggccagttctttgttactgtgtgtttcttaaactgaacaattcaaaaaagttaactccactatgtttgaagcaatattggtggcattaaggttagygcatggattcccaagaaagataacttgaggtgacactgtttaacatatatcgattcaattatgttcaatcaacactagtcctcttatctctgacaagaag

SEQ ID NO: 27837 - DNA, 201 bp, Homo sapiens
ctctttcctccttccttccttcctctctctctttcctccttccttccttcctctgtttctctctttctttctttctttctttctttctttctttctttctytcttgacagggtcttactctgtctggagtgcagtggcatgatcacggctcactgcagccttgacctcgcagactcaagtgatcctcccacctcagcctcc

SEQ ID NO: 27838 - DNA, 201 bp, Homo sapiens; identical to SEQ ID NO: 4190

SEQ ID NO: 27839 - DNA, 201 bp, Homo sapiens; identical to SEQ ID NO: 4192

SEQ ID NO: 27840 - DNA, 201 bp, Homo sapiens
tgaagagcgtcttatgactgagtgttccagtctccttctcaagctgaaccttgcttttcaaaccagattaagaacactatcataagttatactgcattttrtttccctacccatgtccactgcatcattctctatagtacaaagagcttgtctcgccaggcgcatctataatcttagcactttggggcgccaaggcgggtg

SEQ ID NO: 27841 - DNA, 201 bp, Homo sapiens
atcacgaggtcaggagtccaagaccagcctggccaacatggtgaaaccccgtctctactaaaaatacaaaaattcaccaggcgtggtggctgaggcaggaraatcgcttgatggtggaggttgcagtgagccgagatcgcgccactgcactccagcctgggtgaaagagcgaaactccatctcaaaaaaaaaaaaaaaaaa

SEQ ID NO: 27842 - DNA, 201 bp, Homo sapiens; identical to SEQ ID NO: 4250

SEQ ID NO: 27843 - DNA, 201 bp, Homo sapiens
gaaaaagtaaagcccaggcatggaagtgggaatggaaagaaagattctaagcctacaaatactcaaacatcaagaagaaataaaaataagtcatcacttcracttcatgtgctaacatcactgaggttataaattcccaggaatattttattgcgggagcaagactgcactgctgcctttcagcttgcaaattccagtgag

SEQ ID NO: 27844 - DNA, 201 bp, Homo sapiens
ggaaaaaccttcctaaagcactagcccctggacaactattatttaaacatctacagctgttcaatagatattgggttctttttggagggatgtgacaaaaktcttgtataattagattgtgatgatgattgtatcagtttagtacatgtaaatacactgaaaaccattggattatacactttaaatatgtgatttgcatgg

SEQ ID NO: 27845 - DNA, 201 bp, Homo sapiens
tgtttaaaatttcaactgaggctgggcccagtggctcatgcctgtaatcccagcactttgggaggccgaggcgggcaaatcacgaggtcaggatttcgagwccatcctggctaacatggtgaaaccccatctctactaaaaatacaaaaaattagccgggcatggtggcaggcacctgtagtcccagctactcgggagggt

SEQ ID NO: 27846 - DNA, 201 bp, Homo sapiens
gcataagccaccacacctagcctagtattcttttttgaatatgtaaaacattaacataaagtcaaaactattaaaaaaaggtgtactcagaaaattgtcaytcctcccctataccttctgcctcattcacaccacactctgtagataatcgatttcattagtttgtggtttatcctcactgtgtttctttttgcaaaacgc

SEQ ID NO: 27847 - DNA, 201 bp, Homo sapiens
taactattatccctgctataaggatactaattaagcaaaatacgacagcaatggaaactctgtccaatatttcagttagaaggtgctaccatggataaccytattgcaaatagtagagtgaggaaagcagttcccacaaatgtggtgtggtaggtaatttccatctaaaattttacttgccaacatatagaattcccctct

SEQ ID NO: 27848 - DNA, 201 bp, Homo sapiens
cactgcactccagcctgggtgatgggagggaaactgtctaaaaaaacaaacaaacaaaaattatatattgcattttcttctcattggtgtataagtaattytgattttctttcattgttctagtgatggtatctactgcgggagggggtactagatagatggagattgctttcttgattgctcagtagtcttggcaattta

SEQ ID NO: 27849 - DNA, 201 bp, Homo sapiens
ttttccccaccaaataatcttagcaccttaatcaaaaatcatttggccatggacatatgtaggtgtgggttttttctgggctctctgtgttagatggataratagacagatacagatatataactgtgtttacacatatgtaactgtaaacacagttatatatctatatatccaccaacagttgaatgagaataaactatt

SEQ ID NO: 27850 - DNA, 201 bp, Homo sapiens
catttggccatggacatatgtaggtgtgggttttttctgggctctctgtgttagatggatagatagacagatacagatatataactgtgtttacacatatrtaactgtaaacacagttatatatctatatatccaccaacagttgaatgagaataaactattgttataagcatatatacacattgtatatatatgtgtaca

SEQ ID NO: 27851 - DNA, 201 bp, Homo sapiens
gatagttgcagttgaatatactaagtttttcattaatattgaattaacaatttatttataacaatgtatgcttagatttttccagccctatttataactgrtaacactgcagtatcctttttgcatacaattctctaatttcacactgctatgtggaagatatagcattttaatttaactttcattgctcaatagggatcc

SEQ ID NO: 27852 - DNA, 201 bp, Homo sapiens
gagtttaccagtttccttcagtggtgacactttaatatagaacacataggatatagtatttctttagtgaaagcctatggacaagattatgaatatgtggwctatcacattttataatttccacctactttccaatctatgttccaacctactttcttaactcatatattttatacattggaatgaatcgagtctttcata

SEQ ID NO: 27853 - DNA, 201 bp, Homo sapiens
tgaggtgggagatctgctcttccagcccgcctctcctcctccagctccccagctccactcaaattcagctcccctcccccctgcccacccccgccactcgrtgactaagaactgctgcaagcaggcaaacctccgagcagtttttaagaggctggaaggagacataagagacttcagctgctgcattccaagccctgggtc

SEQ ID NO: 27854 - DNA, 201 bp, Homo sapiens
catgcttggcctctgaccaccctcctgggtgacctgattcagccccagaaatgttcccctacccaaaaactgtaacactcattccacatttggggtctggrgtgtcagaaaagctaagtcccatgtcagctgacattgagatttccgcaaagcattgctggagagtcagggcaagactttacaaggttcttactaatcttt

SEQ ID NO: 27855 - DNA, 201 bp, Homo sapiens; identical to SEQ ID NO: 4247

SEQ ID NO: 27856 - DNA, 201 bp, Homo sapiens; identical to SEQ ID NO: 4239

SEQ ID NO: 27857 - DNA, 201 bp, Homo sapiens; identical to SEQ ID NO: 4375

SEQ ID NO: 27858 - DNA, 201 bp, Homo sapiens
tttaaaaaatgaactgattatagttgtaaaaagagcagatgatcaaaaggatataaaaatataagcttctattactgaaaaatatagcttagaaaataccrgaatatttaaacataattccataagaaataatagaccccacaggaagaaagttagttaacataaagaagatttgaacaacataatttagaagcttgatct

SEQ ID NO: 27859 - DNA, 201 bp, Homo sapiens; identical to SEQ ID NO: 4478

SEQ ID NO: 27860 - DNA, 201 bp, Homo sapiens
tgcctcaacctcctgagtagctgggattccaggcatatgccaccacgccaggctaattttgtatttttaatagagacggggtttcttcatgttggtcaggygggtcttgaactcccgacctcaggtgatctgcccgccttggcctcccaaaatgctgggattacaggcatgagccactgcacccagtccaattttttgtat

SEQ ID NO: 27861 - DNA, 201 bp, Homo sapiens
tttcatcatgttggccaggctggtcttgaactcctgacctcaggtgatccgcctgcctcggcctcccaaagtgcagggattacaggtatgagccaccatgmccagcctaaagtgtattgtttagtcaccaaatatgtaagtattacccaaatatatttgtcactgatttctaatttaattgtattgtgatccaaaaatata

SEQ ID NO: 27862 - DNA, 201 bp, Homo sapiens
catatgtttaaaagccagtttatatctttttgtttttttagagacaggaatcttgttctgttgcccaggccaaattgcagtgatgcagtcatagctcactrtagcctcgcactcctgggctcaagcaatcctcctaccttagcctcccaagtagctaggactacagatggatgccaccatgtccagctaatttttttattt

SEQ ID NO: 27863 - DNA, 201 bp, Homo sapiens
cacaaggtcaggagatcaagaccatcctggctaacacggtgaaaccccgtctctactaaaaatataaaaagttagctgggcgtggtggcgggtgcctgtaktcccagctactcgggaggctgaggcaggagaatggcgtgaacccgggaggcggaacttgcagtgagccaagatcaagccactgcactccagcctgggcaa

SEQ ID NO: 27864 - DNA, 201 bp, Homo sapiens
acctgtggttttttttaccttaggcttttgacttccaaaattattgtttttgctgggtgcggtgggtcactcctgtaatcccagcactttgggaggccaasgtgggaggattgcttgagcctaggagtttgagaccattctaggcaacaaagcaagaacctgtctctaaaaaaatttaaaaattagccagaaatggtggca

SEQ ID NO: 27865 - DNA, 201 bp, Homo sapiens; identical to SEQ ID NO: 4349

SEQ ID NO: 27866 - DNA, 201 bp, Homo sapiens
gtggttgcctgaggctgaagctaggaagattgactacagacaagcatgagggaaattttgggggtgatgagagttttctaaaactggattgtggggttggytgcattactgtataaatttattaaaaatccctgcatcgtataggggcactatattgtatgtagaaagctgtgaaaagattttaaaaatgattgacatgtc

SEQ ID NO: 27867 - DNA, 201 bp, Homo sapiens; identical to SEQ ID NO: 4276

SEQ ID NO: 27868 - DNA, 201 bp, Homo sapiens
atagtccttagtgtatgctatgattattttactatgtcagtagcataaagattgctatattaataagcattaagtgcctgctgtgctagacagtgaggatrcaagtggccaccaaaatagcatggtccctgccctcctggagcttctttttttcttcttcagtgggggaagcagatactttgcttatgcaaaaataattat

SEQ ID NO: 27869 - DNA, 201 bp, Homo sapiens; identical to SEQ ID NO: 4126

SEQ ID NO: 27870 - DNA, 201 bp, Homo sapiens; identical to SEQ ID NO: 4254

SEQ ID NO: 27871 - DNA, 201 bp, Homo sapiens; identical to SEQ ID NO: 4256

SEQ ID NO: 27872 - DNA, 201 bp, Homo sapiens
caaaggagcaaagggagccagaagatgaaagcgagctcagggaggtgcgggctggtgcggtggctgcaggtactgttgcccttcctgttgtctttgttccscggggctctcccagtccagatccgctattcaattccagaggagctggccaaaaactcggtcgtaggaaacctcgccaaggatctggggctcagcgtccgg

SEQ ID NO: 27873 - DNA, 201 bp, Homo sapiens
gcgtttctctcaggcccagagacccggcaccagcgggtaggtgactgattctccagcccaccctcttctctgcggcattttctcagggatgacgtgggagsagatgggggagggcccagcatttgctacagatggcttctccctcagtttgagatcccagggaggtcttggtgtgcggggggctggcacacagaccccgga

SEQ ID NO: 27874 - DNA, 201 bp, Homo sapiens
actggcgtttctctcaggcccagagacccggcaccagcgggtaggtgactgattctccagcccaccctcttctctgcggcattttctcagggatgacgtgrgaggagatgggggagggcccagcatttgctacagatggcttctccctcagtttgagatcccagggaggtcttggtgtgcggggggctggcacacagaccc

SEQ ID NO: 27875 - DNA, 201 bp, Homo sapiens
tgccactcgctcgcggccagattcacaggcctgttccggtccactcgcagctcccctctgccgctccctccgccgggctcaggagtactcgtagctgattrtgcgcgcctgagggtcccagatcgcggccgcccaggaccaggcgaggactccggagcctcctctcacctctcccacctgcgccccgggctgggccgggtc

SEQ ID NO: 27876 - DNA, 201 bp, Homo sapiens; identical to SEQ ID NO: 5539

SEQ ID NO: 27877 - DNA, 201 bp, Homo sapiens
attaggaaataacatttaaactaagaccagacagacctgtagaaattagcaaagcaaagggagggaggaaaaagcagctttcctggcaaaggaacaatttrtgtgaaggccctgagacagggaagggctggggttctgaccaccctccaagtggtgcaatggaatatagtgagagagggagaagacatgagaacttggata

SEQ ID NO: 27878 - DNA, 201 bp, Homo sapiens; identical to SEQ ID NO: 4243

SEQ ID NO: 27879 - DNA, 201 bp, Homo sapiens
ggtgaattttaggtatgtaaatgatagctcaattggaaaaaaaaaaaaaaaaaaagacttcctggagatctgggaaagctggagtggagaaagcagtaccrgaatgttttagaagcaggaccagatgaaagagccgagcactcctaaataaagaccaagactggggcagctgcatgactggaatgaagcgcctttttggac

SEQ ID NO: 27880 - DNA, 201 bp, Homo sapiens; identical to SEQ ID NO: 4245

SEQ ID NO: 27881 - DNA, 201 bp, Homo sapiens
tagatagtaatggttatacaatcttgtggatattctaaaacccctgaattatacatttttaaaaggtgaattttaggtatgtaaatgatagctcaattggraaaaaaaaaaaaaaaaaagacttcctggagatctgggaaagctggagtggagaaagcagtaccggaatgttttagaagcaggaccagatgaaagagccga

SEQ ID NO: 27882 - DNA, 201 bp, Homo sapiens
ctatgagacagtgtgcgattgtgtgcctatggatctgtgtaccgtgtgccattgtgtgatcggtccgctgtgggggtggggatctgagtgcggcgtgtcartgtgcagtggagtgtgcagtctaagcttgcggctgtctccaggcagaagaggagaccccggcgcgggcgggggcgggttggcgccgggcaaacgccttgg

SEQ ID NO: 27883 - DNA, 201 bp, Homo sapiens; identical to SEQ ID NO: 4201

SEQ ID NO: 27884 - DNA, 201 bp, Homo sapiens
tcatccccattttgcagatgagaaaactgaagtggcataaggaggttaggtagacttgcccaggatcacagtgagtaaggaaaggagctaggaatcaaacytagactttctcactccagagcctcttaacctctaccctcaactcttgtgaagagagactaccttggtgacccctatattcccagtgctcagcgtggtcaa

SEQ ID NO: 27885 - DNA, 201 bp, Homo sapiens
cagctcagaaattcacacaggaagctgtaaggcagtactgtttcaatgctttattaacagttggaaacaaaaccaacaaactggaggtgatgacatcccaraagcctatgaggcaagggaaataggtttgcattttgtccctcacacctctctctctctctctttttttttattaaatgcatcttagcaaaagtagattaa

SEQ ID NO: 27886 - DNA, 201 bp, Homo sapiens
gtctcagtaggtctagaggagggcatttctgcatttctaacaagctccccggtgatgcctagaccattggtcctcacactttgagtagcaagtgattgggstatactctttattctaaattctaaatgtattctatcttctaatgcctatcagccctcttgctggtctggctaattatcaaacttgagcatttaaaactgg

SEQ ID NO: 27887 - DNA, 201 bp, Homo sapiens
tagctcccacctgatcttcctctgtctctgcagaagctgctgatgggagctccaccctgggagggggtgccggcaccatgggattgagcgcccgctacggrccccagttcaccctgcagcacgtgcccgactaccgccagaatgtctacatcccaggcagcaatgccacactgaccaacgcagctggcaagcgggatggca

SEQ ID NO: 27888 - DNA, 201 bp, Homo sapiens; identical to SEQ ID NO: 4398

SEQ ID NO: 27889 - DNA, 201 bp, Homo sapiens
agccatgatcttggcgtccgccagtggtaagtggtgtcagtgtgtgtatggaagagtgggagacctggggttctggggtgcatctcacagccaccatgccyacggactggatgtcaaacctgtgtagtttctccagatctttcggcaggtctgaaaggacccacaattccaaacataaagcctggaattgtggctaaggaa

SEQ ID NO: 27890 - DNA, 201 bp, Homo sapiens
gtttgacacagagatgctgcaagccatgatcttggcgtccgccagtggtaagtggtgtcagtgtgtgtatggaagagtgggagacctggggttctggggtrcatctcacagccaccatgcccacggactggatgtcaaacctgtgtagtttctccagatctttcggcaggtctgaaaggacccacaattccaaacataaag

SEQ ID NO: 27891 - DNA, 201 bp, Homo sapiens
tcctgctcggagaactcttgggattatttaaagatctcctctcctcggatttagaaaggcaaaggcgcagagagcgggatgggaaatagctccggatggargggcccagcagggcagaggcgaatgctatttctcttcctgctctctttgttagaccaggctctctccgaaccgatccgctacgctattcccgaggagctg

SEQ ID NO: 27892 - DNA, 201 bp, Homo sapiens
gaaagtaaatatgggttgggaagacagataaatttgtacatgttcccgagaacaggagcaagagatatatgacaaagctatttcagtggctctttaatgtrtaaggaggcaaacacctgaaactctgaaaactctgaaattgagaggcaaaataaacttagagtcaagaaagaaatgccatttctgcagatcagaatataa

SEQ ID NO: 27893 - DNA, 201 bp, Homo sapiens; identical to SEQ ID NO: 4191

SEQ ID NO: 27894 - DNA, 201 bp, Homo sapiens
ggatgtcaaacctgtgtagtttctccagatctttcggcaggtctgaaaggacccacaattccaaacataaagcctggaattgtggctaaggaacagcagargggttgggggtcctgggatgcctggaggagagcgaacaaggaaaagactcatggagggaatagtggttacaagtctagctctggaatgggacagtgtagc

SEQ ID NO: 27895 - DNA, 201 bp, Homo sapiens
atcagcctctcagtgcccaccatgagcaccgtaaagatggacagtttctatcatactcacagccacaaccccagcacctggctctgtgtctggtacatagwaattgctcaagaaagaattgttggaggggcgcggtggctcacgcctgtaattccagcactttgggaagcggaggcaggtggatcatgaggtcaggagttc

SEQ ID NO: 27896 - DNA, 201 bp, Homo sapiens
gggtgttgtcagggtgacttcctagatttctcagttttttgagcatgatgtagggagtattttattatagtccagtctatgggatattcccttatacacayacacacacacacacacacacacacacacacacaccccaaactcaatagggcaagaaccatattcatcatctcttaaatcctaggtcctgtcacaggccac

SEQ ID NO: 27897 - DNA, 201 bp, Homo sapiens
ctttcccagtccatgcaccaaaatgatacggctctgatgagtggaggaacaacagggttcctggtcctcatgctggtttagataaaatgacacagacacaygtggagtggttttaaggagtggagagtttaataagcaagaaggaagggagaagagagaaggaagacgctcccccttgcagagacggagcgggggttccaa

SEQ ID NO: 27898 - DNA, 201 bp, Homo sapiens
catttcctactagttttttaaaaatagcaactgaggccatactgtccaacagaattatagcttttttcttctttgcagtgtatcatgagaatttccccatrtctttcaaaattcttcccaagtcatttgcagagtaactcctcttatgaatatacatattattttacagaataagtcctcatatgaatatacatattattt

SEQ ID NO: 27899 - DNA, 201 bp, Homo sapiens
ggggtttcaccgtgttagccaggatggtctcgatctcctgacctcgtgatccgcccgcctcggcctcccaaagtgctgggattacaggcgtgagccaccgygcctggccgagcttcattttaaaaaaatctcattcacctaaataagttgttcacaaacttgtcacactttcatgtgacactttattcacatattaagaac

SEQ ID NO: 27900 - DNA, 201 bp, Homo sapiens; identical to SEQ ID NO: 4230

SEQ ID NO: 27901 - DNA, 201 bp, Homo sapiens
tcctttgaccccagctgttgtccttctccctgctggccttgccaaccttctcataagttatccattaagtcattaatgtattcattcgttcatttattcamcaaatatttatcgagcatctactatgagcagggccctgtgctaaacattgggctataggagtgaacaagtagatgtgatcccagaactcataggcttcca

SEQ ID NO: 27902 - DNA, 201 bp, Homo sapiens
aaaggcccaatctggcatgactcctaaattaataatgtatttagctgtgggaagagattcttgcaagccaagggcccagagaagatgtccctgtgaatgtstcactgcacaacctggcaccaaaagggttaccaagaacagcagccatcttgctgcagaggatgctttgttcccagctgaggagttgaataaattcattct

SEQ ID NO: 27903 - DNA, 201 bp, Homo sapiens
gtgccgggcgggcaggactctacgatccttgggccagaggtccggatggtcccgggactccgtctcaagggtcggcgacccctcaacccagaagcctcgarcaggcggacaggcagagctgcccagtggccgaggcgcggcagggctccgcgttgggcgagtgagtgagcctctataggacagcaggactgggactccagt

SEQ ID NO: 27904 - DNA, 201 bp, Homo sapiens
ctcaggagtactcgtagctgattgtgcgcgcctgagggtcccagatcgcggccgcccaggaccaggcgaggactccggagcctcctctcacctctcccacytgcgccccgggctgggccgggtcgcctggggggcggcctgagcgaggcgcggggccaggagcgctggagcgactgccgctctaagtgccgggcgggcagg

SEQ ID NO: 27905 - DNA, 201 bp, Homo sapiens; identical to SEQ ID NO: 4105

SEQ ID NO: 27906 - DNA, 201 bp, Homo sapiens
tgactctgggggcagggaggaaggggccatttctttaggaaaggagtctcagcttgctcactgtggtcagatgaaatgtgatttatctcttggtttctggkacctcagacctctgagacctgaggtgtattttgtctttggagatgagtccacccctgccccctcttagtccgttttcttctctgtgcccactcccctcct

SEQ ID NO: 27907 - DNA, 201 bp, Homo sapiens
tttgtttagtagagacggggtttcaccgtgttagccaggatggtctggatgacctcgtgatctgctcacctcggcctccaaaagtgctgggattacaggcrtgagccaccgcgcccggcctgcttctcttctcttatgggttagaatcctgcactgtcttttgaacaaatgtctaaaagcttttatcacacattttgatcc

SEQ ID NO: 27908 - DNA, 201 bp, Homo sapiens
aaagctttaggtaggcagaagccaaacaggatcagatagcccgtcttttttttttttttttgatggaatctcagtcgcccaggctggagtgcagcagcgcratcacagctcaccgtagcctcaacctcccaggctcaagtgatccacccacctcagcctccctagtagctgggactataagcatgtgccaccatatctggc

SEQ ID NO: 27909 - DNA, 201 bp, Homo sapiens; identical to SEQ ID NO: 4356

SEQ ID NO: 27910 - DNA, 201 bp, Homo sapiens; identical to SEQ ID NO: 4253

SEQ ID NO: 27911 - DNA, 201 bp, Homo sapiens; identical to SEQ ID NO: 4131

SEQ ID NO: 27912 - DNA, 201 bp, Homo sapiens
aattccagtatgttgttttagtggtacagccagatgaagtgtgtctgtgggctatcaaagtgggagattggggatactggctttgtttcaactgtctcacrtactcaaaccttagaccatcttatgtacacagatcctagaccagtagttgattttatttattaggtctactgaaaaattcagttggaaataacccaatct

SEQ ID NO: 27913 - DNA, 201 bp, Homo sapiens; identical to SEQ ID NO: 4171

SEQ ID NO: 27914 - DNA, 201 bp, Homo sapiens
tcctctcctcggatttagaaaggcaaaggcgcagagagcgggatgggaaatagctccggatggaggggcccagcagggcagaggcgaatgctatttctctwcctgctctctttgttagaccaggctctctccgaaccgatccgctacgctattcccgaggagctggacaggggctcgctggtagggaacctcgccaaggac

SEQ ID NO: 27915 - DNA, 201 bp, Homo sapiens; identical to SEQ ID NO: 4173

SEQ ID NO: 27916 - DNA, 201 bp, Homo sapiens
ctatttaaaaatattttccccaaattatagctgaatcagaaagtttaaattattatattatatgatttgtcaaaaagagaaactcctagggagacatctccataataggtgtgttgggggaacagtaatctcaaagcagatgcactaacattataagattaaaatcattgtttatagaaacttccaattcatttaaaagct

SEQ ID NO: 27917 - DNA, 201 bp, Homo sapiens
ctccacccgattctcgggatcattggaccgtttgcgcgaaaccagagtggccgattaagggatggggctccgagcaccgggggtggtggcgactgtgggcraggggaggtgggaccgacccccacccctacactcaaaaaaggccggggcctccttcgagcttccggtgaatttcgggcgatttccgcgggtgtcgggggt

SEQ ID NO: 27918 - DNA, 201 bp, Homo sapiens
gtgttcccaaggtttccaggattgaggaaactccataattggttgagagcacacagactttttggccaatcagactcagagctgaggtgggagatctgctyttccagcccgcctctcctcctccagctccccagctccactcaaattcagctcccctcccccctgcccacccccgccactcggtgactaagaactgctgca

SEQ ID NO: 27919 - DNA, 201 bp, Homo sapiens
ctgtgttcccaaggtttccaggattgaggaaactccataattggttgagagcacacagactttttggccaatcagactcagagctgaggtgggagatctgytcttccagcccgcctctcctcctccagctccccagctccactcaaattcagctcccctcccccctgcccacccccgccactcggtgactaagaactgctg

SEQ ID NO: 27920 - DNA, 201 bp, Homo sapiens
ggtgggggtggggtgagatcaagtctccagctccaagaggtcccctggggctaagtgaaaagcttgctcttttgaaatggtcttcgttggtaattaacaamagatcaagaataccttggtgtcagataaagggaatttgtaggcacaatgctgttggtagctgatctcaatcattcaaggaagctattaaatctatgaaca

SEQ ID NO: 27921 - DNA, 201 bp, Homo sapiens; identical to SEQ ID NO: 4153

SEQ ID NO: 27922 - DNA, 201 bp, Homo sapiens
tagtcaaaaggatattcctgaggatcgaggcttggaaaaatattggggaaggataagaactccagttgttgctgctttttttggcagccagtgtaacctargtaaggacttggttgaattaagaaatttcatgtccagatcaggatggatttttctatttctctgagctctggtgtgtttcccactcagattgcaggtcgt

SEQ ID NO: 27923 - DNA, 201 bp, Homo sapiens
tatctcaggaagcagaggttgcagtgagccaagatcatgctgttgcattccagcctgggcaacaagaacaaaactcactccatctcaaaaaaaaaaaaaawatatctagagatgggagaatcatatggctggcataaaaaggtcaagtcaaagatatgtaagattaaggctttacgatgctccagttctagtaaaacagac

SEQ ID NO: 27924 - DNA, 201 bp, Homo sapiens; identical to SEQ ID NO: 4277

SEQ ID NO: 27925 - DNA, 201 bp, Homo sapiens; identical to SEQ ID NO: 4103

SEQ ID NO: 27926 - DNA, 201 bp, Homo sapiens; identical to SEQ ID NO: 4242

SEQ ID NO: 27927 - DNA, 201 bp, Homo sapiens
tgtctgatgtcacctagctgtggcactctgagcctgtgcctaaagtgtccctgagatgtctagtccccgagatcatcatctcctcagcttcatagagccgrgctcttctccatcttctctctacctcccattcactcagaacagggataaggtccaagctgctggtggtgatggtgactgactgtcccttccagcatgcgc

SEQ ID NO: 27928 - DNA, 201 bp, Homo sapiens; identical to SEQ ID NO: 4125

SEQ ID NO: 27929 - DNA, 201 bp, Homo sapiens
gacagattgcgataagccctcttccaggctgcactaaactcaagcctctatcctgctggattctgagctccccttcctaagacagaggggtccacccggayacacccgcattctgaagcacttcccgagatcggcgcctaagcaagagaagcaggacgactatggcggctcagccgaggggcggggactacagaggattct

SEQ ID NO: 27930 - DNA, 201 bp, Homo sapiens
tgctactcagagatcttgggtgcacataggacgtgggtgggccgagcttctagctactccgtcaggcccttcctgtcattctgtctctgcctcccttctcyctgcttctccgtgttcctcctcattcttttctgtgtgcagggagactacaccccccaccccgctctttctctggcgcctctgaggtcccccctctagccc

SEQ ID NO: 27931 - DNA, 201 bp, Homo sapiens
ctaaaaatagaaaaatttgctgggcatggtggcgggtgcctgtaattccagctacttgggaggatgaggtaggagaattgcctgaacctgggaggcagagrttgtggtgagccgagaccacgccattgcaccccagcctgggcaacaagagcaacggtaaactccatctcaaaaaaaaaaaaaaaaaaagaaagaaaaaag

SEQ ID NO: 27932 - DNA, 201 bp, Homo sapiens
tattgtgtgcatcaatgtggtgcagtaacttagtaaggactcacagcgccgctgttcaccaaccagggaaaaatggtgcgagagatcccacagaaaccacsgagttttacagcacagagaaacgacagattgcgataagccctcttccaggctgcactaaactcaagcctctatcctgctggattctgagctccccttcct

SEQ ID NO: 27933 - DNA, 201 bp, Homo sapiens
gggataggaaagtgcaccttggaaaaggtttgatgatagagtgtttgagggcggggggtgggggttcttgtaaaataggaggggcaggttcttctatggcsgtggattttactctgagggcttaggaagccattgaattttagaaatttcttctccctgctccagggtctcttggggcctcctacatctccccctaggtac

SEQ ID NO: 27934 - DNA, 201 bp, Homo sapiens; identical to SEQ ID NO: 4128

SEQ ID NO: 27935 - DNA, 201 bp, Homo sapiens; identical to SEQ ID NO: 4159

SEQ ID NO: 27936 - DNA, 201 bp, Homo sapiens
aaaccccatctctactaaaaatacaaaaattcgctgggcatggtggcatgtgtgcacttgtcgtcccagctgctcaagaggctgaggcaggagaatcactygaacctgggaggcagaggttgcagtgagccgagatcgcgccactgtactccagcctgggtgacagagcgagactccagctcaaaaaaaaaaaaaaaagaa

SEQ ID NO: 27937 - DNA, 201 bp, Homo sapiens; identical to SEQ ID NO: 4473

SEQ ID NO: 27938 - DNA, 201 bp, Homo sapiens
aatagttgactaaatgtagtccatttcttccatttttacttttcactattccccaaatcctggaagagtccctcatatctgctgctggggctccaaggcckccaagctgaagcccagtacgttgttgtgcataagatcataggccctggaatcatattaggctggctttcaggttgcaactctaccagttccagctgtgtg

SEQ ID NO: 27939 - DNA, 201 bp, Homo sapiens; identical to SEQ ID NO: 4181

SEQ ID NO: 27940 - DNA, 201 bp, Homo sapiens
atattagccaggtgtggtggtgcacacctgtagtcccagctactcaggaggctgaggcaggggaatcgcttgaacccaggaggcggaggttgcagtgagcygagatcacaccactgcactccagtctgggtgacagagcgagactccatcaggaaagaaagaaagaaaaagagagagagggagggagggagggaaggaagg

SEQ ID NO: 27941 - DNA, 201 bp, Homo sapiens; identical to SEQ ID NO: 4108

SEQ ID NO: 27942 - DNA, 201 bp, Homo sapiens; identical to SEQ ID NO: 27639

SEQ ID NO: 27943 - DNA, 201 bp, Homo sapiens
gccaggttcaagcgattctcctgcctcagcctcccgagtagctgggacagcaggtgtgcaccaccacacccagctcatttttgtatttttagtagagatgkgtttcgccacgttggccaggctggtttcaaactccccgacctcaactgatccacctgcttcagcttcccaaagtgctagaattacaggtgtgatcgcccc

SEQ ID NO: 27944 - DNA, 201 bp, Homo sapiens
tcaagtgaaaactctggtcttaaactgcagctgatctattttatttttattttttttcagacacagccttgctctgttacccaggctggagtgcagtggcmccatcatggctcaatgcagccttggcctcgtgagctcaagcaatcttcccacctcaggctcccaagtagctgggactacaggcacatgctaccatgcctg

SEQ ID NO: 27945 - DNA, 201 bp, Homo sapiens
tccttctatggttgtatgtgccagtaatgaagatcacaaaatcgcttatgacccttctttgtcttcgcacgtgagtttctgcaaatctagttaaattttayatatggcggccgggcgcggtggctcaagcctgtaatcccagcacttaaccaggctgaggcaggtggatcacttgaggtcaggagtttgagaccagcatag

SEQ ID NO: 27946 - DNA, 201 bp, Homo sapiens
atcaagtgaaaactctggtcttaaactgcagctgatctattttatttttattttttttcagacacagccttgctctgttacccaggctggagtgcagtggsaccatcatggctcaatgcagccttggcctcgtgagctcaagcaatcttcccacctcaggctcccaagtagctgggactacaggcacatgctaccatgcct

SEQ ID NO: 27947 - DNA, 201 bp, Homo sapiens
atttccttctccttttttttttttttttttttttttttttgagatggagtctcgctctgtcacccaggctggagtgacgtggcgtgatctcggcttactaraaactccggctcccgggttcatgccattctcctgcctcagcctcccgagtagctgggactacaggtgcctgccaccatgcccggctaattttttgtattt

SEQ ID NO: 27948 - DNA, 201 bp, Homo sapiens
cttacacacaactgtgtaactgaaaactgtgtattctgcttctcgtggttgttgtatcctataattgtcaactagatcaagttagtaagagtgttgttcaktgatcttttcttcttcagtgtttactgtatttgctaatcccatccagtgaagtttccatttcatatattgtatttttcacttttagaagttccatttgac

SEQ ID NO: 27949 - DNA, 201 bp, Homo sapiens
ttgtggttttaatttgcattttcctgatgattagcgatgttgagcattttttcatatgtttgtgggccatttgtataccttcttttgagaaatggctattygtgtcctttgcctactttttaatgggattgtgttttatttttcttggtgatttgttagttccttgtagattctggatactagtcctttgtcagatgtgta

SEQ ID NO: 27950 - DNA, 201 bp, Homo sapiens; identical to SEQ ID NO: 4475

SEQ ID NO: 27951 - DNA, 201 bp, Homo sapiens
agccgagactgcaccactgcactccagcctgggcaacagagtgagacttcatctaaaaaataataattatacatgtaattatatatgatttttatatatgkaatatatatattcttgatgtgagctctttgtcacatacatattttgtggatattttatcccagactatgacttgtcttttcattttcttagttgtgtctt

SEQ ID NO: 27952 - DNA, 201 bp, Homo sapiens; identical to SEQ ID NO: 4234

SEQ ID NO: 27953 - DNA, 201 bp, Homo sapiens
aaaatgaacatgctccaaattttgttcacagtagtataccttacttgattattaaaggccataaatagtttaaaataagtttcctttcccagtccatgcaycaaaatgatacggctctgatgagtggaggaacaacagggttcctggtcctcatgctggtttagataaaatgacacagacacatgtggagtggttttaagg

SEQ ID NO: 27954 - DNA, 201 bp, Homo sapiens
tcttcactgaccacaggttaggaaccctgtgtggggactgtgtagacaaggtgtgaggccagttctccccaaggggcttttattggctctgcatgtcaagsttgattccttaaagggaaacacaccctttcagttaaagccttggcaaaataaccggtttttccaattgtgttctgttgacaaagaaaaatggattcttgc

SEQ ID NO: 27955 - DNA, 201 bp, Homo sapiens
gaggcgggagcatcatgaggtcaggagtttgagaccagcctggcctacatggcaaaaccccatctctactaaaaatacaaaaaattagccatcgtggtagygggcgcctgtaatcccagctaattgggaggctgaggcaggagaatcgcttgaacccgggaggcagaggttgcagtgagccgagatcgcaccactgcactc

SEQ ID NO: 27956 - DNA, 201 bp, Homo sapiens
acattcctccctgtggcgatatcaaactaactgctgttaggaggctttgggcgaccattgcttctggctacttcctgctgaaaaggggcgtctaatggagracagcagctagggctcctcctggggttgatctaagggtcctcggaagaatggcgtccatgtgtggttcagtttacagcaccgtttggagtttgattgctt

SEQ ID NO: 27957 - DNA, 201 bp, Homo sapiens; identical to SEQ ID NO: 4213

SEQ ID NO: 27958 - DNA, 201 bp, Homo sapiens; identical to SEQ ID NO: 4182

SEQ ID NO: 27959 - DNA, 201 bp, Homo sapiens; identical to SEQ ID NO: 4183

SEQ ID NO: 27960 - DNA, 201 bp, Homo sapiens; identical to SEQ ID NO: 4184

SEQ ID NO: 27961 - DNA, 201 bp, Homo sapiens
aatgatacggctctgatgagtggaggaacaacagggttcctggtcctcatgctggtttagataaaatgacacagacacatgtggagtggttttaaggagtsgagagtttaataagcaagaaggaagggagaagagagaaggaagacgctcccccttgcagagacggagcgggggttccaaagctgaaagaggaggtccccc

SEQ ID NO: 27962 - DNA, 201 bp, Homo sapiens
tagaaaatgggttgcttctatagctgattgctgcagccaagacaaacaacgatttctttctttttttctcacaagactgggagtgagaatatttggattcygacattgttctactactatataatcaataatcaggaacaaggcaaggcaattccctctttctttctttctttctttcttcttcttttttttttttttttt

SEQ ID NO: 27963 - DNA, 201 bp, Homo sapiens
tcctaagagatattttcataaaaatgaatggtaaacttcagagaacatttaaaattattcaaaataatctcttacactcttctaaatgcttcattatcttsgggagggaaatattatgagtgtcatctctgcagatttagcagaaataaaatcctctgtgtgatagtttcacaaaacgatgcagtattaagttaggactct

SEQ ID NO: 27964 - DNA, 201 bp, Homo sapiens; identical to SEQ ID NO: 4389

SEQ ID NO: 27965 - DNA, 201 bp, Homo sapiens; identical to SEQ ID NO: 4357

SEQ ID NO: 27966 - DNA, 201 bp, Homo sapiens; identical to SEQ ID NO: 4121

SEQ ID NO: 27967 - DNA, 201 bp, Homo sapiens
agtttttaatgctttgacaaaaaatgttaaaggtcatagtacaatcgcatttcttcccattgattattaacatcactttacatagtttcatcttgcattarcaattttgtgtgtgtgtttgtggttttaaggagcggagagtttaataggcaagaaggaagggagaagacagaaggaaggagctcccccttacagagacag

SEQ ID NO: 27968 - DNA, 201 bp, Homo sapiens
aagaataaattaatattaagcaatggtttgtgattttataatacacttacagaaattttattccactttatttacaactcagatatctaaaaaatagattkcttttgaaatacaaatgcaagaaacaattggagaaatctaaaatcataattagaagagagtagtgttttctttatcagccatctgatataatgttacaca

SEQ ID NO: 27969 - DNA, 201 bp, Homo sapiens
tctcctgacctcgtgatccgcccgcctcggcctcccaaagtgctgggattacaggcttgagccactgcgcccggtgggtctaatgttttaaattacactgkgttaaataaatattagtttgttggttttttttttagtttttttatttctctacaaatttacaaccaataagagtttttaatgctttgacaaaaaatgtta

SEQ ID NO: 27970 - DNA, 201 bp, Homo sapiens
ctgggcgtggtggctcacgcctgtaatcccagtgctttgggaggccgaggtgggtgaatcatctgaggtcaggagttcgagaccagcctggccaacatggygaaactctgtctccactaaaaatacaaaaattagctgggcatggtggcggacacctataatcccagctactcgggaggctgaggcatgagaatcgcttga

SEQ ID NO: 27971 - DNA, 201 bp, Homo sapiens
ccccgccgcttgcctgctctccctactttattcccattagcccccttcacctggggctgagaacacctggccttgaccctgcaccctcagccaggcccacrgagctcagtcgggccggaagtaaggaccccagatattcagttgaggaatttaacattaatacaataatatagaatccaccagcagattttcataaatgtt

SEQ ID NO: 27972 - DNA, 201 bp, Homo sapiens
cacacccggctaatttttgtatttttagtagagacgggtttcatcatattggtcaggctggtctcaaactcctgaccctggtgatctgcccacctcggccycccaaagtgctgggattacaggcgtgagccaccgcacccggaggaaatttttaacctcagtttttcttcaccatctgtaaaactgcatagaaggaatgtt

SEQ ID NO: 27973 - DNA, 201 bp, Homo sapiens
gtttaattttctttcacatgattatatgtgctccatggatttttttgtttgtttgttttttgtttttgtttttgtttaagcggggtcttgctcttgtcgcscaggctggagtgcaatggcttgatctcggctcactgcaacctccgcctcccgggttcaagtgattcttctgtctcagcctcccaagtagctgggactaca

SEQ ID NO: 27974 - DNA, 201 bp, Homo sapiens
gctgttttaatttttgttgtttaattttctttcacatgattatatgtgctccatggatttttttgtttgtttgttttttgtttttgtttttgtttaagcgkggtcttgctcttgtcgcccaggctggagtgcaatggcttgatctcggctcactgcaacctccgcctcccgggttcaagtgattcttctgtctcagcctcc

SEQ ID NO: 27975 - DNA, 201 bp, Homo sapiens; identical to SEQ ID NO: 4202

SEQ ID NO: 27976 - DNA, 201 bp, Homo sapiens; identical to SEQ ID NO: 4474

SEQ ID NO: 27977 - DNA, 201 bp, Homo sapiens
tctcaaggaggctgcggtttgcagctcagccagctgtgttccagctaatcagcctccttgggctactctggagttgctgccttggccctgggatggggtakgttaagaggacagagggaggtcagggagctgggggctgagtttccctgagtagaggctggcacaggagagaaggcatcacccccacctcgtccaggccag

SEQ ID NO: 27978 - DNA, 201 bp, Homo sapiens
aataggcctttttcaaactacattttatatatttttcaatctatactttgtggtgatagttgcagttgaatatactaagtttttcattaatattgaattarcaatttatttataacaatgtatgcttagatttttccagccctatttataactgataacactgcagtatcctttttgcatacaattctctaatttcacact

SEQ ID NO: 27979 - DNA, 201 bp, Homo sapiens
cttcgacttcatgtgctaacatcactgaggttataaattcccaggaatattttattgcgggagcaagactgcactgctgcctttcagcttgcaaattccartgagaaacgtctttctctctgctctcaactaactctacagaacgctgtcctctcatttcttcaggctgcagttctagagtagggactcagagtgccactg

SEQ ID NO: 27980 - DNA, 201 bp, Homo sapiens
catggtgaaaccccgtctctactaaaaatacaaaaattagccaggtggggtggcatgggcctgtaatcgcagctactcgggaggctgaggcaggagaatckcttgaacccatgaggcagaggttgcagtgagccaagatcgtgccactgcactccagtctgggtgacagagcgagactctgtctcaaaaaataataatgat

SEQ ID NO: 27981 - DNA, 201 bp, Homo sapiens
aaagaatcatagtgcaaaaccaattattttacatggacttttcctctatatctaagccctaataagaggcagctgtctgatatacatacatacatacatayatatatatatatatatatatatatatatatatatatatatatacacacacacacacatatatgtatatatatatttggagtaggggatggagtcttgctc

SEQ ID NO: 27982 - DNA, 201 bp, Homo sapiens; identical to SEQ ID NO: 4482

SEQ ID NO: 27983 - DNA, 201 bp, Homo sapiens; identical to SEQ ID NO: 4211

SEQ ID NO: 27984 - DNA, 201 bp, Homo sapiens; identical to SEQ ID NO: 4287

SEQ ID NO: 27985 - DNA, 201 bp, Homo sapiens; identical to SEQ ID NO: 27625

SEQ ID NO: 27986 - DNA, 201 bp, Homo sapiens
aaaggacagggcagggaggggccattgcaagaaattccatgcagagggattatggtatttcattatcactgaaccttaaactgtgtgtgtggccgggtacsgtggctcatgcctgtaatcctagcactttgggaggccaaggtgggcagatcacttgaggtcaggagtttgaaaccagcctggccaacatggtgaaacctc

SEQ ID NO: 27987 - DNA, 201 bp, Homo sapiens; identical to SEQ ID NO: 27627

SEQ ID NO: 27988 - DNA, 201 bp, Homo sapiens; identical to SEQ ID NO: 4099

SEQ ID NO: 27989 - DNA, 201 bp, Homo sapiens; identical to SEQ ID NO: 4101

SEQ ID NO: 27990 - DNA, 201 bp, Homo sapiens
aaacctctctcctccatcatcttgtatgaactaccaaaatgtttatcatatggacagttctcatatatagtcaaatagaaagaaagacataataggaaaayaaatgacttgggaaactaagctaacatggtctaattattctgacctctgctcacctaacttgatttaggaacaaatcattgagagttagagcatgaatag

SEQ ID NO: 27991 - DNA, 201 bp, Homo sapiens
atgcccatgctggaaggtagtgggtttaccggaatgagggcaaggaacacctggcccgcccagggcagaaaactgcttaaaggtgttcttaaaccacaaayaatagcatgagtgatctgtgccttaaggacatgcccctgctgcagataactacctcaatccatccctttatttccgcccatctcttcgtttcccataagg

SEQ ID NO: 27992 - DNA, 201 bp, Homo sapiens; identical to SEQ ID NO: 27633

SEQ ID NO: 27993 - DNA, 201 bp, Homo sapiens
caatttattttttcttttatagtttgtatttcttatgtcctattcaaaaactccttgcctactgaaaacttatgatgattttctcctatattttcttttaraagttttatagttttaccatttataatttggtctatgaatccttttgagttgatgtttatgtatggtgtatggtgtgaggtaacaatgaagattcatatt

SEQ ID NO: 27994 - DNA, 201 bp, Homo sapiens
aaagcccaatttattttttcttttatagtttgtatttcttatgtcctattcaaaaactccttgcctactgaaaacttatgatgattttctcctatattttyttttagaagttttatagttttaccatttataatttggtctatgaatccttttgagttgatgtttatgtatggtgtatggtgtgaggtaacaatgaagatt

SEQ ID NO: 27995 - DNA, 201 bp, Homo sapiens
gacatcaatatttgagtatataaggctttttctttaatccattaactataaattttgaagaaaatgcatgagaaaatggagaaaatgtgttttttttttawaaaaaattgagattaaggtctcattatgttgcccaggctggactcaaactcttgggctacagtaatcctcccacctcaatctccagagtagctgagacta

SEQ ID NO: 27996 - DNA, 201 bp, Homo sapiens; identical to SEQ ID NO: 5482

SEQ ID NO: 27997 - DNA, 201 bp, Homo sapiens
ggacatcaatatttgagtatataaggctttttctttaatccattaactataaattttgaagaaaatgcatgagaaaatggagaaaatgtgttttttttttwaaaaaaattgagattaaggtctcattatgttgcccaggctggactcaaactcttgggctacagtaatcctcccacctcaatctccagagtagctgagact

SEQ ID NO: 27998 - DNA, 201 bp, Homo sapiens; identical to SEQ ID NO: 4193

SEQ ID NO: 27999 - DNA, 201 bp, Homo sapiens; identical to SEQ ID NO: 4491

SEQ ID NO: 28000 - DNA, 201 bp, Homo sapiens; identical to SEQ ID NO: 4194

SEQ ID NO: 28001 - DNA, 201 bp, Homo sapiens; identical to SEQ ID NO: 4195

SEQ ID NO: 28002 - DNA, 201 bp, Homo sapiens; identical to SEQ ID NO: 4240

SEQ ID NO: 28003 - DNA, 201 bp, Homo sapiens; identical to SEQ ID NO: 4198

SEQ ID NO: 28004 - DNA, 201 bp, Homo sapiens
catctcaaaaataataataataataataaggtactaatatgatccagactagaagagaatagcactaaaatgggagatggggtaaacctgtggttttttttaccttaggcttttgacttccaaaattattgtttttgctgggtgcggtgggtcactcctgtaatcccagcactttgggaggccaaggtgggaggattgctt

SEQ ID NO: 28005 - DNA, 201 bp, Homo sapiens
agggcccagagcaggagaagaagaatatcatttgtccttaagagcacagcctaagctgggcgtggtggctcacgcctgtaatcccagcactttgggaagcwgaggcaggaggatcatgaggtcaggagttcgaaaccggcctggccaacatagtgaaaccctgtctctactaaaaatacaaaaattagctgggcatggtgg

SEQ ID NO: 28006 - DNA, 201 bp, Homo sapiens; identical to SEQ ID NO: 4188

SEQ ID NO: 28007 - DNA, 201 bp, Homo sapiens; identical to SEQ ID NO: 4139

SEQ ID NO: 28008 - DNA, 201 bp, Homo sapiens
ttagcactttggggcgccaaggcgggtggatcacttgagcccaggagtttgagaccagcctggacagcatggcaaaaacccatctctacaaaaaaaaaaaacaaaaattaacaaggtttagtggtccatgcctgtggtctcagctacttgggaggctgaggtgtgaggatcacctgagtctggggagattgaagctgcagt

SEQ ID NO: 28009 - DNA, 201 bp, Homo sapiens; identical to SEQ ID NO: 4140

SEQ ID NO: 28010 - DNA, 201 bp, Homo sapiens; identical to SEQ ID NO: 4141

SEQ ID NO: 28011 - DNA, 201 bp, Homo sapiens
tttcgaagagatgttgatcaaactgatgaggctaaatctcaagaaagagacacagttaccctctaatgttacactttgagttcacctttttttttttttttgagacagagtctcaatctgtcgccaagctggagtgcagtggcactatcttggctcactgcaacctctgcctcctgggttcatgctattctcctgccttag

SEQ ID NO: 28012 - DNA, 201 bp, Homo sapiens; identical to SEQ ID NO: 4143

SEQ ID NO: 28013 - DNA, 201 bp, Homo sapiens; identical to SEQ ID NO: 4291

SEQ ID NO: 28014 - DNA, 201 bp, Homo sapiens; identical to SEQ ID NO: 4145

SEQ ID NO: 28015 - DNA, 201 bp, Homo sapiens
gttgcagtgagcctcgatcctgtcactgcactccagcctgggcaacagggtgagactccgtctcaaaaaaaaaaaaaactaatattaatagtaaaaactcrgtataggctatccattattgtattcctgcataccttcttgtagcatttgaataaagctaatacctgaattgattgttgtaaggtagaagtagatgaccca

SEQ ID NO: 28016 - DNA, 201 bp, Homo sapiens; identical to SEQ ID NO: 4109

SEQ ID NO: 28017 - DNA, 201 bp, Homo sapiens
gctttaaatttaatcatctctttggtgaaagggatgggatggagctttgctttttatcatatattcatctgtacctttcaagtattcaaatagaaaaatayaaacaatgtaaataaaatagcaaaacaatgtaatatctcataaaactgcaatggtaaaagcatttatcctattgaaattccacaatttttatttgaaaat

SEQ ID NO: 28018 - DNA, 201 bp, Homo sapiens
cctaaacaagagatctaatcatacacatcttcaagctcattttcttgtatctttgtgatataatttgataaaataacattttaaacaacttgaatcttggmtattagtctcatgagttagatgggctgttatacatatgattatttcataaactctgaaagtgtgaatgttattttactatactaccaatttgggatgtta

SEQ ID NO: 28019 - DNA, 201 bp, Homo sapiens
tattggttgacaggaaaattcaagattgtctttgattagtgcttagttttcttagccctttgcagagagtcacataattctaatgtttttcttttatatcraaagaatgttctgaagtcttaattttgtgggggaaaataatgcatgtcctagtttttctttacctttctcttcttggcaaactatttgtgtcttggattg

SEQ ID NO: 28020 - DNA, 201 bp, Homo sapiens
tctaattctgggccaagcccaagagtgccattctttcttcctagctggggatggaaagctgagaggggcacaaggagggcaaaagtatcaccctaagccasagaattgcagcttcctgtggttggggccaccaaacagttcagtgtgcccacccacttctcttttagaagagagctggggtacagtgtatgaaggcactcc

SEQ ID NO: 28021 - DNA, 201 bp, Homo sapiens
cagccagagaagctgcagaagaacacggagctgggggtgaagggggacttaaaaggggaactacccggaaggacccaagaacacaaagacagagccactgsggttatctggctggtcagcaagggtatgcggcttcctccgcgctgcggaggctcccagagccaggtcacccattctgccagctcaagtctgttgtcatgg

SEQ ID NO: 28022 - DNA, 201 bp, Homo sapiens
tccactcactcgcctgctctcccatctccccgccccctccgcctgcctcctcgaagcactgtgggattccgaggttgctgcagccagagaagctgcagaaraacacggagctgggggtgaagggggacttaaaaggggaactacccggaaggacccaagaacacaaagacagagccactggggttatctggctggtcagca

SEQ ID NO: 28023 - DNA, 201 bp, Homo sapiens
gcggctacacaaaacccggcagataccacaaacctgctcccaggctgcagcaaaactcagcctctttcttctaaggaaaagatcaccatactttgcagggyggaagaaagaacctgatgaagcagcgcgcacagagatccttttgagaaaattccaaagcgaggcagcaatggcagctccaaccaaatgccagctccgcgg

SEQ ID NO: 28024 - DNA, 201 bp, Homo sapiens; identical to SEQ ID NO: 4151

SEQ ID NO: 28025 - DNA, 201 bp, Homo sapiens
gactgcaaatattttctcacagctcatcatttaccttttggcatttttttgcaatgcaatttttttccctttgtttttgttttttgtgtaatgaatcaatkttttcttttttttttttttttagaccaagtctcactctgtcacacaggctggagtacaatggtgcaatctcagctcactgcaacctctgcctcccaggtt

SEQ ID NO: 28026 - DNA, 201 bp, Homo sapiens
atcacttgaacccgggagacagaggttgcagtgagctgagatcacgccactgcactccagcctgggcgacatagtgagactctgacaaaaaaaaaaaaaaatccatatgtgaaaattcttagaagcttcctatacaatttcagctgaagattcagccaacagttcattctgagactgtgttccatggaaaaagtaaagccc

SEQ ID NO: 28027 - DNA, 201 bp, Homo sapiens; identical to SEQ ID NO: 4186

SEQ ID NO: 28028 - DNA, 201 bp, Homo sapiens; identical to SEQ ID NO: 4350

SEQ ID NO: 28029 - DNA, 201 bp, Homo sapiens; identical to SEQ ID NO: 4351

SEQ ID NO: 28030 - DNA, 201 bp, Homo sapiens
cctgggcaacatagtgaaaccccacctctatagaaaaaaaaagttttcaatcatacttatttaattaaaagtagacacttggaaacaaaggaaaagagacyctcttgctttttactatacttctattttataaggtcaatcatttcctcattacctttaacttcttttggggggagataataaagataaaagagaagaaag

SEQ ID NO: 28031 - DNA, 201 bp, Homo sapiens; identical to SEQ ID NO: 4267

SEQ ID NO: 28032 - DNA, 201 bp, Homo sapiens
tcaccgaatagtgaatgcatccaaagagtaacaagagaatctatacagtaggtgtcgacattattcactcctatgtgaaaacttgcttttccattttttttaaaagaaaatgttatatgcttcttagggtaaggtgtttgggaaaaaagtaaaggttatagatttgggtacatttcttctgagttaaatgttttgtgcaat

SEQ ID NO: 28033 - DNA, 201 bp, Homo sapiens; identical to SEQ ID NO: 4157

SEQ ID NO: 28034 - DNA, 201 bp, Homo sapiens; identical to SEQ ID NO: 4269

SEQ ID NO: 28035 - DNA, 201 bp, Homo sapiens
gcctcttgggaacaaaatacaaatcatggagccgctggggtcccttttgcctcagatactattttgaaggtgagctttaattaatttattttcacttctgkttttattgtttcacctaatttgggtaggaagttccactgcgtatttctttgtctgtgagttagatttggccaatgttgtgccttaattgtcttaatctta

SEQ ID NO: 28036 - DNA, 201 bp, Homo sapiens
tttattgtacaggaagacttggatcattcttgaattttcattgcaaatcaaaaacaggaatttgactttattatcttgggagaaataggaatagaaaagtrtataaaaaataaactttttttaaccaagaataaattgcagtaacaggttaagactctgggtgtcgctgttcaccaatcagggggaaaagacaaaccagaa

SEQ ID NO: 28037 - DNA, 201 bp, Homo sapiens
aacatgtaaaggaatatgtctcagcctctgcgggagatttccagacaatctcttccaacaatggaatagaagtcccttcttttgtcatgttctacaacttycttgagccagaaattgttggcttattctgcaatttatgaaattattttcactcatgaaatcatatgagagttatccaaaattagaccaaaatatgtttta

SEQ ID NO: 28038 - DNA, 201 bp, Homo sapiens
ctccagctggggcaatagagagagactccatctcaaaaaaaaaaaaaaagtagaggctggtcaaatggttttacctatagtgcctgttacatatgcctaawgtatatgcttatgtgtgtattcattttgatttcaacattttgcctgagggtggaaagctcacctagctaaattattatgagccttggagtggtatttctt

SEQ ID NO: 28039 - DNA, 201 bp, Homo sapiens
aatttttttttcttttttttttgagacagagttttgctcttgttgcccaggctggagtgcaatggcacgatctcggctcactgcaacctctgcctcctggkttccagcaattctcctgcctcaacctcctgagtagctgggattccaggcatatgccaccacgccaggctaattttgtatttttaatagagacggggtttc

SEQ ID NO: 28040 - DNA, 201 bp, Homo sapiens
gcctgttattcttttcatctcaataacataaaaattggagaacaaaaatgtagaggctgggtgcagtggctcatgctgtaatcccagcactttgggaggcygaggcaggtggatcacttgaagtcaggagttcaagaacaccctggccaacatggtgaaagcctgtctctactaaaaatacaaaaattagctgggcatggt

SEQ ID NO: 28041 - DNA, 201 bp, Homo sapiens
tttttgaatgggatggcattgcatctatacctttatcagggaaagagggaaggagggaggaggatcatcttaacaatattgacacttcaaatccatgaacrtggtatatatttccatttaattaggtctttaatttctctcagctatgttgtatagttttcagtgtagagaggtcatgtatatttctcattaaattgtccc

SEQ ID NO: 28042 - DNA, 201 bp, Homo sapiens
ttccttcctctctctctttcctccttccttccttccttcctctctctctttcctccttccttccttcctctctctctttcctccttccttccttcctctgkttctctctttctttctttctttctttctttctttctttctttctttcttgacagggtcttactctgtctggagtgcagtggcatgatcacggctcactgc

SEQ ID NO: 28043 - DNA, 201 bp, Homo sapiens; identical to SEQ ID NO: 4233

SEQ ID NO: 28044 - DNA, 201 bp, Homo sapiens; identical to SEQ ID NO: 5540

SEQ ID NO: 28045 - DNA, 201 bp, Homo sapiens; identical to SEQ ID NO: 4236

SEQ ID NO: 28046 - DNA, 201 bp, Homo sapiens
ccaagcacaaagacaaagcaaatagttggtcctgctcggagaactcttgggattatttaaagatctcctctcctcggatttagaaaggcaaaggcgcagaragcgggatgggaaatagctccggatggaggggcccagcagggcagaggcgaatgctatttctcttcctgctctctttgttagaccaggctctctccgaac

SEQ ID NO: 28047 - DNA, 201 bp, Homo sapiens; identical to SEQ ID NO: 4107

SEQ ID NO: 28048 - DNA, 201 bp, Homo sapiens
tcactatgtatttggttcataagttgctctatctttttgtaaaataatgtcaccagactgaagatattttgtctttgtcttttttttttttttttttttttgagatggagtctcgcactgttgcctaggctggagtgcagtggcgtgatctctgctcactgcaacctccgccttctgggttcaagcgattctcctgcctca

SEQ ID NO: 28049 - DNA, 201 bp, Homo sapiens; identical to SEQ ID NO: 4388

SEQ ID NO: 28050 - DNA, 201 bp, Homo sapiens
tcatgttcatttataccattcttattaatcctgataaaaagattcctgttttgaaagatctaattctagggtatcttagagctgtaagattctttaaagcrccttgaaagtcaacaaaggcaaacaaacaagaagtaacttaggttttcctgagcaggtgcagaaattatttaggcctctgagcgtcgctgttgaccacct

SEQ ID NO: 28051 - DNA, 201 bp, Homo sapiens; identical to SEQ ID NO: 4204

SEQ ID NO: 28052 - DNA, 201 bp, Homo sapiens
attctagggtatcttagagctgtaagattctttaaagcgccttgaaagtcaacaaaggcaaacaaacaagaagtaacttaggttttcctgagcaggtgcaraaattatttaggcctctgagcgtcgctgttgaccacctaaggagtaaaaggcagcgagacatccaatccagcaatacggctcccacagcacaagggggtg

SEQ ID NO: 28053 - DNA, 201 bp, Homo sapiens; identical to SEQ ID NO: 4290

SEQ ID NO: 28054 - DNA, 201 bp, Homo sapiens
aagcaacaaaagaaaaaaattgtatactggactttatcacagttaaaaactatatgcagcaaagaacaatatcaatagagtgaaaaggcagcccacagaawgagagaaaatgtttccaaatcatgtatctgagaatggatatccagaataaagaactcgaactcaacaacaaagaatcccaaacaattggatgttaaaatg

SEQ ID NO: 28055 - DNA, 201 bp, Homo sapiens; identical to SEQ ID NO: 27636

SEQ ID NO: 28056 - DNA, 201 bp, Homo sapiens; identical to SEQ ID NO: 4542

SEQ ID NO: 28057 - DNA, 201 bp, Homo sapiens; identical to SEQ ID NO: 4394

SEQ ID NO: 28058 - DNA, 201 bp, Homo sapiens; identical to SEQ ID NO: 4162

SEQ ID NO: 28059 - DNA, 201 bp, Homo sapiens; identical to SEQ ID NO: 4444

SEQ ID NO: 28060 - DNA, 201 bp, Homo sapiens
cattatagtcaagatttttctccagtcatgagttggaagattctacaatctggtggtattatagaatggattggccacttgtgcatctgaatttgttatgmatgtgtaagaaaaaagcaattgagaagataccttgaaaataaatgagaacctcctttgtaacctgactttgtcagtcttcttaaagataacattgagttg

SEQ ID NO: 28061 - DNA, 201 bp, Homo sapiens
aatccactgtctgcactaagttcagcatgaatacagtgacctcttgggagggcaggaccatcaggttgcctaaagaggggtgaactggcccaggttggaartggagaaggtcaaaactgctgtgctatccagtagtgggatgacatctgtgaatagccactgcactccagcctaggcaatatagggaaaccatgtctcttt

SEQ ID NO: 28062 - DNA, 201 bp, Homo sapiens
tgtgtctgactactcacagcaggtttccttattggtatgtattctgtggtccatctaagctatgttaattttattttaaatgctacctgggtattggcttytaaaaggaattcagtaaatcagataatttggcatcttcaatctagattctgatgctcacctgaaaagtctgctaaggattggaaaccaagaaaagtgaag

SEQ ID NO: 28063 - DNA, 201 bp, Homo sapiens; identical to SEQ ID NO: 4437

SEQ ID NO: 28064 - DNA, 201 bp, Homo sapiens
tgctcgccttgcacgcgcctgaagcacaaagcagatagctaggaatgaaccatccctgggagtatgtggaaacaacggaggagctctgacttcccaactgycccattctatgggcgaaggaactgctcctgacttcagtggttaagggcagaattgaaaataattctggaggaagataagaatgattcctgcgcgactgca

SEQ ID NO: 28065 - DNA, 201 bp, Homo sapiens; identical to SEQ ID NO: 4540

SEQ ID NO: 28066 - DNA, 201 bp, Homo sapiens
ggccaagccaaggagtttttattttattccatatagatgacagtcactgcagaaatttgaactgatatgcatatatcatgaggtttttttgttttagaaakattattctgtcagtcataagtgaagggactggggacattgggactggaggcaaagagatcttatctctttgcaatagtttgaaagctattgcaatatttg

SEQ ID NO: 28067 - DNA, 201 bp, Homo sapiens; identical to SEQ ID NO: 4380

SEQ ID NO: 28068 - DNA, 201 bp, Homo sapiens; identical to SEQ ID NO: 4525

SEQ ID NO: 28069 - DNA, 201 bp, Homo sapiens
gtttaatgagtcttgatttggattggagacttgcagaacggctagcctcacagccccaaggctggctttccctaaggtaggtttcctatgcaccgatactrgcaaggcgctttggctggaaactctggaaggaagccaaaggaaagtgaagttcctggcgctagcgcgtgtcctgctcagagagcccggcgctagctcatt

SEQ ID NO: 28070 - DNA, 201 bp, Homo sapiens; identical to SEQ ID NO: 4297

SEQ ID NO: 28071 - DNA, 201 bp, Homo sapiens
aggtgcagaaattatttaggcctctgagcgtcgctgttgaccacctaaggagtaaaaggcagcgagacatccaatccagcaatacggctcccacagcacargggggtggaggtttggccctaaagcttcaggacaccaaagaaattcagtcgaacagcccaccagttctctccatagggacctgggtcccgtgaatgctgg

SEQ ID NO: 28072 - DNA, 201 bp, Homo sapiens; identical to SEQ ID NO: 4392

SEQ ID NO: 28073 - DNA, 201 bp, Homo sapiens; identical to SEQ ID NO: 4138

SEQ ID NO: 28074 - DNA, 201 bp, Homo sapiens; identical to SEQ ID NO: 4265

SEQ ID NO: 28075 - DNA, 201 bp, Homo sapiens; identical to SEQ ID NO: 4111

SEQ ID NO: 28076 - DNA, 201 bp, Homo sapiens; identical to SEQ ID NO: 4296

SEQ ID NO: 28077 - DNA, 201 bp, Homo sapiens
taaaaaacatacaatgagtatatactaaaataaaatgatggaaaaaataacaaagagttacatttttgaaatgcaaccatggaagagttctgaggatgaartaatggaagcagacaataaatgtaataaaaccagtggggagaaaatgaaaattctgtcaagtctaacgttaggactcatgtaagagagccaggcacaatg

SEQ ID NO: 28078 - DNA, 201 bp, Homo sapiens; identical to SEQ ID NO: 27622

SEQ ID NO: 28079 - DNA, 201 bp, Homo sapiens; identical to SEQ ID NO: 27624

SEQ ID NO: 28080 - DNA, 201 bp, Homo sapiens; identical to SEQ ID NO: 4106

SEQ ID NO: 28081 - DNA, 201 bp, Homo sapiens
acttttctgaccccaaatctagactggatacccctcctaggtattcctccatcacccagtgtttcctacctcatatcacagcagttaccatactctattayactctctttactttcttatgtcctcctccaaccttcacgcttgagaccagggcctgtgtttatcatgttcaccatttctagctccagctgcaatcatgca

SEQ ID NO: 28082 - DNA, 201 bp, Homo sapiens; identical to SEQ ID NO: 4289

SEQ ID NO: 28083 - DNA, 201 bp, Homo sapiens; identical to SEQ ID NO: 4347

SEQ ID NO: 28084 - DNA, 201 bp, Homo sapiens; identical to SEQ ID NO: 4348

SEQ ID NO: 28085 - DNA, 201 bp, Homo sapiens
agaaaagatgttttatttattcaaattgttagatatattgttctcttttgagtgtctgcctagacaccattagtgaatgtgttttggaaaggataatgtayaggactgatattttagtctacctgaaatttgtttaaggaaataatttacagtatttacataaatcagtggaaaggtacagagaacttctgggtcataaat

SEQ ID NO: 28086 - DNA, 201 bp, Homo sapiens; identical to SEQ ID NO: 4443

SEQ ID NO: 28087 - DNA, 201 bp, Homo sapiens; identical to SEQ ID NO: 4279

SEQ ID NO: 28088 - DNA, 201 bp, Homo sapiens; identical to SEQ ID NO: 4384

SEQ ID NO: 28089 - DNA, 201 bp, Homo sapiens
tcttgacaggtcccaggaaactcctaggccaaaacacttctcagtcagccctgggagggttgtccctagcagaaggcaaccttccgtaagtggctggagasactcccgcaaagaggaacagcagccacgcactgacaccgcactcccacgtgttcctccaacaacagatgcccacatgccttagctctttcccaccccttc

SEQ ID NO: 28090 - DNA, 201 bp, Homo sapiens; identical to SEQ ID NO: 4353

SEQ ID NO: 28091 - DNA, 201 bp, Homo sapiens
ggcctggcccagctcaaccagagaaggggttcctcctgtgtcggattccctgggagagaggatctgccttggactcaagggtccagaaggtccaggggcayattcaggattgggcctgtgagaagaaatcccagaactctgtaacctgccaccaaagcttcttacattatggaggggaaagggggaaggaacagttttctt

SEQ ID NO: 28092 - DNA, 201 bp, Homo sapiens
agatcggcgcctaagcaagagaagcaggacgactatggcggctcagccgaggggcggggactacagaggattcttcctgctctccatcctcctggggaccmcctgggaagcctgggcaggacgtattctctactccgtgtcggaggagacggacaaagggtcctttgtgggagacatcgccaaggacctggggctggagcc

SEQ ID NO: 28093 - DNA, 201 bp, Homo sapiens; identical to SEQ ID NO: 4118

SEQ ID NO: 28094 - DNA, 201 bp, Homo sapiens
cgtgctcagacaagtatggctccaagtggcaagtcatctggagcatgacctcaggctcccaacctctgctgggcaggctcaggtttccaccccagggtaarcccctctactctggaatgtggtctgtggccaccaacagagcagaggggatgagaaaatgggagccagatgcttccctcagcaagagacacaggtactgcc

SEQ ID NO: 28095 - DNA, 201 bp, Homo sapiens
aattcaaaaaaatcatgaaaattgtcactgtgggaaaattccaagtagagctgaaccttctaagaagcagagagttcttcttatggtttagtatttttttwaattatgaatcatttcatgttttttcaacactcggagtttctaaaagtctcacttaggtccaagtgctaggctttgtgctaggtgcttcagtaggaagca

SEQ ID NO: 28096 - DNA, 201 bp, Homo sapiens
tgggataggctctgcgccaggcctcccagttagaagtcaggagcctggaggagtctcagagcccagggagagaagcaggagcttgggccaccttaccctayctcctcaatggttgagtacttgctgtccacatttgccaagttgctacagatgctgagcttccaagagttatctttcccccatcctgcaaccaaccaaacc

SEQ ID NO: 28097 - DNA, 201 bp, Homo sapiens; identical to SEQ ID NO: 4450

SEQ ID NO: 28098 - DNA, 201 bp, Homo sapiens; identical to SEQ ID NO: 4113

SEQ ID NO: 28099 - DNA, 201 bp, Homo sapiens
cggaggcagcaaagagctggtttgagggactgacttgtgggattctggcttctgaaggattgtagaagtgcctcctaccttgctgagagaaacaggtcttsggcatggggtagggttagggtactaggtttgggagccctgggagaggacaggaggggcatgagctgtgccggcctgggagtctgtgctcaccatcctact

SEQ ID NO: 28100 - DNA, 201 bp, Homo sapiens; identical to SEQ ID NO: 4104

SEQ ID NO: 28101 - DNA, 201 bp, Homo sapiens
  misc_feature (101)..(101): n is a, c, g, or t
gcgctattgaatagccctgtacctacatcagtttttacatatgcagtatatctttgggatgaattcccagaaatggaattgaaattgctgggtcaaagagnaaataggtgtaattttcttaggtattttcacaagaagtgttaattctaactttctgttttgaaatgatttcaaattttcaaaggagttgcaagaattgta

SEQ ID NO: 28102 - DNA, 201 bp, Homo sapiens; identical to SEQ ID NO: 4370

SEQ ID NO: 28103 - DNA, 201 bp, Homo sapiens; identical to SEQ ID NO: 4371

SEQ ID NO: 28104 - DNA, 201 bp, Homo sapiens
aattcaatggaaaatataaataaaattgtgataaacttttgtaaatagagtggcttttaactacacttgagatggctagcaaattcataaagtgaatttastttctttcaaagttcagtaattctttctggccattagggatatgtccatttatactttctcagtatcccaagtcatttcatggttttaaatcattcatga

SEQ ID NO: 28105 - DNA, 201 bp, Homo sapiens; identical to SEQ ID NO: 4286

SEQ ID NO: 28106 - DNA, 201 bp, Homo sapiens
tctttttcacttgggttcttgttaagtgtgattctgataatgtatacaatcacatatcatttttaggtttccataatatcatgaaaatttgatttttaagygttacatgtcaacaacctggtaaagtaatccttccattcaggatcattcaaggaatctatttaaaaatattttccccaaattatagctgaatcagaaagt

SEQ ID NO: 28107 - DNA, 201 bp, Homo sapiens; identical to SEQ ID NO: 4288

SEQ ID NO: 28108 - DNA, 201 bp, Homo sapiens; identical to SEQ ID NO: 5541

SEQ ID NO: 28109 - DNA, 201 bp, Homo sapiens; identical to SEQ ID NO: 4433

SEQ ID NO: 28110 - DNA, 201 bp, Homo sapiens
ccattctttaagaggagcagtaaattgtgagtttttatgtcgcataaaagaagtagccttatagatttacaaagtagtgagagtttgctcttagcttcctmtctagcaaaaacatttggtgcgtttttttgtcctctttctcaaagctaatgaattttacctattcgttgtctcattctttaacatgtttatattttattg

SEQ ID NO: 28111 - DNA, 201 bp, Homo sapiens
cctgcctctcttcataccctctggtagcccctgacacagcccatggcaagtatcacaattgcaattactctattgtgtaattatttaaaatcagcctctcrgtgcccaccatgagcaccgtaaagatggacagtttctatcatactcacagccacaaccccagcacctggctctgtgtctggtacatagaaattgctcaag

SEQ ID NO: 28112 - DNA, 201 bp, Homo sapiens; identical to SEQ ID NO: 5538

SEQ ID NO: 28113 - DNA, 201 bp, Homo sapiens
aagaagttgttataattttttattaagtatatggacgtaaaaacttggcttgttaagttaggcacacaaaaacaattactgcactggttaacttgaagcckcagaggctgtagtttcctagtgctgactctgggcgccgctgttggccaaagtgcagagcttggcgctccagatctcctcgcgcagccgcagcgcgctttc

SEQ ID NO: 28114 - DNA, 201 bp, Homo sapiens; identical to SEQ ID NO: 4387

SEQ ID NO: 28115 - DNA, 201 bp, Homo sapiens; identical to SEQ ID NO: 4386

SEQ ID NO: 28116 - DNA, 201 bp, Homo sapiens
atattcagtggagtgggagttaacttcatagtttgtgtaccatttggatgcacatttgagaggacaacatattattggcactttgcaattttaaaaactcrgatgaaagttgccctggtaggaaagaaaatccttactctccctaaaaatgttggctagttgtttttattaatctgacaaatggactaaagaaggttgacc

SEQ ID NO: 28117 - DNA, 201 bp, Homo sapiens
tttctatgaaatcagtgtattgtgtgcatcaatgtggtgcagtaacttagtaaggactcacagcgccgctgttcaccaaccagggaaaaatggtgcgagasatcccacagaaaccaccgagttttacagcacagagaaacgacagattgcgataagccctcttccaggctgcactaaactcaagcctctatcctgctggat

SEQ ID NO: 28118 - DNA, 201 bp, Homo sapiens
aaaggcgcagagagcgggatgggaaatagctccggatggaggggcccagcagggcagaggcgaatgctatttctcttcctgctctctttgttagaccaggytctctccgaaccgatccgctacgctattcccgaggagctggacaggggctcgctggtagggaacctcgccaaggacctggggtttggcgtgggggattta

SEQ ID NO: 28119 - DNA, 201 bp, Homo sapiens
taaaagagaagaaagtgaaacatagaataaaactaaaagctatgacattataacttttagaagttagaagtaaaggaaatagaatgcaataagaatacacrtgaagctgatatttcaagcctctttatactacgtcttctgccatcaccaaaaatagcttccatttgtatgattttctatgtattattttatttggccctc

SEQ ID NO: 28120 - DNA, 201 bp, Homo sapiens; identical to SEQ ID NO: 4217

SEQ ID NO: 28121 - DNA, 201 bp, Homo sapiens
ctttatgcttattgtagagtggttacagacactgaatgctaaagtgtattactctttgaaaagcattgcttgatttcttttggtgaattctgtaaaggtgyagggaaacataacgtcccaattattttttctttcttctttgtttgctgcctatctactttgaaagatacaatagttaaaacccagaaaagagattggaaa

SEQ ID NO: 28122 - DNA, 201 bp, Homo sapiens; identical to SEQ ID NO: 4235

SEQ ID NO: 28123 - DNA, 201 bp, Homo sapiens
aagagaccctcttgctttttactatacttctattttataaggtcaatcatttcctcattacctttaacttcttttggggggagataataaagataaaagaraagaaagtgaaacatagaataaaactaaaagctatgacattataacttttagaagttagaagtaaaggaaatagaatgcaataagaatacacgtgaagct

SEQ ID NO: 28124 - DNA, 201 bp, Homo sapiens
atttctaaaggacaggcaatgtttgaggtctgaggtgtctgctagaaagagtgcatttaacaaatgtgagaaatcattctctaacatgcattttaacaaaytgctcttaagaaaaactacacattgagaaaaatcttacaacctatgttcacatcattttctacaaaatattacttaaaactttgcttttgaatttcctaa

SEQ ID NO: 28125 - DNA, 201 bp, Homo sapiens; identical to SEQ ID NO: 4270

SEQ ID NO: 28126 - DNA, 201 bp, Homo sapiens; identical to SEQ ID NO: 4271

SEQ ID NO: 28127 - DNA, 201 bp, Homo sapiens; identical to SEQ ID NO: 4355

SEQ ID NO: 28128 - DNA, 201 bp, Homo sapiens
cataattttcttaaccattcctaaattatttgtttttatgctctttctattttgtctctattaaaacaaagaatgtaatgaacatttgggtttataaagcrttttccatacttcttgtttctttagtgtagatttctgaggaattagttaaatctataaacatgttgagatttttttaatgcatactgtcaaatttatttc

SEQ ID NO: 28129 - DNA, 201 bp, Homo sapiens
actcatgaaatcatatgagagttatccaaaattagaccaaaatatgttttattagaactcaaacaaaagaatagattcctccctcaatatattaggaaaargcacatttaaatgtatgagacaacagggccagaacacaaaagctgtaagcagagtaaggtgtattctcactgaaacatggaaatacatcacagaatttaa

SEQ ID NO: 28130 - DNA, 201 bp, Homo sapiens; identical to SEQ ID NO: 4293

SEQ ID NO: 28131 - DNA, 201 bp, Homo sapiens; identical to SEQ ID NO: 4295

SEQ ID NO: 28132 - DNA, 201 bp, Homo sapiens; identical to SEQ ID NO: 27631

SEQ ID NO: 28133 - DNA, 201 bp, Homo sapiens; identical to SEQ ID NO: 4382

SEQ ID NO: 28134 - DNA, 201 bp, Homo sapiens; identical to SEQ ID NO: 4114

SEQ ID NO: 28135 - DNA, 201 bp, Homo sapiens; identical to SEQ ID NO: 4446

SEQ ID NO: 28136 - DNA, 201 bp, Homo sapiens; identical to SEQ ID NO: 4447

SEQ ID NO: 28137 - DNA, 201 bp, Homo sapiens; identical to SEQ ID NO: 4438

SEQ ID NO: 28138 - DNA, 201 bp, Homo sapiens
tttatttcttttttatttttaagatcagagttatttacccattgttttaggctttgcatttgaactggtcattcatgaaacattgaaaggtttcataaaarttactactctatgaaaggtattgttctaaagattgagaacacattgtgaacaagatagtcatatgcatagcttgtggccaagaatctactgtacacaaaa

SEQ ID NO: 28139 - DNA, 201 bp, Homo sapiens; identical to SEQ ID NO: 5483

SEQ ID NO: 28140 - DNA, 201 bp, Homo sapiens; identical to SEQ ID NO: 4449

SEQ ID NO: 28141 - DNA, 201 bp, Homo sapiens
aattgatcaatccactgtctgcactaagttcagcatgaatacagtgacctcttgggagggcaggaccatcaggttgcctaaagaggggtgaactggcccasgttggaagtggagaaggtcaaaactgctgtgctatccagtagtgggatgacatctgtgaatagccactgcactccagcctaggcaatatagggaaaccat

SEQ ID NO: 28142 - DNA, 201 bp, Homo sapiens; identical to SEQ ID NO: 4420

SEQ ID NO: 28143 - DNA, 201 bp, Homo sapiens
tgggattacaggcacatgccaccatgcctggctaatttttgtatttttagtagagatggggtttcaccatgttggccaggctggtctcgaactcttgacckcaagtgatccactcacctcggcctcccacagtgctgggattagagacgtaagccactgcccccggccaaatcaacgttttcttatattgcatttaggttt

SEQ ID NO: 28144 - DNA, 201 bp, Homo sapiens; identical to SEQ ID NO: 4477

SEQ ID NO: 28145 - DNA, 201 bp, Homo sapiens; identical to SEQ ID NO: 4205

SEQ ID NO: 28146 - DNA, 201 bp, Homo sapiens
ttcccgagatcggcgcctaagcaagagaagcaggacgactatggcggctcagccgaggggcggggactacagaggattcttcctgctctccatcctcctgsggaccccctgggaagcctgggcaggacgtattctctactccgtgtcggaggagacggacaaagggtcctttgtgggagacatcgccaaggacctggggct

SEQ ID NO: 28147 - DNA, 201 bp, Homo sapiens
agcccaggagttctgggctgtggtgcactatgctgatcaattgatcaatccactgtctgcactaagttcagcatgaatacagtgacctcttgggagggcargaccatcaggttgcctaaagaggggtgaactggcccaggttggaagtggagaaggtcaaaactgctgtgctatccagtagtgggatgacatctgtgaata

SEQ ID NO: 28148 - DNA, 201 bp, Homo sapiens
ttgctgctcagtgcctgaggtgggaggattgcttgagcccaggagttctgggctgtggtgcactatgctgatcaattgatcaatccactgtctgcactaarttcagcatgaatacagtgacctcttgggagggcaggaccatcaggttgcctaaagaggggtgaactggcccaggttggaagtggagaaggtcaaaactgc

SEQ ID NO: 28149 - DNA, 201 bp, Homo sapiens; identical to SEQ ID NO: 4442

SEQ ID NO: 28150 - DNA, 201 bp, Homo sapiens
cattgaaactattattttatatttgtgttaatgagagtcaaaattattgtgcattcatctcaaataattctattattttgaaaaatacaggtttttttttwaaaaaaaactgctcttgacattgtagctattgtgagaaaatattttgattataattatttaaaagcaatacaggacaccctggatgatggtaatgactag

SEQ ID NO: 28151 - DNA, 201 bp, Homo sapiens
agtatagctgtgatcatgaattggatagttctggtgtaaaaatctgctttatccccatataagatgtcaggttcagaaaagcaaacacatagtttcgaagrgatgttgatcaaactgatgaggctaaatctcaagaaagagacacagttaccctctaatgttacactttgagttcacctttttttttttttttgagacaga

SEQ ID NO: 28152 - DNA, 201 bp, Homo sapiens; identical to SEQ ID NO: 4448

SEQ ID NO: 28153 - DNA, 201 bp, Homo sapiens; identical to SEQ ID NO: 4214

SEQ ID NO: 28154 - DNA, 201 bp, Homo sapiens
ctcggcctcccaaagtgctgggattacaggcttgagccactgcgcccggtgggtctaatgttttaaattacactgtgttaaataaatattagtttgttggktttttttttagtttttttatttctctacaaatttacaaccaataagagtttttaatgctttgacaaaaaatgttaaaggtcatagtacaatcgcatttct

SEQ ID NO: 28155 - DNA, 201 bp, Homo sapiens
acctcgtgatccgcctgcctcagcctccctaagtgctgggattacaggtgggagccaccatccccagcctcatttacattttaacacaattaaattcaggstgttgtcagggtgacttcctagatttctcagttttttgagcatgatgtagggagtattttattatagtccagtctatgggatattcccttatacacacac

SEQ ID NO: 28156 - DNA, 201 bp, Homo sapiens
tttagtagagacggggtttcaccatgttgaccaggatggtctcaatctcttgacctcgtgatccgcctgcctcagcctccctaagtgctgggattacaggygggagccaccatccccagcctcatttacattttaacacaattaaattcagggtgttgtcagggtgacttcctagatttctcagttttttgagcatgatgt

SEQ ID NO: 28157 - DNA, 201 bp, Homo sapiens; identical to SEQ ID NO: 4285

SEQ ID NO: 28158 - DNA, 201 bp, Homo sapiens; identical to SEQ ID NO: 4238

SEQ ID NO: 28159 - DNA, 201 bp, Homo sapiens; identical to SEQ ID NO: 4200

SEQ ID NO: 28160 - DNA, 201 bp, Homo sapiens; identical to SEQ ID NO: 4144

SEQ ID NO: 28161 - DNA, 201 bp, Homo sapiens
tctataatacctctattagttcctttaaacaaaatttatctactttgtgaatgcaaagataactatggattattttgatagatcaaaacagaatgtccttmaaagtgttccctgtattctggagcaatgccaccagaaagcagaaataggttacttaggagcctcccacaaaacgaagttaagctttcttagtgttagttc

SEQ ID NO: 28162 - DNA, 201 bp, Homo sapiens; identical to SEQ ID NO: 4283

SEQ ID NO: 28163 - DNA, 201 bp, Homo sapiens
tttggatggataaagctcaaattaaaagaaataacagactaaagatatagtaagtatatttaatgttttttaaaagtccttttaaaatgggaagaaagtaycactatcagtacactgccgatttttctcctaactagctccttatttggagctgatttagtcaccattactgcagttctgcagcagaggcgccgggtgccg

SEQ ID NO: 28164 - DNA, 201 bp, Homo sapiens
cttccctgttaaaaatatggaaatttagaaatatacattccttacagtgtttcaggaaggtatgtcatattattttggcttagttttaaaaatcacattarcctctaagctatatgcttcttgaagaagtgactgacttatcatctgctctataataaagctgtagagtggtaataaacaggtttctccttttttttatct

SEQ ID NO: 28165 - DNA, 201 bp, Homo sapiens; identical to SEQ ID NO: 4352

SEQ ID NO: 28166 - DNA, 201 bp, Homo sapiens; identical to SEQ ID NO: 5479

SEQ ID NO: 28167 - DNA, 201 bp, Homo sapiens; identical to SEQ ID NO: 4142

SEQ ID NO: 28168 - DNA, 201 bp, Homo sapiens; identical to SEQ ID NO: 4216

SEQ ID NO: 28169 - DNA, 201 bp, Homo sapiens
gatccagataatgttagcatagcattttactgaactagtagtttacaaacacttcaaaaattatagaataacatttgcatataaaattcctcatacatttycctatcagtgaattggaagcttacaatatacaatattaccaaaaagacaaaaaaaatgaaaaggaaacagttacctttggaaaacataattaggtaaaat

SEQ ID NO: 28170 - DNA, 201 bp, Homo sapiens; identical to SEQ ID NO: 4281

SEQ ID NO: 28171 - DNA, 201 bp, Homo sapiens
tttaaaagctgattttcaaaaaccagattgtgaattaagtgatgctgaataggggaaaaaaagactgataaaccagtgtatctctgaataacccactagaycagtgcttgtcaaactttaatgtgttttcaaatcaccctgatgttttgttaaaatgtaagtcatgtctcagtaggtctagaggagggcatttctgcattt

SEQ ID NO: 28172 - DNA, 201 bp, Homo sapiens
gaagtaattaaagagggattgtagccactcggggctgaagcccacattttccctgagcctgtcaataattttgatttgatttttaagtccctgtagatttkcctcttctttactacaggtgttaatcccaaagaagcatgtttcatttaaaaatgcattactggccaggcgtggtggctcgcgcctgtaatcccagcactt

SEQ ID NO: 28173 - DNA, 201 bp, Homo sapiens
cttcaaagcagggctggtgttgagttcttcagtaaacttggttcaagatcaagccagctctgggtcacactgcctacacagaaggaagagcattccaaatrggaaaagcctatgcaaaagccttgtggtgaggcctcctgggatcaagggaatggcagggagttttctctttgctggcactggagtgaggggatgaagagg

SEQ ID NO: 28174 - DNA, 201 bp, Homo sapiens
agccttctgttgatgccctgcctcactccctccccaccatcttgcccactgccctccagcctggtctggtcagacacaccagcttcaaagcagggctagtrttgagttcttcagtaaacttggttcaagttcaagtcagcactgggtcacactgcctagacagaaggaagaagacctggccaggtgtggtggctcacgcct

SEQ ID NO: 28175 - DNA, 201 bp, Homo sapiens; identical to SEQ ID NO: 4187

SEQ ID NO: 28176 - DNA, 201 bp, Homo sapiens; identical to SEQ ID NO: 4134

SEQ ID NO: 28177 - DNA, 201 bp, Homo sapiens; identical to SEQ ID NO: 4189

SEQ ID NO: 28178 - DNA, 201 bp, Homo sapiens
gctggagtgcagtggcaagatctcggctcactacaatatctgcttcctgagctcagatcatcctcccacctcagcctcccaagtagctgggactacaggcrcatgccaccacacctggctaatttttttttgcatattttgtagagacagggttttgccatgttgcccaggctggtcttgaaatcctgggctcaagtgatc

SEQ ID NO: 28179 - DNA, 201 bp, Homo sapiens; identical to SEQ ID NO: 19613

SEQ ID NO: 28180 - DNA, 201 bp, Homo sapiens
ccaacctatttttgcaccaacctaataaatgtatgataaattccgataaaaaataagcataacacattaaaacacaaagtaaatatggttcctcttttggsttaggctgctcacctccaccagggcctgcaggaggcgctgcgtcagggcaccaaaggggcatccatcttccggctgttcatgctgggcctcagacttctt

SEQ ID NO: 28181 - DNA, 201 bp, Homo sapiens; identical to SEQ ID NO: 4718

SEQ ID NO: 28182 - DNA, 201 bp, Homo sapiens; identical to SEQ ID NO: 4721

SEQ ID NO: 28183 - DNA, 201 bp, Homo sapiens
gttcatctatactgattcacttctgtatcacccatgccagtcacatactgtttaacagaagagtcctctcagcaaaccttcacttcgatgtcaccactackgagatgccttctctcaatcagttacccaggttcttagatgctaaaatacaacttgagtcatagccttcctcaaggagggtccatggattcccagggacaa

SEQ ID NO: 28184 - DNA, 201 bp, Homo sapiens
gttccttctgcatttattagctgagattcttctgtaaagatgaactttccctcatcatctggggctacttgggagtgctgatagctacatttttatttgatttttttttttttttttttttagacagagtctcactctgccacccaggctggagtgcagtggtgctagctcggctcactgcaacctccgcctcccggattc

SEQ ID NO: 28185 - DNA, 201 bp, Homo sapiens; identical to SEQ ID NO: 19621

SEQ ID NO: 28186 - DNA, 201 bp, Homo sapiens
gaagcaggtaggggcttttcctgagccctgtaggaacccggaagtggggtctcctaggctctttggagcatttcgagggtacgtagtcggcctcttagcckctgaggcatgaagcaagtccacctgcctatccacagtggaacttcacgacatacgccctttgtcctcttctgccttcctgaccctacagttgcttaaggc

SEQ ID NO: 28187 - DNA, 201 bp, Homo sapiens
gcctaatttttgttttgttttatagtctatttattattggtaggaacgtaataggtgcacatactttaaaaaagcccccaacactggccaggtacagtggytcatgcttgtaatcccagcagtctgggaggccgaggcgggtggatcacttgaggtcaggagttggagaccagcctggccaacatggtgaaaccctgtctc

SEQ ID NO: 28188 - DNA, 201 bp, Homo sapiens
tttgggaggcagaggcgggcggatcacgacgtcaggagatcgagaccatcctggctaacacggtgaaacctcttctctactaaaaatgcaaaaaattagcygggcgtggtggtgggcacctgtagtcccagctactcaggaggctgaggcaggagaatggcgtgaacccagaaagcagagcttgcagtgagtcgagatcgt

SEQ ID NO: 28189 - DNA, 201 bp, Homo sapiens; identical to SEQ ID NO: 4713

SEQ ID NO: 28190 - DNA, 201 bp, Homo sapiens
ggtatggtggcatgcgcctgtagtaccatccgctcaggacactgaggcaggaggatcacttgagcccagaagttcgaggccgtagtacactgtgatcactsctgtgaatagccactgcacttcagcctggacaatatagcaagatcccgtgtcttaaaaaaaaaaagtcaagttgtgtaaccactactgcaaccaaaatac

SEQ ID NO: 28191 - DNA, 201 bp, Homo sapiens; identical to SEQ ID NO: 4714

SEQ ID NO: 28192 - DNA, 201 bp, Homo sapiens
cgaggccgtagtacactgtgatcactcctgtgaatagccactgcacttcagcctggacaatatagcaagatcccgtgtcttaaaaaaaaaaagtcaagttrtgtaaccactactgcaaccaaaatacagaacatttccgtcaccccaaaaagttccctcaagcccttttgtaatcagtcctctccttcccaccccagacaa

SEQ ID NO: 28193 - DNA, 201 bp, Homo sapiens
ggtcttgatctcggttgggcaccctgtatctttcgacaccgctgccccacacacccttcctcttggctgtctgactgcacgctcctagttttcctttctcyctctttggctgctgcttttcagcggcctttaaaggttcctcagccattagtggccccctggccccttccccaggtctgtctcctttggctgtgtccttgg

SEQ ID NO: 28194 - DNA, 201 bp, Homo sapiens; identical to SEQ ID NO: 19624

SEQ ID NO: 28195 - DNA, 201 bp, Homo sapiens; identical to SEQ ID NO: 4683

SEQ ID NO: 28196 - DNA, 201 bp, Homo sapiens
tttgagacagagtcttgctctgtcacccaggctggagtgcagtggcacaatctcagctcactgcaagctccgcctcccgggttcacgccattctcctgccktagcctcccgagcagctgggactacaggcgcccgccaccacgcccggctaattttttctatttttagtagagacggggtttcaccgtgttagccaggatg

SEQ ID NO: 28197 - DNA, 201 bp, Homo sapiens
acggggtttcaccgtgttagccaggatggtctcaatctcctgaccttgtgatctgcccgcctcggcctcccaaagggctgggattacaggcttgagccacygcacccggcttttttttttttaatggatggaatctccttctgtcacccaggctggaatacagtggcacgatcttggctcattgcaaccgatgcctcccca

SEQ ID NO: 28198 - DNA, 201 bp, Homo sapiens
tacagtggcacgatcttggctcattgcaaccgatgcctccccagttcaggtgattttcctggctcagcctcccgagtagccaggattacaggtgcatgccmccgtgccaggctaatttttgtatttttagtagagacggcgtttcaccatgttggtcaggctggtcttgaactcctgacctcagatgatctgcctgccaca

SEQ ID NO: 28199 - DNA, 201 bp, Homo sapiens
aggtgcccgccaccattcccggctaattttttgtatttttagtagagacggggtttcactgtgttagccaggatggtcttgatctcctgaccttgtgatcsgcccacctcggcctcccaaagtgttgggattacaggcgtgagccaccgcgcccggcccactgaatcagtctcttaaagccacagttaacattgggtcagt

SEQ ID NO: 28200 - DNA, 201 bp, Homo sapiens
acagagaaagaaactgagactctgtaagggtgggtatgtgcctatgcttccaagatgcaatttgaaccccgctagtcttgagtctgcaccctgatcaccabgctatactgctatgccttgcctcgcctttctgatgctctttccttcccttctatttctcttgggttctgctaagactttgagttccaagcaccccattct

SEQ ID NO: 28201 - DNA, 201 bp, Homo sapiens; identical to SEQ ID NO: 19627

SEQ ID NO: 28202 - DNA, 201 bp, Homo sapiens; identical to SEQ ID NO: 19628

SEQ ID NO: 28203 - DNA, 201 bp, Homo sapiens
gggctgttgatgaagtctctcctgtggcattgttgaaaacactggtagtttaaggaatggtcagataattgttatctgagattccatctccatacttttcttttttttttttttttttcccatctccatacttttctaatgtaatgatcagggattttttttttacctaccagcctagacactctgaccccctaatccaaa

SEQ ID NO: 28204 - DNA, 201 bp, Homo sapiens
taccctgttttcttctcactgcctctggaggaggaaccgggagggctccgtcggccttcaccccattccctccatatccccccatcctccacacgtacctkttagggcagctaggccaccttgggccccaccccagggcctcacagcttctcttgctcccacagcccgtcaccacttccccagcctccacaccaaggccca

SEQ ID NO: 28205 - DNA, 201 bp, Homo sapiens
ctgaggcaggagaattgcttgaacctgggaggcggaggttgcagtgagccaagatcgtgccaccgcactccagcctggcagcagagcaagacttcgtctcaaaaataaaataaaataaaataaaataaaataaaattcattctggtacatacataactgagataatctgggttacaacattaaatgatacgatttaatttt

SEQ ID NO: 28206 - DNA, 201 bp, Homo sapiens
tgaggcaggagaattgcttgaacctgggaggcggaggttgcagtgagccaagatcgtgccaccgcactccagcctggcagcagagcaagacttcgtctcaaaaataaaataaaataaaataaaataaaataaaattcattctggtacatacataactgagataatctgggttacaacattaaatgatacgatttaattttt

SEQ ID NO: 28207 - DNA, 201 bp, Homo sapiens
agaggtgttaagggcatgctagcaaccagcagcaataatcttcctttagaaatgttgagagttcagggccaggcacagtggctcatgcctgtaatcccagyactttgggagaccaaggcgggtggatcacttgatgtcaggagttcaagaccagcctggccaacatggtaaaaccctgtctctactaaaaatacagaaatt

SEQ ID NO: 28208 - DNA, 201 bp, Homo sapiens; identical to SEQ ID NO: 19634

SEQ ID NO: 28209 - DNA, 201 bp, Homo sapiens
cccagcaccaggatgggctgcattttcaccatgaccttttctagtggggacaggcaaccccaccacttgaacagattgccactgagtccgaagaacccccrggccctgggtaagaccattcccccaaaacacccgagtgttccaaggcgatttattcctgctctccaggcccctcccaaccacctggatcagccaccccac

SEQ ID NO: 28210 - DNA, 201 bp, Homo sapiens
cctgcaggaggcgctgcgtcagggcaccaaaggggcatccatcttccggctgttcatgctgggcctcagacttcttcagcagggcatccacatctaagcgrgcacaggaaaggaggggaggtgggctgaagttctggaattcaagtcctgacctggggttggcagggaggtgagaggcctacctttagtgtccagttcggt

SEQ ID NO: 28211 - DNA, 201 bp, Homo sapiens
tgctcatgacactcttagtatgaaatccaagtccgttccaaggcctgcagggccttccacagtctggccactgcctacctcctctggggctttccccatcrttttccatgttccactcactctggtctcccttcagttccttctgacctctctccagcctcaaggcctttgcacatgcattcccctctgcctgaaccgcca

SEQ ID NO: 28212 - DNA, 201 bp, Homo sapiens; identical to SEQ ID NO: 19637

SEQ ID NO: 28213 - DNA, 201 bp, Homo sapiens
attttttagtagagatggggtttcaccatgttggtgacctcaggtgatccacctgcttcagcttcccaaagtgctgggatttcgggcacgagccatcatgygcagccttacctggtgttcttagcaagtgacttcacctctctgagcctcaatttcctcatctttcaatgagaataccagtaaggcccatcttctggggtt

SEQ ID NO: 28214 - DNA, 201 bp, Homo sapiens; identical to SEQ ID NO: 19638

SEQ ID NO: 28215 - DNA, 201 bp, Homo sapiens
ttccaaggcctgcagggccttccacagtctggccactgcctacctcctctggggctttccccatcattttccatgttccactcactctggtctcccttcakttccttctgacctctctccagcctcaaggcctttgcacatgcattcccctctgcctgaaccgccatttcccagctctgtacattcatggcttcctttcaa

SEQ ID NO: 28216 - DNA, 201 bp, Homo sapiens
gccatgcttcattcattcattcacttacctatcttatatctctctcaagtccctagtccaaggccaagcccagtgtcaggtgtaggtaagaaagtacaacraagataaaacctgtacttcacactctagtaagggagacaggtccaaaaagaactaagacacacacacagaagccaatctgaaataattcccaagatagaa

SEQ ID NO: 28217 - DNA, 201 bp, Homo sapiens
aggagttcaagaccagcctgggcaacatagtaagactcagtctctacaaaaaaaggtagaaaaacattatccgggtgtggtggcatgtacctgtagtcccrgctactcgggaggctaaggtgggaggatcacttgaacctgggaattacaggctgcagtgagctatgatcgcaccattgcactccaacctgggcagcaaag

SEQ ID NO: 28218 - DNA, 201 bp, Homo sapiens
gtgaaaccccgcctctactaaaaatacaaaaaaattagctgggcctggtggcgcacacctgtaatcccagctactagggaggctgaggcagaagaatcaayttgaacccaggagacggagcttgcagtgagccaagatcacgccactgcactccagcctgggcgacaagagtcagactccatctcaaaaaaaaaaaaaagc

SEQ ID NO: 28219 - DNA, 201 bp, Homo sapiens
cgcacacctgtaatcccagctactagggaggctgaggcagaagaatcaacttgaacccaggagacggagcttgcagtgagccaagatcacgccactgcacyccagcctgggcgacaagagtcagactccatctcaaaaaaaaaaaaaagccatttctgtatgtcaggaatggctgaatattggcagcttcatatgggtcaa

SEQ ID NO: 28220 - DNA, 201 bp, Homo sapiens
caaaaaaggctgcaggctttggatttctaaggcagactaggttccgattccacaatatgttctaaattcaggttagaatttggatccagattctatgctasatttaaattacattcagaatctgaactaggacacagtctggttctcaggacagaataagtatcaaaagtaggtgatgaacagaagaaacaaatcagacaa

SEQ ID NO: 28221 - DNA, 201 bp, Homo sapiens
tgaagagggatatggccgaggaaaatggagaggggcactggagctgtgccagcaaggactgggatgcgtggacttgatcctgtagataacgggaggaagamaggcctggatgcagcgccatgtcatgagcacatctgatcatgacagctcacctatgggaggattctccctcaacatttttctgtattttctaaattttct

SEQ ID NO: 28222 - DNA, 201 bp, Homo sapiens
gaggcaggagaattgcttgaacctgggaggcggaggttgcagtgagccaagatcgtgccaccgcactccagcctggcagcagagcaagacttcgtctcaaaaataaaataaaataaaataaaataaaataaaattcattctggtacatacataactgagataatctgggttacaacattaaatgatacgatttaattttta

SEQ ID NO: 28223 - DNA, 201 bp, Homo sapiens
aggcaggagaattgcttgaacctgggaggcggaggttgcagtgagccaagatcgtgccaccgcactccagcctggcagcagagcaagacttcgtctcaaaaataaaataaaataaaataaaataaaataaaattcattctggtacatacataactgagataatctgggttacaacattaaatgatacgatttaatttttaa

SEQ ID NO: 28224 - DNA, 201 bp, Homo sapiens; identical to SEQ ID NO: 19644

SEQ ID NO: 28225 - DNA, 201 bp, Homo sapiens
gcaggagaattgcttgaacctgggaggcggaggttgcagtgagccaagatcgtgccaccgcactccagcctggcagcagagcaagacttcgtctcaaaaataaaataaaataaaataaaataaaataaaattcattctggtacatacataactgagataatctgggttacaacattaaatgatacgatttaatttttaatt

SEQ ID NO: 28226 - DNA, 201 bp, Homo sapiens
tcccggagcctatagtctagcatcagaaagagcacagtgaattagaaatcctttctaagatctgccaaatgaatcatagtctctctctctttttttttttytttgagacggagtctcgctctgtcgcccaggctggagtgcagtggcacaatcttggctcactgcaagctccgcctcccgggttcacgccattctcctgcc

SEQ ID NO: 28227 - DNA, 201 bp, Homo sapiens
cctatagtctagcatcagaaagagcacagtgaattagaaatcctttctaagatctgccaaatgaatcatagtctctctctctttttttttttctttgagayggagtctcgctctgtcgcccaggctggagtgcagtggcacaatcttggctcactgcaagctccgcctcccgggttcacgccattctcctgcctcagcctc

SEQ ID NO: 28228 - DNA, 201 bp, Homo sapiens
tagcatcagaaagagcacagtgaattagaaatcctttctaagatctgccaaatgaatcatagtctctctctctttttttttttctttgagacggagtctcrctctgtcgcccaggctggagtgcagtggcacaatcttggctcactgcaagctccgcctcccgggttcacgccattctcctgcctcagcctcctgagtagc

SEQ ID NO: 28229 - DNA, 201 bp, Homo sapiens
tgtctcaaacaaaacaaaataaaaacacacagtattgttagtaatgcatgtaagtgctcagcatgtagtaggtcctcaataaatattagccattgctattrtcattattaccatgcatatttatttctctacttatttatagtctgtttatttctcctaatggaatataaaaatttcctgatggcagagtccataactgtc

SEQ ID NO: 28230 - DNA, 201 bp, Homo sapiens
gtagaacaatcaccaaatccaatgatagtgagcaaacggactcttacctcctaagcagaagatatctggctaatggacccattctgtcttacctgggtttytttttttttttgagacagagtcttgctctgtctcccaggctggagtgcagtggtgcaatctcagcccactgcaacctctgcctcccagttcaagcaattc

SEQ ID NO: 28231 - DNA, 201 bp, Homo sapiens
acccaggctggagtgcagtggcgcaagcatggctcactgcagcctcagcttccccaggctcaagtgattctcccacctcagcttcctgagtagctgggacmacaggcctgtgccaccacgcccagctaatttttttgtttttggtttttgtttttttttaggtctcactatgttgcctcggctgccttgggtgatcccccc

SEQ ID NO: 28232 - DNA, 201 bp, Homo sapiens
aagcatgcaggagcaactggagggagaacagccctgaaggcagaacacacagtaagcatttcttgagcaactccgatgtgccaagcattgtgccaggttcygaaatgaagcgtagcccctgttctcaactgggacacagctcaaggtttgagacctgcaggaagccaggtgggagtgctaggaatctcagctggggtggtg

SEQ ID NO: 28233 - DNA, 201 bp, Homo sapiens
acagctcaaggtttgagacctgcaggaagccaggtgggagtgctaggaatctcagctggggtggtggtaatgggaagaaatggatagatttaattactcartaggggaaaccgaagaactaatgaatgacatgagcagcagatccacatcattagcacgtaattcactgcatcttttctaaatgccaggacataactcagg

SEQ ID NO: 28234 - DNA, 201 bp, Homo sapiens
aagacaggaatgaaccccaaaaagcacctgtgggtggaggaatcagacaggacagagtttgaatcctggctgaaccactcaactttcagtgtatggccttsggtaagtcccttaactctcaaagcttcagtttactctttttgttttttgagatggagcctcgctccgttgcccacactggagtgcaatggcgcgatctcg

SEQ ID NO: 28235 - DNA, 201 bp, Homo sapiens
gcctgggtgacagaccaagaccctgtctcaaaaaaaaaaaaaaaaagtcggggggtagggggtgggtactagtaatacttccctggcagggccttgagggsattcgtgaaaatatatggaaagcccttgtcacaatgcctggcacatagtggtgctttatcattaggaactggaatgattaaattctgtcaaagacagttt

SEQ ID NO: 28236 - DNA, 201 bp, Homo sapiens
acttccctggcagggccttgagggcattcgtgaaaatatatggaaagcccttgtcacaatgcctggcacatagtggtgctttatcattaggaactggaatkattaaattctgtcaaagacagttttaatgtaataggaagggggtggcacaggtggagtgttggagtagggggtggtttgcagttaatggaattttatcag

SEQ ID NO: 28237 - DNA, 201 bp, Homo sapiens; identical to SEQ ID NO: 19654

SEQ ID NO: 28238 - DNA, 201 bp, Homo sapiens
tctaccagtagaggccaaggaagttaatagtgcaggtctattgaagccaaattgcctgggtttgagtcctagctctgctactaatgtgcttcgtgaccttsagcaggttttagcgcctccctgaacctcagttccctcatctgtgacatgaggaggatgataatacctcctgtgaggtgaggattaaatgcagtcatgcag

SEQ ID NO: 28239 - DNA, 201 bp, Homo sapiens; identical to SEQ ID NO: 19655

SEQ ID NO: 28240 - DNA, 201 bp, Homo sapiens
tcaaacaaaactggttaattaggaaaaatttaaaatccttagcaaattcctggctttcccaaagggaactgggttctgattgagggagacagccttacccrctcagccctatcagctccgaggggacaagagctcatgacaagctggcccttctcctggcccacgcctgaccttccaatccctgactgccctcttcccccg

SEQ ID NO: 28241 - DNA, 201 bp, Homo sapiens
caggccctcatcctgccagctgtccttgcatccaacagatttttttttaacagacagggggcggtctcactctgttacctaggctggagtgcagtggcatkgtcacggctcactgtagccttgacttcctgtgctcaagcaatccttcctcctcagcctcccaagtgtctgagaccacaggcatgtaccacagctgatttt

SEQ ID NO: 28242 - DNA, 201 bp, Homo sapiens
ctcaagcaatccttcctcctcagcctcccaagtgtctgagaccacaggcatgtaccacagctgatttttaagttttttaatgtagacatggggtctcactmtgttgcccaggttggtctcaaactcctgggctcaagcgatcatcccaccttggcttcccaaagtgctgggattacactatgcctggcccctccaacagat

SEQ ID NO: 28243 - DNA, 201 bp, Homo sapiens
ccaagccagattctgaaggcagaatatgatccaagtcaggtcagatttggggtctggttacacaactgaaacaggagcaagttcttttttttttttgagayggagtctcgctctgtcacccaggctggggtgcagtggcgcgatcttggctcactgcaagctccgcctcccaggttcccgccattctcctgcctcagcctc

SEQ ID NO: 28244 - DNA, 201 bp, Homo sapiens; identical to SEQ ID NO: 4644

SEQ ID NO: 28245 - DNA, 201 bp, Homo sapiens
atccaagtcaggtcagatttggggtctggttacacaactgaaacaggagcaagttcttttttttttttgagacggagtctcgctctgtcacccaggctggrgtgcagtggcgcgatcttggctcactgcaagctccgcctcccaggttcccgccattctcctgcctcagcctcccgagtagctgggactacaggcgcccgc

SEQ ID NO: 28246 - DNA, 201 bp, Homo sapiens
acacaactgaaacaggagcaagttcttttttttttttgagacggagtctcgctctgtcacccaggctggggtgcagtggcgcgatcttggctcactgcaasctccgcctcccaggttcccgccattctcctgcctcagcctcccgagtagctgggactacaggcgcccgccatcacgcctggctaattttttgtattttta

SEQ ID NO: 28247 - DNA, 201 bp, Homo sapiens; identical to SEQ ID NO: 19659

SEQ ID NO: 28248 - DNA, 201 bp, Homo sapiens; identical to SEQ ID NO: 4641

SEQ ID NO: 28249 - DNA, 201 bp, Homo sapiens
gaaacaggagaaaaacccagtgttggtgtccccagagtttgtggatgaagctctgtgtgcgtgcgaggagtaccttagcaacttggcccacatggacatcracaaggacctggaggccccgctgtacctcacccccgagggctggtccctcttcctccagcgctactaccaagtggtccagtgagtcccctgcagctggga

SEQ ID NO: 28250 - DNA, 201 bp, Homo sapiens; identical to SEQ ID NO: 19664

SEQ ID NO: 28251 - DNA, 201 bp, Homo sapiens
tctacagaaaattagctgggtgtggtggcacacacctgtagtcctagctactcgggaggcctaggtgggaggattacctgagcctgggaagatcaaaactrtggtgagctgtgatcacgccactgcgctctgagcctgggagacagagtgaaaccctaaatcaaaaaaaaaaaaaaaggtctttgcagatgtaaataaatt

SEQ ID NO: 28252 - DNA, 201 bp, Homo sapiens; identical to SEQ ID NO: 19666

SEQ ID NO: 28253 - DNA, 201 bp, Homo sapiens; identical to SEQ ID NO: 19667

SEQ ID NO: 28254 - DNA, 201 bp, Homo sapiens
gtctcactatgttgcccaggttggtctcaaactcctgggctcaagcgatcatcccaccttggcttcccaaagtgctgggattacactatgcctggcccctycaacagatttgaccgagtgtgtaccttgtgccatgcactgttctgggcacttggggtatagcagtgaacaaaacaagatcccagctctcaagggcttaca

SEQ ID NO: 28255 - DNA, 201 bp, Homo sapiens
agcctgaattccaattctgtctctgcagcttccaagttgtttgaatctggtcatgtgaaaacctatttaagccttggtttccacatctgaagaatggaggyagtagtatgaaattcatagctatcaattattgagtgcttcatatgtgatagtgctgagcactttgtatacatgatctcattcttaataagaacccagtgc

SEQ ID NO: 28256 - DNA, 201 bp, Homo sapiens; identical to SEQ ID NO: 4638

SEQ ID NO: 28257 - DNA, 201 bp, Homo sapiens; identical to SEQ ID NO: 19674

SEQ ID NO: 28258 - DNA, 201 bp, Homo sapiens
gagatcaacgccagccccacgatggcaccctccacagcagtcactgcccggctctgtgctggcgtgcaagctgacaccctgcgcgtggtcattgaccggakgctggaccgcaactgtgacacaggagcctttgagctcatctataagcaggtgaggaggttgggcccaggcaggaccccagagagtctgcaccctcttcca

SEQ ID NO: 28259 - DNA, 201 bp, Homo sapiens
aaatgaattcatgtatgaggataatatttctagagaggcatatagcatagccataagagcagagattctggaatctccttgggttcaaattcctgttcagygacaacaagctatgtgactttggacaagttcctaacccctaggtctccttgtccgtaagaataaaaatagtacctaactcacaaagttaggtactatgag

SEQ ID NO: 28260 - DNA, 201 bp, Homo sapiens; identical to SEQ ID NO: 19678

SEQ ID NO: 28261 - DNA, 201 bp, Homo sapiens; identical to SEQ ID NO: 19680

SEQ ID NO: 28262 - DNA, 201 bp, Homo sapiens; identical to SEQ ID NO: 19682

SEQ ID NO: 28263 - DNA, 201 bp, Homo sapiens; identical to SEQ ID NO: 19686

SEQ ID NO: 28264 - DNA, 201 bp, Homo sapiens
gccaccatgacctgctaatttttttgtatttttagtagagacagggtttggttatgttggccaggctgatctcgaactcttgacctcaagtgatctgccarccttagcctcccaaagctctgggattacaggtgtgaccaccatgcccggccaatagctgtatttttaacaagctccaagtaattctgatgtttagataga

SEQ ID NO: 28265 - DNA, 201 bp, Homo sapiens
atgcagtgctcatctttgggctagtttcaggcatgggccattggttcacaacctttggtctctaaaatgtgcagggctgtcctaggcagcatgggggaccsttgagggcagaaaacatttcaagggcctggcttggttggaggttcatccagagcttgacacaaaagtaccagaacctgggtccttttccacttggccctc

SEQ ID NO: 28266 - DNA, 201 bp, Homo sapiens
atctcaagttgaatagtgcagggtggcccagggctgcttccaggacttgcctgtcctccctgagtttggatgggagagacacaagggcctggacctcagtyttctgttctctgccccagctcagtgcacctgtgcaacaactccatccagaagcacctggagaactcatgccatcggcatccactgcttccgccagacaac

SEQ ID NO: 28267 - DNA, 201 bp, Homo sapiens; identical to SEQ ID NO: 4673

SEQ ID NO: 28268 - DNA, 201 bp, Homo sapiens; identical to SEQ ID NO: 4674

SEQ ID NO: 28269 - DNA, 201 bp, Homo sapiens; identical to SEQ ID NO: 4676

SEQ ID NO: 28270 - DNA, 201 bp, Homo sapiens
agatccacctacccatctatctacctgctattccattctcccatctactacctatctgttcttcaggccatccactcatccattcttctgtcccaggtacytagacacttgtcttcccatccgtttgttagttgatccactcctcattcagccctcccatgggcctggcatgtagccgagcaccctggagagggcagacta

SEQ ID NO: 28271 - DNA, 201 bp, Homo sapiens
gctgcccgcaacgttctcaagctggtggtgaagtctgagtggaagtcataccctattcaggcagtagaggaagaggcctcaggtaagtactgtggttacckccactctcccacccatttatcctccacccatccgcccttccacctatctgcccttctacctatctattcatccacgcacctactggttcatccacacatc

SEQ ID NO: 28272 - DNA, 201 bp, Homo sapiens; identical to SEQ ID NO: 19619

SEQ ID NO: 28273 - DNA, 201 bp, Homo sapiens; identical to SEQ ID NO: 4678

SEQ ID NO: 28274 - DNA, 201 bp, Homo sapiens; identical to SEQ ID NO: 19620

SEQ ID NO: 28275 - DNA, 201 bp, Homo sapiens; identical to SEQ ID NO: 4680

SEQ ID NO: 28276 - DNA, 201 bp, Homo sapiens
gcctgcaggaggcgctgcgtcagggcaccaaaggggcatccatcttccggctgttcatgctgggcctcagacttcttcagcagggcatccacatctaagcrggcacaggaaaggaggggaggtgggctgaagttctggaattcaagtcctgacctggggttggcagggaggtgagaggcctacctttagtgtccagttcgg

SEQ ID NO: 28277 - DNA, 201 bp, Homo sapiens
tccacgcagcccttctccctgaagaacctggacaagtgagcccctctgctcgcctcccacgagctccctgcctagttggggagctggcaagcaaacaggcrattacagtgcaggggactcgcgcagcagcgctaggctccacacacagactgcaggcaggcaggccctcatcctgccagctgtccttgcatccaacagatt

SEQ ID NO: 28278 - DNA, 201 bp, Homo sapiens; identical to SEQ ID NO: 19622

SEQ ID NO: 28279 - DNA, 201 bp, Homo sapiens
ggttcacgccattcttctgcctcagcctcccgagtagctgggactacaggtgcccgccaccattcccggctaattttttgtatttttagtagagacggggyttcactgtgttagccaggatggtcttgatctcctgaccttgtgatccgcccacctcggcctcccaaagtgttgggattacaggcgtgagccaccgcgccc

SEQ ID NO: 28280 - DNA, 201 bp, Homo sapiens; identical to SEQ ID NO: 19623

SEQ ID NO: 28281 - DNA, 201 bp, Homo sapiens; identical to SEQ ID NO: 19625

SEQ ID NO: 28282 - DNA, 201 bp, Homo sapiens
tgaccccaggttaaaaaagaaagaaaggaaatgtctcgacattaccaaatgtaccctggcaggcaaaattgtctcctgttgaaaactaccactctacaccytggaaggcgtctcgaaggcctagtctgttctgttcacagtagtgtcttaagagccttgcaccctcagtgctacctggcttcatgggagctggaatagggg

SEQ ID NO: 28283 - DNA, 201 bp, Homo sapiens
ggactctaccctgttttcttctcactgcctctggaggaggaaccgggagggctccgtcggccttcaccccattccctccatatccccccatcctccacacrtacctgttagggcagctaggccaccttgggccccaccccagggcctcacagcttctcttgctcccacagcccgtcaccacttccccagcctccacaccaa

SEQ ID NO: 28284 - DNA, 201 bp, Homo sapiens
atgtgggcatccggctcctggtagagggcttcaccatcaagaagcccatggcgatgtgtcatcggcggatgggggtccgcccagcagtccctctgctgacycagcgaggctctggggaaggcaaggactcggggacccctacccacaggtcagcttctaggaaaggcactggggccaggagcctggggcacagtgagaagc

SEQ ID NO: 28285 - DNA, 201 bp, Homo sapiens
atggctaggattcccccttcctctgggctagcaattcctggagctctgtgactctaggtactgactcagaggtgggctttccatttctcagctcagaaacrcctctttgaccaggtgcctcagaaagtaattccacccatctctactctgggtcccgctgggccaaggattccagtaccactgactgagtgggccttgtct

SEQ ID NO: 28286 - DNA, 201 bp, Homo sapiens
aagtatattgagcggcccctcctcatctttggcaccaagtttgacctcagacagtggttcctggtaactgactggaacccacttaccgtgtggttctaccrcgacagctatatccgcttttccacgcagcccttctccctgaagaacctggacaagtgagcccctctgctcgcctcccacgagctccctgcctagttgggg

SEQ ID NO: 28287 - DNA, 201 bp, Homo sapiens
ttaggagagatggggtttcaccatattggccaggatggtctcaatctcttaaccttgtgatccgcccaccttgccctcccaaagtgctgggattacaagcrtgagccactatgcccgtcccagtttactttttcttttcttttcttttctttttttttttttttttttttgagacggaatcttgctctgtcgcccaggctg

SEQ ID NO: 28288 - DNA, 201 bp, Homo sapiens; identical to SEQ ID NO: 19635

SEQ ID NO: 28289 - DNA, 201 bp, Homo sapiens; identical to SEQ ID NO: 19639

SEQ ID NO: 28290 - DNA, 201 bp, Homo sapiens; identical to SEQ ID NO: 19641

SEQ ID NO: 28291 - DNA, 201 bp, Homo sapiens
tctttttttttttctttgagacggagtctcgctctgtcgcccaggctggagtgcagtggcacaatcttggctcactgcaagctccgcctcccgggttcacrccattctcctgcctcagcctcctgagtagctgggactacaggcgcccaccaccacacctggctaattttttgtatttttagtagagacggggtttcacca

SEQ ID NO: 28292 - DNA, 201 bp, Homo sapiens; identical to SEQ ID NO: 19642

SEQ ID NO: 28293 - DNA, 201 bp, Homo sapiens
gctgtgaggacatcctgcagcagctgcaggccgtggtaccccagatagacatggaaggggatcgcaacatctggatcgtgaagccaggagccaagtcccgyggacgaggtgggggtcagctcctgcttcctgcactggcacctcaccacctgcatctaccagtagaggccaaggaagttaatagtgcaggtctattgaagc

SEQ ID NO: 28294 - DNA, 201 bp, Homo sapiens
aatcccagcactttgggagaccaaggcgggtggatcacttgatgtcaggagttcaagaccagcctggccaacatggtaaaaccctgtctctactaaaaatwcagaaattagccaggcgtggtggcacgcgcctgtaatcccagctacttgggaggctgaggcaggagaatcgcttgaacccgggaggcagagcttacagtg

SEQ ID NO: 28295 - DNA, 201 bp, Homo sapiens; identical to SEQ ID NO: 4650

SEQ ID NO: 28296 - DNA, 201 bp, Homo sapiens; identical to SEQ ID NO: 4635

SEQ ID NO: 28297 - DNA, 201 bp, Homo sapiens
ggggtgcagcacacagagatggctgctgtctagaaggtgccatgaacttatgtcctgcagtagtcaggaaagctgcagttgacattttgtcttgctgccarctgaatggtgattcccaatttggagttaagaaaatagggtcagtgggttggcaggacagaacccaggggaaaagacaagattggttaacacaaggtatga

SEQ ID NO: 28298 - DNA, 201 bp, Homo sapiens; identical to SEQ ID NO: 19647

SEQ ID NO: 28299 - DNA, 201 bp, Homo sapiens; identical to SEQ ID NO: 4643

SEQ ID NO: 28300 - DNA, 201 bp, Homo sapiens
cacaagggagctgtggagaagctctcatggctcttaatttttctgccttatctagtgctaggcttagggccggtgcccataggtcacttctgaaagctggmtgaattagagcatgaccacaaggtgtcctgggacccaactctgcccctcacagatatgagcacagtggcagctctcaggttcatgcacctccttagagca

SEQ ID NO: 28301 - DNA, 201 bp, Homo sapiens; identical to SEQ ID NO: 19650

SEQ ID NO: 28302 - DNA, 201 bp, Homo sapiens
ccaaactgtgttcaattttagcctttccttacctctaagacaggtgttctctctgtattcctaaatggtatattggtttgcctgtacaggttgagtatctyttatccaaaatgcttgggaccaaaagtatttcagattgtggaatatttgcagatacttaaccagttgagcatccctaattccaaatccaaaatgctccaa

SEQ ID NO: 28303 - DNA, 201 bp, Homo sapiens
gttctccatgactggagacactcaagatgctaagatgtcacagagttagcttcccctgaacaggaggctcccgtcctattcagtcagaaggaaagaaatgygagagtctggatgaggcagccatctggggtattttgtgacttggtttagttcaggacattttctgtcttgtagagaacagggtccctctttgtccatgaa

SEQ ID NO: 28304 - DNA, 201 bp, Homo sapiens
ccagaggggtttcttctgatggggtggacaaggtgatgttaaagggaggagggggtaaagggcaacttgcaacagctatttgcccccctcctccccccccyctttttttttttcatttttgagacagggtctcgctttgttacccaggctggagtgcagtggcgcaagcatggctcactgcagcctcagcttccccaggct

SEQ ID NO: 28305 - DNA, 201 bp, Homo sapiens
aacttgaggctaggagttcaagaccagcctgggcaacatagtaagactcagtctctacaaaaaaaggtagaaaaacattatccgggtgtggtggcatgtayctgtagtcccagctactcgggaggctaaggtgggaggatcacttgaacctgggaattacaggctgcagtgagctatgatcgcaccattgcactccaacct

SEQ ID NO: 28306 - DNA, 201 bp, Homo sapiens
actttcaggtttttttttttttttgagatggagtttgattctgtcacccaggctggagtacagtggtatgatcttggctcactgcaactgccacctcctgmgttcgagcaattctcgtgcttcagcctcctgagtatctgggattataggagtgcgccaccatgcccagctaatttttatatttttagtacaaatgggata

SEQ ID NO: 28307 - DNA, 201 bp, Homo sapiens
actcagccctatcagctccgaggggacaagagctcatgacaagctggcccttctcctggcccacgcctgaccttccaatccctgactgccctcttcccccrtaggcatcatgtgcatggaccacctggaggagatgctgaagctggtgaacggcaaccccgtggtgatgaaggacggcaagtgggtggtgcagaagtatat

SEQ ID NO: 28308 - DNA, 201 bp, Homo sapiens
atgaagagggatatggccgaggaaaatggagaggggcactggagctgtgccagcaaggactgggatgcgtggacttgatcctgtagataacgggaggaagraaggcctggatgcagcgccatgtcatgagcacatctgatcatgacagctcacctatgggaggattctccctcaacatttttctgtattttctaaattttc

SEQ ID NO: 28309 - DNA, 201 bp, Homo sapiens
catccacccacgtattcacccactctctgatctaccgattcacccacccacccttccactcatccttccatcctcccacctgtcacccattgttaatctcktcattcatctacctgatgtcagctccatactccccatccatctatccactccctgcctacctatccttccacagatccacctacccatctatctacctgc

SEQ ID NO: 28310 - DNA, 201 bp, Homo sapiens; identical to SEQ ID NO: 4637

SEQ ID NO: 28311 - DNA, 201 bp, Homo sapiens
ctcagaaagtaattccacccatctctactctgggtcccgctgggccaaggattccagtaccactgactgagtgggccttgtctcctcttcttgcccacagmctgctgtggaggtgcctcaatatgtgggcatccggctcctggtagagggcttcaccatcaagaagcccatggcgatgtgtcatcggcggatgggggtccg

SEQ ID NO: 28312 - DNA, 201 bp, Homo sapiens
gttgaaaactaccactctacaccttggaaggcgtctcgaaggcctagtctgttctgttcacagtagtgtcttaagagccttgcaccctcagtgctacctgkcttcatgggagctggaataggggatcggtgggtttggcgtgacagattttgatcttccctttcctctgtgttatttcctatagactgccactctccgccc

SEQ ID NO: 28313 - DNA, 201 bp, Homo sapiens
acatttttctgtattttctaaattttctttaatggagcatgttttatttattttcatcattaaaacatagttttatatcttcttttttttttgagacagartcttgctctgtcacccaggctggagtgcagtggcacaatctcagctcactgcaagctccgcctcccgggttcacgccattctcctgccttagcctcccga

SEQ ID NO: 28314 - DNA, 201 bp, Homo sapiens
agcatgttttatttattttcatcattaaaacatagttttatatcttcttttttttttgagacagagtcttgctctgtcacccaggctggagtgcagtggcrcaatctcagctcactgcaagctccgcctcccgggttcacgccattctcctgccttagcctcccgagcagctgggactacaggcgcccgccaccacgcccg

SEQ ID NO: 28315 - DNA, 201 bp, Homo sapiens; identical to SEQ ID NO: 19672

SEQ ID NO: 28316 - DNA, 201 bp, Homo sapiens; identical to SEQ ID NO: 19675

SEQ ID NO: 28317 - DNA, 201 bp, Homo sapiens; identical to SEQ ID NO: 19673

SEQ ID NO: 28318 - DNA, 201 bp, Homo sapiens; identical to SEQ ID NO: 19677

SEQ ID NO: 28319 - DNA, 201 bp, Homo sapiens; identical to SEQ ID NO: 19685

SEQ ID NO: 28320 - DNA, 201 bp, Homo sapiens
aaatacaaaaataagctgggcatggtggtatgcacctgtagtcccagctactcgggaggctgaggcaggagaattgcttgaacctgggaggcggaggttgyagtgagccaagatcgtgccaccgcactccagcctggcagcagagcaagacttcgtctcaaaaataaaataaaataaaataaaataaaataaaattcattc

SEQ ID NO: 28321 - DNA, 201 bp, Homo sapiens
tacaacctgtgaccatcagcaggaatgagaaggaaaaggttctgattgagggctccatcaactctgtccgggtcagcattgctgtgaaacaggtaagttcrccatggaggaggcccaacgtaaggcctctttcagtcctttcagcctctttcagtccggggtccccatctgagagatcagtgtgccagattccagattcag

SEQ ID NO: 28322 - DNA, 201 bp, Homo sapiens; identical to SEQ ID NO: 19614

SEQ ID NO: 28323 - DNA, 201 bp, Homo sapiens; identical to SEQ ID NO: 19616

SEQ ID NO: 28324 - DNA, 201 bp, Homo sapiens
atctgagagatcagtgtgccagattccagattcagagtgcaggaaacctagcctctgcttcctttttttttgacacggattctcactcttgtcgcccaggstggagtgcagcagcatgatctcagctcactgcaacctctgcctcccgggttcaagcagttcttctgtctcagtctcccaagtagctgggattacaggcat

SEQ ID NO: 28325 - DNA, 201 bp, Homo sapiens
ttctatatttgggtgtctggggtggctcttagtctctcgtaggaacttggtcactcatttctacatctcaggatgttcacaaagtccttgcctctatctcstttaaaccccaagtgaggtaagtgaagtctgcatgtgaattttctaggagtataggacaattaatcatgttatgattccacttctcaaatagacttcagt

SEQ ID NO: 28326 - DNA, 201 bp, Homo sapiens; identical to SEQ ID NO: 19626

SEQ ID NO: 28327 - DNA, 201 bp, Homo sapiens
gaaagcaacctcagttcaccaggcaggacgctggcagggctttctagcagcctccatgccagggcacaagggagctgtggagaagctctcatggctcttamtttttctgccttatctagtgctaggcttagggccggtgcccataggtcacttctgaaagctggctgaattagagcatgaccacaaggtgtcctgggaccc

SEQ ID NO: 28328 - DNA, 201 bp, Homo sapiens
accccggtcctcgacccctctccgcaggatggtgaggcccgtgcggcccgctcgctctggcctacagcggctgcgaggacgacaagacgctggggtggagrgactgggggtcgggagaagagcggctgagggtgggcatctggatgaaggcaggaggaagaaaagaggcgtggctatgggcggccagaaaagatcctaggc

SEQ ID NO: 28329 - DNA, 201 bp, Homo sapiens; identical to SEQ ID NO: 19629

SEQ ID NO: 28330 - DNA, 201 bp, Homo sapiens
ttcaagcccaggctttaccattctctacttatatgcccctgaacatgttatttgacctttttcagtctcagtttttccatctgtaaaatggggacaaaagwagtctcggtctgtttccccattaaaagtctgaatctgaaaaatggggataacaatagtacctacctccctgggatgttctgaggattaagagatgatgcc

SEQ ID NO: 28331 - DNA, 201 bp, Homo sapiens
tcaagcccaggctttaccattctctacttatatgcccctgaacatgttatttgacctttttcagtctcagtttttccatctgtaaaatggggacaaaagamgtctcggtctgtttccccattaaaagtctgaatctgaaaaatggggataacaatagtacctacctccctgggatgttctgaggattaagagatgatgccc

SEQ ID NO: 28332 - DNA, 201 bp, Homo sapiens; identical to SEQ ID NO: 19633

SEQ ID NO: 28333 - DNA, 201 bp, Homo sapiens
gtcactgatgaccatgggccagaacaaagtgtgacattcagttgtgcagctttgtcactccttggggacacccttaggggccctgccccctcagcagctawctccataggtgggtctatgtctcagtctttggaatttgccatggtttgatgaggctaatgccaactccttctcacgctgccaccgcctgggggctgacaa

SEQ ID NO: 28334 - DNA, 201 bp, Homo sapiens
ggtttgatgaggctaatgccaactccttctcacgctgccaccgcctgggggctgacaagcctcataggacaccttaagcagtgacaaagggaggcagaagrgagtctttggcctccctaaggccaaaaggaggctgaaaggctggcttgctctctgcccacctgtgccctggaggaagagaaatcttcttgacttacacaa

SEQ ID NO: 28335 - DNA, 201 bp, Homo sapiens
gtcagatttggggtctggttacacaactgaaacaggagcaagttcttttttttttttgagacggagtctcgctctgtcacccaggctggggtgcagtggcrcgatcttggctcactgcaagctccgcctcccaggttcccgccattctcctgcctcagcctcccgagtagctgggactacaggcgcccgccatcacgcctg

SEQ ID NO: 28336 - DNA, 201 bp, Homo sapiens
cgctactaccaagtggtccagtgagtcccctgcagctgggactttgggctgtgggcaggtgcttagggatagaccctttctgtctcgtgcagcccctaccycttccccaagcctcccgctcgtttaccccgctgttctgctcaggaaccctcgaggactcccactgcctccgtgatagggtctgggccacttttcttggtt

SEQ ID NO: 28337 - DNA, 201 bp, Homo sapiens; identical to SEQ ID NO: 19636

SEQ ID NO: 28338 - DNA, 201 bp, Homo sapiens
taccccgctcggagcatagatggtaccgtccggaagtccgggcggagaccgtagctgcgcttctcgcgaaagggcaggcatcgcggggctggccacttccrtacttccgctttccggcccagccagcgcccgcgatggtgagagagccgggcccccggccagggacccccggctgttcggcctcagggcagtgggtcggtg

SEQ ID NO: 28339 - DNA, 201 bp, Homo sapiens
cccagcactttgggagaccaaggcgggtggatcacttgatgtcaggagttcaagaccagcctggccaacatggtaaaaccctgtctctactaaaaatacaraaattagccaggcgtggtggcacgcgcctgtaatcccagctacttgggaggctgaggcaggagaatcgcttgaacccgggaggcagagcttacagtgagt

SEQ ID NO: 28340 - DNA, 201 bp, Homo sapiens
aaggtgggaggatcacttgaacctgggaattacaggctgcagtgagctatgatcgcaccattgcactccaacctgggcagcaaagcaagactctatctctraaaaagaaataagtgaataaaggctagataggcccacagagtggggagggacacagcagggctgtgtcccatctggcctgggattcagagctctgctagg

SEQ ID NO: 28341 - DNA, 201 bp, Homo sapiens; identical to SEQ ID NO: 2527

SEQ ID NO: 28342 - DNA, 201 bp, Homo sapiens; identical to SEQ ID NO: 19643

SEQ ID NO: 28343 - DNA, 201 bp, Homo sapiens
tctaccgcgacagctatatccgcttttccacgcagcccttctccctgaagaacctggacaagtgagcccctctgctcgcctcccacgagctccctgcctarttggggagctggcaagcaaacaggcgattacagtgcaggggactcgcgcagcagcgctaggctccacacacagactgcaggcaggcaggccctcatcctg

SEQ ID NO: 28344 - DNA, 201 bp, Homo sapiens; identical to SEQ ID NO: 4764

SEQ ID NO: 28345 - DNA, 201 bp, Homo sapiens
atcatttttggggatccgtggcacgtcgatagggtcatcagtgaattcatattcctggatcttgggctgaaggtttttggatttgggccgtcctgggccayggcccggcccatgtcctgccttcccttccagtttctgcttcttgggcttcccatgtttggggggagctccaagttcatggtctcgacccagcttcaggaa

SEQ ID NO: 28346 - DNA, 201 bp, Homo sapiens
ggccacagtttccctatctgtagtaaaaactgcttctttaaaggctggatagagctggacatggtggctcatgcctgtggtcccagctactcaggaggccraggtgggaggataacttgaggctaggagttcaagaccagcctgggcaacatagtaagactcagtctctacaaaaaaaggtagaaaaacattatccgggtg

SEQ ID NO: 28347 - DNA, 201 bp, Homo sapiens
tgaaagcactttagtcatctgaagaggtagaattgtttacattgatgaactggtgacatcgttcttagttgtttagatattcagaacatgccttttttttyctcctttttccaagcaatctttggtttgttgacatgtgccacccagagtggctgtgatctctagacggtagacttagtgtgtactcccaccagtaagtac

SEQ ID NO: 28348 - DNA, 201 bp, Homo sapiens; identical to SEQ ID NO: 19648

SEQ ID NO: 28349 - DNA, 201 bp, Homo sapiens; identical to SEQ ID NO: 19649

SEQ ID NO: 28350 - DNA, 201 bp, Homo sapiens
agttcatggtctcgacccagcttcaggaatcgtctgtcacctttcttatcctgccagtcggtgaggatctgaaatttacagaaagtgtcactgagggggasaagggaaaacacagaatatctctttcctctagtgaataaattaggatctagaatctacagaggctcctgggtctttccccatcctctttttacctagtaa

SEQ ID NO: 28351 - DNA, 201 bp, Homo sapiens; identical to SEQ ID NO: 19651

SEQ ID NO: 28352 - DNA, 201 bp, Homo sapiens
ggaggcagtgcacggagaaagctgagtttgggcctaggtgtctggaggcactgatggagcagacagcagactgggcagggttggggaaggaagatgatgcrtggctttggtagctttacttctcaggcacctctgaactctcttgttccgcatcatgtctatcaaggcccagagtttctaccttgtaatgctcagcctcat

SEQ ID NO: 28353 - DNA, 201 bp, Homo sapiens
aacaaagacacaaaaaaagcactttgggaggccgaggcgggcagatcacttgaggtcaggagttcgagaccagcctggccaacatggtgaaaccccatctstactaaaaaatacaaaaattagccgagtgtaggggcaggtgcctataatcccagctacttgggagactgaggcacgagaatcgcttgaacccaggaagcg

SEQ ID NO: 28354 - DNA, 201 bp, Homo sapiens; identical to SEQ ID NO: 19652

SEQ ID NO: 28355 - DNA, 201 bp, Homo sapiens; identical to SEQ ID NO: 19653

SEQ ID NO: 28356 - DNA, 201 bp, Homo sapiens; identical to SEQ ID NO: 19656

SEQ ID NO: 28357 - DNA, 201 bp, Homo sapiens; identical to SEQ ID NO: 19658

SEQ ID NO: 28358 - DNA, 201 bp, Homo sapiens
ttgtttaaaaatacacagccaaattagctgggcacggtggtgtgagcctgtggtccaggctactcgcgaggctaatgaggatcgcttgagcccgggaggtyaaggctgcagtgagttatgatcgcacctctgcactccagcctgggagacagagcgagatgctgtcttaaaaacaaagacacaaaaaaagcactttgggag

SEQ ID NO: 28359 - DNA, 201 bp, Homo sapiens
atgttattattacctaataaggttaggagtttcatcatgtataacctgtaaagtgcctgaatgtatagtaataggcaattactggtagctactattattaktagtattataattatttcactcgtcttgctccaaaaagagattggagtctacttgtaaaatagaacagcattttaaaaaatcagtcagaaaattgattgc

SEQ ID NO: 28360 - DNA, 201 bp, Homo sapiens
gggtttcgccatgttggccaggctggtctccaattcctgacctcagctgatccgcctgtcttggcctcccagagagccaccgcgcccggcaatagctgcattttttttttttttttttttttgagacggagtttcgctcttttcacccaggctggagtacaatggtgcgatctcggctcactgcaacttctgtctcctggg

SEQ ID NO: 28361 - DNA, 201 bp, Homo sapiens; identical to SEQ ID NO: 19660

SEQ ID NO: 28362 - DNA, 201 bp, Homo sapiens
agtgctgctgagtttgactgtgggttacagtggtggctaccagattctctccattataagctacatctcccctttgcaattaatttttctgtaaggtgctstgttggctctgtccagattacacattttcctgtcatcctttcatctaattgttttgataccagttttgattattgcctattttattagagttgcaaaatg

SEQ ID NO: 28363 - DNA, 201 bp, Homo sapiens
cttttttttttgagacagagtcttgctctgtcacccaggctggagtgcagtggcacaatctcagctcactgcaagctccgcctcccgggttcacgccattytcctgccttagcctcccgagcagctgggactacaggcgcccgccaccacgcccggctaattttttctatttttagtagagacggggtttcaccgtgttag

SEQ ID NO: 28364 - DNA, 201 bp, Homo sapiens
ggattactggcatgagccaccgcgccaagccctctaaatgtcttttattgctgatttgttcttgtttttgtttttaggccagcacatagtaaaggcttatrccttgcactgtttttttttgtctcttttcatctaggccagccccagtgccttttgaccccatagttttgatcttttgaggggccaggcgggttgttttgt

SEQ ID NO: 28365 - DNA, 201 bp, Homo sapiens; identical to SEQ ID NO: 19661

SEQ ID NO: 28366 - DNA, 201 bp, Homo sapiens
gttttgattattgcctattttattagagttgcaaaatggcaaatgtctaattctgttgttccttctgcatttattagctgagattcttctgtaaagatgarctttccctcatcatctggggctacttgggagtgctgatagctacatttttatttgatttttttttttttttttttttagacagagtctcactctgccacc

SEQ ID NO: 28367 - DNA, 201 bp, Homo sapiens; identical to SEQ ID NO: 19662

SEQ ID NO: 28368 - DNA, 201 bp, Homo sapiens
gtccaaggccaagcccagtgtcaggtgtaggtaagaaagtacaacgaagataaaacctgtacttcacactctagtaagggagacaggtccaaaaagaactmagacacacacacagaagccaatctgaaataattcccaagatagaaggtgcagaatacgtacacagattgtctcaggtcacagcaattgcctctcgagaga

SEQ ID NO: 28369 - DNA, 201 bp, Homo sapiens
gagtaaggctacctttggggaaagttggagaaaaacaggggcatgagaggggcttctaggatatagtaatgtttcattttgtaatctccaggctggtaatrcaagctcatttgtgaaaactgtacatttatgatctgtgcacttttctattaggtgcacaagttatatattattcccaatcttttgctatatattagtcca

SEQ ID NO: 28370 - DNA, 201 bp, Homo sapiens
taaagaaaaaaggttgaaagagtcggtgtgatgatgtggaggacatgcacgttgaggtgagggcccttgggtttccatcttggtagtgccacttactgagktcaaatatataaaattgccatttctggccgggcatggtgggtcatgcctgtaatcgcagcactttgggaggccaaggcgggtggattatttgaggtcagg

SEQ ID NO: 28371 - DNA, 201 bp, Homo sapiens
acaatagtacctacctccctgggatgttctgaggattaagagatgatgcccgtcaagagcccagttcagtgtctggcacagaagtgggactgtttaatggytggccccgcccgggggtcgcccaaatgtcccgccttcagagtcctcgttctctagggacaccctagtgcgacccccgccccctctacctcctcgctgcgg

SEQ ID NO: 28372 - DNA, 201 bp, Homo sapiens
gggcggggagtcagcgagggcgagcctactggagtttgccgggggtgggaagaaggtgggcctcgagcaaagccgctagaggtggggtgcgggtggtcggmctcaggcgagccccggggcacagcccggggcgggaggcggagcttggcggccgagatctccgcgctgcagttagccccgccgagcgccaggagctgcggg

SEQ ID NO: 28373 - DNA, 201 bp, Homo sapiens; identical to SEQ ID NO: 4647

SEQ ID NO: 28374 - DNA, 201 bp, Homo sapiens
actgaactgtgtcagccttagtgtatgttagctgtgatactgctcatccctcccttcctggaagtcctccctttttcatacatgtgggcctttttcatacrtgtgggcctttttcatacgtgtgggcattcctgggagttgtgactttggatgaccatctccctcttcgtcacaccttccctggtgataccgatctagtct

SEQ ID NO: 28375 - DNA, 201 bp, Homo sapiens
agtgtatgttagctgtgatactgctcatccctcccttcctggaagtcctccctttttcatacatgtgggcctttttcatacatgtgggcctttttcatacrtgtgggcattcctgggagttgtgactttggatgaccatctccctcttcgtcacaccttccctggtgataccgatctagtctcctggcttcgataactttc

SEQ ID NO: 28376 - DNA, 201 bp, Homo sapiens; identical to SEQ ID NO: 2528

SEQ ID NO: 28377 - DNA, 201 bp, Homo sapiens
ttcaaattacgctcctgtgtgatattttcctgggccacatcacagattactgaaaagatacttcatgctacggaccacagaaaagtttgtcaggacatagktgtgagtactcctgggagaccttgcctagccccctgcatctggctgtccctgttcctggcactgccccagtggctgctgcctcctccttaaaaaagagaa

SEQ ID NO: 28378 - DNA, 201 bp, Homo sapiens; identical to SEQ ID NO: 19676

SEQ ID NO: 28379 - DNA, 201 bp, Homo sapiens
aggatcgcttgagcccgggaggtcaaggctgcagtgagttatgatcgcacctctgcactccagcctgggagacagagcgagatgctgtcttaaaaacaaaracacaaaaaaagcactttgggaggccgaggcgggcagatcacttgaggtcaggagttcgagaccagcctggccaacatggtgaaaccccatctgtactaa

SEQ ID NO: 28380 - DNA, 201 bp, Homo sapiens; identical to SEQ ID NO: 19681

SEQ ID NO: 28381 - DNA, 201 bp, Homo sapiens; identical to SEQ ID NO: 19687

SEQ ID NO: 28382 - DNA, 201 bp, Homo sapiens
attgaggtattacatgagactacatctgttttattcatgaaaggacaggcgtcacggagccagtcaccctttttaggtttactttctataactgttgacaraggccaggcgtggtggctcacgcttgtaatcccagcactttgggaggcagaggcgggcggatcacgacgtcaggagatcgagaccatcctggctaacacg

SEQ ID NO: 28383 - DNA, 201 bp, Homo sapiens
ctcacgcttgtaatcccagcactttgggaggcagaggcgggcggatcacgacgtcaggagatcgagaccatcctggctaacacggtgaaacctcttctctrctaaaaatgcaaaaaattagccgggcgtggtggtgggcacctgtagtcccagctactcaggaggctgaggcaggagaatggcgtgaacccagaaagcaga

SEQ ID NO: 28384 - DNA, 201 bp, Homo sapiens
aggcgggcagattacaaggtcaggagattgagaccatcctggctaacaccgtgaaaccctgtctctactaaaaatacaaaaagttagccgggtgtggtggygggcgcctgtagtcccagctacttgggaggctgaggcaggagaagggcatgaacccgggaggtggagcttgcagtgagccgagatcgtgccaccgcgctc

SEQ ID NO: 28385 - DNA, 201 bp, Homo sapiens
ctgagtatctgggattataggagtgcgccaccatgcccagctaatttttatatttttagtacaaatgggatatcaccatgttggccaggctggtctcgaaytcctgacctcaggtgatccaccagcctcagcctctcaaagtgctgggattacaggcatgagccactgtgcccagccagtttcagattttggatttcagat

SEQ ID NO: 28386 - DNA, 201 bp, Homo sapiens
cctgggagcagaggacttctggctgactgctgcccgcaacgttctcaagctggtggtgaagtctgagtggaagtcataccctattcaggcagtagaggaaraggcctcaggtaagtactgtggttacctccactctcccacccatttatcctccacccatccgcccttccacctatctgcccttctacctatctattcatc

SEQ ID NO: 28387 - DNA, 201 bp, Homo sapiens
ataggagtgcgccaccatgcccagctaatttttatatttttagtacaaatgggatatcaccatgttggccaggctggtctcgaactcctgacctcaggtgmtccaccagcctcagcctctcaaagtgctgggattacaggcatgagccactgtgcccagccagtttcagattttggatttcagatttgcagattggggatg

SEQ ID NO: 28388 - DNA, 201 bp, Homo sapiens
agagcaggttctaaaagttggtcagtcccttgagtttggaatccagaacagattccaggcttatatcaagttccatttgttgaattgggttccaaaaaagkctgcaggctttggatttctaaggcagactaggttccgattccacaatatgttctaaattcaggttagaatttggatccagattctatgctagatttaaat

SEQ ID NO: 28389 - DNA, 201 bp, Homo sapiens
ctctattaaaaatacaaaaattagctgggcatggtggtgggcgcctgtaatcctagctactcaggaggctgaggcagagaactggttgaacctgggaggcrgaggttgtagtgagccaagatcgtgccactgtactgcagcctgggcgacagagcaagactccgtctcaaaaaaaaaaaaaaaaaaaaaaaaggcaaaaaa

SEQ ID NO: 28390 - DNA, 201 bp, Homo sapiens
acctctgtgacctacctcgccacccctctgaattaggtgttccctcctccagggcacatggctatgttctagctttgcagtgaatgttaaaggtgctcacrgtgaaactgggtgactaataggatatagcagctggtcactcaacaaccctcacaggacagcattgcctgggtgagccagccacaaacctcatttgtcatg

SEQ ID NO: 28391 - DNA, 201 bp, Homo sapiens
gtccctgtgtggtccttctgtgactggcaggcaacctgagtgataacaggtgtttaagagacaggctttggagtcagacctgggttccagtgctgcctctrctctgtgatttgaggcaaattgtttaacatcttggagccttacctcccctgtgacttttgaggataatattttgccagtgcttccaaaaaggttgcttac

SEQ ID NO: 28392 - DNA, 201 bp, Homo sapiens
gggcttggaacggaggacaaggctcgagcctaggcaggaacttcccgggagaggaggcggcgacgcggaggggcgcgggatcaggggccctgggagggcgrgcgcggcgaggggcgcatgcagggccccgacgcgccactgctcctgagcgcgagggagctggggcccgggcgccggggctcggcctcctggtaccgccag

SEQ ID NO: 28393 - DNA, 201 bp, Homo sapiens; identical to SEQ ID NO: 19615

SEQ ID NO: 28394 - DNA, 201 bp, Homo sapiens; identical to SEQ ID NO: 4657

SEQ ID NO: 28395 - DNA, 201 bp, Homo sapiens
ttctggatagaatttcttgtggcagtttaagtggcttctgattagcctccggtttctgtcaaggtttggttacaggaagagaacgtactgatcacatgacytaagtgacctcgcctttgttacagttgttattgatcatttcttaaattaatatattggcgttttggtttcaaaaaatgtaaacggggaaatacatgggca

SEQ ID NO: 28396 - DNA, 201 bp, Homo sapiens; identical to SEQ ID NO: 19617

SEQ ID NO: 28397 - DNA, 201 bp, Homo sapiens
ttcaccatgttagccaggatggtctcgatctcctgacctcgtgatttgcccgcctcggcctcccaaaatgctaggattactggcatgagccaccgcgccargccctctaaatgtcttttattgctgatttgttcttgtttttgtttttaggccagcacatagtaaaggcttataccttgcactgtttttttttgtctcttt

SEQ ID NO: 28398 - DNA, 201 bp, Homo sapiens
gttactacccccattttgcagatgtgaagagcacacaggttagatgacttccctaaggtctcacaactagtgtggagatggcgcttgaacacgtcctggcratgacggggccatacccttacccaccctcttatcttccagacactgggatggttaactgagactatgcacaaagcacttactactgcggcccccgtaact

SEQ ID NO: 28399 - DNA, 201 bp, Homo sapiens
cccagaaagcagagcttgcagtgagtcgagatcgtgccactgcacaccagactgggcaacagagtaagactccgtctcaaaaaaaaaagcgttgcaaaaayttgctgggtatggtggcatgcgcctgtagtaccatccgctcaggacactgaggcaggaggatcacttgagcccagaagttcgaggccgtagtacactgtg

SEQ ID NO: 28400 - DNA, 201 bp, Homo sapiens
cgtggtttgatgaggttgatgccaactccttcttcccacgctgctactgcctgggggctgaggatgacaaaaaagccttcataggtaaggagacccccagycctatgcctgaacctcaggctgacagagcagggctgaagctctggctcatattggagagaaacaggcctctcttcatgccctcatctgcctgccccagca

SEQ ID NO: 28401 - DNA, 201 bp, Homo sapiens; identical to SEQ ID NO: 19630

SEQ ID NO: 28402 - DNA, 201 bp, Homo sapiens; identical to SEQ ID NO: 19631

SEQ ID NO: 28403 - DNA, 201 bp, Homo sapiens; identical to SEQ ID NO: 19632

SEQ ID NO: 28404 - DNA, 201 bp, Homo sapiens
tgaaaacccatctctactaaaaaaacaaacaaataaaaaaacaaacaaataacaacaacaacaaaaagtagctgactgtggtggcaggcgcctgtaatccyagctactcgggaagctgaggcaggagaatcacttgaacccaggaggtggaagttgcagtgaactgagatcacgccactgcaccccagcctgggtgacaga

SEQ ID NO: 28405 - DNA, 201 bp, Homo sapiens
ttgccgtggtttgatgaggttgatgccaactccttcttcccacgctgctactgcctgggggctgaggatgacaaaaaagccttcataggtaaggagacccscagccctatgcctgaacctcaggctgacagagcagggctgaagctctggctcatattggagagaaacaggcctctcttcatgccctcatctgcctgcccc

SEQ ID NO: 28406 - DNA, 201 bp, Homo sapiens
taatcacagctacttgggaggctgaggcaggagaattgcttgaatctgggtagcaaaggttgcagtgagctgagatcgcgccactgcactccagcctgggygacagagtgagactctgtctcaaaaataaaataaaaatacaaaaattagccaggcatggtggcgggcgcctgtaatcccagctactcgggaggctgaggt

SEQ ID NO: 28407 - DNA, 201 bp, Homo sapiens
gttctcaggacaaggggaagtatacaattcagaaaatttggagtctgaccagtatctggcaagttcaaatccagcccctgcaccgtatccggcatttgtaratatgatgtctaaaatgggtctggaggtagaacaatcaccaaatccaatgatagtgagcaaacggactcttacctcctaagcagaagatatctggctaat

SEQ ID NO: 28408 - DNA, 201 bp, Homo sapiens
catttgtagatatgatgtctaaaatgggtctggaggtagaacaatcaccaaatccaatgatagtgagcaaacggactcttacctcctaagcagaagatatytggctaatggacccattctgtcttacctgggtttctttttttttttgagacagagtcttgctctgtctcccaggctggagtgcagtggtgcaatctcagc

SEQ ID NO: 28409 - DNA, 201 bp, Homo sapiens
tctggaggtagaacaatcaccaaatccaatgatagtgagcaaacggactcttacctcctaagcagaagatatctggctaatggacccattctgtcttaccwgggtttctttttttttttgagacagagtcttgctctgtctcccaggctggagtgcagtggtgcaatctcagcccactgcaacctctgcctcccagttcaa

SEQ ID NO: 28410 - DNA, 201 bp, Homo sapiens
agtgctgggattataggtgtgagccaccgcgctcggccttggcagctctttaagaatgagaaagggtgggccgggcacagtggctcacgcctgtaatcccrgcactttgggaggccgaggcaggcagatcaccaggtcaggagatcgagaccatcctggctaacacggtgaaatgccgtctctattaaaaatacaacaaat

SEQ ID NO: 28411 - DNA, 201 bp, Homo sapiens; identical to SEQ ID NO: 4656

SEQ ID NO: 28412 - DNA, 201 bp, Homo sapiens
agtagagacggcgtttcaccatgttggtcaggctggtcttgaactcctgacctcagatgatctgcctgccacagcctcccaaagtgttgggattacaggcrtgaggtgacttttatatcttttttttttttttggagacggagtcttgctctgttgcccaggctggagtgcagtggcgtgatctcggctcactgcaacttc

SEQ ID NO: 28413 - DNA, 201 bp, Homo sapiens
tttcaccatgttagccaggatggtctcgatctcctgacctcgtgatttgcccgcctcggcctcccaaaatgctaggattactggcatgagccaccgcgccmagccctctaaatgtcttttattgctgatttgttcttgtttttgtttttaggccagcacatagtaaaggcttataccttgcactgtttttttttgtctctt

SEQ ID NO: 28414 - DNA, 201 bp, Homo sapiens
gtggcaccatctcggctcactgcaagctgcgcctcccgggttcaagcgcttttcctgcctccgccccctgagtagctgggactacaggtgcctgccaccaygcccggctaattttttgtattttagtagagatggggtttcaccatgttagccaggatggtctcgatctcctgacctcgtgatttgcccgcctcggcctcc

SEQ ID NO: 28415 - DNA, 201 bp, Homo sapiens
ccaggccagaagcatctgaaagcttctaaaggtatggatgtgaggaggctccacccccagagattgacccaaaatgtctagcttggggaggagactatgtmtatctgcatttttcaaatgccccccaaatatcttttttttttgagacggggtcttgctctgttgcctaggctggagtgcagtggcaccatctcggctcac

SEQ ID NO: 28416 - DNA, 201 bp, Homo sapiens
gttttttttcagttccattatccactccatctaatgtcagtccaacgcttgtgatactctttgcttgtgatacagtctgctgtatgtctcacttccctctycaaatcattctccacagagccatcatgcagctgcagtcatgaacttcctcctcagaaagccccagtagttccttacccccttaagagaaaagctaaactt

SEQ ID NO: 28417 - DNA, 201 bp, Homo sapiens
ttgagacagagtctcgctctgttgcccaggctggagtgcagtggcatgatcttggctcactgcaacctctacctcctgggttcaagcgattctcctgcctyagcctcccaagtagttgggattacaggtgcctaccaccacgcctggctaatttttgtatttttagtagatacagggttttgccatgttggccaggctggt

SEQ ID NO: 28418 - DNA, 201 bp, Homo sapiens
actccatctcaaaaaaaaaaagaatgtgaaaggggggacaggagggacatcaggcattcttggcaaaggacacctcccaggcaaatatatggtgatagatrtgagcaactcagaccttgcaagcggggccaaggctctgagcgcagatccagtcagagtctttctgaactgtctgggtgtgtggtgagtgtgggcagtcct

SEQ ID NO: 28419 - DNA, 201 bp, Homo sapiens
tctcaaagcttcagtttactctttttgttttttgagatggagcctcgctccgttgcccacactggagtgcaatggcgcgatctcggctcactacaacctcygcctcctggcttgaagtgattctcctgcctcaacctcctgagtagctgggattacaggtgcccaccaccacacccggctaatttttgtatttttaggaga

SEQ ID NO: 28420 - DNA, 201 bp, Homo sapiens
tcagcttcccaaagtgctgggatttcgggcacgagccatcatgcgcagccttacctggtgttcttagcaagtgacttcacctctctgagcctcaatttccycatctttcaatgagaataccagtaaggcccatcttctggggttgtggcaaggatgaagggctttataataatgacctgccattatattattggtgtgggt

SEQ ID NO: 28421 - DNA, 201 bp, Homo sapiens; identical to SEQ ID NO: 19645

SEQ ID NO: 28422 - DNA, 201 bp, Homo sapiens
cttgaaaggaattaggctaacattgtttcagccaatattaggcacagattaagacaggaatgaaccccaaaaagcacctgtgggtggaggaatcagacagracagagtttgaatcctggctgaaccactcaactttcagtgtatggccttcggtaagtcccttaactctcaaagcttcagtttactctttttgttttttga

SEQ ID NO: 28423 - DNA, 201 bp, Homo sapiens
tttccacagctgttgctcctgagtccttttcctttggttcccactgtcccagagttgaggccttatgggctatgggtcagggagaggaaactcatcagctmtgggctctgcatccacagaggatgaagatgaggacgaggagttccagccatcacagctgttcgacttcgatgatttactgaaatttgatgacctagatgg

SEQ ID NO: 28424 - DNA, 201 bp, Homo sapiens; identical to SEQ ID NO: 19646

SEQ ID NO: 28425 - DNA, 201 bp, Homo sapiens
agcagactgggcagggttggggaaggaagatgatgcatggctttggtagctttacttctcaggcacctctgaactctcttgttccgcatcatgtctatcarggcccagagtttctaccttgtaatgctcagcctcatcttctgggggcttcagtaactcctcaagtgtgcggacctcctcgctggtgatgtcagcacagta

SEQ ID NO: 28426 - DNA, 201 bp, Homo sapiens
ggatgaggcagccatctggggtattttgtgacttggtttagttcaggacattttctgtcttgtagagaacagggtccctctttgtccatgaaaccctgtcygtgcagcccagttgctgaggcaagctcctaccaaagtacttgctgagccaaccgttcattcattgagcaaacttccagggagtacctgctgagtgccagg

SEQ ID NO: 28427 - DNA, 201 bp, Homo sapiens
ccaggagttcaagactagcctgggtaacataataagacccatctctgcaaaaaataaaaattagcttgggtgtggtggcgtatgcctgtaattccaactayttgggaggctgaaacttggacctaggagttcctggctgcactgagccgtgatttcaccactgcacttcagcctgggtgacagaccaagaccctgtctcaa

SEQ ID NO: 28428 - DNA, 201 bp, Homo sapiens; identical to SEQ ID NO: 4712

SEQ ID NO: 28429 - DNA, 201 bp, Homo sapiens
actctttttgttttttgagatggagcctcgctccgttgcccacactggagtgcaatggcgcgatctcggctcactacaacctccgcctcctggcttgaagygattctcctgcctcaacctcctgagtagctgggattacaggtgcccaccaccacacccggctaatttttgtatttttaggagagatggggtttcaccata

SEQ ID NO: 28430 - DNA, 201 bp, Homo sapiens; identical to SEQ ID NO: 19657

SEQ ID NO: 28431 - DNA, 201 bp, Homo sapiens
gcgatgggtgacagtgacaccactgaggatggtgagtggttccttccctttccacagctgttgctcctgagtccttttcctttggttcccactgtcccagmgttgaggccttatgggctatgggtcagggagaggaaactcatcagctctgggctctgcatccacagaggatgaagatgaggacgaggagttccagccatc

SEQ ID NO: 28432 - DNA, 201 bp, Homo sapiens; identical to SEQ ID NO: 19663

SEQ ID NO: 28433 - DNA, 201 bp, Homo sapiens; identical to SEQ ID NO: 4717

SEQ ID NO: 28434 - DNA, 201 bp, Homo sapiens
tgttctgttcacagtagtgtcttaagagccttgcaccctcagtgctacctggcttcatgggagctggaataggggatcggtgggtttggcgtgacagattytgatcttccctttcctctgtgttatttcctatagactgccactctccgcccctacctgagtgccgtgcgggccacattgcaggctgccctctgcctggag

SEQ ID NO: 28435 - DNA, 201 bp, Homo sapiens; identical to SEQ ID NO: 19665

SEQ ID NO: 28436 - DNA, 201 bp, Homo sapiens; identical to SEQ ID NO: 4723

SEQ ID NO: 28437 - DNA, 201 bp, Homo sapiens
agggagtccctctcctggacccttctctctgccttcctctgcatattcgttacttcattctctccacagactgtcttctttaaggttcttagtttctgctwccccataacctggattcacacgaggctctaggcaggctccaaacctcttacttgtctgggtggcgtaactcaaattctctgtgcagagaatctgattggc

SEQ ID NO: 28438 - DNA, 201 bp, Homo sapiens; identical to SEQ ID NO: 19668

SEQ ID NO: 28439 - DNA, 201 bp, Homo sapiens; identical to SEQ ID NO: 4725

SEQ ID NO: 28440 - DNA, 201 bp, Homo sapiens; identical to SEQ ID NO: 4726

SEQ ID NO: 28441 - DNA, 201 bp, Homo sapiens; identical to SEQ ID NO: 19670

SEQ ID NO: 28442 - DNA, 201 bp, Homo sapiens; identical to SEQ ID NO: 4715

SEQ ID NO: 28443 - DNA, 201 bp, Homo sapiens; identical to SEQ ID NO: 19671

SEQ ID NO: 28444 - DNA, 201 bp, Homo sapiens
ccaggatggtctcgatctcctgacctcgtgatctgcctgcctcggcctcccaaagtgctgggattacaggcttgagccaccgcgcctggcctttttttttytttttttgagatggagttttgcttttgttgcccaggctggagtgcagtggcgcagtctcactgactgcaaccttccacctcccaggtcaagtgattctcc

SEQ ID NO: 28445 - DNA, 201 bp, Homo sapiens; identical to SEQ ID NO: 19679

SEQ ID NO: 28446 - DNA, 201 bp, Homo sapiens; identical to SEQ ID NO: 19684

SEQ ID NO: 28447 - DNA, 201 bp, Homo sapiens
gatggtgagagagccgggcccccggccagggacccccggctgttcggcctcagggcagtgggtcggtgggagatgtggctttgccgcaggggcgcggggcygagggatgtccgggggttgtggggacacgatgagggtgggaaaaagagacggggcgggggcccgaggtgaggaaggggcgagtgggggtactccctggta

SEQ ID NO: 28448 - DNA, 201 bp, Homo sapiens; identical to SEQ ID NO: 19688

SEQ ID NO: 28449 - DNA, 201 bp, Homo sapiens
gcaaacaggcgattacagtgcaggggactcgcgcagcagcgctaggctccacacacagactgcaggcaggcaggccctcatcctgccagctgtccttgcakccaacagatttttttttaacagacagggggcggtctcactctgttacctaggctggagtgcagtggcatggtcacggctcactgtagccttgacttcctg

SEQ ID NO: 28450 - DNA, 201 bp, Homo sapiens; identical to SEQ ID NO: 4770

SEQ ID NO: 28451 - DNA, 201 bp, Homo sapiens
ggactaacatgaagactctaaatctctcttactgttagtccttatctacagtgccaaatgcatcaggtaggttcaacaaaatcgagaaacaccacgaaacyctgcataattagatgagcgcaaactacacttaatagcacaaaatatcaaacacctgctgctgttctttaacgatgacttgatattctatagaattggaga

SEQ ID NO: 28452 - DNA, 201 bp, Homo sapiens
tcaaaaaaaaaaaaagaaagaaagaaagaaaaagaaaagaaattattacacctgccatcacttctcttctacatcatgctaggaattaaaaagaatgcatmattttgttgcttcagaaaatctcctgcattcttgtctttgtattttatcaattgattagggctttggggagctgagcaaagtatagaacatatccaaccc

SEQ ID NO: 28453 - DNA, 201 bp, Homo sapiens
tgaaacagtttggggatttgtttttaagtgaaaacaactatccgtagaagtgagaagtcagataaaatagcatttgttttcttttgtgagctttctccttmctctgcttcttctaagaactttggtgagcatgtctaaatggtcagatgctgggcttcgtgctctcctcagcttagcttctcatcacctgcaggaatggca

SEQ ID NO: 28454 - DNA, 201 bp, Homo sapiens
taagtgaaaacaactatccgtagaagtgagaagtcagataaaatagcatttgttttcttttgtgagctttctccttcctctgcttcttctaagaactttgktgagcatgtctaaatggtcagatgctgggcttcgtgctctcctcagcttagcttctcatcacctgcaggaatggcagagcagtgtcatctcactctgtct

SEQ ID NO: 28455 - DNA, 201 bp, Homo sapiens
gcgagattccgtctcaaaaaaatcattgtaagtaattggatttttgtgtgtgtgtgatgttctgaagataggctttctaggccaaatcgtcactcaaggcyaattcgaacacaattcagtttaaatcagaatacattcgagtgataattccttacctttttaaatagttcatagaaaactttttgtagacattatctggtt

SEQ ID NO: 28456 - DNA, 201 bp, Homo sapiens
ggaggctgaggcgggagaatagcttgaacccagtggcggaggctgcagtgagccgagattgcgccactgcactccagcctgggcgacagagcgagattccrtctcaaaaaaatcattgtaagtaattggatttttgtgtgtgtgtgatgttctgaagataggctttctaggccaaatcgtcactcaaggccaattcgaaca

SEQ ID NO: 28457 - DNA, 201 bp, Homo sapiens
gccgagtcggtggattgcttgaggctaggattttgagaccagcctggggaaaccgcgtctctactaaaaatttgaaattagccaggcatggtggtgcgagsctgtaattccagctacttggaggctgaggcgggagaatagcttgaacccagtggcggaggctgcagtgagccgagattgcgccactgcactccagcctgg

SEQ ID NO: 28458 - DNA, 201 bp, Homo sapiens; identical to SEQ ID NO: 4777

SEQ ID NO: 28459 - DNA, 201 bp, Homo sapiens
caaggcgagaatgctactttagatgatgagaaaaaatctctcgaatggctcccaaaatgaggtccttgtttaagaggccacaggaagccgccagccgaackctgataccacagaggaggccaagaagcggactgtggcttggtgacctgtttggtattgccaaattttcagcttttattaaagctgaaacaccttggctgt

SEQ ID NO: 28460 - DNA, 201 bp, Homo sapiens
tgtttggcgacggaatcgctcctgctcgcccctctgactgactcctccggctcaccgtcttccctttgggaggaagaggcgggacatcctgtttctccgtygaaggacttccggtggcttccaaggcgactccgtagtggatgcagcgccggacgccacagccgaaaaacagaatcttggaactggtttagtacaatccag

SEQ ID NO: 28461 - DNA, 201 bp, Homo sapiens; identical to SEQ ID NO: 4778

SEQ ID NO: 28462 - DNA, 201 bp, Homo sapiens; identical to SEQ ID NO: 4779

SEQ ID NO: 28463 - DNA, 201 bp, Homo sapiens; identical to SEQ ID NO: 4780

SEQ ID NO: 28464 - DNA, 201 bp, Homo sapiens; identical to SEQ ID NO: 4781

SEQ ID NO: 28465 - DNA, 201 bp, Homo sapiens
tgcctcttcagccaagaatgtaaaccagaatcttttcttccaaggccaagagcagtgaatgatagcttatggtatatactctcattcccaagtgatcctcytcctccaggagttctgctttaggctaactaatttcaagtttccctttcactacatttctcacccatctgaagctaaaaatgttacaggagacatgctgaa

SEQ ID NO: 28466 - DNA, 201 bp, Homo sapiens
ccaggttcagtggttatgctggacatttttgcttttagggctacccacagcccaagcttccttctatttagtaggactcctttgaggtgtgggtctttgcragggataaagaccatctctctccatctctctgctccctgacaactacagtggcttggcaaaaaaggtcacaaagatgcaggagcaataagagatttttca

SEQ ID NO: 28467 - DNA, 201 bp, Homo sapiens
tccacacctcctcttatactccgtgatccagccatcctaaacaccttttaattcttgaaatgttccacattaccttttgacgcttggaagtcttctatccraaactggattccctaaccgctctttatctctttgcccagtgagttcctgttcattctctggtcgccattccctcttggtattcctccctaacctctttaa

SEQ ID NO: 28468 - DNA, 201 bp, Homo sapiens; identical to SEQ ID NO: 4782

SEQ ID NO: 28469 - DNA, 201 bp, Homo sapiens; identical to SEQ ID NO: 4783

SEQ ID NO: 28470 - DNA, 201 bp, Homo sapiens; identical to SEQ ID NO: 4784

SEQ ID NO: 28471 - DNA, 201 bp, Homo sapiens; identical to SEQ ID NO: 4768

SEQ ID NO: 28472 - DNA, 201 bp, Homo sapiens
caccagcgtcgcttaacggaagaaggcgcgagtagcagcggcgcagccagggcacctgggggtgacacgagagtgggcgggcggtccagggagcccctgcwggaaaccagacgctaaagcttgcagctgtgcagctaggggagcatctgttttccacttgagagcaacccgggcacgcgagaacagcccgatttcggtgca

SEQ ID NO: 28473 - DNA, 201 bp, Homo sapiens
tgctcgcttcccccgggcctggagtggctcctgtcgcttctggcgctccgatttcgagaaatgactttcagctgtgcaaggcgagaatgctactttagatratgagaaaaaatctctcgaatggctcccaaaatgaggtccttgtttaagaggccacaggaagccgccagccgaacgctgataccacagaggaggccaaga

SEQ ID NO: 28474 - DNA, 201 bp, Homo sapiens
gcattggaaagagagggaagtgtggaagacgatgcagggctctgctatcaactagccgatggtccacttaccaaggtagggagcaccagaggggtaacagkctcgaggaatggatggaagttttcatactaggtgagtagagtttcagatgtgaaatgggcaggaagatgggtgggcctgattctcggaagagggggctgg

SEQ ID NO: 28475 - DNA, 201 bp, Homo sapiens; identical to SEQ ID NO: 4771

SEQ ID NO: 28476 - DNA, 201 bp, Homo sapiens; identical to SEQ ID NO: 4772

SEQ ID NO: 28477 - DNA, 201 bp, Homo sapiens
ctaggatgtcaccaggcatagactgcaaagctgtaactcaaatcactattaagactgtaattacttataaaagtattctacatgtgtgtccacggatgtgrgatgtcctattccaaaactccccaatgaaataaatggctactcaaaacccagcgcaaccgacagaggtcagcggccactgcaccccgcctccaccagctt

SEQ ID NO: 28478 - DNA, 201 bp, Homo sapiens; identical to SEQ ID NO: 4773

SEQ ID NO: 28479 - DNA, 201 bp, Homo sapiens; identical to SEQ ID NO: 4774

SEQ ID NO: 28480 - DNA, 201 bp, Homo sapiens; identical to SEQ ID NO: 4775

SEQ ID NO: 28481 - DNA, 201 bp, Homo sapiens
taaatctctcttactgttagtccttatctacagtgccaaatgcatcaggtaggttcaacaaaatcgagaaacaccacgaaaccctgcataattagatgagmgcaaactacacttaatagcacaaaatatcaaacacctgctgctgttctttaacgatgacttgatattctatagaattggagatgtgatggcttgaagcct

SEQ ID NO: 28482 - DNA, 201 bp, Homo sapiens
gttttggtgaatttcagtgtgggaggtgagatgatttaaagcttcagattttctgttatagtcaaaggcataatttatctgacatcttttttcattctgcmtaaggaattacactagaataatgtttttaaataaaatttgtccacataatgacatttttttcaattctatccaaactaaaatagctccaaagcgtttact

SEQ ID NO: 28483 - DNA, 201 bp, Homo sapiens; identical to SEQ ID NO: 4776

SEQ ID NO: 28484 - DNA, 201 bp, Homo sapiens
ggaagcattggtcatttttggtgactagtcatttttgatgactaagtgtcatttaaagtttcatttcctttaaattaacattttttgtcattccattcaartgcctacttacaatggcaataagaatatgctatgaacacttaaccacccacactagaattttaaatctaagttcttctcgaatgctgttttggtgaattt

SEQ ID NO: 28485 - DNA, 201 bp, Homo sapiens
acacagagaatgcctaggattcaattgttgagaaaaattgatgtaagtctgtttgtctcaaagaaagctatcaggaactacagttttattaacctaaatgwacacctggtttgatgatgactatgtaaatgtatttttagctaattaatttattatttctgcccatcagccaacgagtggataaagaaaatgtgatatata

SEQ ID NO: 28486 - DNA, 201 bp, Homo sapiens
ctgcttaagtcagccaagtccattgccatggttgacaaccaagaatcatgaatggcactgtgacactctgtgggcaggccatcagactgcactgccaatgygcatttgcttgtctatattccccactatcttgttcatcattttactctagtgcaatggctggcacaaagcaagcatgcggtaaatgtttcctgaatgcat

SEQ ID NO: 28487 - DNA, 201 bp, Homo sapiens
atctctccttttcagagccgcctccccttactttacttcacctgctaaagtatccctgaactctgccttctggggttgaaagtgggattttaaataaactrtagatggcttcctttatttggttataattatttaaaatttgaaggaagcattggtcatttttggtgactagtcatttttgatgactaagtgtcatttaaa

SEQ ID NO: 28488 - DNA, 201 bp, Homo sapiens
caacgtaataattgagacactgctggtctcagattcagcaggaatgaagatcagcgaatacatattgttgggtaacttcttaaatctgatggtacattagycagaaatgcttacagtgtattttataataaacttatgttaatggactaacatgaagactctaaatctctcttactgttagtccttatctacagtgccaaa

SEQ ID NO: 28489 - DNA, 201 bp, Homo sapiens
gctggcacaaagcaagcatgcggtaaatgtttcctgaatgcattacttaattccactagtcatcagagttggaaagcaaggaaaacgctcagtggaggacyacagtgcattcctaaaaaaccaatctcaactacagtcgaaagagtcacaactatcaattagaaacatacagcttaatttattcgcctattcatagattta

SEQ ID NO: 28490 - DNA, 201 bp, Homo sapiens
aacctaatcggaatgaatgttggggaaaatgtcccttcaaccaggtgaatacccactagtccttgagacctatctcaaatcacatatcctgcaagaagctytcaccactccccaccatcaatcagccgtaacttccactgtgctcccacatctctattttagtaagcagaaaaaggtattatatatatttatttatgtgtc

SEQ ID NO: 28491 - DNA, 201 bp, Homo sapiens
atgctactttagatgatgagaaaaaatctctcgaatggctcccaaaatgaggtccttgtttaagaggccacaggaagccgccagccgaacgctgataccamagaggaggccaagaagcggactgtggcttggtgacctgtttggtattgccaaattttcagcttttattaaagctgaaacaccttggctgtttaaaacgtt

SEQ ID NO: 28492 - DNA, 201 bp, Homo sapiens
tctctattttagtaagcagaaaaaggtattatatatatttatttatgtgtctattcaaccagatctcaaaatcctctagggaagtatattactatttccarcacctagaagggtgtttggcataaagcaagaaccagtgtttttgaagtggagccactttgctctgcttaaaaggtaccaatggaactgtcctattgtttg

SEQ ID NO: 28493 - DNA, 201 bp, Homo sapiens
tcagctgtgcaaggcgagaatgctactttagatgatgagaaaaaatctctcgaatggctcccaaaatgaggtccttgtttaagaggccacaggaagccgcyagccgaacgctgataccacagaggaggccaagaagcggactgtggcttggtgacctgtttggtattgccaaattttcagcttttattaaagctgaaacac

SEQ ID NO: 28494 - DNA, 201 bp, Homo sapiens
cttttctgtaaatcttaatttattccgaaataaagtttaaaaaaaaatgcaccagtagcaactgtgttgtgagcaattatcacacctgccttacatgtcaygcaagaagaaagctttaccttttaccagtagcagtaattttgtatatagcaaagtgagtctcagtttgtaaaaagggaataattcctactacacaagatt

SEQ ID NO: 28495 - DNA, 201 bp, Homo sapiens
tgaattttcaggagactgctttaagtaataataaaactctggtctcctgtttagccagctctgtgtgaattaaactctttattgcaattcctttgtcttgrtgaatccactgtctgggcagcgggcaagatgaacccgttgggtggttacaatgacaccaggaacccctgggatcaagacttgctcgaagccagccacact

SEQ ID NO: 28496 - DNA, 201 bp, Homo sapiens
ttccgaaataaagtttaaaaaaaaatgcaccagtagcaactgtgttgtgagcaattatcacacctgccttacatgtcatgcaagaagaaagctttaccttktaccagtagcagtaattttgtatatagcaaagtgagtctcagtttgtaaaaagggaataattcctactacacaagattgctgtactaaatgaagcacagt

SEQ ID NO: 28497 - DNA, 201 bp, Homo sapiens; identical to SEQ ID NO: 4785

SEQ ID NO: 28498 - DNA, 201 bp, Homo sapiens
ctcggggggcagaggttgtggtgagccgagatcatgccattgcactccagcctgggcaatgagagcgaaactgcatctcaaaaaaaaaagaaaaaaattgrtaacatggcactttccctctccagctgtgaactctttgagggttgggaatgtctttacctgtattcttggcacatagtatatggacttatgtttgtgaaa

SEQ ID NO: 28499 - DNA, 201 bp, Homo sapiens
tttttttttgagatggagtcttgctctgctgcccaggttggagtgcagtgccatgatcctggctcactgcaacttccaccttagcgattctcctgcctcarcctcccaagtagccgggattacaggcacatgccaccatgtcccggcaaagcctgctttctacaaaaaatatgcttgagcccaggaagcggaggttgcagt

SEQ ID NO: 28500 - DNA, 201 bp, Homo sapiens
acaggactccagatcgagcacttgtactttactgccccaataaaaagctgttaacattttagcttatttttttgagagagggtctcgctttgtcgcccagsctggagtgcagtggcgcaatcacaactcactgtagcctctgcctcccgagcccaaccgatcttcccacctcagcctccctagtagggaccacagatgcac

SEQ ID NO: 28501 - DNA, 201 bp, Homo sapiens
agtagtcaaaaacactttcctgccactaaagtaaccccacaacttaggactctgcagggcctaagggagagagactttgcgtaaaaacatggaaccctacaataccgactttgctccttagtaaagattaataaaactccatgagactgttgtccagaggtcctgcgtccggcccccacccccatcctcaccaacaataaa

SEQ ID NO: 28502 - DNA, 201 bp, Homo sapiens
tcccaaagtgctgggattataggtgtgagctactgtgcctaaccacattttagctttttattacaaaaattttcggccgggcgcagtgactcacacttggraggatgaggcgggtggatcacgaggtcaggagttcaagaccagcctggccaaaatggtgaaaccccatctctactaaaaatacaaaaattagcctggcgt

SEQ ID NO: 28503 - DNA, 201 bp, Homo sapiens
ctggcgtggtggcgggcgcctgtaatcccagctacttgggaggctgaggcagagaattgctttgaacccgggaggtggagattgcagtgagccaagatcgygccactgcactccagcttgggcaacagaacgagactcccatctcaaaaaaaaaaaaaaaaaaattcaaacattacaccaaaatagaacagtattaataaa

SEQ ID NO: 28504 - DNA, 201 bp, Homo sapiens
gtggtggcgggcgcctgtaatcccagctacttgggaggctgaggcagagaattgctttgaacccgggaggtggagattgcagtgagccaagatcgcgccamtgcactccagcttgggcaacagaacgagactcccatctcaaaaaaaaaaaaaaaaaaattcaaacattacaccaaaatagaacagtattaataaactcta

SEQ ID NO: 28505 - DNA, 201 bp, Homo sapiens
ccctgcgacagtgacagcaggtgagcagtggatgtgcggtggttggaatcttggaagtgggtgtcacagttctcgcagtactggagggagggagtaggagmcctgcagagaaagaagaaaaagcattaagggcaggggaaggaaaaggggaagagttgaggcctcagagggggctggcagggtagaataggatcttttcag

SEQ ID NO: 28506 - DNA, 201 bp, Homo sapiens
cactattctagcattttacatatattaacccattgaatcctaacaacaattcttactacccccatttctaagatgagaaaactggaacatgtagacattargttgtttgcccaagtaagtggaatcaggctttaaatccagggagctcatgtttataaccacttgactatactaccctgtcaacctacacatgaggataag

SEQ ID NO: 28507 - DNA, 201 bp, Homo sapiens
tactctgaccagggttcgaaggtcacacttagagcctaaggggaaatggagaagtgcaaagggacgagcagaatggctggcaccacctcaggttagcgcamtgggacgttccagttctcacaccgcccaccccaccccacccaagtccctacgcacggagccaagccgcacctctcccctcatgaggcaggagcccggagg

SEQ ID NO: 28508 - DNA, 201 bp, Homo sapiens
attcaaacattacaccaaaatagaacagtattaataaactctaatatactggtcacccaaattttgtttgttttttaactaaatcgcaagcctcagccctyggcaaattttttgtggcagtccatgggatataaatttatcaagctaggtgtggtggctcatgcctgtaatcccaacactttaggaggctaaggtgggccg

SEQ ID NO: 28509 - DNA, 201 bp, Homo sapiens
gaaggagggagaggtggcctgaggagcggaggggggatgtgtggattccggtgaaagggacctgacaatcgcccccaacccgtgagaaaaggaggagcccrgttcttgcttgagaatgataaacttggaaacccttgggaaaggcgtgggggtcatgcagagacttgtattggtagggagcctgagtcgaggtccctgccg

SEQ ID NO: 28510 - DNA, 201 bp, Homo sapiens
caagggtctctggcgggactgattcgcactaggggcccaacaggcaataaggacccagcggattggccgaggataggccagtcccctgggcagcagcgcckcgccgggactagaggggaacgtgaggagagctgcggaaagagatccagcctggctccctcctttccccgccctaagtcagcctcttcacccagtgagcac

SEQ ID NO: 28511 - DNA, 201 bp, Homo sapiens
tcttcttttctttctctttctttctctggcaggttcagtctgagatctctgggagtcaggagcgctgctctcatccccaatcagggcctcatagaaagctmgggctgcagccccatccagggtggactctggcttctcgggctgtggctgctgctgcccatccttccagaggtcgctggggtcagtggctggggtgaaggt

SEQ ID NO: 28512 - DNA, 201 bp, Homo sapiens
tttttttttttttgagatggagtcttgctctgctgcccaggttggagtgcagtgccatgatcctggctcactgcaacttccaccttagcgattctcctgcvtcagcctcccaagtagccgggattacaggcacatgccaccatgtcccggcaaagcctgctttctacaaaaaatatgcttgagcccaggaagcggaggttg

SEQ ID NO: 28513 - DNA, 201 bp, Homo sapiens
gtgagactctgtctcaaaaaaaaaaaaaagaagctgggacactatggttggggtgatgctcattctttcctccttgccaccaccacctctgcaggaaagaygggctctgtgtgccccggaaatggatctaccacctgactgaagggagcacagatctcagaactgaaggttggttcttcccagccctcaccctcccttgag

SEQ ID NO: 28514 - DNA, 201 bp, Homo sapiens
ccccatcctcaccaacaataaacaccagcctctttctgaaaccactttcccaccccgtaagacataccagtaggaaaaaaaaatcagcctggccctttaaktcttccgcgatcccatttcggagtttcctcttcccaaacaaaaatagatgggtcactccctagaagatctcggggagagtctcctatacgtgttgctgtg

SEQ ID NO: 28515 - DNA, 201 bp, Homo sapiens
tcctcccatttcaacattccccctggatcctctaccacctaaactcccagctggacggtgtcagtaagaacagagtggcagtaactctcactttgtagtgktatatttaggatttgatgtgacacagttatttattgctgagtgagcaaacccctagcccccaagtggggactacaggcttcagtgcttcccccacactgc

SEQ ID NO: 28516 - DNA, 201 bp, Homo sapiens
ctgatgctccttctgccactgcttctgctgctggtgccttcattattcttcttttctttctctttctttctctggcaggttcagtctgagatctctgggastcaggagcgctgctctcatccccaatcagggcctcatagaaagctcgggctgcagccccatccagggtggactctggcttctcgggctgtggctgctgct

SEQ ID NO: 28517 - DNA, 201 bp, Homo sapiens
ctttgcaaacattactattaattatagcaaatatatactttggacttaccatgtgcaagtctttgctaagggctttatgtgcattatttcatttaatcctrtaagattgatgatttgccaattttacagatgaaaaaacagacatagcagttaggggttggtggtgttttgtttgtttggagacagagtctctgtcgccca

SEQ ID NO: 28518 - DNA, 201 bp, Homo sapiens
gatcccgctcccaagccctgtctttctcctccctccttctctcctccctccagctcagtgtggccacccgagggggtctctccctcccagccacagctcgkgtatcccaagctgggaaatgtgtcactcggggctggggtgctgatctgtagcctagtccttcctggtccctcttgaggacagtggggatgggattggcac

SEQ ID NO: 28519 - DNA, 201 bp, Homo sapiens
ctcccatttcaacattccccctggatcctctaccacctaaactcccagctggacggtgtcagtaagaacagagtggcagtaactctcactttgtagtggtwtatttaggatttgatgtgacacagttatttattgctgagtgagcaaacccctagcccccaagtggggactacaggcttcagtgcttcccccacactgcct

SEQ ID NO: 28520 - DNA, 201 bp, Homo sapiens
agcaaatggagtccgagtggacagaaagacaagaccctgaccgtggggaatttaaaggccggccagcgtgcttccgaaggccgggggtggaggcattacckcctctccgtgccctcttctcttaacctgccctgggccaagggcctcggccccgcgaaactgcgagtcctccagaaagacacatcgctgttggggtgtcca

SEQ ID NO: 28521 - DNA, 201 bp, Homo sapiens
acccgggaggtggagattgcagtgagccaagatcgcgccactgcactccagcttgggcaacagaacgagactcccatctcaaaaaaaaaaaaaaaaaaatkcaaacattacaccaaaatagaacagtattaataaactctaatatactggtcacccaaattttgtttgttttttaactaaatcgcaagcctcagccctcgg

SEQ ID NO: 28522 - DNA, 201 bp, Homo sapiens
ttggcaattcttactgcctattatttgagaacttattacccaccagaaactaagtgctttgcaaacattactattaattatagcaaatatatactttggamttaccatgtgcaagtctttgctaagggctttatgtgcattatttcatttaatcctataagattgatgatttgccaattttacagatgaaaaaacagacat

SEQ ID NO: 28523 - DNA, 201 bp, Homo sapiens
cagcccgtctctcacgaagacagagcctattgaccaaaaacttcaggatctgcatctgagcagatcccaggaaggggaagtcaaagggcccaggtcagagrcccaagttcagacttcagcagcagactagggtcagactttaccaaagtcagaactcgaggttcatgtaagtccttagatcccgctcccaagccctgtctt

SEQ ID NO: 28524 - DNA, 201 bp, Homo sapiens
gggttggtggtgttttgtttgtttggagacagagtctctgtcgcccaagctggagtgcagtggcacaatcagggctcattgcagcctcgacatcccaggcycaagcaatcctccctcctcagcctccctagtagctgggactacaggcgtgtgccaccacatcggctaatttttgtattttttgtagagacagagttttgc

SEQ ID NO: 28525 - DNA, 201 bp, Homo sapiens
caccatgtcccggcaaagcctgctttctacaaaaaatatgcttgagcccaggaagcggaggttgcagtgagctgaaatcacaccattgcacaccagcctgrgcgacagagtgagatgagtgagactttgtctcaaaaaaaaaaaaaaaaaaaaaagggacaaattgccttccttcctacttaacagtgagggatccaggct

SEQ ID NO: 28526 - DNA, 201 bp, Homo sapiens
attagtcataatgactatagctaacattcatgtattgcatactatgcggcatgcactattctagcattttacatatattaacccattgaatcctaacaacrattcttactacccccatttctaagatgagaaaactggaacatgtagacattaggttgtttgcccaagtaagtggaatcaggctttaaatccagggagctc

SEQ ID NO: 28527 - DNA, 201 bp, Homo sapiens
ccccccaggtccccaagctttacttttgtggggcacgacgagaaagtccgcagccccaaacagtgagtttctgagggcgagtcgggccggggccggcctakgtgggagggagccgagcaccccgaggagccgccaccgctgtcgcccgggggaccgtactacgcctgcgtgcgtcgcactacggatgcgtggacacttaag

SEQ ID NO: 28528 - DNA, 201 bp, Homo sapiens
caccccgaggagccgccaccgctgtcgcccgggggaccgtactacgcctgcgtgcgtcgcactacggatgcgtggacacttaagcatcgccccaccccctyccccctctggcggcgttcacgtctgtgcgcgcgcttgagcgctagaagattgaggtggctaccgtaaatgcctgaaaaacagtcaccagctgggactcta

SEQ ID NO: 28529 - DNA, 201 bp, Homo sapiens
ctccaccccaggagagttttcaaaggtagagaggaccctttggtctttattcaccaccatcatacttttttttttttttgcttttaaaaagtggaggtggaaaaaaaaaaaaaactgaaggtgggagaaaagtaaaagcaaaaataacagctggtgaatccaagagcagtgccctcactgtccataaacacaaacacccta

SEQ ID NO: 28530 - DNA, 201 bp, Homo sapiens
tctgtgcgcgccggaccgccaaaccgagattagcaaggaccaggaccttaatataaacccagctccccattttcccgggtttctcatgcttccctaaactyggtcgccccctacagccccctgcccctgggttcttttccacatcccccaccactcctccatttcgcatccaagacttcatgaaaggctttcccagaaaag

SEQ ID NO: 28531 - DNA, 201 bp, Homo sapiens
ccgtactacgcctgcgtgcgtcgcactacggatgcgtggacacttaagcatcgccccaccccctcccccctctggcggcgttcacgtctgtgcgcgcgctkgagcgctagaagattgaggtggctaccgtaaatgcctgaaaaacagtcaccagctgggactctaccactgcctcgagaggggctatggacggtcgtatgg

SEQ ID NO: 28532 - DNA, 201 bp, Homo sapiens
atataaaaaactagctgggcatggtggtgggcacctgtagtcccagctactcacgaggttgaggcaggagaatggcgtgaacccgggaggcagagcttgcrgtgagccgagatggcgccactgcactccagcctgggcaacagagtgagactctgtctcaaaaaaaaaaaaaagaagctgggacactatggttggggtgat

SEQ ID NO: 28533 - DNA, 201 bp, Homo sapiens
gtgcctaccacccggcatgagcaagacaagggggtgggtggtgggagagtggggaagtgtgggaaagaaaagtgtagacaaatgggtggaacaaagaagtytaaagtttagatttgggggctagagttctggtcccagttcaactaagtgtacaagcttgataatcgtgggccttcctatcacactggcctcttccagcaa

SEQ ID NO: 28534 - DNA, 201 bp, Homo sapiens
cctcttccagcaaaaccctacccattctcatctctagaggccttgacttcccttatcaccctgcattataatatttgataacatgggccgggagtggtggytcatgcctgcaaccccagcactttgggaagccgaggccggcggatcacctgaggtcgggagttcaagaccagcttggccaacatggagaaaccccgtctc

SEQ ID NO: 28535 - DNA, 201 bp, Homo sapiens
gagggggtctctccctcccagccacagctcgggtatcccaagctgggaaatgtgtcactcggggctggggtgctgatctgtagcctagtccttcctggtcyctcttgaggacagtggggatgggattggcacggccctcaccccggggtcccagccccattcctggctcccagccccccctcagcagcagtttgaagcccg

SEQ ID NO: 28536 - DNA, 201 bp, Homo sapiens
aaaagtgaataaaccacaaatggttgatttatttctgactctcagcccgtctctcacgaagacagagcctattgaccaaaaacttcaggatctgcatctgrgcagatcccaggaaggggaagtcaaagggcccaggtcagaggcccaagttcagacttcagcagcagactagggtcagactttaccaaagtcagaactcga

SEQ ID NO: 28537 - DNA, 201 bp, Homo sapiens
ggacttatgtttgtgaaatcagtgaattggctgtagtcagggaactcctcctgggggaagtgagacttgcacgaagctgggcaattcttggtccagggggsttgaaagaataggtgggggactcccaggagggtctgggacctgaaagtgaacccagattggcagggaggtgaccttatcatgccacctggagaggctgcc

SEQ ID NO: 28538 - DNA, 201 bp, Homo sapiens
agggttgggaatgtctttacctgtattcttggcacatagtatatggacttatgtttgtgaaatcagtgaattggctgtagtcagggaactcctcctggggkaagtgagacttgcacgaagctgggcaattcttggtccaggggggttgaaagaataggtgggggactcccaggagggtctgggacctgaaagtgaacccag

SEQ ID NO: 28539 - DNA, 201 bp, Homo sapiens
taccagcgctttctcctctacagtgagtagggatacaaggcaggaagggttggagggaaacaagggagggcaggagaactcctcactctgggtcctatgayaccctcccaggaagagctaggtgcttccaggggttttgactggcctgaccccaccttgcccttccagatcgctcaccacatcctcccgaaaagtgtgtgg

SEQ ID NO: 28540 - DNA, 201 bp, Homo sapiens
gtagacaaatgggtggaacaaagaagtttaaagtttagatttgggggctagagttctggtcccagttcaactaagtgtacaagcttgataatcgtgggccytcctatcacactggcctcttccagcaaaaccctacccattctcatctctagaggccttgacttcccttatcaccctgcattataatatttgataacatgg

SEQ ID NO: 28541 - DNA, 201 bp, Homo sapiens
tgagtgctagagataggctggtcccacttgagggaatccattcttttgctccctagctgctcaacttggggctcctccttgcttggttcggaagcagcccyagaaaccctcaatgcccccgagtccttagtcttgggatgccccacatcttccatggtttctggggcactatcccagtcacttcctgaattctccgaggag

SEQ ID NO: 28542 - DNA, 201 bp, Homo sapiens
ggtccaccagaaggcatcccgggcgttgatattccccccagctcctcctgcctcatgcggttccagcagtctcctaagttctggcaggtccccctcctggrctgccctcagtatccggtgagtcatcttatcctcagcctcaagggatctcccttgtccatgtcttcctgatgctccttctgccactgcttctgctgctgg

SEQ ID NO: 28543 - DNA, 201 bp, Homo sapiens
tcaccacatcctcccgaaaagtgtgtggaggaattcaagtccctgacttcctgcctggactccaaagccttcttattgactcctaggaatcaaggtaaggkgttaaaatctcataaaacaggattaggactcaccaagtcttctggtgttacagggtgaaagaggctcgtgtgatgtcaccagagggatgtggctaagagc

SEQ ID NO: 28544 - DNA, 201 bp, Homo sapiens
cccagaaactggggaggcagtgctccatccaataaagcgggcaggaaggtggccccaggtcctaggtgctcctggatcgtgtagtctttaactgctgcccyaagggacctcaaggaataggaattctctttgttaggaggtggaatgaaagtgtccagcaaactccagccagcagcgttcgtcccttgatttagagggcta

SEQ ID NO: 28545 - DNA, 201 bp, Homo sapiens
attgcagcctcgacatcccaggctcaagcaatcctccctcctcagcctccctagtagctgggactacaggcgtgtgccaccacatcggctaatttttgtaytttttgtagagacagagttttgccatgtagcccaggctggttttgaactcctgggctcaagccatccgcccaccttggcctctcaaagtgctgagattac

SEQ ID NO: 28546 - DNA, 201 bp, Homo sapiens
ctacttctatggtattatccttaactccatctaccagtgccctgagcacagtcaactgacaactctgggcgtggatgggaaggaggtatggactgagattrggggaagcctatggtggaggctctgagggacttgggtggatggcctaggatgactggagaccatcttgggaaaggaagagaggaagggggtgtgagtgtt

SEQ ID NO: 28547 - DNA, 201 bp, Homo sapiens
gcacacatcagtggggtccaccagaaggcatcccgggcgttgatattccccccagctcctcctgcctcatgcggttccagcagtctcctaagttctggcargtccccctcctgggctgccctcagtatccggtgagtcatcttatcctcagcctcaagggatctcccttgtccatgtcttcctgatgctccttctgccact

SEQ ID NO: 28548 - DNA, 201 bp, Homo sapiens
tcaagtccctgacttcctgcctggactccaaagccttcttattgactcctaggaatcaaggtaaggggttaaaatctcataaaacaggattaggactcacmaagtcttctggtgttacagggtgaaagaggctcgtgtgatgtcaccagagggatgtggctaagagctgtgatgtcacctgagggaggcaggatgggttct

SEQ ID NO: 28549 - DNA, 201 bp, Homo sapiens
agcggattggccgaggataggccagtcccctgggcagcagcgccgcgccgggactagaggggaacgtgaggagagctgcggaaagagatccagcctggctycctcctttccccgccctaagtcagcctcttcacccagtgagcacaaaactgtattgcccagactcccgggccccgaacgccatacctggcttccgcttcc

SEQ ID NO: 28550 - DNA, 201 bp, Homo sapiens
ttgttggagggagaagctggagacttccagctccagctcccactcaagataataaagataatttttcaatcctcatctcattctggggtttgtctccagaygtcattcccactcctcccatttcaacattccccctggatcctctaccacctaaactcccagctggacggtgtcagtaagaacagagtggcagtaactctc

SEQ ID NO: 28551 - DNA, 201 bp, Homo sapiens
tccctagaagatctcggggagagtctcctatacgtgttgctgtgtagcttccgtaccgcaaaatggcgccattctaatcagaagagttgacacaatcaaawagccacacggcacgaagacgcatgcgtggcgacaacaacaacaaaaaccacaacccacattacttgagggctcgggcgtgcgcaaagctccgggttcagt

SEQ ID NO: 28552 - DNA, 201 bp, Homo sapiens
tgacaaggcctgggtcaccaccagagagtcctctctgcgtttccggatttccttcccagcaggcagcaccccaagtttcactcaccaaggccacaccccamggtgtcccagaaactggggaggcagtgctccatccaataaagcgggcaggaaggtggccccaggtcctaggtgctcctggatcgtgtagtctttaactgc

SEQ ID NO: 28553 - DNA, 201 bp, Homo sapiens
aaacctgtggaatgccgagaagccgtgtaatgaaataacgtcacgcctgcccctcaccattactctgaccagggttcgaaggtcacacttagagcctaagrggaaatggagaagtgcaaagggacgagcagaatggctggcaccacctcaggttagcgcactgggacgttccagttctcacaccgcccaccccaccccacc

SEQ ID NO: 28554 - DNA, 201 bp, Homo sapiens
tggtgccacctgaatccacatgatcccatctgagtttgggactggcccctccagcctccagtctcccagactcttgagtgctagagataggctggtcccasttgagggaatccattcttttgctccctagctgctcaacttggggctcctccttgcttggttcggaagcagccctagaaaccctcaatgcccccgagtcct

SEQ ID NO: 28555 - DNA, 201 bp, Homo sapiens
ccagccccccctcagcagcagtttgaagcccgggctggagatgggcaccccaagtggaaggttgggaggctgaggaccctgcgacagtgacagcaggtgarcagtggatgtgcggtggttggaatcttggaagtgggtgtcacagttctcgcagtactggagggagggagtaggagacctgcagagaaagaagaaaaagca

SEQ ID NO: 28556 - DNA, 201 bp, Homo sapiens
ctgaaaccactttcccaccccgtaagacataccagtaggaaaaaaaaatcagcctggccctttaagtcttccgcgatcccatttcggagtttcctcttccyaaacaaaaatagatgggtcactccctagaagatctcggggagagtctcctatacgtgttgctgtgtagcttccgtaccgcaaaatggcgccattctaatc

SEQ ID NO: 28557 - DNA, 201 bp, Homo sapiens
ggctcacgcctgtaatcccaacactttgggaggcagaggcgggcagatggctttgagctcaggagtttgagaccagcctgggcaaaatggcaacgcctgctttttttttttttttttttgagatggagtcttgctctgctgcccaggttggagtgcagtgccatgatcctggctcactgcaacttccaccttagcgattct

SEQ ID NO: 28558 - DNA, 201 bp, Homo sapiens; identical to SEQ ID NO: 9824

SEQ ID NO: 28559 - DNA, 201 bp, Homo sapiens
gaatcccttgaactcggggggcagaggttgtggtgagccgagatcatgccattgcactccagcctgggcaatgagagcgaaactgcatctcaaaaaaaaargaaaaaaattgataacatggcactttccctctccagctgtgaactctttgagggttgggaatgtctttacctgtattcttggcacatagtatatggactt

SEQ ID NO: 28560 - DNA, 201 bp, Homo sapiens
tgaatgagacaggccagggttaccagcgctttctcctctacagtgagtagggatacaaggcaggaagggttggagggaaacaagggagggcaggagaactmctcactctgggtcctatgacaccctcccaggaagagctaggtgcttccaggggttttgactggcctgaccccaccttgcccttccagatcgctcaccaca

SEQ ID NO: 28561 - DNA, 201 bp, Homo sapiens
aagttcaggtatgaggggaggaatgccctgtgtgatccatcccaaatttattaaagttctctgtattgggtttggaggcctcagtcctagctaatataaartataactttattacctggttttttgctttttgttccttttgttcatgaaactcctctggtaatatcaatatgttccctttgttcatgaaactctgttggt

SEQ ID NO: 28562 - DNA, 201 bp, Homo sapiens
cactgctatattctcttttttcagtttttgcttttatttttgtttttctgtcacactgggctgctgctatcctgtttcagaactatagtgaaaatgggtasactagctgctctaacaagggatatgtgcttttcctagagagcagtctttgagatgtttgaccagtggcttccttccagtgcccccttgacctgcgccatg

SEQ ID NO: 28563 - DNA, 201 bp, Homo sapiens
caaaacttagctgggtgtggtggcatgcgcctgtagtcccagctacttgggactacaagcgattcaaggagaattgcctgaacccaggagccagatgctcyagtgagccgagatcacaccactgcactccagcctgagtgacaaagcaagactccatcctaaaaataagtaaataaataaaatagaaaattaagtactcaa

SEQ ID NO: 28564 - DNA, 201 bp, Homo sapiens
tttagtagagacgggtttctccatgttgttcaggctggtcttgaactcccgacctcgggtgatccacacacctcggcctcccaaaatgctgggattacagrcgtgagccaccgcgcctggcctgggccaggcctttctcataaagtgttgtttgagtggatatcagaaggaagtgaggacacaagctattcaggtaagtgg

SEQ ID NO: 28565 - DNA, 201 bp, Homo sapiens
accaccacgcccagctgattttctatttttagtagagacgggtttctccatgttgttcaggctggtcttgaactcccgacctcgggtgatccacacacctyggcctcccaaaatgctgggattacaggcgtgagccaccgcgcctggcctgggccaggcctttctcataaagtgttgtttgagtggatatcagaaggaagt

SEQ ID NO: 28566 - DNA, 201 bp, Homo sapiens
tgattttctgctgtaccatatatagaagaacaagaaataggaatgtcattctttggctgcagtgttggctctgtcctgctgtccagagaacttcttctggkgcctatatagagaaaggttgccagtcctgagcccactcagggacacattctctgcctattcagatacagcagagagcgttgcccagtgttgcctactcag

SEQ ID NO: 28567 - DNA, 201 bp, Homo sapiens
gatgtgcatattttagggtcttgagtttttttgactgggaggaccatgtttcattaacgcttggatatatttttgcctataatatagtttaagcgtttagyaaatgttttagtgaatccttaatcccaacaagaataaagggtgttaaaacactttcacgaatgtgcttatattattgtcatataccattgattgggagat

SEQ ID NO: 28568 - DNA, 201 bp, Homo sapiens
ctaactgggtttacttctgaaaccagctcctccttagacttcacctgtgaccctaggcaaatcacttgacttctttagacacaggatttgcgggagggcargctacctctgtctgaggctgacagtgtgagttttctagtagatagcgcatgaaatgggaatagtattgcaagtgatacaaacatatataatatatataat

SEQ ID NO: 28569 - DNA, 201 bp, Homo sapiens
ttttacttgagatatgattcacataccacacatttcacctgcttaaagtgtacaattcagtggtttctttggtatattcagagttttgtgaccatcaccaygatctactttgagaacattgttgtcaccccaaaaagaaaccctgtacctattagccatcactccagattctctctatgcccccagctttaggcaatcatt

SEQ ID NO: 28570 - DNA, 201 bp, Homo sapiens
ccctcacttcagatgccagccccaatattgaatcctcagattacctacacttttgtctcacttggctacaatttttgggattcccagcacttccccccaargttggtaatttgctagagtgactcacagaactcagaaaaatgctatagttactattagtttattttaaaggataaaaatgagcagtcagatgaagaagta

SEQ ID NO: 28571 - DNA, 201 bp, Homo sapiens
actttctttctttctcccctttccctgccaaaaacaaaaaaccaacatacaaccttaccttgtagtatctctggccatatctcttaagggggccggcagtyggtatctttttcattataggcaagaagagaggcggaggcgatccttccaggattacactgggcagaagatcacccttgaggctgtcttgaacactacctg

SEQ ID NO: 28572 - DNA, 201 bp, Homo sapiens
cgagtacaaagcctctgtccccatggagttggggtgtgtcaccctcttggcacatggatgtgttcaccaactctccaaactccattgcttaggggtttatrtggaggatctgttatatagacatggttgattaaattattggccttcagtgatagagctcagtctccagcccctctccccttcccggaagtcagagggtag

SEQ ID NO: 28573 - DNA, 201 bp, Homo sapiens
ggagtgcagtggcacaatctcggcttactgcaagctccacctcctgggttcacgccattctcctgtctcagcctcccaagtagctgggactacaggcaccygccaccatgcctggctaattttttgtatttttagtagagtcagggtttcaccgtgttagccaggatggtctcgatctcctgacctcatgatctgcctgcc

SEQ ID NO: 28574 - DNA, 201 bp, Homo sapiens
gatagcatttagcatcgttgtcttttcacctcattgttaatcccgtcattaccttttatgcctcatatttgtttagtgcttacagtttataaaatacattsctgtttttgtttctttttatcattatacaattctatgagatagccagaacaggaattattatcccaccattttacacatgagtaaaatggagcttcagag

SEQ ID NO: 28575 - DNA, 201 bp, Homo sapiens
tcctggttgtgttagtgtactatagttttccaaaatgtcaccattggagaaaactggataaagtgtacataaaacctctgtattctttctttctttttttyttttgagacggagtcttgctctgttgcccaggctggagtgcagtggcacaatctcggcttactgcaagctccacctcctgggttcacgccattctcctgt

SEQ ID NO: 28576 - DNA, 201 bp, Homo sapiens
agcatcctggttgtgttagtgtactatagttttccaaaatgtcaccattggagaaaactggataaagtgtacataaaacctctgtattctttctttctttyttttttttgagacggagtcttgctctgttgcccaggctggagtgcagtggcacaatctcggcttactgcaagctccacctcctgggttcacgccattctc

SEQ ID NO: 28577 - DNA, 201 bp, Homo sapiens
agttgactttttttttttaatttcttttttttgagacagggtttcattttgtcttctaggctggagtgcagtggtatgatcacggctcagtgcactctccrtctcttgggctcaagtgatcctcctgcctcagcctcctgagtagctgggacaataggcaggtgccactatgccgagctaatttattttattttttgtatt

SEQ ID NO: 28578 - DNA, 201 bp, Homo sapiens
atacaattccatcacactgctacctgactgataacagttgtaaaacatcattgattatgagaagcactccaatttcagagagattaaagtgagaggaaaaraaagtgcatcttagaatcaatgaaacacaataaatgtcagtttactgacatgagccaggagtggtggcatgcacctgtaattccagctacttgggaggct

SEQ ID NO: 28579 - DNA, 201 bp, Homo sapiens
agatcctacaggtgggaaatggcagagctaggattagaagccacatctttcactccaaagcatgttcactttctatacctatactgttattttttttttttaaagcttttttagagatgggtcttgctatgttatccaggctggattcaactcctggcctcaggccacgctccagcctcagcctctggagtagctaggact

SEQ ID NO: 28580 - DNA, 201 bp, Homo sapiens
tcttagaatcaatgaaacacaataaatgtcagtttactgacatgagccaggagtggtggcatgcacctgtaattccagctacttgggaggctgaagtagtragatcacttgaggccaagagttcggggccaggctgggcaacatagcaagaccccactgatggcgatggaggcctgtctagagtggctgctgcaaagatgc

SEQ ID NO: 28581 - DNA, 201 bp, Homo sapiens
aggatttgtgcacatgctgttttctttttagtctgtgctgctataacaaaatacctgagattgggtaatttataaagaacagaaatttatttctcacagtwctggaggctgggaaatctaagatcaagttgtcagcagatttggtgtctagtgaagactactctgtttccaagatggcaccttcctgctgcatcctctgga

SEQ ID NO: 28582 - DNA, 201 bp, Homo sapiens
ctttactgggatccctgcttcatcgtagctcctctccagtctgttcttcacattgtagctagcataagatttttgtttttgtttttgttttttaattcttytttaaaaattgagctggggtctcactatgttgcccaggctggtctcaaactcctgggcttaagtgatactcccacttcagcctcccagagtcctggggtt

SEQ ID NO: 28583 - DNA, 201 bp, Homo sapiens
ctcattttatgttgtctggaatttaatgacatcgaactcttccccaccccacaggacattcatctctttctgtctgagcacaggttttcttgttagtatasttgccatagctgccagtgcctgaaagtcccattctaatttgggcatatgtgacactttggggactgtgtgggattaaaggcctgtgaccttccagcagtc

SEQ ID NO: 28584 - DNA, 201 bp, Homo sapiens
ctccttcttcttctatatcctttagaccagaatgtgttcccccctctttctctacctgtgcttggcatatagtgaggctcagttcactcatttaaaaaaaactgagtacttgtagtataccagaccccaggaacacaaaatcaaatgagaaatggtccttggtttcatgtttgaatgaatggatccagacgttgctcatcc

SEQ ID NO: 28585 - DNA, 201 bp, Homo sapiens
ggaggctgaggcaggaggatcacttgagcccaggtggtggaggctgtactgagccagtggtcaacacagagagattgtctaaaaacaaaaaaacaaaaaaagagagagagagaagcaatgtgggttccacagtatgtggtactgcaatttaaaatagggtggtcaggaaaatcctcactgaaaaaattacatttgggcaaa

SEQ ID NO: 28586 - DNA, 201 bp, Homo sapiens
ctgatatgctcacttgtcaaatgggagaagtatactacccataatccccaaatctcttcagtacttcccagcattttcatatttatttatttatttatttwttttttggggaaggagtcttgctctgttgcccaggctggagtacaatggcgtgatctcgtctcatcgcaaactccgcctcctgggttcaagcgattctcc

SEQ ID NO: 28587 - DNA, 201 bp, Homo sapiens
gtagtgcgatcatggttcactgcagcttcaaactccttggctcaagtgatcctcctgcctcagcctcctgagtagccaggactacaggcatgaactagcawgccatgctaatttttttagtttttgtggagatgaggtcttgctacgttgcctaggctggtctcaaaatcctggcctccctccttggcctcccaaagcact

SEQ ID NO: 28588 - DNA, 201 bp, Homo sapiens
tccaggagtgtgccaccacacccagctaatttagtttttgtagagatggagtcctgctatgttgctcaggctgatcttgaactcctggcctcaagcagtcktcccaccttggcctcctaaagtgctgggattacaggcatgagccaccacatcgagccccattttatgtatataccacattttgcttatccatttattttt

SEQ ID NO: 28589 - DNA, 201 bp, Homo sapiens
gtgatccaggagtgtgccaccacacccagctaatttagtttttgtagagatggagtcctgctatgttgctcaggctgatcttgaactcctggcctcaagcwgtcttcccaccttggcctcctaaagtgctgggattacaggcatgagccaccacatcgagccccattttatgtatataccacattttgcttatccatttat

SEQ ID NO: 28590 - DNA, 201 bp, Homo sapiens
ggagtgcagtggcacaattatgtctcactgcagcctcaacctcctgggctcaagtgatccaggagtgtgccaccacacccagctaatttagtttttgtagwgatggagtcctgctatgttgctcaggctgatcttgaactcctggcctcaagcagtcttcccaccttggcctcctaaagtgctgggattacaggcatgagc

SEQ ID NO: 28591 - DNA, 201 bp, Homo sapiens
atacacacacacactaccaccatcaccagtaccaccaaaacccttgtttctacctttctatcatatattattacctattaatgtcagcaatactctcccartctcccaagaaagaaaccaatgtcatttattttcctctccttttccatcccacatctagtcagtcaccaagtcctggcagtggtgccttttaagtgcata

SEQ ID NO: 28592 - DNA, 201 bp, Homo sapiens
gtttcaccatgttggccagggtggtctcaaactcctgacctcaagtgatccgcctgccttcgcctcccaaagtgttgggattacaggcgtgagcctccgcrcctggcaaacttccgttttttcattttcgaagtgggattgttgtgatctttgatgacaatgttcttgcagagggatgcctgactcccaaaaataagatat

SEQ ID NO: 28593 - DNA, 201 bp, Homo sapiens
ctggctgggtttgcacaccttggggtggtgctgccatgccagcttcctaccatcttggccccctctggactttgggtgccagtgagcacaggagggaggcyaaaggggtgctgagggtggctcagcatgggcctgcaggtgcccctgggcacagaacaactgggcgtcatggacaacatgattgatggtgacaagaggcag

SEQ ID NO: 28594 - DNA, 201 bp, Homo sapiens
gcacaccttggggtggtgctgccatgccagcttcctaccatcttggccccctctggactttgggtgccagtgagcacaggagggaggccaaaggggtgctragggtggctcagcatgggcctgcaggtgcccctgggcacagaacaactgggcgtcatggacaacatgattgatggtgacaagaggcagacaggctcctgg

SEQ ID NO: 28595 - DNA, 201 bp, Homo sapiens
agcaattgacttccttacagtgtatcttagtttctctgcccataaagagggaagattattaagtctcagcctgaaaggactgagttagaaaataactctgrtctgatcaggtcttaacatctttggctcaggtaggtagattctaatttgagctggtttcccagatgtcatgttctcagaatacttcagccaccactgagt

SEQ ID NO: 28596 - DNA, 201 bp, Homo sapiens
ggtcaactgaggtttgaaaatattaaagggaaaattctagaaacaattcataagctttaagttgcagttgcagtgtgatgaaatcttgtgctgtcttgccrcattccatctgggacttgaatcatccctttgtccatccacactgtgtacgctacccacccattagtcccttagtagccttctcagtgatcagatcgactg

SEQ ID NO: 28597 - DNA, 201 bp, Homo sapiens
ttgctctctctttaggatttgtgcacatgctgttttctttttagtctgtgctgctataacaaaatacctgagattgggtaatttataaagaacagaaattyatttctcacagttctggaggctgggaaatctaagatcaagttgtcagcagatttggtgtctagtgaagactactctgtttccaagatggcaccttcctgc

SEQ ID NO: 28598 - DNA, 201 bp, Homo sapiens
agtcccttagtagccttctcagtgatcagatcgactgctgttgcagtgcttgtgttccaagtaacccttattttacttaatggccccaaagtgtaatactratgctggcaattttgatatgccagagagaagccataaagggcttcctttaagtcaaaaggtaaaagttctcaacttaataagggaaaaacagggacccct

SEQ ID NO: 28599 - DNA, 201 bp, Homo sapiens
caggcgccacgcaattggttccaaattagtccttcctccacaacttccagcttggaagaaccaatcggctttcaatatttccatttgcaccgccctcggayagtctcttgttattgggcatatctttctgacgtcatgagagtgcgataccaggattggtggacggagctggcgaccgccctaggcgcgctgggtcttgtg

SEQ ID NO: 28600 - DNA, 201 bp, Homo sapiens
atgatttgcaaagatttttatgtaacatacttgaaatgacaaagttatttaaatggagaacaaattatttaatggttcacaaggattaagaaggggaaggmagtagcaatatgaaggatccttgtggtgagggacctgttctgtatcttaactgtggcagtgtatacatgaatctacacatgtggtaaaattacgtggaac

SEQ ID NO: 28601 - DNA, 201 bp, Homo sapiens
ttctcaacttaataagggaaaaacagggacccctagaggggggactgaggaagggggagaatggttgaaaaatttaactttgagtactatgctgagtactwctgtaacgggatgattaatatcccaaacctcagcatcatgcagtgtacacagataacaaacttgaacatatgtacccccggaatctaaaataaaggttaa

SEQ ID NO: 28602 - DNA, 201 bp, Homo sapiens
gccgctctcaggcgccacgcaattggttccaaattagtccttcctccacaacttccagcttggaagaaccaatcggctttcaatatttccatttgcaccgycctcggatagtctcttgttattgggcatatctttctgacgtcatgagagtgcgataccaggattggtggacggagctggcgaccgccctaggcgcgctgg

SEQ ID NO: 28603 - DNA, 201 bp, Homo sapiens
gtaggagctctaaacagaaagggcaggtattttgagtttcaggcatctgcaggcatccatgtgcatctctctctctctctctctctctctctctctctctstgtgtgtgtgtgtgtgtgtgtgtgtgtgtgtgtgtgtgtgtgtgtgtgtgaaagagagagtgggagaatgagaatagaggtggataaatttcccaagcaa

SEQ ID NO: 28604 - DNA, 201 bp, Homo sapiens
aattagagtggcgtgtaataaaaatgagtgttgttgcacttagtccatggaattgtggaacggttaggctgtttggatgagtcagggcatagtacaatacytgaggtatagtgggtgggtgttcagtaaatctcactgaatgaatgaatgaattatagcctcagttctaccattaactggcttcttggcaagtctcctagt

SEQ ID NO: 28605 - DNA, 201 bp, Homo sapiens
gttgaatagatggtggtaccattcactcactatcacggaatccctcaagctggatagggaacactagaagatgattagagaccagtttttttttgtttttkttttttttttgagacaggttcttgctctgtcgcccaggctggagtgtggtggtgcaaccttggctcactgcaacctccacctcccaggttcaagcaattc

SEQ ID NO: 28606 - DNA, 201 bp, Homo sapiens
cctcagcctcccaaagtgctgggattacaagcgtaagccaccatgcccggccgagatggatttttttatgaggaagtgatagtacactaaaccttcatggmcaaaaaaagtatctcaaaatagttgtctcccttttgttctgattccatgtggaagcaatttctgatcactaatgatcactaatgtaattgttcaggtatt

SEQ ID NO: 28607 - DNA, 201 bp, Homo sapiens
cccagcataacatgttcattagtataaaacatgagtttagaacttttggttcgtaacccattcttcatgttttgtcttggagagttaattcaagtgctccrtccgatgtctccattaaaaaatgagaatgaaagtttttatctatttccatcctaacattgaagtgagtaatgatgatatttggttaagtataaggcactg

SEQ ID NO: 28608 - DNA, 201 bp, Homo sapiens
accatttggcttccttcatccttagtgtctaagatggtgcctggcatatagttgacaaataggaaaaatatccagagactcaggaaaggactgtgtttggstactaactccaatccttccctaacttagagtagtgccagggccagagccctgtacctcccactatccggtctggcatcatagagccagacccatggcctc

SEQ ID NO: 28609 - DNA, 201 bp, Homo sapiens
ttattgggcatatctttctgacgtcatgagagtgcgataccaggattggtggacggagctggcgaccgccctaggcgcgctgggtcttgtgggtggaaacrcgctggctgactggggtcggcgtttagttcagcgcagcgactcggggacctggagctgacgcctagtacgtatgaggaagaacggggtgggtggctgcct

SEQ ID NO: 28610 - DNA, 201 bp, Homo sapiens
agtcttgcgcttagttctgtttggtgaacacagataactgatcccattagatgagagatacttaaggaacagcagtgccatagcaagtcagtggcagagcwgggattagaataagctactattgggccaagtgtggtggctcacgcctgtaatcacactttgggaggccaaggcaggcggatcacatgaggccaggagttt

SEQ ID NO: 28611 - DNA, 201 bp, Homo sapiens
gtgacctggtaagggttgtagggtgtttagcatgttgagtaattatatattttcatcctctgtgcattagtgagatgaaggttagtctcattcgtaattgytaatttagggctatttcacatcattgcatttactgcctgtctcgttctgtcaaaaactttctttctttctcccctttccctgccaaaaacaaaaaaccaa

SEQ ID NO: 28612 - DNA, 201 bp, Homo sapiens
gattaattctgtctgaggggctcagaggaaaagacttgatagaaggagagctagtaactgaactgagccatgaaatgtctaggtatagtgaagtggtgagrtgagagtcaagtggggaaacagagcatttcagagagggggagaactgcctgagcaaaagcactgagccacatggataagagaaaatagacttctttggcc

SEQ ID NO: 28613 - DNA, 201 bp, Homo sapiens
tgagctgtatacttatgacagacatttatatatatatatatattatattatatatatatatattataatatatatatataatataatatatatatatatawtataatatatatatatatattagttctcacactgctataagaactacctgagactgggtaatttataaagaaaagaggtttaattgacttatagttccac

SEQ ID NO: 28614 - DNA, 201 bp, Homo sapiens
tcgctctgtcgcccaggctggagtgcagtggcgcaatctcggctcactgcaagctctgcttcccaggttcatgccattctcctgcctcagcctcccaagtwgctgggactacaggcgcccgccacctcgcccggctaattttttgtatttttagtagagacagggtttcaccttgttagccaggatggtctcgatctcctg

SEQ ID NO: 28615 - DNA, 201 bp, Homo sapiens
cctcccaggttcaagtgattctcctgcctcagcctccacagtagctgggattacaggcatgtgccaccatgcccggctaattttgtatttttagtagagawggggtttctctatgttggtcgggctggtcttgaactcccgacctcaggtgatctgcccgtctcggcctcccaaagtgctgggattacaggcgcgagccac

SEQ ID NO: 28616 - DNA, 201 bp, Homo sapiens
gcctcccaggttcaagtgattctcctgcctcagcctccacagtagctgggattacaggcatgtgccaccatgcccggctaattttgtatttttagtagagwtggggtttctctatgttggtcgggctggtcttgaactcccgacctcaggtgatctgcccgtctcggcctcccaaagtgctgggattacaggcgcgagcca

SEQ ID NO: 28617 - DNA, 201 bp, Homo sapiens
gggctggagtgcagtggtgcagttgcagctcactgcagtttcagcctcctgggctcatgcgatcctcccatctcagcctcctaagtagctagagctacagrcacgtgccaccatgcctggccaggttttttttttttgtattttttgtagagactgggttttggcatgtttctcaggctggtcttgaactcctgagctcag

SEQ ID NO: 28618 - DNA, 201 bp, Homo sapiens
gaggctgaggctgagaattgcttgaacctaggaggtggaggttgcagtgagtcgagattgtgccactgcactccagcctagccaacagagtgagattccayctcaaaaaaaaaaaaaaaaagctactattaagtactatgagctttttgtgtagtaagaactgtacatgttatctcatttagttcttcctgttcttctgaa

SEQ ID NO: 28619 - DNA, 201 bp, Homo sapiens
caaggaaaggattttggacagacaggaaaaggatgtttgctataagtgttttattaaatgttattaaaatattatttgatttatttttgagacaaagtctygctctgtcacctaggctggagtgcagtggtgccatcacagcttactgtagccttgacttcctgggctcaagccatcctcccacctcagcctcctgagtat

SEQ ID NO: 28620 - DNA, 201 bp, Homo sapiens
ggttttgtagtgaatccctggataatcttctgatgaacttgtggtctgtgctttactggcctctttcattaatcatatgccatcgtaggtctttctgaatyggtgttatgttatgaagaagtaagtgccttggggaccaagctgcccactgattatagtaaactttagatatgtttgattcagaatataattttcttttga

SEQ ID NO: 28621 - DNA, 201 bp, Homo sapiens
tcagcctcctaagtagctagagctacaggcacgtgccaccatgcctggccaggttttttttttttgtattttttgtagagactgggttttggcatgtttcycaggctggtcttgaactcctgagctcaggcaatctgcccgcctcagccttccaaagttctgggattacaggcatgagccactgtgcccggccactttgag

SEQ ID NO: 28622 - DNA, 201 bp, Homo sapiens
ttggcatgtttctcaggctggtcttgaactcctgagctcaggcaatctgcccgcctcagccttccaaagttctgggattacaggcatgagccactgtgccyggccactttgagcattattttaagaatgtttgttggttgattgggtataaaaagcagtctcaatttgcagttttaagtttcacgcttttcagtaaaaatt

SEQ ID NO: 28623 - DNA, 201 bp, Homo sapiens
ggaccctgttactcacttgagggtatgagggctgtgggtgtgggccgaccacaggagaaataagagcatacactgagtcctgttctaccagagacagcacrggagataggcatgaaagaactattattcaacaatatttaagtgcttaatatgtgctaggtttgggagatataagagcgaaccagacaaaaatgatcccag

SEQ ID NO: 28624 - DNA, 201 bp, Homo sapiens
gggtttcaccatgttggccaggctggtcttgaactcctggcctcaagtaatccgcctgccttggcctcccaaagtgctgggattacaggcgtgagccatcrcacccagcccatgaatttttttaaaaaagcctttggacagagaggcttctcgtcagattaacctccccaggaatcccattgtctggccttgccctgttat

SEQ ID NO: 28625 - DNA, 201 bp, Homo sapiens
caacatggagaaacccagtctctacaaaaaatacaaaattagccaggcacggtgatgcatccctgtaatcccagctactctggaggctgaggcaagagaawcacgtgaacctgggaggcggaggttgcagtgagccgagatcgtgccattgcactccagcctgggcaacaagagtgaaattccgtctcaaaaaaaaaaaaa

SEQ ID NO: 28626 - DNA, 201 bp, Homo sapiens
aaaactggaggcagggagaccagtgagggagttattactctagatgaaacatgatgggagcctaaactagaatgatggcaatgaggacaaaaagagagacrtgggtgactgacacatttgttgaattgagtgttaagtgggaagtatgatttggtttgtagtctggtagaagccacagagtattggaattgattgtcatgg

SEQ ID NO: 28627 - DNA, 201 bp, Homo sapiens
tgagggagttattactctagatgaaacatgatgggagcctaaactagaatgatggcaatgaggacaaaaagagagacgtgggtgactgacacatttgttgmattgagtgttaagtgggaagtatgatttggtttgtagtctggtagaagccacagagtattggaattgattgtcatgggggttgcttaagctgcaactcac

SEQ ID NO: 28628 - DNA, 201 bp, Homo sapiens
agtcaccatagacattccacagtactgttagggagatgggttctgtgagcattactaggcaaagggtacttataaatttatcagaacaacagttctcaggycaggcacggtggctcacacctgtaatcccagcactttgggaggccgagacgggtggatcacttgaggtcaggagttcgagaccagcgtggctgatacggc

SEQ ID NO: 28629 - DNA, 201 bp, Homo sapiens
ctagaatgatggcaatgaggacaaaaagagagacgtgggtgactgacacatttgttgaattgagtgttaagtgggaagtatgatttggtttgtagtctggkagaagccacagagtattggaattgattgtcatgggggttgcttaagctgcaactcacagccacttgaaactcatctctacaaatagataggtgaaagcaa

SEQ ID NO: 28630 - DNA, 201 bp, Homo sapiens
gccaggtgtagtggcagacgcctacaatcccagctcttgggagactgaggcaggagaatcacttgaacccaggagacggaggatgcagtgagccgagatcrcgccacggcactccaacctgggtgacagagtgagactccgtctctaaaaagccaaccgaccaaccaaacaaaaaaaactatgtagtttgtctgatgaaat

SEQ ID NO: 28631 - DNA, 201 bp, Homo sapiens
ttgtttgtttgttttggagacagggtcttgctctgtcacccaggctggagtacagtggtgcagtccgctcactgcaacctcaatcttgcaggcttaagtgwtcctcctgcctcagcctctcgagttgctgggactacaaacacaagccaccatgcctggctattttttttttttttttaagtaaaaggaatctgtactgtt

SEQ ID NO: 28632 - DNA, 201 bp, Homo sapiens
acagagtgagactccgtctctaaaaagccaaccgaccaaccaaacaaaaaaaactatgtagtttgtctgatgaaattaagcctatcaataattcatatatsttctgcaaagatccctaagcaatccagacgtttggccactagtaagcttaaggatcatagagccggaacatccaaatcaaaatgggcagtgaagacgggt

SEQ ID NO: 28633 - DNA, 201 bp, Homo sapiens
aaatggaaatctggtagtagatcctaatgatgtacaggtagattatttaagggagttaccactttaggattccttccttcccatatgctagctaggattcygggtgtgaattaagaggaccttatacctttgggaaaataaaagttatttctctcctcattactgccattaacctgttatgtctagattgctaagtgcctt

SEQ ID NO: 28634 - DNA, 201 bp, Homo sapiens
cttctgtatttaccccatggactccaagttctacacccaagatcattcagcatgttcatgccccaattttagcatattagccatgcagcctgttatgttgycaacatagagtgataccttctgtggcacccaagatttaaaaaaaaaaatcactatctggcaggaaaaattattccagattcaaaaactatgcctcacata

SEQ ID NO: 28635 - DNA, 201 bp, Homo sapiens
gaaaagcctcatgcagcagtacacacctgtagtcccagctacttgggaggataaggtgggaggattgctcgaggccagaagtttaaggctgcggtgcgctrtgattatgcctgtgaatagccactgcattccactctgaacaacatagtgagacccaatctctaaaaagaaattttttttgttaaaaaaaaaagaaaaatg

SEQ ID NO: 28636 - DNA, 201 bp, Homo sapiens
tgttgcccaggccggagtgcaatggcacaatctcggctcaccgcaacctccgcctcccaggttcaagtgattctcctgcctcagcctccacagtagctggrattacaggcatgtgccaccatgcccggctaattttgtatttttagtagagatggggtttctctatgttggtcgggctggtcttgaactcccgacctcagg

SEQ ID NO: 28637 - DNA, 201 bp, Homo sapiens
actcttgttgcccaggccggagtgcaatggcacaatctcggctcaccgcaacctccgcctcccaggttcaagtgattctcctgcctcagcctccacagtarctgggattacaggcatgtgccaccatgcccggctaattttgtatttttagtagagatggggtttctctatgttggtcgggctggtcttgaactcccgacc

SEQ ID NO: 28638 - DNA, 201 bp, Homo sapiens
atgcccaggcttctttcttaaatttctcatcggaggttcttggatccctaaagtctcttaaagggggatcttggagggttttttttttttttttttttgaracaagtttcactcttgttgcccaggccggagtgcaatggcacaatctcggctcaccgcaacctccgcctcccaggttcaagtgattctcctgcctcagcc

SEQ ID NO: 28639 - DNA, 201 bp, Homo sapiens
gaaattatctatgtaggacaatgtctggcaatacaaggaatgttctgtctgtctcaagtctttcttggatttctttttttttttttttttttttttttgaratggggtcgcccaggttggagtgcagtgccataatcacggcttactgcagtcttgacctcccaagcccaagctatcctcccacctcagcctaccgagtag

SEQ ID NO: 28640 - DNA, 201 bp, Homo sapiens
ggagtgcagtggtgccatcacagcttactgtagccttgacttcctgggctcaagccatcctcccacctcagcctcctgagtatctaggactacaagcatgmaccaccacatcctattaatttttctgtaatttttctagagatggggtctcactgtattgcccaggctagtcttgaatacctgggctcaagcagtcctccc

SEQ ID NO: 28641 - DNA, 201 bp, Homo sapiens
ttgatacattttatcaaattgccttccagaaaatacttatctgtccctagcagtgtatcagagcacctgtctcactgaattccatctcctatatctactayttatggcagagcaattcataaaacagatattattgtggtccagaaagaaacagtgcatttgtagcatgctacacagacaataaaaactattctgtaggtt

SEQ ID NO: 28642 - DNA, 201 bp, Homo sapiens
tctagactggtcatgtttatccaggagagagctacctgtaccaaaaataaaataaaataagtacaataaaataataaaatagaatttaaaaaaatgccggrtgcagtggctcacacctgtaatcccagcactttgggaggccagggcgggtggatcaagagatcaggagttcaagaccagcctggccaacatagtgaaacc

SEQ ID NO: 28643 - DNA, 201 bp, Homo sapiens
tcactgctaacgcttctagactggtcatgtttatccaggagagagctacctgtaccaaaaataaaataaaataagtacaataaaataataaaatagaattwaaaaaaatgccgggtgcagtggctcacacctgtaatcccagcactttgggaggccagggcgggtggatcaagagatcaggagttcaagaccagcctggcc

SEQ ID NO: 28644 - DNA, 201 bp, Homo sapiens
atatggtgaaacccgtctctactaaaaatacaaaaaattagccagatgtggtggtatgtgcctgtaatcccagctactcaggaggctgaggctgagaattkcttgaacctaggaggtggaggttgcagtgagtcgagattgtgccactgcactccagcctagccaacagagtgagattccatctcaaaaaaaaaaaaaaaa

SEQ ID NO: 28645 - DNA, 201 bp, Homo sapiens
taagttgtttccagtttttcactgctaacgcttctagactggtcatgtttatccaggagagagctacctgtaccaaaaataaaataaaataagtacaatawaataataaaatagaatttaaaaaaatgccgggtgcagtggctcacacctgtaatcccagcactttgggaggccagggcgggtggatcaagagatcaggag

SEQ ID NO: 28646 - DNA, 201 bp, Homo sapiens
ttaatggctttattctgtcattcagatgtaccacataatcattttaagttgtttccagtttttcactgctaacgcttctagactggtcatgtttatccagsagagagctacctgtaccaaaaataaaataaaataagtacaataaaataataaaatagaatttaaaaaaatgccgggtgcagtggctcacacctgtaatcc

SEQ ID NO: 28647 - DNA, 201 bp, Homo sapiens
gctgggactacaaacacaagccaccatgcctggctattttttttttttttttaagtaaaaggaatctgtactgttagaaattagaattgtgattacccttkggggaggcaggtaactagaagggagcatgagatgggcttctgagatgctggcaatgttctgtttgtttgtttgtttgtttgttttgagacagagtctcgc

SEQ ID NO: 28648 - DNA, 201 bp, Homo sapiens
gagcaaaagcactgagccacatggataagagaaaatagacttctttggccagagcatattgtgtgagtaaagatgaggctggaaaagtagtttagagacaractgtgaaagaccttgaatgccaaggtaaagaatttggagctgattttctagaaagcctttgaaggtcttttaaacctatgagtgacctggtaagggttg

SEQ ID NO: 28649 - DNA, 201 bp, Homo sapiens
attgttaatttagggctatttcacatcattgcatttactgcctgtctcgttctgtcaaaaactttctttctttctcccctttccctgccaaaaacaaaaamccaacatacaaccttaccttgtagtatctctggccatatctcttaagggggccggcagtcggtatctttttcattataggcaagaagagaggcggaggcg

SEQ ID NO: 28650 - DNA, 201 bp, Homo sapiens
gtctttcagcctgatccctagttggagctataatgagagagattgccagcttctcattttcaggttgacctcaattgtcaccccttctccctagtcttccrtctaccctactgtgtgatttttctacaataactggtagcagatttgtgccctggttgaagttgtggggttttaagcccctatttatcattagcatagagg

SEQ ID NO: 28651 - DNA, 201 bp, Homo sapiens
acataacagttttaagcttatgaattgtttatttctggaatttttcatttggtgtttttggaccgtggtagactgtgagtaactgcaactgtggaaagtasaactgtggatgggaggactactgtactgttatatttcaggctttccctcaaaaatgcatgccagtttttttttgagataaggtctcactgtgtcgcccag

SEQ ID NO: 28652 - DNA, 201 bp, Homo sapiens
gagcagtctttgattgtcaggaatatgttccaaaatagatcttaaaaaattaataagccccattgttaatggagggcagtaaaaacctgcatcctcatatsctttgccatttcgagaacagtaccagtgttccccacagccctgagaccagctgctagtctggctgtggttgagtgagcagtgtcatgttgaggtggtaga

SEQ ID NO: 28653 - DNA, 201 bp, Homo sapiens
gcctttagagaggaagtaatttggtcaagatcctgagtgtttttccttcccttataccatttggcttccttcatccttagtgtctaagatggtgcctggcrtatagttgacaaataggaaaaatatccagagactcaggaaaggactgtgtttggctactaactccaatccttccctaacttagagtagtgccagggccag

SEQ ID NO: 28654 - DNA, 201 bp, Homo sapiens
acaaaattgtggtcatactagctatagtttatacctttttttcatttcacttatcaaaagcatttcctagtatccttaagtgttcaaaaacttgatttaaragcaacataatattctaccctatggctgtatgatgatatatttaattatttttgtattactggatattttttattacttccaacctaaatttttggccac

SEQ ID NO: 28655 - DNA, 201 bp, Homo sapiens
aatatttcctgagccagctagcccatttcaggagacttggggaaagattcacttgctgagaagagagactacttcctttttctataccttttctacttttyttctgcaggccactttgcaaaagattgtttcatgcaaccaggtgggactaaatactctctgatacctgatgaggaagaggaaaaggaagaggcaaagtca

SEQ ID NO: 28656 - DNA, 201 bp, Homo sapiens
taagttctttgcctattttgcataagcttgtttattttgttgttgttgttgatatgtaggaattttttatatgttctggatatcaatcccatcagatatayggtttgcaaatactttcttctaatctgtggattgtttttttactctgttgatagtgtcccttttttccctatcagatttagactttttaaaatagtggta

SEQ ID NO: 28657 - DNA, 201 bp, Homo sapiens
taccatatgattttctgctgtaccatatatagaagaacaagaaataggaatgtcattctttggctgcagtgttggctctgtcctgctgtccagagaacttsttctggtgcctatatagagaaaggttgccagtcctgagcccactcagggacacattctctgcctattcagatacagcagagagcgttgcccagtgttgcc

SEQ ID NO: 28658 - DNA, 201 bp, Homo sapiens
agctaaggccttttggtaataagccattaatgtctcaactttaataatcctgtaccccgttataactatttttatgtttccttttggtctatgtccatatraggcatagtttcacattatttcatagtgtatatattatttaattataaaaatatataaatttttatgattggaaataatgcatgctcatcatagaaaaat

SEQ ID NO: 28659 - DNA, 201 bp, Homo sapiens
gccacgcaattggttccaaattagtccttcctccacaacttccagcttggaagaaccaatcggctttcaatatttccatttgcaccgccctcggatagtckcttgttattgggcatatctttctgacgtcatgagagtgcgataccaggattggtggacggagctggcgaccgccctaggcgcgctgggtcttgtgggtgg

SEQ ID NO: 28660 - DNA, 201 bp, Homo sapiens
aaatattttctataaacatttaatggctttattctgtcattcagatgtaccacataatcattttaagttgtttccagtttttcactgctaacgcttctagwctggtcatgtttatccaggagagagctacctgtaccaaaaataaaataaaataagtacaataaaataataaaatagaatttaaaaaaatgccgggtgcag

SEQ ID NO: 28661 - DNA, 201 bp, Homo sapiens
tccgcctcctgggttcacaccattctcctgtctcagcctcccgagtagctgggactacaagcacctgccaccacgcctggctaatattttgtatttttagwagagacggggtttcaccatgttagccaggatggtctcgatctcctgacctcgtgatccacctgcctcggcctcccaaagtgctgggattacaggcgtgag

SEQ ID NO: 28662 - DNA, 201 bp, Homo sapiens
ttccattatctacctgttataatgactctcttgttcactctctcagctcttgttgtacgaccaacttttttttggagatagggtctcactctgtcacctargctggactgcagtagtgcgatcatggttcactgcagcttcaaactccttggctcaagtgatcctcctgcctcagcctcctgagtagccaggactacaggc

SEQ ID NO: 28663 - DNA, 201 bp, Homo sapiens
acatttccccattaaaaaaatattttctataaacatttaatggctttattctgtcattcagatgtaccacataatcattttaagttgtttccagtttttcrctgctaacgcttctagactggtcatgtttatccaggagagagctacctgtaccaaaaataaaataaaataagtacaataaaataataaaatagaatttaa

SEQ ID NO: 28664 - DNA, 201 bp, Homo sapiens; identical to SEQ ID NO: 4793

SEQ ID NO: 28665 - DNA, 201 bp, Homo sapiens
ataatgactctcttgttcactctctcagctcttgttgtacgaccaacttttttttggagatagggtctcactctgtcacctaggctggactgcagtagtgygatcatggttcactgcagcttcaaactccttggctcaagtgatcctcctgcctcagcctcctgagtagccaggactacaggcatgaactagcatgccatg

SEQ ID NO: 28666 - DNA, 201 bp, Homo sapiens
ttacagtatgttgttatgttattattgttaatctatttctgtgcttaatttataaattaagcttcacagccaggcatggtggctcacacatgtaatttcarcactttgggaggcgaggtaggtggatcgcttgagctcaggagtttgagaccagcctgggtaacatggtgaaaccccatctccacagaaatacaaaaattt

SEQ ID NO: 28667 - DNA, 201 bp, Homo sapiens
gccaccgcgcttggccaacattttggtgtatttctgtatattcacatatgtgtacacaatttaatatgttgagattaagattatactgtatatttaaaatktgtagttttttgcacgtaatggaccttaaacatttccccattaaaaaaatattttctataaacatttaatggctttattctgtcattcagatgtaccaca

SEQ ID NO: 28668 - DNA, 201 bp, Homo sapiens
agtgcagtggtgtgatctcggctcactgcaacctatgctttctgggttcaagggatctggtgcctcagcctcccgagcagccaagattacaggcatgcacraccacgcccggctaatttttgtatttttagtagagatggggtttcaccatgttggccaggctggtctcaaactcctggcctcatgtgatctgcctgcctt

SEQ ID NO: 28669 - DNA, 201 bp, Homo sapiens
taactctggtctgatcaggtcttaacatctttggctcaggtaggtagattctaatttgagctggtttcccagatgtcatgttctcagaatacttcagccamcactgagttgaagaccccttcctactattcaaacctaagctagattttctttcccctctcatagtattatccaatataactttctgtgatgatgaaaata

SEQ ID NO: 28670 - DNA, 201 bp, Homo sapiens
ctggctaatttttgtatttttagtagagatggagtttcaccatgttggccaggctggtcttgaactcctgacctcaagtgatccacccggctcagcctccraaggtgctgggatcacaagcatgagccaccgcgcttggccaacattttggtgtatttctgtatattcacatatgtgtacacaatttaatatgttgagatt

SEQ ID NO: 28671 - DNA, 201 bp, Homo sapiens
cttgcagcaaggctcccggcgtcgcctgctgctgcccggctcctgggccagaccccgctcccaacagcaactcatgccgctgccgcttgactggaaccagsggcaactctgggcccttacgcttctgctgttctatcatggcggcaaccggtctcttcagcgccgccactgaccgcgctgccgctctcaggcgccacgcaa

SEQ ID NO: 28672 - DNA, 201 bp, Homo sapiens
actatgtgccggctatatgtatgtatgtgtgtgtgtgtgtgtgtgtgtgtgtatacatacataattttttttttctgatatgcacagcaaatccttaagayaggcattgtaattcttattttagagatttggaaaaaacgagcctttagagaggaagtaatttggtcaagatcctgagtgtttttccttcccttataccat

SEQ ID NO: 28673 - DNA, 201 bp, Homo sapiens
gaaggcagcagctagtttacctagatgaggactgagaaccttccaggtataaggaaagtatatcttgtattgtaaattaataaactggtgtgtgtctctcyctgaaccagtcactaaactgacagtctggttaatgtattttagtatataagcatctgcatgctaaagactcctgcacttatatctacagttcataccctt

SEQ ID NO: 28674 - DNA, 201 bp, Homo sapiens
ttacagtgtttatgtgctttaactctgcgtagaaactctcgttctgcccccgcaatgcgggaaagggtcagggatcaccagatacagcgctctgaggggargaagatgagctgagggccaaaggccgcctgcttcttcacttaccgcttgcagcaaggctcccggcgtcgcctgctgctgcccggctcctgggccagaccc

SEQ ID NO: 28675 - DNA, 201 bp, Homo sapiens
aatagttgtctcccttttgttctgattccatgtggaagcaatttctgatcactaatgatcactaatgtaattgttcaggtatttaatctgaaggcagcagytagtttacctagatgaggactgagaaccttccaggtataaggaaagtatatcttgtattgtaaattaataaactggtgtgtgtctctctctgaaccagtc

SEQ ID NO: 28676 - DNA, 201 bp, Homo sapiens
tcctaacaggctgctaccaagatcaatggaaatttcatatacgaaacactttagtacaagagtcaatgaatgttagctgctatttagttgttaataatacyagtgcagagaaataaagggaaaagcaacttgcccaaagtcccaaaacgagccaacacaaatcatttcccttttttcttccctccctcattcattcattct

SEQ ID NO: 28677 - DNA, 201 bp, Homo sapiens
tttttgtttgtttgtttctgtttgattttggagcatatgctagaacagaattagatgtactttcctctatttgtaggtaagttcatctttctccttttttwaattgtaaggataatatagattaataataaaaatggggaaaatattggtatgatgtaggagacctgataaactcatatttgaattgcacttctgttattt

SEQ ID NO: 28678 - DNA, 201 bp, Homo sapiens
tgatgatggacttgatatgcctcttgggcatttatttatggcttgatgtcagaaatccatgcacaggttgctctgaagagctccctttggtgtagcgtggsaagcaaagcatttttgtttgtttgtttctgtttgattttggagcatatgctagaacagaattagatgtactttcctctatttgtaggtaagttcatcttt

SEQ ID NO: 28679 - DNA, 201 bp, Homo sapiens
cactgagccgtcttcccccagtggggtgtggtggaggaggggacttgatccctcaggctcagtggtgtgaacagacgggggttggggaagccctagtcgaygtatgtggaccacttgggatatgcagtaatcctggtcagagatgtcagtgaggactgagatatgggtggaactgcagagaattggacagattctagaggt

SEQ ID NO: 28680 - DNA, 201 bp, Homo sapiens
tgtatacttatgacagacatttatatatatatatatattatattatatatatatatattataatatatatatataatataatatatatatatataatatawtatatatatatatattagttctcacactgctataagaactacctgagactgggtaatttataaagaaaagaggtttaattgacttatagttccactgcct

SEQ ID NO: 28681 - DNA, 201 bp, Homo sapiens
ttgcttacagtctagtgatgtaaacaaattagagtggcgtgtaataaaaatgagtgttgttgcacttagtccatggaattgtggaacggttaggctgtttrgatgagtcagggcatagtacaatacttgaggtatagtgggtgggtgttcagtaaatctcactgaatgaatgaatgaattatagcctcagttctaccatta

SEQ ID NO: 28682 - DNA, 201 bp, Homo sapiens
tgtagaagatttgaaagtcactgtggagtgtgggagaatgaggttactagagaaatgtaggatgcaaggaaaaaaaaaatttttttccagcatatccagcrgtttagtgcatgcatggagaaaacctttctgggtatggcaaggacatcgcttgctcaagacacattctaacctctaatatgtcttctcttcctgaaaaat

SEQ ID NO: 28683 - DNA, 201 bp, Homo sapiens
atgcagaggaagaaatgaggcaatgtggtgctgagtcgaggggtagccgattggcagagtagtagtcagcaacagtgcagtcaggtcatgcctctttctcrtaagtgcgagtgcaaactgcagtgccgtgggtgagtgtctggaaggaaagacagagtgagatggggggtggagccaggaacaccattgcgagcattctac

SEQ ID NO: 28684 - DNA, 201 bp, Homo sapiens
ccccactcttctttctttttggtatatacctaatagtagaattgctggatcatatattctgtttttaatattttgaggaagcactctgtttcccattgtaygttcccatcaataatgcacaagggttcaagtgtcactacatccttgccaacacttattttctgggttttgtgttttttggagagtagccatcctaatgcg

SEQ ID NO: 28685 - DNA, 201 bp, Homo sapiens
gtttaaaaatcttttgaatggaccatcaagcgactataccataattgacctaattgttatcctttgttgtttctaaattttcctgtcttaaaaatacattraatattttgatgtaaatcacttttcctgaagcatatagtttttcctatgtataaagttattttcttaggacaggttcccagaagcaattaggggtcaaat

SEQ ID NO: 28686 - DNA, 201 bp, Homo sapiens
tgaaaagagagtggtaggagaggaagttagatcagaaggaacccagatcactggggccttataggtgattgggaggatttcatctttcacttgagtgagakggatgttattagaggttttgagcagaggaatgacatgatctgacttccttttaagagaattattctggctgctatgtagaaacttagatggtcagaaagc

SEQ ID NO: 28687 - DNA, 201 bp, Homo sapiens
agaggttatggagatgaggatgaactaacaaagaagacaggaaaggaacagccaaggaagtttgtagaaaagtaagagaatgtaaaatgtggtagaaatamcatgaatgtgttctaggtaagatggtctgtatccatcttgactgaccaagtaaataagacccaataattgaccactagatttggccacgtggaggttact

SEQ ID NO: 28688 - DNA, 201 bp, Homo sapiens
tgggataatactagaacaagggtttggatgtcctgaaaggattttctttcatttctgtttcaagtgaagctgtcaatttaatggatggtcattgtaaatcrggaatacttaccaaaatcaggacatcaagtcatcctctgaaagtgaaaggaagcagtgggggttgaggagagaagaaagtatttacctgtgaaaacacaa

SEQ ID NO: 28689 - DNA, 201 bp, Homo sapiens
gatgccattatttctatgtggtactccagtaaatagactttctgttttagggaagaagaatagtgttccctcaagtatattaggttcaacattaatttccwtcataactttcattagcaatagaggaaagagatgaattttaaccagtagaggacagttgcagccaaaaacaagtcaagatgaagggcttcccctttatgg

SEQ ID NO: 28690 - DNA, 201 bp, Homo sapiens
aattgaaacttaaaacagctacatgactagtgactatctattaggcagtgcaaccctatacaattataaagttcttttttttttcctactgtcttctgccrtccagcactaaactatgaaattttgagaacagatttttcaacattatactttcagagtttcttgcttatgatagaagctcaaatatatttagcagtggat

SEQ ID NO: 28691 - DNA, 201 bp, Homo sapiens
ggcctcccaaagtgctgggattatagatgtgagccaccgcacccagccaagagaattcttttgactgaattgagttataggaggaatatagataaatttgktggttctacagtcatttgttggtacaactctgttacagcatttatcctggtctgtcttgtattattattacttgtatgtgtctctctccactactagatc

SEQ ID NO: 28692 - DNA, 201 bp, Homo sapiens
ataaagtatagtggttttgccgctttagccttggtcgactcactttacatttctgagttgcagtttttccatctgtaaaatgggaataataactcatgaaktttgactctacagactattattgtaagataaggatgcaaaaagcttgataaactaaagcactgtttaggtgtaaggcagtattattactctcctcacttc

SEQ ID NO: 28693 - DNA, 201 bp, Homo sapiens
tgttatatactcttttttttttttctttctgagacagagtctctgttgcccagggtggagttgcccagggtggagtgcagtggcatgatctcggctcgctrcaacctccacctcccatgttcaagtggttctcctgtctcagtctcccgagtagctgggattacaggtgcccaccacaatgcccagctaatttttgtattt

SEQ ID NO: 28694 - DNA, 201 bp, Homo sapiens
ctactccattggagatgccaaggaagaattgttatttcatcttctcttaaaactttgacttgtctcctgtagatgcttggccaggctgtcagaacatcctrggagttaatgagagaaaaatacatatagctcccactaagtgcctataatgtgtcaggcactatagttagtgcttatcttgtttaaacctcatagcatcct

SEQ ID NO: 28695 - DNA, 201 bp, Homo sapiens
gaaggatatgatgatgtgcaagacaaaggcatgcttacaagagttccacactctacaaagggaggaaaaaaatgtccctaaaaatgatttgaatcccatcyccatcattcatattttgcaatcttgagcgagtttacttagcttctcttgtgtcctcatttttaaaatggcaatgataattgcctgttttatgggatagtc

SEQ ID NO: 28696 - DNA, 201 bp, Homo sapiens
gttggggtggaacttgcagcagtagacttccccttcatgtccagagagcagcatgattggggcttgaagggaggaacatcttggaggtccctaaacaaaakagaagcacaaggtaactactgcatacagacaaaggaggctacaaaattagggggtggggagtggagggaaaagaccaagaaaacaatgattaagtgggtt

SEQ ID NO: 28697 - DNA, 201 bp, Homo sapiens
tatgagtataatcttgtgaggtggctgtaaagttagagatgatgaatattcaagggtagcaagtacaggcttattatttgatggcagttatttcccctggyaccaggatctaatagaaaccagaatagcagtcaggagttctaaatcttttactcctattctttgaccttggatatgtgagtcactgtttctagatagact

SEQ ID NO: 28698 - DNA, 201 bp, Homo sapiens
aactcaggtataatcaaaaggggcttactatgaataacagaatacactcctatcacttaataaatcccaggagttttagaagttctttgacaggaaaatgracaaatgtatttttgtattatactacatctgtgctgatacatgactttttcattttatttatttcaactaattgaaattgaaacttaaaacagctacatg

SEQ ID NO: 28699 - DNA, 201 bp, Homo sapiens
tgcctgtctcgttctgtcaaaaactttctttctttctcccctttccctgccaaaaacaaaaaaccaacatacaaccttaccttgtagtatctctggccatrtctcttaagggggccggcagtcggtatctttttcattataggcaagaagagaggcggaggcgatccttccaggattacactgggcagaagatcacccttg

SEQ ID NO: 28700 - DNA, 201 bp, Homo sapiens
tattatttgatggcagttatttcccctggcaccaggatctaatagaaaccagaatagcagtcaggagttctaaatcttttactcctattctttgaccttgratatgtgagtcactgtttctagatagactggctagtctttaggggcgcctttcagctttaatgtcctgcactttaaaaaatgaaagtaataagatacttg

SEQ ID NO: 28701 - DNA, 201 bp, Homo sapiens
caggagtttgagtccagcctgggcaatatggcaagatcctgtctcaaaatagaaaaagttccagccctctgatcgcttggtctttctggtgactagtccaycctgaggctatctagggatcccactctgtcacctcattaaaataaactcaggtataatcaaaaggggcttactatgaataacagaatacactcctatcac

SEQ ID NO: 28702 - DNA, 201 bp, Homo sapiens
gtgaaaattgaatttggaactgagttaaatgtggaaagaaggagggtgtgagtcatccagttttgctgccagtcatggcagtaaatttctccagtcaatarctccctggtttggtggcttgctgcagtgatagccataactttcctggattgtggcaaaggtggtattattttgtgggttaggtgttgttcctggaagttc

SEQ ID NO: 28703 - DNA, 201 bp, Homo sapiens
agggtgtgagtcatccagttttgctgccagtcatggcagtaaatttctccagtcaatagctccctggtttggtggcttgctgcagtgatagccataacttycctggattgtggcaaaggtggtattattttgtgggttaggtgttgttcctggaagttctgccaaagtcttttattgcaatacatcccttactgcttaagt

SEQ ID NO: 28704 - DNA, 201 bp, Homo sapiens
taagtgggtttcatctgacttacagaatggtagctcttctcatatgaatgcctccaacttgacactctctgaaactttccattatctacctgttataatgmctctcttgttcactctctcagctcttgttgtacgaccaacttttttttggagatagggtctcactctgtcacctaggctggactgcagtagtgcgatcat

SEQ ID NO: 28705 - DNA, 201 bp, Homo sapiens
cttaataagggaaaaacagggacccctagaggggggactgaggaagggggagaatggttgaaaaatttaactttgagtactatgctgagtacttctgtaaygggatgattaatatcccaaacctcagcatcatgcagtgtacacagataacaaacttgaacatatgtacccccggaatctaaaataaaggttaaaaacaaa

SEQ ID NO: 28706 - DNA, 201 bp, Homo sapiens
ctgcagtgatagccataactttcctggattgtggcaaaggtggtattattttgtgggttaggtgttgttcctggaagttctgccaaagtcttttattgcartacatcccttactgcttaagtgggttctgttgtctgcaactgtccctgaccaggttagaggtactgccagagagttaaatataaagacagagttaaaggg

SEQ ID NO: 28707 - DNA, 201 bp, Homo sapiens
agaacaaattatttaatggttcacaaggattaagaaggggaaggaagtagcaatatgaaggatccttgtggtgagggacctgttctgtatcttaactgtgscagtgtatacatgaatctacacatgtggtaaaattacgtggaactaaatacatacacatacagaaacacaaatgagtacaggtaaaactggggaaatctg

SEQ ID NO: 28708 - DNA, 201 bp, Homo sapiens
gctgggcatggtggtgtgtgcctgtaatcccagctactcgggaggctgaggcaggagaatcgcttgaacctgggaggaggttgcagtgagctaagatcgcrccattgcactctagcctgggtgacaagaacaaaactctgtctcaaaaaaaaaaaaagaaaaaaaagggtggtttagtggcaagtgtgtgtggcccttgga

SEQ ID NO: 28709 - DNA, 201 bp, Homo sapiens
agggattgaaagcaggtttataaagtaccttatatataaacatcaatcaatagcatactgaattgatgaattaacaatttaaatggggtaaaattaaatayttcactattttagtagacaatttccatgtgtgttacactgtgctaggcactggagatttggggaggaaggatatgatgatgtgcaagacaaaggcatgct

SEQ ID NO: 28710 - DNA, 201 bp, Homo sapiens
gcttcccttataaaaccatcattcgctgggcacttattctccttcctgctgccctgtgaagaaggatgtgtttgcttcccctttccccatggttgttaagwttcttgaggcttccccagccatgctgaactgtgagtcagttaaatctctttccttggtaaattacccagtctcgtatgtctttattagcagtgtaagaac

SEQ ID NO: 28711 - DNA, 201 bp, Homo sapiens
atattagctattataagactttgaagggatcttaggaataattgactgaaagtgtagtgtcgagtggtagaataagtgctgatcctggggtcttataccartgttgctaactgtgagcagcctttgtcaaatcacttggcttcattttcagtggcctaagagtaataggtttaattatttccataattcctttaagttttt

SEQ ID NO: 28712 - DNA, 201 bp, Homo sapiens
tataaggggcttcccttataaaaccatcattcgctgggcacttattctccttcctgctgccctgtgaagaaggatgtgtttgcttcccctttccccatggytgttaagtttcttgaggcttccccagccatgctgaactgtgagtcagttaaatctctttccttggtaaattacccagtctcgtatgtctttattagcagt

SEQ ID NO: 28713 - DNA, 201 bp, Homo sapiens
aaagcaagaagcatctatcttacatggtcactctagaatttggtgggagggaggaaagttggaccaccagtttgacatttgaaagtgtcccggccgggtgsggtggttcacacctgtaatcctaacactttgggaggccgaggcgagcagatcacttgaggtcaggagtttgagaccaacctggccaacatggtgaaacca

SEQ ID NO: 28714 - DNA, 201 bp, Homo sapiens; identical to SEQ ID NO: 4792

SEQ ID NO: 28715 - DNA, 201 bp, Homo sapiens
agtttgatgtatccttttcagtgttctctgtgtatactaaatatacacaagtgtgtgtaacatacacagtttatatcatgtgcatatatatataaatacamatgtatatgttatacgcactggaacctacaatacatattatgtcttggttcttttacttaacatgttttagctatttttttcttgttggcacttaaagat

SEQ ID NO: 28716 - DNA, 201 bp, Homo sapiens
taacacaagatctgatggttttataaggggcttcccttataaaaccatcattcgctgggcacttattctccttcctgctgccctgtgaagaaggatgtgtytgcttcccctttccccatggttgttaagtttcttgaggcttccccagccatgctgaactgtgagtcagttaaatctctttccttggtaaattacccagtc

SEQ ID NO: 28717 - DNA, 201 bp, Homo sapiens
ctcgatctcctgacctcatgatccacctgccttggcctcccagagtgctgggattacaggcatgagccaccgcgcccagccagtagatgttattcttatcyccagtttacatttgaagggaacaggcctcagtgagttcagatgacttgcccacggatgcagaatagtaaatggcagagccagaactcaggtccaggtcta

SEQ ID NO: 28718 - DNA, 201 bp, Homo sapiens
tctcctctatagccacagtgtaattaccaacattatgaaattaacattgcattacttctttgatcctcaggccccacctcttgatgctcgagctctgactrcccattctgggctgctccagtgtgtgccttcatcaccttattcttccctatattgcagttctctttgtagatttcctcctcacccagcttagactctgac

SEQ ID NO: 28719 - DNA, 201 bp, Homo sapiens
gtaacacaagatctgatggttttataaggggcttcccttataaaaccatcattcgctgggcacttattctccttcctgctgccctgtgaagaaggatgtgwttgcttcccctttccccatggttgttaagtttcttgaggcttccccagccatgctgaactgtgagtcagttaaatctctttccttggtaaattacccagt

SEQ ID NO: 28720 - DNA, 201 bp, Homo sapiens
ttatgtagttgaatagatggtggtaccattcactcactatcacggaatccctcaagctggatagggaacactagaagatgattagagaccagttttttttkgttttttttttttttttgagacaggttcttgctctgtcgcccaggctggagtgtggtggtgcaaccttggctcactgcaacctccacctcccaggttcaa

SEQ ID NO: 28721 - DNA, 201 bp, Homo sapiens
gaagttgagagagcagaagcttggttcatcttctggctctcagtcttcccccaccccaactcccaactttgcttttgaactacaaccttttttttttttttgagacggagtttccatcttgttgcccaggctggagtgcaatggcacaatcttggctgaccccaacctctgcctccgggttcaagcaattctcctgcctca

SEQ ID NO: 28722 - DNA, 201 bp, Homo sapiens
ctatcttaatgttatatactcttttttttttttctttctgagacagagtctctgttgcccagggtggagttgcccagggtggagtgcagtggcatgatctyggctcgctacaacctccacctcccatgttcaagtggttctcctgtctcagtctcccgagtagctgggattacaggtgcccaccacaatgcccagctaatt

SEQ ID NO: 28723 - DNA, 201 bp, Homo sapiens
caactttttgagaaactgccaaactgtttttccaaagtgaccacgccattttacattcctaccagcaatgtatgagggttctattttctttacatctttgktaacacttgttattatctttctgggtatggccatcctaatggatgtgcacggacatctcattgtggtttgaatttccctaatagctaatgatgttaagtc

SEQ ID NO: 28724 - DNA, 201 bp, Homo sapiens
ttgattaagggagatagggagtcctagaatgaggatgtggggagcaggtgactttcattttagataggatggtaaggccaggcctttctttttttttttttgagacggagtttcactcttgttgcccaggctggagtgcaatggtgcgatctcagctcactgcaacctctgcctcctgggttcaagcaattcttatgcctc

SEQ ID NO: 28725 - DNA, 201 bp, Homo sapiens
caggttgacctcaattgtcaccccttctccctagtcttccgtctaccctactgtgtgatttttctacaataactggtagcagatttgtgccctggttgaarttgtggggttttaagcccctatttatcattagcatagaggggagaaggaaaaaataaaattgagagaaagaatacctcctcaggaaaactgtgggaacat

SEQ ID NO: 28726 - DNA, 201 bp, Homo sapiens
ggggctttatttttgattttctttttgttttttgagatggagtgtcattctgtctcccaagctggagtgcagtggtgtgatctcggctcattgcagcttcygcctcccaggttccagcaattctcctgcctcagcctcctgagtagctgggactacaggcgcaagccaccatgcccggctaatttttgtatttttttagta

SEQ ID NO: 28727 - DNA, 201 bp, Homo sapiens
ggatgccatgggtacctcaaactttggctggagtcagtcaaatccagacttgaggctcttctgtgctatttactagctgttaatttggggctttatttttkattttctttttgttttttgagatggagtgtcattctgtctcccaagctggagtgcagtggtgtgatctcggctcattgcagcttccgcctcccaggttcc

SEQ ID NO: 28728 - DNA, 201 bp, Homo sapiens
agtgagctgtatacttatgacagacatttatatatatatatatattatattatatatatatatattataatatatatatataatataatatatatatatawaatataatatatatatatatattagttctcacactgctataagaactacctgagactgggtaatttataaagaaaagaggtttaattgacttatagttcc

SEQ ID NO: 28729 - DNA, 201 bp, Homo sapiens
ctttcagcctgatccctagttggagctataatgagagagattgccagcttctcattttcaggttgacctcaattgtcaccccttctccctagtcttccgtmtaccctactgtgtgatttttctacaataactggtagcagatttgtgccctggttgaagttgtggggttttaagcccctatttatcattagcatagagggg

SEQ ID NO: 28730 - DNA, 201 bp, Homo sapiens
tatgaaaaatcaagtgagctgtatacttatgacagacatttatatatatatatatattatattatatatatatatattataatatatatatataatataawatatatatatataatataatatatatatatatattagttctcacactgctataagaactacctgagactgggtaatttataaagaaaagaggtttaattg

SEQ ID NO: 28731 - DNA, 201 bp, Homo sapiens
ttacccttgggggaggcaggtaactagaagggagcatgagatgggcttctgagatgctggcaatgttctgtttgtttgtttgtttgtttgttttgagacasagtctcgctctgtcgcccaggctggagtgcagtggcgcaatctcggctcactgcaagctctgcttcccaggttcatgccattctcctgcctcagcctccc

SEQ ID NO: 28732 - DNA, 201 bp, Homo sapiens
aaggtttaattaaagattttaacattttaaaaaaaggcaaccataagaatactagaagaaaatctagaagaatatttcactacatgaaaattaaaaacttmactgcaaaaatcattgtaatcagagttaagtttggaaaaagaatttgtagtacatatgataaagagctaatacaaagggggtattaggaaaaggtgccaa

SEQ ID NO: 28733 - DNA, 201 bp, Homo sapiens
tttcttaattttttttctgattgctccttgctactgtatagaaacacaactgattttagcatgttcgttttgtattctgcaactttgctaaattcacttaytcgttctaacaggatttttttgtggactctttagggttttctacatagaagatcatgccatctgtaaacagaaataattttcttgcagatttagtttttt

SEQ ID NO: 28734 - DNA, 201 bp, Homo sapiens
gtgggagaatgaggttactagagaaatgtaggatgcaaggaaaaaaaaaatttttttccagcatatccagcagtttagtgcatgcatggagaaaacctttytgggtatggcaaggacatcgcttgctcaagacacattctaacctctaatatgtcttctcttcctgaaaaatctggaaaactaaaaaccattttcttgact

SEQ ID NO: 28735 - DNA, 201 bp, Homo sapiens
tactttggtatgttcaaattatgaaaaatcaagtgagctgtatacttatgacagacatttatatatatatatatattatattatatatatatatattataatatatatatataatataatatatatatatataatataatatatatatatatattagttctcacactgctataagaactacctgagactgggtaatttata

SEQ ID NO: 28736 - DNA, 201 bp, Homo sapiens
ccagtgtcacaatggactgtggaaagagggtagaggcctgagctgtgatcttagtcaggaattgaggggcagggtggggtctggacactgggccacagagsacacagcctttgacccaaactagtgatggtgtgaggacaagagctcaggcaatccgcctcccagctatccctgcaagacatctagttcacctccagcctc

SEQ ID NO: 28737 - DNA, 201 bp, Homo sapiens
acatgtatttagcatcagtggcattccagcactacacaggctttatgaatcttgtttcatttaaattccccatgatagtctgcccctcagggtgcaatacyagggagccaagactaccagcctattctcttttagagtctcagcactctccattccccacccctgtttccctgacttaccttgaccttcctgtcatctgct

SEQ ID NO: 28738 - DNA, 201 bp, Homo sapiens
ctgcagtctccgcctcccgggttcaagcaattctcctgcctcagcctcccaagtagctgggactacaggtgcgcaccaccacgcctagctaatttttgtayttttagtagagacggggtttcactatgttggccgggatggtctcgaactcttgaccttgtgatccacccgccttggcctcccaaagcgctgggattacag

SEQ ID NO: 28739 - DNA, 201 bp, Homo sapiens
tccctgacttaccttgaccttcctgtcatctgctgttgtctcatcgaactccacccccaacttaaagctgatctctgtgttcttgaaggtgctgtgtgttyttagggtgagaatgtccccattcttttcgatgattgtggtaggcttggtcatgctggccacctgcctggtagcaaaacccacacctgagggtagggggaa

SEQ ID NO: 28740 - DNA, 201 bp, Homo sapiens
tatgtagttgaatagatggtggtaccattcactcactatcacggaatccctcaagctggatagggaacactagaagatgattagagaccagtttttttttkttttttttttttttttgagacaggttcttgctctgtcgcccaggctggagtgtggtggtgcaaccttggctcactgcaacctccacctcccaggttcaag

SEQ ID NO: 28741 - DNA, 201 bp, Homo sapiens
atatgataactccatgttcaactttttgagaaactgccaaactgtttttccaaagtgaccacgccattttacattcctaccagcaatgtatgagggttctrttttctttacatctttgttaacacttgttattatctttctgggtatggccatcctaatggatgtgcacggacatctcattgtggtttgaatttccctaat

SEQ ID NO: 28742 - DNA, 201 bp, Homo sapiens
ttgtctttgttcaggctgcaaaacagcttttgcatcaaagttgaggtctaggagaaggccacctccttgagcccttcttgctagctagagtccatgttccrgcatgccaggactctccagtgatttgtttttatcttccctcctcctgagccttcatctttgagagagaacaaagtggaaatagtgccaaactctgtgtta

SEQ ID NO: 28743 - DNA, 201 bp, Homo sapiens
gaactcctgacctcaagcgatccacccaccttggccttccaaagtgctgggatacaggcgtgagccaccatgcccggccataattttcttttctttttttwaaaaaatattttgtggagatggggtgtcgctgtgttgcccaggctggcctcgaacttctggtctcaagcattccttccacctcagccttccaaagtgctg

SEQ ID NO: 28744 - DNA, 201 bp, Homo sapiens
ctgacctcaagcgatccacccaccttggccttccaaagtgctgggatacaggcgtgagccaccatgcccggccataattttcttttcttttttttaaaaartattttgtggagatggggtgtcgctgtgttgcccaggctggcctcgaacttctggtctcaagcattccttccacctcagccttccaaagtgctggaatta

SEQ ID NO: 28745 - DNA, 201 bp, Homo sapiens
caaagtgctggaattacaggtgtggactactgtacctggcctggaagttgactttttaaaaataaatttggattaactaaggagcctctgagtaaccgcartagaaccctcggtttctacagaatttgaaaaaaagttttatattccatatttaaaaaatgacaaccatttactttcctgaaattgtaaacctgttatagt

SEQ ID NO: 28746 - DNA, 201 bp, Homo sapiens
ggcctttcatcactaacatttattggttgcctattacatagacccatcaagcctctaacttcatcttagacaactctgcagaagactgaggggacaactcyttctctctgattagatcttttcaggttctgtcagatgtgtatgtattggctttttatctagttgtcttgatgaaacccaagactcagacttggagttaaa

SEQ ID NO: 28747 - DNA, 201 bp, Homo sapiens
gtggggccatctcggctcactgcagtctccgcctcccgggttcaagcaattctcctgcctcagcctcccaagtagctgggactacaggtgcgcaccaccaygcctagctaatttttgtatttttagtagagacggggtttcactatgttggccgggatggtctcgaactcttgaccttgtgatccacccgccttggcctcc

SEQ ID NO: 28748 - DNA, 201 bp, Homo sapiens
ctgcagctggggttgtgcaattgtacataaatgtgtggaggaaccaaaagacccatgagaattcttttttttttaagatggagtcttcctctgtcgctcargctggagtgcagtgggttcaagcgattctcatgcctcaacctcctgaatagctgggattacaggcgcatgccaccacacctggctaatttttgtattttt

SEQ ID NO: 28749 - DNA, 201 bp, Homo sapiens
tgaccttgtgatccacccgccttggcctcccaaagcgctgggattacaggcgtgagccactgtgcctggctgattttttttttttttaagtagagatagartctcactgtgttgtccaggctggtcttgaactcctggcctcaagtgatcctcccgccttagcttcccacgattacagtcgtgagccactgcacctggccc

SEQ ID NO: 28750 - DNA, 201 bp, Homo sapiens
ctgacttcaaactcctgacctcaggtgatccacccacctcggcctcccaaagtgctgggattacaggtgtgagccactgtgcctggccacctacagctttyttatatgagatggagcttgaattagtgcaggttttatatattactatcaaggatggatggtctttaggaatgttcagagagaactttatagttctaactt

SEQ ID NO: 28751 - DNA, 201 bp, Homo sapiens
attatgaaaaatcaagtgagctgtatacttatgacagacatttatatatatatatatattatattatatatatatatattataatatatatatataatatwatatatatatatataatataatatatatatatatattagttctcacactgctataagaactacctgagactgggtaatttataaagaaaagaggtttaat

SEQ ID NO: 28752 - DNA, 201 bp, Homo sapiens
ctgattttttttttttttaagtagagatagagtctcactgtgttgtccaggctggtcttgaactcctggcctcaagtgatcctcccgccttagcttcccaygattacagtcgtgagccactgcacctggccccagtttccttcttgaagaattgcatggggtttcttaggccactgttctacaagaggtataaatctggga

SEQ ID NO: 28753 - DNA, 201 bp, Homo sapiens
gaataactcggatttctaaagtggatcctaacctacagctcgctcttttcttttctcttctcttctcttctttctcttttttttttttggacagagtctcrctctgtcactcaggctggagtgcagtggtgcaatctcggctcactgcaacctccacctccgggttcaagtgattctcctgcctaagcctccagagtagca

SEQ ID NO: 28754 - DNA, 201 bp, Homo sapiens
ctggcctggaaggctgaggcaagctgccaagacagccactgcagggtgatagaaccctgggaggaggggctaaggcttggtgggaagacactgcaaacacrttcatgacaaggtgaatgccctatcacggaacatagctcttcctgcctgtcagctggcaacactggaaatagtttgtcagggtcattggccatgtctggg

SEQ ID NO: 28755 - DNA, 201 bp, Homo sapiens
aattatgaaaaatcaagtgagctgtatacttatgacagacatttatatatatatatatattatattatatatatatatattataatatatatatataatawaatatatatatatataatataatatatatatatatattagttctcacactgctataagaactacctgagactgggtaatttataaagaaaagaggtttaa

SEQ ID NO: 28756 - DNA, 201 bp, Homo sapiens
tcaagaaaaaaaaagtaagcccttttctctttgaagtcacttcagatttaataccttagcatagtagttaagagaatggactctggagtcagccagtttgrctccccatttcctggctttttgacatgcttagtaatttaacttctggaagcctttgttctctcatctgtataatataatagtaatagaacttacatttta

SEQ ID NO: 28757 - DNA, 201 bp, Homo sapiens
actttggtatgttcaaattatgaaaaatcaagtgagctgtatacttatgacagacatttatatatatatatatattatattatatatatatatattataatatatatatataatataatatatatatatataatataatatatatatatatattagttctcacactgctataagaactacctgagactgggtaatttataa

SEQ ID NO: 28758 - DNA, 201 bp, Homo sapiens
tttagttcttgagggctccaccctcctgaagggattaatgccaattattgaaaggcttgaggctgtgagtttgatctctttctctccttcttaccctcttrccttccaccatgggatgacacaacaagaagattcttgccagatgctggcaccttgctcttggactttccaacctccagaactatgagccaaataaatttc

SEQ ID NO: 28759 - DNA, 201 bp, Homo sapiens
tagtctgtgctgctataacaaaatacctgagattgggtaatttataaagaacagaaatttatttctcacagttctggaggctgggaaatctaagatcaagktgtcagcagatttggtgtctagtgaagactactctgtttccaagatggcaccttcctgctgcatcctctggagggaagaaatgctgtgtcctcacatgac

SEQ ID NO: 28760 - DNA, 201 bp, Homo sapiens
ttactttggtatgttcaaattatgaaaaatcaagtgagctgtatacttatgacagacatttatatatatatatatattatattatatatatatatattataatatatatatataatataatatatatatatataatataatatatatatatatattagttctcacactgctataagaactacctgagactgggtaatttat

SEQ ID NO: 28761 - DNA, 201 bp, Homo sapiens
gaaacttaatctccagtgcatcaacgttgggaggtaggacctagtaggaggtatttagttcttgagggctccaccctcctgaagggattaatgccaattaytgaaaggcttgaggctgtgagtttgatctctttctctccttcttaccctcttaccttccaccatgggatgacacaacaagaagattcttgccagatgctg

SEQ ID NO: 28762 - DNA, 201 bp, Homo sapiens
ggcgccaaacgggggaacacgtacgcagcattcgcaggctatggggagcttttacagtgtttatgtgctttaactctgcgtagaaactctcgttctgcccscgcaatgcgggaaagggtcagggatcaccagatacagcgctctgaggggaggaagatgagctgagggccaaaggccgcctgcttcttcacttaccgcttg

SEQ ID NO: 28763 - DNA, 201 bp, Homo sapiens
tggttactttggtatgttcaaattatgaaaaatcaagtgagctgtatacttatgacagacatttatatatatatatatattatattatatatatatatattataatatatatatataatataatatatatatatataatataatatatatatatatattagttctcacactgctataagaactacctgagactgggtaatt

SEQ ID NO: 28764 - DNA, 201 bp, Homo sapiens
agtgaagctgtcaatttaatggatggtcattgtaaatcaggaatacttaccaaaatcaggacatcaagtcatcctctgaaagtgaaaggaagcagtggggrttgaggagagaagaaagtatttacctgtgaaaacacaagaaaaataatttcaggtcttactggtgtcaaatgtaattgggaggaaagagaactgaggata

SEQ ID NO: 28765 - DNA, 201 bp, Homo sapiens
cctagggaggagaggaaagggaatgctgagataggcaatgggagcccctcctagagggcctgggatcagatttggccctgttttctacttcttcctgaggkgaggcaaggtagaaacacaggaagagcaaacaaaggacatggagcacctgctgtgttcctcaatcagtgatgctttgtgctgtgcatacactgtctctta

SEQ ID NO: 28766 - DNA, 201 bp, Homo sapiens
ctggttactttggtatgttcaaattatgaaaaatcaagtgagctgtatacttatgacagacatttatatatatatatatattatattatatatatatatattataatatatatatataatataatatatatatatataatataatatatatatatatattagttctcacactgctataagaactacctgagactgggtaat

SEQ ID NO: 28767 - DNA, 201 bp, Homo sapiens
ttgatctgagtactggttactttggtatgttcaaattatgaaaaatcaagtgagctgtatacttatgacagacatttatatatatatatatattatattatatatatatatattataatatatatatataatataatatatatatatataatataatatatatatatatattagttctcacactgctataagaactacctg

SEQ ID NO: 28768 - DNA, 201 bp, Homo sapiens
ttttgatctgagtactggttactttggtatgttcaaattatgaaaaatcaagtgagctgtatacttatgacagacatttatatatatatatatattatattatatatatatatattataatatatatatataatataatatatatatatataatataatatatatatatatattagttctcacactgctataagaactacc

SEQ ID NO: 28769 - DNA, 201 bp, Homo sapiens
gttttttgatctgagtactggttactttggtatgttcaaattatgaaaaatcaagtgagctgtatacttatgacagacatttatatatatatatatattatattatatatatatatattataatatatatatataatataatatatatatatataatataatatatatatatatattagttctcacactgctataagaact

SEQ ID NO: 28770 - DNA, 201 bp, Homo sapiens
ctgttttttgatctgagtactggttactttggtatgttcaaattatgaaaaatcaagtgagctgtatacttatgacagacatttatatatatatatatattatattatatatatatatattataatatatatatataatataatatatatatatataatataatatatatatatatattagttctcacactgctataagaa

SEQ ID NO: 28771 - DNA, 201 bp, Homo sapiens
gtagattatccccagtttacaatgaagagtgcgaagtgtcttgtcgaaattcaaagagaataaactactgacatagatttgaacctcggctccaaaactgwtgactattttcactgggcgattctgtccagcacatactcaatccaggccagcagttgtgcctgtggtcactggtactagacgggacctctttgccccttg

SEQ ID NO: 28772 - DNA, 201 bp, Homo sapiens
tttttgtgtagtaagaactgtacatgttatctcatttagttcttcctgttcttctgaagactgtttccacgttacagatacaaaaacagaggtaaagcccrgggtcacaaatctgagattgaagcccagaattgtctgagtccagagcttgcttaagtgctcagctatactacctcccaaggctggagcataaggctgcct

SEQ ID NO: 28773 - DNA, 201 bp, Homo sapiens
ttcaggccgttatttctgcccactctctgacacacaggataaaccaagactcccagagttatgttaccaaaggcaaaaaggcaactgggtggccttggctytgctttattgacctcagagcaccctatgagtgcagttaaaaaaaaaaaaaaaaaaaccacatacaccatgggaactggaactggatcccggtcagtggca

SEQ ID NO: 28774 - DNA, 201 bp, Homo sapiens
aggtgatcagctgattaacaggctccgagactgtccatttcagtctcccatccagtgcttcttcctcagtaaccttcaggccgttatttctgcccactctytgacacacaggataaaccaagactcccagagttatgttaccaaaggcaaaaaggcaactgggtggccttggctctgctttattgacctcagagcacccta

SEQ ID NO: 28775 - DNA, 201 bp, Homo sapiens; identical to SEQ ID NO: 4794

SEQ ID NO: 28776 - DNA, 201 bp, Homo sapiens; identical to SEQ ID NO: 4795

SEQ ID NO: 28777 - DNA, 201 bp, Homo sapiens; identical to SEQ ID NO: 4790

SEQ ID NO: 28778 - DNA, 201 bp, Homo sapiens; identical to SEQ ID NO: 4791

SEQ ID NO: 28779 - DNA, 201 bp, Homo sapiens
tcagccctaatgtctcctcagaattttttttacccatcataaataaatcggttcacactgtatttaattatatacttgtttaatgtctatcttcctcacargacactaagctccatgagggctgagttgtgtctgttttgttgtatatctcagtcttaggtggatgggtagaaaatagtaagtgcttgatacatttttgat

SEQ ID NO: 28780 - DNA, 201 bp, Homo sapiens
ctgtaatctcagcactttgggaggctgaggtaggaggattgcttgagccaggagttcaagaccagactgggcaacataatgaaatccagtctctacccccsctcaaaaaaaaaaaaaattagccaagctcgttggtgtgtttctgtcccagctacttgggaggctgaggcgggaggatagcttgagcccaggaggtcaagg

SEQ ID NO: 28781 - DNA, 201 bp, Homo sapiens
gtgacagaatcacttgaacccgggaagtggaggttgcagtgagtcgagatcgcaccactgccctccagcctgggcaacagagcgagactccatcttaaaaraaaagaaaaaagaagtgttccatctgttgatctgtccaacatattaaatgggacctagctccttcttcttctatatcctttagaccagaatgtgttcccc

SEQ ID NO: 28782 - DNA, 201 bp, Homo sapiens
gtgcaatctcggctcactgcaacctccacctccgggttcaagtgattctcctgcctaagcctccagagtagcagggactacaggcgtcagccaccacgccyggctaattttttgtatttttagtagagacagagtttcgccatgttggccaggctgacttcaaactcctgacctcaggtgatccacccacctcggcctccc

SEQ ID NO: 28783 - DNA, 201 bp, Homo sapiens
cagagttaaagggagtttagagtgttgttggaatgatgatatctgatatccctatcagattaggaggtctttgagaacagggactgtgttgaaaagggtgktttaggccgggtgctgtggctcactcctataatcccagcactttgggaggccgaggcaggtggatcacctgaggtcaggagttcgagaccatcctgacca

SEQ ID NO: 28784 - DNA, 201 bp, Homo sapiens
ttgtccttgaagaaggtggtgtttcagcccatgtcccagctcttctcttgctgaacttagcagggatttgggacctagtaattaaatagctgagaagccartattcatcctgtcatcctctgagaagcatgttggtagcagagtgcattatattaatacatggtaggaggtacgagcatagcaatgagacttgggatttgg

SEQ ID NO: 28785 - DNA, 201 bp, Homo sapiens
cctcgacctcccaggctccagtgatcctcccacctcagcctctccagtaggtgggataacaggtatgtgccaccatgcctggctaattgttgtattttttrtagagataaggtcttgccatgttgtccaggctggtctcaaactcctggcctcaagtgatcttgctgccttggtctcccaaagtgctacgattataggcat

SEQ ID NO: 28786 - DNA, 201 bp, Homo sapiens
ttgggacctagtaattaaatagctgagaagccagtattcatcctgtcatcctctgagaagcatgttggtagcagagtgcattatattaatacatggtaggrggtacgagcatagcaatgagacttgggatttggcttaggcttgccatagcccaagaaatgctgaggggagattcatgttggtaaggtcgaaatagcattg

SEQ ID NO: 28787 - DNA, 201 bp, Homo sapiens
tgtggcaaaggtggtattattttgtgggttaggtgttgttcctggaagttctgccaaagtcttttattgcaatacatcccttactgcttaagtgggttctrttgtctgcaactgtccctgaccaggttagaggtactgccagagagttaaatataaagacagagttaaagggagtttagggtgttgttggaatgatgggct

SEQ ID NO: 28788 - DNA, 201 bp, Homo sapiens
ttagccaggatggtctcgatctcctgaccttatgatccacccgccttggcctcccaaagtgctgggattacaggcataagccaccacacccagccttaatrttctgttttttgatctgagtactggttactttggtatgttcaaattatgaaaaatcaagtgagctgtatacttatgacagacatttatatatatatatat

SEQ ID NO: 28789 - DNA, 201 bp, Homo sapiens
aaatagctgagaagccagtattcatcctgtcatcctctgagaagcatgttggtagcagagtgcattatattaatacatggtaggaggtacgagcatagcartgagacttgggatttggcttaggcttgccatagcccaagaaatgctgaggggagattcatgttggtaaggtcgaaatagcattggactagaagtaaaaaa

SEQ ID NO: 28790 - DNA, 201 bp, Homo sapiens
ttttgttttatttttaattttttttgtgtgttttgagacagagttttgctctgtcacccaggctggagtgcagtggtgtgatctcggctcactgcaacctrtgctttctgggttcaagggatctggtgcctcagcctcccgagcagccaagattacaggcatgcacgaccacgcccggctaatttttgtatttttagtaga

SEQ ID NO: 28791 - DNA, 201 bp, Homo sapiens
gcctgtaatcacactttgggaggccaaggcaggcggatcacatgaggccaggagtttaagaccagcctggccaatatggtgaaacccgtctctactaaaamtacaaaaaattagccagatgtggtggtatgtgcctgtaatcccagctactcaggaggctgaggctgagaattgcttgaacctaggaggtggaggttgcag

SEQ ID NO: 28792 - DNA, 201 bp, Homo sapiens
gtggcgcaatctcggctcactgcaagctctgcttcccaggttcatgccattctcctgcctcagcctcccaagttgctgggactacaggcgcccgccacctygcccggctaattttttgtatttttagtagagacagggtttcaccttgttagccaggatggtctcgatctcctgaccttatgatccacccgccttggcctc

SEQ ID NO: 28793 - DNA, 201 bp, Homo sapiens
cttgccatagcccaagaaatgctgaggggagattcatgttggtaaggtcgaaatagcattggactagaagtaaaaaaaaagtctgtgttgtacttggctgwgctactatctttgtgacttttgacaagtaacttatgcccctgagcctcaaattcttcatttacattatggtgacaacaagtttcaaggccatttgccacc

SEQ ID NO: 28794 - DNA, 201 bp, Homo sapiens
acagactataaacacctcacttggggtgacagtgataaatcggatactaaagtagctacccaaaattagtagtttttgatagcagggtctcctgagaaagratgaaaggtgaaaggacgccaagaattagtatgagaagctgtccttccattatgcagaatactcacctgccatctgtgttgtaatgcaattccatcactg

SEQ ID NO: 28795 - DNA, 201 bp, Homo sapiens
aattgtgattacccttgggggaggcaggtaactagaagggagcatgagatgggcttctgagatgctggcaatgttctgtttgtttgtttgtttgtttgttttgagacagagtctcgctctgtcgcccaggctggagtgcagtggcgcaatctcggctcactgcaagctctgcttcccaggttcatgccattctcctgcctc

SEQ ID NO: 28796 - DNA, 201 bp, Homo sapiens
atttatttatttattcacttatttatttatttattgacagaatcttgctctgtcacccaggctggagtgcagtagcatgatcttggctcactgcaaccatracctcctgtgttcaaacgattttcgtgcctcagctacccaagtagctgggattacaggcatgtgccgccatgcccagctaaattttgtatttttagtaga

SEQ ID NO: 28797 - DNA, 201 bp, Homo sapiens
ggttgcagtgagccgagatcgtgccattgcactccagcctgggcaacaagagtgaaattccgtctcaaaaaaaaaaaaaaaaaaaaaattaacactgattrtctttggagtggtagaaatatagactattttttcatctttctgctttttttggtttctcaaaagaaatgatttttataatagaaatagctgatttcaggc

SEQ ID NO: 28798 - DNA, 201 bp, Homo sapiens
gaattgtgattacccttgggggaggcaggtaactagaagggagcatgagatgggcttctgagatgctggcaatgttctgtttgtttgtttgtttgtttgttttgagacagagtctcgctctgtcgcccaggctggagtgcagtggcgcaatctcggctcactgcaagctctgcttcccaggttcatgccattctcctgcct

SEQ ID NO: 28799 - DNA, 201 bp, Homo sapiens
agttgtgtgccttcctaccagtcactaatctttttgtgcttcagtgtcttagactgtaaattattgaaaagctacactttgttgaatgtccattatgtgcyacatacctatgtcagtcactttatgtacatcatttgttatctgcagcagcaaagtgagaacaaatgggaacttaggccctgaaaggcaagttgtgtgcaa

SEQ ID NO: 28800 - DNA, 201 bp, Homo sapiens
tgggagttcaagaccagcctgaccaacatggagaaacccagtctctacaaaaaatacaaaattagccaggcacggtgatgcatccctgtaatcccagctaytctggaggctgaggcaagagaatcacgtgaacctgggaggcggaggttgcagtgagccgagatcgtgccattgcactccagcctgggcaacaagagtgaa

SEQ ID NO: 28801 - DNA, 201 bp, Homo sapiens
cctctgattctactctctgctaacactccaccacctcctaattataggctgtacatttttcagacagtagtttttcattcctttgttttctttttaatgtrtagatatgaatacaagatgacagttcatttttagcgggcagagaattgtggtctctgactcaggaggaagactggggtatagctaactgggtttacttct

SEQ ID NO: 28802 - DNA, 201 bp, Homo sapiens
agaattgtgattacccttgggggaggcaggtaactagaagggagcatgagatgggcttctgagatgctggcaatgttctgtttgtttgtttgtttgtttgttttgagacagagtctcgctctgtcgcccaggctggagtgcagtggcgcaatctcggctcactgcaagctctgcttcccaggttcatgccattctcctgcc

SEQ ID NO: 28803 - DNA, 201 bp, Homo sapiens
tagaattgtgattacccttgggggaggcaggtaactagaagggagcatgagatgggcttctgagatgctggcaatgttctgtttgtttgtttgtttgtttgttttgagacagagtctcgctctgtcgcccaggctggagtgcagtggcgcaatctcggctcactgcaagctctgcttcccaggttcatgccattctcctgc

SEQ ID NO: 28804 - DNA, 201 bp, Homo sapiens
cccagagtgctgggattataggcatgagccactgcacctggcctatttttatttcttattttttcatagcaaacggatcctcagcatgggtgaagtagttktgattatggtcttggacaccaagatgacacttgggcaattcatctaaacatgggctgatatgctcacttgtcaaatgggagaagtatactacccataatc

SEQ ID NO: 28805 - DNA, 201 bp, Homo sapiens
cacttgggcccagaagttagaggctgcagtgagctatgattgtgccaccgcaccccagcctgggtaagagtaagaccctgtcccttaaaaaaaaaaaaaaagaaaaaactaacatggaaagaagtctaagataataaaatttaaaaacatgttgcagaagactttgtatagcatctctcttccccttttaaagcaagtgtg

SEQ ID NO: 28806 - DNA, 201 bp, Homo sapiens
ttaatccagaaattctttgaagaatttagtgtaagtagagaattacataaattatgtgcatctgttttgtagactatgcagatgattgaaagaatgactgtatttctaagacataattatgcctcatcttaccagaaagatgccatggaaggttttcatacaattccatcacactgctacctgactgataacagttgtaaa

SEQ ID NO: 28807 - DNA, 201 bp, Homo sapiens
agaccccgctcccaacagcaactcatgccgctgccgcttgactggaaccagcggcaactctgggcccttacgcttctgctgttctatcatggcggcaaccrgtctcttcagcgccgccactgaccgcgctgccgctctcaggcgccacgcaattggttccaaattagtccttcctccacaacttccagcttggaagaacca

SEQ ID NO: 28808 - DNA, 201 bp, Homo sapiens
tttaatccagaaattctttgaagaatttagtgtaagtagagaattacataaattatgtgcatctgttttgtagactatgcagatgattgaaagaatgactgtatttctaagacataattatgcctcatcttaccagaaagatgccatggaaggttttcatacaattccatcacactgctacctgactgataacagttgtaa

SEQ ID NO: 28809 - DNA, 201 bp, Homo sapiens
tatcctttcccccattcagttcattcccaatgtgtaacacttattaccagtttgatgtatccttttcagtgttctctgtgtatactaaatatacacaagtrtgtgtaacatacacagtttatatcatgtgcatatatatataaatacacatgtatatgttatacgcactggaacctacaatacatattatgtcttggttct

SEQ ID NO: 28810 - DNA, 201 bp, Homo sapiens
acttgtccaagccttagatactatctcattaacttgtcaccataggtgttttttttggggagagggggagattatttatttatttatttatttatttattyatttatttattttgagacagggtcttgctcagttgcccagcctggagtgcagtggcaggattatggctcactgcaacttccagctcttgggctcaagcga

SEQ ID NO: 28811 - DNA, 201 bp, Homo sapiens
gggcctaagggccccacctcttgataccattgaattggggattaggcttcaaagtgaatattggagaaataccaaagttcatgttgaactttagtcccccmcgtgggggtattaagaggtggtattaagaagtattaatcacttgggaagtggttaagtcatgaaggctctgcccttgtaaatgtgattaatgcccttata

SEQ ID NO: 28812 - DNA, 201 bp, Homo sapiens
agccatggttgttatagctcggtaatgtgggtctgagaagctttgttgccttctctctactccattggagatgccaaggaagaattgttatttcatcttcycttaaaactttgacttgtctcctgtagatgcttggccaggctgtcagaacatcctgggagttaatgagagaaaaatacatatagctcccactaagtgcct

SEQ ID NO: 28813 - DNA, 201 bp, Homo sapiens
cctcccgagtagctgggattacaggcatgtgccaccacgcccggctaattttgtttttgtgtgtgcgtgttttgttttgttttgttttgagacagagtttygctcttgttgcccaggctggagtgcagtggcgcgatcttggctcaccaaaacctccgcctcccacgctcaagcgattctcctgcctcagcctcccgagta

SEQ ID NO: 28814 - DNA, 201 bp, Homo sapiens
actggactgggggaccaggtcgatgggatggccgaatggggccaggctctgtgcctcggtctgtacgctgtgatcgttctgtgccaatggggccagggggyagaggctgctcccggggcagctcctggattgggcacacagtaaagtgcattgggggagggaaagggaaatccaaattggaatgcccagaacacacacgca

SEQ ID NO: 28815 - DNA, 201 bp, Homo sapiens
aaagtgctgggattacaggcttgagccatcgtgcccggccagcttttttcttttttttttaagttacagagtcttgctctgtcacccagactggagtgcartggtgcaatccagtgagttaaagctcactgtaaccttgaactcctgggctcaaacagttctcccacctcagcctcctgagtagctagcagtactagctcc

SEQ ID NO: 28816 - DNA, 201 bp, Homo sapiens
ggaaagtccacatccctattccgtttcaccttccagttgggggagtccgtgatgatccaggtcccccaaggttgctgctcagtttttgataatcctggaayggctttagttccactggatgcagctgaggggaaaaaaatcatgagctgcctaccttgaaatacagaatccctactcccaagtcttggcgctccctagccc

SEQ ID NO: 28817 - DNA, 201 bp, Homo sapiens
ggtgatccacctgcctcggcctcccaaagtgctgggattacaggtgtgagccactgtgctgggaccttttttgctttcttatcttcttagtctttcttcaktaacctgataccagaccccatcttctttgccattttttaatcttggaaatcacaggagagtctggtaaataaactggtatcatcttgtgtttggaaaggg

SEQ ID NO: 28818 - DNA, 201 bp, Homo sapiens
ggtaaataaactggtatcatcttgtgtttggaaaggggtcactgatgtctctagacacatactcccttggatgccagacagataatataatgtccatgtgktttttttttgtttttcatccgtgttatttttcctggatctataacctgagcttcattaagtttatttatttaattttttgagatggagtccctctctgtc

SEQ ID NO: 28819 - DNA, 201 bp, Homo sapiens
ctcccaaggcttaggtatccagcgcagggcatctggtggggaggcctaggggacaggcatgtgttaaagagtgagtcacagtgagaggtcagcgatgagayggaaggacaggaaatcaggtggcaactcgaatttagagttggggccacaagggtttctccttcacctgctggtaaaggtcgacgcgctgggtgcggaaga

SEQ ID NO: 28820 - DNA, 201 bp, Homo sapiens
ctcaagggagggtgagggctgggaagaaccaaccttcagttctgagatctgtgctcccttcagtcaggtggtagatccatttccggggcacacagagcccrtctttcctgcagaggtggtggtggcaaggaggaaagaatgagcatcaccccaaccatagtgtcccagcttcttttttttttttttgagacagagtctcac

SEQ ID NO: 28821 - DNA, 201 bp, Homo sapiens
ctatcggggaaacggaagtggccgtcggtggcaggtttgggggagaccggaagtgacggtccgtggggaagtcgggggcggagccgcggggtggtgggtgkgtgtgtgtgtgtgtgtgtgtgtgtgtgtgtgtgtgtgtttggctgtgggttagttgtgccgttctgctggaacaccgtgggaaggcagtagacgcgggca

SEQ ID NO: 28822 - DNA, 201 bp, Homo sapiens
aagggacaggcatggctctggcctttgggaagggaaacagcacaggaaccctaagcaagtgtgtcttactgatagacattggtcaggtctatgctgtgttyttaaagggtagaaatcagaacccataatggagataggtccttgatagactgttgagtgaaattactaatttttatggcatagcttgagtctcttgagctt

SEQ ID NO: 28823 - DNA, 201 bp, Homo sapiens
cctcaggtgatgtgccctcctcggcctcccaaagtgctggtattacaggcatgagccaccgcacctggcctcagattttctttttattgatccctttgttygtattccagtagaacgttttctgatgttttgtgagtgaggctgattttgttctgtcctccacatggatagaacttaatgcagagggaaatacagaggaag

SEQ ID NO: 28824 - DNA, 201 bp, Homo sapiens
cttgaacctgggaggcggaggttacagtgagctgagatcatgccactgcactccagcctgggcaacagagcgagactctgtctcaaaaaaaaaaaaaaaaattacagatgcttattatgcatctaatttgtgtcagtcttatgctagttgctagcgagtcggagataaaattgcagagccatgccttcagggagtctagtt

SEQ ID NO: 28825 - DNA, 201 bp, Homo sapiens
tccctaagccgtcgatctcctgccctttgtgtttctctccctgtgccccggaatcagaagggggatggggacaggtgtgaatgtgtgtgtgtgcaggagawactttttaggtattggggcagggattaatgctagggagtctttcgggtacactctggtctgggcaacagcgggccttccttccttcgttcttctttagag

SEQ ID NO: 28826 - DNA, 201 bp, Homo sapiens
  misc_feature (101)..(101): n is a, c, g, or t
tgtgtgtgtgtgtgtgtgtgtgtttggctgtgggttagttgtgccgttctgctggaacaccgtgggaaggcagtagacgcgggcagtcagctagcaggtcngtcgccccgtgagtgccgtttcgggtctatagtgagttaggagggttcgatgggcgtggcgcgcgtgcgcgaaaccactttctccgcagagtgtggggcg

SEQ ID NO: 28827 - DNA, 201 bp, Homo sapiens
ggcaggcctcatccgtggctccgtcttctaccaatgtcgagtcctcagctgagggggctcccccgccaggtccagctcccccgccagccaccagccacccragggtcatccggatttcccaccagagtgtggaacccgtggtcatgatgcacatgaacattcaaggtgagaatagttgctggcgagaagagcaggatcagc

SEQ ID NO: 28828 - DNA, 201 bp, Homo sapiens
atcccccccaggtaagggacctgttgggcgatggggtcagggtacttgagagaactggagagatctgagaggaagtatggtgttctttaatttcacagccrcttcctgaggagccaatggaagttcagggagcagaaagagcttcccctgagcctcaggtactctagagagggggaggttgaggggccagataatgtggag

SEQ ID NO: 28829 - DNA, 201 bp, Homo sapiens
tggacaccccaacagcgatgtgtctttctggaggactcgcagtttcgcggggccgaggcccttggcccagggcaggttaagagaagagggcacggagaggmggtaatgcctccacccccggccttcggaagcacgctggccggcctttaaattccccacggtcagggtcttgtctttctgtccactcggactccatttgct

SEQ ID NO: 28830 - DNA, 201 bp, Homo sapiens
aggcagtgtgggggaagcactgaagcctgtagtccccacttgggggctaggggtttgctcactcagcaataaataactgtgtcacatcaaatcctaaatawaccactacaaagtgagagttactgccactctgttcttactgacaccgtccagctgggagtttaggtggtagaggatccagggggaatgttgaaatgggag

SEQ ID NO: 28831 - DNA, 201 bp, Homo sapiens
tttttttttttaaatccttttattactcttttttaacaaacagccccagggacaggggaccaggggaagggggaggaggggaagtgaggccccagccccasaacccctccccgcccacccctttcccccttatatatttataatctatatacaagccccgggggtagggggcaagaggaactccctcagcggggtgggggc

SEQ ID NO: 28832 - DNA, 201 bp, Homo sapiens
cagatggcaacccacacattgatcacggggctagaagagtatgtgcgggagagttttgtgagtaacccttctctattcctttcctctcctgggtctggtcraggcagctgcctcctccactcccagtcttatgattcttgattttgggatctttgtgttatcttgtctctcagtccttggtgcaggttcagccaggtgtgg

SEQ ID NO: 28833 - DNA, 201 bp, Homo sapiens
ccgagggctgaggcttgcgatttagttaaaaaacaaacaaaatttgggtgaccagtatattagagtttattaatactgttctattttggtgtaatgtttgmatttttttttttttttttttgagatgggagtctcgttctgttgcccaagctggagtgcagtggcgcgatcttggctcactgcaatctccacctcccgggt

SEQ ID NO: 28834 - DNA, 201 bp, Homo sapiens
atgtctgttttttcatctgtaaaattggcaaatcatcaatcttataggattaaatgaaataatgcacataaagcccttagcaaagacttgcacatggtaaktccaaagtatatatttgctataattaatagtaatgtttgcaaagcacttagtttctggtgggtaataagttctcaaataataggcagtaagaattgccaa

SEQ ID NO: 28835 - DNA, 201 bp, Homo sapiens
tgcccagcctccacccacccctcaaccctccatggctgatcttcagttctctcagcttctggggaacctgctagggcctgcagggccaggggctggagggyctggtgtggcttctcccaccatcactgtggcgatgcctggtgtccctgcctttctccaaggcatgactgacttcttgcaggtgagtggctggcttgccat

SEQ ID NO: 28836 - DNA, 201 bp, Homo sapiens
gcaaaactctgtctctacaaaaaatacaaaaattagccgatgtggtggcacacgcctgtagtcccagctactagggaggctgaggagggaggattgcttgrgcctgggatgtcgaggctgcaatgagccctgattgtgccactgcactccagcttgggcgacagagactctgtctccaaacaaacaaaacaccaccaaccc

SEQ ID NO: 28837 - DNA, 201 bp, Homo sapiens
gaaggtgaaaccgcagccccctctgagtgatgcctacctcagtggtatgcctgccaagagacgcaaggttggttttcctcttccctaagcctctctctctrtccaggtttccccgtcatgcctggaatcaaactatgtagagatggtgggagctcttgttattcagtctcccctcccctcgtttaatgaggaaactttttc

SEQ ID NO: 28838 - DNA, 201 bp, Homo sapiens
agagtggggtgacacagggtgtggggacaacaagggagacacatgggagactaatactgagaattctggagtaaaaacacagtgaaagaaacaggaaagaraacagagaaaacataacccagaagaattttcacgagtaagagtgcagtgaagcacaatctcaaacccatcccttacctcctgtagcagctctggttttct

SEQ ID NO: 28839 - DNA, 201 bp, Homo sapiens
gtccttctaagggttcctatgcatacagatgcacagactggaaagcaaagaaccagcaatgaatacataggtgggtgttcttgactctaacaccctaccarccgctttccagttgccttagccagacatggaaatcctactgacattctagagcccatggcccctcaggccacaatctccactccacccaaacttatcttt

SEQ ID NO: 28840 - DNA, 201 bp, Homo sapiens
ttcacagtatttaagaaataaaagtcggatttttctggctgctttctctctacattgtctccattaggtagtgtgtcccttaatcttgtgtgaactttttwaaattaatacttccttggaacactgttgtgttctactcagcacgctaaattgtacaagccagttttgatgtttgtttttttttttttttgagacagagta

SEQ ID NO: 28841 - DNA, 201 bp, Homo sapiens
ctgctcgccccaagctagcggggaagggcctggcaggtgaaggcagcacccgagtagcaggagcaggtgggggccgcacagccaggctggggggctgcagrgcagggcccacaggtaacagagaaaggggaggtggggcaggaggtggtgctggcggcagggagccaaagttcaccacaggcagctgtgagtctaccatgg

SEQ ID NO: 28842 - DNA, 201 bp, Homo sapiens
gtttttttttttaaatccttttattactcttttttaacaaacagccccagggacaggggaccaggggaagggggaggaggggaagtgaggccccagccccrcaacccctccccgcccacccctttcccccttatatatttataatctatatacaagccccgggggtagggggcaagaggaactccctcagcggggtggggg

SEQ ID NO: 28843 - DNA, 201 bp, Homo sapiens
agctagacctcttggaacatgagctcacggacatttaacaggcctgctggagagtccatgtgaagacactggttgataacccagtaatgttacagatgtcycaccaaggccctagatatgcaaaggaagccatattgggaccagcccaggtgtcagctgcagactgataaccagttgacctcgctcactggcacaaaaaag

SEQ ID NO: 28844 - DNA, 201 bp, Homo sapiens
gagggcccttctcgaggtggcggccctgtccgctcccaaggcttaggtatccagcgcagggcatctggtggggaggcctaggggacaggcatgtgttaaasagtgagtcacagtgagaggtcagcgatgagacggaaggacaggaaatcaggtggcaactcgaatttagagttggggccacaagggtttctccttcacctg

SEQ ID NO: 28845 - DNA, 201 bp, Homo sapiens
ctggcaggtgaaggcagcacccgagtagcaggagcaggtgggggccgcacagccaggctggggggctgcagagcagggcccacaggtaacagagaaagggraggtggggcaggaggtggtgctggcggcagggagccaaagttcaccacaggcagctgtgagtctaccatgggtagaagcatctgtaacaagaaatttggg

SEQ ID NO: 28846 - DNA, 201 bp, Homo sapiens
tccatattttcttggttcctgctttcctggaatggggctgctgtagtgtcttgtgtcttcaggtttcagcttttttttttttttttttttttttttttgaratggagtctcactctgttgctaggctggagtgcagtgtacaatcttggctcactgcaacctctgcctcccgggttcaagtgattctcctgcctcagcctc

SEQ ID NO: 28847 - DNA, 201 bp, Homo sapiens
gcagccagtccttgtgggtgagttttcattcttccccactcagagtttaaactcctttcctagtctgctcactggcactttccagttctttccatattttsttggttcctgctttcctggaatggggctgctgtagtgtcttgtgtcttcaggtttcagcttttttttttttttttttttttttttttgagatggagtctc

SEQ ID NO: 28848 - DNA, 201 bp, Homo sapiens
tttccctccctggaaaaacattgcaacagggccaggtgcagtggctcacgcctgtaatcccagcactttgggaggccaaggtgggcggatcatctgagatygggagtttgagaccagcctggccaacatggtgcaaccccatctctactgaaaatataaacattagctggatgtagtggtgcacacctgtaatcccagcta

SEQ ID NO: 28849 - DNA, 201 bp, Homo sapiens
ccatacgaccgtccatagcccctctcgaggcagtggtagagtcccagctggtgactgtttttcaggcatttacggtagccacctcaatcttctagcgctcmagcgcgcgcacagacgtgaacgccgccagaggggggagggggtggggcgatgcttaagtgtccacgcatccgtagtgcgacgcacgcaggcgtagtacgg

SEQ ID NO: 28850 - DNA, 201 bp, Homo sapiens
aggttcatgctgaggtgtgagggaacagggtggggaagggagaggcacatgctggtggtggtagcctggggaccagagcagaagcttaagtagacagatgwggggggtgtgggggttggtttgtctttggaggtgtgtttgtgtggtgaagggagtacctctccctgtttagatggagggaaaggcaggctttctgattgg

SEQ ID NO: 28851 - DNA, 201 bp, Homo sapiens
ccaggagacggagcttgcagtgagctgaggtcgcaccactgcactccagcctgggtgatagagcgagactctgtctcaaaaaaaaaaaaaaaaaaaaaaamcaaaaattagccgggtgtggtggcaggcaacttaatcccagctacttgggaggcagaggcaggagaatcgtttgaacctgggaggcggaggttgaagaga

SEQ ID NO: 28852 - DNA, 201 bp, Homo sapiens
ccacacacttttcgggaggatgtggtgagcgatctggaagggcaaggtggggtcaggccagtcaaaacccctggaagcacctagctcttcctgggagggtrtcataggacccagagtgaggagttctcctgccctcccttgtttccctccaacccttcctgccttgtatccctactcactgtagaggagaaagcgctggta

SEQ ID NO: 28853 - DNA, 201 bp, Homo sapiens
caaggcatgactgacttcttgcaggtgagtggctggcttgccattcacctcatcttcctgtcccccggcccagccaggcagtggtaccttcttgccattayataaccactgggtaagagcccctagtgacatgttaggggaaggggccctgggaattcattgactctgaacctttcattttaaagatgaagaaaatgaggt

SEQ ID NO: 28854 - DNA, 201 bp, Homo sapiens
gtaatctcagcactttgagaggccaaggtgggcggatggcttgagcccaggagttcaaaaccagcctgggctacatggcaaaactctgtctctacaaaaartacaaaaattagccgatgtggtggcacacgcctgtagtcccagctactagggaggctgaggagggaggattgcttgagcctgggatgtcgaggctgcaat

SEQ ID NO: 28855 - DNA, 201 bp, Homo sapiens
aacactcacacccccttcctctcttcctttcccaagatggtctccagtcatcctaggccatccacccaagtccctcagagcctccaccataggcttccccyaatctcagtccatacctccttcccatccacgcccagagttgtcagttgactgtgctcagggcactggtagatggagttaaggataataccatagaagtag

SEQ ID NO: 28856 - DNA, 201 bp, Homo sapiens
cccagtctctgggacactggtgagcaagggtcggggagttctagtgcgtaacagtctagggagagactcctgtggtggtgcatggaagggcaggtctgaarttctcccttgctctctatccagcagggcgccggtctgggtaccaatgcctcgttggcccagatggtgagcggccttgtggggcagcttcttatgcagcca

SEQ ID NO: 28857 - DNA, 201 bp, Homo sapiens
agaacccatcctgcctccctcaggtgacatcacagctcttagccacatccctctggtgacatcacacgagcctctttcaccctgtaacaccagaagacttkgtgagtcctaatcctgttttatgagattttaaccccttaccttgattcctaggagtcaataagaaggctttggagtccaggcaggaagtcagggacttga

SEQ ID NO: 28858 - DNA, 201 bp, Homo sapiens
tgcagtggtgcaatccagtgagttaaagctcactgtaaccttgaactcctgggctcaaacagttctcccacctcagcctcctgagtagctagcagtactakctcctggctagtaattgtctttttttttttctggtagagatggggtcttgctatgtggcctagactcctgggctcaagcagttctcatgccttggcctcc

SEQ ID NO: 28859 - DNA, 201 bp, Homo sapiens
gagagttactgccactctgttcttactgacaccgtccagctgggagtttaggtggtagaggatccagggggaatgttgaaatgggaggagtgggaatgacrtctggagacaaaccccagaatgagatgaggattgaaaaattatctttattatcttgagtgggagctggagctggaagtctccagcttctccctccaacaa

SEQ ID NO: 28860 - DNA, 201 bp, Homo sapiens
agcacaggaaccctaagcaagtgtgtcttactgatagacattggtcaggtctatgctgtgtttttaaagggtagaaatcagaacccataatggagataggkccttgatagactgttgagtgaaattactaatttttatggcatagcttgagtctcttgagcttaaagccttggacatagctatctgtgtctttactcctgt

SEQ ID NO: 28861 - DNA, 201 bp, Homo sapiens
aggctggtctcgaactccttacctcaggtgatgtgccctcctcggcctcccaaagtgctggtattacaggcatgagccaccgcacctggcctcagattttmtttttattgatccctttgttcgtattccagtagaacgttttctgatgttttgtgagtgaggctgattttgttctgtcctccacatggatagaacttaatg

SEQ ID NO: 28862 - DNA, 201 bp, Homo sapiens
ggtgtgaacccaggagacggagcttgcagtgagctgaggtcgcaccactgcactccagcctgggtgatagagcgagactctgtctcaaaaaaaaaaaaaamaaaaaaaaacaaaaattagccgggtgtggtggcaggcaacttaatcccagctacttgggaggcagaggcaggagaatcgtttgaacctgggaggcggagg

SEQ ID NO: 28863 - DNA, 201 bp, Homo sapiens
gccggcaacttccccagctctgtagcttgcattgtggagaaatccagaaactggcccttgagagctaccccagagagcagtgctgagggaggggctgggcyggggggtaggtataggggctgtgatctgaaaataaattgtggggagaaaagctgttaggaagccagagtcctagcaatgccttaagtccactagcttcta

SEQ ID NO: 28864 - DNA, 201 bp, Homo sapiens
ctagttaagtcagggtagaaagcaccccaatacctgactgatgcacacatacaaactgcagaaaggggacagccaagtgagagaacagctccagactcaamccagagcaggtggggggtatgaccagtgctcaaaaaagtcccagctcagacacaccctcccaccctcactcacttctgtgccagccacatcctcaaaagg

SEQ ID NO: 28865 - DNA, 201 bp, Homo sapiens
tgtggtgagcgatctggaagggcaaggtggggtcaggccagtcaaaacccctggaagcacctagctcttcctgggagggtgtcataggacccagagtgagkagttctcctgccctcccttgtttccctccaacccttcctgccttgtatccctactcactgtagaggagaaagcgctggtaaccctggcctgtctcattca

SEQ ID NO: 28866 - DNA, 201 bp, Homo sapiens
tcaggatacccagatccagcccacacagaccttgtcactagtgccaaactggactgggggaccaggtcgatgggatggccgaatggggccaggctctgtgsctcggtctgtacgctgtgatcgttctgtgccaatggggccagggggcagaggctgctcccggggcagctcctggattgggcacacagtaaagtgcattgg

SEQ ID NO: 28867 - DNA, 201 bp, Homo sapiens
tggctaacatgatgaaaccccgtctctactaaaaatacaaaaaattagctgggcatggtggcgggcacctgtagtcccagctactcgggaggctgagtcasgagaatggtgtgaacccaggagacggagcttgcagtgagctgaggtcgcaccactgcactccagcctgggtgatagagcgagactctgtctcaaaaaaaa

SEQ ID NO: 28868 - DNA, 201 bp, Homo sapiens
gagcttgattttctggtcaccagattttctttttttttcttttttttgagatggagtcacgccctgtcttccaggctggagtgcagtggcgcgatctcgaytcactgaaacttccacctcttgggttcaagcgattttcctatctcagcctcctgagtagctgggattataggcgtgtgccactatacccagctgattttt

SEQ ID NO: 28869 - DNA, 201 bp, Homo sapiens
gtgcatctgtggtccctactagggaggctgaggtgggaagatcggttgggctcgggaggcagaggctacagtgagttgtgattgcgccactgcactccagsctgggcgacaaagcgagaccctctctcaaaaaaataagctaaaatgttaacagctttttattggggcagtaaagtacaagtgctcgatctggagtcctgt

SEQ ID NO: 28870 - DNA, 201 bp, Homo sapiens
acgccaggctaatttttgtatttttagtagagatggggtttcaccattttggccaggctggtcttgaactcctgacctcgtgatccacccgcctcatcctyccaagtgtgagtcactgcgcccggccgaaaatttttgtaataaaaagctaaaatgtggttaggcacagtagctcacacctataatcccagcactttggga

SEQ ID NO: 28871 - DNA, 201 bp, Homo sapiens
tttattaatactgttctattttggtgtaatgtttgaatttttttttttttttttttgagatgggagtctcgttctgttgcccaagctggagtgcagtggcrcgatcttggctcactgcaatctccacctcccgggttcaaagcaattctctgcctcagcctcccaagtagctgggattacaggcgcccgccaccacgccag

SEQ ID NO: 28872 - DNA, 201 bp, Homo sapiens
ccagggaaaatcaaagccagcaactggacagagaaatcaaatgaaggggaagtgtgaagatacaatatacctgctgggcaggagcccctgaagggagaaakccactttggccaccaggctgcagaggagtagaataaaaatccgaaggggatggcagatcctggcgtacctgtcgggaaacagggagaaatatatcaaccc

SEQ ID NO: 28873 - DNA, 201 bp, Homo sapiens
tagagtttattaatactgttctattttggtgtaatgtttgaatttttttttttttttttttgagatgggagtctcgttctgttgcccaagctggagtgcaktggcgcgatcttggctcactgcaatctccacctcccgggttcaaagcaattctctgcctcagcctcccaagtagctgggattacaggcgcccgccaccac

SEQ ID NO: 28874 - DNA, 201 bp, Homo sapiens
ttagtagagacagggtttcaccatattggccaggctggtctcgaactcctgaccttgtgatccacccgccttggcctcccaaagtgctggaattacaggcstgggccaccgcgcccagcctgatgtttgtattttttgtgcgaaagcactttatatataaataaaaaacctgtattttgagttgggagcatattccaggtg

SEQ ID NO: 28875 - DNA, 201 bp, Homo sapiens
cggcccaccttagcctcctaaagtgttgggattacaggcatgagccaccacacctagcttgataaatttatatcccatggactgccacaaaaaatttgccragggctgaggcttgcgatttagttaaaaaacaaacaaaatttgggtgaccagtatattagagtttattaatactgttctattttggtgtaatgtttgaat

SEQ ID NO: 28876 - DNA, 201 bp, Homo sapiens
tgctgggaggtgggggaggcaggggaagccccgggggacgctcctctggaggacgactggagaaaacagagcattagctccagtatccactaaatcgttaytttttcccacaagttatgtttcccaacttctgcttacaacctattctcttccctattaaagtccaggtgtttttgagtccttctaagggttcctatgcat

SEQ ID NO: 28877 - DNA, 201 bp, Homo sapiens
cacatctccaagtacttctgtgatccacaggcatcgagtcttacctgtaagggtgcagtgagggtgtcccagggcggaagcctccactgtttggatgtaaytgagagtccatggctcccccagagatctgcaggagaggagcacggttgaaacagctttagtatctgtggtcaagaaaaaagatcaccatcccacccatag

SEQ ID NO: 28878 - DNA, 201 bp, Homo sapiens
aagatcaccatcccacccatagaagcaaaaagtagggagaaaaatgatgtgacaaagtggtatctcacaactctgcaacgtagaaaggcttgattataaayacataccaggcagaaaaaaattattattcactgaaggggtcatgcaatgggaagcggggcctacctgagaactggaaggcccagcactgccatagaaaac

SEQ ID NO: 28879 - DNA, 201 bp, Homo sapiens
ctggaggacgactggagaaaacagagcattagctccagtatccactaaatcgttactttttcccacaagttatgtttcccaacttctgcttacaacctatyctcttccctattaaagtccaggtgtttttgagtccttctaagggttcctatgcatacagatgcacagactggaaagcaaagaaccagcaatgaatacata

SEQ ID NO: 28880 - DNA, 201 bp, Homo sapiens
ccggcaacttccccagctctgtagcttgcattgtggagaaatccagaaactggcccttgagagctaccccagagagcagtgctgagggaggggctgggccsgggggtaggtataggggctgtgatctgaaaataaattgtggggagaaaagctgttaggaagccagagtcctagcaatgccttaagtccactagcttctag

SEQ ID NO: 28881 - DNA, 201 bp, Homo sapiens
gatccagcccacacagaccttgtcactagtgccaaactggactgggggaccaggtcgatgggatggccgaatggggccaggctctgtgcctcggtctgtaygctgtgatcgttctgtgccaatggggccagggggcagaggctgctcccggggcagctcctggattgggcacacagtaaagtgcattgggggagggaaagg

SEQ ID NO: 28882 - DNA, 201 bp, Homo sapiens
aaaacataacccagaagaattttcacgagtaagagtgcagtgaagcacaatctcaaacccatcccttacctcctgtagcagctctggttttctgggaggcygctcccgacgtttagggggaaagggactaaccccggcagagtcccgaggagtcccacccacccctctcaccattggccccggctcctcaaagtgggggtc

SEQ ID NO: 28883 - DNA, 201 bp, Homo sapiens
gcaagaggaactccctcagcggggtgggggcaacccaggctccttgtcccctcgggacccaggctcctctgcccgtcgggagggcccttctcgaggtggcrgccctgtccgctcccaaggcttaggtatccagcgcagggcatctggtggggaggcctaggggacaggcatgtgttaaagagtgagtcacagtgagaggtc

SEQ ID NO: 28884 - DNA, 201 bp, Homo sapiens
ctaaatcgttactttttcccacaagttatgtttcccaacttctgcttacaacctattctcttccctattaaagtccaggtgtttttgagtccttctaaggrttcctatgcatacagatgcacagactggaaagcaaagaaccagcaatgaatacataggtgggtgttcttgactctaacaccctaccaaccgctttccagt

SEQ ID NO: 28885 - DNA, 201 bp, Homo sapiens
gcagtgtgggggaagcactgaagcctgtagtccccacttgggggctaggggtttgctcactcagcaataaataactgtgtcacatcaaatcctaaatatamcactacaaagtgagagttactgccactctgttcttactgacaccgtccagctgggagtttaggtggtagaggatccagggggaatgttgaaatgggagga

SEQ ID NO: 28886 - DNA, 201 bp, Homo sapiens
aatactatcggggaaacggaagtggccgtcggtggcaggtttgggggagaccggaagtgacggtccgtggggaagtcgggggcggagccgcggggtggtgkgtgtgtgtgtgtgtgtgtgtgtgtgtgtgtgtgtgtgtgtgtttggctgtgggttagttgtgccgttctgctggaacaccgtgggaaggcagtagacgcg

SEQ ID NO: 28887 - DNA, 201 bp, Homo sapiens
actttttcccacaagttatgtttcccaacttctgcttacaacctattctcttccctattaaagtccaggtgtttttgagtccttctaagggttcctatgcrtacagatgcacagactggaaagcaaagaaccagcaatgaatacataggtgggtgttcttgactctaacaccctaccaaccgctttccagttgccttagcc

SEQ ID NO: 28888 - DNA, 201 bp, Homo sapiens
  misc_feature (101)..(101): n is a, c, g, or t
atcatccggacaaacctggaatttctccaagagcagtttaatagcattgctgcgcatgtgctgcattgcacaggtcaggggctggccaggcgggggcaagnggggcctgttgcatgtgcagggctgccacgtgccagcattccctccttgtattttgcccacagatagtggatttggggcccggttgctggagttgtgtaa

SEQ ID NO: 28889 - DNA, 201 bp, Homo sapiens
tgggcgacagagactctgtctccaaacaaacaaaacaccaccaacccctaactgctatgtctgttttttcatctgtaaaattggcaaatcatcaatcttayaggattaaatgaaataatgcacataaagcccttagcaaagacttgcacatggtaagtccaaagtatatatttgctataattaatagtaatgtttgcaaag

SEQ ID NO: 28890 - DNA, 201 bp, Homo sapiens
cgtttctccaacctgcttactttttctctttagctccggtctgatatacaaaaacgactgcaggaagaccccaactacagtccccagcgcttccccaatgsccagcgggcctttgctgatgatccttagctctttgctctatggcccttcctcatcaggggaccgtttcccccctcttccttcacagtatttaagaaataa

SEQ ID NO: 28891 - DNA, 201 bp, Homo sapiens
gcatctgcctggctctgccactgaccctaacttttcctctctactccacctcccaattcttctacccttgctccctgcagaaacgcacccagcagcagggyccctaggccaggttctccacccgctccctccagcacttgaccttctctggggatggagatattcccacccataacccctccagcttaccagaactgaggc

SEQ ID NO: 28892 - DNA, 201 bp, Homo sapiens
gccctgggaattcattgactctgaacctttcattttaaagatgaagaaaatgaggtttagaaaaagaaagtatagtaattagtgtcactgctttctgacarcctgttcagaggaagaggtaggtaagttgtgctgcctgactctgttaaatacctaccatacttctgctttaagcagtgaagatcagaatgtaactcccca

SEQ ID NO: 28893 - DNA, 201 bp, Homo sapiens
gagcctggagctgatggggcccttggtgagcaaaaaggatgctttggcttgctccaggaaggggcagccagaggaatgtagatggccttggtttaggggtrttgccaaggtgggatgaggttgatgatctggttgtgggtgggcaggccaggtggtaaaggccattgctaacatctgcccttgtcccccaggattctttgg

SEQ ID NO: 28894 - DNA, 201 bp, Homo sapiens
agggtcagcatctgcctggctctgccactgaccctaacttttcctctctactccacctcccaattcttctacccttgctccctgcagaaacgcacccagcrgcagggcccctaggccaggttctccacccgctccctccagcacttgaccttctctggggatggagatattcccacccataacccctccagcttaccagaa

SEQ ID NO: 28895 - DNA, 201 bp, Homo sapiens
ggatcccttcagcgatgaactggtcagcctggtgctaccatttgttttcccctttggcatctgggaaggcttgacagtgccaccccgggctatttgacagygtgcttggggggggaaatgttagcttctgagggatggccttgtgtgcttgctgggatcatagggacttggccagcgtttctccaacctgcttactttttc

SEQ ID NO: 28896 - DNA, 201 bp, Homo sapiens
gggacctgatgacacctgagaatccccactcaggtccaccccactgtcagactgactcatctgagaggagtggagaaggagctagttaagtcagggtagaragcaccccaatacctgactgatgcacacatacaaactgcagaaaggggacagccaagtgagagaacagctccagactcaacccagagcaggtggggggta

SEQ ID NO: 28897 - DNA, 201 bp, Homo sapiens
tgggaaggcttgacagtgccaccccgggctatttgacagtgtgcttggggggggaaatgttagcttctgagggatggccttgtgtgcttgctgggatcatrgggacttggccagcgtttctccaacctgcttactttttctctttagctccggtctgatatacaaaaacgactgcaggaagaccccaactacagtccccag

SEQ ID NO: 28898 - DNA, 201 bp, Homo sapiens
aatttgggtgtgcatgttgggggcagggaggaatgtcagaaaaccagggaaaatcaaagccagcaactggacagagaaatcaaatgaaggggaagtgtgamgatacaatatacctgctgggcaggagcccctgaagggagaaagccactttggccaccaggctgcagaggagtagaataaaaatccgaaggggatggcaga

SEQ ID NO: 28899 - DNA, 201 bp, Homo sapiens
gtctaaggcaagcctaggatccagaccctggttccaaagtaaggaagcacttggaaagtccacatccctattccgtttcaccttccagttgggggagtccrtgatgatccaggtcccccaaggttgctgctcagtttttgataatcctggaacggctttagttccactggatgcagctgaggggaaaaaaatcatgagctg

SEQ ID NO: 28900 - DNA, 201 bp, Homo sapiens
catcttcctgtcccccggcccagccaggcagtggtaccttcttgccattacataaccactgggtaagagcccctagtgacatgttaggggaaggggccctrggaattcattgactctgaacctttcattttaaagatgaagaaaatgaggtttagaaaaagaaagtatagtaattagtgtcactgctttctgacagcctgt

SEQ ID NO: 28901 - DNA, 201 bp, Homo sapiens
gaatttagagttggggccacaagggtttctccttcacctgctggtaaaggtcgacgcgctgggtgcggaagactccactgtaggtggaaggcgtggccttsagacgggaattgaggccagagaaggacctaagggaagaagggcgtctaaggcaagcctaggatccagaccctggttccaaagtaaggaagcacttggaaa

SEQ ID NO: 28902 - DNA, 201 bp, Homo sapiens
caaacatcagaaccagttgaaagtgaagcacctccccgggagcccatggaggcagaagaagtggaggagcgtgccccagcccagaacccggagctcactcmtggcccagccccagcgggcccaacacctgccccggaaacaaatgcacccaagtgagagatggagggaatctttagtgggtggggaatcctaagtgaagta

SEQ ID NO: 28903 - DNA, 201 bp, Homo sapiens
gttctggaagacacctttagcttttcctcgtttaggccccttagcctgagagatgagcttgattttctggtcaccagattttctttttttttcttttttttgagatggagtcacgccctgtcttccaggctggagtgcagtggcgcgatctcgactcactgaaacttccacctcttgggttcaagcgattttcctatctca

SEQ ID NO: 28904 - DNA, 201 bp, Homo sapiens
tcggggaaacggaagtggccgtcggtggcaggtttgggggagaccggaagtgacggtccgtggggaagtcgggggcggagccgcggggtggtgggtgtgtgtgtgtgtgtgtgtgtgtgtgtgtgtgtgtgtgtgtttggctgtgggttagttgtgccgttctgctggaacaccgtgggaaggcagtagacgcgggcagtc

SEQ ID NO: 28905 - DNA, 201 bp, Homo sapiens
atcggggaaacggaagtggccgtcggtggcaggtttgggggagaccggaagtgacggtccgtggggaagtcgggggcggagccgcggggtggtgggtgtgkgtgtgtgtgtgtgtgtgtgtgtgtgtgtgtgtgtgtttggctgtgggttagttgtgccgttctgctggaacaccgtgggaaggcagtagacgcgggcagt

SEQ ID NO: 28906 - DNA, 201 bp, Homo sapiens
cttaagtgtccacgcatccgtagtgcgacgcacgcaggcgtagtacggtcccccgggcgacagcggtggcggctcctcggggtgctcggctccctcccacmtaggccggccccggcccgactcgccctcagaaactcactgtttggggctgcggactttctcgtcgtgccccacaaaagtaaagcttggggacctgggggg

SEQ ID NO: 28907 - DNA, 201 bp, Homo sapiens
tagagtcccagctggtgactgtttttcaggcatttacggtagccacctcaatcttctagcgctcaagcgcgcgcacagacgtgaacgccgccagagggggragggggtggggcgatgcttaagtgtccacgcatccgtagtgcgacgcacgcaggcgtagtacggtcccccgggcgacagcggtggcggctcctcggggtg

SEQ ID NO: 28908 - DNA, 201 bp, Homo sapiens
atcaccccaaccatagtgtcccagcttcttttttttttttttgagacagagtctcactctgttgcccaggctggagtgcagtggcgccatctcggctcacygcaagctctgcctcccgggttcacgccattctcctgcctcaacctcgtgagtagctgggactacaggtgcccaccaccatgcccagctagttttttatat

SEQ ID NO: 28909 - DNA, 201 bp, Homo sapiens
ccagcgcagggcatctggtggggaggcctaggggacaggcatgtgttaaagagtgagtcacagtgagaggtcagcgatgagacggaaggacaggaaatcargtggcaactcgaatttagagttggggccacaagggtttctccttcacctgctggtaaaggtcgacgcgctgggtgcggaagactccactgtaggtggaag

SEQ ID NO: 28910 - DNA, 201 bp, Homo sapiens
ccagatggtgagcggccttgtggggcagcttcttatgcagccagtccttgtgggtgagttttcattcttccccactcagagtttaaactcctttcctagtytgctcactggcactttccagttctttccatattttcttggttcctgctttcctggaatggggctgctgtagtgtcttgtgtcttcaggtttcagcttttt

SEQ ID NO: 28911 - DNA, 201 bp, Homo sapiens
gctcttagccacatccctctggtgacatcacacgagcctctttcaccctgtaacaccagaagacttggtgagtcctaatcctgttttatgagattttaacmccttaccttgattcctaggagtcaataagaaggctttggagtccaggcaggaagtcagggacttgaattcctccacacacttttcgggaggatgtggtga

SEQ ID NO: 28912 - DNA, 201 bp, Homo sapiens
ctcgaactcttgaccttgtgatccacccaccttggcctcccaaagtgctgggattacaggcttgagccatcgtgcccggccagcttttttcttttttttttaagttacagagtcttgctctgtcacccagactggagtgcagtggtgcaatccagtgagttaaagctcactgtaaccttgaactcctgggctcaaacagtt

SEQ ID NO: 28913 - DNA, 201 bp, Homo sapiens
atcccggatggaggtaagtgggcaaggctggctagggtctctctccaccctccctctcccttttctctcagcctgggagttagggcttcactggccacatycacagggtttggccttcataatctagtcttctctgcagtattcattcttttgggcagaaaaagtatctttgtgaggctctctcatttctgccaatcctct

SEQ ID NO: 28914 - DNA, 201 bp, Homo sapiens
atattggccaggctggtctcgaactcctgaccttgtgatccacccgccttggcctcccaaagtgctggaattacaggcgtgggccaccgcgcccagcctgrtgtttgtattttttgtgcgaaagcactttatatataaataaaaaacctgtattttgagttgggagcatattccaggtgcacactagcatagagctctcaa

SEQ ID NO: 28915 - DNA, 201 bp, Homo sapiens
tgagcttaaagccttggacatagctatctgtgtctttactcctgtaatacttggagacaaattgcatgtggggtggtccatggttttctaaaatgtgataytacctggatataagaaagccatatatagacttgtgattagatgtatataaatactctggtacttcccaagagtcagtttgtagttaggaaaaatatttct

SEQ ID NO: 28916 - DNA, 201 bp, Homo sapiens
gagacagggtttcaccatattggccaggctggtctcgaactcctgaccttgtgatccacccgccttggcctcccaaagtgctggaattacaggcgtgggcyaccgcgcccagcctgatgtttgtattttttgtgcgaaagcactttatatataaataaaaaacctgtattttgagttgggagcatattccaggtgcacact

SEQ ID NO: 28917 - DNA, 201 bp, Homo sapiens
cccatcccttacctcctgtagcagctctggttttctgggaggccgctcccgacgtttagggggaaagggactaaccccggcagagtcccgaggagtcccayccacccctctcaccattggccccggctcctcaaagtgggggtctgggaaagagaaaaagggtcagcatctgcctggctctgccactgaccctaacttttc

SEQ ID NO: 28918 - DNA, 201 bp, Homo sapiens
caacaagggagacacatgggagactaatactgagaattctggagtaaaaacacagtgaaagaaacaggaaagaaaacagagaaaacataacccagaagaawtttcacgagtaagagtgcagtgaagcacaatctcaaacccatcccttacctcctgtagcagctctggttttctgggaggccgctcccgacgtttaggggg

SEQ ID NO: 28919 - DNA, 201 bp, Homo sapiens
ccataacccctccagcttaccagaactgaggccgctgttgaccctctggggctcgtatcgggttgggggcctaggagaggggccctgaggggcttggggargcccaggcttgtgccttggatgaccccctggtgcagttacactcccttgacggctactaagctgggccagagcctgttggatgccagcagggttgctgtg

SEQ ID NO: 28920 - DNA, 201 bp, Homo sapiens
agaggagtggagaaggagctagttaagtcagggtagaaagcaccccaatacctgactgatgcacacatacaaactgcagaaaggggacagccaagtgagaraacagctccagactcaacccagagcaggtggggggtatgaccagtgctcaaaaaagtcccagctcagacacaccctcccaccctcactcacttctgtgcc

SEQ ID NO: 28921 - DNA, 201 bp, Homo sapiens
cctaccttcagtgtcgaggagggccccaaccgcagcacagtcagccgcccccgcagccaccggctgtgaccccggagccagtagccttgagctctcaaacrtcagaaccagttgaaagtgaagcacctccccgggagcccatggaggcagaagaagtggaggagcgtgccccagcccagaacccggagctcactcctggcc

SEQ ID NO: 28922 - DNA, 201 bp, Homo sapiens
gtgaatgtgtgtgtgtgcaggagaaactttttaggtattggggcagggattaatgctagggagtctttcgggtacactctggtctgggcaacagcgggccytccttccttcgttcttctttagagacctgtcggccatggagcctaatgatagtaccagtaccgctgtggaggagcctgacagcttggaggtgttggtgaa

SEQ ID NO: 28923 - DNA, 201 bp, Homo sapiens
attgtcccgtgacagacatgtgtcctctatgtcccacctttagtccttcccttctctccacccaactcaggatacccagatccagcccacacagaccttgycactagtgccaaactggactgggggaccaggtcgatgggatggccgaatggggccaggctctgtgcctcggtctgtacgctgtgatcgttctgtgccaat

SEQ ID NO: 28924 - DNA, 201 bp, Homo sapiens
gaaggggatctgggagaaggaggctgggaggtggggtggacctggctgagagatggctgggacctgatttagtaggtggtagaactcatggcttcatctgyaacctaccctgataaaccttctctcattgtagagtgagccccgggtacggctggtgatggctcagcacatgatcagggatatacagaccttactatcccg

SEQ ID NO: 28925 - DNA, 201 bp, Homo sapiens
tcttagttgaagggttagcattgaggggcgaggaggggctctctcggtataggtaaatgacgctaggacaggcagctgagaagaactgctgctctccctayggcaaggaaatccaaatggtatctcctgagcctgatcggaattctcctctgagttcacgaaggcctgctctctttcttagaattagtctttcaccattgt

SEQ ID NO: 28926 - DNA, 201 bp, Homo sapiens
atctcgagctcggctcactacaacctccacctcccgggttcaagtgattctcactcatgcctcagcctcctgagtagctgggactacaggcgtccgccacsacgcccggctaatttttgtatttttagtagagacagggtttcaccatattggccaggctggtctcgaactcctgaccttgtgatccacccgccttggcct

SEQ ID NO: 28927 - DNA, 201 bp, Homo sapiens
tccccagaaatcttgggcctttccaccaaactcttactcccacttacctcagtgactgatgctgttagctccttctctgctttcaagctgtctcctaccaytaggcgtaagtctgagtcctgtgatcacaagaaggcaggagacattgtcccgtgacagacatgtgtcctctatgtcccacctttagtccttcccttctct

SEQ ID NO: 28928 - DNA, 201 bp, Homo sapiens
atggccttgtgtgcttgctgggatcatagggacttggccagcgtttctccaacctgcttactttttctctttagctccggtctgatatacaaaaacgactrcaggaagaccccaactacagtccccagcgcttccccaatgcccagcgggcctttgctgatgatccttagctctttgctctatggcccttcctcatcaggg

SEQ ID NO: 28929 - DNA, 201 bp, Homo sapiens
gtgctgctgccaccacggactacaataacaatgtgagccctttgatggccctgccctttctcctcagccccagtactcccaaaacagaacaggctgaaatrcagataactctttccctccctggaaaaacattgcaacagggccaggtgcagtggctcacgcctgtaatcccagcactttgggaggccaaggtgggcggat

SEQ ID NO: 28930 - DNA, 201 bp, Homo sapiens
ttgacagtgtgcttggggggggaaatgttagcttctgagggatggccttgtgtgcttgctgggatcatagggacttggccagcgtttctccaacctgcttrctttttctctttagctccggtctgatatacaaaaacgactgcaggaagaccccaactacagtccccagcgcttccccaatgcccagcgggcctttgctga

SEQ ID NO: 28931 - DNA, 201 bp, Homo sapiens
agtgagccgagattgcactactgcactctagcctgggtgacagagcgagactgtctcaaaaaacaaaacaaaacaaaaaaacacacattgcaacaaaacartttctctctaaacctgtaagtgattttgtcctcccttacagagaaggtgataatctttgctgtaagcactgtcctcgtatcgtaccccttgtgcccctga

SEQ ID NO: 28932 - DNA, 201 bp, Homo sapiens
ctcgtggagagggatgtctggcatcctggacgccctggtcactcccagcaatcttccccagaaatcttgggcctttccaccaaactcttactcccacttayctcagtgactgatgctgttagctccttctctgctttcaagctgtctcctaccactaggcgtaagtctgagtcctgtgatcacaagaaggcaggagacatt

SEQ ID NO: 28933 - DNA, 201 bp, Homo sapiens
gtgccaccccgggctatttgacagtgtgcttggggggggaaatgttagcttctgagggatggccttgtgtgcttgctgggatcatagggacttggccagcstttctccaacctgcttactttttctctttagctccggtctgatatacaaaaacgactgcaggaagaccccaactacagtccccagcgcttccccaatgcc

SEQ ID NO: 28934 - DNA, 201 bp, Homo sapiens
tcccactggccccctgggaccccctggtcatggccaaaccctgggtaagagtgagggcatcagggcaggctgagctctgggtagagaaagggaagggctgwgtgggtgggttgaaggggtccaggttcaaggttacatcagacccgccccccaggctccaccctcatccagctgccctccctgccccctgagttcatgcac

SEQ ID NO: 28935 - DNA, 201 bp, Homo sapiens
aggaaggaaggtggagggtagagaactcctccagccggcaacttccccagctctgtagcttgcattgtggagaaatccagaaactggcccttgagagctamcccagagagcagtgctgagggaggggctgggccggggggtaggtataggggctgtgatctgaaaataaattgtggggagaaaagctgttaggaagccaga

SEQ ID NO: 28936 - DNA, 201 bp, Homo sapiens
aacccgggtggtgattgcccggcccactcctccacaggctcggccttcccatcctggagggcccccagtctctgggacactggtgagcaagggtcggggakttctagtgcgtaacagtctagggagagactcctgtggtggtgcatggaagggcaggtctgaagttctcccttgctctctatccagcagggcgccggtctg

SEQ ID NO: 28937 - DNA, 201 bp, Homo sapiens
gggtttctccttcacctgctggtaaaggtcgacgcgctgggtgcggaagactccactgtaggtggaaggcgtggccttgagacgggaattgaggccagagraggacctaagggaagaagggcgtctaaggcaagcctaggatccagaccctggttccaaagtaaggaagcacttggaaagtccacatccctattccgtttc

SEQ ID NO: 28938 - DNA, 201 bp, Homo sapiens
cggggagttctagtgcgtaacagtctagggagagactcctgtggtggtgcatggaagggcaggtctgaagttctcccttgctctctatccagcagggcgcyggtctgggtaccaatgcctcgttggcccagatggtgagcggccttgtggggcagcttcttatgcagccagtccttgtgggtgagttttcattcttcccca

SEQ ID NO: 28939 - DNA, 201 bp, Homo sapiens
gctaattttttatgtttttagtagagaagggggtttcaccatgttggccaggatggtctcgaactcttgaccttgtgatccacccaccttggcctcccaargtgctgggattacaggcttgagccatcgtgcccggccagcttttttcttttttttttaagttacagagtcttgctctgtcacccagactggagtgcagtg

SEQ ID NO: 28940 - DNA, 201 bp, Homo sapiens
catctggtggggaggcctaggggacaggcatgtgttaaagagtgagtcacagtgagaggtcagcgatgagacggaaggacaggaaatcaggtggcaactcraatttagagttggggccacaagggtttctccttcacctgctggtaaaggtcgacgcgctgggtgcggaagactccactgtaggtggaaggcgtggccttg

SEQ ID NO: 28941 - DNA, 201 bp, Homo sapiens
tcacacgtgtaatcccagcactttgagaggccaaggagggaggattgcttgagctcagtaatctgagaccagcctgggtaacagtgagaccccatctctaygaacaaaacaaaacaaaaacaaaaaaccaaggggtctgatatttcccccacttcccagagtgctgttgctcttctgtatatatgatgatcctttatcttt

SEQ ID NO: 28942 - DNA, 201 bp, Homo sapiens
cccccccagggacagggcgaggcacagaaccaggaaccacatggtgacagaggtgtccaggggccagcaggtggaggaactggggaacctccctggggagscttttaaaagcccttatcccctcagagccccacccctgccctgctggcacccagatgttggccaaggcccttcccctgttgcctgggggctggacaattg

SEQ ID NO: 28943 - DNA, 201 bp, Homo sapiens
tcatcccaggcagggaggatcatctcaggcagggaggaccatcccaggcagggaggatcatctcaggcagggaggaccatcccaggcagggaggaccatcycaggcagggaggactatctcaggcagggagggccgtcccaggcagggagggccgtcccaggcagtgaggaccatctcaggcagggaggaccatcccaggc

SEQ ID NO: 28944 - DNA, 201 bp, Homo sapiens
tttccttgacagcttcctaataaaaagtcttggggcagagcttgattggttgggctttggtcatgtgtccatctttgggccaattgcagggtctgcagctrgggtactgtgattggctcagccagaatcacatgattacctctgtggcccagaggccagcatatgccaggagaatccctcatccagggttatgtgagttgg

SEQ ID NO: 28945 - DNA, 201 bp, Homo sapiens
gctggctggtggaggctgttggatactgaccccgtgactgttcctggctggtggagggtcttggatactgacccgggaattgtaggtaattggcaccaccrtgcctggctaatttttttgtaattttagcacagatggggtttcaccatgttggtcaggcgggtctcgaactcttaacctcaggtgatccacctgcctcag

SEQ ID NO: 28946 - DNA, 201 bp, Homo sapiens
ccttagaatttttaggtagtttaatttcttcacctttgtctctgtgactttattaattgcttcttggcttcgggaggttctccctccagatttttgatgarcattcagttctgtttttttaaattctcattacttatttttaggttttgattgtgattttggagttggtatgcagggaacattgaattctgtgctccctgc

SEQ ID NO: 28947 - DNA, 201 bp, Homo sapiens
acatgagttgttatgagacaccttttaggagttcaagtagggtgaccaggggtgtctgtgggggtggttctagaaatgatcgaggctgggctcagtggctsacgcttgtaatcccagcactttgggaagccgatcacctgaggtcaggagtttgagaccagcctggccaacatggtgaaaccatgtctctactaaaaatac

SEQ ID NO: 28948 - DNA, 201 bp, Homo sapiens
atctgcccctttggtaaagcggtgggacagggcgttggctagggaagaggagaaagtactgaggcttcctgggaggagcaggaatctggtgtgggagtgarcactatgacaacatggaggagcgggggtggaagtttagggtggggccgcgcaagatagataagagccggggcaccccggactaggatagactgtgggcca

SEQ ID NO: 28949 - DNA, 201 bp, Homo sapiens
cagaaggaagtaaatacagggaatttgttcgtgagtaacagaggagctgagaagccaataggaaatagtgaggcaaaccaggagttaggaactacaggatrctgctacttggccagaaggacaaagggaggaggtggtattactacagtccagaaactgcagccctctggaacgcataggttcatggttggattgctcaga

SEQ ID NO: 28950 - DNA, 201 bp, Homo sapiens
agcccttatcccctcagagccccacccctgccctgctggcacccagatgttggccaaggcccttcccctgttgcctgggggctggacaattgccccccccsctccgatccccagagctgtagacggggagggagaaccagcacctgttctgcaggccctggatcacgctggacgcattcctggggttgaagccaggtgggg

SEQ ID NO: 28951 - DNA, 201 bp, Homo sapiens; identical to SEQ ID NO: 4889

SEQ ID NO: 28952 - DNA, 201 bp, Homo sapiens
ctagaggactttggttgagttcagagctgagcacacttgccttcagactctcctgggactcccaggtaactgattcaatgcttttgatactgggctcgggrccgtaggtaagtgatgggagcacattgacaatggcccaggcttggaagttgggggttggaacacttaaatgggcagtctcggttgttgacaggtagtttt

SEQ ID NO: 28953 - DNA, 201 bp, Homo sapiens
ccaaggaaaggagcatgtggtgggagggtgtggtgtttttcctgggagagctgggggtgctgggtgggaagggacatttgcagacccccccccataccagrtgggggatcccacatgccagtttgggaagcagggttttctggtgaaatttgggggaccctggaaggactggggagaccagatgtcagggtctggaggaca

SEQ ID NO: 28954 - DNA, 201 bp, Homo sapiens
cagaaaaccagagctgtgtaggaacaattcaggcagagaagggctggggcctggggcgggatggaacttccccaaggaaaggagcatgtggtgggagggtktggtgtttttcctgggagagctgggggtgctgggtgggaagggacatttgcagacccccccccataccagatgggggatcccacatgccagtttgggaag

SEQ ID NO: 28955 - DNA, 201 bp, Homo sapiens
gcaatgcaggacccacttgatgtgaggttgtagaatcacatactgacttgggggaggccagggcagaagcgctggctgagaaggcattcaggatccttggsgtggggttccagaaaaccagagctgtgtaggaacaattcaggcagagaagggctggggcctggggcgggatggaacttccccaaggaaaggagcatgtgg

SEQ ID NO: 28956 - DNA, 201 bp, Homo sapiens
gccttcagactctcctgggactcccaggtaactgattcaatgcttttgatactgggctcggggccgtaggtaagtgatgggagcacattgacaatggcccrggcttggaagttgggggttggaacacttaaatgggcagtctcggttgttgacaggtagttttggtcatgatctttgttgctggggataattgatgattag

SEQ ID NO: 28957 - DNA, 201 bp, Homo sapiens
gatatggggtcctcttggaggcaatcctaggaagaggattggagaagtggtgagaacaggcgccaagcagctgtgggaatgcaatgcaggacccacttgaygtgaggttgtagaatcacatactgacttgggggaggccagggcagaagcgctggctgagaaggcattcaggatccttggcgtggggttccagaaaaccag

SEQ ID NO: 28958 - DNA, 201 bp, Homo sapiens
cccagaaccagtcttctgccagtgcctcccattagtcaaacacagtgataagatggtgagcaaaggaggctgggaaatgtggtccttgcagtgcagaacargacagggcgggaaatggatctgagagcagacagacaaaaaactggcagagttgttagcaacttggcagagttggtaataactgccgagtccggtagaaaa

SEQ ID NO: 28959 - DNA, 201 bp, Homo sapiens
agaggagaaagtactgaggcttcctgggaggagcaggaatctggtgtgggagtgagcactatgacaacatggaggagcgggggtggaagtttagggtgggsccgcgcaagatagataagagccggggcaccccggactaggatagactgtgggccagagggatgagggtggggtgttggaggggaaggtcttatcgggggg

SEQ ID NO: 28960 - DNA, 201 bp, Homo sapiens
cagtcttctgccagtgcctcccattagtcaaacacagtgataagatggtgagcaaaggaggctgggaaatgtggtccttgcagtgcagaacaggacagggygggaaatggatctgagagcagacagacaaaaaactggcagagttgttagcaacttggcagagttggtaataactgccgagtccggtagaaaaaagttatc

SEQ ID NO: 28961 - DNA, 201 bp, Homo sapiens
ggggttggaaggggccagcttggctgggacagttagatttcagggcttcctggttaaagggtaaaagaaagggctatggttaaggctagaggtgggcttcygagaggttttggggtccttcctgtgaaccaggaatggcaatctgaggggaggttggggccctgagaacacagttgcggtcaggactgggacggggctcag

SEQ ID NO: 28962 - DNA, 201 bp, Homo sapiens
ccagggcagtgaggactatcccggagcagtgaggaccattctagagctgtgaggactatcccagggcagtgaggattatcctggggcagtagggactatcytatgacaatgaggaccatcccagtgctgtgaggaccatcctggggcagtaaggaccatctcagtcagtgaggatcatttcagtcagtgaggatcatcctg

SEQ ID NO: 28963 - DNA, 201 bp, Homo sapiens
gtccatcctagtgtgagtgaactgttctggcgtccctgactcgccctttgggatctgagcctttccctgcctgtttgtctgcacctgtcacagccccttcytttccccacctgctggtgacctcagacttccaggcatgagattgacacagctggggtggccccagcctcagccgagtgggtccaggtgcaccacatctgg

SEQ ID NO: 28964 - DNA, 201 bp, Homo sapiens
agacaggagacagtgtctggagcagacactgcatctgggcgtcaggtcatttggggtctggggctgggggatgggaggtggtgggttaggggagtggaaarggattctggaaaccagggatcaaggcgccaagggtgggacaggatcagaggctcactgaggaagaatctggagggctaaggggctcctaggctagggaaa

SEQ ID NO: 28965 - DNA, 201 bp, Homo sapiens
atgaacaaactgggctgtgttttcgtcgtcaaacaagttgtggcgacccagccagagctggtaattgctggggaaagatgggaatggagggatgagaagaygggaaggggaaaaggggatggggcaggggagcatgggggagggtccccaaagagagaaagggaaagagaaaaatgtgggtgggcggagacagaggaagaa

SEQ ID NO: 28966 - DNA, 201 bp, Homo sapiens
gagaaatacagacagcgaatgggaagatgaaagagtttgagagtgcaaaaggcaaatgaagagacagagcaaaaaagagctcaaaaggacagaggggtgaraaaggcggaggggagggcagtgagaaacagggtgagcaaaaaagaggcagatgagaaggataaaagacagggacagcgagaaacaggcccagggaagagg

SEQ ID NO: 28967 - DNA, 201 bp, Homo sapiens
caaagagagaaagggaaagagaaaaatgtgggtgggcggagacagaggaagaaagatatagttatggagaaatacagacagcgaatgggaagatgaaagaktttgagagtgcaaaaggcaaatgaagagacagagcaaaaaagagctcaaaaggacagaggggtgagaaaggcggaggggagggcagtgagaaacagggtg

SEQ ID NO: 28968 - DNA, 201 bp, Homo sapiens
cccacatacaattctctggttcgatgctgccccagccggaagccaaacaggtgctccccacttcgggttcctcggtgggcaactccacgaccttcacagcrtctgtgatggtatcagcaggctctgtcaggcggagcagcatgaggtcgtggctgtagtcctcgtctgcttggcgggtgtggttctccaggaggctcatgt

SEQ ID NO: 28969 - DNA, 201 bp, Homo sapiens
ccctgggggcagggctgcctcaccacacaggtgtctttgccaccttccaggtgtccgacacacagcatgaagtctgtcaccttctggacgtgggctttttygcactcatcattaggcaggattttgaggtccacacactggagatcatctggaaatgagactacgaacccgggagaaaaagggctgcagcccgacctcacc

SEQ ID NO: 28970 - DNA, 201 bp, Homo sapiens
gccctttgggatctgagcctttccctgcctgtttgtctgcacctgtcacagccccttcctttccccacctgctggtgacctcagacttccaggcatgagaytgacacagctggggtggccccagcctcagccgagtgggtccaggtgcaccacatctggaaagataggtgatggcagaacgtgacacacattggatgcaca

SEQ ID NO: 28971 - DNA, 201 bp, Homo sapiens
cagaaccagtcttctgccagtgcctcccattagtcaaacacagtgataagatggtgagcaaaggaggctgggaaatgtggtccttgcagtgcagaacaggrcagggcgggaaatggatctgagagcagacagacaaaaaactggcagagttgttagcaacttggcagagttggtaataactgccgagtccggtagaaaaaa

SEQ ID NO: 28972 - DNA, 201 bp, Homo sapiens
atctggaaatgagactacgaacccgggagaaaaagggctgcagcccgacctcacctgcttccctggccctttctcccttggacgcaggagtccccatcccygccttgggctacacagtctgcccccacatacaattctctggttcgatgctgccccagccggaagccaaacaggtgctccccacttcgggttcctcggtgg

SEQ ID NO: 28973 - DNA, 201 bp, Homo sapiens
gggcttcctggttaaagggtaaaagaaagggctatggttaaggctagaggtgggcttccgagaggttttggggtccttcctgtgaaccaggaatggcaatmtgaggggaggttggggccctgagaacacagttgcggtcaggactgggacggggctcaggaggagggaggcgtgagtggcagtccttctcggacagggtga

SEQ ID NO: 28974 - DNA, 201 bp, Homo sapiens
catggccctctcctcctggccagtggtcctccgcctgaacatggccgactttgtcttcagtttcctctgcctcggcattggtaggtgttggcttggggggygggggccctccctaaccccagccctgctctctggctttctggaggtgtatctagacttccgtgctgctcccctcggggcctctgtcttagcatgtctctg

SEQ ID NO: 28975 - DNA, 201 bp, Homo sapiens
gcctccagtgcccactcccagaggaaggtgggcagggattcccacagaggggacagggtctccagtcctggccaagggggaagggacctcagggtccagckcctgcacatggggcagggtccaggtggacagtgcctgcagacaggttagggggaggaggggcaggaccatctgcaggacgctgcccctgcgggcacatcg

SEQ ID NO: 28976 - DNA, 201 bp, Homo sapiens
tgggcggagacagaggaagaaagatatagttatggagaaatacagacagcgaatgggaagatgaaagagtttgagagtgcaaaaggcaaatgaagagacasagcaaaaaagagctcaaaaggacagaggggtgagaaaggcggaggggagggcagtgagaaacagggtgagcaaaaaagaggcagatgagaaggataaaag

SEQ ID NO: 28977 - DNA, 201 bp, Homo sapiens
ggctcctaggctagggaaacaggacctgggttgggcttttgaggttcaggaaaggatgcagctttagggaaccaggtctgagaggtaaagaagagcatctsgactgaagagtttgggggtgacttggggtccctacattggggttggaaggggccagcttggctgggacagttagatttcagggcttcctggttaaagggt

SEQ ID NO: 28978 - DNA, 201 bp, Homo sapiens
tgagaaacagggtgagcaaaaaagaggcagatgagaaggataaaagacagggacagcgagaaacaggcccagggaagagggaggaagagggaacagaacayggaagggagcgagaagcagacaaatgaaaaaggacgcgggacgtcagagtgagaactagaaacagaggcagagaggaagcaggagtgaccgagtgtggga

SEQ ID NO: 28979 - DNA, 201 bp, Homo sapiens
cagttgccccacccagctcccgctgaaaccagcccttccctgtgtctctccagagtggagggatatcctgtggggcggggagctggacagagggagaggcrccccctcccaggcacacaagttggggataaagcccttcctttactctggggcctcccttaggtccatctgggtgtgtgtttagtagggatgagggagcgg

SEQ ID NO: 28980 - DNA, 201 bp, Homo sapiens
atccccgccttgggctacacagtctgcccccacatacaattctctggttcgatgctgccccagccggaagccaaacaggtgctccccacttcgggttcctsggtgggcaactccacgaccttcacagcgtctgtgatggtatcagcaggctctgtcaggcggagcagcatgaggtcgtggctgtagtcctcgtctgcttgg

SEQ ID NO: 28981 - DNA, 201 bp, Homo sapiens
ggagcagacactgcatctgggcgtcaggtcatttggggtctggggctgggggatgggaggtggtgggttaggggagtggaaagggattctggaaaccaggsatcaaggcgccaagggtgggacaggatcagaggctcactgaggaagaatctggagggctaaggggctcctaggctagggaaacaggacctgggttgggct

SEQ ID NO: 28982 - DNA, 201 bp, Homo sapiens
gtgggttaggggagtggaaagggattctggaaaccagggatcaaggcgccaagggtgggacaggatcagaggctcactgaggaagaatctggagggctaasgggctcctaggctagggaaacaggacctgggttgggcttttgaggttcaggaaaggatgcagctttagggaaccaggtctgagaggtaaagaagagcatc

SEQ ID NO: 28983 - DNA, 201 bp, Homo sapiens
gctcactgaggaagaatctggagggctaaggggctcctaggctagggaaacaggacctgggttgggcttttgaggttcaggaaaggatgcagctttagggraccaggtctgagaggtaaagaagagcatctggactgaagagtttgggggtgacttggggtccctacattggggttggaaggggccagcttggctgggaca

SEQ ID NO: 28984 - DNA, 201 bp, Homo sapiens
ggacacagttgagagcggacagctggatggaaaaagtcactggagtgtggtgggatttgtagactcaggagccaaataggtggccgcagggaactaggggrcaggaggggatgatcagagtcctgtggggtgggggaagcccatgggagggttggggtcctccagagagagacagagatggcccagaatctgcccctttgg

SEQ ID NO: 28985 - DNA, 201 bp, Homo sapiens
gtgagcactatgacaacatggaggagcgggggtggaagtttagggtggggccgcgcaagatagataagagccggggcaccccggactaggatagactgtgrgccagagggatgagggtggggtgttggaggggaaggtcttatcggggggggatgtgaggccagcaagagaatcagggcccgttccccctcccacatcccc

SEQ ID NO: 28986 - DNA, 201 bp, Homo sapiens
ggggttgactctggggcccctgtccccctctccccagttctcatccatatgagcaagggcttcatgttactggccgtggccctgtgctgagtcctcctccygcccatggccctctcctcctggccagtggtcctccgcctgaacatggccgactttgtcttcagtttcctctgcctcggcattggtaggtgttggcttggg

SEQ ID NO: 28987 - DNA, 201 bp, Homo sapiens
gataagatggtgagcaaaggaggctgggaaatgtggtccttgcagtgcagaacaggacagggcgggaaatggatctgagagcagacagacaaaaaactggyagagttgttagcaacttggcagagttggtaataactgccgagtccggtagaaaaaagttatcaacagttcttgcaagaatcctgtgtggcttggggcaca

SEQ ID NO: 28988 - DNA, 201 bp, Homo sapiens
cttttaaaagcccttatcccctcagagccccacccctgccctgctggcacccagatgttggccaaggcccttcccctgttgcctgggggctggacaattgcccccccccctccgatccccagagctgtagacggggagggagaaccagcacctgttctgcaggccctggatcacgctggacgcattcctggggttgaagcc

SEQ ID NO: 28989 - DNA, 201 bp, Homo sapiens
tccacacactggagatcatctggaaatgagactacgaacccgggagaaaaagggctgcagcccgacctcacctgcttccctggccctttctcccttggacrcaggagtccccatccccgccttgggctacacagtctgcccccacatacaattctctggttcgatgctgccccagccggaagccaaacaggtgctccccac

SEQ ID NO: 28990 - DNA, 201 bp, Homo sapiens
aagcccttatcccctcagagccccacccctgccctgctggcacccagatgttggccaaggcccttcccctgttgcctgggggctggacaattgcccccccscctccgatccccagagctgtagacggggagggagaaccagcacctgttctgcaggccctggatcacgctggacgcattcctggggttgaagccaggtggg

SEQ ID NO: 28991 - DNA, 201 bp, Homo sapiens
cattggtaggtgttggcttggggggcgggggccctccctaaccccagccctgctctctggctttctggaggtgtatctagacttccgtgctgctcccctcrgggcctctgtcttagcatgtctctggggagctctgactcagttctactctatctgtgggatgtctctctcccccactctctgtttccctttctttttttg

SEQ ID NO: 28992 - DNA, 201 bp, Homo sapiens
gagaccagcctggccaacatggtgaaaccatgtctctactaaaaatacaaaaattaggctggcgtggcagcagctgcgtgtagtatcagctaatcgggagkctgaggcaggagaattgcttgagcccaaaggcagaggttggagtgagccgagatcacaccactgcactccagcctgggcaacagagcaagactccatctt

SEQ ID NO: 28993 - DNA, 201 bp, Homo sapiens
tagcatgtctctggggagctctgactcagttctactctatctgtgggatgtctctctcccccactctctgtttccctttctttttttgtcccctctctccrggtatctttctgtctgttgtgagggcgtgtgtgtgtgtgtgtgtgtgtgtgtgtgtgtgtgtctgcttgtcacggagggtgggagaggatgtctcagtcc

SEQ ID NO: 28994 - DNA, 201 bp, Homo sapiens
atcctagtgtgagtgaactgttctggcgtccctgactcgccctttgggatctgagcctttccctgcctgtttgtctgcacctgtcacagccccttcctttycccacctgctggtgacctcagacttccaggcatgagattgacacagctggggtggccccagcctcagccgagtgggtccaggtgcaccacatctggaaag

SEQ ID NO: 28995 - DNA, 201 bp, Homo sapiens
attgcagggctcctgatttctcttcagcctgacgctcttttcagttaacggcaaggcggtgcacccaagtccggtggtgtcctacctggtgacctcctacytgtgctgggacgccagcgacttgatgctgcactccggtgagggcggggcctcgggaggagggcggggcctcgggaagcgggtggggcctagggtgggact

SEQ ID NO: 28996 - DNA, 201 bp, Homo sapiens
gtgattttgaggatgtgccagactttggggttgtctgttgggctgcttgtgggtatcagcagagatgactttggagggtgaccaagaggggtatctggggktgactctggggcccctgtccccctctccccagttctcatccatatgagcaagggcttcatgttactggccgtggccctgtgctgagtcctcctcccgccc

SEQ ID NO: 28997 - DNA, 201 bp, Homo sapiens
caagcagaaccagatcccaagagacccaggcagccttggagaggggtgtccagcccagctctgccctgccaggcgacctgcgccagagccttcctctctgsctcagccccccagtcttgcctgaggttatccaaggggaatgccactggcctgtcaatcctgtggcagcatagatgccctcctcccagaccccaggcccct

SEQ ID NO: 28998 - DNA, 201 bp, Homo sapiens; identical to SEQ ID NO: 4888

SEQ ID NO: 28999 - DNA, 201 bp, Homo sapiens
gaggtgactttggggaggtgagtaggggtgattttgaggatgtgccagactttggggttgtctgttgggctgcttgtgggtatcagcagagatgactttgragggtgaccaagaggggtatctggggttgactctggggcccctgtccccctctccccagttctcatccatatgagcaagggcttcatgttactggccgtg

SEQ ID NO: 29000 - DNA, 201 bp, Homo sapiens; identical to SEQ ID NO: 4890

SEQ ID NO: 29001 - DNA, 201 bp, Homo sapiens
gctaatcgggaggctgaggcaggagaattgcttgagcccaaaggcagaggttggagtgagccgagatcacaccactgcactccagcctgggcaacagagcragactccatcttaaaaaaaaaaaaaaaaaaagaagaagaaagaaagaaatgattgaggtgattctgtggggtaaccttgaggatgagtgggatgaccttt

SEQ ID NO: 29002 - DNA, 201 bp, Homo sapiens; identical to SEQ ID NO: 4891

SEQ ID NO: 29003 - DNA, 201 bp, Homo sapiens
tggatgggcgggggaaggagggggagctggggcactgatggggcgagtggctacagctagctgggaagcagtgaagcagatgcctggttagctctcagaarccagttcagaggctgagtcccctccctcagcccttccagaccctgggggcagggctgcctcaccacacaggtgtctttgccaccttccaggtgtccgaca

SEQ ID NO: 29004 - DNA, 201 bp, Homo sapiens
ggtcttggcctatttggctaaaacaattttgcactgttgaaaagtagacaaagtagaaaaagggctaaaaggaggagatgtagcatctcggaaacaggtawacctctcttctgctggaagtctaagttggataaatatccactgtaaactggaactaagcttttgggcacattggttttagagtatttgacttgaaagttt

SEQ ID NO: 29005 - DNA, 201 bp, Homo sapiens
agttatcaacagttcttgcaagaatcctgtgtggcttggggcacatgagcaccccgagccaattatatggccagtggagtacagttggctgattggcttawgactggggctgagaatggggaatgggcaggaggtgaaatgcatggtggggaggtaagctgcaaatatccactcattctgaccaaatcacagagtgggctg

SEQ ID NO: 29006 - DNA, 201 bp, Homo sapiens
gggggaaggagggggagctggggcactgatggggcgagtggctacagctagctgggaagcagtgaagcagatgcctggttagctctcagaagccagttcasaggctgagtcccctccctcagcccttccagaccctgggggcagggctgcctcaccacacaggtgtctttgccaccttccaggtgtccgacacacagcatg

SEQ ID NO: 29007 - DNA, 201 bp, Homo sapiens
gtattactacagtccagaaactgcagccctctggaacgcataggttcatggttggattgctcagaagtggctagaatcagagaatagatacaactactackgaagacccaccacatgcagagatagagaggctaataaataccctggcttgccctctcctcccagaaccagtcttctgccagtgcctcccattagtcaaac

SEQ ID NO: 29008 - DNA, 201 bp, Homo sapiens
gcaaaccaggagttaggaactacaggatgctgctacttggccagaaggacaaagggaggaggtggtattactacagtccagaaactgcagccctctggaasgcataggttcatggttggattgctcagaagtggctagaatcagagaatagatacaactactacggaagacccaccacatgcagagatagagaggctaata

SEQ ID NO: 29009 - DNA, 201 bp, Homo sapiens
ttgcagtgcagaacaggacagggcgggaaatggatctgagagcagacagacaaaaaactggcagagttgttagcaacttggcagagttggtaataactgcygagtccggtagaaaaaagttatcaacagttcttgcaagaatcctgtgtggcttggggcacatgagcaccccgagccaattatatggccagtggagtacag

SEQ ID NO: 29010 - DNA, 201 bp, Homo sapiens
gtcagtgaggatcatttcagtcagtgaggatcatcctgtggctgggaggaccaccctggggccgtgagactcataaaatacctgtgaagatcattgcaggraaggaagaaaccattctgtgacaggtggaggggtccctgggataaagtggagcgatgggtcccaggagtggtgagggcagggcaggccttccaagcatcc

SEQ ID NO: 29011 - DNA, 201 bp, Homo sapiens
cccttatcccctcagagccccacccctgccctgctggcacccagatgttggccaaggcccttcccctgttgcctgggggctggacaattgccccccccccyccgatccccagagctgtagacggggagggagaaccagcacctgttctgcaggccctggatcacgctggacgcattcctggggttgaagccaggtggggca

SEQ ID NO: 29012 - DNA, 201 bp, Homo sapiens
attttggggtacacatcaccacattcctagtgcctccagatccaggaatgtgaagtttcaggggtctcccagggtaagttctttagcattacaaaatccartgtccctcccaaacaatgctggggtctcaatgagcctcccacttcttgctcccagttatgggtgctcaacgtcctgtcctccaaagtcccagagatctgg

SEQ ID NO: 29013 - DNA, 201 bp, Homo sapiens
aggggtctcccagggtaagttctttagcattacaaaatccagtgtccctcccaaacaatgctggggtctcaatgagcctcccacttcttgctcccagttakgggtgctcaacgtcctgtcctccaaagtcccagagatctggacaaccttccctcccaggtcaagatcaggctaaccacagattccaatgacccttccccc

SEQ ID NO: 29014 - DNA, 201 bp, Homo sapiens
agtgatgggagcacattgacaatggcccaggcttggaagttgggggttggaacacttaaatgggcagtctcggttgttgacaggtagttttggtcatgatmtttgttgctggggataattgatgattagtcagggggtgagagccttggatactgaagcagcgagtttggaaaattggtgaagcacctcgcatactgaaat

SEQ ID NO: 29015 - DNA, 201 bp, Homo sapiens
aggtgggcagggattcccacagaggggacagggtctccagtcctggccaagggggaagggacctcagggtccagctcctgcacatggggcagggtccaggwggacagtgcctgcagacaggttagggggaggaggggcaggaccatctgcaggacgctgcccctgcgggcacatcgcagaggccacctctccaggactact

SEQ ID NO: 29016 - DNA, 201 bp, Homo sapiens
agggtccagctcctgcacatggggcagggtccaggtggacagtgcctgcagacaggttagggggaggaggggcaggaccatctgcaggacgctgcccctgygggcacatcgcagaggccacctctccaggactactctctgactcgacggtaacaacacattaccacgaggaacggtgaactctggtgtggggggtgagat

SEQ ID NO: 29017 - DNA, 201 bp, Homo sapiens
acaataaaacctctcagcctcagaccttccattgccccccacctccccaccagggcagggtccatcctagtgtgagtgaactgttctggcgtccctgactygccctttgggatctgagcctttccctgcctgtttgtctgcacctgtcacagccccttcctttccccacctgctggtgacctcagacttccaggcatgaga

SEQ ID NO: 29018 - DNA, 201 bp, Homo sapiens
aggggacagggtctccagtcctggccaagggggaagggacctcagggtccagctcctgcacatggggcagggtccaggtggacagtgcctgcagacaggtyagggggaggaggggcaggaccatctgcaggacgctgcccctgcgggcacatcgcagaggccacctctccaggactactctctgactcgacggtaacaaca

SEQ ID NO: 29019 - DNA, 201 bp, Homo sapiens
  misc_feature (101)..(101): n is a, c, g, or t
tccagtgcccactcccagaggaaggtgggcagggattcccacagaggggacagggtctccagtcctggccaagggggaagggacctcagggtccagctccngcacatggggcagggtccaggtggacagtgcctgcagacaggttagggggaggaggggcaggaccatctgcaggacgctgcccctgcgggcacatcgcag

SEQ ID NO: 29020 - DNA, 201 bp, Homo sapiens
gaacgcataggttcatggttggattgctcagaagtggctagaatcagagaatagatacaactactacggaagacccaccacatgcagagatagagaggctrataaataccctggcttgccctctcctcccagaaccagtcttctgccagtgcctcccattagtcaaacacagtgataagatggtgagcaaaggaggctggg

SEQ ID NO: 29021 - DNA, 201 bp, Homo sapiens
cctccagtgcccactcccagaggaaggtgggcagggattcccacagaggggacagggtctccagtcctggccaagggggaagggacctcagggtccagctmctgcacatggggcagggtccaggtggacagtgcctgcagacaggttagggggaggaggggcaggaccatctgcaggacgctgcccctgcgggcacatcgc

SEQ ID NO: 29022 - DNA, 201 bp, Homo sapiens
cccctccctcagcccttccagaccctgggggcagggctgcctcaccacacaggtgtctttgccaccttccaggtgtccgacacacagcatgaagtctgtcwccttctggacgtgggcttttttgcactcatcattaggcaggattttgaggtccacacactggagatcatctggaaatgagactacgaacccgggagaaaa

SEQ ID NO: 29023 - DNA, 201 bp, Homo sapiens
gcctgggtaacagtgagaccccatctctatgaacaaaacaaaacaaaaacaaaaaaccaaggggtctgatatttcccccacttcccagagtgctgttgctsttctgtatatatgatgatcctttatctttcttgttgggtattagagatgtgcagtttgccagaaacaaagcagatgaggtcttggcctatttggctaaaa

SEQ ID NO: 29024 - DNA, 201 bp, Homo sapiens
ggtgtggttctccaggaggctcatgttgaagccagggtgtgggaagctctcactgacatgaacaaactgggctgtgttttcgtcgtcaaacaagttgtggygacccagccagagctggtaattgctggggaaagatgggaatggagggatgagaagacgggaaggggaaaaggggatggggcaggggagcatgggggaggg

SEQ ID NO: 29025 - DNA, 201 bp, Homo sapiens
gccctcaaacaccagcagttagggctctgattccctgcaccactcggagccaagatactagcatctcagctgccagttccccctgaaatataagccttggmcttcagaatgccctggttcttgcactcccagacccaggacctaggtccccaaagctactgttcctttcataataaaattttggggtacacatcaccacat

SEQ ID NO: 29026 - DNA, 201 bp, Homo sapiens
ggaacttccccaaggaaaggagcatgtggtgggagggtgtggtgtttttcctgggagagctgggggtgctgggtgggaagggacatttgcagacccccccmcataccagatgggggatcccacatgccagtttgggaagcagggttttctggtgaaatttgggggaccctggaaggactggggagaccagatgtcagggtc

SEQ ID NO: 29027 - DNA, 201 bp, Homo sapiens
gcccttccagaccctgggggcagggctgcctcaccacacaggtgtctttgccaccttccaggtgtccgacacacagcatgaagtctgtcaccttctggacrtgggcttttttgcactcatcattaggcaggattttgaggtccacacactggagatcatctggaaatgagactacgaacccgggagaaaaagggctgcagc

SEQ ID NO: 29028 - DNA, 201 bp, Homo sapiens
gtagggtcttggatactgacctggtgattgtgaataattggcaaggggtcttggatactgaccaggcgattgctgctggctggtggaggctgttggatacygaccccgtgactgttcctggctggtggagggtcttggatactgacccgggaattgtaggtaattggcaccaccgtgcctggctaatttttttgtaatttt

SEQ ID NO: 29029 - DNA, 201 bp, Homo sapiens
agtgcagtggcatgagatctcggctcactgcaacctccgcctcccaggttcaagccatcctctcacctctgcctcccacgtagttgggactacaggggagygctactattcctagctataattttgtattttttggtagaggtagagttttgccatgtttcccaggctggtctcgaacttgtaagctcaagcaatctgccc

SEQ ID NO: 29030 - DNA, 201 bp, Homo sapiens
cagggaacattgaattctgtgctccctgctgtcctaaggaagggacttgaattagtcaggagtttttgggtcacaagtgacacaaactctttttttttaawttttttttattttttacttttttaaatttgagatggagtttcactctttcacccaggctggagtgcagtggcgtgatcttggttcactgcaaccttcacc

SEQ ID NO: 29031 - DNA, 201 bp, Homo sapiens
cacaaactctttttttttaaattttttttattttttacttttttaaatttgagatggagtttcactctttcacccaggctggagtgcagtggcgtgatctyggttcactgcaaccttcaccccccgggtttgagcgattctcctgcctcagcctccggagtagctgggattacaggcgcccgctgccatgcccggctaact

SEQ ID NO: 29032 - DNA, 201 bp, Homo sapiens
ttttttacttttttaaatttgagatggagtttcactctttcacccaggctggagtgcagtggcgtgatcttggttcactgcaaccttcaccccccgggttygagcgattctcctgcctcagcctccggagtagctgggattacaggcgcccgctgccatgcccggctaacttttatctttttagtagagacggagtttcac

SEQ ID NO: 29033 - DNA, 201 bp, Homo sapiens
ttacttttttaaatttgagatggagtttcactctttcacccaggctggagtgcagtggcgtgatcttggttcactgcaaccttcaccccccgggtttgagygattctcctgcctcagcctccggagtagctgggattacaggcgcccgctgccatgcccggctaacttttatctttttagtagagacggagtttcaccatg

SEQ ID NO: 29034 - DNA, 201 bp, Homo sapiens
tcactgcaaccttcaccccccgggtttgagcgattctcctgcctcagcctccggagtagctgggattacaggcgcccgctgccatgcccggctaacttttrtctttttagtagagacggagtttcaccatgttggccaggctggtctcaaactcctgacctcaggtgatccacctgcctcggcctcccaaagtgctgggat

SEQ ID NO: 29035 - DNA, 201 bp, Homo sapiens
agtgggctgctctctgggatgacgagagccagggacttcagtgtcagctcaatgctctttcgcttgtctgttttccttcttagttttactctccccatgargctaggtccaaggcttaggcagcttcaggcttgtaatccttgaggagagactgcttttccttgacagcttcctaataaaaagtcttggggcagagcttga

SEQ ID NO: 29036 - DNA, 201 bp, Homo sapiens
ctttcgcttgtctgttttccttcttagttttactctccccatgaagctaggtccaaggcttaggcagcttcaggcttgtaatccttgaggagagactgctyttccttgacagcttcctaataaaaagtcttggggcagagcttgattggttgggctttggtcatgtgtccatctttgggccaattgcagggtctgcagctg

SEQ ID NO: 29037 - DNA, 201 bp, Homo sapiens
tcccctctctccaggtatctttctgtctgttgtgagggcgtgtgtgtgtgtgtgtgtgtgtgtgtgtgtgtgtgtctgcttgtcacggagggtgggagagratgtctcagtccctcttttcttactgggggtcatagggctcactgtccagccttctgtctctggccccaccccattgcagggctcctgatttctcttcag

SEQ ID NO: 29038 - DNA, 201 bp, Homo sapiens
gttttatttcattatgaattcttattttatgttgttgttagataatgatgcacacaattaaatttgagtgacaaacatatgtagagtaaattttgtatatrtataccaaaaacagtactaaagaatactagatttataccagtatgtgaatagcttagaaaaaaaattcgtttgtataataggaatgaagaaacataatca

SEQ ID NO: 29039 - DNA, 201 bp, Homo sapiens
agagggtatagaaactatggatcataactgaatgaaacattctgcaaatattacaaattatctgtctaatcaatatattgatgataggaaacgtattaatratatgttttattgggggtgggcagtgagctgaggatcctcaggcatctctatttttattttgtttctctacgtagtttctccagcatttggctctaggtg

SEQ ID NO: 29040 - DNA, 201 bp, Homo sapiens
atctctatttttattttgtttctctacgtagtttctccagcatttggctctaggtgccaagggcacatgtgacaagaaggtgccagctttataaaccttgkaacttcttctgtgtcagttctgagacatacaatttactaaaacacatcatgaaggcctgttttgaagagaaggggaataagactgcatctgttcatatga

SEQ ID NO: 29041 - DNA, 201 bp, Homo sapiens
ttctccagcatttggctctaggtgccaagggcacatgtgacaagaaggtgccagctttataaaccttgtaacttcttctgtgtcagttctgagacatacartttactaaaacacatcatgaaggcctgttttgaagagaaggggaataagactgcatctgttcatatgaggtatgtcgaagcacttggatatgttttcaaa

SEQ ID NO: 29042 - DNA, 201 bp, Homo sapiens
ttagattccatttgtacattttgtcttttgttgcaattgcttttggtgtttcagtcatgaagtctttgctcatgcctatgtcctgaatggtattgcctagsttttcttctagggtttttatggttttggatattacatttaagtttttaatccaccctgaattaatttttgtataatgtgtaaggaaggggtccagtttca

SEQ ID NO: 29043 - DNA, 201 bp, Homo sapiens
ttaggcaaagatactcttttcttgaaaacccaaactacattccattacctttcataacagtcatattccttgtccattcttgtttctaccatggttctaastcctacttttattcattacattaatcaaagtaattctctttcaaagaggaaactggaagttatgtaattgaggactattaaaaataagtattttggcaga

SEQ ID NO: 29044 - DNA, 201 bp, Homo sapiens; identical to SEQ ID NO: 5668

SEQ ID NO: 29045 - DNA, 201 bp, Homo sapiens
atatctgctcagctgtcttctgtcttctatttcccactggccagggtttccctgaggcagaactaccatctctgctgttctgctttccatcatccaatccmttgatggaggttatgaaagtcagacctcatgcccacaatgtggtgatccattcaagtcccaaatggaagggtgatgtgggtcaggcaaggtgctgaccag

SEQ ID NO: 29046 - DNA, 201 bp, Homo sapiens
cactccagcctaggcgacagagcaacatcctttctcaaaacaaaaaaggaaaagtggaagttttcactggtatcttttaagtatcaagtaacacagaatcraaagaataactaataatcctcggttcctgcctgcactgaacatgtaaaattgaaagcagttatacatatactatactagcacctcataaggactacccag

SEQ ID NO: 29047 - DNA, 201 bp, Homo sapiens
aggtgagcatgtgcagtgtgtttactggagttgtacacatgcttgcatgaggcattcttcccttttttggtggaatgcccccagaaggttgttttctaccsttttctctcttaacacgtatgcctcagcctactcgccctattcctgagctgctgactagcaattttaagcatctttacttattgtgaaattgcctctccc

SEQ ID NO: 29048 - DNA, 201 bp, Homo sapiens
gatctgccctcctcagcctcctccacacctggcctggatttcatttttctaagctgggtttgatggatggctctggtgatttgagatgggccaaattcggsatcttggagatagagtttggccaatttagtctggatcaggtgggggcaatctgactacattactttctcattctccttctgggaacagtgtacttgcgag

SEQ ID NO: 29049 - DNA, 201 bp, Homo sapiens
tatcagtgataaaatagataaataaattatggcatacctatataatagtatagtactatacagtaatcaaaatgaaccaactagagagacatgtttacaaraaatgtatataacaaagaaaataaacaaatttgagctgattagataatactcacaagtgtaagaggatctatccatagtgaaaaacattcattttaattc

SEQ ID NO: 29050 - DNA, 201 bp, Homo sapiens
atcttaagactcagtacaggtactcttaccagaaaatgtatacacacacatgaatatcactgtgttttcatagctaaagttgagaagtttctcaaatgtcyatcagtgataaaatagataaataaattatggcatacctatataatagtatagtactatacagtaatcaaaatgaaccaactagagagacatgtttacaag

SEQ ID NO: 29051 - DNA, 201 bp, Homo sapiens
atataaatataaaagtgtgaaaattattctgatattactcattttgaaaagaacaagaagtaatgagaattttcaaacactgctcctagaagtataaattratataattctttggcttagtatggcattatctgatgaagatgaaggagcacatcttaagactcagtacaggtactcttaccagaaaatgtatacacacac

SEQ ID NO: 29052 - DNA, 201 bp, Homo sapiens
aacttgagctgttctgagaataacatattttccataaagacagcattgaactcatctataagcatgtgctggtgctttactgcttgacattggtcacacarctgaatttaaaagcatcaaaaatattagtgcacattcagaattcaggtacacatagagtttaaggtcaggaccttaagggggatcatgcccagtgatatt

SEQ ID NO: 29053 - DNA, 201 bp, Homo sapiens
tcttcatttgcatgcttgcaagtgaaaaatcagcttttacttcaacgtcattatgaaaaattttattcaaattttttcaaaagaaaaaatagaaagaacastgtatgaatagtagttaacttgagctgttctgagaataacatattttccataaagacagcattgaactcatctataagcatgtgctggtgctttactgct

SEQ ID NO: 29054 - DNA, 201 bp, Homo sapiens
ggcagagaagattaggttttctaaatatacaatggcaaattctattttcttaccaaggtatggtaacatcaattttaaccttataattttttatcttactstttattagttgttattactctgtatctgtatgttttgctccacaataaaaaatgttaaaaaagcagaaacctaaagtacatttctaagtgtaaaattagg

SEQ ID NO: 29055 - DNA, 201 bp, Homo sapiens
caactgatgttgctgaacaaaaattatggagaagttaaagagggaaaaaattgcaaaacaatgaaagagaatatgtcttcatttgcatgcttgcaagtgaraaatcagcttttacttcaacgtcattatgaaaaattttattcaaattttttcaaaagaaaaaatagaaagaacagtgtatgaatagtagttaacttgagc

SEQ ID NO: 29056 - DNA, 201 bp, Homo sapiens
gccccagagtgtgatgttccccaccctgtatccaagtgttctcgttgttcagttcccacctatgagtgagaacacgtggagtttggttttctgtccttgcratagtttgctcagaatgatggtttctagcttcatccacgtccctacaagggacgtgaactcatcattttttatggctgcatagtattccatggtgtatat

SEQ ID NO: 29057 - DNA, 201 bp, Homo sapiens
ctaacaactgatgttgctgaacaaaaattatggagaagttaaagagggaaaaaattgcaaaacaatgaaagagaatatgtcttcatttgcatgcttgcaartgaaaaatcagcttttacttcaacgtcattatgaaaaattttattcaaattttttcaaaagaaaaaatagaaagaacagtgtatgaatagtagttaactt

SEQ ID NO: 29058 - DNA, 201 bp, Homo sapiens
aaatcactcagcttttgttggtctggaaaagtctttatttctctttcacgtttgaaggatattttctccagttacactattctaggctgaaagttttcttycttcagcacttttaatatgtcataccactctctgcacttttaatatgtcataccactctctcctggcctttttccactgaaaagtctgctgccacatgta

SEQ ID NO: 29059 - DNA, 201 bp, Homo sapiens
taaaaatacaaaaaattagccaggcgtggtggcgggctcctgtagtcccagctactccggaggctgaggcaggagaatggcgtgaacccgggggacagagyttgcagtgagccgagatcgcgccactgcactccagcctgggagacagcgacactccgtctcaaaaaacaaaacaaaacaaagcaaaaacagcgtaaaatt

SEQ ID NO: 29060 - DNA, 201 bp, Homo sapiens
tgtgtatatgtaccacattctctctccctcttttttttttttttttttttgagatggagtctcgctctgtctccaggctggagtgcagtggcgcaatctcrgctcactgcaacttcagcctcccaggttcaagtggttctcctgcctcagcctcctgagtcgctgggactacaggcgccagccaccacgcccagctaattt

SEQ ID NO: 29061 - DNA, 201 bp, Homo sapiens
aaactcatcacaaaatctgcagttgcttgaattttctagtttcaggttgaggttataggcttatcaaagaagaagcatttctcagagcaaaagtttgactrttccaaaattctaggggaaatatcactgtaatatagctttgctgtagctatatcaggtgtgtgaagtagagacaaggtggaacgtcaaaattagatggca

SEQ ID NO: 29062 - DNA, 201 bp, Homo sapiens
tccaaatcttggctattgtgaacagtgctacaacaaacatgggagtgtggatacctgtttgatacacttacttcctttcttttgggtatatacccaccagygagattgctggatcatatggtaactctaattttagtcttttgagaaacctttaaactgttttccatagtggttttactaatttatattcccacctgcggt

SEQ ID NO: 29063 - DNA, 201 bp, Homo sapiens
tgtattctgcaaatttactgagtttgtttatcaattctaatagtttttggtacagtcttcaggttttacaaatataagatcatattgtttacaaacaagcrtaatttgacttgttcctttcctatgtggatgctctttatttttcttgagtgattgctctagccagagcttctactattatgttgaataatagtagtgaat

SEQ ID NO: 29064 - DNA, 201 bp, Homo sapiens
ttagacttaaacttttccaaatagggtaaacgcacattttgcaaaaagaaagaggggtgggaggtaggattcatttacaacatttacaacttatggctggraagttgagtctttaaagaggaatttagttgtcctaacggaaccagctagagtgacatgtttacaaagaatataaataaaaagaaaaatgaagaaatttga

SEQ ID NO: 29065 - DNA, 201 bp, Homo sapiens
caggttttacaaatataagatcatattgtttacaaacaagcataatttgacttgttcctttcctatgtggatgctctttatttttcttgagtgattgctcyagccagagcttctactattatgttgaataatagtagtgaatgtgagcattcttgtcatgttccagatcttagaggaaagccttttagtttttcccaattt

SEQ ID NO: 29066 - DNA, 201 bp, Homo sapiens
ataatgcttcattatagcagaatacacatttgtcattaaaagagatatagagcagaatttctcagagttcagcagaatattcatagttgttacaaaaaaawgttcttaatttttaaatattttaggcaatgctggcttaagcgactttaacctttttgtttgtttttaaatcataagctttctgtatactctgttagtatg

SEQ ID NO: 29067 - DNA, 201 bp, Homo sapiens
tataatgcttcattatagcagaatacacatttgtcattaaaagagatatagagcagaatttctcagagttcagcagaatattcatagttgttacaaaaaaatgttcttaatttttaaatattttaggcaatgctggcttaagcgactttaacctttttgtttgtttttaaatcataagctttctgtatactctgttagtat

SEQ ID NO: 29068 - DNA, 201 bp, Homo sapiens
ttggagagtttagtccatttacattcaatgttagtattggtagttaggacttacttttgtcattttgttatttgttttctggttatgttgtggtctgctcktctttctttcctaccttcctatttttctttagtgaaggttattttctctggtgatataatatagttttttgctttttatgtttgtgtatccattctatgc

SEQ ID NO: 29069 - DNA, 201 bp, Homo sapiens
tgcgtgcctgtagttccaactacccaggaagttctggcagggggatcagtttagcccaggaatttgagtctgcagtaagctatgattgtgccatttcactmcagcctgggctgcactctagcctgggcaaccaaacaagactctgtctctaaaaacaaaaaaaaacgaacaaccgaaaacaaagcctcccactccattctg

SEQ ID NO: 29070 - DNA, 201 bp, Homo sapiens
aaaatctcttagcatttgcttgtctgtaaggattttatttctccttcaactatgaagctttttggcttgctatgaaattctgggttgaaaatccttttctygaagaatgtccccactctcttctggcttgtagggtttctgccaggagatctgctgttagtctgatgggcttctctttttggtgactcagcctttctgtct

SEQ ID NO: 29071 - DNA, 201 bp, Homo sapiens
ctgtaaggattttatttctccttcaactatgaagctttttggcttgctatgaaattctgggttgaaaatccttttctcgaagaatgtccccactctcttcyggcttgtagggtttctgccaggagatctgctgttagtctgatgggcttctctttttggtgactcagcctttctgtctggctgttcttaacattttttcct

SEQ ID NO: 29072 - DNA, 201 bp, Homo sapiens
tactattacccgtacgttttatagcttcaagtgattacttattgcccattaatgtccttttctttctgactgaagtaatccgtttgaaatttttctaggasagatctggtgctgatgaaatcactcagcttttgttggtctggaaaagtctttatttctctttcacgtttgaaggatattttctccagttacactattcta

SEQ ID NO: 29073 - DNA, 201 bp, Homo sapiens
tagcaacacttggtttctgcctgtatcagacaggtgaaattgcaagcagttatacaagtagtgtactaacttctcataaagcctactcaaggagggtattrttattgtgtgcgttttacagatggctatcctaaggctgatagtagttgtaaaatatagtctaagttcatatctatatgaaacagagtatctgggtttctg

SEQ ID NO: 29074 - DNA, 201 bp, Homo sapiens
atgtttctttgttgattttctgtctggaggatctgtctgatgctgaaagtggagtgttgaagtctccatctattattgtattgaggctttctctttgctttggtctaatagtatttgctttatatatctgggtgctccagtgttgagtgcatatatatttacaattgcaatatcattttgatgaattgacccctttatcat

SEQ ID NO: 29075 - DNA, 201 bp, Homo sapiens
gggttattttcagaaagatggggactgcaacatatcctgtaatagggacagtgtgaaagcagccttaatgttcagtgacaaggattggttaagtaaattayggaaaaaccaaacaatagcatcatatataattgtaaaaaaaaaaactaaccaataaacactgaagagatctaaataaactcatgtgaaagctaagaaata

SEQ ID NO: 29076 - DNA, 201 bp, Homo sapiens
tgctcatagtagtcactaataattctttgaatttcagtggtatcagttgtaatatctctgctttcatgtctgattttattaattttgatctttttttcttrgtcggcctgaacgtttgtcaatgttgtttaacttttcaagaaaacaggtttttgtttcattgatcttttgtattgttttcttcatttcaatttcatttat

SEQ ID NO: 29077 - DNA, 201 bp, Homo sapiens
gatatttgtatagatatatgggcctagtttcattcttctgcatatggatattcagttgtcccagcaccatttattgaagagactgtctttttccagtgtaygttcttggcatctttttcaaaaatgagttcactgtaggtgtgtgggtttgtttccgagttgtctgttctgttccatcgttctatgtgtcagttttaatgc

SEQ ID NO: 29078 - DNA, 201 bp, Homo sapiens
acttacttcctttcttttgggtatatacccaccagtgagattgctggatcatatggtaactctaattttagtcttttgagaaacctttaaactgttttccatagtggttttactaatttatattcccacctgcggtgtacagtggttcccgtttctccacatcctcaccagcatttgttactacctgtcttttgtatataa

SEQ ID NO: 29079 - DNA, 201 bp, Homo sapiens
gagggagttccccgaccccttgcacttcccgggtgaggcaacaccacaccctcctttggctcgtcctccgtgggcttcacccgctgtctaaccagtcccartgagatgagccatgtaactcagttggaaatgcagaaatcacccaccttttgtgttgatcttgctgggatttgcagactggagctgttcctattaggacat

SEQ ID NO: 29080 - DNA, 201 bp, Homo sapiens
taaaaattgttattcagatattcttgtatagagtatcaagaccctgtgaccctgtgttttacagaagctcttgaaggcaattctgattttgagaatcactrtcttcaaattacatgtcttaagtagggttgacaatgaggacatagaaccatgttccccctttggctctctctattttctttcctcaaactcagactccca

SEQ ID NO: 29081 - DNA, 201 bp, Homo sapiens
aacagaggactgagtttagggtaacatgagccgcaggaggtcaggagaaaatctgagaaaggagaagtccagaaaaggggagccccagcttctgactataractatccaaagctttgtctggtccctacaccacacatgtataggcagacttcatgaagcccagctaaaataataaaattgatttcagttatcatcaagca

SEQ ID NO: 29082 - DNA, 201 bp, Homo sapiens
ttacaaattatctgtctaatcaatatattgatgataggaaacgtattaatgatatgttttattgggggtgggcagtgagctgaggatcctcaggcatctcyatttttattttgtttctctacgtagtttctccagcatttggctctaggtgccaagggcacatgtgacaagaaggtgccagctttataaaccttgtaactt

SEQ ID NO: 29083 - DNA, 201 bp, Homo sapiens
catggaatacaatgacatagctgtggttgatgaactatattttatctattgcaatgatattttgaaatgcagtgctactcattgagtttccttgtgaggasattgtgtggcgaggacccagcaagacaagctactatcccaaaaaagctacttatatgaacttcatttccggtttctttcaaattgaaggtaaattccaag

SEQ ID NO: 29084 - DNA, 201 bp, Homo sapiens
ataggtttttcttctaggtttaattatctacttcatatgacaaaactttgacattctccatctatttttcccttggatccagaattcctaacacaacaagkgtggtcatgttacccacactcttagtttagcagaatacctatatcagttatgtttttctgcaagagaaaatcctccaaaactgctttagatatttgtgtc

SEQ ID NO: 29085 - DNA, 201 bp, Homo sapiens
tcaccacgacagagctcctgctcatttctctcatcagacagggcaattggtgagagttctgatagaaaaccattaggcatccacattacaccctaatttakatcctttggatgctttttgttttgtaatctcgtaacatctgtaaagactatttattattcttcagttaatgtaaaaaggacacaccaatagctggtatgt

SEQ ID NO: 29086 - DNA, 201 bp, Homo sapiens
tcttagtttagcagaatacctatatcagttatgtttttctgcaagagaaaatcctccaaaactgctttagatatttgtgtctcataagtctttggatttcrtttttctaagcttggtttggcagatggctctggtgattggagatgggccacatactgcatcttgcagctagtttggctgatttaggctggatcaggtagt

SEQ ID NO: 29087 - DNA, 201 bp, Homo sapiens
agaatattttgagaaagccagaactctagtagagaaatgcctgggggagcttcagcagagtccttcaccacgacagagctcctgctcatttctctcatcaracagggcaattggtgagagttctgatagaaaaccattaggcatccacattacaccctaatttagatcctttggatgctttttgttttgtaatctcgtaac

SEQ ID NO: 29088 - DNA, 201 bp, Homo sapiens
aaaggaaaagagcaggaaactccaacatggaagctgtcttaaatatctgtgtaaagtctactaacttcctgttgactgaagcaaattagaggagtgaattyagagtccaagttcaaggtagtcaccctgcctgtggtgggaggatactgcaggattatatgacaaaatgtagggtacttagaaacatttacaaaattgctg

SEQ ID NO: 29089 - DNA, 201 bp, Homo sapiens
aagagtttattgggaagctcaaggcattttgcttattgactttctgaagggccagagaaggacaatatatgcttattctgagaatattttgagaaagccaraactctagtagagaaatgcctgggggagcttcagcagagtccttcaccacgacagagctcctgctcatttctctcatcagacagggcaattggtgagagt

SEQ ID NO: 29090 - DNA, 201 bp, Homo sapiens
aatgagtcagagcaatattttcaaacgtggaatatgttggctccaaaatctcaataggtccccaaaacattgtatctcttttgtagtgataggaagtacayagagagagcaacatgccatttactttaaaaaagattgttttgacatgtgccctagggacactgcacaccttaaaacatcacctatgctgtaggtccctga

SEQ ID NO: 29091 - DNA, 201 bp, Homo sapiens
cccgtaaaaagtatcaaaagctctgctctgctcagtgaagatagcacatcctggaaagcatttgtgagtgttgattgaagtttatggtagtctgcattcastataacctgtctgtctttggtagaggccagataggttaagtgaatcgggttatagaaaggactaccatcccctgtaactttcaagtgttttgtcatgaca

SEQ ID NO: 29092 - DNA, 201 bp, Homo sapiens
gaattacaggcctgagccaccgtgcccagcctattatctgctttttataggtaattatactgaggcaggcagtagttgtaaaatggagtctcacatatctrtatgaaacagggaatctggtttcctgtctttgtagtctgactcgaagatcccctcttagaaaccattatagtgtaaaaactgaaaagatataaaatccaa

SEQ ID NO: 29093 - DNA, 201 bp, Homo sapiens
tgggattcactctccataaatccggcgttgaaaaaatgaatcaacagtggtcatgattctagttttgaccaagctacatataacagtgtaggcatctgatktatgatctatgtattaggttggaaaatttcccttacaactgacattgctgaatacaaattatatagaggttaaacaaggaaaaaaattacaaaatgatga

SEQ ID NO: 29094 - DNA, 201 bp, Homo sapiens
aggttggaaaatttcccttacaactgacattgctgaatacaaattatatagaggttaaacaaggaaaaaaattacaaaatgatgaataagaatatgacttratttgcatgctagcaaatgagaattcagctttcacatcaacatcagtatgaaaatttttatcttataacaaggacatagtatttgaataggagttaattt

SEQ ID NO: 29095 - DNA, 201 bp, Homo sapiens
aatttttatatttttagtggagacagggtttcaccatgttggccatgctggatttgcactcctgacctcaggtgatccacctgccttggcctcccaaagtrctgggattacagccatgagccactgcgcccgctttttataggtgattatactgaggcaggagtagttggaaaatggagtctcagagcatagctataccaa

SEQ ID NO: 29096 - DNA, 201 bp, Homo sapiens
cttaaagggaatcttgcccattgatattagtcctgccctaaaaaaagtcggacatggtatgtttactactaatcattttttttccataacgttaatggtaktttgtattttcccatgggcacctacattacacttatagactattttgatatttcaacctattattttctttgaatccttttaaggagttgttaaacaatg

SEQ ID NO: 29097 - DNA, 201 bp, Homo sapiens
tcggattataggtgcgtgccaccaccacctggctaatttttatatttttagtggagacagggtttcaccatgttggccatgctggatttgcactcctgacytcaggtgatccacctgccttggcctcccaaagtgctgggattacagccatgagccactgcgcccgctttttataggtgattatactgaggcaggagtagt

SEQ ID NO: 29098 - DNA, 201 bp, Homo sapiens
aaatcagagcaattactttgtctgactatggcattatctgattaagttgatggatcacatttgaacacccagtatttgcactgttatcagaatatatgtgsacacacatgcatatcactgagttttaatagctaaagttgagaagtctctcaaatatccatcagtgataaaatggataagtaaattatggcatacttgtac

SEQ ID NO: 29099 - DNA, 201 bp, Homo sapiens
aactacaaactgattagatccaccttgggatggacatgagccgaagctctaggtagcatctgaccttcaaaactcccactgcgggctggatgtgatggctyatgcctgtagtcctagtactttgggaggccaaggtgtgaagatcctttgagagcaggagttccctgtgcatcatatggaaactccgtctctacaaaaaat

SEQ ID NO: 29100 - DNA, 201 bp, Homo sapiens
tctgaaaagttcatgtggataatggctgaagaaatcagcagttcacaagtagatatgttatttcaagaagggatgaaatggtgctgaacctcaagtctacrgtgacagagtattcatatcaaatgtatcttgttgataccatgatagaagaggaatgaagattaagagtacaaacaatagccaacccttcatgttttttaa

SEQ ID NO: 29101 - DNA, 201 bp, Homo sapiens
cttacatggaaatgtgatctaaacctagagtctagcttgctttataatgtgtgattattaagagttggagtatgttagccactaattgtcttcttgcactsagccctgaaaatgttaaatttgggcttttggataatcattgggccctttcgatatggagaattaacctttagttctgggaaatgtattgtttcattgatg

SEQ ID NO: 29102 - DNA, 201 bp, Homo sapiens
ttgcagagtagtattgcattgtgtatatatcacgatttctttacctacaaacccattagtatccattgatggttacttaggttgatgccatatctttgctrttgtgtatggtgtttcaataaacatagaagtgcagatttatttttcatatactgatttcatttcctctgcatagatacagtagtaagattgctagattga

SEQ ID NO: 29103 - DNA, 201 bp, Homo sapiens
taaagttgccttcaattatatttatttatttatttatttatttatttatttatttatttatttattttgagatggagtctcattctgtcacccaggctggyctgcagtggcaagatatcggctcactgcaacctccgcctcccaggttcaagcgattctcctgcctcagcctcctgagtagctgggattacaagcatgcac

SEQ ID NO: 29104 - DNA, 201 bp, Homo sapiens
gaaatgcaggctctttcttcctcctcctcctcctcttccttcttttttatttctcctactccatctccctctttttcttttttgaaaaaatatgtttaaakttgccttcaattatatttatttatttatttatttatttatttatttatttatttatttattttgagatggagtctcattctgtcacccaggctggtctgc

SEQ ID NO: 29105 - DNA, 201 bp, Homo sapiens
caattagaaatgcaggctctttcttcctcctcctcctcctcttccttcttttttatttctcctactccatctccctctttttcttttttgaaaaaatatgyttaaagttgccttcaattatatttatttatttatttatttatttatttatttatttatttatttattttgagatggagtctcattctgtcacccaggctg

SEQ ID NO: 29106 - DNA, 201 bp, Homo sapiens
atttgccaaaagtaaactgtataattaaaatggtttttcatataatttataaaaattatatttcagtaaagctgatttacaaaaagaagcattttttttttgagaagcctcagaccacattaggtagaaaacaagacattttagatgttctgagttagaagaagtttaatcagggagttagacactatacaaacattagaa

SEQ ID NO: 29107 - DNA, 201 bp, Homo sapiens
cagatcacatacatgaaaaactagtggatatagtcatgtctgcttcacaataatgattttaggaaagaacagcagacatgaaattgtgaggaattaaatgytcccgagttaaaaatcttaagatttctttgtccaaaaaatctaagtagaatagtctctgatattgtttttttctaggctttcaaacaaaataggaacaca

SEQ ID NO: 29108 - DNA, 201 bp, Homo sapiens
atgaaagagggcagaagaatccccaaatatgtcattgaaatactcagagcagtttaactaaataagcgctaagggtttacaggcaaatgctatagaggagraaagtggagggaagagaggaggatgagaaaacagatgggactgcagaattttcatgctgaggatcagaagacctattgtatcttcattcctcatcaaggc

SEQ ID NO: 29109 - DNA, 201 bp, Homo sapiens
gataagcgccttcttagaaagtggtggatagcagagtgatactcatggctaatgaacaatttgctatattttctaaattgaaaacaacatcgacaacatcyggttaaactggaattacaaagagaagagaaaatcaacttaatttttcctcatttactacagtgaccttagccatgtgacttaatttctttagatataatt

SEQ ID NO: 29110 - DNA, 201 bp, Homo sapiens
acttgagatgggccaaattctgcatcttggaggtcgttagagtttggccaatttagtctggatcaggtggggggcaatctgccttcattagtttctgattmtccttctgggaacagtgtactagccaggtgatattctcatagtaaatggaaagaggaagaacacccagtatggaagccatctcaaatttctatgcaaagt

SEQ ID NO: 29111 - DNA, 201 bp, Homo sapiens
agtcaaaactctaggtagcatctgaccttcaaaactccctctgcaggctgggtatgatggctcatgcccgcagtccccgcacttttggaggcggaggtggraatatctcttgaggcccagagttgcagaccaccttgggctacacagtgacagcctgtctgtacaaaaactaaaaaacagaaaaaacaacaacaaaaaatt

SEQ ID NO: 29112 - DNA, 201 bp, Homo sapiens
ttttaattaaaatttaaacaaaaaacagacttgaatgtaaatttaccaaagacctaagcataagaaacatgtttgataaacattattcattgtctgacaaygctgaataggaaaatagtactaattctacctggatgacctcctggaaactcgttttccatttggtgagtaataagaaaataattccttccatcccctaat

SEQ ID NO: 29113 - DNA, 201 bp, Homo sapiens
aatactatacagcaatcaaaatgaactgttggagacatgtgctcggagtagccaaaagaaatccccacttggacaatttctcagcaaggcacctttacgtyagcagaagggtgctgcttgcacctgttacaatcccaagagaagagcatacctaacaaaggagggaaggagtttttaatcctaacacagttcctgtttctg

SEQ ID NO: 29114 - DNA, 201 bp, Homo sapiens
aaataaatcacatgtacatgcaactatgggattaaatttctgatacagaatgttgatttcaggaagccatgaataagaacatatagaattgcacctatacmcagttcaaagaaggccaaaccaagctattgagtttagggtcgcatacctagttggtaaagtataaagaaaattttaaaaagatcaacataaattatggat

SEQ ID NO: 29115 - DNA, 201 bp, Homo sapiens
atactatacagcaatcaaaatgaactgttggagacatgtgctcggagtagccaaaagaaatccccacttggacaatttctcagcaaggcacctttacgtcrgcagaagggtgctgcttgcacctgttacaatcccaagagaagagcatacctaacaaaggagggaaggagtttttaatcctaacacagttcctgtttctgt

SEQ ID NO: 29116 - DNA, 201 bp, Homo sapiens
tcataatagctaaaaaataagctgcccaaatatatatcaaataaagatggataaataattacagtaaaatcataaaatggaaaaatatggagaaatgaaawgaaataaatcacatgtacatgcaactatgggattaaatttctgatacagaatgttgatttcaggaagccatgaataagaacatatagaattgcacctata

SEQ ID NO: 29117 - DNA, 201 bp, Homo sapiens
gagaagagcatacctaacaaaggagggaaggagtttttaatcctaacacagttcctgtttctgtgtccttcccttattggctggggttggattgcacaatmtaagctgatcctgaatggcttagacttaaacttttccaaatagggtaaacgcacattttgcaaaaagaaagaggggtgggaggtaggattcatttacaac

SEQ ID NO: 29118 - DNA, 201 bp, Homo sapiens
ttcatctactcatggccttacttattttctgtgtgctgatgatgccaacatttaatctttcagctgagatctcaacgctggtctccggaatcctttctctratagactatttgacatcttcatttggatgcctaacaggaacttgaactaacatgtccaaatcaaaatactgctcttcccccaattgtcagatttgtttct

SEQ ID NO: 29119 - DNA, 201 bp, Homo sapiens
aaaagaattgtagtaaatgatgtaggtcattgaagcattattcataatagctaaaaaataagctgcccaaatatatatcaaataaagatggataaataatyacagtaaaatcataaaatggaaaaatatggagaaatgaaatgaaataaatcacatgtacatgcaactatgggattaaatttctgatacagaatgttgatt

SEQ ID NO: 29120 - DNA, 201 bp, Homo sapiens
acacatgtgtaaggaaaaatattttgatactgcaaatttttttaatattagagaaaaattagtagaaagataattttattaaggcataaaacatatttagwgtagttactttgactgctataataaaaacacccagattttgtgacagtagctgagaatgtaaataagcagtcaagagaatttaacttggtaatgatgcta

SEQ ID NO: 29121 - DNA, 201 bp, Homo sapiens
ttaatattagagaaaaattagtagaaagataattttattaaggcataaaacatatttagtgtagttactttgactgctataataaaaacacccagattttstgacagtagctgagaatgtaaataagcagtcaagagaatttaacttggtaatgatgctattaaaagatgaaatgaagcttattcagtctataattgcaca

SEQ ID NO: 29122 - DNA, 201 bp, Homo sapiens
tcacccttaactccagtactttgaaaagaagacccaaatcacagttatttggtaacattctcccttttagttgacatcatcatcattattatcatcatctmtatttacatctgttttatgaaatgatttatttttgaaatatttacatacataatttcgtaacatctatgtaatttctaagagatatcattgtgggaaagt

SEQ ID NO: 29123 - DNA, 201 bp, Homo sapiens
taaaaaagattttgattttagtataaataaaattccttaataagaaaaataaaccatttcatgatcaagctctgatttacaaagagaggattttagggctraataaatcaaagagaagtaagccttcccccacatcttctctatttcatttaggtaatgatggggttcagaggcacagagccccatttctacaacataagc

SEQ ID NO: 29124 - DNA, 201 bp, Homo sapiens
aaattttaacaatgttgttcagaccttaagataaatcatccccacacctgattcatgtattttttagaatcatgtatcttcctcagtacaatgtaagaacyataaaagaagagatcgtgtctgtcaggctttctgttgactcccaggacctagaacccagcacaaggaatagatggtcaaaaatgatattttaatgaacaa

SEQ ID NO: 29125 - DNA, 201 bp, Homo sapiens
ggcattgtgtgtcttctagcagaaaacaaactggtggtgtatgaaacattttatatttcttactgggttttctgtaatatatgtatatgaataatttccamatgtatacctagaaaagtcttttacctaaagttagtctagaaaagtatatatatatagatgtgtgtgtgtgtgtgtgttgtgtgtatgaaaaactgaaga

SEQ ID NO: 29126 - DNA, 201 bp, Homo sapiens
atttaaatctggcatttaaaaaagtccgtattggtgatgatcttagttatgatcaagctccctttaagattttagacatttactatacgatctacatatcrggttataaaacttcccaagcaactgaagtcgctaaagacaaatgatggagaggttacacaaggaaaaattgcaaacactggaagtgaacatgtccttgtt

SEQ ID NO: 29127 - DNA, 201 bp, Homo sapiens
ctttctgaaccttctgtattctgctcaaaaatggaagttctcagctaggtgcagttcacgcctgtatccaagcattttgggagaccaaggtgggaagatcrtatgagcccatgttttcaagaccatactgggcaacatagggagaccccatttctacaaaaaaactgaaaaattagctggctgtgttggtgcacgcccata

SEQ ID NO: 29128 - DNA, 201 bp, Homo sapiens
tcctcgcctcagagactgggttctgctttgcttacttcaggtcaagtgtatccctcatttcttctgggactctagcctagcaggaagggttggggaggatrttgtttgtggctaatttctaaaaggtacaactatgacttggacaaatgttttgacggaactgtgtccaagcaatcagcacagtgtcaggattgaacttta

SEQ ID NO: 29129 - DNA, 201 bp, Homo sapiens
tgtctctttcttctgatattttatttctatttaatgtttaagtattttactataattaggtaactttccatttcctggttattgtaccaattaccgtaacrttattaatatattaaattaacatgatgttttccaaaatgtaaattaaactgagagcagaagtgacaaagccctgacataaaacagtgaagcagtgctctt

SEQ ID NO: 29130 - DNA, 201 bp, Homo sapiens
ttgtcctgtgtcacattttgtatcttgtcatttggggcctgctgggaattgagtgttatcatatatttaaacataagaggaggcagggatatatatagagkggtatcagcattcctctgtaagccaaacagctcaaggtaactcattacaggtttttaaggcaagggaaggaagactaaccttctcagcgaggggaggaag

SEQ ID NO: 29131 - DNA, 201 bp, Homo sapiens
catttttaaaaattgagtttgtaaccagtcacctttcttacacattatttgtatatttttttagtatcctttctaaatgaatgttttaattgccatgttayaaacgcatggaaaagtgatgcaactgaatgtatatcttagcttttggtgtctaaaactagagccaatgtctgagtttacagtgatgacatttatttggga

SEQ ID NO: 29132 - DNA, 201 bp, Homo sapiens
agattattaagatctattgtattcttcattacaaggccagatttcataggtgcataaaaaatcacctatacatgaatctattttttaattgagacatttgtaaaccatgcatgtggaagaatatgatatagcatgcatttatgcatgcattttgaaaaccagcttgagaattttacttccttttagttagcagtagaccaa

SEQ ID NO: 29133 - DNA, 201 bp, Homo sapiens
attttggtatatttgcacagggtcagggtcacctgtgagtgccagctgctcggggctagcagaccccatgacaagaatgttagggaacttcccagcagctkccaaacacacttttgtttttagggaacgtctctttctccttcagtatgacttatgctgccttcaatgctttgctgatacaaaagaagtaaactcaaaaga

SEQ ID NO: 29134 - DNA, 201 bp, Homo sapiens
gaagaatgtgagtcctgccggctgccatacatatctatttcaattatactttcaggaagaggtagtaactacaaactgattagctccaccttggaatggasatgagccgaagctctaggtagtatctgaccttcaaaaactccccctgcaggctggatgtgatggctcatgcctgcagtcctagcactttgggaggcgaag

SEQ ID NO: 29135 - DNA, 201 bp, Homo sapiens
aaaatacaaaaattgacgggtggggtggtgggcacctgtaatcataggtacttgggaggctgaggcaggagaattgattgaatcagggaggcagaggtttytgcaagccgagattgtgccattgcactccagcctgggtgacaagggagaaacttcatctgagaaaaaaaaaaaaattgtaaatccatgaggaagaataag

SEQ ID NO: 29136 - DNA, 201 bp, Homo sapiens
aacacccagattttgtgacagtagctgagaatgtaaataagcagtcaagagaatttaacttggtaatgatgctattaaaagatgaaatgaagcttattcartctataattgcacagagtatttgtgtaagttcatatgaaactggaccaaaactaaacagccaaaaaaagagtattatttgctttaggtcacttttgccat

SEQ ID NO: 29137 - DNA, 201 bp, Homo sapiens
tactgaaaatacaaagttgaacacgcaaggagcattacaaattaatgacaatccatgctggctaacacggtgaaaccccgtctctactaaaaataaaaaawaattagcctggcgtggtggcgggcacctgcagtcccagctactccggaggctgaggcaggagaatggctaaacccggaaggcggagctttcagtgagcag

SEQ ID NO: 29138 - DNA, 201 bp, Homo sapiens
cagattggaaagtggcattgaggtaaacctaggctcttagcaattttccatgtcttgccctacatgatgattacatgagtatttatgacacattgctatgyttcccagttttgttttggctcatttctaagtgtgcactctagttacaatacaaaaattgttaatgaggagaaatgttccatgaaattattattactctgc

SEQ ID NO: 29139 - DNA, 201 bp, Homo sapiens
tagcaattttccatgtcttgccctacatgatgattacatgagtatttatgacacattgctatgcttcccagttttgttttggctcatttctaagtgtgcastctagttacaatacaaaaattgttaatgaggagaaatgttccatgaaattattattactctgctcattatatactgaagggaaaaatccactatttgtat

SEQ ID NO: 29140 - DNA, 201 bp, Homo sapiens
aacattttaattaaataataaatatttaaatattagacttgagagaaactttaccaaaggcctaagaattagagatatgtttgataaataaacattattcrtgggctgaaaaccttgagtgggaaaataggactaatttcacctggacaacctcctggaaactgattttttattttggaaattatgagaaaataattcgtt

SEQ ID NO: 29141 - DNA, 201 bp, Homo sapiens
ttgttgttgttcaaacatatgtgttctgctcatcattttatcaattctggtagtgtttgcatttgttcttggaaatgttgccaatggcttcatagctctarttaatgtcaatgactgggttaagacacaaaagatctcctcaactgaccaaattgtcactgctctggcattctccagaattggtttactttgatcatatta

SEQ ID NO: 29142 - DNA, 201 bp, Homo sapiens
ctgccttcattagtttctgattctccttctgggaacagtgtactagccaggtgatattctcatagtaaatggaaagaggaagaacacccagtatggaagcyatctcaaatttctatgcaaagtgtattaattttttgttcatcaaagtaagttaaatgattgaacttcaagttcaggggaaaggtagtcagtcttcgtgtg

SEQ ID NO: 29143 - DNA, 201 bp, Homo sapiens
aacatgaggaaatttgagatgattttatttgccaccccagatttttccaaaggatttcttctagccttaattatccacctcacatgaacaaatctttgccrttccccatctattttttcttttggctcctgaattcctgacacaacaaggttgtacacatttcccacactcttggtttagcagagttcttttatcagttat

SEQ ID NO: 29144 - DNA, 201 bp, Homo sapiens
tattataaagcaaatagaatggttgttagctaatgatgcacacaataaaatttgagtgacaaacatacatacataagtagagtaaattttgtatgtgtatrccaaaaactgttctaaaggatactggatttaatagtagtatgtgaatagattagaaaaaaatcatttctataataggaatgaagatacatgatcatgata

SEQ ID NO: 29145 - DNA, 201 bp, Homo sapiens
acaatcagagcatctaacatacttctggatttctggaagattaaaagggataaaatagggcagaatcaatgttgtggagattttcccaaaagtgataaaakgtattaatccatatatttttagtaaccatcaaaggtcagacaagataactaaaaacaaattaacataaaatgtcacaagacatcaaagaccagtagaaaa

SEQ ID NO: 29146 - DNA, 201 bp, Homo sapiens
tatttcccataaaggcagcattgaactcattcattagtttaagctggtgcttttctgttgacattgttcacagaatttaaaagtataaagaatgttattgracattcaggaatcaagtgcatatttaatttaaagtcttgaatatcagaggagtcaccatcagtgacattaggcctgaattttttacttgcttttttgttt

SEQ ID NO: 29147 - DNA, 201 bp, Homo sapiens
tatatggagagtgtctggattgctggtgaaatctactttatgaccatgatgtggaatcatgactcttaatgctataatttttttctttactgtacattagrcctcattactttatatactttatatatatatgttatgtttcacaatattaaatatttcacaataatgaaaatatttaaaaagtagaaacatacactaaat

SEQ ID NO: 29148 - DNA, 201 bp, Homo sapiens; identical to SEQ ID NO: 21203

SEQ ID NO: 29149 - DNA, 201 bp, Homo sapiens
gcatagagtatttgtctattttcatattgaaaactgcacaaaaaaacccaaaatagaatcctaattgttggagatcacttttgctatgaatttttaaagtrtaataaaataaaaaaagcaaataaatcattgaaaatacattggttttacattattcttgatgaaataccacgtgagggtatttgcctaggcctgatgctg

SEQ ID NO: 29150 - DNA, 201 bp, Homo sapiens
ctgcattttgggttaaatattttgttactatatattttttggttctgcattagagaagaaaaatcataggcaaatttgttaaggtgtaaaacatatttagyatgatctttgagtatgtttgtgcatatataatgctactttgactgctatagtaagataacagatttagtcaccatagctaagaatgtgaaaaagcattta

SEQ ID NO: 29151 - DNA, 201 bp, Homo sapiens
tacatattactggcattgaaaaaaaataaatctactttggtgatgatcctagctatcctcaagctccattcaccaggctatacaaccaatgtgtcatataygtattgggttgtaaaatatctctaacaactgaagttgctgaaaacaaattatggagaggtgaaacaaggaaaaaattgcagaacaattaaaaaactcttc

SEQ ID NO: 29152 - DNA, 201 bp, Homo sapiens
caatctatcattgatggacatttgggttggatcccagtcttcactattgtgaatagtgccgcaatgaacatacgtgtgcatgtgtctttatagtagcatgstatttaatcctttgtgtagatagccagtattggaatcactgggtcaaatggtatttctagctctagatccttgaggaatcaccacactgtctttcataat

SEQ ID NO: 29153 - DNA, 201 bp, Homo sapiens
ctgagcactctcgcgagactgtggggctcgccattggctgctccgccgcgccgcaacggaccctgggagtcggccatcatgctggccccggaggccgttakcttagtcatggctctaaatatgtacctgcaatcggatgttgaggatcaccgagcccgcgacgtagaagtacgggaagttcatgcgcagctgccaggccag

SEQ ID NO: 29154 - DNA, 201 bp, Homo sapiens; identical to SEQ ID NO: 5661

SEQ ID NO: 29155 - DNA, 201 bp, Homo sapiens
atggttcccaagaaaattttcgatgactttgattaaaaagtttggattttgtctatttaaatctagcataaaaattggtcatggtgatgatcctagttatractaatctccctttaagatttaggcatttactgtgtgaaatatgtggcacattttccataacaaacagctaaagttactgaacacaaattatggaaaggt

SEQ ID NO: 29156 - DNA, 201 bp, Homo sapiens
acaaaatcattgctcttttccactgttatttgtaccatacgtatgtaccatagtgtgcttaaacgtgattatttgaacgtctagttttttggatggtatgmgcattctaatctaaatcaataatgaagttttatctttggggtagtttttgttgcataatgaattctaattttatgtttaatttaaagcaaacaattattg

SEQ ID NO: 29157 - DNA, 201 bp, Homo sapiens
tcataacaaaagagtatttaaatctttaagaaaaaatattagaaaagctaataatatgaataaataaatatatgaagtatataattcattattaatatatktgcatgaaatcatggtcatagaatttaaaagtaataatttttgaattaaggatacattctgaactataatagaaaaaggcttcaaaaatgttaggtttat

SEQ ID NO: 29158 - DNA, 201 bp, Homo sapiens
ttcataacaaaagagtatttaaatctttaagaaaaaatattagaaaagctaataatatgaataaataaatatatgaagtatataattcattattaatataygtgcatgaaatcatggtcatagaatttaaaagtaataatttttgaattaaggatacattctgaactataatagaaaaaggcttcaaaaatgttaggttta

SEQ ID NO: 29159 - DNA, 201 bp, Homo sapiens
cttgaacccgggaggtggaggttgcagtgagctgagatcgcgccactgcactcctgcctgggtgatagagcgagactctgtctcaaaaaaaaagaaaatcraggaaatgatcattctaaattatggctattgctctcctcagggtatgtgaagaaaggtgtaggggcttggagagtggcatggaggtggacctaggctatt

SEQ ID NO: 29160 - DNA, 201 bp, Homo sapiens
gtcttggcagtctgactccaaaatcctctcttagaaacaattatactgtaaaaatgaaaaataaataaaatccaagattggagactgattttaacatctaytcatcttaaaccattaagtaatcaaaaataaattaagcagaggaaaacaaaaccaaatattcatatagaaagaagtctagactcttcaatggaaaacgtg

SEQ ID NO: 29161 - DNA, 201 bp, Homo sapiens
ctttattttagctgcaacatatggaaatttcagatgatgctacctgcagcacacaaatcctttcaaacatttttttattacctttaattatctacctcacrtgacaaaactttgccactccccatctatttttcttttggctcctgaattcctgacaaaacaggggcaaatatatttccccacactcttggtgtagcatag

SEQ ID NO: 29162 - DNA, 201 bp, Homo sapiens
tatttgtttcttttcttttgctgctttagaatcctttctttatccttgaccttagggaaattgattattaaattccttgaggtagtcttcttcaattttayctggcattgtttgttgagaaaaacgattaattcctttcgaattgcaatagtacctttttttgaaagcaattgaccatgaatgttggtgttagtttctgga

SEQ ID NO: 29163 - DNA, 201 bp, Homo sapiens
aaacaaatgaagactctacaccttaacaccatcttctcagtttttaactttttgtgtcactatttatatatcattgtgctgtctatatcttcaaaggttgygggaactattttttttttgtcagttcatgatttaatttttgtactttagcgaggtttacacaccacatttacagtgttatactagtctgtgtttttctgt

SEQ ID NO: 29164 - DNA, 201 bp, Homo sapiens
tgctctaatcatatttgacttatatacctgggagctccagtgttgagtgcatatatatttacaattgttatatcctttccatatgttgaccttctttgtcrcttcatagtttttgtcttgaaatctattttgtctaatattagtatagctattcctctttttttggcttccattgccatggagtgtctttttccatccctt

SEQ ID NO: 29165 - DNA, 201 bp, Homo sapiens
gcaagactcagcagaggcagccataatcctcctaggtacccaactccagtgacctgggaatctcatccccatcccccacagcagccacagcaagacccacrggagagtctgagctcagacatacctagccctgcccccacctgatggtccttccctatccaccctggtagtggaagacaaagggtatataattctgggaga

SEQ ID NO: 29166 - DNA, 201 bp, Homo sapiens
taaaaaatatattaaatattatcaaagacaacgttggcatcttttgagatggtcatatttttttttcctctgctgacttcattatccaaaacaaataatgracattccttaacattcctagaatcaagtctgcttggtcatttaactcatatatcactttaatttgttttaaattatttaaagtgagatttatagttatta

SEQ ID NO: 29167 - DNA, 201 bp, Homo sapiens
aaaggaacaggaacattactgcacaaccagaaatcaggtgcacatagaaattaaggtcaggaccttaaagggaatcttgcccattgatattagtcctgccytaaaaaaagtcggacatggtatgtttactactaatcattttttttccataacgttaatggtattttgtattttcccatgggcacctacattacacttata

SEQ ID NO: 29168 - DNA, 201 bp, Homo sapiens
tgtgcttaaacgtgattatttgaacgtctagttttttggatggtatgcgcattctaatctaaatcaataatgaagttttatctttggggtagtttttgttkcataatgaattctaattttatgtttaatttaaagcaaacaattattgttagaaaactatgcacaaaataaaattcaaggatgaaaaatatatttggaata

SEQ ID NO: 29169 - DNA, 201 bp, Homo sapiens
gtatgtgtttaaaaggagtctgtgaaatttctgtctctatccaagggaagaaataaaaagaatgtatatattggctctcatctttcattggtcagagtttycagggtgtcccctctgtgtatttctcaactatattttctagcctctctaaccagcccctggtgtagcaagatcccgagagagcagcaacagcacttatgg

SEQ ID NO: 29170 - DNA, 201 bp, Homo sapiens
cttatctgattaagaaaatttctttccagaagaaatgcaatttttaaaagactccttgtctaggaatctcatcaaatgaccaggataagatactggatcarataaccactggataagatacttggagttgtcaacatgcctagacagacttttcagttgttcttttgaaggcagctccaagagattccctgggtgacttta

SEQ ID NO: 29171 - DNA, 201 bp, Homo sapiens; identical to SEQ ID NO: 5591

SEQ ID NO: 29172 - DNA, 201 bp, Homo sapiens
aaaccatctgatttttctttattttctttatttttattgtaaattgacatattttacttgcatacatttatgaggtatcaggtgttgttatgatttatgamtactatgtggaataattaaatgaaactaattaacgtattcaaatgataataaatataacagataacaggtaacaaatatttttttatggtgagaatattt

SEQ ID NO: 29173 - DNA, 201 bp, Homo sapiens
agtggaggagaatttcgcaggcttcgccttggtcctgctctaatagtgtcccttactctacaggtcaggaagaaagtgagagtcctgccagctgccatgtrtgtccatttcaattacacattcaggaagaggtaataacagcaaactgatcagattcactttgggatggacatgagtcaaaactctaggtagcatctaacc

SEQ ID NO: 29174 - DNA, 201 bp, Homo sapiens
aatctggatggttgctggtttaacattccctttttaaagggaatatattattgaattttcaagaatcagatatacatagcattttagatgaatgcattaaraagtcttcagcagtgatattagacattggggcatgctcttacaggcaatgggtggtgtcataaagagcatatttacattcgttttaattgtggaatttat

SEQ ID NO: 29175 - DNA, 201 bp, Homo sapiens
aacacgcatgcctcagcctactcaccctattcctgagctgctgactaccaattttaagcgtttttatttattgtgaaatgcctctccctggcacctatgaycaattattatttttagagaggcagggtgtcaactgccaggccatcagctgatggccacttgacattccttgtgggtggtgggagccttcttctgccctac

SEQ ID NO: 29176 - DNA, 201 bp, Homo sapiens
taataagttgtcatctccatctattacagtatttgctctaatcatatttgacttatatacctgggagctccagtgttgagtgcatatatatttacaattgytatatcctttccatatgttgaccttctttgtcacttcatagtttttgtcttgaaatctattttgtctaatattagtatagctattcctctttttttggct

SEQ ID NO: 29177 - DNA, 201 bp, Homo sapiens
aataagttgtcatctccatctattacagtatttgctctaatcatatttgacttatatacctgggagctccagtgttgagtgcatatatatttacaattgtwatatcctttccatatgttgaccttctttgtcacttcatagtttttgtcttgaaatctattttgtctaatattagtatagctattcctctttttttggctt

SEQ ID NO: 29178 - DNA, 201 bp, Homo sapiens
ttgtcatctccatctattacagtatttgctctaatcatatttgacttatatacctgggagctccagtgttgagtgcatatatatttacaattgttatatcmtttccatatgttgaccttctttgtcacttcatagtttttgtcttgaaatctattttgtctaatattagtatagctattcctctttttttggcttccattg

SEQ ID NO: 29179 - DNA, 201 bp, Homo sapiens
tttctcctatttgcatgtaatcaaagttgaatccagcccttcaatcaaaattacagatcgagtgttactgcctgggattggcagaactgtttgataggaaygaaaatgtttttatgttaatataaaatttgtgcccacatgtatgaaggatttttctattaaaactctacaattaagcggaagatgtgacacactgcaaga

SEQ ID NO: 29180 - DNA, 201 bp, Homo sapiens
tgatgatggacttgtaagacacaaagccccatgtctaacagtgtaaggagagtaaaaggactacttaaatattaagccatgttataagatggtgttgctgwgattgatgtattatcttttatttatggtaatggcattttgagatcaagttctgctccttgaattttcatgtaataagagtctgtggtgaagatgcagcaa

SEQ ID NO: 29181 - DNA, 201 bp, Homo sapiens
cttctatccatgagtgagtgagtatgtgtgtatgggtttgagtgtgtttgtattaatgagcttcttaagaataagttattcaaaagtattagtagcaaccrggttttaagaattattggcctttctgagattcccaagaaaaacttgaatccttttgctaggaaaagtttggattcactctacatattactcacgttgaaa

SEQ ID NO: 29182 - DNA, 201 bp, Homo sapiens
ctttgtcacattctgaaattcgtcaggtgttttaggatgcacactttcttagatcttttcgagggtcttaactgcagttctgtttccggaatggcgtattytctttctaggaattgtaggctcccggccgccccctgaggagctccgctagcagctaagagggcagccacgaagagcgcctgagcactctcgcgagactgt

SEQ ID NO: 29183 - DNA, 201 bp, Homo sapiens
tgatcgtaactgctgtctttgcaaatggagtgttttctagtgttttaacaataaacgtaatactgactctagctttgagataaattcttttaaaaatattmttcagggagaatatttgtttcctatcttcctgtgtatagtattgtaataaaatctctgttaaaaactatcaaattttttgctgtttattaagatgatcat

SEQ ID NO: 29184 - DNA, 201 bp, Homo sapiens
gaaacagggtgttgctctgtctccccgttggagtgcagtggtgtgatctcgaccaattacaacctccgtctcctgggttcaaatgattctcctgccgcagscaaccaagtacctaggatcataggcatgcacaaccacaactggcaaatttttgtatttttagtggagacagggtttcaccatgttggccatgctgttttc

SEQ ID NO: 29185 - DNA, 201 bp, Homo sapiens
gcatatatccttctggagataaaaaaactatgttgtaggatcatttgaaacaattcctcttttagttaaatcatccatcagacaggttcatttgtttttawttttatttttcaggattaatattcctttattttaatttttagtgattatttaataaatgttcatggtaccaggggtaaaacttcaaaacaaaatgtattc

SEQ ID NO: 29186 - DNA, 201 bp, Homo sapiens
atatgaggtgagtcaaagcacttagacgtgttttcaaaccactaatcttgatgattcagaaatgtgctcccttttccaatttcatcctgatacaaatgtawcatctccggatgatgccaatattctccccaattccatcatgagctgttctctataattcagaatctgtagactaagttgtaaaactaatgactgtcaatg

SEQ ID NO: 29187 - DNA, 201 bp, Homo sapiens
catagttcctggtattaaaaactcaatatattttaaaaatgatgctgatggtaatgatatgctatttgtcaagtaatcacacatatttttacccagaattwaaaaaaaaaaacaacttttcccctatcccttaggttacatatgttgctatgttcactgttttccttttatagttaaaataagctgtaacgcatcgtttcc

SEQ ID NO: 29188 - DNA, 201 bp, Homo sapiens
acattatgtttcaaggcatttgaaacactgtcatcttcttattcacttcctgaaaaagacaaggaagattataggcaagacttgacatggcaggaaatgtstaatacctcattggtttactgcggtgaggaagatgcaaaaccatccttttgccctctatcccttctacagcccccctccttaatatcattttctttgttc

SEQ ID NO: 29189 - DNA, 201 bp, Homo sapiens
tcgacatttttttttttttttttttgccaattgctttcccctaaagtaagtttatagtcttgatgtcatgagagtttttgagtttcccgcccctgcccccmcccccccaacccagtttggtcacacagttgatttatagaagagttgccaataacctgaataacctgtttctaatgccaaaaacggctgatgcctgagccc

SEQ ID NO: 29190 - DNA, 201 bp, Homo sapiens
agtaaaaagggatcaaatcaataattaacaatctttggttcctgcctatagcaaacaggtaaaatggaaagtagttatacaaagggtatattatattaacycctaacaaaattaaacaaagccagttttttttcatctcctttcattttttttttttttgaaacagggtgttgctctgtctccccgttggagtgcagtggt

SEQ ID NO: 29191 - DNA, 201 bp, Homo sapiens
acaatttagacatttactgtatgatatatgtattgggttttaaaatttccctatgtaacaactgaagatgctggatacaaattatggagaggttaaacaagaaaaaaattgcaaaacaatgaaaaagaatatggctttatttgcatactaacacacgagaattcacttttgacttcaacatcagtataaaacatttcagca

SEQ ID NO: 29192 - DNA, 201 bp, Homo sapiens
ccgtcttggctagacagtatgtcatcctttatctacattggtccctgtagtgaggatcatggagtagatgttgctgggagagtgagtatatgtgaaaaaaatgtgaaggtatttggtgctgatgaagcaatatgccctactgggcaggggagaggcacagaataagaattcttgccatgtggatgaactcattcaaacaca

SEQ ID NO: 29193 - DNA, 201 bp, Homo sapiens
aataagctctggtctcccgtagcactcccaggcttattaggatgaggaaattcctgcctaataaattttggtcaaaccggttgtctgctctcaaaccctgyctcctgataagatgttatccatgacaattcatgcccgaaacttcattagcaattttaattttgccccggtcttgtggtcctgtgatctcgccctgcctcc

SEQ ID NO: 29194 - DNA, 201 bp, Homo sapiens
tcagtaatttctttcagggaatttgtccattttatctaatttaattcactgaaataattttataaatattattcctcaatttcttggtctgtttgtgttgstataaaggaatacctgaagctgagtaatttataaataaaagaggtttatttagttcatggttccgcaggctgtacaagaagcatggcattagcatctgct

SEQ ID NO: 29195 - DNA, 201 bp, Homo sapiens
cacaatgatgtgagagagacagcatggtggttatcagatgcatgcacttggctcccaggactttttcagaagggctgcgagaggacaacacagccagcatyagcccatggaagcaacagaggacggagaatatatctgctcagctgtcttctgtcttctatttcccactggccagggtttccctgaggcagaactaccatc

SEQ ID NO: 29196 - DNA, 201 bp, Homo sapiens
tttgtttattctgtttagctcctgtaacattgcatacaaattatttatattaatagttttaggacttgggtgaaattcttgaactatgaataattttaggracttatttctataaatcatattgcatcaacaaaaatgcttggtatgtagaaggatgttactgaatgagagacaaataattactgaaataaatgttatttc

SEQ ID NO: 29197 - DNA, 201 bp, Homo sapiens; identical to SEQ ID NO: 5652

SEQ ID NO: 29198 - DNA, 201 bp, Homo sapiens
ttcaaactgaatgtccctaacctcagagaactatagtcaattcttcactgaagcatttgtatcttcctcgtctttaattctggtatattttgtttattctktttagctcctgtaacattgcatacaaattatttatattaatagttttaggacttgggtgaaattcttgaactatgaataattttaggaacttatttctat

SEQ ID NO: 29199 - DNA, 201 bp, Homo sapiens
atgaaaaataatatgcctttctttgcatactaacacatgagaattcattttccacttcaacctcagtataaaaaagtacagcatatagcaaggagagaatstatatgaagaggagtgaatttgagctgttttgagaataatgaccttttctatttctataaagacagttttgaattcatctattagcatatgctggtgctt

SEQ ID NO: 29200 - DNA, 201 bp, Homo sapiens
ggttacatgagtgtttatgacacattgctatgttttccatttttgttttggttcatttctaagtgtgcagtctagctatatgataaaaattattaattagsagaaatggtccatgaaaattattattactctgctcattatatactgaagggaaaaatccactatttgtatacattcatgtgtaactctaagagattttaa

SEQ ID NO: 29201 - DNA, 201 bp, Homo sapiens
gggagactatgtctcaaaaaaaaaaaaaaaaattaatgacaatgaaaactaagtgtgtaattctaaataaatgttgactatataaaacaatagtgtcttcktggattgaatgtataattgataagatatatgcaaatagcaataaagaggctggagataaaggtaacaggaataaatttagtcaaactgtgttttgggctt

SEQ ID NO: 29202 - DNA, 201 bp, Homo sapiens
ctctactaaaaataaaaaaaaattagcctggcgtggtggcgggcacctgcagtcccagctactccggaggctgaggcaggagaatggctaaacccggaagrcggagctttcagtgagcagagatcgtgccactgcactccagcctgggtgacagggagactatgtctcaaaaaaaaaaaaaaaaattaatgacaatgaaaa

SEQ ID NO: 29203 - DNA, 201 bp, Homo sapiens
tactctgtcaccatttcaggattaagactagacagtcttttgtgttacaaattgggacatcagtgctctgggaaacagtgatgtccacgattctaaatccyttggtattactatttcattgattaaactacacttctgatattttagactaaaatgttttggcttatcgcagtctaggaaacctgtcttgggtatataaaa

SEQ ID NO: 29204 - DNA, 201 bp, Homo sapiens
tgcttagtgaagacagcacatcctggaaagcatttgtgagtgttgatttaagtttctggtagtctgcattcattctataacccgtctggttttgatagagkccagataggtttagtgaatcggcttatagaaaggactaccatcccctgtaactttcaagtgttttgtcacggcactgaccagttccattccttagggaat

SEQ ID NO: 29205 - DNA, 201 bp, Homo sapiens
atgtaaattaaacagaagtgacatagccgtgatataaaacagtgacacagtgttattattatgatacaaggcaaattgttttgatttttcctcataatggktgtagattaagaaccattcagcaaatcacaagcccagtaaaaagtaccagaagctctgctctgcttagtgaagacagcacatcctggaaagcatttgtga

SEQ ID NO: 29206 - DNA, 201 bp, Homo sapiens
tgagacagggtctcattctgtccctgaggctggagttcagtggcaggatcacagctcattacagcctcaaccttctgggctcaagtaattctcccacctcygcattgctagcagctgggactgcaggggcacaacatcacgcctggctaatttttgtattttctgtagggctaggatttcacagtgttacccaggctggtc

SEQ ID NO: 29207 - DNA, 201 bp, Homo sapiens
ctattattttgagacagggtctcattctgtccctgaggctggagttcagtggcaggatcacagctcattacagcctcaaccttctgggctcaagtaattcycccacctccgcattgctagcagctgggactgcaggggcacaacatcacgcctggctaatttttgtattttctgtagggctaggatttcacagtgttaccc

SEQ ID NO: 29208 - DNA, 201 bp, Homo sapiens
tattgctattattttgagacagggtctcattctgtccctgaggctggagttcagtggcaggatcacagctcattacagcctcaaccttctgggctcaagtrattctcccacctccgcattgctagcagctgggactgcaggggcacaacatcacgcctggctaatttttgtattttctgtagggctaggatttcacagtgt

SEQ ID NO: 29209 - DNA, 201 bp, Homo sapiens
acagtgaccttagccatgtgacttaatttctttagatataattttttttttgtatttttagtagagatgggaaaaaattagtcagtcatggtggcgagggrcctgtaatcccagctacttgggaggctgaggcaggagaattgcttgaacccgggaggtggaagttgcagtgagctgagatcatgccactgcaccccaacc

SEQ ID NO: 29210 - DNA, 201 bp, Homo sapiens
cctctgcgctttgtcacattctgaaattcgtcaggtgttttaggatgcacactttcttagatcttttcgagggtcttaactgcagttctgtttccggaatrgcgtattttctttctaggaattgtaggctcccggccgccccctgaggagctccgctagcagctaagagggcagccacgaagagcgcctgagcactctcgc

SEQ ID NO: 29211 - DNA, 201 bp, Homo sapiens
tcctctgcgctttgtcacattctgaaattcgtcaggtgttttaggatgcacactttcttagatcttttcgagggtcttaactgcagttctgtttccggaayggcgtattttctttctaggaattgtaggctcccggccgccccctgaggagctccgctagcagctaagagggcagccacgaagagcgcctgagcactctcg

SEQ ID NO: 29212 - DNA, 201 bp, Homo sapiens
taggagaatgtgcccaaatggagtttggctggagacaaagaataaagactagaaagaacaattaccctaggccagacatggtgttggacggggcaagatgyttactacttaaagccatagaacactgtttgctggacacaatgagtggaatatagaacaatgcaactattttaacactttacccctcttagtggtttatta

SEQ ID NO: 29213 - DNA, 201 bp, Homo sapiens
cggatactcctccactgaagagggaatagttctgcagtaattccctaggggtttgctttctcctctcctacgggcttgatggagacaggcacagagtcctrtgatgcccacgttgcatgcctctagcagctttgaattctgctggatcatctggcacaatgggccgagcaggttgggccagaccctgtatctgctgtagag

SEQ ID NO: 29214 - DNA, 201 bp, Homo sapiens
gttaattagactttacatgaagtgagcaactaagcttttctgttacaagacttcatgcccacagatacattcaagtcccaggtggaaggatgatctggatyaggcaaggtgctgaccatgggaacaggagacagtcaagggaatctgaggaagcacatgtttgtgtccaatatagtcccctccttgtgccactcagatgtg

SEQ ID NO: 29215 - DNA, 201 bp, Homo sapiens
tttgggaaagtcacactaaccaatacccccatttttctaagagatagtttttttttaatttattttttctcttttcctctcccctttccctatgtttcccygctttctacttaactttttagacatgcacatagaactgtttactttccccccaccagacagtcccttcgggcgagttcatctaactatgtgctccacgag

SEQ ID NO: 29216 - DNA, 201 bp, Homo sapiens
aaacgcatggaaaagtgatgcaactgaatgtatatcttagcttttggtgtctaaaactagagccaatgtctgagtttacagtgatgacatttatttgggarggcaagtccagggcagcaatgaggggtaaatgtggaaactgaggcaaaagaagatgtaaaaccatgtgtcgtgatgttgatatgattttgctggtggcca

SEQ ID NO: 29217 - DNA, 201 bp, Homo sapiens
tatttgtatatttttttagtatcctttctaaatgaatgttttaattgccatgttataaacgcatggaaaagtgatgcaactgaatgtatatcttagctttkggtgtctaaaactagagccaatgtctgagtttacagtgatgacatttatttgggaaggcaagtccagggcagcaatgaggggtaaatgtggaaactgagg

SEQ ID NO: 29218 - DNA, 201 bp, Homo sapiens
gtacagaagctctttagtttaattagattccatttgtacattttgtcttttgttgcaattgcttttggtgtttcagtcatgaagtctttgctcatgcctaygtcctgaatggtattgcctagcttttcttctagggtttttatggttttggatattacatttaagtttttaatccaccctgaattaatttttgtataatgt

SEQ ID NO: 29219 - DNA, 201 bp, Homo sapiens
tccacccactttttgatggggttgtttgtttaatagattgcaaaaattttctcccattctgtaggttgcctgtcactctgatgatagtttcttttgctgtrcagaagctctttagtttaattagattccatttgtacattttgtcttttgttgcaattgcttttggtgtttcagtcatgaagtctttgctcatgcctatgt

SEQ ID NO: 29220 - DNA, 201 bp, Homo sapiens
tgaagcctcttcaactattggcttatgaactcattccaatgaagctgctactgtcatcgtttcattgattctgacatttgcaagatcaccagagtctgtgttgctgaggttagtcttcatgttgcatgctctattagccacattgaacatagtttatttgcatttcaggatgctgtcctctcctgattttatctttgttca

SEQ ID NO: 29221 - DNA, 201 bp, Homo sapiens
cccactgagctactaacacttaagacgtctgcagatagcagagctaaaagagcactgtaacaccctccccctcgaggtttcaggggtgcgggcaccccccyagatgctgctgcggggcctgcacagaatttgttcctgctggcatccaaaagtgctcctgcacctgttcacctgtgtgctccctcccatgagggctgggcg

SEQ ID NO: 29222 - DNA, 201 bp, Homo sapiens
atgaagcctcttcaactattggcttatgaactcattccaatgaagctgctactgtcatcgtttcattgattctgacatttgcaagatcaccagagtctgtgttgctgaggttagtcttcatgttgcatgctctattagccacattgaacatagtttatttgcatttcaggatgctgtcctctcctgattttatctttgttc

SEQ ID NO: 29223 - DNA, 201 bp, Homo sapiens
aacttttcccctatcccttaggttacatatgttgctatgttcactgttttccttttatagttaaaataagctgtaacgcatcgtttcccatttttttttttgccagctacatttcttatctctattgataataactataccacctatgtctctgctttttcatgcttgagggatctctggatcaatcaacgtgcatgatgg

SEQ ID NO: 29224 - DNA, 201 bp, Homo sapiens
aaactgaaaagaaatacaatccaaggttggagtcttattttagcatctattaatcttaagccattaagtaatcaaaaataaattaaaaagaaaaaaatatmttcaaatatcacatgtagagaagtctagtttcttcagtggaaaacacatgttttttaagtgctcaaggaatatttacaaaattgcttaatatttttaatt

SEQ ID NO: 29225 - DNA, 201 bp, Homo sapiens
agatgcagtagaagagagaattagtgaattggaagatagctaaacagaatgaagcatagagagaaacagatggaaatataccaagctagagggtatcacaytgatgctacagtcagaacacctaacatacttctggagttctgtaagattagaggagagaaaatcaagcaagagaaatgttgcaaggatttttccaaaagt

SEQ ID NO: 29226 - DNA, 201 bp, Homo sapiens
ctggcacagtggccagagcagcttggagcagagtctatatcttctgtagagccctcatttgttctggattccacttgagaccagcagcctgggaaacttcrttaatgagtcagagcaatattctcaaatgtggaatatgttgtctccaaaatcccaataggcccccaaaacattgtgtctcttttgtagtgataggaaatt

SEQ ID NO: 29227 - DNA, 201 bp, Homo sapiens
gctctcccctctccaacaggcttgtcagagacatgcacagagtcctataatgaccactatgtatgttctagcatctttgaatcctgctggatcatctggcwcagtggccagagcagcttggagcagagtctatatcttctgtagagccctcatttgttctggattccacttgagaccagcagcctgggaaacttcattaat

SEQ ID NO: 29228 - DNA, 201 bp, Homo sapiens
gatactttaatgaacaaataaatgggtggctaaaatggataagttgatgtggtaaaccagtgaaaaggaaactcacacaaaatctgcagttgcatgaattmccctgttccagtctcaggttaagattacaggcttatccaagcagaatccttctcctaaggaaaagtttggctattccacaattttaggggaaatatgaca

SEQ ID NO: 29229 - DNA, 201 bp, Homo sapiens
ttttatatttcttactggtttttctatactgtatgtgtatgaataatttcccaacgtatacctagaaaagcctttgacctaatattagtctagaaaaaaawatatatatatgtgtgtgtgtgtttatgtgtgtatgaaaacttaagaacattgacaataacatgctcttttctgtttttttcatacaaactgccaaattat

SEQ ID NO: 29230 - DNA, 201 bp, Homo sapiens
cctgggatctgtgtgtccttatgattctggtagattcccactttccttcttgaaataaagctcacagagttaacctttatgagactttgttgaaaaatttrtgtaggttggtatttttttcttcttaaatatgtgatgaaaataaacattcaggtcatcccttgctttgtgtgaaagttttaaattaagaattcaattttt

SEQ ID NO: 29231 - DNA, 201 bp, Homo sapiens; identical to SEQ ID NO: 5693

SEQ ID NO: 29232 - DNA, 201 bp, Homo sapiens; identical to SEQ ID NO: 5694

SEQ ID NO: 29233 - DNA, 201 bp, Homo sapiens
ctctgataggacaaaaaaaggaaaatgggaggggacaaataagggaataaaagctcatggcttcagccagcagcagcaacctgcctgggtcgccttcctcycggtggaagctttgtcctttctctcttctcaataaaccttgctgttgctcactctttgggtccatgccatctttaagagcagcaacactcaccgtgaagg

SEQ ID NO: 29234 - DNA, 201 bp, Homo sapiens
gcttctatagccttatgcacttacagattgcaggttttatattagactgtgcggttcaacctacaagccagtagatggcacttataggtaagagccagttktggacaatgtgatggttatatatttgatccttgtttactggaagaaactctctgttgctgcagataatggtctgactcatggagtacacagtggtgtgaa

SEQ ID NO: 29235 - DNA, 201 bp, Homo sapiens
tttttctaagctgggtttggtggatggctgtggtgatttgagatgggccaaattctacatcttggaggacgttagagttttgccaatttaatctggatcakgtggcagcaatctcacgtcattagtttctcattcttcttctgggaacagtgtactagataggccatactcttatggtaaatggaaagaagaagaatcccc

SEQ ID NO: 29236 - DNA, 201 bp, Homo sapiens; identical to SEQ ID NO: 21200

SEQ ID NO: 29237 - DNA, 201 bp, Homo sapiens
taatctgccttcctcaacctcgcctgcgctgggcctggattttatttttctaagctgggtttggtggatggctgtggtgatttgagatgggccaaattctrcatcttggaggacgttagagttttgccaatttaatctggatcaggtggcagcaatctcacgtcattagtttctcattcttcttctgggaacagtgtacta

SEQ ID NO: 29238 - DNA, 201 bp, Homo sapiens
gaaataaccattataaattatggatattgcttatatcaggagatgcgaagaagggtttagggacttggaaagtggaatggaggtggacctaggctgttttmggtgttccttgtcttgccctgcatcatggttacttgagtgtttatgatacactgtggtatttcccatttttgtattggttcatttctaagtgcgcattat

SEQ ID NO: 29239 - DNA, 201 bp, Homo sapiens
taaataagcgctaagggtttacaggcaaatgctatagaggaggaaagtggagggaagagaggaggatgagaaaacagatgggactgcagaattttcatgcygaggatcagaagacctattgtatcttcattcctcatcaaggcttggggaatcaaaagaggacaaacaggggcccttctatgttgagttcctggttgacgc

SEQ ID NO: 29240 - DNA, 201 bp, Homo sapiens
ggtggtacataaaacaatgacatgtcttctagtctatgcattctagatttaataaaatacaatatacatattcatacacacgcacgcacacacacacacasagagagagagagagagagagagagaaataaaattgcaaccttagaggcaaatgggaattcagaaagcagctgcaaggtagtgagaggtaatctccaaaag

SEQ ID NO: 29241 - DNA, 201 bp, Homo sapiens
agtaggggtaaggggaggtttacttatattttgaaaagatctcatgacttgacctggtggtaatcctgctgagcaaatcctattaagtctaatttgttcakgctgctataaaaaataccataaaatgggtgcttatgaacaacagaaatttatttcttatagttctagaagctgggaagtccaagatccaggcattcacaa

SEQ ID NO: 29242 - DNA, 201 bp, Homo sapiens
ctttatctacattggtccctgtagtgaggatcatggagtagatgttgctgggagagtgagtatatgtgaaaaaaatgtgaaggtatttggtgctgatgaarcaatatgccctactgggcaggggagaggcacagaataagaattcttgccatgtggatgaactcattcaaacacaatgactgctttatgagacaatagata

SEQ ID NO: 29243 - DNA, 201 bp, Homo sapiens
aacttcaggcatgataactaaaaccaaattaacataaaataatacaggacgcaaaagaccaatagaaaatctgaaaagtagctagaggtagaagatagagyatgttgaaaagaactgtattctaaatacaacctgattttaacagaaaacatggaagcaggaattcaatggattaatgggaatcatgtcttcaatgtgttt

SEQ ID NO: 29244 - DNA, 201 bp, Homo sapiens
aaagctcaaaaaataagctgtccaaatatatatcaaataaggatggataaataattacagtaaaatcaaaaaatgaaaaaaatatagagaagtgaaaagawatggatcacatgtacatgcaatgatggggttaaattttggatacaaaatgttgattccaggaagccatgaataagaacatataggattgcacctatacat

SEQ ID NO: 29245 - DNA, 201 bp, Homo sapiens
taaaggtaacaggaataaatttagtcaaactgtgttttgggcttttctatgtctgtgagaagaatttgaacatcataatcaaggaccctgtaattctacamccagatatatatacacagaggaattgtagcaaatgatatgtgaaagaatgttcattgtagcattattcataaaagctcaaaaaataagctgtccaaatat

SEQ ID NO: 29246 - DNA, 201 bp, Homo sapiens
ctgttagatgcagtagaagagagaattagtgaattggaagatagctaaacagaatgaagcatagagagaaacagatggaaatataccaagctagagggtawcacattgatgctacagtcagaacacctaacatacttctggagttctgtaagattagaggagagaaaatcaagcaagagaaatgttgcaaggatttttcca

SEQ ID NO: 29247 - DNA, 201 bp, Homo sapiens
aaaaaccccaaaatctaaaacacttttaaaaataacatggtgttaagagtagtttgttcagtttccctatagaaaatgatttatggaaggagaataaaagwttattctgaacactaaaacaataagaccaaaaaaatgaattatcaatattgagaatccaatagacagaattagcctgttagatgcagtagaagagagaat

SEQ ID NO: 29248 - DNA, 201 bp, Homo sapiens
tgtttcattgtgggtgggcagtgagctgaggctcctcaagcatctctttctatttttattttgtttcttgacataggttctccagcatttggctcaaggcyccaagggcacatgtgacaagaaggcgccggctttttaaacattggaagttcttctgtgtcagttctgtgacagaacatttacttaacacatcatgaaggc

SEQ ID NO: 29249 - DNA, 201 bp, Homo sapiens
ttttctatttctataaagacagctttgaattcatccattagcatatgatggtgctttcctgttgaaattagtcatgaatttaaaggcagaaaatgttactrcacatttaaaagtcaagtgtttatcgacattaaggtctggatattaagggaatcacaaccagtgttattaaggctgcattttttctttcttttcatttgt

SEQ ID NO: 29250 - DNA, 201 bp, Homo sapiens
cccagcaccatttattaaatagggaatcctttccccattgcttgtttttctcaggtttgtcaaagttcagatagttgtagatatgcagcattatttctgasggctctgttctgttccattgatctatatctctgttttggtaccagtaccatgctgttttggttactgtagccttgtagtatagtttgaagtcaggtagtg

SEQ ID NO: 29251 - DNA, 201 bp, Homo sapiens
gtatctttgcatacaatttttcagttgtgaatgatatatttgtattgtgatatttccagctggttagtgtataaacaaaaatggcatttcattaaaaaaaactgagttagttaccaactaccttactaaaacgtgacttttatagaatattttaaaaccctttctaaatgaacatttaaattgccatattaaaaacccaca

SEQ ID NO: 29252 - DNA, 201 bp, Homo sapiens
ctcaacatgcagttagaaaagtcatttcttccagtttttgagttaaagaaaaccttttttgaagttgagatctgatgtcaagtatttcaggttttttttttctaaaccacctcagagtccctgaattgccaatgatctcctctatcttccatacttgaaattctttttaaacttcacataaaagaacttgagtcttcccta

SEQ ID NO: 29253 - DNA, 201 bp, Homo sapiens; identical to SEQ ID NO: 5674

SEQ ID NO: 29254 - DNA, 201 bp, Homo sapiens
tcagaaacgtaaaggtgagtccaagaagccatgaacaggaacatacaggactacacctacatatggcttaaaggtttaaagtaggcaaaaccgtatcataragtttagggttgcatacctagttgttaatgtataaagaaaatcaaggccaggcgcggtggctcacgcctgtaatcccagcactttgggaggccgaggcgg

SEQ ID NO: 29255 - DNA, 201 bp, Homo sapiens
cgattcttctcttagggtcttgtgttcctttttccatgattcagccccttagggtgggctgctcacatgcatggtagcttgctaacactttagaggtgagyatgcgcagtgtgtttactggaattgtacacatgcttgcctgaggcattcttcccttttttggtggaatgcccacagaaggtcatattccaccattttctc

SEQ ID NO: 29256 - DNA, 201 bp, Homo sapiens
gtatgtgagtaaatttcagaaacgtaaaggtgagtccaagaagccatgaacaggaacatacaggactacacctacatatggcttaaaggtttaaagtaggyaaaaccgtatcataaagtttagggttgcatacctagttgttaatgtataaagaaaatcaaggccaggcgcggtggctcacgcctgtaatcccagcacttt

SEQ ID NO: 29257 - DNA, 201 bp, Homo sapiens
ataggtgtggatttgtttccacattctctattctatttcgctgctctatgtgtctgtttttatgccagtaccatgctgttttggttactatagctctgtartatactttgaagtcaggtgatgtgattcctccagttttgttctttttgctcaggataactttggctattctgagacatccgtatattttcagaagccatt

SEQ ID NO: 29258 - DNA, 201 bp, Homo sapiens
aaattgaggaaataaccattataaattatggatattgcttatatcaggagatgcgaagaagggtttagggacttggaaagtggaatggaggtggacctagsctgttttcggtgttccttgtcttgccctgcatcatggttacttgagtgtttatgatacactgtggtatttcccatttttgtattggttcatttctaagtg

SEQ ID NO: 29259 - DNA, 201 bp, Homo sapiens
tgcacaggctggtcttgaactcctgggtgctcctgccccagccttacaaaatgttgggattatgggtgtgagctaccctgcctggccaataaagggtcttwttgaaaatattaagttgaatatgcaagaaggaatacaaattaatgaaagtggtaaatatgtgcataattctaaatgaatgtttagaaaataataatgtct

SEQ ID NO: 29260 - DNA, 201 bp, Homo sapiens; identical to SEQ ID NO: 2823

SEQ ID NO: 29261 - DNA, 201 bp, Homo sapiens
catgtgtctttatagtagcatgctatttaatcctttgtgtagatagccagtattggaatcactgggtcaaatggtatttctagctctagatccttgaggartcaccacactgtctttcataatggttgaagtaatttacactcccaccaacagtgtaaagcgttcctatttctccacatcctctccagcatctgttgtttc

SEQ ID NO: 29262 - DNA, 201 bp, Homo sapiens; identical to SEQ ID NO: 21224

SEQ ID NO: 29263 - DNA, 201 bp, Homo sapiens
attgaatttaataagaacgtctcctcttaaaaatgtaatgagaaagcatgtaaaaatagcaggttaaataaaagaacacaatcgcaagtttaaggtaacartaataaatatttaaaatgaaataattggaagcagattttgaagaacaattacgttctctctaagaaaaaaaagaacatattgcaagcaaataatataatt

SEQ ID NO: 29264 - DNA, 201 bp, Homo sapiens
tagccactccataaaatataagaataaaagttatatttatttattatataactttgattggtgaccacatttcagtattccaacttaactagaaattatcygaagattttcatcaactcactgaatttaatattagtctaaggtcttaaattgcaccaggaatcttggaaattaaatttaagctgataggctagagaaaat

SEQ ID NO: 29265 - DNA, 201 bp, Homo sapiens
aacaaacctatctttaaataatagccaaatgaagttctctaaacataaaggaaagaatagaagagaaatttgtggaacatcaagaatgaagtaaaaataasagaaagggggaaagtgggcaaacacaatatatcttcctttttcacttgagttttcttcatatgttttaaccagccattgctagcattgaagatggaagag

SEQ ID NO: 29266 - DNA, 201 bp, Homo sapiens
acaacaaagaaaatgaacaaatttgagctacatagataataatactcacagatgtgagaggaattatcaagatggaaaaatacatttactgtaatctcatygacgtaaagtttgaaaaactttatttttaatacattgtcattcattacattggtgataaaaccctacagtgaaacatatgagtgatcatcatatgagtga

SEQ ID NO: 29267 - DNA, 201 bp, Homo sapiens
ggccccagagtgtgatgttccccaccctgtatccaagtgttctcgttgttcagttcccacctatgagtgagaacacgtggagtttggttttctgtccttgygatagtttgctcagaatgatggtttctagcttcatccacgtccctacaagggacgtgaactcatcattttttatggctgcatagtattccatggtgtata

SEQ ID NO: 29268 - DNA, 201 bp, Homo sapiens
ctctgtctccatttttccctgaaaaattgatgagttctccagtgtcttcttatcaccattttcttgtcaggaattggctaataccaatgccccaaagatayaaacagttttctcccaaccttgattctggggaccatgagtaaagaaattcgatttttcatcacccttatgtggattaagaggagttctaattaggaagcc

SEQ ID NO: 29269 - DNA, 201 bp, Homo sapiens
aatttcttagaattttgaagccatgtatatttcattcatgtattttatatttcatttgtagaatttatgatgtctatttataattattaagaagtaacagyttatcccaggataaatattgctcttttctattgttatttgaaccacaggaatacaccacattgtgcttagaattcattgcttgaacctcgaatttattgg

SEQ ID NO: 29270 - DNA, 201 bp, Homo sapiens
caaaaatttcttagaattttgaagccatgtatatttcattcatgtattttatatttcatttgtagaatttatgatgtctatttataattattaagaagtarcagcttatcccaggataaatattgctcttttctattgttatttgaaccacaggaatacaccacattgtgcttagaattcattgcttgaacctcgaattta

SEQ ID NO: 29271 - DNA, 201 bp, Homo sapiens
tgaaataaaaaacaatttatttccttccaagatacagttgttgtacaggcattggatagacattctcattccaaaagggagaaatcagccacaagagaggrgcagtaggcaccacgcaagtacaaaacacagcagggcaggcgttaaatattaacgttctaaaataatctcttttgactgtatgtgctgccttctgggcac

SEQ ID NO: 29272 - DNA, 201 bp, Homo sapiens
gttctctataggtgtggatttgtttccacattctctattctatttcgctgctctatgtgtctgtttttatgccagtaccatgctgttttggttactatagytctgtaatatactttgaagtcaggtgatgtgattcctccagttttgttctttttgctcaggataactttggctattctgagacatccgtatattttcaga

SEQ ID NO: 29273 - DNA, 201 bp, Homo sapiens
tgataaataggcatctagtttcatttttctgcaaatggatatccaattttcccagcaccatttagtgaagagactgtcctttccccagagtatgttcttgscacctttgtcatgagttctctataggtgtggatttgtttccacattctctattctatttcgctgctctatgtgtctgtttttatgccagtaccatgctgt

SEQ ID NO: 29274 - DNA, 201 bp, Homo sapiens
gcaactgtttgactttccacatagctgcagaatatttgaccactggtattatattccttctcaacccacatcactatttatgtcagcagaaaaacagaaakttaatctgcctaatcaactagaaaattcaatgttacctgtagcaattcttatattattgaaaggccttcctgtaatgtagtaggtctttaaaaagttcat

SEQ ID NO: 29275 - DNA, 201 bp, Homo sapiens
gttctgggaaatgtattgtttcattgatgtgtttctcaatatattctggtttcttggtctgaaattaatgattgttgatattaaagagaacaggttatagraggtggaaatcaagattctacttggtacacggtatgtttacattcattttaaatgacaggtggattgctgaggtccttgactcctgtacagatgcctaag

SEQ ID NO: 29276 - DNA, 201 bp, Homo sapiens
tgtctgtaatcttccttgtttgcttgtctttttcaggaagtgaataagaagataacagtgtttcaaatgccgtgaaacatggcatcatgctctaacttcartataccaataaaacaatcagcttgcaatttctgctggtggtgtctctttctgagtgtttgggactctagaatctgagacccatgttcacattgtaagaat

SEQ ID NO: 29277 - DNA, 201 bp, Homo sapiens
cttgtttgcttgtctttttcaggaagtgaataagaagataacagtgtttcaaatgccgtgaaacatggcatcatgctctaacttcagtataccaataaaayaatcagcttgcaatttctgctggtggtgtctctttctgagtgtttgggactctagaatctgagacccatgttcacattgtaagaatatccaggacccctt

SEQ ID NO: 29278 - DNA, 201 bp, Homo sapiens
ggcctttctgaggttcccaagaaaaccttaaatgcttttggtaggaaaagacgggattcattctacatattactggcgttgaaaatataaatctactttgktgatgatcctagttatgcccaagctccctttaccaggtaataaaaccaatgtgtcatctgtgtattgggttgttaaattgctgaacacaaattatggaga

SEQ ID NO: 29279 - DNA, 201 bp, Homo sapiens; identical to SEQ ID NO: 5695

SEQ ID NO: 29280 - DNA, 201 bp, Homo sapiens
ctttgcagaaatacgttataaaagtggccaagtgggtatgttttccatatgccctcctgttggatgaaagcccttgggtaattcctagagtggagaagagyctggaatttccaggtccactttctggaggtaaaaattctgtggcgggtgtgctttggtctgcaaattgactgtcagttctcaggagaatctgtcttggag

SEQ ID NO: 29281 - DNA, 201 bp, Homo sapiens
agtaagaaaaataaataaaccatttcatgatcaagctcttatttctaaagagaggattttagggctaaataaatcaaacagaagtaagctctcccccacawcttgtctatatcatttggataatgatgtaattcaaaggcacagagcaccttttcaacaacataagcaaagtgaaaattatgtcatggaatacaatgatgt

SEQ ID NO: 29282 - DNA, 201 bp, Homo sapiens
atataaatgctacaggaaaccaaagaccaatagaaaatttgaaaagtagcctgagaaaaaagatagattatgttgaaaggatcaactgtttgaatgacaastgattttcagcagaaagcatggaagctagaattcaatgtaatatattttcagtgtgtttcaaaggagtagcagacatttcataaacagaaattcaaaagg

SEQ ID NO: 29283 - DNA, 201 bp, Homo sapiens
aagactacctccacattcctaatgttattcttactttgaaacatcagattttgagcacttatattttactggacacatttttttcttatttccaatttaawtatttatgataacatttcaaagtggcagaaattagtgaatttccaataaattatagtagtatagatattaaatgtataggacaatttttctaaatttatc

SEQ ID NO: 29284 - DNA, 201 bp, Homo sapiens
tagaaaaaggaagagataagcaggaagactacctccacattcctaatgttattcttactttgaaacatcagattttgagcacttatattttactggacacmtttttttcttatttccaatttaattatttatgataacatttcaaagtggcagaaattagtgaatttccaataaattatagtagtatagatattaaatgta

SEQ ID NO: 29285 - DNA, 201 bp, Homo sapiens
taaattaattagaaaaaggaagagataagcaggaagactacctccacattcctaatgttattcttactttgaaacatcagattttgagcacttatattttrctggacacatttttttcttatttccaatttaattatttatgataacatttcaaagtggcagaaattagtgaatttccaataaattatagtagtatagata

SEQ ID NO: 29286 - DNA, 201 bp, Homo sapiens
gctaaaatggataagttgatgtggtaaatcaatgaaaaggaaactcatcacaaaatctgcagttgcatgaattcccctgttctggtctcaggttgaggttkcaggcttatccaagcagaatccttcctcagaggaaaagtttggctattccacaattttaggggaaatatcacactagtgatatatatagtgatatatagt

SEQ ID NO: 29287 - DNA, 201 bp, Homo sapiens
ccacttgacattccttgtgggtggtgggagccttcttctgccctactcatgcctgactaactacgtactgtaagagccctatacctaaaagtctcagatgrtatggatgtgtgtccttccctctgagtactattatctgggaaatggctacaggtctttgagaaagcatcatatgaatacattctgaatattctgtggtga

SEQ ID NO: 29288 - DNA, 201 bp, Homo sapiens
aggaacattactgcacaaccagaaatcaggtgcacatagaaattaaggtcaggaccttaaagggaatcttgcccattgatattagtcctgccctaaaaaaagtcggacatggtatgtttactactaatcattttttttccataacgttaatggtattttgtattttcccatgggcacctacattacacttatagactattt

SEQ ID NO: 29289 - DNA, 201 bp, Homo sapiens
ttaccattttcatgtcaggagggtggcatggagatggacttagcctattttcggtgttccatctcttgccctttataagggttagttgactgtttatgatrcattccggtatttcccatttttgttttggttcatttctaagtgtgcattataattttaatattaaagtttttgattaggagaaatgtctcatagaaatta

SEQ ID NO: 29290 - DNA, 201 bp, Homo sapiens
aaagaggctatcaaaacagtcagagatattgaccatcttcactgttagctgtaggatcagtgtccaccccccgacacacccacacaaactcacatacacasaaatgaaaagcacagtgaaaagcagaatagcagtctttccaaacagattgaaaaccaaaagatgtctaaagttcaatcctgacactgtgccgactgcttg

SEQ ID NO: 29291 - DNA, 201 bp, Homo sapiens
gtgcagagctgctgtgggctccacccagtttgaacttcctggtggctttgtttacaccgtaaggggaaaattgcctactcaagccccagtaatggcggacrtccttcccttgactaagctcaagcatcccaggttgacttcagactgctaaactagcagtgagaatgtcaaaccagtggatcttagcttgctgggctccaa

SEQ ID NO: 29292 - DNA, 201 bp, Homo sapiens
caaggagaaacctgtcttgcaccaggcctgcagcttcctcagtcccccacatcatcaggcaatatctgcctggcactcctctttgttccttttctctgacmttcctttttgacatgatggttgacctgaagtcaccgaggcaggactgctcatctccaggtcctatgggaaacagtacctggtgaaaccagagacaataat

SEQ ID NO: 29293 - DNA, 201 bp, Homo sapiens
gttggtgcaattaatagaataattctgccaattcataacactgccagaccacagcgacccaatgaaactcactgactctcagagaagtttattccctctgycaatgttcatctttcctggcaaaccatctttagtgttccaggcaaactagagcatggtgaagtcgaagaagattctactttctgttccattcagagagct

SEQ ID NO: 29294 - DNA, 201 bp, Homo sapiens
attttctaaattgaaaacaacatcgacaacatccggttaaactggaattacaaagagaagagaaaatcaacttaatttttcctcatttactacagtgaccytagccatgtgacttaatttctttagatataattttttttttgtatttttagtagagatgggaaaaaattagtcagtcatggtggcgaggggcctgtaatc

SEQ ID NO: 29295 - DNA, 201 bp, Homo sapiens
aacacagcaaagagcataaacctacagattcaagaagctgagcaaatcccaaccagaatacaaccaatgaaatccattccaggaaaattcattgtccaatwtctgaaaattaaagacaaaatattgaaagcagaaagaaggaaatgacatcatagttatagggaaaatgcaatataaataatagtggttattatcaccaga

SEQ ID NO: 29296 - DNA, 201 bp, Homo sapiens
aaagttacttctgatggatttagttctgtccaggaagaaaatagatgatatattcagaatactctacaatctttggcaactgtgtaaccttgatcttgggratggatgttgggaaaaaaattctccatgaatgtattgcacttctgcatggtctagctcttatcttgtgagcaaacagtatgtttgatgagcaaacagaag

SEQ ID NO: 29297 - DNA, 201 bp, Homo sapiens; identical to SEQ ID NO: 21225

SEQ ID NO: 29298 - DNA, 201 bp, Homo sapiens; identical to SEQ ID NO: 21226

SEQ ID NO: 29299 - DNA, 201 bp, Homo sapiens; identical to SEQ ID NO: 21227

SEQ ID NO: 29300 - DNA, 201 bp, Homo sapiens; identical to SEQ ID NO: 21228

SEQ ID NO: 29301 - DNA, 201 bp, Homo sapiens
aactatttgttttttaaatgtttacatgcacgatttggagaatgtctaggtaatttcctaaagattattattgtgggtaagttgcattattaaagagcaargcttatgtgaaacttaatacatttagagttagaagttgagtgtatttttacttaaaatgcattgcttgaacaaatgatttataaataatcttaaactcat

SEQ ID NO: 29302 - DNA, 201 bp, Homo sapiens
ccactaacattcttgagcatttattgtgtgcttagaaatttgtgtatgaattcatttaatatagtcctatggcttaacacgagattttgttcatttttttwatattttatttatttatttatttttattttactttaagttctagggtacatgtgcacaatgtgcaggtttgttacatatggatacatgtgcttgttggtg

SEQ ID NO: 29303 - DNA, 201 bp, Homo sapiens
aatagtgttccatgtatcccttctctctgcaattattgattgactcaggctaaagaagtcttcgcaaatattaacacatttttccatggttgcccaggggktattcttcattacaagtgtgcatgtgtatttatgtgtgtgtttggggtgaggctgtatttgttggggacatagagttttcacacatcacttctcaagctc

SEQ ID NO: 29304 - DNA, 201 bp, Homo sapiens
aatattacatattgaagcacctcacaatgacttaacaccaattttatttgaggaatttctttagtgttaaaatacagtaaacagccacagtaacagtaatrccactaacattcttgagcatttattgtgtgcttagaaatttgtgtatgaattcatttaatatagtcctatggcttaacacgagattttgttcattttttt

SEQ ID NO: 29305 - DNA, 201 bp, Homo sapiens
ggggcagttgctagagaagaacaaagagctcccattgccccaccatgaacttttctctgattaacaagcaatgccactatactgggagagggacacaagtrtagaaagagccttctctatagtgcatgtgtggactcttgaagctgagcacaaacactgagaatccctttggcactccagtcttccccaaaacacaagtta

SEQ ID NO: 29306 - DNA, 201 bp, Homo sapiens
tacgcagttagaaacgtcatttcttccagcttttgaattaaagaaaagctgtttttgaagttgagatctgatgtaaattattttagtatttttttctaagrcacttctaagcccctgaattgctaattatatcctcatcttccatttacaaaattccttctaaacttcagataagagaactcaaatcttctcttttctaaa

SEQ ID NO: 29307 - DNA, 201 bp, Homo sapiens
aggaaagtttatgtctgctgatgctgctcccacagctgccccttctcccaggtgctctgtcccagggagatgagagttttatctataagcccctgactggrgctgctgcctttctttcagagatgccctgaccagagaggaagagtctagagaggcagtttggctacagtggttgtgcagagctgctgtgggctccaccca

SEQ ID NO: 29308 - DNA, 201 bp, Homo sapiens
ggctgccttcagccaaactatctgaagctatgcaaaaacttttggtcttccaagaaggtttttgttttgttttatacttttccctaccattctgactgaayccctacactaccagatagttgaattggtgccttcctttgcagaaatacgttataaaagtggccaagtgggtatgttttccatatgccctcctgttggatg

SEQ ID NO: 29309 - DNA, 201 bp, Homo sapiens
gtatgtgaatagcttagaaaaaaatctctttgataataaagggaggaaatatgatcatggtcttgattgctattatcggtttccatacgcagttagaaacrtcatttcttccagcttttgaattaaagaaaagctgtttttgaagttgagatctgatgtaaattattttagtatttttttctaagacacttctaagcccct

SEQ ID NO: 29310 - DNA, 201 bp, Homo sapiens; identical to SEQ ID NO: 21201

SEQ ID NO: 29311 - DNA, 201 bp, Homo sapiens
gaagaactgattttaatgtaattaacaacaaattaacaatgagcaatggaattaatggacatagcaagagagaagtactgaaacaataaatattaaatattaatcccttaattattgtattaatcccttagttgaaaataaaaaaaattataaaattaggaatttttctctctgaagagaagccaggtatagaggaggaca

SEQ ID NO: 29312 - DNA, 201 bp, Homo sapiens
ggaggcagaggtggcactgagccaagatcacaccattgaactccagcctgggcaacaagagcaaaactctgtctcaaaaaaaaaaaaaagggccgggcgcrgtggctcacgcctgtaatcccagcactttgggaggccgaggcgggtggatcatgaggtcaggagatcgagaccatcctggctaacaaggtgaaaccccgt

SEQ ID NO: 29313 - DNA, 201 bp, Homo sapiens
gaaaacaaactgacggtatctggaacattttatatttccattcgtttttccttagtgtatatatttgaataatttcaaaacagatacctagaaaagtcatctatctatctatctatctatctatctatctatctatcacacacacacacacatatatgtgtgtgggtatatgtgtgcatgtgtgtgaataacaacattgac

SEQ ID NO: 29314 - DNA, 201 bp, Homo sapiens
ctgaaaacaaactgacggtatctggaacattttatatttccattcgtttttccttagtgtatatatttgaataatttcaaaacagatacctagaaaagtcatctatctatctatctatctatctatctatctatctatcacacacacacacacatatatgtgtgtgggtatatgtgtgcatgtgtgtgaataacaacattg

SEQ ID NO: 29315 - DNA, 201 bp, Homo sapiens; identical to SEQ ID NO: 5682

SEQ ID NO: 29316 - DNA, 201 bp, Homo sapiens; identical to SEQ ID NO: 5683

SEQ ID NO: 29317 - DNA, 201 bp, Homo sapiens; identical to SEQ ID NO: 5684

SEQ ID NO: 29318 - DNA, 201 bp, Homo sapiens; identical to SEQ ID NO: 5685

SEQ ID NO: 29319 - DNA, 201 bp, Homo sapiens
tatcctagttatgaccaagctccttaaacaatttaaacctgtactgtatgatatgtgtattgggttttaaaatttccctatgtaacaactgacgatgctgracacaaattatggagaggttagcaaggacaacaattgcaaaacaattaaaaaaatgcctttatttgcatactaacacatgagaatttacttttcacttca

SEQ ID NO: 29320 - DNA, 201 bp, Homo sapiens
gcactacccattagcttatctaatttcttccaccttcaaaatacatctcaaatgtgtccacttgcatgatctttactagaagcttgttgttcggcccacartgctctctcctggaggtctttaacagcctcgacctggtcctggtaacattcttcccccagtacatcccatatcagttccctcacgacaatcagagtgatc

SEQ ID NO: 29321 - DNA, 201 bp, Homo sapiens
agtggaatatgactaattccacctagatgacctcctggggaaactcgttttccaattggggatttataagaaaataattcattgcatctgctaagtgtgtsagtgcatgtgtgtctatgtattgaggagcttattaacaatgatgtcatataaatgtattggttatcagaaaccagattttaaggtgtattggcctcccag

SEQ ID NO: 29322 - DNA, 201 bp, Homo sapiens
atttaatcttctaagcaatggtgtatggtactcctcactatctttattttcatttttgtctctacaattggacaataaactattaagtttctgaaaaatcyttccagggtcctggattggtactcctcttctcagctgctgattgctctgtgatacctagaaattccctgttcctcaattcataaaatatactactcggta

SEQ ID NO: 29323 - DNA, 201 bp, Homo sapiens
atctggccataaactggccccagtaaactggccataaataaaatctctgcagcactgtgacatgttcgtgatggccatgacacccatgctgaaggttgtgrgtttaccagaatgagagcaaggaacacctggcccacccagggcaggaaaccacttaagggtattcctgagccacaaacaatagcatgagcgatctgcacc

SEQ ID NO: 29324 - DNA, 201 bp, Homo sapiens
taaaccccaatcagagtcacaatatcttcccccaattcggcttaccttcatctaagtcctgagctgagctgaaggccagcagggccactgacagcagaatyagaagcatcttgcagaaggctctggtgtcactcccaactttatgctgggagaaacgtgtcagctccctttataaagacaagcaggacaatggcgcatttg

SEQ ID NO: 29325 - DNA, 201 bp, Homo sapiens
acagtgtactcaccagatgatgttctcatggtgaatggaaaagagcaagaaactccaatatggaaaccgtcttaaatctctgtgtaaagtctactaatttsctgttcactgaagcaaattacatgagtgaattcagagtccaagttccaggtagtcaccctgcctgtggtgggaggatactgcaggattatatgacaaagt

SEQ ID NO: 29326 - DNA, 201 bp, Homo sapiens
ctccatctgtgtgagttgaaacaagaagagctgagctcatgctggaaaaccctcctgtcttcatatctctctgtcttcaccacacggccggcccctctctscctgacctgcctctcaactcccaacctccccccttcccaaggcttcctaattagaactcctcttaatccacattagggtggtgaaaaatcaaatttcttt

SEQ ID NO: 29327 - DNA, 201 bp, Homo sapiens
ctgacgctcctcatctatgaactgctcagagtctcctccatctgtgtgagttgaaacaagaagagctgagctcatgctggaaaaccctcctgtcttcatayctctctgtcttcaccacacggccggcccctctctccctgacctgcctctcaactcccaacctccccccttcccaaggcttcctaattagaactcctctta

SEQ ID NO: 29328 - DNA, 201 bp, Homo sapiens; identical to SEQ ID NO: 5586

SEQ ID NO: 29329 - DNA, 201 bp, Homo sapiens; identical to SEQ ID NO: 5588

SEQ ID NO: 29330 - DNA, 201 bp, Homo sapiens
gtctttatagtagcatgctatttaatcctttgtgtagatagccagtattggaatcactgggtcaaatggtatttctagctctagatccttgaggaatcacyacactgtctttcataatggttgaagtaatttacactcccaccaacagtgtaaagcgttcctatttctccacatcctctccagcatctgttgtttcctggc

SEQ ID NO: 29331 - DNA, 201 bp, Homo sapiens
attattagaaaactctgctactttgtaggaggagctttggataactatgaataagtccctttacagacttaactttaaaaaaccatctgatttttctttaytttctttatttttattgtaaattgacatattttacttgcatacatttatgaggtatcaggtgttgttatgatttatgactactatgtggaataattaaat

SEQ ID NO: 29332 - DNA, 201 bp, Homo sapiens
aatcagaaaggcaccagagaaaagtgaagcccaatgcaaggaaatccaaaaatatgatacaagaagtgaagggagaaatattcaaataaattttaataatataataataaattttaataataaataaataataaattttaataataaataaattcaaacatttgatacagttagtacataaattttgatgcataaaaaagt

SEQ ID NO: 29333 - DNA, 201 bp, Homo sapiens
ttacgaagaccatggggaaagtgtagtatctgggccagaatacatcgtccctcactgcatggtcccttacagcttcccttggctaggagagggagttcccygaccccttgcacttcccgggtgaggcaacaccacaccctcctttggctcgtcctccgtgggcttcacccgctgtctaaccagtcccaatgagatgagcca

SEQ ID NO: 29334 - DNA, 201 bp, Homo sapiens
gctgtggccggagaatggcgtgaacgtgggtggcagagcttgcagtgagccgagaccgcgccactgcattccagcctgggcgacagacaaaaaaaaaaaaagaaaagaaaaaattaggtggcacctatgacaatactttaaaaagcatataaaagactttggtctatttgcataagtatttttttattgtgaattatatat

SEQ ID NO: 29335 - DNA, 201 bp, Homo sapiens
ccagctactcggaaggctgtggccggagaatggcgtgaacgtgggtggcagagcttgcagtgagccgagaccgcgccactgcattccagcctgggcgacaracaaaaaaaaaaaaagaaaagaaaaaattaggtggcacctatgacaatactttaaaaagcatataaaagactttggtctatttgcataagtattttttta

SEQ ID NO: 29336 - DNA, 201 bp, Homo sapiens
tactttggctgatttaggctggataaagcagtggcattctgactccattagtttctcattcttcttctgggaacagtgtactcaccagatgatgttctcayggtgaatggaaaagagcaagaaactccaatatggaaaccgtcttaaatctctgtgtaaagtctactaatttcctgttcactgaagcaaattacatgagtg

SEQ ID NO: 29337 - DNA, 201 bp, Homo sapiens
ggctactatggtgaaaccccgtctccactaaaaatacaaaaaaattagctgggagtggtggtgggcacctgtattcccagctactcggaaggctgtggccrgagaatggcgtgaacgtgggtggcagagcttgcagtgagccgagaccgcgccactgcattccagcctgggcgacagacaaaaaaaaaaaaagaaaagaaa

SEQ ID NO: 29338 - DNA, 201 bp, Homo sapiens
gaatgctcattgtagaattattctaacagctcagaaaagaagctgcccatatgtacatcaaataaggatgaataaataattacaataaaatcataaaatgraaaaacatagagaagtgaaaagaaatgaatcacatgtacatgcagttatgtgattacatttcagatccataatgttgagcacaggaagccatgaatacga

SEQ ID NO: 29339 - DNA, 201 bp, Homo sapiens
gaataaatttagtcaaactgtgttttgggcttttctatgtctgtgaggagaatttgaatgtcataatcaaggacgctgtaattctacacccagctatatawatgcaaaggaattgtagcaaatgatatgtgaaagaatgctcattgtagaattattctaacagctcagaaaagaagctgcccatatgtacatcaaataagg

SEQ ID NO: 29340 - DNA, 201 bp, Homo sapiens
atccttcctcagaggaaaagtttggctattccacaattttaggggaaatatcacactagtgatatatatagtgatatatagtcacactatatatatatatwgtgatatatagtcttgatgcagctgtgtcaggtgtctgaattggagacaaggtaaaacatcaaaattagatggcaccttggaaggctgaggcgggcggat

SEQ ID NO: 29341 - DNA, 201 bp, Homo sapiens
atgaaatatcagtactgagaatccaatagaaagagtcaaccagttagagcactagaagagataattagtgaattagaagatagctacacagaatgaagcayagagagaaagaaatggaaaatgcaaggctagagggtaacacactgatgctatcatcaaaacacctaacatacttgtagagttctgtaagattagaggaga

SEQ ID NO: 29342 - DNA, 201 bp, Homo sapiens
ataagactaaaaaaatgaaatatcagtactgagaatccaatagaaagagtcaaccagttagagcactagaagagataattagtgaattagaagatagctamacagaatgaagcatagagagaaagaaatggaaaatgcaaggctagagggtaacacactgatgctatcatcaaaacacctaacatacttgtagagttctgt

SEQ ID NO: 29343 - DNA, 201 bp, Homo sapiens
agaaagagaataaaagattattctgaacactaaaacaataagactaaaaaaatgaaatatcagtactgagaatccaatagaaagagtcaaccagttagagyactagaagagataattagtgaattagaagatagctacacagaatgaagcatagagagaaagaaatggaaaatgcaaggctagagggtaacacactgatgc

SEQ ID NO: 29344 - DNA, 201 bp, Homo sapiens
aaattctaacacaaagcttttattctattctctgactaaagtgttgggaaaagaagaaaattgttaccgttttcatttctaacatactaaaacaaaaaacaaaaaatcaaaaaaatcagaaacatttttaaaaagaacagagtgttaagagtagtttgttcagttttcctatagaaaataatgttcagaaagagaataaaa

SEQ ID NO: 29345 - DNA, 201 bp, Homo sapiens
taatcagaaaggcaccagagaaaagtgaagcccaatgcaaggaaatccaaaaatatgatacaagaagtgaagggagaaatattcaaataaattttaataawataataataaattttaataataaataaataataaattttaataataaataaattcaaacatttgatacagttagtacataaattttgatgcataaaaaag

SEQ ID NO: 29346 - DNA, 201 bp, Homo sapiens
taaattctaacacaaagcttttattctattctctgactaaagtgttgggaaaagaagaaaattgttaccgttttcatttctaacatactaaaacaaaaaacaaaaaatcaaaaaaatcagaaacatttttaaaaagaacagagtgttaagagtagtttgttcagttttcctatagaaaataatgttcagaaagagaataaa

SEQ ID NO: 29347 - DNA, 201 bp, Homo sapiens
cataggaaaaaagggagaatactacatcaaagaaacaccctctggaacaaaaaagtctaaacaacagccttcagccctagatcttttctctgatagagccyacccaaatgaggaggagccagaaaaccaactctggtaatatgacaaaacaaggctctttaacactccccaaacatcacactagctcaccagcaatggatc

SEQ ID NO: 29348 - DNA, 201 bp, Homo sapiens
agtgggaaagggagatcctctgcccccaaacacaacctcccctgggaaaactgaaggtctattttatgggaaaagattacaaccttacctggagctgagtyaatttagagagctgagcaaaatacaggaatagagggagcagtagaaaaggccctgtgagctcgctgggtcctcaagcaggctattcctgtgtggcatcac

SEQ ID NO: 29349 - DNA, 201 bp, Homo sapiens
attcatgcccgaaacttcattagcaattttaattttgccccggtcttgtggtcctgtgatctcgccctgcctccatttgccttttgatattttattacctwgtgaagcatgtgatctctgtgacccacaccctatttgtacactccctccccttttgaaaatcactaataagaacttgctggttttatggcttagggggca

SEQ ID NO: 29350 - DNA, 201 bp, Homo sapiens
taatctcttaatcccatcatcttcataagctgaggaggatgtatgttgcctcaggaccctgtgatgattgcattaactgcacaaattgtagagcctgtgtgtttgaacaatatgaaatctgggcaccttgaaaaaagaacaggataacagcaatgtttagggaaaaagggagataaccttaacctctgactgctggttagc

SEQ ID NO: 29351 - DNA, 201 bp, Homo sapiens
atttattcttaagaaatgtatatgaaatcagagtcgtagaatgaaaaaagagtaatatgtaatttttaaactacagttacatttcaaatgtgaatttaaaytgtaaaatgttaagtttaataatattttatataaatataaaagtgcaaaaattattctttgatgtttctaattttgaaaagggcatgaggcactgacaat

SEQ ID NO: 29352 - DNA, 201 bp, Homo sapiens
ggaggattgtttgtatttcagtggggtcagtggtaatatccactttgtcatttttgattgggtttatttggatcttctctcttttttttctttattagtckggttaggggtctatcatattaattttttaaaaacatcaaatcctggattcactgaccttttgtatgttttttttaatcacaatttccttcagttcagctc

SEQ ID NO: 29353 - DNA, 201 bp, Homo sapiens
cttttcaatttttgtttctgttgcaattgattttggtgtctttgccatgaaatctttgccaggtcctatgcaggaatggtgtttactaggttatttttccrttttttaaaaaaatagttttaggttttacattttattatttaacccagcttgcattgagttttgtgtatgtataagaaaggtgtccagtttccatcttct

SEQ ID NO: 29354 - DNA, 201 bp, Homo sapiens
tctgccatactagtctaaactgctgcatatcttgccaggatatttgccatgagtttctaattattctttctagttctgcacatccttttatcctgatgtaytctcaaggtggcagccagagagaacctgtaaaaacgcaaatttgatcatgccattcttctcctccagatttttcagtggctttcatctaattcagagtaa

SEQ ID NO: 29355 - DNA, 201 bp, Homo sapiens
tcagatgcttagactaaaaaaaaatggagtcaatattttctctctttcagaacctatctttaaggcatcagcaaattttgttgactctaccctcaaaaacmtacagaatccaatcccttgtcatcactctgccatactagtctaaactgctgcatatcttgccaggatatttgccatgagtttctaattattctttctagt

SEQ ID NO: 29356 - DNA, 201 bp, Homo sapiens
catcactgttgtagacctttggggagacctaaaattcaaatgtttattcaattggttttgagcaatgtctgcactgcttgaatttgaaattaaatgtgtcytgtttacttgcatgaagacactttatacatatctcccttatcacttctattcctctactctgatctcagttcctttaaggatttgagctgggcctgagat

SEQ ID NO: 29357 - DNA, 201 bp, Homo sapiens
gtgtataagagctctcctttctccacatccatcccaacatctgttttgtttgtttgtttgttttaatcatagccattctgaatagggtaaggtgatagtgwggttttgatttttatttctctgatgattagtgatatagagtatttttcacatactgttgattatttgtatgtcttatttgaaaagatgtccatttctatc

SEQ ID NO: 29358 - DNA, 201 bp, Homo sapiens
cagatttatttttcatatactgatttcatttcctctgcatagatacagtagtaagattgctagattgaatagtaatcgagttttagttctttgagaaatcrtactgttttccatagagtttatactatttactttccaatcagggtgtataagagctctcctttctccacatccatcccaacatctgttttgtttgtttgt

SEQ ID NO: 29359 - DNA, 201 bp, Homo sapiens
tgagttctccagtgtcttcttatcaccattttcttgtcaggaattggctaataccaatgccccaaagatataaacagttttctcccaaccttgattctggrgaccatgagtaaagaaattcgatttttcatcacccttatgtggattaagaggagttctaattaggaagccttgggaaggggggaggttgggagttgagag

SEQ ID NO: 29360 - DNA, 201 bp, Homo sapiens
gagtgatgaaaggttagctttaggactacctgagtaaacaagctctttagataaactactatacattcctttgtatctgtgccccaagtgcccaggctccrgcaaagagactggctgccttcagccaaactatctgaagctatgcaaaaacttttggtcttccaagaaggtttttgttttgttttatacttttccctacca

SEQ ID NO: 29361 - DNA, 201 bp, Homo sapiens
gtgcagaacaattaaaaaactcttcattggcatgctagtagatgagaaatcacttttcacttcaacaccaatatggaaaattttatcttacagcaaggacrttgtgtttgaataggagttaatttgagctgttttggaaatcatcatgttttccataaagacagcattgatttcatccactggcatattgagatgctttcc

SEQ ID NO: 29362 - DNA, 201 bp, Homo sapiens
gactcccagaacttttccagaagggctacaaagggaaacgacagctggcattagtccatggaagagagagagaggagggagaatgtatctgctcagctgtygttagtcttctgtttccccttggccagggtttccctgagttagaactaccatctctgttgttctgtcttacatcatccagtcccttggtggtggtcatga

SEQ ID NO: 29363 - DNA, 201 bp, Homo sapiens
tttccaatttcattatttatgataacatttcaaagaggcagaaattagtgaatttccaataaattatagtaatatagatattaaatacacaggacaatttytataaatttatctctaaatgaaataattatgcccatttttaccattcaaagattataccatgcatgtgtacacatatgtgaggaaaaatattttgatagt

SEQ ID NO: 29364 - DNA, 201 bp, Homo sapiens
gtgatattacaccagcattttaaaaatttctttttgtctgttcagacatgataacttttctgcccatcattttttccattctaatagtggttatatttgtkattggaaattttgctaatggcttcatagcattggtaaattccattgagtgggtcaagagacaaaagatctcctttgttgaccaaattctcactgctctgg

SEQ ID NO: 29365 - DNA, 201 bp, Homo sapiens
gaggcagagcttgcagtgagccgagatctcgccactgcactccagcctgggtgacagagcaagactccgtctcaaaaaaaaaaaaaaaaaaaaaaaagaamcatcagattctgagcatctgtattacactagacacctttttttcttatttccaatttcattatttatgataacatttcaaagaggcagaaattagtgaat

SEQ ID NO: 29366 - DNA, 201 bp, Homo sapiens
gataattagagttttgctgaataaagaagaatagagcattatgatagtaagaaatccaagataaaattttaaacttttctttaaatattttaaaaagtaasagataagcaggaagtctacctccacattcttaatgttagttttactatgaaacatcagattctggccgggtgcggtggctcatgcctgcaatcccagcac

SEQ ID NO: 29367 - DNA, 201 bp, Homo sapiens
tgctgcagccatctgagtacctgggattacagacgggcaccaccacacctggctaatttttgcatttctagtggatatagagtttcaccatgttggccatrctggtcttgaagtcctaacctcaggtgatccacctgcctcagcctgccaaattgctgggagccacgggcctggccaatcatctgctttttataggtgata

SEQ ID NO: 29368 - DNA, 201 bp, Homo sapiens
cttgagagcaggagttccctttgcaacatatggaaactccatgtctacaaaaaattgaaaaattagctggcgtggtgctgcatgcctatagttccaaatasttgggaaactgaggcaggaggattgcttgagcccagggtttcaaggctgtagtgggctatgatcctgccactgtactccagcttgggtaacagagggaga

SEQ ID NO: 29369 - DNA, 201 bp, Homo sapiens
gtgagtgttgattgaagtttatggtaatctgcactcattctataatccatctggttttggtagaggccagataggttaagtgaatccggttatagaaaggwctaccatcccctgtaacttgcaagtgttttgtcacggcagtgaccagttccattccttagggaatgcggttattatattttatacattgggttgccagca

SEQ ID NO: 29370 - DNA, 201 bp, Homo sapiens
ctagaaagcatttgtgagtgttgattgaagtttatggtaatctgcactcattctataatccatctggttttggtagaggccagataggttaagtgaatccrgttatagaaaggactaccatcccctgtaacttgcaagtgttttgtcacggcagtgaccagttccattccttagggaatgcggttattatattttatacat

SEQ ID NO: 29371 - DNA, 201 bp, Homo sapiens
taaggttacaggcttatccaagcagaatccttccgcagaggaaaagtttggctattccacaattttaggggaaatatgacaataatatagtcttgatgcarctgtatcaggtgtctgaattggagacaaggtagaacatcaaaattagatggcgcctattacaatatttttagaaagcgtataaacaaccttggtctattt

SEQ ID NO: 29372 - DNA, 201 bp, Homo sapiens
cattccttatctatttttcttttggctcctctattcctgacacaacaagggtggacatatttcccacacgcttggttttgcagagtacctatatcagttaggtttttctgccagagaaacctctccaacactacattacatattgatatctcacatgtctttggattcagtttttctaagctgggtttgctggatggctct

SEQ ID NO: 29373 - DNA, 201 bp, Homo sapiens
ccattccttatctatttttcttttggctcctctattcctgacacaacaagggtggacatatttcccacacgcttggttttgcagagtacctatatcagttaggtttttctgccagagaaacctctccaacactacattacatattgatatctcacatgtctttggattcagtttttctaagctgggtttgctggatggctc

SEQ ID NO: 29374 - DNA, 201 bp, Homo sapiens
gccattccttatctatttttcttttggctcctctattcctgacacaacaagggtggacatatttcccacacgcttggttttgcagagtacctatatcagttaggtttttctgccagagaaacctctccaacactacattacatattgatatctcacatgtctttggattcagtttttctaagctgggtttgctggatggct

SEQ ID NO: 29375 - DNA, 201 bp, Homo sapiens
tgccattccttatctatttttcttttggctcctctattcctgacacaacaagggtggacatatttcccacacgcttggttttgcagagtacctatatcagttaggtttttctgccagagaaacctctccaacactacattacatattgatatctcacatgtctttggattcagtttttctaagctgggtttgctggatggc

SEQ ID NO: 29376 - DNA, 201 bp, Homo sapiens
agtcttgctctgtcgcccaggctggagtgcggtggcgccatctccgctcactgcaagctccgcctccggggttcacaccattctcctgcctcagcctcccragtagctgggactacaggtgcccgccaccacgcctggctaattttttgtattttttgtagagacggggtttcaccgtgttagccaggatggtctcgatcc

SEQ ID NO: 29377 - DNA, 201 bp, Homo sapiens
cttgcctgtgttgtatagcaccaaggcttgcctgagtgtagtgagattcacagaagtttggacaattcttgtagcctgagcaggctgccagcccccttctytcatatatgtgtgcctgggagtgtgctgtcctcacacatctcacagataagcaagaccatctctgttacatgaaaaatttagctaaatgtgaaaatatcc

SEQ ID NO: 29378 - DNA, 201 bp, Homo sapiens
tttagcttgcctgtgttgtatagcaccaaggcttgcctgagtgtagtgagattcacagaagtttggacaattcttgtagcctgagcaggctgccagccccyttctttcatatatgtgtgcctgggagtgtgctgtcctcacacatctcacagataagcaagaccatctctgttacatgaaaaatttagctaaatgtgaaaa

SEQ ID NO: 29379 - DNA, 201 bp, Homo sapiens
tattttagcttgcctgtgttgtatagcaccaaggcttgcctgagtgtagtgagattcacagaagtttggacaattcttgtagcctgagcaggctgccagcmcccttctttcatatatgtgtgcctgggagtgtgctgtcctcacacatctcacagataagcaagaccatctctgttacatgaaaaatttagctaaatgtga

SEQ ID NO: 29380 - DNA, 201 bp, Homo sapiens
tgaacatctatagtagaaggcaagtgtggtgctgagggctgccacccacctctaggtacccaagctcctgcagcagtcctgcgtctccctttcacccaccytcactcacagacagtgtccctttcagctcttccattacctctgtttttgatgtgtctagtgagagcatagctgatatttatgctttcctgatacactagt

SEQ ID NO: 29381 - DNA, 201 bp, Homo sapiens
ccaggttatacaaccagtgtgtcatctctgtattaggttgtaaaatttctctaacaactgaagttgctgaacacaaattgtggagaggttaaacaaagaartaagtgcagaacaattaaaaaactcttcattggcatgctagtagatgagaaatcacttttcacttcaacaccaatatggaaaattttatcttacagcaag

SEQ ID NO: 29382 - DNA, 201 bp, Homo sapiens
ttatttccttccaagatacagttgttgtacaggcattggatagacattctcattccaaaagggagaaatcagccacaagagaggagcagtaggcaccacgmaagtacaaaacacagcagggcaggcgttaaatattaacgttctaaaataatctcttttgactgtatgtgctgccttctgggcacatgcctcttctttctg

SEQ ID NO: 29383 - DNA, 201 bp, Homo sapiens
gagcttcttaagaataagttattcaaaagtattagtagcaaccgggttttaagaattattggcctttctgagattcccaagaaaaacttgaatccttttgstaggaaaagtttggattcactctacatattactcacgttgaaaaattaaatttactttggtgatgatcctagttatgtccaagctccctttaccaggtta

SEQ ID NO: 29384 - DNA, 201 bp, Homo sapiens
aacaatttcttctatccatgagtgagtgagtatgtgtgtatgggtttgagtgtgtttgtattaatgagcttcttaagaataagttattcaaaagtattagkagcaaccgggttttaagaattattggcctttctgagattcccaagaaaaacttgaatccttttgctaggaaaagtttggattcactctacatattactca

SEQ ID NO: 29385 - DNA, 201 bp, Homo sapiens
aaaggggcatcctggctttataacaattcactctcatgaaaaacaactcattcccctagaacaaattcagtcttgtgagagtgagaactcactcactacaytgaaaatggtaccaaggcattcatgagggaaccaaccctatgactcaaacacttctcactaagctcaacctcccaacaccactactttggggatcaaatc

SEQ ID NO: 29386 - DNA, 201 bp, Homo sapiens
aaaaatgatattttaatgaacaaataaatgggtggataaaatgggtaagctgatgtggtaaaccaatgaaagggaaactcatcacaaaatctgcagttgcrtgaattcccctgttctgttctcaggttaaggttacaggcttatccaagcagaatccttccgcagaggaaaagtttggctattccacaattttaggggaaa

SEQ ID NO: 29387 - DNA, 201 bp, Homo sapiens
cccattcatcctgatttggggaaacaagaagctaaagcagacttttctttcagttttgtggcatgtgaggtactgggtgaaaggagagaagccttcatctycatagattcacaagagcagcattgtgtatcttctagcagaaaacaaacgtgttatatgaagcattttatatttcttactgtgttttctgtaatgtatgta

SEQ ID NO: 29388 - DNA, 201 bp, Homo sapiens
caagatcccagcatgaaggtccacataaaagctatgcaaactgtgacctccttcctcttgttatgtgccatttactttctgtccataatcatgtcagtttrgagttttgagagtctggaaaacaaacctgtcttcatgttctgcgaagctattgcattcagctatccttcaacccacccattcatcctgatttggggaaac

SEQ ID NO: 29389 - DNA, 201 bp, Homo sapiens
aaagagagagttttaggaccagattgtcaaacagaggtaagacctcagatcttctgtcacacttgagtgagtgatgatggagtttgaaggttatagttctrtaaccaaaactatattcacggatagggattaaatggtggaattccttagaagcaccagattcagttttgtttccatgggaataaaagttcttcaatgttt

SEQ ID NO: 29390 - DNA, 201 bp, Homo sapiens; identical to SEQ ID NO: 5679

SEQ ID NO: 29391 - DNA, 201 bp, Homo sapiens
taatttgagttgttttgaaaataagaatattttccataaagagagcgttgaacttacccattagcatgccatggtgatttctggcttgacattggtaacarcaattaaaagtaaaaagaatgtcacagcacatacacaaatcaggtgcatatagaatttaaggtcaggatattcaagcaatcacaaccagtgatattacac

SEQ ID NO: 29392 - DNA, 201 bp, Homo sapiens
tgaatgggttaatttgagttgttttgaaaataagaatattttccataaagagagcgttgaacttacccattagcatgccatggtgatttctggcttgacaytggtaacaacaattaaaagtaaaaagaatgtcacagcacatacacaaatcaggtgcatatagaatttaaggtcaggatattcaagcaatcacaaccagtg

SEQ ID NO: 29393 - DNA, 201 bp, Homo sapiens
aaatgttttgtatagtaataaatatttaaacattagtcttgagagaaactttaccaaaggcctaagaattagagatatgtttgataaataaatattattcrtgagctgaaagccctgagtgggaaaataggactaacttcacctagacaacctcctggaaactcctttttttattttggaactgatgagaaaataatttgt

SEQ ID NO: 29394 - DNA, 201 bp, Homo sapiens
caagttccttatagattctgaataggactttgtcagatgcatagttagcaaaatattttctcccattctgcaggttgtctgtttactctgttgataatttmttttcttgtgcagaaactctttagtttaattaagtttcatttatcaatttctgtttttgttgcaattgcttttggcatctttgtcatgaactctttgcca

SEQ ID NO: 29395 - DNA, 201 bp, Homo sapiens
tatggaagccatctgaaatctctatgcaaagtgtagtaattttctgtttatcaaagcaagttaaatggttgtactccaagttcaggggcaaggtagtcagycttctcagtgatggcaggatactgcaagactatatatcaaagggttgggtactcaggaattcttatacaattgctaaatgttttgtatagtaataaatat

SEQ ID NO: 29396 - DNA, 201 bp, Homo sapiens
cctttagtgagtcagagaaatatccttaaatgtggtatatgttgaattcaaaaccccaataagcccccataaaactgtatttcccttttagtgataggaartatatatatatagggcaacatgccatttactgtaaaaaggatgttttgacaaaaggaccagaagcattggacccctataaacttcatctatgttataggt

SEQ ID NO: 29397 - DNA, 201 bp, Homo sapiens
aatgctctagtagaattattcgtaactgttcaaaaaagaagctggccaaatatatattaaggatagatcaatcattacagtaaatccacacaatggaacartatagagaagtgaaaaaaaatcacatgtacttgcaactatgtgactaaatttcagaaacacaatgttgagtccaagaagccacaaacaagaagaacatgt

SEQ ID NO: 29398 - DNA, 201 bp, Homo sapiens
gtaagctatgattgtgccatttcactccagcctgggctgcactctagcctgggcaaccaaacaagactctgtctctaaaaacaaaaaaaaacgaacaaccraaaacaaagcctcccactccattctgtgaaacacagtgtctttttttagttctcaaatattattagtgttagttcaggccccatgtttaaaattctgaga

SEQ ID NO: 29399 - DNA, 201 bp, Homo sapiens
acaaattaatgaagtggtaaatatgtgcataattctaaatgaatgtttactgcataaaataataatgtcttgttggggtaattatataattgataagatayatgcaaatggcaaaaaatagaatggaggtaaagctgacaggagtacatttagttaaattatcttttaaacttttctatgtctatgaggatattttgcaca

SEQ ID NO: 29400 - DNA, 201 bp, Homo sapiens
tgagtctgcagtaagctatgattgtgccatttcactccagcctgggctgcactctagcctgggcaaccaaacaagactctgtctctaaaaacaaaaaaaaacgaacaaccgaaaacaaagcctcccactccattctgtgaaacacagtgtctttttttagttctcaaatattattagtgttagttcaggccccatgtttaa

SEQ ID NO: 29401 - DNA, 201 bp, Homo sapiens
acctgtaatccaaacaatttgggaggctgaggtgggaggagcacttgaggccaggagttccagatcagcctgggcaagacagcaagaccctgtttgttaawgaaaataaactgattgtagtactgcgtgcctgtagttccaactacccaggaagttctggcagggggatcagtttagcccaggaatttgagtctgcagtaa

SEQ ID NO: 29402 - DNA, 201 bp, Homo sapiens
aatgataaatatgtgcataattctaaatgaatgttgactgaataaaataatagcgtcttgctgagttaaatatattattgataagatatatgcaaatagcrataaagagactggaggtaaaggtgacaggaacaaatttagataaattattttttgcacttttctatgtctgtgaggataatttgaacaccacatttaatg

SEQ ID NO: 29403 - DNA, 201 bp, Homo sapiens; identical to SEQ ID NO: 5589

SEQ ID NO: 29404 - DNA, 201 bp, Homo sapiens
ggatgtgtagaccaagcttttattctattttgtgaccaaagtcttgggaaaagaagaaaattgttagcattttcatgtcaagcatacgaaaaacaaaaaaacaaagccaaccaactgaacaaagaacccaactttttttaaaaaacttggtggtaagagtgctttgttctgcttctccatagataatgatttatagaagga

SEQ ID NO: 29405 - DNA, 201 bp, Homo sapiens
tattggaatggcatcttgagatccagcacagctcattgaatttccctgtggggagagtttgtggtgaagactcatcaacagacaagctgctatccccaccyaaaaaaaaaaactactaacatcacatcaatttccaggttcttccaacttgcggaaggatgtgtagaccaagcttttattctattttgtgaccaaagtctt

SEQ ID NO: 29406 - DNA, 201 bp, Homo sapiens
agttttcactggcaccttctaaatatctagtaacacaggatcaaatcagtaactaaccatctttgttttttcctgtcccagacaggtaaaatggaaagcagttatacaaatgctatactaactcctcacaaagactacccaaagataatattatcatctgtgttttttggtgatcatactgaggcagagagcagttgtgaa

SEQ ID NO: 29407 - DNA, 201 bp, Homo sapiens
gacgttgccaatattcccctccattccatcatgagccgttctctgtaattcagaatctgtggactaagctgtaaaactaatgactgtcaatctattctacrtgaaatagtgggccaaagaaaaaggaaaacatgataagcagtaaaaatatatacacaacattttttgcttacactaatgatcaaataacacccataggac

SEQ ID NO: 29408 - DNA, 201 bp, Homo sapiens
gaacatgggaggggacaaataagggaataaaagctggccattccagcccacggggcagcccacggggcaacccactcaggcccccttccaccctgtggaasctttgtccttttgctcttaacaataaaccttgctaccactcagtctttgggtccacaccgtctttaagagctgaaaccttgctactgctcagccctgggg

SEQ ID NO: 29409 - DNA, 201 bp, Homo sapiens
tcatgaaggcctgttttgaagagaaggggaataagactgcatctgttcatatgaggtatgtcgaagcacttggatatgttttcaaaccaccaatcttgatsatttagaaatgtgctcccttttccaatttcatcctgataaaaatgtatgatctctggacgttgccaatattcccctccattccatcatgagccgttctct

SEQ ID NO: 29410 - DNA, 201 bp, Homo sapiens; identical to SEQ ID NO: 21210

SEQ ID NO: 29411 - DNA, 201 bp, Homo sapiens
aagtgattctcccatcttagcctccagagtagctaggacaacaggcgtgcaccactacgccctgctaattttttctatttttttgtagagacatggttttkccatgttgcccaggcaggtcttgaactcctgtgcttaggcaatccacctgcctcagcctcccaaatgatgggattacaggtgtgagccaccacacctggc

SEQ ID NO: 29412 - DNA, 201 bp, Homo sapiens; identical to SEQ ID NO: 21213

SEQ ID NO: 29413 - DNA, 201 bp, Homo sapiens
ataaataaataaatgaataaataaacagattttttgacatgtggactaggagtatgggacccctaaaaacaatatctgtgttgcaggtctctaaatattaycaggtgtatctctttctgctggtattttatttctatttaatgttcaagtattttactatatttaggaaactttccatttcctggttattgcaccaattac

SEQ ID NO: 29414 - DNA, 201 bp, Homo sapiens; identical to SEQ ID NO: 21216
  misc_feature (101)..(101): n is a, c, g, or t

SEQ ID NO: 29415 - DNA, 201 bp, Homo sapiens
gagaatgtatctttggggtaggttttatttcattatgaattcttattttatgttgttgttagataatgatgcacacaattaaatttgagtgacaaacataygtagagtaaattttgtatatatataccaaaaacagtactaaagaatactagatttataccagtatgtgaatagcttagaaaaaaaattcgtttgtataat

SEQ ID NO: 29416 - DNA, 201 bp, Homo sapiens
agatatgcaaaaattaattttcaaagacattgattattctcaaattaattcacatattcaatataattctaaccagaatcttaaagaaatttattttcaarttgacaaaacagtcctaaattacacatgaattaagtattcaaaaataattcagacaattcttgaaaaagaaaattaaggtaggggtatccagtagatagc

SEQ ID NO: 29417 - DNA, 201 bp, Homo sapiens
catgatgttatatattgtgaaattacataactataatactttagtgaaggatttgaactatatagatatgcaaaaattaattttcaaagacattgattatkctcaaattaattcacatattcaatataattctaaccagaatcttaaagaaatttattttcaaattgacaaaacagtcctaaattacacatgaattaagta

SEQ ID NO: 29418 - DNA, 201 bp, Homo sapiens
tagagtttggatgatttaggctagatcaggcagtggcattctgactccattagtttctcattcttcttctgggaacagtgtaatagccagatgatgtcctyatggtaaatggaaaagagcaagaaactccaatgtggaagccatcttaaatctctgtgtaaagtctactaatttcctgttcattgaagcaagttacaggag

SEQ ID NO: 29419 - DNA, 201 bp, Homo sapiens
aagaggggtgccagacagatattgcctgatgatgtgggtaacggagaaagctgcaagcctggtgaaagacagatttctccttggcagcagagtacaggaaragaacaggaaatgctcctaaaggtcgctcagctcaggtcccttccatgaccttctccaatgtcaacaatcagcaaaagagactagcatatcaagaaagta

SEQ ID NO: 29420 - DNA, 201 bp, Homo sapiens
tggccctgtggaaactggatcagttttagctgggcttgatgggttgtatcttaggcacagggtaggtgcttaagccaagcagctcccaatgggttactggrattattttctttggtttcaccagatactgttttccattagacctggagatgagcagtcctgccttggtgatttcaggtcaaccatcatgtcaaaaaggaa

SEQ ID NO: 29421 - DNA, 201 bp, Homo sapiens
agtgagactctgcctcaaaaaaaaaaaaaaaaaaaaaaaagaatgagcctggaagtagtccctctttctctattttttcagaagagtttgagtaggattgrcatcagttctttaaatgtttggtagaattcagatctaaagccgtctgctcccaggcttttttttttttttttttttaaactgggagacattttattgcag

SEQ ID NO: 29422 - DNA, 201 bp, Homo sapiens
ggagaatgcgtagaccataattttaatctcttctgtgacctaagtattacaaaaagaagaaaatcactacaattttcatgtcaggtgtgctaaaaatttayaaaaactattttttaagaacttggtgttataaatactttgtttagtttctccattaaaaatgatttatagcaagagaataaaagttcatttctaccccta

SEQ ID NO: 29423 - DNA, 201 bp, Homo sapiens
caaatcaatttccagtttcttccaagttgcaggagaatgcgtagaccataattttaatctcttctgtgacctaagtattacaaaaagaagaaaatcactamaattttcatgtcaggtgtgctaaaaatttataaaaactattttttaagaacttggtgttataaatactttgtttagtttctccattaaaaatgatttata

SEQ ID NO: 29424 - DNA, 201 bp, Homo sapiens
agtcttgatttctgctaataaaaacagagtaaaatttaaatcatggaatagaaaggtggagctgtggttgagatattatattttattaattgtaatgacaktttgagatccagtgctgctcactgaatttccctgtgaggagagtttgtggtgatgacccagcaacagacaagctactatccaaaaaaagctactcacatc

SEQ ID NO: 29425 - DNA, 201 bp, Homo sapiens
ctctttgatcttttaaagattgttataaatgaagaagtcttgatttctgctaataaaaacagagtaaaatttaaatcatggaatagaaaggtggagctgtrgttgagatattatattttattaattgtaatgacattttgagatccagtgctgctcactgaatttccctgtgaggagagtttgtggtgatgacccagcaac

SEQ ID NO: 29426 - DNA, 201 bp, Homo sapiens
tttttatctgttcaaacatgatgtgttttctgctcatcatttcatcaattctggtagtgtttgcatttgttcttggaaatgttgccaatggcttcatagcyctagtaaatgtcattgactgggttaacacacgaaagatctcctcagctgagcaaattctcactgctctggtggtctccagaattggtttactctgggtca

SEQ ID NO: 29427 - DNA, 201 bp, Homo sapiens
aagataattgccatcaactcctaattattctttctagttctgcacatcattttctcctgatgtactctcaagatagcagccaaagagagcctatgaagatkcaaatttgatcatgccattcttcagctttagatttttcagtggcttctcatctcattagagtaaggccaaaatccttacaaagtcctataatcatttgaa

SEQ ID NO: 29428 - DNA, 201 bp, Homo sapiens
ctcatctaaactgctgccatacctagccaagataattgccatcaactcctaattattctttctagttctgcacatcattttctcctgatgtactctcaagrtagcagccaaagagagcctatgaagatgcaaatttgatcatgccattcttcagctttagatttttcagtggcttctcatctcattagagtaaggccaaaa

SEQ ID NO: 29429 - DNA, 201 bp, Homo sapiens
tttctctaagaagtcatttgacatcttcatttggatgtcgtaacaagaacttgaactaacatgtccaaatcaaaatagtgatcttccctctagtctccagmgttgtttcttctatagcctttccctcttctgttaatgaccacttcagtctttcagatgcttagaccaaaaacacggagttaacattttctctctttcaga

SEQ ID NO: 29430 - DNA, 201 bp, Homo sapiens
ttggtacagttaatgtcttagtatctcagtaatctgtttttatatttttctctatgatcaattaattatgagttaatttttatatatggtatgaaataatrgtctacactcatgtttttatcattctgtttttactcccacttcttaggtaagttcatctagtcataaccttagttactttctgtgtgctgttgatgccaa

SEQ ID NO: 29431 - DNA, 201 bp, Homo sapiens
tcaccactccattaaatctgacatttgcaagatcaccgataagtctgtgttgccaatggttagttttcatgttgcatgctctatgagcagcactgaacctrgtttatttgcatttcaggatgctgccctctcctgattttatccttgttcactggcacaatttcttagtctcctttgctagttcttcctcttgtctgtaaa

SEQ ID NO: 29432 - DNA, 201 bp, Homo sapiens
tgtcaccactccattaaatctgacatttgcaagatcaccgataagtctgtgttgccaatggttagttttcatgttgcatgctctatgagcagcactgaacstggtttatttgcatttcaggatgctgccctctcctgattttatccttgttcactggcacaatttcttagtctcctttgctagttcttcctcttgtctgta

SEQ ID NO: 29433 - DNA, 201 bp, Homo sapiens
tttctaagctgggtttgatggatggctgtggtgattggagatgggccacgtactgcatcttgaagatagagtttggatgatttaggctagatcaggcagtrgcattctgactccattagtttctcattcttcttctgggaacagtgtaatagccagatgatgtccttatggtaaatggaaaagagcaagaaactccaatgt

SEQ ID NO: 29434 - DNA, 201 bp, Homo sapiens
caatgtcaaaggctgacctcaggagtcagcttttgcaactcttgtcccctcttggtttataattatttagcaaagtatgaggcctcttcaactatcggtcyatcaacccatttaaatgaggctgttactgtcaccactccattaaatctgacatttgcaagatcaccgataagtctgtgttgccaatggttagttttcatg

SEQ ID NO: 29435 - DNA, 201 bp, Homo sapiens
taattctaaataaatgttgcctgtagaaaacaatagtgtcttgttggattaattgtataattgataagatatatgcaaatagcaataaggagactggagayaaagtgacaggaataaatttagtcaaactgttttgggcttttctatgtctgtgagtagaatttgaatatcataatccaggaccgtataaatctacaccca

SEQ ID NO: 29436 - DNA, 201 bp, Homo sapiens
ttatatgatttatttttgaaatatttacatacataatttggacaccgtttacataagttctaagagatatcattgtgggaaatttacgttagtaaacagcaaagttcaagtcaagttgaatacatttagatttagaaagttaagtgtagtgcagtttaaaatacattgctgaagaaaacaattatagatgatattaaacta

SEQ ID NO: 29437 - DNA, 201 bp, Homo sapiens
attatatgatttatttttgaaatatttacatacataatttggacaccgtttacataagttctaagagatatcattgtgggaaatttacgttagtaaacagcaaagttcaagtcaagttgaatacatttagatttagaaagttaagtgtagtgcagtttaaaatacattgctgaagaaaacaattatagatgatattaaact

SEQ ID NO: 29438 - DNA, 201 bp, Homo sapiens
tattatatgatttatttttgaaatatttacatacataatttggacaccgtttacataagttctaagagatatcattgtgggaaatttacgttagtaaacagcaaagttcaagtcaagttgaatacatttagatttagaaagttaagtgtagtgcagtttaaaatacattgctgaagaaaacaattatagatgatattaaac

SEQ ID NO: 29439 - DNA, 201 bp, Homo sapiens
ataattttggccttttatttctcttatcttaattgtagcagaaggtatcatgcttttctgaaccttgtgcattctgcccaaaaatggaagttctcagccaygtgtggttgttcacacctgtatccaagcactttgggaggccaagatgaggggaccacttgagaacaggagttgaagaccagactgggcaacatagggaga

SEQ ID NO: 29440 - DNA, 201 bp, Homo sapiens
aaaataaaagttaattcatggaatacaatggtgtatttgtaattgaggtactatattttatttattggaatggcattttgagatccagtgctgttcattgmatttccctgtaaggagagtttgtggtttggactcatcaagctgctatgccaaaaacaaaacaaaacaaaacaaaacaaaaagctaatcacatgaaatcaa

SEQ ID NO: 29441 - DNA, 201 bp, Homo sapiens
gaagtctacctccacactcttaatgttattcttattttgaaacatcagattttgcacatctgtattttgctagacacctttttttcttatttccaatttaratatttatgatcacaacatttcaaagtggcagaaattagtgaatttccaatatatagtaatatagatattaaatatacaggacaattttctaaatttatc

SEQ ID NO: 29442 - DNA, 201 bp, Homo sapiens
tattaaataaaattattcactttctaattatccacaacattgacaagctttttctttgtgcctttttattagataatttttcagggtgttgcagatacacrtaaggttagcagctactttgaggtacaccattttaatcatggtcagaaggctaatcaaaaaagtattttacaagaattgttttttaaaaaatatattaaa

SEQ ID NO: 29443 - DNA, 201 bp, Homo sapiens
acaaggtggaacgtcaaaattagatggcacttattctaatgctttttgaaaagcatattaaagattttggtatatttgcacagggtcagggtcagcagtgwgtgccagctgctcggggctagctgaccccatgacaagaatgttagggaacttcccagtagctgctaaacacacttttgtttttagggaatgtctctttct

SEQ ID NO: 29444 - DNA, 201 bp, Homo sapiens
aatatagctttgctgtagctatatcaggtgtgtgaagtagagacaaggtggaacgtcaaaattagatggcacttattctaatgctttttgaaaagcatatwaaagattttggtatatttgcacagggtcagggtcagcagtgtgtgccagctgctcggggctagctgaccccatgacaagaatgttagggaacttcccagt

SEQ ID NO: 29445 - DNA, 201 bp, Homo sapiens
tgatgagtatcacatggtgagacactcatgaaattgtacactttatatctgtacaacttattgcatgtcaagtatacctcaagtggcatattagaaacaaytcaggaggaaaactgcacataagtatgcattcttagaaagcttctctttgcaactttggaagaatcaaatattattatttcctattcttattttttgatc

SEQ ID NO: 29446 - DNA, 201 bp, Homo sapiens
ttggtgctgatgaagcaatatgccctactgggcaggggagaggcacagaataagaattcttgccatgtggatgaactcattcaaacacaatgactgctttrtgagacaatagatagatttctacctcttctcacatgtacagagaaaatatttccaaagtctccggaatatttacatgtattactatttaatataaacttg

SEQ ID NO: 29447 - DNA, 201 bp, Homo sapiens
tacccactgccggtgcctcttcatactatcacagctgatgctctctagaaagaactacctcctggtaggaggccaaccacacaaaaatagagcattaaacycccaaagctaagaaccctcacagagtccatttcacccccctgccacctccaccagaacaggtgctggtatccacagttgagagaccaacagatggtttac

SEQ ID NO: 29448 - DNA, 201 bp, Homo sapiens
taaaaatcttaagatttctttgtccaaaaaatctaagtagaatagtctctgatattgtttttttctaggctttcaaacaaaataggaacacattgagtatycatatttttttttagcattttctttcttatcagacccgtaaaattctaattaggttttttttaaaaaaaatagtatctgcttatggaaatttaattatga

SEQ ID NO: 29449 - DNA, 201 bp, Homo sapiens
gcactgaaaagcccaagtaagaaaattattttttcattttagaaattataggacaataatatttcccaactatgaggtgtgtgtatgtgtgtgtgtgaacrtgtttgtgttaatgagcttgttaacaataagttatacaaaattattagttggcagcaacgagatttttaggaatattggccttcctgggcttcccaagaa

SEQ ID NO: 29450 - DNA, 201 bp, Homo sapiens
ttctttccctttccattccccctccctccttaggaggtatgactttagagaattctgggtaggtcttttgcccagcttctatagccttatgcacttacagrttgcaggttttatattagactgtgcggttcaacctacaagccagtagatggcacttataggtaagagccagttgtggacaatgtgatggttatatatttg

SEQ ID NO: 29451 - DNA, 201 bp, Homo sapiens; identical to SEQ ID NO: 21202

SEQ ID NO: 29452 - DNA, 201 bp, Homo sapiens; identical to SEQ ID NO: 21204

SEQ ID NO: 29453 - DNA, 201 bp, Homo sapiens; identical to SEQ ID NO: 21205

SEQ ID NO: 29454 - DNA, 201 bp, Homo sapiens
agtttaaaaatgtcataatttttaccttctccaaactacttcagtgaacctaaatgttttattctcatttattttaagaagttaaaaaattattctcaaartgagtaaaaacagtagaggacagcaaataatgagaaggtaggcaattagatacaggcacaaaactgctaaaaaaaagtgtaaaagtaaattagtctcata

SEQ ID NO: 29455 - DNA, 201 bp, Homo sapiens
atatcagttccctcacgacaatcagagtgatcatttaaaagtagaaattagatcatatcacccttgtgcttcaaaccccttgtttttccttctggacttayaataaggtccaaatttcatgactcagctctttcacacccacatgactaaatcttttttgaagacccggaagctctctgaatggaatataaagtaggatct

SEQ ID NO: 29456 - DNA, 201 bp, Homo sapiens
ccctccaggcactacccattagcttatctaatttcttccaccttcaaaatacatctcaaatgtgtccacttgcatgatctttactagaagcttgttgttcrgcccacaatgctctctcctggaggtctttaacagcctcgacctggtcctggtaacattcttcccccagtacatcccatatcagttccctcacgacaatca

SEQ ID NO: 29457 - DNA, 201 bp, Homo sapiens
catggatatttgtatatttagctaaatttttcatgtaatagagatgctttctgcttatccgtgagttgtgtgaggacagcacactgctgggtacacatagrtgacagaaggctgccccgcagcctcctcatgctacaggaaatttccaaactctgtgaatctcactacactcaggcaagcgttggtgctgtacaatacagg

SEQ ID NO: 29458 - DNA, 201 bp, Homo sapiens
attttcaatgtcaaaggctgacctcaggagtcagcttttgcaactcttgtcccctcttggtttataattatttagcaaagtatgaggcctcttcaactatyggtccatcaacccatttaaatgaggctgttactgtcaccactccattaaatctgacatttgcaagatcaccgataagtctgtgttgccaatggttagttt

SEQ ID NO: 29459 - DNA, 201 bp, Homo sapiens
tttaaaaataaatccgtagtgattttgatcctagatttcaccaggctcttttaacaatatattttttgtgtcatctatgtactgggtattaaaatttcccyaacaactgaagggctgaacacaaattatggaaaggtgaaacaaggaaaaaattgcaaagcaatgaaagaggatatgtctttatttgaatgctagcaaatg

SEQ ID NO: 29460 - DNA, 201 bp, Homo sapiens
aaggagtattggctttcctgtggtttccaagaaaatcttgggtgattttgataaaaagtttagattttgtgtatttaaatctggctttaaaaataaatccrtagtgattttgatcctagatttcaccaggctcttttaacaatatattttttgtgtcatctatgtactgggtattaaaatttccctaacaactgaagggct

SEQ ID NO: 29461 - DNA, 201 bp, Homo sapiens
atatagaagtattggttaacagcaaccaaattataaggagtattggctttcctgtggtttccaagaaaatcttgggtgattttgataaaaagtttagattytgtgtatttaaatctggctttaaaaataaatccgtagtgattttgatcctagatttcaccaggctcttttaacaatatattttttgtgtcatctatgtac

SEQ ID NO: 29462 - DNA, 201 bp, Homo sapiens
gtttatgagcttgttaatagtgatgccatatagaagtattggttaacagcaaccaaattataaggagtattggctttcctgtggtttccaagaaaatcttrggtgattttgataaaaagtttagattttgtgtatttaaatctggctttaaaaataaatccgtagtgattttgatcctagatttcaccaggctcttttaac

SEQ ID NO: 29463 - DNA, 201 bp, Homo sapiens
attaattttaaaaaggaagagataaacaggaagtctacctccacactcttaatgttattcttattttgaaacatcagattttgcacatctgtattttgctrgacacctttttttcttatttccaatttagatatttatgatcacaacatttcaaagtggcagaaattagtgaatttccaatatatagtaatatagatatta

SEQ ID NO: 29464 - DNA, 201 bp, Homo sapiens
agctggggtttggtggatggctctggtgatttgagatggtccaagttttgcctcttggatctagttagagtttggccgatttaaggctggatcaggcaggrgccatatgattccatgagttactcattcttattctgggaacagtgtgttagtgtggacatgttctcattataaaccggaaaggaacaagaaagcctaatg

SEQ ID NO: 29465 - DNA, 201 bp, Homo sapiens
aagttttcttctagttttagatattcacctcatattacaaaaactttgatatttccaacctatttttcctttggctcctgaatttctgacacaacaagggygcacatatttctcaaactcttggattagcagagtacctatatcacttagctttttctgcaaaagaaacttctccaaaaccacattagatatttatatctc

SEQ ID NO: 29466 - DNA, 201 bp, Homo sapiens
tagttttggcagaggctaggtaggttaactgaacagggatttaaaaaggactttattaacacgttggagcaatatcctctattgtggtatttgtggactcygaaaccccaagaggctcaataaacactgtgcttcctttttagtgataagaagtatatatagggcaacatgccatttaccttaaaaaggatgtttctgctg

SEQ ID NO: 29467 - DNA, 201 bp, Homo sapiens
ttgttagcattttcatgtcaagcatacgaaaaacaaaaaaacaaagccaaccaactgaacaaagaacccaactttttttaaaaaacttggtggtaagagtrctttgttctgcttctccatagataatgatttatagaaggagaacaaaatataatttctgctactaaaacaataatagcaaaaaataaataatcaatattg

SEQ ID NO: 29468 - DNA, 201 bp, Homo sapiens
acataaattgtgaagatttcatggacacttatcacttccccaatcaatacctttgtgatttcctatgcctgtctttacgttaatctcttaatcccatcatyttcataagctgaggaggatgtatgttgcctcaggaccctgtgatgattgcattaactgcacaaattgtagagcctgtgtgtttgaacaatatgaaatctg

SEQ ID NO: 29469 - DNA, 201 bp, Homo sapiens
ggatctaaaagccagcacaaagaatagttggtcaaaagaatatattaatgaacacataagtgattggataaatggataatttgttgtggtaaaccaatgamaatgaaactcatcacaaaatctgcagttgcttgaattttctagtttcaggttgaggttataggcttatcaaagaagaagcatttctcagagcaaaagttt

SEQ ID NO: 29470 - DNA, 201 bp, Homo sapiens
ccataaaggcagcattgaactcatccattagtatgccctagcgctttcctatttgacattggtcccagaattgaatttagaagaaccaagaattttactgmacattcagaaatcaggatcgcagagagtttaagatcaagaccttaaaggggatcatgaccagtgatactgggcttgcccttttttaatgtgtgtttgttc

SEQ ID NO: 29471 - DNA, 201 bp, Homo sapiens
gagtaatatacactgacacatatattttgcttgtcagtccagctgagcatcctggccacttacagactctaaggaagagtgctgtcagctgccgccccaamttgctggccttcttggcatttatttagaacacattaaatgacaaacgctttgagtcaacaccattagagggtaatcaacctggtcaccttcccccaggag

SEQ ID NO: 29472 - DNA, 201 bp, Homo sapiens
ctttctcttgactcacaggatctaaaagccagcacaaagaatagttggtcaaaagaatatattaatgaacacataagtgattggataaatggataatttgwtgtggtaaaccaatgacaatgaaactcatcacaaaatctgcagttgcttgaattttctagtttcaggttgaggttataggcttatcaaagaagaagcatt

SEQ ID NO: 29473 - DNA, 201 bp, Homo sapiens
cccacgatgcatgcctctagcagctttgaattctgctggatcatctgacgcaatgggcagagcaggtttggccacagcctatatctgctgtagagatatcwtatgttctggattccacttgaaaccactagtctttgcattcattctgcaacccatctagttttggcagaggctaggtaggttaactgaacagggatttaa

SEQ ID NO: 29474 - DNA, 201 bp, Homo sapiens
gaagtgtaaattcttctatggaaaacatgtttttttagtgcccaaggaatagttatacaattgttgaggtttttctttttctttttcttttttttttttttttttttgagactgagtctcgctctgtcgcccaggctagagtgcagtggcgccatctcggctcactgcaagctccgcctcctgggttcacaccattctctg

SEQ ID NO: 29475 - DNA, 201 bp, Homo sapiens
ctcactgcatggtcccttacagcttcccttggctaggagagggagttccccgaccccttgcacttcccgggtgaggcaacaccacaccctcctttggctcrtcctccgtgggcttcacccgctgtctaaccagtcccaatgagatgagccatgtaactcagttggaaatgcagaaatcacccaccttttgtgttgatcttg

SEQ ID NO: 29476 - DNA, 201 bp, Homo sapiens
tgcctcagcaatagctctgacatgtgtttatctccttcatggatactcatccactgtccagcaaggccaccatcatccctgtctactgggatcagtatagkatcttcacagctgcacttccctgaatctgtcttgcattctccatatccttcccagcagtcccatgtctctataaatgcaaatctcactctctcactcccc

SEQ ID NO: 29477 - DNA, 201 bp, Homo sapiens
cactctggtgattctctaactctatgtagacagaggcaagtgtttacccaattctctgcctcagcaatagctctgacatgtgtttatctccttcatggatrctcatccactgtccagcaaggccaccatcatccctgtctactgggatcagtataggatcttcacagctgcacttccctgaatctgtcttgcattctccat

SEQ ID NO: 29478 - DNA, 201 bp, Homo sapiens
  misc_feature (101)..(101): n is a, c, g, or t
aaaatactacatgcaggagagaaaaaaatgacaatatttcactctggtgattctctaactctatgtagacagaggcaagtgtttacccaattctctgcctnagcaatagctctgacatgtgtttatctccttcatggatactcatccactgtccagcaaggccaccatcatccctgtctactgggatcagtataggatctt

SEQ ID NO: 29479 - DNA, 201 bp, Homo sapiens
tatcaaagacaacgttggcatcttttgagatggtcatatttttttttcctctgctgacttcattatccaaaacaaataatgaacattccttaacattcctrgaatcaagtctgcttggtcatttaactcatatatcactttaatttgttttaaattatttaaagtgagatttatagttattactgttagagtagtcatatc

SEQ ID NO: 29480 - DNA, 201 bp, Homo sapiens
aggaactcaatggaaacatgtcttcagtgcatttccaaagagtagtagaacttcataaacagaaattgaaaatatttttcagagaaaataaaaatgactgmaaatgcaaagttgaacatgcaaggagcaataaaaattattgacaatgaaaaataagtgtaattctaaataaatgttgactgtataaaaattattgtcttg

SEQ ID NO: 29481 - DNA, 201 bp, Homo sapiens
tgtaaacacctctgtgcagacaaactagaaaacctagaagagatagataaattcctggacacatacaccctccctgctgctggaagtcagagaccccaaayggagggaccagctgaagccatggcagaagaacataaattgtgaagatttcatggacatttattagttccccaaattaatacttttataatttcttatgcc

SEQ ID NO: 29482 - DNA, 201 bp, Homo sapiens
gccaagaatttcatatccaaccaaattaagctttttaagtgaaggagaaggaagatttttttcaggtaagcaaatgttgagggaatttattatcaccagawctgccttacaagagatcttgaaagcggcacttagtatagaaaagaacaccactaccagctaataaaaaaaaccctgaaacacagagaccagtgtcactgt

SEQ ID NO: 29483 - DNA, 201 bp, Homo sapiens
tgaacacaaattatgactacacgaggaaaatattgcaaaacagtgaaagagaatatgtcttcatttgcatgcttgcaaatgagaaatcagcttttacttcmaaattattatgaaaaaagcctatagcaagaagagacgttgtttaaatagtaggtaatttgagccgttttgaaaattacattttttccataaaggcagcat

SEQ ID NO: 29484 - DNA, 201 bp, Homo sapiens
catcttgagatccagcacagctcattgaatttccctgtggggagagtttgtggtgaagactcatcaacagacaagctgctatccccacccaaaaaaaaaarctactaacatcacatcaatttccaggttcttccaacttgcggaaggatgtgtagaccaagcttttattctattttgtgaccaaagtcttgggaaaagaag

SEQ ID NO: 29485 - DNA, 201 bp, Homo sapiens
atttattggaatggcatcttgagatccagcacagctcattgaatttccctgtggggagagtttgtggtgaagactcatcaacagacaagctgctatccccmcccaaaaaaaaaaactactaacatcacatcaatttccaggttcttccaacttgcggaaggatgtgtagaccaagcttttattctattttgtgaccaaagt

SEQ ID NO: 29486 - DNA, 201 bp, Homo sapiens
tcagcttaatttccctaggtgctccattaacctgatggcagaaattaaatcttaagcaactctgggttctcccacaagcacactttgcttcagagttgtgytgaagttttgaggaggatgggaggaggcaaggaggtgtccagtcctttgtgcatctatcccctggcattctcccatcctgccccaagtcatcagcccaca

SEQ ID NO: 29487 - DNA, 201 bp, Homo sapiens
aggtaaagtaaagcctaatcgcagttcagaaactcacatgtacaacaaatttaactttctggatatttttaaaactcagcttaatttccctaggtgctccrttaacctgatggcagaaattaaatcttaagcaactctgggttctcccacaagcacactttgcttcagagttgtgctgaagttttgaggaggatgggagga

SEQ ID NO: 29488 - DNA, 201 bp, Homo sapiens
ttaacttattcttaatgaaatactgtctgaggatctttgtctgtgcctgatgctgagaataatataagaaacaagttcatgagcccatcaccctgaaacgyagcacttagaaaacatgattgaagtcacatttatagaagagcatggccccttttaactgacattatcatcatcaccaatcatcatctatatctatctcat

SEQ ID NO: 29489 - DNA, 201 bp, Homo sapiens
aaagaaaaaaaaatagccagtaaatcattggaaatacattggttttaacttattcttaatgaaatactgtctgaggatctttgtctgtgcctgatgctgaraataatataagaaacaagttcatgagcccatcaccctgaaacgcagcacttagaaaacatgattgaagtcacatttatagaagagcatggccccttttaa

SEQ ID NO: 29490 - DNA, 201 bp, Homo sapiens
cttgagacccatggccctggtggcataaacactggaggaaatctcctggtttgtgggttacgaagaccatggggaaagtgtagtatctgggccagaatacrtcgtccctcactgcatggtcccttacagcttcccttggctaggagagggagttccccgaccccttgcacttcccgggtgaggcaacaccacaccctcctt

SEQ ID NO: 29491 - DNA, 201 bp, Homo sapiens
cactgcgcccgctttttataggtgattatactgaggcaggagtagttggaaaatggagtctcagagcatagctataccaagcagggaatatgatttcctgwcctggcagtctgactccaagatcccctcttagaaacagttatgctataaaaactgaaaagaaacaaaatccaggattggagactgattttaacatctatt

SEQ ID NO: 29492 - DNA, 201 bp, Homo sapiens
gagcaagggtagagggtcctcctgcaagcttggtgccttttctaccatgcgggggtctgtcctgcagaccctgactcaatgacagaggagtaatatacacygacacatatattttgcttgtcagtccagctgagcatcctggccacttacagactctaaggaagagtgctgtcagctgccgccccaaattgctggccttct

SEQ ID NO: 29493 - DNA, 201 bp, Homo sapiens
gcagacacttttataagataaggggggttattgagcaagggtagagggtcctcctgcaagcttggtgccttttctaccatgcgggggtctgtcctgcagaycctgactcaatgacagaggagtaatatacactgacacatatattttgcttgtcagtccagctgagcatcctggccacttacagactctaaggaagagtgc

SEQ ID NO: 29494 - DNA, 201 bp, Homo sapiens
gtatcaccagtggaggctgcaaaacagcagatattgctgcctgttccttcctctggaagcttcatcccagagggttacccgccagatgtcaggcagagctytcctgtatgaggtttctgtccaccattgctgggagatgtctcccagtcaggaggcacagaggtcagggacccacttaaggaggcactctgtcctttagca

SEQ ID NO: 29495 - DNA, 201 bp, Homo sapiens
acaaagagtcctgcctttaagtgtaccacttcacctttggagcagaaagcagacacttttataagataaggggggttattgagcaagggtagagggtcctyctgcaagcttggtgccttttctaccatgcgggggtctgtcctgcagaccctgactcaatgacagaggagtaatatacactgacacatatattttgcttgt

SEQ ID NO: 29496 - DNA, 201 bp, Homo sapiens
aagagaagaggcttccggtttttggaattttcagccttttttgccctggtttttcctcatcatcatggatttttctacctttggtctttgatgttggtgaycttcagatggggtctctgtgtgtacatcctttttgttgatgttgatgctattcctttttgtttgttgattttccttctaacagtcagggtcctctgctgc

SEQ ID NO: 29497 - DNA, 201 bp, Homo sapiens
tctaagctgggtttgctggatggctctggtgatatgagatgggccaagttctgcatcttggaattagttagagtttggacaaagtaggctggatcaggcarggacaaactgactccattattttctcattctccttctgggaacagagtagtagccaggcaatgttctcataataaacagaaaaggaaaagaaactccaat

SEQ ID NO: 29498 - DNA, 201 bp, Homo sapiens
atctatcccattaaataatttactttttgaaatatgtacattcataaattggataatgcctacgtaatttaaataaagaatatcattatgggcaagttacrttagtaaacggtaaagttcaagtcaagctaaatacatttagatttagaaattaagtttagtttagtttaaaatacattgcttaagaaaatagttatttat

SEQ ID NO: 29499 - DNA, 201 bp, Homo sapiens
ctatcatcatcatctctatctacatctatcccattaaataatttactttttgaaatatgtacattcataaattggataatgcctacgtaatttaaataaasaatatcattatgggcaagttacattagtaaacggtaaagttcaagtcaagctaaatacatttagatttagaaattaagtttagtttagtttaaaatacat

SEQ ID NO: 29500 - DNA, 201 bp, Homo sapiens
gtagctatcatcatcatctctatctacatctatcccattaaataatttactttttgaaatatgtacattcataaattggataatgcctacgtaatttaaawaaagaatatcattatgggcaagttacattagtaaacggtaaagttcaagtcaagctaaatacatttagatttagaaattaagtttagtttagtttaaaat

SEQ ID NO: 29501 - DNA, 201 bp, Homo sapiens
aaatgaatggtcacatttattagctagcagtctaccttgtagctatcatcatcatctctatctacatctatcccattaaataatttactttttgaaatatrtacattcataaattggataatgcctacgtaatttaaataaagaatatcattatgggcaagttacattagtaaacggtaaagttcaagtcaagctaaatac

SEQ ID NO: 29502 - DNA, 201 bp, Homo sapiens
gaataatatgagaatcataaagccaggagaaagaataattgtgttatcccattaccctgaattgtagcacttagaaaaatgaatggtcacatttattagcyagcagtctaccttgtagctatcatcatcatctctatctacatctatcccattaaataatttactttttgaaatatgtacattcataaattggataatgcc

SEQ ID NO: 29503 - DNA, 201 bp, Homo sapiens
tttccagatacattttaggagtagttttttatggtctaccaaaaaagcccgccagaatttgatagagattgcattaaatatataagttgactcttcacctmtaaagactctccttgtgctggattttagtttagctggccctccttgtttgcacagctctccgatgaattgaaaatataattttggccttttatttatctt

SEQ ID NO: 29504 - DNA, 201 bp, Homo sapiens
attgtgtttcattattcttgtctatagtattaaaaatgccagtgtcctgatgattagtccagcttttagcaaactttgaaatgagaaactgtaatcccccyactttgttctttttaaattatttctctaggtgctcttgtcacttggcatttccagatacattttaggagtagttttttatggtctaccaaaaaagcccgc

SEQ ID NO: 29505 - DNA, 201 bp, Homo sapiens
aaggatggtgccagcctaagcactttgttgggcagtggcattgtggctcatccttgttcacacatgccagcagcatcagtagtgtggcagagtacacactygtagactggggtggggtgcaggtggatccaaggctgctagcctctatatggacattggcagtagcctaaattcatctttatgcatgagaatattcatttt

SEQ ID NO: 29506 - DNA, 201 bp, Homo sapiens
aagaaaatcaaggaaatgatcattctaaattatggctattgctctcctcagggtatgtgaagaaaggtgtaggggcttggagagtggcatggaggtggacmtaggctatttgcaatgtgacatgttttgccctgcttgatggttgcatgagtgtttatgacacattgctatgtttaccatcttagttttcacccatttcta

SEQ ID NO: 29507 - DNA, 201 bp, Homo sapiens
aattcttataattgcttataaaagaaattataaattcttataactccttaccaaagaaattataacattttataaaagaaattataacttctcataaaagraattttattttaagtttttataattcttataatttgaaataaattcttataatttattacattggtggcaaaactgtaaagcgaaacatataagtgatta

SEQ ID NO: 29508 - DNA, 201 bp, Homo sapiens
atattttatataaatatgaaagtgcaaaaattactctactaattttggagagcatatgaagcagtgggaattttcatacactgctcctaggattataaatyagtgcaattactttgtctgagtgtgacattatttgaataagatgaaggatcacatcctaagacccaggatttgcactcatatcagaatacatatacaagt

SEQ ID NO: 29509 - DNA, 201 bp, Homo sapiens
gcatgaaattatagtcatagaattaagagtgatgtaatttttcaactaaagatgcattctgaattataatagaaaaaggtttgtaaaatgttaagtttaayaatattttatttatttttgagacagtctcacttcgtggtctaggttggagtgcagtggtgtgatctcagctcaccgcaacctccgcctccgggttcactc

SEQ ID NO: 29510 - DNA, 201 bp, Homo sapiens
tacatatggcttaaaggtttaaagtaggcaaaaccgtatcataaagtttagggttgcatacctagttgttaatgtataaagaaaatcaaggccaggcgcgrtggctcacgcctgtaatcccagcactttgggaggccgaggcgggtggatcacctgaggtcaggagttcaagaccaacctggccaacatggcaaaaccctg

SEQ ID NO: 29511 - DNA, 201 bp, Homo sapiens
aaattagcaggcttggtggtgcatgcctgtagttccagttacttggcaagctgaggcaggaaggcaagagtatcacttgtgtccaggagttcaagactacrgcgaggtatgattgtgccactgcactccagcttgggtgagagagcaagagcctgtctcagaaaaaaaaaaaaaaaaaaagaaaaggagaaaagaaatgga

SEQ ID NO: 29512 - DNA, 201 bp, Homo sapiens
agacatgttaaaatttctacttatcattttgtcaactctgtgtgtttgcattcgttcttggaaatttgtctccacaaaaatgttaaaattagcaggcttgstggtgcatgcctgtagttccagttacttggcaagctgaggcaggaaggcaagagtatcacttgtgtccaggagttcaagactacggcgaggtatgattgt

SEQ ID NO: 29513 - DNA, 201 bp, Homo sapiens
caatgaaagttttattatcatctcctttttgttgttattttgagacggagtctcgctctgtctctcaggctagagtgcagtggcgtgatctcgactaactrtaacctctgccttctgggttcaaatgattctcctgctgcagtcaccgagtggctcggattataggtgcgtgccaccaccacctggctaatttttatattt

SEQ ID NO: 29514 - DNA, 201 bp, Homo sapiens
atgattttgataaaaggtttgggttctgtatatttaaatctagcattaaaaaataaatccatatttatacgatcctaggtatgaccaagctcttttaacartttagacatttactgtatgacatatgtattgggttttaaaatttccctatgaaacaactgaaaatgctgaatacaaattatggagaggttaaacaaggaa

SEQ ID NO: 29515 - DNA, 201 bp, Homo sapiens
acaggtaaaattgaaagtagttacagaaatagtatattaactcctaacaaaactaaccaatgaaagttttattatcatctcctttttgttgttattttgakacggagtctcgctctgtctctcaggctagagtgcagtggcgtgatctcgactaactgtaacctctgccttctgggttcaaatgattctcctgctgcagtc

SEQ ID NO: 29516 - DNA, 201 bp, Homo sapiens
ttaaaaagaaacttctccaaaactacattagatatttatatctcacatgtctttagattccattttcctaagctgggtttgggtggatcactctggtaatwtgagatgggccatgttctgcatcttgaagttagagtttggccaatttaggctacatctggagggggtgatctcattctcattctgcttctgggaatggtg

SEQ ID NO: 29517 - DNA, 201 bp, Homo sapiens
ccagcttgggtaacagagggagatgctgtctcagaacaaaaaaaaaggtggaagttctcactggtgtcaaatatcaagaaaaacatgatcaaatcaataaktaacaatctttggttcctgcttatagcaaacaggtaaaattgaaagtagttacagaaatagtatattaactcctaacaaaactaaccaatgaaagtttta

SEQ ID NO: 29518 - DNA, 201 bp, Homo sapiens
ttgtgccactgtactccagcttgggtaacagagggagatgctgtctcagaacaaaaaaaaaggtggaagttctcactggtgtcaaatatcaagaaaaacakgatcaaatcaataagtaacaatctttggttcctgcttatagcaaacaggtaaaattgaaagtagttacagaaatagtatattaactcctaacaaaactaa

SEQ ID NO: 29519 - DNA, 201 bp, Homo sapiens
ctatgattgtgccactgtactccagcttgggtaacagagggagatgctgtctcagaacaaaaaaaaaggtggaagttctcactggtgtcaaatatcaagaraaacatgatcaaatcaataagtaacaatctttggttcctgcttatagcaaacaggtaaaattgaaagtagttacagaaatagtatattaactcctaacaa

SEQ ID NO: 29520 - DNA, 201 bp, Homo sapiens
ctttcccttggtcctgctataataatgttccttactctacagttcacgaagaatgtgagagtcctgccagctgccatacgtatccatttcaattcaggaasaggtaataactacaaactgattagatccaccttgggatggacatgagccgaagctctaggtagcatctgaccttcaaaactcccactgcgggctggatgt

SEQ ID NO: 29521 - DNA, 201 bp, Homo sapiens
aagaaacaactgtctaaatgacaatcttattttcaacagacaaaattgaagctagaattcaatggaatcatgtcttcagtgtgtttcaaaaccaaagcggrctttaacaaatagaaattcaaaagaatattttttagataaaaggaaaattactaaaaatataaagctgaacatgcatgaaggaataataaataatagaag

SEQ ID NO: 29522 - DNA, 201 bp, Homo sapiens
agggctctgttctgttccattgatctatatctctgttttggtaccagtaccatgctgttttggttactgtagccttgtagtatagtttgaagtcaggtagygtgatgcctccagctttgttcttttggcttaggattgacttggcgaaagcaagagcaaacacattcaaaagctagcagaaggcaagaaataactaaaatc

SEQ ID NO: 29523 - DNA, 201 bp, Homo sapiens
tcacttcctgcttatgggtaacagttaatgcaatattattaatatattgagttagcatgatgttttgcaaaatgccaattaaactgaaaacagaagtgacrtagccatgacataaaacagtgaagcagtgcttttgttcttacctcaccaaaacaaatcattttgattttctctcccaatcgatgtagattaaaaagcatt

SEQ ID NO: 29524 - DNA, 201 bp, Homo sapiens; identical to SEQ ID NO: 5657

SEQ ID NO: 29525 - DNA, 201 bp, Homo sapiens
gtatatgaaagaatgctcatagtagcattattcataatagttcataaaagaagctgtccaagtatatatcaactaaggatagataattatagtaaattcayaaaattaaacaatatagagaaatgaaaagaaataaatcacatgtacatgcatctgtctgattaaatttcagattcataatgttaagtccaggaagccatg

SEQ ID NO: 29526 - DNA, 201 bp, Homo sapiens
tctatacctaggcatatatgcaaaggaattgtagcaaatgtatatgaaagaatgctcatagtagcattattcataatagttcataaaagaagctgtccaartatatatcaactaaggatagataattatagtaaattcataaaattaaacaatatagagaaatgaaaagaaataaatcacatgtacatgcatctgtctgat

SEQ ID NO: 29527 - DNA, 201 bp, Homo sapiens
acgttttatatttctgtcagtttgttgtagtgtatgtatgtgagtaatttcaaaacagattcctaggatagtcttttatatatatataatatatataaaaytcatatatatataaaatacgtatgggtgtatatgtgtgcatgtgtgtgaataataacattgaccataaattatgaagcctagtatatttcatatatataa

SEQ ID NO: 29528 - DNA, 201 bp, Homo sapiens
cttgtttttaaatattgcactgataaacatccatataaatgccagtatcaatggatacagaagaaacaagacttgcagttctgattcaagtaactttacaygattttccagtcttattgtattaaccagcactgtgttcattttcataccctttactttgtccctggcaatgtttcttctcctcatcttctccatgtggaa

SEQ ID NO: 29529 - DNA, 201 bp, Homo sapiens
tatatgtatctctgttatgtgcttgtttatctaatattaaataaaattattcactttctaattatccacaacattgacaagctttttctttgtgccttttyattagataatttttcagggtgttgcagatacacataaggttagcagctactttgaggtacaccattttaatcatggtcagaaggctaatcaaaaaagtat

SEQ ID NO: 29530 - DNA, 201 bp, Homo sapiens
aattctatacctaggcatatatgcaaaggaattgtagcaaatgtatatgaaagaatgctcatagtagcattattcataatagttcataaaagaagctgtcyaagtatatatcaactaaggatagataattatagtaaattcataaaattaaacaatatagagaaatgaaaagaaataaatcacatgtacatgcatctgtct

SEQ ID NO: 29531 - DNA, 201 bp, Homo sapiens
taaaagtgaaaatttacatacagagaagtgtaggctcttcaatggaatacacatgttttttaagtgcccaaggaatatttacaaaattgctaaatattttrattaaacaattcatatttaaatattaactagactcaagaaaatgacttactcaaaagcctaagcatgagacacaagtttataaatattgaaaatgggctg

SEQ ID NO: 29532 - DNA, 201 bp, Homo sapiens
tatactataacaactggaaagaaataatatccaatattgaagaccgatttttaacatctattcatcttaaaccattaaataataaaaaatacattagagaraaataaaagtgaaaatttacatacagagaagtgtaggctcttcaatggaatacacatgttttttaagtgcccaaggaatatttacaaaattgctaaatat

SEQ ID NO: 29533 - DNA, 201 bp, Homo sapiens
aacagatggaaatataccaagctagagggtatcacattgatgctacagtcagaacacctaacatacttctggagttctgtaagattagaggagagaaaatsaagcaagagaaatgttgcaaggatttttccaaaagtgataaaatgtattcctccatatatttttagtaatctcaaacttcaagcatgataaattaaacca

SEQ ID NO: 29534 - DNA, 201 bp, Homo sapiens
aaactgaaaaattagctggctgtgttggtgcacgcccatagtcacagctactccagaagctgaggtgggaggatctcttgagcccaggagtacaaagctgwagtgaactaccactgcactccagcctaggcgacagagcaacatcctttctcaaaacaaaaaaggaaaagtggaagttttcactggtatcttttaagtatc

SEQ ID NO: 29535 - DNA, 201 bp, Homo sapiens
agttgacccttcacctgcaaagactctccttgtgctggatttcagttcagctggccctccttgcttgtacaactctgtgatgaattgaatatataattttkgccttttattactcttatcctagttgttgcagaaggatatcttgcctttctgaaccttctgtattctgctcaaaaatggaagttctcagctaggtgcagt

SEQ ID NO: 29536 - DNA, 201 bp, Homo sapiens
tttatatgcattcttatacaactctagagagttgaagtagaaactttcttattttagttacaacttgtagaaatttgacatcatgtcacctgccaaccccrtatttttccgtagctttatttcagtttttttctttcagctttaattatgcacctcacatgacaaaactttgatattcctcatctatttttcccttggctt

SEQ ID NO: 29537 - DNA, 201 bp, Homo sapiens
atgtatgcattataattttaatataaaaattttgaattaggagaaatgtctcatagaaattattaatcttctcattacgtactaaggggaaaagaaactayttatatgcattcttatacaactctagagagttgaagtagaaactttcttattttagttacaacttgtagaaatttgacatcatgtcacctgccaaccccg

SEQ ID NO: 29538 - DNA, 201 bp, Homo sapiens
tcattaaatgatttatttttcattgtacatgattttgataatgtctaagacatttttaaaagattatcattttgggaaatttgcattagtaaaagtaaagytcaagtcaagctgaatacatttagatttagaaattaagtgaagtttagtttaaaatgcattgcttaagcaagtaattgtagatgaccttaaactaatcca

SEQ ID NO: 29539 - DNA, 201 bp, Homo sapiens
ctatctcattaaatgatttatttttcattgtacatgattttgataatgtctaagacatttttaaaagattatcattttgggaaatttgcattagtaaaagyaaagttcaagtcaagctgaatacatttagatttagaaattaagtgaagtttagtttaaaatgcattgcttaagcaagtaattgtagatgaccttaaacta

SEQ ID NO: 29540 - DNA, 201 bp, Homo sapiens
ttgatgaaatattacctgagggtgtttgtctaggcctgatactgagaataatataagaattataaggccatgaagaaaagttaaaatagtgttctcccatygccctgaattccagcacttaggaaacatgattgaagtcacatttacagaataaaatagtcccttttagctgacatcaacatcatcatcaatcatctacac

SEQ ID NO: 29541 - DNA, 201 bp, Homo sapiens
tatgttggttttaagttattcttgatgaaatattacctgagggtgtttgtctaggcctgatactgagaataatataagaattataaggccatgaagaaaarttaaaatagtgttctcccatcgccctgaattccagcacttaggaaacatgattgaagtcacatttacagaataaaatagtcccttttagctgacatcaac

SEQ ID NO: 29542 - DNA, 201 bp, Homo sapiens
tttagaatgtggtaaaatgaaacaatatcaagtaaatcattgggaatatgttggttttaagttattcttgatgaaatattacctgagggtgtttgtctagrcctgatactgagaataatataagaattataaggccatgaagaaaagttaaaatagtgttctcccatcgccctgaattccagcacttaggaaacatgattg

SEQ ID NO: 29543 - DNA, 201 bp, Homo sapiens
ggctgaatatggcattacctgattaaggcgaagtattttttattgtaccacactttagaatgtggtaaaatgaaacaatatcaagtaaatcattgggaatrtgttggttttaagttattcttgatgaaatattacctgagggtgtttgtctaggcctgatactgagaataatataagaattataaggccatgaagaaaagt

SEQ ID NO: 29544 - DNA, 201 bp, Homo sapiens
ctcttaggattataaagtacaattactttggctgaatatggcattacctgattaaggcgaagtattttttattgtaccacactttagaatgtggtaaaatraaacaatatcaagtaaatcattgggaatatgttggttttaagttattcttgatgaaatattacctgagggtgtttgtctaggcctgatactgagaataat

SEQ ID NO: 29545 - DNA, 201 bp, Homo sapiens
agaatgtaaaaggaaaaagaacattactgcacattcagaaatcaggtgcacatagaatttaaggtcaggaccttacagagaatcttgtccagtgataatasgcctgccttaaaaaaattcagacatggtaggtttattaccaatctttttttgtgctagtaatggtagaatttattttttcctgtggacacctacgttaaa

SEQ ID NO: 29546 - DNA, 201 bp, Homo sapiens
aaggcaaattgttttgattttccctcataatgggtgtagattaagaaccattcaccaaatcactagccccacaaaaagtaccagaagctctgctctgctcrgtgaagatagcacatcctggaaagcatttgtgagtgttgatttaagtttatggtagtctgcattcattcgataacccatctggttttggtagaggccaga

SEQ ID NO: 29547 - DNA, 201 bp, Homo sapiens
attttggtattttttgtagggctgggatgtcaccgtgttacccaggctggtctcaaactcctgggctcaagtgatctgcctgtgtcggcctcctaaagtgytgggattacagtcatatgccacagggcccggtctgtaatattatcaatacattaaactggcaggatgttttaaaaaatgtaaattaaactgagaacagaa

SEQ ID NO: 29548 - DNA, 201 bp, Homo sapiens
tctcgaagaatgtccccactctcttctggcttgtagggtttctgccaggagatctgctgttagtctgatgggcttctctttttggtgactcagcctttctktctggctgttcttaacattttttccttcatttcaaccttggtgaatctgactattatgtgtttttgggtgctcttctcaaggagtatctttgtggtgttc

SEQ ID NO: 29549 - DNA, 201 bp, Homo sapiens
aagtggttgaaaattgagtaccactggtagaactgaaacagacttccaaatgacacttttagatttagctgtcttctccagataacattaggtagacagaytaaagatctcccaaagttgttacaggcctttggtggaaaggtgaaaagattaaggatctcccaaagttgttacattcagatgcttattcagttaaccacc

SEQ ID NO: 29550 - DNA, 201 bp, Homo sapiens
aagttgaacacgcaaggagcattacaaattaatgacaatccatgctggctaacacggtgaaaccccgtctctactaaaaataaaaaaaaattagcctggcstggtggcgggcacctgcagtcccagctactccggaggctgaggcaggagaatggctaaacccggaaggcggagctttcagtgagcagagatcgtgccact

SEQ ID NO: 29551 - DNA, 201 bp, Homo sapiens
catttagctctataatcaattaaatatgagttattttttgtgtatggtgtgaaataagaatagaaatttatctttatgcatgtggatattcaatgttctcrgtatcatttgttgaaaaaatgattaattcctattgaactgcagtggtaccatttttgaaatcaattaccatcaatgtcagtgttaatttctggactctca

SEQ ID NO: 29552 - DNA, 201 bp, Homo sapiens
tcgtccctcactgcatggtcccttacagcttcccttggctaggagagggagttccccgaccccttgcacttcccgggtgaggcaacaccacaccctccttyggctcgtcctccgtgggcttcacccgctgtctaaccagtcccaatgagatgagccatgtaactcagttggaaatgcagaaatcacccaccttttgtgttg

SEQ ID NO: 29553 - DNA, 201 bp, Homo sapiens
tgatgctgtcatcagttcattgattctgacatttgcaagatcaccagagagtctatgttcccaaggttagtcatcatgttgcatgctctattagctgcatygaacttagtttatttagatttcaggatgctgccctctcctgattttatccttatccactgggcactacttctcaatctcctttgctagttctcttttgtc

SEQ ID NO: 29554 - DNA, 201 bp, Homo sapiens
tacaaattatggagaggttaaacaaggaaaaaaattgcaaaacaatgaaaaataatatgcctttctttgcatactaacacatgagaattcattttccactkcaacctcagtataaaaaagtacagcatatagcaaggagagaatctatatgaagaggagtgaatttgagctgttttgagaataatgaccttttctatttct

SEQ ID NO: 29555 - DNA, 201 bp, Homo sapiens
cagcttcccttggctaggagagggagttccccgaccccttgcacttcccgggtgaggcaacaccacaccctcctttggctcgtcctccgtgggcttcaccygctgtctaaccagtcccaatgagatgagccatgtaactcagttggaaatgcagaaatcacccaccttttgtgttgatcttgctgggatttgcagactgga

SEQ ID NO: 29556 - DNA, 201 bp, Homo sapiens
aatttgagttgtttgaaaataagaatgttttccataaagagatcattgaactcatcagttaacatgccatggttatttctggcttgacactggtcacaacrattaaaagtaaaaagaatgtcacagcacattcacaaatcaggtgcatatagaatttaaggccaggatattcaagcaatcacacccagttatattacattg

SEQ ID NO: 29557 - DNA, 201 bp, Homo sapiens
agacgaatagatagaaaatataaggctagagggtcagagacagtgaagctacaatcagaacaactaacatacttctgcagttcccgaaaattagaagagarcaaatggggcagaagcaatgtggagatttttccaaaagtgataaagtatatcagttcatatatttttagaaactatcagacttcagacacgataactaaa

SEQ ID NO: 29558 - DNA, 201 bp, Homo sapiens
aaaaagcatttgcaagaatttggcttgctaatgatgctattaaaagataaactaaagttgatatactgtattattgcatagactatttgtccatgtttgtrttcaaaaatgccaaaaaaaatcccaaaatagaatcctaattgttggaggtcgtgtttcttatcgaattttaaaatgtagtaaaagaaaaaaaagcaaata

SEQ ID NO: 29559 - DNA, 201 bp, Homo sapiens
cttttgctgctttcagaatcctttctttatccttgagcttagggaaattgattattaaattctttgaggtagtcttcttcaattttacccagcattgtttkttgagaaaaaccattaattcctatcaaattgcagtagtcccttttttgaaatcaattgaccatgaatgttggtgttaatttctggactctcagttgtgtt

SEQ ID NO: 29560 - DNA, 201 bp, Homo sapiens
gggaaaaagcatttgcaagaatttggcttgctaatgatgctattaaaagataaactaaagttgatatactgtattattgcatagactatttgtccatgttwgtattcaaaaatgccaaaaaaaatcccaaaatagaatcctaattgttggaggtcgtgtttcttatcgaattttaaaatgtagtaaaagaaaaaaaagcaa

SEQ ID NO: 29561 - DNA, 201 bp, Homo sapiens
gtacacctgtaagttgggttaaatattttgttactataaattttttggctctacattagagaaaaataccatagaaaggcaaattttttaaggtataaaayatatttagcatgatctttgagtatgtttgtgcatatataattctactttgactgctatagtaaaatgatccagatttagtcaccatagctaagaagggga

SEQ ID NO: 29562 - DNA, 201 bp, Homo sapiens
aaattattaatcagaagaaatgttccatgaaaattattattactctgctcattatataccaaagggaaaaatacactgtatacattcatgtacagctctamaagattttaattagaaaatttttgattttagttgtgactactgaaaatttgacaagatgtttcctgccaaccccagatttttcagtagatatttcttcta

SEQ ID NO: 29563 - DNA, 201 bp, Homo sapiens; identical to SEQ ID NO: 21215
  misc_feature (101)..(101): n is a, c, g, or t

SEQ ID NO: 29564 - DNA, 201 bp, Homo sapiens
atgatattttaatgaacaaataaatgggtggataaaatgggtaagctgatgtggtaaaccaatgaaagggaaactcatcacaaaatctgcagttgcatgarttcccctgttctgttctcaggttaaggttacaggcttatccaagcagaatccttccgcagaggaaaagtttggctattccacaattttaggggaaatatg

SEQ ID NO: 29565 - DNA, 201 bp, Homo sapiens
cttttgtagtgataggaaatatatagagagagcaaaatgccgtttactgtaaaaaagattgtctcagcatgtggactagggacactaaaaaccttaaaacrtcacctatgttgtcggtccctgaatcttctctgatttatctattttcttctggtattttacttctgctcaatgttataatattttactatactgaagaaa

SEQ ID NO: 29566 - DNA, 201 bp, Homo sapiens
caaaacatagtgtctcttttgtagtgataggaaatatatagagagagcaaaatgccgtttactgtaaaaaagattgtctcagcatgtggactagggacacyaaaaaccttaaaacatcacctatgttgtcggtccctgaatcttctctgatttatctattttcttctggtattttacttctgctcaatgttataatatttt

SEQ ID NO: 29567 - DNA, 201 bp, Homo sapiens
gctacttaagtctcagagcctaagtttcctcttctaaatttttgaataatcaaaatggctcccctaaaggatgaagactaagcagatcacatacatgaaamactagtggatatagtcatgtctgcttcacaataatgattttaggaaagaacagcagacatgaaattgtgaggaattaaatgctcccgagttaaaaatctt

SEQ ID NO: 29568 - DNA, 201 bp, Homo sapiens
cagtgtttactggttagtttgtttttacaattgtatactattctattgtttggttgttccgtaatctatttaaccaatccctgtcactggatattaaggckggattcacattctcactattatatgatatgttgcagtgcccatctttgtaaaaatagcccttacataaccaacagcagcaaagcatgaacacataacaat

SEQ ID NO: 29569 - DNA, 201 bp, Homo sapiens
tggcagccacttcacagtgaggtgagagagacagcatggtggtcatcagatgcatgcacttgactcccagaacttttccagaagggctacaaagggaaacsacagctggcattagtccatggaagagagagagaggagggagaatgtatctgctcagctgttgttagtcttctgtttccccttggccagggtttccctgag

SEQ ID NO: 29570 - DNA, 201 bp, Homo sapiens
ttataccatactgtatattcagatttgtgtcttactcactggaaaaatttattgtttagaaaactttctcctgagttcatttagatctcttcagtgtttaytggttagtttgtttttacaattgtatactattctattgtttggttgttccgtaatctatttaaccaatccctgtcactggatattaaggcgggattcaca

SEQ ID NO: 29571 - DNA, 201 bp, Homo sapiens
tttatatggaaggccaattcaagacaaaaatggcagggacatgtggaaattgagacaagaacggatgtgaaacaatgtgtggtgatgtctggtatgactctgctggcagccacttcacagtgaggtgagagagacagcatggtggtcatcagatgcatgcacttgactcccagaacttttccagaagggctacaaagggaa

SEQ ID NO: 29572 - DNA, 201 bp, Homo sapiens
aaatatatataatgcttttattacaagcacttataccatactgtatattcagatttgtgtcttactcactggaaaaatttattgtttagaaaactttctcmtgagttcatttagatctcttcagtgtttactggttagtttgtttttacaattgtatactattctattgtttggttgttccgtaatctatttaaccaatcc

SEQ ID NO: 29573 - DNA, 201 bp, Homo sapiens
agcttagggaaattgattattaaattctttgaggtagtcttcttcaattttacccagcattgtttgttgagaaaaaccattaattcctatcaaattgcagkagtcccttttttgaaatcaattgaccatgaatgttggtgttaatttctggactctcagttgtgtttcattgttctttttgtctaccctaatgcgagtacc

SEQ ID NO: 29574 - DNA, 201 bp, Homo sapiens
ttgaggtagtcttcttcaattttacccagcattgtttgttgagaaaaaccattaattcctatcaaattgcagtagtcccttttttgaaatcaattgaccaygaatgttggtgttaatttctggactctcagttgtgtttcattgttctttttgtctaccctaatgcgagtaccatagaatcctgattcgtgcagctttgaa

SEQ ID NO: 29575 - DNA, 201 bp, Homo sapiens
ttatcttaattgtagcagaaggtatcatgcttttctgaaccttgtgcattctgcccaaaaatggaagttctcagccacgtgtggttgttcacacctgtatscaagcactttgggaggccaagatgaggggaccacttgagaacaggagttgaagaccagactgggcaacatagggagactctgtctcaacaaaaaaattaa

SEQ ID NO: 29576 - DNA, 201 bp, Homo sapiens
aaaatagtatctatgaaatctatgtattaattatgggatttgtcctagtgtaattttgttgtcaatgattaaatggaattgtcttgacatattcattaatrggaagttctattataagaaggaaatgtacagtcttgtttacagctaaattctacatgactgtattaattcttggtgttatgaaattttaacaatgttgtt

SEQ ID NO: 29577 - DNA, 201 bp, Homo sapiens
atcatgatcttgattgctattatcagcttccatatgcagttagaaaagtcatttcttccagcttttcaattaaagaaaaactttttttgaaattgagctcwgatgtaaattattttagtattttttctaaagcacttctaagcccctgaattgctaattatatccttatcttccatttttaaaattctttctaaacttcag

SEQ ID NO: 29578 - DNA, 201 bp, Homo sapiens
ttccatttattttgcttagcaacctctgagcctctgaatttccaatattcttctttgtctcccattcctgatattcctcaaaaaaactcaaatattccctktctttaaaaaaaaaagcccaacataaacagggtgtagaaactatagatgataatcgaatgaaactttcttcaaatgttaaaaattgcctgtgaaatctat

SEQ ID NO: 29579 - DNA, 201 bp, Homo sapiens
gctgtcttaaatatctgtgtaaagtctactaacttcctgttgactgaagcaaattagaggagtgaatttagagtccaagttcaaggtagtcaccctgcctrtggtgggaggatactgcaggattatatgacaaaatgtagggtacttagaaacatttacaaaattgctgaatattttaattaaaatttaaacaaaaaacag

SEQ ID NO: 29580 - DNA, 201 bp, Homo sapiens
atttatatggaaggccaattcaagacaaaaatggcagggacatgtggaaattgagacaagaacggatgtgaaacaatgtgtggtgatgtctggtatgactctgctggcagccacttcacagtgaggtgagagagacagcatggtggtcatcagatgcatgcacttgactcccagaacttttccagaagggctacaaaggga

SEQ ID NO: 29581 - DNA, 201 bp, Homo sapiens
tagtaaccagctactttactaaaatgtttttaacgtaatacctgatattaaagtgatgacatttatatggaaggccaattcaagacaaaaatggcagggayatgtggaaattgagacaagaacggatgtgaaacaatgtgtggtgatgtctggtatgactctgctggcagccacttcacagtgaggtgagagagacagcat

SEQ ID NO: 29582 - DNA, 201 bp, Homo sapiens
tataaaaatggcatttcatttcaaaaaattgagttagtaaccagctactttactaaaatgtttttaacgtaatacctgatattaaagtgatgacatttatmtggaaggccaattcaagacaaaaatggcagggacatgtggaaattgagacaagaacggatgtgaaacaatgtgtggtgatgtctggtatgactctgctgg

SEQ ID NO: 29583 - DNA, 201 bp, Homo sapiens
agaatccttcctcagaggaaaagtttggctattccacaattttaggggaaatatcacaataatatagtcttgatgcagctgtatcaggtgtctgaattggmgacaaggtagaacatcaaaattagatgccactattacaatattttaaaaaagcatataaaagactttggtctatttgcgtatgtatttttttctattgtg

SEQ ID NO: 29584 - DNA, 201 bp, Homo sapiens
tacaaaacaatgaacacaataaaatttgagtgacaagtatatgtagagtaaatttcatgtatgtgtaccataaacagtactgaggaatattagatttaatrcaagtatgtgaatagcttagaaaaaaatctctgctataagagggatgaaaaatcatgatcatgatcttgattgctattatcagcttccatatgcagttag

SEQ ID NO: 29585 - DNA, 201 bp, Homo sapiens; identical to SEQ ID NO: 4926

SEQ ID NO: 29586 - DNA, 201 bp, Homo sapiens
ttggcaggcttcttattactgattcaattttggaactcatcatcggtttatttagggatgcaatttcttcttagttcagtcttggaggttgtatatgcccrggaatttatgcatttcttctaggttttctagcttgtatgcatagaggtgttgatagtagtttgtgaaggttgtttgcatttcagtggggtcagtggtaat

SEQ ID NO: 29587 - DNA, 201 bp, Homo sapiens; identical to SEQ ID NO: 4921

SEQ ID NO: 29588 - DNA, 201 bp, Homo sapiens
aataagagtctgtggtgaagatgcagcaacagagaagctgctacttgcatcaaatttatttttagttcttttcaacttggttaagaatgattagactcacrcttttattctattcttgaccaaagtgtgggtaatcccagcactttgggaggctgcggcaggcagatcacgaggtcaggagatcgagaccatcctggctaa

SEQ ID NO: 29589 - DNA, 201 bp, Homo sapiens
aaaatcacatgtacttgcaactatgtgactaaatttcagaaacacaatgttgagtccaagaagccacaaacaagaagaacatgtaggattgcacctacacrcagtgcaaagcaggccagaccaagcgatggagtttagggttgcatacctagttggtaaagtgtaaagaaaattaaggaaataatcaccataaattttgga

SEQ ID NO: 29590 - DNA, 201 bp, Homo sapiens
ttgggaggctgcggcaggcagatcacgaggtcaggagatcgagaccatcctggctaacatggtgaaaccccatctctactaaaaatacaaaaaaattagcygggcatggtggcaggtgcctatagacccagctactcgggaggctgaggcaggagactggtgtgaacccgggaggcagagcttgcagtgagccaagatcgc

SEQ ID NO: 29591 - DNA, 201 bp, Homo sapiens
gaaacacaatgttgagtccaagaagccacaaacaagaagaacatgtaggattgcacctacacgcagtgcaaagcaggccagaccaagcgatggagtttagsgttgcatacctagttggtaaagtgtaaagaaaattaaggaaataatcaccataaattttggatattgcttatctcaggaggtatgaagaaatgtttaggg

SEQ ID NO: 29592 - DNA, 201 bp, Homo sapiens
tgcaaagcaggccagaccaagcgatggagtttagggttgcatacctagttggtaaagtgtaaagaaaattaaggaaataatcaccataaattttggatatygcttatctcaggaggtatgaagaaatgtttagggacttggaaagtggcatggaggtggacctaggttgtgtttggtgttccttgtcttgcctgcatcatg

SEQ ID NO: 29593 - DNA, 201 bp, Homo sapiens
agtatgtgaatagcttagaaaaaaatctctgctataagagggatgaaaaatcatgatcatgatcttgattgctattatcagcttccatatgcagttagaamagtcatttcttccagcttttcaattaaagaaaaactttttttgaaattgagctctgatgtaaattattttagtattttttctaaagcacttctaagcccc

SEQ ID NO: 29594 - DNA, 201 bp, Homo sapiens
tacaaacgtattagcagcaaccagattctgaggttctccagaaaatcttagatatttttgataaaagcagtttggattctgtgtatttaaatctgtcattwaaaaaagtccatataggtgatgaacttaattatgaccaagctccttttaagaatttagacatttactatatgatctctgtattgggttataaaacttccc

SEQ ID NO: 29595 - DNA, 201 bp, Homo sapiens; identical to SEQ ID NO: 5678

SEQ ID NO: 29596 - DNA, 201 bp, Homo sapiens
gacatttatttagaaatcaagttcaagacaaaaatggcaaggatatgtggaaattgagacaggaacaaatgtgaaacaatgtgtggtgatgtctggtatgrctctgctggcagccacttcacagtgaggtgagagagacagcatgacggtcatcagatgcgtacacttggctcccagcacttttccagaagggctacaagg

SEQ ID NO: 29597 - DNA, 201 bp, Homo sapiens
ctcccagcacttttccagaagggctacaaggggaaaccacagccggcattagtccagggatgagagagaggagggagaatggagaatgtatctgctcagtkgtcttctgtatttgatttcccattggccattgtttccctgaggcagaactaccatctctgctgttctgccttccatcatccagtccctaggtggaggttg

SEQ ID NO: 29598 - DNA, 201 bp, Homo sapiens
atcatgtgccacagggcccgggctgtaatattattaatatattaaattagcatgatgtttttaaaaaaatgtaaattaaacagagaacagaagtgacataktcctgacataaaacagtgaagcagtgctattattcttacaatacaaggcaaattgtcttgattttccctcataaagggtgtagattaacaaatattcacc

SEQ ID NO: 29599 - DNA, 201 bp, Homo sapiens
gtgatgatgtcactgcttaaatgaacactcctaaagaatcaacaggtactattagcataagaaaagataacaaggttcttcatataacatcgatttaccaraaaacagtgtatctattgccaacagtaaattacaatatgtaaatttaaaaaattctttggccaggtgtcatggctcatgtctgtaatcccagcatgttgg

SEQ ID NO: 29600 - DNA, 201 bp, Homo sapiens
ttccaagttgcaggagaatgcgtagaccataattttaatctcttctgtgacctaagtattacaaaaagaagaaaatcactacaattttcatgtcaggtgtrctaaaaatttataaaaactattttttaagaacttggtgttataaatactttgtttagtttctccattaaaaatgatttatagcaagagaataaaagttca

SEQ ID NO: 29601 - DNA, 201 bp, Homo sapiens
gggttttattccattatgaattcctattttatgtttagtaaaaagcaatcagaattattgttacaaaacaatgaacacaataaaatttgagtgacaagtayatgtagagtaaatttcatgtatgtgtaccataaacagtactgaggaatattagatttaatacaagtatgtgaatagcttagaaaaaaatctctgctataa

SEQ ID NO: 29602 - DNA, 201 bp, Homo sapiens
tctcaatagatgcagaaaaggcctttgacaaaattcaacaaccttcacgctaaaaactctcaataaattaggtattgatgggacgtatctcaaaataatargagctatctatgacaaacccacagccaatatcatactgaatgggcaaaaactggaagcattccctttgaaaactggcacaagacagggatgccctctctc

SEQ ID NO: 29603 - DNA, 201 bp, Homo sapiens
tcttcagggttttattccattatgaattcctattttatgtttagtaaaaagcaatcagaattattgttacaaaacaatgaacacaataaaatttgagtgasaagtatatgtagagtaaatttcatgtatgtgtaccataaacagtactgaggaatattagatttaatacaagtatgtgaatagcttagaaaaaaatctctg

SEQ ID NO: 29604 - DNA, 201 bp, Homo sapiens
tatgaataatttccaaatgtatacctagaaaagtcttttacctaaagttagtctagaaaagtatatatatatagatgtgtgtgtgtgtgtgtgttgtgtgtatgaaaaactgaagaacattgacaataacatgctttttattgttttttcacaaaaactgccaaattatagaaaatatgacaaaaattcctcaattatgaa

SEQ ID NO: 29605 - DNA, 201 bp, Homo sapiens
atatgaataatttccaaatgtatacctagaaaagtcttttacctaaagttagtctagaaaagtatatatatatagatgtgtgtgtgtgtgtgtgttgtgtgtatgaaaaactgaagaacattgacaataacatgctttttattgttttttcacaaaaactgccaaattatagaaaatatgacaaaaattcctcaattatga

SEQ ID NO: 29606 - DNA, 201 bp, Homo sapiens
tatgtatatgaataatttccaaatgtatacctagaaaagtcttttacctaaagttagtctagaaaagtatatatatatagatgtgtgtgtgtgtgtgtgttgtgtgtatgaaaaactgaagaacattgacaataacatgctttttattgttttttcacaaaaactgccaaattatagaaaatatgacaaaaattcctcaat

SEQ ID NO: 29607 - DNA, 201 bp, Homo sapiens
ttttatatttcttactgggttttctgtaatatatgtatatgaataatttccaaatgtatacctagaaaagtcttttacctaaagttagtctagaaaagtayatatatatagatgtgtgtgtgtgtgtgtgttgtgtgtatgaaaaactgaagaacattgacaataacatgctttttattgttttttcacaaaaactgccaa

SEQ ID NO: 29608 - DNA, 201 bp, Homo sapiens
tcagtttgtaatttggggaggctggaaaagcaacctgtcttcatgttctgccaagctattatattcagctatccttcaacccacccattcatcctgatttkgggaaacaagaagctaaagcagatttttctttcagttttgcggcatgtgaggtactgggtgaaagacagaagccttcgtctccatagattcacaagaggg

SEQ ID NO: 29609 - DNA, 201 bp, Homo sapiens
atcaagaaattacaaccttgaaattacttagatattaaaatgaccaaagactttacaggagctgttgtacccatccttcatgaggtcaaggtagacactcwaaatgaatggaaaggaaaaacttgtcagcagaaaaataggaattataaattataaattaagaaaacagatattttagaaatgaaaaatataatgtcttaa

SEQ ID NO: 29610 - DNA, 201 bp, Homo sapiens
aacacacacacacacacaccaaagttaggaagactttgtggatagggccctttggacccattcgatgcactgctttttattgtctttatatctgtatgtakggtgtgatattaaatacttaaaatattatctcataagtgccagagagattgacccagggaaaaccaccaaaaatgttagtgggacaaactccctggccat

SEQ ID NO: 29611 - DNA, 201 bp, Homo sapiens
agtttgttaacattaagataaaagccttaacattttttatgcttaaaaacattataatgcttcattatagcagaatacacatttgtcattaaaagagatayagagcagaatttctcagagttcagcagaatattcatagttgttacaaaaaaatgttcttaatttttaaatattttaggcaatgctggcttaagcgacttt

SEQ ID NO: 29612 - DNA, 201 bp, Homo sapiens
aatagaagatagcagggccttctggctactgtgacagcctctaacaagcaggtttagaaagaaaaaggaaaaagaagtgcctgagttcaactgatgaggaytgaacaaacagtgcacacacacacacacaaacacacacacacacacaccaaagttaggaagactttgtggatagggccctttggacccattcgatgcact

SEQ ID NO: 29613 - DNA, 201 bp, Homo sapiens
aaaaaaatgttcttaatttttaaatattttaggcaatgctggcttaagcgactttaacctttttgtttgtttttaaatcataagctttctgtatactctgytagtatgtaaaaggaagtgctctatgtggagtttcccaaatttccttttctgtgaaatccttttctgttttagaaaataccttttaattctaacattttc

SEQ ID NO: 29614 - DNA, 201 bp, Homo sapiens
tctattatgttgctcattaatgaggaggattgggaagtggttgaaaattgagtaccactggtagaactgaaacagacttccaaatgacacttttagatttwgctgtcttctccagataacattaggtagacagattaaagatctcccaaagttgttacaggcctttggtggaaaggtgaaaagattaaggatctcccaaag

SEQ ID NO: 29615 - DNA, 201 bp, Homo sapiens
ccatgcatggtgttatgtatctgtaatcccagacactcaggaggctgaggcagggagaatcacttgaacctgagaggcagaggttgcagtgacccgagatygcgccactgtattccaacctgggcaatggggcgagactccgtttcaaagaaaaccaaaaacaaaaaacaaaacaaaaaaagtataggcacatgtgtaggt

SEQ ID NO: 29616 - DNA, 201 bp, Homo sapiens
tcatccctgatgtcacagttctcctgtcccccttacctctggactcatctcttaatctaaaataaaaacaaattgtatgcaaaagaaagaaacattttttwaaaaagttacttctgatggatttagttctgtccaggaagaaaatagatgatatattcagaatactctacaatctttggcaactgtgtaaccttgatcttg

SEQ ID NO: 29617 - DNA, 201 bp, Homo sapiens
cgccactgtattccaacctgggcaatggggcgagactccgtttcaaagaaaaccaaaaacaaaaaacaaaacaaaaaaagtataggcacatgtgtaggttyggatggaacaataaacactgcagagattcaggggattgtggcagatggatgtgaggcaggactagattgcagctctagacagaccagcatgtggatgctt

SEQ ID NO: 29618 - DNA, 201 bp, Homo sapiens
gatttcacacacaccagctgccttccttatctctgaaatgtccagcttaccatacttaggctctgatttctgcacatacatccccagttcacacttgcttmcaagcaggccttactttgagacaggaatgatttgggctgctttagtccttcaccaattgctgattaatgagctgtgatggcttccagttaaaataatttg

SEQ ID NO: 29619 - DNA, 201 bp, Homo sapiens
ggcaatggggcgagactccgtttcaaagaaaaccaaaaacaaaaaacaaaacaaaaaaagtataggcacatgtgtaggtttggatggaacaataaacactrcagagattcaggggattgtggcagatggatgtgaggcaggactagattgcagctctagacagaccagcatgtggatgcttgtattgtgaattttagctac

SEQ ID NO: 29620 - DNA, 201 bp, Homo sapiens
aaagtcctgccagctgccatacgtatccagttcaattacacgttcaggaagaggtagtaactacaaactgattagatccaccttgggatggacatgagacraagctctaggtagcatctgaccttcaaaacctccccctgcaggctggatgtgatggctcatgcctgtagtcttagtagtttgggaggccaaggtgggaga

SEQ ID NO: 29621 - DNA, 201 bp, Homo sapiens
cgtattaaaaaatcagtaagattttaagtaagcaaaattggaggactgctgctggcatctagtgtagagttaccaggtttagtaaataaaaatatagaagrccaagacgatagtaacaaatacaggatctcatttgatgaaagtcactgtgtaaagaaagaaaaataaataaagttttgaaaagaaaaacaaatcagggat

SEQ ID NO: 29622 - DNA, 201 bp, Homo sapiens
ggggcgagactccgtttcaaagaaaaccaaaaacaaaaaacaaaacaaaaaaagtataggcacatgtgtaggtttggatggaacaataaacactgcagagwttcaggggattgtggcagatggatgtgaggcaggactagattgcagctctagacagaccagcatgtggatgcttgtattgtgaattttagctacaaatcc

SEQ ID NO: 29623 - DNA, 201 bp, Homo sapiens
gtcctgccagctgccatacgtatccagttcaattacacgttcaggaagaggtagtaactacaaactgattagatccaccttgggatggacatgagacgaarctctaggtagcatctgaccttcaaaacctccccctgcaggctggatgtgatggctcatgcctgtagtcttagtagtttgggaggccaaggtgggagaatc

SEQ ID NO: 29624 - DNA, 201 bp, Homo sapiens
gattatgtatttagtagtaaaattctaatatattgaaaatgcatttttcattaggcactgtgatcaatataatagattactctatctttaaattttattawtatgttgcataagcattagaatagaatagaaatacatcaagaattataatatctatgtatgtgtatagagtgtatataaaatcagatttatatgtacaaa

SEQ ID NO: 29625 - DNA, 201 bp, Homo sapiens
cgagactccgtttcaaagaaaaccaaaaacaaaaaacaaaacaaaaaaagtataggcacatgtgtaggtttggatggaacaataaacactgcagagattcrggggattgtggcagatggatgtgaggcaggactagattgcagctctagacagaccagcatgtggatgcttgtattgtgaattttagctacaaatccactg

SEQ ID NO: 29626 - DNA, 201 bp, Homo sapiens
catatggaaactccatgtctacaaaaaattgaaaaattagctggcgtggtgctgcatgcctatagttccaaatacttgggaaactgaggcaggaggattgyttgagcccagggtttcaaggctgtagtgggctatgatcctgccactgtactccagcttgggtaacagagggagactctgtctaagaagaaaaaaaaaaaa

SEQ ID NO: 29627 - DNA, 201 bp, Homo sapiens
ttctatgatatattgagcattattgaaaatacttgctgatttaaattaagcagaacagattgctaccttgtttgcaccatatatggagattatgtatttartagtaaaattctaatatattgaaaatgcatttttcattaggcactgtgatcaatataatagattactctatctttaaattttattaatatgttgcataag

SEQ ID NO: 29628 - DNA, 201 bp, Homo sapiens
gcctggaaatagaatcggtgctgtcggctgggaggggcatggtgggagtgagaccagcccttcagtttgcatggttgctgggtgagacctgtgactgttgsctttcccccactttcctgacaacctgcaagactcagcagaggcagccataatcctcctaggtacccaactccagtgacctgggaatctcatccccatccc

SEQ ID NO: 29629 - DNA, 201 bp, Homo sapiens
aaattcagacatggtatgtttactactcatcattattatccataacagtaatggtagaatttgtattttcccataggcaccttcattacacttatatactkatttgatatttcaacatattattttctttgggtccttttaagtagttgttaaacaatgctgaaagttgccttacagtatgctgttaactaatcatatttt

SEQ ID NO: 29630 - DNA, 201 bp, Homo sapiens
tgtcaagcatttgggagacactgtttataagaattcttgtagtgtaattcataatggggactgtgggaaattgattcattgtattggttaatatcattgaytgaatcaggaactgaaaggtctccctgattgattttattctcaactgcttggccatctccaggatatgtttcctgtagataacaattttagctacctctt

SEQ ID NO: 29631 - DNA, 201 bp, Homo sapiens
ctttcaggtgacatcatcatcattattatcatcatctacatttacatctgtcttattaaatgatttatttctgaaatatttacatacataatttgggtaaygtctatgtaatttccaagagatatcattgtgggaaagttacattagtaaacagcaaagttcatgtcaggctgaatacattgagatttagaaagttaagtg

SEQ ID NO: 29632 - DNA, 201 bp, Homo sapiens
ataatcctcctaggtacccaactccagtgacctgggaatctcatccccatcccccacagcagccacagcaagacccacaggagagtctgagctcagacatrcctagccctgcccccacctgatggtccttccctatccaccctggtagtggaagacaaagggtatataattctgggagatctagggccacacccactgcca

SEQ ID NO: 29633 - DNA, 201 bp, Homo sapiens
ttgcaatgatattttgaaatccagtgctgctctttgagttccctttgagcagagtttgtggtggggacccagcaacagacaagctaatatccaaaaaaagstactcacatcaacttaatttccagtttctttcaaattgaaggtaaattctaacacaaagcttttattctattctctgactaaagtgttgggaaaagaaga

SEQ ID NO: 29634 - DNA, 201 bp, Homo sapiens
tgagaagtgtctgctcatatcctccacccactttttgatggggttgtttgtttaatagattgcaaaaattttctcccattctgtaggttgcctgtcactcygatgatagtttcttttgctgtacagaagctctttagtttaattagattccatttgtacattttgtcttttgttgcaattgcttttggtgtttcagtcatg

SEQ ID NO: 29635 - DNA, 201 bp, Homo sapiens
taactaaaatcaagttaacaaaaaataatacaggacaccaaagaccagtagaaaatctgaaaagtagctagaggtagaagatagagtatgttgataagaaytgcattctaaatacaacctgattttaacagaaaatatggaaggaggaattcaatggaatcatgtcttcagtgtgtttccaaagagtagtagaccttcata

SEQ ID NO: 29636 - DNA, 201 bp, Homo sapiens
atctgaaaagtagctagaggtagaagatagagtatgttgataagaactgcattctaaatacaacctgattttaacagaaaatatggaaggaggaattcaawggaatcatgtcttcagtgtgtttccaaagagtagtagaccttcataaacagaaattgaaaatgatatttttcagatataataaaaattactgaaaataca

SEQ ID NO: 29637 - DNA, 201 bp, Homo sapiens
ggctctctattccatttccttggtctatgtgcctgtttttgtaccattgccatgctgctttggttactgttgccttgcagtgtggttcaaagttaggtaakgtgcctccagcttgttctttttccttgggattgccatggctatttgggctctttcttttttttttttttttattccatatgaactttaaaatagtttttt

SEQ ID NO: 29638 - DNA, 201 bp, Homo sapiens
gcccacgatgcatgcctctagcagctttgaattctgctggatcatctgacgcaatgggcagagcaggtttggccacagcctatatctgctgtagagatatyttatgttctggattccacttgaaaccactagtctttgcattcattctgcaacccatctagttttggcagaggctaggtaggttaactgaacagggattta

SEQ ID NO: 29639 - DNA, 201 bp, Homo sapiens
gtgggtggcattatttctgggctctctattccatttccttggtctatgtgcctgtttttgtaccattgccatgctgctttggttactgttgccttgcagtrtggttcaaagttaggtaatgtgcctccagcttgttctttttccttgggattgccatggctatttgggctctttcttttttttttttttttattccatatg

SEQ ID NO: 29640 - DNA, 201 bp, Homo sapiens
atgcaatttttaaaagactccttgtctaggaatctcatcaaatgaccaggataagatactggatcagataaccactggataagatacttggagttgtcaayatgcctagacagacttttcagttgttcttttgaaggcagctccaagagattccctgggtgactttatctgcataataagacaacctttgttcacagtgaa

SEQ ID NO: 29641 - DNA, 201 bp, Homo sapiens
atggtgaatgagtcagttaatttgaattgttttgaaaataagaatgttttccataaagagagcattgaacttatccattagcatgccatggtgatttctgrcttgacactggtcacagcaattaaaagtaaaaagaatgtcacagcacatacacaaatcaggtgcatatagaatttaaggtcaggatattcaagcaatcac

SEQ ID NO: 29642 - DNA, 201 bp, Homo sapiens
gtctgacaacgctgaataggaaaatagtactaattctacctggatgacctcctggaaactcgttttccatttggtgagtaataagaaaataattccttccrtcccctaatggtgtgagtgcatgtgtgtctatgtgtttaggagcttattaacaataatgtcatataaatgtattggttatcagaaaccagattttcaggt

SEQ ID NO: 29643 - DNA, 201 bp, Homo sapiens
ccagacagtcccttcgggcaagttcatctaactgtgtgctccacgagggatctctccttgagacttgacagttgatttgcagacaaaagtatgccctcatsgaactgtcacctccagggtttagcttagacctcacatccattaggaggggatgtggagacgatgcccaggtggccacttctacaatggctgtcctgctca

SEQ ID NO: 29644 - DNA, 201 bp, Homo sapiens
ggttgcatacctagttggtaaagtatgaagaaaattaaggaaataatcaatataaattatggatattgcttatctcaggagatgtgaagaagggtttaggsggttggaaagtggcatggaggtggacctaggctgttttcagtgttccttgtcttgctccacataatggttacttgaatgtttatgatacactgcggtatt

SEQ ID NO: 29645 - DNA, 201 bp, Homo sapiens
taaactctaaatatatactgcatttttctatatgggggcttagaatttctagcccagggtggtagatgaatcaaagggatacatcatacaaatgaataacytttaagcaaaagatggcattgtaaaactataaaggagaatctacttcaattttgcatgttaacaaatgagggttcaaatttgaatgcagaactttccatg

SEQ ID NO: 29646 - DNA, 201 bp, Homo sapiens
agggtttcaccatgttggccaggctggtctcgaactcctgacctcaggtgatccacctgccttggccttccaaagtgctgggattacaggcgtgagccacygtgcctggccaaaaacttccatactctctaaaagatttggtattatatcagagagcagttttctccattttcttaaactttgcatattttataaataatc

SEQ ID NO: 29647 - DNA, 201 bp, Homo sapiens
gacaggtcaaatatcgctttcttggctcataggtttagtacctggggtaaaaggacgtaaaagctgggctcacgtgggataatgagccagagggcctgcayatggcctctgcatgtgggtttggacattgtgacctcagagtagttggactacttacatgtggcttaggactccaagagtaaatattgcagtgattaagaa

SEQ ID NO: 29648 - DNA, 201 bp, Homo sapiens
acaagatttggttgtttgaaagtgtaaggcacctcccccatctttctcttcctcctgctccaaccatgtgaagatgtatctgatttccccattgccttccrccatctttatacatttcctgaggcctccccagaaacagatgccgccatgcttcctgtacagcctgtgaagccatgagccaattaaacctcttacagaaac

SEQ ID NO: 29649 - DNA, 201 bp, Homo sapiens
agaaaatttatacaagttccccttacactgaggaaaataaagatgctatggatacctttatttgggatagaagagaaaaacagacatggaaattagaaatracaaaatattgataccattcatatgctaaataattctattctgatgctctattgctgcataataaaatcacccagaaacttcatggtgtaaaataacagc

SEQ ID NO: 29650 - DNA, 201 bp, Homo sapiens
gaaactttcttcaaatgttaaaaattgcctgtgaaatctatatattgatgataggaaatatattaatgactattataatgatgtaaatggtgaaatgatasaaagtgtgctgatgtatccattgataccaagttctattataagaaggtaatctacagccttgtggaacagctaaattctgtgtgactatattcattcttg

SEQ ID NO: 29651 - DNA, 201 bp, Homo sapiens
aatatgtgatgaaaataaacattcaggtcatcccttgctttgtgtgaaagttttaaattaagaattcaatttttaaaaatagacactaagattttctattyctttgtgtgcctgattcagtaatttctttcagggaatttgtccattttatctaatttaattcactgaaataattttataaatattattcctcaatttctt

SEQ ID NO: 29652 - DNA, 201 bp, Homo sapiens
agcctctgaatttccaatattcttctttgtctcccattcctgatattcctcaaaaaaactcaaatattccctttctttaaaaaaaaaagcccaacataaasagggtgtagaaactatagatgataatcgaatgaaactttcttcaaatgttaaaaattgcctgtgaaatctatatattgatgataggaaatatattaatga

SEQ ID NO: 29653 - DNA, 201 bp, Homo sapiens
ttgaacatgcaaggagcaataaaaattaatgacgaaaaataagtgtgtaattctaaataaatgttgactgtataaaacaatattgtcttgttggattaaaygtataattgataagatatatgcaaatagcaataaagagactggagataaaggtgacaggaataaatttagtcaaactgtgttttgggcttttctatgtct

SEQ ID NO: 29654 - DNA, 201 bp, Homo sapiens
tttttccccacaattctggccatggaggtccccaccctgctctaaagcaggtgctccaatatctggcccaagactaaaatgcctgcacagctacgctgctkagttaccaaagaatgattgactttgtggcatctgaattaaaaatggtatcctgctctcagtcctgggtctgagaaaaggcctgaaccttttcccagtgtc

SEQ ID NO: 29655 - DNA, 201 bp, Homo sapiens
gagcaataaaaattaatgacgaaaaataagtgtgtaattctaaataaatgttgactgtataaaacaatattgtcttgttggattaaatgtataattgatamgatatatgcaaatagcaataaagagactggagataaaggtgacaggaataaatttagtcaaactgtgttttgggcttttctatgtctgtgaggagaattt

SEQ ID NO: 29656 - DNA, 201 bp, Homo sapiens
gagggcctccctattctaggatctctgcacaagaagggtggagcagatgaagctgctgaaccaggtgaatgagtgatccaaatgcccagatttctgcctaraggtagagtggaggagagtctgctgcaccacaatcacaggggaacagggtggggtacccagcaatgacacacacagactagttccaagtagctaagctgc

SEQ ID NO: 29657 - DNA, 201 bp, Homo sapiens
atcagtgacaaacatgtagagtatatgtatttgcctttgggaaggcaaattttgtatatgtataacaaaactgtactaaagaatactagatttaataccartatgtgaatagcttagaaaaaaatcatttctataataggaatgaagaaacaaaaccatgatcatttcagtgctattataattttttaagtgtagttagaa

SEQ ID NO: 29658 - DNA, 201 bp, Homo sapiens
aaagagactggagataaaggtgacaggaataaatttagtcaaactgtgttttgggcttttctatgtctgtgaggagaatttgaatgtcataatcaaggacsctgtaattctacacccagctatatatatgcaaaggaattgtagcaaatgatatgtgaaagaatgctcattgtagaattattctaacagctcagaaaagaa

SEQ ID NO: 29659 - DNA, 201 bp, Homo sapiens
tgcacagggtaaatggggtgactcaggcttcttaactaggcaggcaggtgctcttaatgcttggatatttgcctgggcataaaacagagaggatcagcccwgtacatggatctgtgaacgggaagggtgaggcagcacaggttgccagtctgtgtgagcaggtgctttgaatgctagggtatgcagcagagaggacctccc

SEQ ID NO: 29660 - DNA, 201 bp, Homo sapiens
ccacttcccctagggccagagactcattaaacatggccttcttctaagttattgcatataatgtttttaaaaagtttgcttatacaccacatgtgccatcrtgttgccagtctccaagatctgttccttcactgtccaaatcctctaaacaaattctcccactttcagttccaatttctgtgttagactgggtagacaaac

SEQ ID NO: 29661 - DNA, 201 bp, Homo sapiens
ttgacattttccatctatttttcccttggatcctgaattcctgacacaacaggggtggacatgtttcccacacgcttggcttagcagaatacctatatcayttaagtttttctgcaagagaaaatcctccaaaactgcattagatatttgtgtctcatgtgtctttggatttcatttttgtcagctaggtttggtggatgg

SEQ ID NO: 29662 - DNA, 201 bp, Homo sapiens
gcctgcttgtggagcagaacccacccccaccaaccaagatttctgcacagggtaaatggggtgactcaggcttcttaactaggcaggcaggtgctcttaawgcttggatatttgcctgggcataaaacagagaggatcagcccagtacatggatctgtgaacgggaagggtgaggcagcacaggttgccagtctgtgtgag

SEQ ID NO: 29663 - DNA, 201 bp, Homo sapiens
tttgtggagagtaggggtaaggggaggtttacttatattttgaaaagatctcatgacttgacctggtggtaatcctgctgagcaaatcctattaagtctartttgttcaggctgctataaaaaataccataaaatgggtgcttatgaacaacagaaatttatttcttatagttctagaagctgggaagtccaagatccagg

SEQ ID NO: 29664 - DNA, 201 bp, Homo sapiens
aggcattcgaaacaatggtctctatgtttaattgaaaagtcttaatgggcctcttaatttttttttcagtctcacttattgctgtttgataccccaaacckgtgagattttatacccctctgaaaccttagatttctgaactctctcttgctcttaattcttatttgcaaaccagtcaattcttttcctttctcatcttct

SEQ ID NO: 29665 - DNA, 201 bp, Homo sapiens
acatgtttcccacacgcttggcttagcagaatacctatatcacttaagtttttctgcaagagaaaatcctccaaaactgcattagatatttgtgtctcatrtgtctttggatttcatttttgtcagctaggtttggtggatggctgtggtgattggagatgggccacattctgcatcttgaagctactttggctgatttag

SEQ ID NO: 29666 - DNA, 201 bp, Homo sapiens
atatatatatcttcacttcaaagtataaagtggatgattaggggcaggctgactggcaacaataaactcctcccatttagaaagaaaacaggaggaatacmatggtagattggccatagcagtgacaaaccttccttgataggctatgtggagtcgcctgccctggatttacagggaagttcctgattagtccctgtgtct

SEQ ID NO: 29667 - DNA, 201 bp, Homo sapiens
tattattttccttttagacttcagtttgagatactttcacagttttcaaaaaccaattaaaaagtgaaaatgatctcttgaacaacagttctttttttaarcatctcgtatttttggctttttgtttttttgagacagggtcttgctctgcagccctggctggagtgcagtggcatgatcacagctgttttcttttttttt

SEQ ID NO: 29668 - DNA, 201 bp, Homo sapiens; identical to SEQ ID NO: 5687

SEQ ID NO: 29669 - DNA, 201 bp, Homo sapiens
gccatttactttctgtgtctaatcacatcaacttggaatcctaggactcagcagagcaaacttgtattcctgctttaccaaactcttggattcatgtatcytttgttccactcattcatcctgactatgggaagtaggaagccaaaacagacctttctttcagctttgtgacaggtgaaatgctgagtgaaaggacagaaa

SEQ ID NO: 29670 - DNA, 201 bp, Homo sapiens
tcattgtttgaacctctcattttctggatggtaaagacattcaattctaaatcaatgatgagactgtatctttgtagtaggttttatttcattatgaattsttactttacttttagtataaagcaaatagaatttttgttagataatgatgtacacaataaaattagtgtacatattaaataaaatcagtgacaaacatgt

SEQ ID NO: 29671 - DNA, 201 bp, Homo sapiens; identical to SEQ ID NO: 5672

SEQ ID NO: 29672 - DNA, 201 bp, Homo sapiens
tattccattatgaattcctattttatgtttagtaaaaagcaatcagaattattgttacaaaacaatgaacacaataaaatttgagtgacaagtatatgtakagtaaatttcatgtatgtgtaccataaacagtactgaggaatattagatttaatacaagtatgtgaatagcttagaaaaaaatctctgctataagaggga

SEQ ID NO: 29673 - DNA, 201 bp, Homo sapiens; identical to SEQ ID NO: 21229

SEQ ID NO: 29674 - DNA, 201 bp, Homo sapiens; identical to SEQ ID NO: 21230

SEQ ID NO: 29675 - DNA, 201 bp, Homo sapiens
tttcctggggatgcattaaagtcttatgttatatcagcttaaagttcagggcttctgagtgatagacagttctgtttaccacttccaaatgtagtccctcrtggtctgggaataaatgaaaacaaaaaacacaagatatatatatcttcacttcaaagtataaagtggatgattaggggcaggctgactggcaacaataaa

SEQ ID NO: 29676 - DNA, 201 bp, Homo sapiens; identical to SEQ ID NO: 21231

SEQ ID NO: 29677 - DNA, 201 bp, Homo sapiens
tctgtaattgttccaactttagtatatgtgctgctgaagtgaacactatacgtaaccattttttaaagtcagcttttgacaataccattcttaaacaatayagaacatactacacacattgttctgcatttttccttttaaaataatttaataattaggtatcacttcatagtactatatagcaatctttctcatttcttt

SEQ ID NO: 29678 - DNA, 201 bp, Homo sapiens; identical to SEQ ID NO: 21232

SEQ ID NO: 29679 - DNA, 201 bp, Homo sapiens
ggaggctgagaagtcccatgatacaaccagtggtgtagtcttgaggccaaaggcctgagaatcaggggctctgatgtccaagggcaggaggagatggatgwctccactcaagaagagagtatatttgcccttcctccagctttttgttctattagggccctcatcagattggttgatgcctacctacattggtgagggcag

SEQ ID NO: 29680 - DNA, 201 bp, Homo sapiens; identical to SEQ ID NO: 21194

SEQ ID NO: 29681 - DNA, 201 bp, Homo sapiens; identical to SEQ ID NO: 21195

SEQ ID NO: 29682 - DNA, 201 bp, Homo sapiens
aagacaaagtggaaaataaaaagatggcatttattacaatactttttactaagcatataaaagatttttgtataagtgcacatatcttttctattgcgaaygatatatttatattgtggtatttctagctggttattatataaacaaaaatgacatttcatttaaaaaatttagttaccaactatcttactaaaatataat

SEQ ID NO: 29683 - DNA, 201 bp, Homo sapiens
ggaatgtcaaggatgtttttgggggtgatggaaatgttctatatcttgattgtggtagttaatctgtataatttgccaaaagtaaactgtataattaaaayggtttttcatataatttataaaaattatatttcagtaaagctgatttacaaaaagaagcattttttttttgagaagcctcagaccacattaggtagaaaa

SEQ ID NO: 29684 - DNA, 201 bp, Homo sapiens; identical to SEQ ID NO: 21196

SEQ ID NO: 29685 - DNA, 201 bp, Homo sapiens
aggattatccaagaagaagaagaatttctcagagcaaaagtttggctattccacaattctaggggaaatatcactataatatagcagtgatgcagctataycagatgtgtgacacaaagacaaagtggaaaataaaaagatggcatttattacaatactttttactaagcatataaaagatttttgtataagtgcacatat

SEQ ID NO: 29686 - DNA, 201 bp, Homo sapiens
catgaaacccagcaattcttaagagaaatgagaacatacccgtaaaattgaatactactcagcaacaaaaaagaataaatcacttttacatgcaacaacaratgactctaaacattctaccaagtgaaagaaaggttcaaacatgataccattttctcttctacaaagagaaaaatatagtgacagaaaacagatcagtga

SEQ ID NO: 29687 - DNA, 201 bp, Homo sapiens; identical to SEQ ID NO: 21197

SEQ ID NO: 29688 - DNA, 201 bp, Homo sapiens
gtgaaccaatgaaaatgtaacacatcacaaaatctacagttgggtgcacatttctgttctggtttcagattgaagttacaggattatccaagaagaagaaraatttctcagagcaaaagtttggctattccacaattctaggggaaatatcactataatatagcagtgatgcagctatatcagatgtgtgacacaaagaca

SEQ ID NO: 29689 - DNA, 201 bp, Homo sapiens; identical to SEQ ID NO: 21198

SEQ ID NO: 29690 - DNA, 201 bp, Homo sapiens
atccatgcagatagttccactttaaaatgaaaaaatctaagcgagatgtaacttgccgtagggcacaaaatttgtaagggccaaagctagattaaaacttyagtttgtctgctgtgttatgtgggatgttaggaatcttacccttttgatttcataatattaatattagggcaagatgattcctacgccaataaaagcaca

SEQ ID NO: 29691 - DNA, 201 bp, Homo sapiens; identical to SEQ ID NO: 21199

SEQ ID NO: 29692 - DNA, 201 bp, Homo sapiens
ccctgtaagtaataaaaatgtctttccccactcaacaacagacagtacctttcaagtttccactttataaggacataacccccattccatttacttccccygccctccttcaacattcccacttgtattttccggctgtatttttaaaacatggtaaataacatttgcactccactttgtaaccataattaagtatgccct

SEQ ID NO: 29693 - DNA, 201 bp, Homo sapiens
ggctcctcaagcatctctttctatttttattttgtttcttgacataggttctccagcatttggctcaaggccccaagggcacatgtgacaagaaggcgccrgctttttaaacattggaagttcttctgtgtcagttctgtgacagaacatttacttaacacatcatgaaggctagtttggatgtggaggggaatagactcc

SEQ ID NO: 29694 - DNA, 201 bp, Homo sapiens
caaatacaccaggtactctatcaattttcattttttaaactattctacctgagctctccatctttagccatttcctgttgacttcatactgttctcccctwccactctccctctttaatatattaccgttttagaaactttatggctaccctgtaagtaataaaaatgtctttccccactcaacaacagacagtacctttc

SEQ ID NO: 29695 - DNA, 201 bp, Homo sapiens
atataaaattcatatatatataaaatacgtatgggtgtatatgtgtgcatgtgtgtgaataataacattgaccataaattatgaagcctagtatatttcayatatataagtatgtgtattttatgatagctaattgtatgatatttcatttgaagaatttatctctctttgtaattaagaaattacagcatttatcagaaa

SEQ ID NO: 29696 - DNA, 201 bp, Homo sapiens
attctgagtttcagaaaagcagaagaggttgatgttgaaaaaggactcagagaaataatgatcaaaaattttccaaacacagcaaagagcataaacctacrgattcaagaagctgagcaaatcccaaccagaatacaaccaatgaaatccattccaggaaaattcattgtccaatttctgaaaattaaagacaaaatattg

SEQ ID NO: 29697 - DNA, 201 bp, Homo sapiens
tcctcaaaaagctcaaattttccttactttaaaaagaagctcaatctaaagagggtatagaaactatggcatctatgaaatctatatattaatgataggaratgtcttaaagatatgttttattataatcttggtgtaaataatgaaatgagagaaagtgtgttgacatattcactaatagcaagttctattacaagaaga

SEQ ID NO: 29698 - DNA, 201 bp, Homo sapiens; identical to SEQ ID NO: 21206

SEQ ID NO: 29699 - DNA, 201 bp, Homo sapiens; identical to SEQ ID NO: 21207

SEQ ID NO: 29700 - DNA, 201 bp, Homo sapiens
tattactatttcattgattaaactacacttctgatattttagactaaaatgttttggcttatcgcagtctaggaaacctgtcttgggtatataaaacagayagttgatgcacgattagggaaaaataaggcaacctatgaaaatggccttatggattaaaagaagtgagctcctatatggtcagtggaatccaggaaaaat

SEQ ID NO: 29701 - DNA, 201 bp, Homo sapiens; identical to SEQ ID NO: 21208

SEQ ID NO: 29702 - DNA, 201 bp, Homo sapiens; identical to SEQ ID NO: 21211

SEQ ID NO: 29703 - DNA, 201 bp, Homo sapiens
aaatacatttttctaaaattaaagtgaaaacaaagagaaaatttatggttaagcttgcatgaaagaaggtgaaaccactgatgctttctgaaaagttcatrtggataatggctgaagaaatcagcagttcacaagtagatatgttatttcaagaagggatgaaatggtgctgaacctcaagtctacagtgacagagtattc

SEQ ID NO: 29704 - DNA, 201 bp, Homo sapiens
ttccctcacagagctgccaattatgttggaggatgtaataaatacaaagtctgtttcttcatcttcggtttaacaaatgactgatgtgaggaaaaaagttrtaggaatatgttcacatagtcacccaaatggagcatcctactctgtcaccatttcaggattaagactagacagtcttttgtgttacaaattgggacatca

SEQ ID NO: 29705 - DNA, 201 bp, Homo sapiens
ttttttgaagttgacatctgatgtcaagtatttccatttattttgcttagcaacctctgagcctctgaatttccaatattcttctttgtctcccattcctratattcctcaaaaaaactcaaatattccctttctttaaaaaaaaaagcccaacataaacagggtgtagaaactatagatgataatcgaatgaaactttct

SEQ ID NO: 29706 - DNA, 201 bp, Homo sapiens; identical to SEQ ID NO: 21212

SEQ ID NO: 29707 - DNA, 201 bp, Homo sapiens
aggagtttcaaaacatcccctataagagcaaaatacatttttctaaaattaaagtgaaaacaaagagaaaatttatggttaagcttgcatgaaagaaggtraaaccactgatgctttctgaaaagttcatgtggataatggctgaagaaatcagcagttcacaagtagatatgttatttcaagaagggatgaaatggtgct

SEQ ID NO: 29708 - DNA, 201 bp, Homo sapiens; identical to SEQ ID NO: 5673

SEQ ID NO: 29709 - DNA, 201 bp, Homo sapiens; identical to SEQ ID NO: 21214

SEQ ID NO: 29710 - DNA, 201 bp, Homo sapiens; identical to SEQ ID NO: 21217

SEQ ID NO: 29711 - DNA, 201 bp, Homo sapiens; identical to SEQ ID NO: 21219

SEQ ID NO: 29712 - DNA, 201 bp, Homo sapiens
attatttgtgttctactaattttgggtttgggttacttttgtttttctagttctttaagatacacaattaggttgtttatttgaatttttcttcttttctsatgtaggcttttatagctgtaaatttccttcttagtattgtttttgctgtatttcatagattttggtatgttttgtttccactatcatttgtttctagca

SEQ ID NO: 29713 - DNA, 201 bp, Homo sapiens; identical to SEQ ID NO: 21220

SEQ ID NO: 29714 - DNA, 201 bp, Homo sapiens
caaattttagccttctgttttgttttgaaataatgcatcctctgcgctttgtcacattctgaaattcgtcaggtgttttaggatgcacactttcttagatsttttcgagggtcttaactgcagttctgtttccggaatggcgtattttctttctaggaattgtaggctcccggccgccccctgaggagctccgctagcagc

SEQ ID NO: 29715 - DNA, 201 bp, Homo sapiens; identical to SEQ ID NO: 21221

SEQ ID NO: 29716 - DNA, 201 bp, Homo sapiens
tttatgtcctcatagtttttgtcttgaaaactattttgtctaatattagtataggtactctacttttttgttttgttttttttttttttttttggtttgcmttgacatggaatatctttttccatccctttattttctctctgtgcatgtctttataggcaaagtgtgtttcttagaggcaacagattggagttttttttt

SEQ ID NO: 29717 - DNA, 201 bp, Homo sapiens
atagattcacaaggggagcatggtgtgtcttttagcagaaaagaaactgatggtgtctagaacgttttatatttctgtcagtttgttgtagtgtatgtatktgagtaatttcaaaacagattcctaggatagtcttttatatatatataatatatataaaattcatatatatataaaatacgtatgggtgtatatgtgtgc

SEQ ID NO: 29718 - DNA, 201 bp, Homo sapiens
ttttggtttgccttgacatggaatatctttttccatccctttattttctctctgtgcatgtctttataggcaaagtgtgtttcttagaggcaacagattgragttttttttttgttttgtttttccatttagccaaactatgtcttttgattggagagtttagtccattttcattcaacgttattactggtagtaaggtct

SEQ ID NO: 29719 - DNA, 201 bp, Homo sapiens
taaataaatattattcatgggctgaaaactcttgagtgggaaaatagggctaatttcatctggacaacttcttggaaactcattttttattttggaaattwtgagaaaataatttgttccattcataagtggtgtgcacatgcgtgtatttgtgttcatatttatgagcttgtgaataatgaagttatacaaaagtattag

SEQ ID NO: 29720 - DNA, 201 bp, Homo sapiens
tgaagaaacatgctgatgatcatttcagtgctgttataatttttttatctgtagttagaaaagtcattgcttccactttttgaattaaaggaaaccttttktgaagttgacatctgatgtcaagtatttccatttgtttttcttagccaccttgagcccctgaatttccaattttctcctttgtctcccattcctaatatt

SEQ ID NO: 29721 - DNA, 201 bp, Homo sapiens
ttgatgaaataccacgtgagggtatttgcctaggcctgatgctgagaataatataagaatcatgaggccatgaagaagaataatattgttctctcattacyttgaagtctagtacttaaaaaacaagactgaaatcacatttatcaaatagcattctcccttttacctgccatcatcattatcattatctatatccacatc

SEQ ID NO: 29722 - DNA, 201 bp, Homo sapiens
atgtatataaatagtttttcatagttcctggtattaaaaactcaatatattttaaaaatgatgctgatggtaatgatatgctatttgtcaagtaatcacayatatttttacccagaatttaaaaaaaaaaacaacttttcccctatcccttaggttacatatgttgctatgttcactgttttccttttatagttaaaataa

SEQ ID NO: 29723 - DNA, 201 bp, Homo sapiens
agataaccttggatgattttgacaaaaggtttagaatctggtatttaaatctggcataaaaataaatccatattgatatgatcctatttatgaccaagctyctttaacaatttagacatttactgtatgatatatgtattgggttttaaaatttccctatgtaacaactgaagatgctggatacaaattatggagaggtta

SEQ ID NO: 29724 - DNA, 201 bp, Homo sapiens
tgtatataaatagtttttcatagttcctggtattaaaaactcaatatattttaaaaatgatgctgatggtaatgatatgctatttgtcaagtaatcacacrtatttttacccagaatttaaaaaaaaaaacaacttttcccctatcccttaggttacatatgttgctatgttcactgttttccttttatagttaaaataag

SEQ ID NO: 29725 - DNA, 201 bp, Homo sapiens
agagaaatgttgcaaggatttttccaaaagtgataaaatgtattcctccatatatttttagtaatctcaaacttcaagcatgataaattaaaccaaattarcataaaataatacaggacaccaaagaccaatagaaaatctgaaaagtagcgagaggtggaagatagagtatgtcgtgtgttgaaaagaactgcattctaa

SEQ ID NO: 29726 - DNA, 201 bp, Homo sapiens
gtagctgtggtagatgaactatattttatctattgccatgatattttgagatccagtgctgctcattgagttcccctgtgggcagagtttgtggtgaggasccagcaacagacaagctaatatccaaaaacatctactcacatcaacttaatttccagtttctttcaaattgaaggtaagttccaagacaaactttttatt

SEQ ID NO: 29727 - DNA, 201 bp, Homo sapiens
gctcactgcagcctgggccttccgggctcaagcaatccttccatctcagccttctaagtagctgggactacagatgtgcaccaccatgcccagctattttwtttattttattttattttattttattttatcttattttatagagaggtggtctttttatgttgttcaggctggtctcaaactcctgggctcaagatatct

SEQ ID NO: 29728 - DNA, 201 bp, Homo sapiens
atgtgatctcattgttcacctcccaattataagcgagaacacgtggtgtttggttttctgttcctgcattagtttgctgaggataatggcttccagcttcrtccatgtccctgcaaaggacatgatcttgttcctttttaaggctgcataatattgaagctggacaatctataaagacctaatgtttctgcaggctgggaa

SEQ ID NO: 29729 - DNA, 201 bp, Homo sapiens
gattgaatcagggaggcagaggtttctgcaagccgagattgtgccattgcactccagcctgggtgacaagggagaaacttcatctgagaaaaaaaaaaaaattgtaaatccatgaggaagaataagagtgttctcccatcacccttaactccagtactttgaaaagaagacccaaatcacagttatttggtaacattctcc

SEQ ID NO: 29730 - DNA, 201 bp, Homo sapiens
acatgtttaaacatgatattaaaggcagagtacatttaaaatgaatgcatttaatagcatgactggaagaatttctgaatgcctcaagaaaataaatataraaaggtaaataatagattaaaaactttaaagtctatttgcaatataaacagtagaaaaaaatttaatacttttactgttttataaaaaagataaaaataa

SEQ ID NO: 29731 - DNA, 201 bp, Homo sapiens
aaatattttatataataataaatatttaaacattagacttgagagaaactttaccaaaggcctaagaattagagatatgtttgataaataaatattattcwtgggctgaaaactcttgagtgggaaaatagggctaatttcatctggacaacttcttggaaactcattttttattttggaaattatgagaaaataatttgt

SEQ ID NO: 29732 - DNA, 201 bp, Homo sapiens
gtgtagtaattttctgtttatcaaagtaagttaaatgattgaactccaagttcaggggaaaggtagtcagtcttcctgtgataggaggatactgcaagatkatataccaaagggtcgggtactcaggaattcttataaaatggctaaatattttatataataataaatatttaaacattagacttgagagaaactttacca

SEQ ID NO: 29733 - DNA, 201 bp, Homo sapiens
tgtcattaaggaaaagactgatgagttcacatttgctgataaaaataatataatctgtccatcctaagttaggtgtccaacaaatagttacatgtctatcytctcacctttcatgtcctccaacacttctctttaaagagtggcatagaataacatcatgaaagaatgaggaaactccagtgcaacaaaaaaattatagag

SEQ ID NO: 29734 - DNA, 201 bp, Homo sapiens
gatattctcatggtaaatggaaagaggaagaatccccagtatggaagccatctcaaatctctatgcaaagtgtagtaattttctgtttatcaaagtaagtkaaatgattgaactccaagttcaggggaaaggtagtcagtcttcctgtgataggaggatactgcaagattatataccaaagggtcgggtactcaggaattc

SEQ ID NO: 29735 - DNA, 201 bp, Homo sapiens
gtttgatggatggctctggtgatttgagatgggccaaattcggcatcttggagatagagtttggccaatttagtctggatcaggtgggggcaatctgactwcattactttctcattctccttctgggaacagtgtacttgcgaggcgatattctcatggtaaatggaaagaggaagaatccccagtatggaagccatctca

SEQ ID NO: 29736 - DNA, 201 bp, Homo sapiens
tgtatataataagtaataggtcagcagatcaaactaaagacaggtctggtgagaccagattgtttattcttatcacataggaacctccgtacgtgatagayttggcattagaaatcaacaaaaaaaaaacgtagactgttcaactaatgatattgagacctctgtcatttaatattgggacaaaattgtatttctaactca

SEQ ID NO: 29737 - DNA, 201 bp, Homo sapiens
atttgatcttttaaagattgttaaaaactaagaagtgttgatttctgctaataaaaacagcttaaaatttatatcatggaatagaatggtggagctgtggyggagatactttgtcttattaattgaaatgacattttgagatccagtgctgctcactgaatttccctgtgaggagagtttgtggtgatgaccccacaacag

SEQ ID NO: 29738 - DNA, 201 bp, Homo sapiens
tttgataaagttttaagtactgttttactatttgatcttttaaagattgttaaaaactaagaagtgttgatttctgctaataaaaacagcttaaaatttawatcatggaatagaatggtggagctgtggcggagatactttgtcttattaattgaaatgacattttgagatccagtgctgctcactgaatttccctgtgag

SEQ ID NO: 29739 - DNA, 201 bp, Homo sapiens
tatgtttcctttattgactgctgactatgtagagcataccaacaaaattgccattcatctatccattcaacaatatttattagctattccgcactgggcartgctctaggcttggggatagaacagtgaacaaacaaaatccttagcctaatggatattacctggaagtgtgccaggaagaataaactcacttgtgaatta

SEQ ID NO: 29740 - DNA, 201 bp, Homo sapiens
gccaccatgcccggctaattttttgtattttttggtagagatggggtttcaccgtgttagccaggatggtctcgatctcctgacctcgtgatctgcccgcstcagcctcccaaagtgctgggattacaggcgtgagccacagcgcccggcctgtacttccaaactcttaataccattagagtaacagcacagtgaatctct

SEQ ID NO: 29741 - DNA, 201 bp, Homo sapiens
gtgagccacagcgcccggcctgtacttccaaactcttaataccattagagtaacagcacagtgaatctctaatagccacaatacttttgttatttaaatgrtgcacatttcattaccttcacttatctcccattttaactagaaagcactgtattttttaatcgcacacaccgtcttcattcatggattattcaaatgtgt

SEQ ID NO: 29742 - DNA, 201 bp, Homo sapiens
gttggctttgcgttattcctgatgaaatactatatgagggtatttgtctaggcctgattctgagaataatataagaatggtgccaagcacagtggctcatkcctgtaatcccagcactctaggaggccaaggcagtggattccctgaggtcaggagttccagaccagcctggccaacatagtgaaaccctgtctctactaa

SEQ ID NO: 29743 - DNA, 201 bp, Homo sapiens
caaagctccaaatcctactccttaatgctctagagctgaagaaagatttccttctttccacctgagagtgggataggagcaataatttaggtggttgtagwttttatctgccccttgatgtttagatttgaatgcctaatccacactgcttttgctgcgggtgatattaggagaattcatgattagagtattcatgattgg

SEQ ID NO: 29744 - DNA, 201 bp, Homo sapiens
ttccttctttccacctgagagtgggataggagcaataatttaggtggttgtagattttatctgccccttgatgtttagatttgaatgcctaatccacactkcttttgctgcgggtgatattaggagaattcatgattagagtattcatgattggaaatggcttgattgtacaaattagaaaattcatgattggaaatggct

SEQ ID NO: 29745 - DNA, 201 bp, Homo sapiens
ccacctgagagtgggataggagcaataatttaggtggttgtagattttatctgccccttgatgtttagatttgaatgcctaatccacactgcttttgctgmgggtgatattaggagaattcatgattagagtattcatgattggaaatggcttgattgtacaaattagaaaattcatgattggaaatggcttgattttaca

SEQ ID NO: 29746 - DNA, 201 bp, Homo sapiens
gctgcgggtgatattaggagaattcatgattagagtattcatgattggaaatggcttgattgtacaaattagaaaattcatgattggaaatggcttgattktacagattaactgcattgactggcttgggcattggaagcttcctttaactgacttttcatcaggttagccagctccagaatttaacagctgtgtttaata

SEQ ID NO: 29747 - DNA, 201 bp, Homo sapiens
atttaattatttatgataacatttcaaagtggcagaaattagtgaatttccaataaattatagtagtatagatattaaatgtataggacaatttttctaartttatctttaaatgaaataattatacacatatttttaccattcaaagattataataccatgcatgtgtacacatgtgtaaggaaaaatattttgatactg

SEQ ID NO: 29748 - DNA, 201 bp, Homo sapiens
caatagctaatttttctcagccatttttcctttggataaagtgtagaattaattatgtgaatattatgattctgatggagtccttggtttattaacattcmattgggaaataaatgattttggagtcgtaatctttcttattttctttttatcatgtactgtttttcagcttttatagcagatttgattcactttatggta

SEQ ID NO: 29749 - DNA, 201 bp, Homo sapiens
ttggagtcgtaatctttcttattttctttttatcatgtactgtttttcagcttttatagcagatttgattcactttatggtaaacagcctgctgggcatgrtgcttttgcagatagtaggagccttctgcctttctgatcactctgattctgattcttgggaagagcaagctgagtcagacctcactgataatgctgtgga

SEQ ID NO: 29750 - DNA, 201 bp, Homo sapiens
agcccaggaggtcaaggctgaagtgagccttaattgagccactccagcctgggctacagagcaagactctgtcaggaaaaaaaaaaaaaagattaaaaaawtttttttaatattttttgagacagagcaagaccgtgtctcaaaaaaattattaaaaaaatcaaaacaatgaaggttgtgacacagaaataaaatgtatat

SEQ ID NO: 29751 - DNA, 201 bp, Homo sapiens
ttcaagacccacttgagcaacacagtgagaccttgtctctaaaagcatcaaaaaagtagctgggtatagtggcaactgtagtcttagctacacagagaatsaaacaggaggattgtttgagcccaggaggtcaaggctgaagtgagccttaattgagccactccagcctgggctacagagcaagactctgtcaggaaaaaa

SEQ ID NO: 29752 - DNA, 201 bp, Homo sapiens
aaatgtttagaactcagcaacgaaaaagcttttcacaatcaaaatgaaaaaaccggctaaagctaagaatccatatccattagtacatgttttataaaaamgttttccagatgaatgaggcacatattcaccttcagttaagaaaaatgaacaacagaaaaatttaaagaagggtgaataagttaagaaggagctaatatg

SEQ ID NO: 29753 - DNA, 201 bp, Homo sapiens
acataaaagataaatgtttagaactcagcaacgaaaaagcttttcacaatcaaaatgaaaaaaccggctaaagctaagaatccatatccattagtacatgytttataaaaaagttttccagatgaatgaggcacatattcaccttcagttaagaaaaatgaacaacagaaaaatttaaagaagggtgaataagttaagaag

SEQ ID NO: 29754 - DNA, 201 bp, Homo sapiens
aaaaagatgaacatttctacataaaagataaatgtttagaactcagcaacgaaaaagcttttcacaatcaaaatgaaaaaaccggctaaagctaagaatcsatatccattagtacatgttttataaaaaagttttccagatgaatgaggcacatattcaccttcagttaagaaaaatgaacaacagaaaaatttaaagaag

SEQ ID NO: 29755 - DNA, 201 bp, Homo sapiens
gatagttctgccagctgccatacgtatccatttcaattacacattcaggaagaggtaataactacaaactggttagatccaccttgggatagacatgagcygaagctctgggcagcatctgaccttcaagaactcccactgcaggctggatgtgatggcgcatgcctgtagtcctagtactttgggaggccaaggtgggag

SEQ ID NO: 29756 - DNA, 201 bp, Homo sapiens
tattctctataactgagaaaaagatgaacatttctacataaaagataaatgtttagaactcagcaacgaaaaagcttttcacaatcaaaatgaaaaaaccrgctaaagctaagaatccatatccattagtacatgttttataaaaaagttttccagatgaatgaggcacatattcaccttcagttaagaaaaatgaacaac

SEQ ID NO: 29757 - DNA, 201 bp, Homo sapiens
ttttttgttactataaattttttggctgtccattagagaaaaaaatcatagaaaggcaaattttttaaggtataaaaaataatttagcctgatctttgagyatgtttgtgcacatataatgctactttgactgctgtagtaaaataatccagatttagtcaccatagctaagaatgagaaaaagcatttgtgatagtttgc

SEQ ID NO: 29758 - DNA, 201 bp, Homo sapiens
gcgtgaacccgggaagcggagcttgcagtgagccgagattgcgccactgcagtccgcagtccggcctgggcgacagagcgagactccgtctcaaaaaaaaraaaaagaaaaaattcatggaaaagatgcaataatcatgaatttggacatacctaacaatgcattacgtaaatagataaagcagaagcctcacaaacagaa

SEQ ID NO: 29759 - DNA, 201 bp, Homo sapiens
gccgggcgcggtggcgggcgcctgtagtcccagctactcgggaggctgaggcaggagaatggcgtgaacccgggaagcggagcttgcagtgagccgagatygcgccactgcagtccgcagtccggcctgggcgacagagcgagactccgtctcaaaaaaaagaaaaagaaaaaattcatggaaaagatgcaataatcatga

SEQ ID NO: 29760 - DNA, 201 bp, Homo sapiens
taatttagtgaactgtagaaagaaaatattacatattgaagcacctcacaatgacttaacaccaattttatttgaggaatttctttagtgttaaaatacartaaacagccacagtaacagtaataccactaacattcttgagcatttattgtgtgcttagaaatttgtgtatgaattcatttaatatagtcctatggctta

SEQ ID NO: 29761 - DNA, 201 bp, Homo sapiens
tgcgaagtatctttgactgtgttggtcaccgttgaatcaaatatctaaataaagtgaatctggaacatcctagtgtccacatcaaaagcactcaataaagytggatgggggagtggtagtggtggtacagcaacagggtagcctagttaggttgcacaagcccatctaaacacgtgtgattatctgattagaaccaggaaa

SEQ ID NO: 29762 - DNA, 201 bp, Homo sapiens
ctgatgatgtgggtaacggagaaagctgcaagcctggtgaaagacagatttctccttggcagcagagtacaggaaaagaacaggaaatgctcctaaaggtygctcagctcaggtcccttccatgaccttctccaatgtcaacaatcagcaaaagagactagcatatcaagaaagtataaataccagctatgctctcaccag

SEQ ID NO: 29763 - DNA, 201 bp, Homo sapiens
aaatccatgtgttgaagcccacactctcaatgtgactgtatttggatataaggcttttaagtaggtagttaaggttaaattaggccatacagtgaggccgyagtacaataggactggtgtctttataaaaagaggaagaaacaggcatctgtgggcacagagaaaacacaatgatgtatgattccatttatataccattct

SEQ ID NO: 29764 - DNA, 201 bp, Homo sapiens
tctgtgcgaagtatctttgactgtgttggtcaccgttgaatcaaatatctaaataaagtgaatctggaacatcctagtgtccacatcaaaagcactcaatraagttggatgggggagtggtagtggtggtacagcaacagggtagcctagttaggttgcacaagcccatctaaacacgtgtgattatctgattagaaccag

SEQ ID NO: 29765 - DNA, 201 bp, Homo sapiens
tccctatattcctcaactttcatcctacccctttatgcttctgcatgtaactttattttcttcttgacgctatcaaaagctattgatgtcctgccagaaasatctcccattaaaagcaaactgcaagattttctaacacaatttagttagggatcctcaggacaggaacagacatggcttcaaaatttaacattgtctgat

SEQ ID NO: 29766 - DNA, 201 bp, Homo sapiens
atatcactgagtttcaatagctaaagttgagaagtcctccaaatgtctcagtcctccaaatggataaagaaattgtggcatacttatacagtggaatactrtacagtgatcaaaattaacaaacaagactgacatgtttacaacagaataatacaacaaagaaaatgaacaaatttgagctacatagataataatactcac

SEQ ID NO: 29767 - DNA, 201 bp, Homo sapiens
ttctgcatgtaactttattttcttcttgacgctatcaaaagctattgatgtcctgccagaaacatctcccattaaaagcaaactgcaagattttctaacamaatttagttagggatcctcaggacaggaacagacatggcttcaaaatttaacattgtctgatctctactctgggtagcacaggaaagtgtttcccttcca

SEQ ID NO: 29768 - DNA, 201 bp, Homo sapiens
gtatggcattatctcattaaggtgaaggatcatatcctaagatcaagtatttacactcttatcagaatacatatacatacacatgcatatcactgagtttyaatagctaaagttgagaagtcctccaaatgtctcagtcctccaaatggataaagaaattgtggcatacttatacagtggaatactgtacagtgatcaaaa

SEQ ID NO: 29769 - DNA, 201 bp, Homo sapiens
cttggaatttgattctgtcatgatcaacagtctcattctgagtctcaggcagaaggggcagctgtacttgaagtgtagctgtggctattctcatggtgatyatcaaaatacaagaaggcccagacaaactgataatgcatttttaagatctctgctcatatacattgtgctaatattctaaagcaattcacagacaagtac

SEQ ID NO: 29770 - DNA, 201 bp, Homo sapiens
cctcttcaactattggcctatcaacccatttcaataaggctgttgtcaccacttcattgaatctgacatttggaagatcaccagggagtctgtgttgccartggtcggtcttcatgttgcatgctctgtgagcagtactgaatatagtttatttgcattccaggatgctgccctctcctgattttttccttatttactggg

SEQ ID NO: 29771 - DNA, 201 bp, Homo sapiens
cttgaagtgtagctgtggctattctcatggtgatcatcaaaatacaagaaggcccagacaaactgataatgcatttttaagatctctgctcatatacattstgctaatattctaaagcaattcacagacaagtacaacattaatgggcatggaaattatactttgcccacagtgggagagcacagcaaagttacatgcaaa

SEQ ID NO: 29772 - DNA, 201 bp, Homo sapiens
tcagaagcctccccttggtcctgcttacaataatgtcccttggtatacaggtcaggaagaaatgtaagagtcctgacagctgttgaacctgtcaacttcamttacactttcaggaaggggtaactacgatgaactcattagaacccctttgggttggacatgggccaaagctctatgtaccatctgatcttcaaaaactca

SEQ ID NO: 29773 - DNA, 201 bp, Homo sapiens
gtaatctttcttattttctttttatcatgtactgtttttcagcttttatagcagatttgattcactttatggtaaacagcctgctgggcatggtgcttttscagatagtaggagccttctgcctttctgatcactctgattctgattcttgggaagagcaagctgagtcagacctcactgataatgctgtggaagattaga

SEQ ID NO: 29774 - DNA, 201 bp, Homo sapiens
cagattattaagatctattgtattcttcattacaaggccagatttcataggtgcataaaaaatcacctatacatgaatctattttttaattgagacatttktaaaccatgcatgtggaagaatatgatatagcatgcatttatgcatgcattttgaaaaccagcttgagaattttacttccttttagttagcagtagacca

SEQ ID NO: 29775 - DNA, 201 bp, Homo sapiens
agactccatatcaaaaaaaaaaaaaaaaattacaagcctttccaaataggagacatgaatttatttcatctgtggcagaactccagaagagttctctggcrtttcagtaggtaacaagaaaatggctgaaattttaacaaattcttacaaaggttgagtgtagtttaatgtgacagtttagaatacctgggagccccagac

SEQ ID NO: 29776 - DNA, 201 bp, Homo sapiens
gtaaactagtaaaactgtttactattctttgggcattaattaatcagttaagtatctagtttgccacctgcctaagcattttctacttgcttaagatagcsaatttctcccacttatttttttgcctggctgaagtggagaatgaacagagtggttcttgtgcttttcctgcggtctttgttcttatcgtttgtttacctt

SEQ ID NO: 29777 - DNA, 201 bp, Homo sapiens
aaaatggtgatagccttcctcctcctttttattattaactttatttccactttaataggagattggatcttccttgaggtagagaattatcaggtcatgaygtttattatgatgattttacttgcctttccctcaggccactcatttattataattttgggaaacaacaagctaagacagagctccttgagactactgtgg

SEQ ID NO: 29778 - DNA, 201 bp, Homo sapiens
gcaattcttctctggccctgtggaaactggatcagttttagctgggcttgatgggttgtatcttaggcacagggtaggtgcttaagccaagcagctcccartgggttactggaattattttctttggtttcaccagatactgttttccattagacctggagatgagcagtcctgccttggtgatttcaggtcaaccatcat

SEQ ID NO: 29779 - DNA, 201 bp, Homo sapiens
aaacagatctgcatgtggtggtaattttactccttccatttgaatatatgtatctctgttatgtgcttgtttatctaatattaaataaaattattcacttyctaattatccacaacattgacaagctttttctttgtgcctttttattagataatttttcagggtgttgcagatacacataaggttagcagctactttgag

SEQ ID NO: 29780 - DNA, 201 bp, Homo sapiens
ctttttacgttttgtgccctaggagtctcgttcactttgcccaagaccaggtcatggcaaagagccttgggatttagaaatagggtatccctcttggtcaraaggcagatttgtttaaagataaagactcttctcttcttcttcttctctccagagatatttgcttacattccagtgtaaagcttcttcttcagaaggcaa

SEQ ID NO: 29781 - DNA, 201 bp, Homo sapiens
agacgtgagctctgctctcttttcaaagtatccatgaagtctcaacagaacccaccacacaaccccccacccaccatggtagtttgtctttctctttgtcytctttcccaacctcatctttattgcctggatatagcgaggccagggtaaccttcttgtctctatgtggatagtacgtttgtacttctagccttgggattt

SEQ ID NO: 29782 - DNA, 201 bp, Homo sapiens
atcagaaaggcaccagagaaaagtgaagcccaatgcaaggaaatccaaaaatatgatacaagaagtgaagggagaaatattcaaataaattttaataatawaataataaattttaataataaataaataataaattttaataataaataaattcaaacatttgatacagttagtacataaattttgatgcataaaaaagtt

SEQ ID NO: 29783 - DNA, 201 bp, Homo sapiens
tttaggacctaaacttagcattggaccaaatggatctggtagacctttacagaagtgtccatccccaaataagagaatatacattcttttcatagccacayggcacatactctataatcaaccacataattggatataaaacaatcctcaacaaatgtaaaataaccaaaatcataccaaacacactctcaggccacagtg

SEQ ID NO: 29784 - DNA, 201 bp, Homo sapiens
tgcttgcaagctctttgatgaatacaaacataattttggcccctttatttatcttatgctagttgttgcagaaggacatcttgctttcttgaacctattasatctattcaaaagtggaagttttcacaggtaacctctctgtatcaagtaacacaagatcaaataaaacacgagcaatccttgtttcgtgcctgaaccaga

SEQ ID NO: 29785 - DNA, 201 bp, Homo sapiens
tccactgatttttaccacacatatgtaccacagtgtgcttaaacatctaaattttttgatagtaagcacactcaattctaaatcaataatgaggtttcatytttggggtagtttttatttcatcatgaattctaattttatgtttagtttatagccagcataattattttcagaaaaagatgcacagaataatattcaagg

SEQ ID NO: 29786 - DNA, 201 bp, Homo sapiens
tccatttcttctaggttttctagcttgtgggcatagaggtgttgacagtagtttgggaggattgtttgtatttcagtggggtcagtggtaatatccacttkgtcatttttgattgggtttatttggatcttctctcttttttttctttattagtctggttaggggtctatcatattaattttttaaaaacatcaaatcctg

SEQ ID NO: 29787 - DNA, 201 bp, Homo sapiens; identical to SEQ ID NO: 5676

SEQ ID NO: 29788 - DNA, 201 bp, Homo sapiens
gtgtgaacccgggaggcagagcttgcagtgagccaagatcgcgccactgcactccagcctgggtgacagagcaagcctgcgtctaaaaaaaaaaaaaaaaattggtgttttctttgaccaaagtgtgggtaaaagaagagaattattggtattttcttgtcaagtttactaaaagtttttaaaaaatctttaagaatttgg

SEQ ID NO: 29789 - DNA, 201 bp, Homo sapiens
gtaagtaaaggtatcaaaaagtgaatttagttaatttaaatttggaattttctatgtctgtgaagagaatttgaaagctatatttgatgaccctgtaattmtctttctatgtatatatccaaaggaaatgaatcaaatgatatatgaaagaatggtcatactagaattattcataactcttcaaaaaagaaaccccccaaa

SEQ ID NO: 29790 - DNA, 201 bp, Homo sapiens
tggtgtctttttgggttaagtatttaataagatatatagaaatagccatatatagtctgtaagtaaaggtatcaaaaagtgaatttagttaatttaaattyggaattttctatgtctgtgaagagaatttgaaagctatatttgatgaccctgtaattatctttctatgtatatatccaaaggaaatgaatcaaatgatat

SEQ ID NO: 29791 - DNA, 201 bp, Homo sapiens
aattttgactgtataaagtggtggtgtctttttgggttaagtatttaataagatatatagaaatagccatatatagtctgtaagtaaaggtatcaaaaagwgaatttagttaatttaaatttggaattttctatgtctgtgaagagaatttgaaagctatatttgatgaccctgtaattatctttctatgtatatatccaa

SEQ ID NO: 29792 - DNA, 201 bp, Homo sapiens
attactaaaaatataaagctgaacatgcatgaaggaataataaataatagaagtggtaaatatgtgcataagtctaaataaattttgactgtataaagtgrtggtgtctttttgggttaagtatttaataagatatatagaaatagccatatatagtctgtaagtaaaggtatcaaaaagtgaatttagttaatttaaatt

SEQ ID NO: 29793 - DNA, 201 bp, Homo sapiens
ggcaccatgaaactaactacaactgtatactattggggctcagaaaatgatactgaaaatatatcgctctttgacatgctggactaaacaggaagcctcarattctctgtctgaagttttcccttctgtctgtgtctctgatcctctttcctgaagcaccagagggaattctctctggaatttccttatctgattaagaaa

SEQ ID NO: 29794 - DNA, 201 bp, Homo sapiens
aagactccttgtctaggaatctcatcaaatgaccaggataagatactggatcagataaccactggataagatacttggagttgtcaacatgcctagacagacttttcagttgttcttttgaaggcagctccaagagattccctgggtgactttatctgcataataagacaacctttgttcacagtgaagttctggccctaa

SEQ ID NO: 29795 - DNA, 201 bp, Homo sapiens
tcaggtagtggcattctgactccattagtttctcattcttcttctgggaacagtgtactagccagatgatgtcctcatggtaaaaggaaaagagcaggaawctccaacatggaagctgtcttaaatatctgtgtaaagtctactaacttcctgttgactgaagcaaattagaggagtgaatttagagtccaagttcaaggt

SEQ ID NO: 29796 - DNA, 201 bp, Homo sapiens
tgaaggcagctccaagagattccctgggtgactttatctgcataataagacaacctttgttcacagtgaagttctggccctaaccttccctccacctcccstagagctcagaggaaatttgtcctaggccattgctctttagattatgcatttcctctggaaatcatttattcttacatcccttgctttcctctccccaat

SEQ ID NO: 29797 - DNA, 201 bp, Homo sapiens
ttcttacaatacttgattctcttttaatgtatttcagttgaattggagtatatgctactgatgggagaattaaaagaattattgataaaaaacattttggmattgtttgattgtatccgtaaactgccaaagttggctgatgtatcataagatttatttgagtgactttattctaacaaatttgtctccagtattgagtat

SEQ ID NO: 29798 - DNA, 201 bp, Homo sapiens
attcataagatccatttctactcatatatctcaggtgtgtgttggtataaaattcacaaaatcttacaagtcttttggtctgaattttactttgtcctgtrtcacattttgtatcttgtcatttggggcctgctgggaattgagtgttatcatatatttaaacataagaggaggcagggatatatatagaggggtatcagc

SEQ ID NO: 29799 - DNA, 201 bp, Homo sapiens
ggggaggaagagtgcatctcctggcaacggtgcaccagcagaatttaggggttcaagatcctccagattctttgggatctgccattacaggcccaccccartttttaagttcctatttcttttttagcaaatttcctgactttaacacaggaagttgtgaagttgtaaatacaattttcaagatgatttatttattgcaga

SEQ ID NO: 29800 - DNA, 201 bp, Homo sapiens
atgatttatttattgcagaaattgatttgagtttgcttttcagaaattttagtacttctgctataggagataaggacttttttgaagacagtcgtaggaaygttatgttagtttacataatccgaagctagtaattcagagccttaagttcataatttttctttctccaagttttctagcacacttataagtcagcaacga

SEQ ID NO: 29801 - DNA, 201 bp, Homo sapiens
ttctttctccaagttttctagcacacttataagtcagcaacgaaccctattctacttatgttcactaaaatgttctatggcagcctcactcaatgtcttgycttctataggaacttgattataagttattttgtaagtgatcatctatggacaataatttaaataactgttgtgtcaccgcatgccagggattgccagtgt

SEQ ID NO: 29802 - DNA, 201 bp, Homo sapiens
gctggcattttgtggagtgttttttttaaatctatgtttattgaggttgttttcttttattgttgtgtctctgcctggttttggtatcagggtgatattarccttgtagaatgagttagcgtggagtttcttttcctcagttttttagagtaggtttagtgtgaatagtaccagttctttatacacatggtggaattctgc

SEQ ID NO: 29803 - DNA, 201 bp, Homo sapiens
cagagagaacctgtaaaaacgcaaatttgatcatgccattcttctcctccagatttttcagtggctttcatctaattcagagtaaaggccaaatccttacraagtcttataatcatttgaatgatctgattttgtctgcctgtgtgccctaaaacacctggctcatcccatgctaacaacactggcctttgtgtcacttct

SEQ ID NO: 29804 - DNA, 201 bp, Homo sapiens
tggatcaggcaaggtgctggcctagagaataagtgacagttaagggaatctgaggaagcacatgtttaagtccaatactgtctactccttgtaccactcaratttgctcatgtcttccaatcatggctggctttatgggcatatgatttccactgttgcacagggtcttgtgcttagaggcgctcatgcttagaggggcaa

SEQ ID NO: 29805 - DNA, 201 bp, Homo sapiens
tgggatgtattgtaacaatgtgttgtgtgtatgtgactctgttgtggcaacttcattataaggtgagagagacagcatggtggtcatcagatgcatgcacytggaccccagtacttttccggaaaggctacaaggggaataccacagccagcattagtccatggaagcgagagaggagggagaatgtatctgttcagctgt

SEQ ID NO: 29806 - DNA, 201 bp, Homo sapiens
acataaaaaatagatagccaaaaatattttgaagaacaaatgagttagtgaatagagtaataaattacatgtcttggggtggtgaaccagtgaaaatgaarcatcacaaaatctacagttgcatgaatttgcctattctggtttctggttgagatgacagaattatctaagaagaagcatttttcagagtaaaagtgtggt

SEQ ID NO: 29807 - DNA, 201 bp, Homo sapiens
gcagggcgtggtggcgggagcctgtagtcccagctactcgggaggctgaggcaggagaatggcatgaacccaggaggcggagcttgcagtgagccgagatsgcgccactgcactccagcctgggcgacagagcgagactccgtctcaaaaaacaacaacaacaaaaaacagagatcctgcagaccttgcttattgttgact

SEQ ID NO: 29808 - DNA, 201 bp, Homo sapiens
gtacggtaccctagagtacctctgtttctatatagtctactgattatatgactggtagaaataacgtgccactgagaaatttgtaaaaattaattttgtgytcccagctagtattcttttgctactttgctgctccagtaccactccagcgaggtagcacttagaggaattacttatgacaacttctaaaatactggtata

SEQ ID NO: 29809 - DNA, 201 bp, Homo sapiens
tttttaagactggagtttcctaattttgagatttctcttttgatagacaccactacttgcacatgtaacatcagtttctcatcttatccctgtgaggggaytgaagcttgaagaaatagtacgatgatattcctctgactactgctagtacttcagtgaataataaaccatcttttgccttctgcaagtacaagtgacaag

SEQ ID NO: 29810 - DNA, 201 bp, Homo sapiens
cgttggaaacagggtcatgaatacccttaaatctaattatatgagacaactaataccagacaactcctacctagacttggaatttgattctgtcatgatcmacagtctcattctgagtctcaggcagaaggggcagctgtacttgaagtgtagctgtggctattctcatggtgatcatcaaaatacaagaaggcccagaca

SEQ ID NO: 29811 - DNA, 201 bp, Homo sapiens
atgtatcatgttcatagataaactgagtattataaaatataatttctttctagattaatatagtcaatgcaagttgtggcaaagtcttattaaagttttgyggaaattgtgaaaaatgacttgaaaaatacatatagaaaattaacagttcggagataggcaagaaaacttggaaaaagaagaaggtaagttctttactgg

SEQ ID NO: 29812 - DNA, 201 bp, Homo sapiens
gtatcatgttcatagataaactgagtattataaaatataatttctttctagattaatatagtcaatgcaagttgtggcaaagtcttattaaagttttgcgraaattgtgaaaaatgacttgaaaaatacatatagaaaattaacagttcggagataggcaagaaaacttggaaaaagaagaaggtaagttctttactgggt

SEQ ID NO: 29813 - DNA, 201 bp, Homo sapiens
aaattagcagggcgtggtggcgggagcctgtagtcccagctactcgggaggctgaggcaggagaatggcatgaacccaggaggcggagcttgcagtgagcsgagatcgcgccactgcactccagcctgggcgacagagcgagactccgtctcaaaaaacaacaacaacaaaaaacagagatcctgcagaccttgcttattg

SEQ ID NO: 29814 - DNA, 201 bp, Homo sapiens
caaaaaaattagcagggcgtggtggcgggagcctgtagtcccagctactcgggaggctgaggcaggagaatggcatgaacccaggaggcggagcttgcagkgagccgagatcgcgccactgcactccagcctgggcgacagagcgagactccgtctcaaaaaacaacaacaacaaaaaacagagatcctgcagaccttgct

SEQ ID NO: 29815 - DNA, 201 bp, Homo sapiens
gaggccgaggtgggcggatcacgaggtcaggagatcaagaccgtcctggctaacgctgtgaaacccggtctctgctaaaaatacaaaaaaattagcagggygtggtggcgggagcctgtagtcccagctactcgggaggctgaggcaggagaatggcatgaacccaggaggcggagcttgcagtgagccgagatcgcgcca

SEQ ID NO: 29816 - DNA, 201 bp, Homo sapiens
gatcggataccaaatatttccgtttctttcctaaactgcttcagagcccctaaattgccgattctctccactatcttccacatttaaaaatctttttaaamatcacataaatgaactcaaatctttattacttgaaaaaatactccatgtaaaaatagtatagaaattatgaaaatcatttgaattatactttctgcaaat

SEQ ID NO: 29817 - DNA, 201 bp, Homo sapiens
tactgaggaatattagattttatacaaatatgtgaacaactgagaaaaaagtcatatctgtaatagggatgaagaaagaaacacaatgctgacctcttaastgctgtcataagtctccatatacaggtagaaaagtcatttcttccagtttttgaggtaaagaaaaccttttttgaaattgagatcggataccaaatattt

SEQ ID NO: 29818 - DNA, 201 bp, Homo sapiens
aaatttatgatctctatttataattgttaagaacttacagcttatttcacaaaatcattgctcttttccactgttatttgtaccatacgtatgtaccatastgtgcttaaacgtgattatttgaacgtctagttttttggatggtatgcgcattctaatctaaatcaataatgaagttttatctttggggtagtttttgtt

SEQ ID NO: 29819 - DNA, 201 bp, Homo sapiens; identical to SEQ ID NO: 5669

SEQ ID NO: 29820 - DNA, 201 bp, Homo sapiens; identical to SEQ ID NO: 5670

SEQ ID NO: 29821 - DNA, 201 bp, Homo sapiens; identical to SEQ ID NO: 5664

SEQ ID NO: 29822 - DNA, 201 bp, Homo sapiens; identical to SEQ ID NO: 5665

SEQ ID NO: 29823 - DNA, 201 bp, Homo sapiens
tgtctagcagctattcagagcacaagtacggtaccctagagtacctctgtttctatatagtctactgattatatgactggtagaaataacgtgccactgakaaatttgtaaaaattaattttgtgctcccagctagtattcttttgctactttgctgctccagtaccactccagcgaggtagcacttagaggaattactta

SEQ ID NO: 29824 - DNA, 201 bp, Homo sapiens
agtcttattaaagttttgcggaaattgtgaaaaatgacttgaaaaatacatatagaaaattaacagttcggagataggcaagaaaacttggaaaaagaagraggtaagttctttactgggtatcaagatttattatagtgtaattatgaaaattgaaagaattttggcacagaaggatgcaatagacaacaaaagggaata

SEQ ID NO: 29825 - DNA, 201 bp, Homo sapiens
tgacttgaaaaatacatatagaaaattaacagttcggagataggcaagaaaacttggaaaaagaagaaggtaagttctttactgggtatcaagatttattrtagtgtaattatgaaaattgaaagaattttggcacagaaggatgcaatagacaacaaaagggaatagtaaggcagaatatatttaggtaatttacttttt

SEQ ID NO: 29826 - DNA, 201 bp, Homo sapiens
aagaattttggcacagaaggatgcaatagacaacaaaagggaatagtaaggcagaatatatttaggtaatttactttttgtgcacatgtaatttgtcttayaataagattatcattagaaattagtagataagatgtgttttttgcagtaaattgtttggataatggacttttcataaggaggaaaatcaatgtgtaactt

SEQ ID NO: 29827 - DNA, 201 bp, Homo sapiens
atttgtcttacaataagattatcattagaaattagtagataagatgtgttttttgcagtaaattgtttggataatggacttttcataaggaggaaaatcartgtgtaacttgtatcacaaaaaatagtccaaaaggactaagatctaaacattaagaacaaaatttaaagctaagaaaaatgtaaattattttataaattc

SEQ ID NO: 29828 - DNA, 201 bp, Homo sapiens
ataaattcagggtaggtgaggattttatctgaaagatacaaaaaccacaaaacataaaggaaaagtttgataagttttaaattccttggaaagatctgttmattaatccagctaagttagctgtctgactctagtctaattatacatctaggcatttgataatgaatacagaaagagtattaaaactaggaatatatggat

SEQ ID NO: 29829 - DNA, 201 bp, Homo sapiens
ccacaaaacataaaggaaaagtttgataagttttaaattccttggaaagatctgttaattaatccagctaagttagctgtctgactctagtctaattatayatctaggcatttgataatgaatacagaaagagtattaaaactaggaatatatggatgaaattaaaaatactcattttacctaataaaaaaatcatgttct

SEQ ID NO: 29830 - DNA, 201 bp, Homo sapiens
gaaggaagcagagtgctcctgcaggacccaggagacacccaaatacagtgacttccccaactgcaggagtaggaaagggagaccctcctcttctgaacacwcaccaccactggagaactgaaggtctgtttgcaggagaagtttctggctttaccttgagctgagttaagttagagagctgagtgaaatgcaggggtagag

SEQ ID NO: 29831 - DNA, 201 bp, Homo sapiens; identical to SEQ ID NO: 5666

SEQ ID NO: 29832 - DNA, 201 bp, Homo sapiens
tcagacatgataacttttctacccatcattttttccattctagtagtggttacatttgttcttgggaattttgctaatggcttcatagtgttggtaaattscattgagtgggtcaagagacaaaagatctcctttgctgaccaaattctcactgctctggcagtctccagagttggtttgctctgggtaatattattacat

SEQ ID NO: 29833 - DNA, 201 bp, Homo sapiens
ttgaaagtaaaaagaatgttactgcacattcagaaatcaggtccacataaaatttaaggtcaggatattaaaggatcacagccagtgctgttaggccttcrtttattctatctttttgtctgttcagacatgataacttttctacccatcattttttccattctagtagtggttacatttgttcttgggaattttgctaat

SEQ ID NO: 29834 - DNA, 201 bp, Homo sapiens
tattgaactatcaattagcataaactgctactttcttgtttgacactggtcacagtatttgaaagtaaaaagaatgttactgcacattcagaaatcaggtscacataaaatttaaggtcaggatattaaaggatcacagccagtgctgttaggccttcatttattctatctttttgtctgttcagacatgataacttttct

SEQ ID NO: 29835 - DNA, 201 bp, Homo sapiens
tctgcccacctcagcctcccaaagtgctgggattacaggcgtgagccaccgcgcccagcctctacctttaattatctaccttgcatgacaaaactttgccrttccttatctatttttcttttggctcctctattcctgacacaacaagggtggacatatttcccacacgcttggttttgcagagtacctatatcagttagg

SEQ ID NO: 29836 - DNA, 201 bp, Homo sapiens
gtggcgccatctccgctcactgcaagctccgcctccggggttcacaccattctcctgcctcagcctcccaagtagctgggactacaggtgcccgccaccasgcctggctaattttttgtattttttgtagagacggggtttcaccgtgttagccaggatggtctcgatcccctgatctcttgatctgcccacctcagcctc

SEQ ID NO: 29837 - DNA, 201 bp, Homo sapiens
acaaaacaaaacaaaaagctaatcacatgaaatcaatttcctgtttcttccaacttgcaggataaggcctagacgaagcttttattgtattgtgtgacccmagtgttgggaaaagtagaaaattgttaccagatgtgaagaaacatttaggggcttgaaaagcagcatggaggtggacctaggctctttgcaatgttccac

SEQ ID NO: 29838 - DNA, 201 bp, Homo sapiens
tagatttagaaattaagtttagtttagtttaaaatacattgcttaagaaaatagttatttatggatgaccttaaactaatccaaggaacactataataaasatttagtttttaacgtaaatacaattcttcaatcagagagataaaccatttcatgatcaatctattatttttgtttattatttttattatttatttattt

SEQ ID NO: 29839 - DNA, 201 bp, Homo sapiens
aggggtaagggaaatgtcctccatcaaaggtattatttcagtctaagccctgatgctgagaataatatgagaatcataaagccaggagaaagaataattgkgttatcccattaccctgaattgtagcacttagaaaaatgaatggtcacatttattagctagcagtctaccttgtagctatcatcatcatctctatctaca

SEQ ID NO: 29840 - DNA, 201 bp, Homo sapiens
ggtcctcagctaaagccccactctcaagccaaatagactgagactgtggcccaaagggagtacttctatccctgttttcccactcaaatgttgcctttttkggcctgccccacccctcatcctatgcccataaaaccccaggctccaccggtagtgagaagtggctgaagatcgagaggagaagcagctcaatgttgtaga

SEQ ID NO: 29841 - DNA, 201 bp, Homo sapiens
cgtactgtataattgcacagagtatttgtacatgttcatatgaaaatgcaaaaaaacaaaaaaacagaaaaaccaaagagcaggtgctatttgctggaagwcatgtttgctatgatttttagaatttaataaaagaaaaaaaatagctagcaaacttttggaaatatgttggtttaaagttgtcattgatgaaatactatg

SEQ ID NO: 29842 - DNA, 201 bp, Homo sapiens
ttggccttcttgggcttccgaagaaaaccttggacgcttttggtaggaaaagttgggattcactctccataaatccggcgttgaaaaaatgaatcaacagkggtcatgattctagttttgaccaagctacatataacagtgtaggcatctgatgtatgatctatgtattaggttggaaaatttcccttacaactgacattg

SEQ ID NO: 29843 - DNA, 201 bp, Homo sapiens
ctaatgatgctattgatacatatgataaattttacgtactgtataattgcacagagtatttgtacatgttcatatgaaaatgcaaaaaaacaaaaaaacaraaaaaccaaagagcaggtgctatttgctggaagacatgtttgctatgatttttagaatttaataaaagaaaaaaaatagctagcaaacttttggaaatat

SEQ ID NO: 29844 - DNA, 201 bp, Homo sapiens
ttgctaatgatgctattgatacatatgataaattttacgtactgtataattgcacagagtatttgtacatgttcatatgaaaatgcaaaaaaacaaaaaamcagaaaaaccaaagagcaggtgctatttgctggaagacatgtttgctatgatttttagaatttaataaaagaaaaaaaatagctagcaaacttttggaaa

SEQ ID NO: 29845 - DNA, 201 bp, Homo sapiens
taaaatactccatatttcatcacagtagctgagaatgcaaataaccatttgaaagaatttggcttgctaatgatgctattgatacatatgataaattttaygtactgtataattgcacagagtatttgtacatgttcatatgaaaatgcaaaaaaacaaaaaaacagaaaaaccaaagagcaggtgctatttgctggaaga

SEQ ID NO: 29846 - DNA, 201 bp, Homo sapiens
gattgtaccatggcactctagcctgagcaacagagtgagactccatctcaaaataaaataaaataaaatactccatatttcatcacagtagctgagaatgyaaataaccatttgaaagaatttggcttgctaatgatgctattgatacatatgataaattttacgtactgtataattgcacagagtatttgtacatgttca

SEQ ID NO: 29847 - DNA, 201 bp, Homo sapiens
ttaatcccagctactcaggaggctgatgcaaggagaattgcttgaacctgggagtcagaggttgcagtgagccgagattgtaccatggcactctagcctgrgcaacagagtgagactccatctcaaaataaaataaaataaaatactccatatttcatcacagtagctgagaatgcaaataaccatttgaaagaatttggc

SEQ ID NO: 29848 - DNA, 201 bp, Homo sapiens
gtctgtaatcccaacactttgggaggccgatacaggcagatcacctgaggtcaggagttcaagactagcctggccaacatggcaaaaccccatctctgctwaaaaatacaaaaattagccgggtgtggtggtggatgcctttaatcccagctactcaggaggctgatgcaaggagaattgcttgaacctgggagtcagagg

SEQ ID NO: 29849 - DNA, 201 bp, Homo sapiens
taaaacttacttagtataatctttgggtatgtttttgtatgtgtagtgctgcattgcttgctataataaaatactccaagggaccaggtgcagtggctcaygtctgtaatcccaacactttgggaggccgatacaggcagatcacctgaggtcaggagttcaagactagcctggccaacatggcaaaaccccatctctgct

SEQ ID NO: 29850 - DNA, 201 bp, Homo sapiens
attaaattatacggatgattatccctaaatttatccttaaataaaataatttcagtcatattgttaccattcaaaaatcatagtatgtgcacacatatatsttggaaaaaatattttgttgctataattttttggctctctattagagaaaaaaccagaaagttaaatgtgttaaagtgtaaaacttacttagtataatct

SEQ ID NO: 29851 - DNA, 201 bp, Homo sapiens
atattaaattatacggatgattatccctaaatttatccttaaataaaataatttcagtcatattgttaccattcaaaaatcatagtatgtgcacacatatrtgttggaaaaaatattttgttgctataattttttggctctctattagagaaaaaaccagaaagttaaatgtgttaaagtgtaaaacttacttagtataat

SEQ ID NO: 29852 - DNA, 201 bp, Homo sapiens
ctctaggtagcatctgaccttcaaaactcccactgcgggctggatgtgatggcttatgcctgtagtcctagtactttgggaggccaaggtgtgaagatccyttgagagcaggagttccctgtgcatcatatggaaactccgtctctacaaaaaattttaaaaattacctggcatggtggtacatgcctatagttccaaata

SEQ ID NO: 29853 - DNA, 201 bp, Homo sapiens
ttgagagcaggagttccctgtgcatcatatggaaactccgtctctacaaaaaattttaaaaattacctggcatggtggtacatgcctatagttccaaatasttgagaagctgaggcaggaggattgcttgagcccaggagttccaggctgcagtgggctatgattgtgccactgtactccagcttgggtaacagagggaga

SEQ ID NO: 29854 - DNA, 201 bp, Homo sapiens
taaattatggtactgtagatattaaattatacggatgattatccctaaatttatccttaaataaaataatttcagtcatattgttaccattcaaaaatcayagtatgtgcacacatatatgttggaaaaaatattttgttgctataattttttggctctctattagagaaaaaaccagaaagttaaatgtgttaaagtgta

SEQ ID NO: 29855 - DNA, 201 bp, Homo sapiens
gacaccttttgttcttatttccaatttatttacaatgcacaaagtgacagaaattactgaattttcaataaattatggtactgtagatattaaattatacrgatgattatccctaaatttatccttaaataaaataatttcagtcatattgttaccattcaaaaatcatagtatgtgcacacatatatgttggaaaaaata

SEQ ID NO: 29856 - DNA, 201 bp, Homo sapiens
aggagaatcgcttcaacctgggaggcggaggttgtagtgggctgagattgtgccattgcactccagcctgggcaacaagaatgaaactccatctcaaaaaygaaaaaaaaaaacaaaaaaacttttctttaattttaaaaataatatataagcaagaactataaattcaaattcttaatgctaatcttaatttgaaacatc

SEQ ID NO: 29857 - DNA, 201 bp, Homo sapiens
ggctgagcgggtggatcacctgaggtcaggtgttcaagaccagcctggccaacatggtgaaagcccgtatctactagaaaatacaaaaaattagctgattrtggtggcgggctcctgtaatcccaactactagggaggctgaggcaggagaatcgcttcaacctgggaggcggaggttgtagtgggctgagattgtgccat

SEQ ID NO: 29858 - DNA, 201 bp, Homo sapiens
ggtggctgagcgggtggatcacctgaggtcaggtgttcaagaccagcctggccaacatggtgaaagcccgtatctactagaaaatacaaaaaattagctgrttgtggtggcgggctcctgtaatcccaactactagggaggctgaggcaggagaatcgcttcaacctgggaggcggaggttgtagtgggctgagattgtgc

SEQ ID NO: 29859 - DNA, 201 bp, Homo sapiens
cgctttttataggtgattatactgaggcaggagtagttggaaaatggagtctcagagcatagctataccaagcagggaatatgatttcctgtcctggcagyctgactccaagatcccctcttagaaacagttatgctataaaaactgaaaagaaacaaaatccaggattggagactgattttaacatctattcatcataaa

SEQ ID NO: 29860 - DNA, 201 bp, Homo sapiens
atcccagcactttgggtggctgagcgggtggatcacctgaggtcaggtgttcaagaccagcctggccaacatggtgaaagcccgtatctactagaaaatayaaaaaattagctgattgtggtggcgggctcctgtaatcccaactactagggaggctgaggcaggagaatcgcttcaacctgggaggcggaggttgtagtg

SEQ ID NO: 29861 - DNA, 201 bp, Homo sapiens
tataaaattacactgaaactacatattctcatagatagaactgtaattattagagtttttgctgaataaagtcaaatagactattatagtagttataaacrcaagttaaaattttagggccgggcaaagtggctcacgcctgtaatcccagcactttgggtggctgagcgggtggatcacctgaggtcaggtgttcaagac

SEQ ID NO: 29862 - DNA, 201 bp, Homo sapiens
tgtatgctatgttccacaataataaaaatatttaaaaggcaaaaaaagtaaaataatgaatataaaattacactgaaactacatattctcatagatagaaytgtaattattagagtttttgctgaataaagtcaaatagactattatagtagttataaacacaagttaaaattttagggccgggcaaagtggctcacgcct

SEQ ID NO: 29863 - DNA, 201 bp, Homo sapiens
aattctattttttgaccaagatgtggtaaacacggggagtaaagttataactttttctcttactgtgcttttaggttttgttgctttctgtctgtatgctrtgttccacaataataaaaatatttaaaaggcaaaaaaagtaaaataatgaatataaaattacactgaaactacatattctcatagatagaactgtaatta

SEQ ID NO: 29864 - DNA, 201 bp, Homo sapiens
ctgattttaggcagtttttcttgttgtgggagtggtaggagcattaaaaaagtcccacgtctgaggcaaaggtacgtagacaggggcagttgctagagaakaacaaagagctcccattgccccaccatgaacttttctctgattaacaagcaatgccactatactgggagagggacacaagtgtagaaagagccttctcta

SEQ ID NO: 29865 - DNA, 201 bp, Homo sapiens
agtggggtaagaaacctgcctgcactcctaggtctgtattaatacatattagaagtctgttgtcacaggggaagtccaggaaactcacttgctctgggctrcatgctggctaaacagaaaggatctgccagtgaaggaaggcagaaaacccaccaatcctggactctgcatgaacaccaggaaaaacccatttgctgcagg

SEQ ID NO: 29866 - DNA, 201 bp, Homo sapiens
agaatgggatcaacagaaggcatatatggggagtgtctggatggctggaaaattctattttttgaccaagatgtggtaaacacggggagtaaagttataaytttttctcttactgtgcttttaggttttgttgctttctgtctgtatgctatgttccacaataataaaaatatttaaaaggcaaaaaaagtaaaataatga

SEQ ID NO: 29867 - DNA, 201 bp, Homo sapiens
ttttttcaccgaaaatttctgattattattgttttctcttgtgggatgaaatatgtaccttctatatcacagccttaataccttcagcttcttattcattsaaatcttgcttacaatccagtccgaggattcccggtttactgattttctttttcctgcaaattttagccttctgttttgttttgaaataatgcatcctct

SEQ ID NO: 29868 - DNA, 201 bp, Homo sapiens
gaaactggaagttatgtaattgaggactattaaaaataagtattttggcagatgtgcaaaattctcaagcacatatattacaactttctatagtcatatayatcctttttacacttgcttgaattggcatacaaaactcccatgtttgttaatgtaatccaaacaaatagccagtccataaaatataaaagttacatttag

SEQ ID NO: 29869 - DNA, 201 bp, Homo sapiens
ttacattaatcaaagtaattctctttcaaagaggaaactggaagttatgtaattgaggactattaaaaataagtattttggcagatgtgcaaaattctcargcacatatattacaactttctatagtcatatacatcctttttacacttgcttgaattggcatacaaaactcccatgtttgttaatgtaatccaaacaaat

SEQ ID NO: 29870 - DNA, 201 bp, Homo sapiens
  misc_feature (101)..(101): n is a, c, g, or t
ggtcatcagatgcgtggacttgactcccagtacttttccagaagggctgcaaggggaaaccacagccggcattagtccacggaagagaaagagaagagaanatgtatctgctcagctgtcttctgtcttctatttcccattggccagggtttccctgaggcagaactaccatctctgctgttctgcgttccatcatccagt

SEQ ID NO: 29871 - DNA, 201 bp, Homo sapiens
attcattagtttaagctggtgcttttctgttgacattgttcacagaatttaaaagtataaagaatgttattgaacattcaggaatcaagtgcatatttaayttaaagtcttgaatatcagaggagtcaccatcagtgacattaggcctgaattttttacttgcttttttgtttagacatgatgagttttctacacattgtt

SEQ ID NO: 29872 - DNA, 201 bp, Homo sapiens
cagtgctactcattgagtttccttgtgaggagattgtgtggcgaggacccagcaagacaagctactatcccaaaaaagctacttatatgaacttcatttcyggtttctttcaaattgaaggtaaattccaagatgaagcttttattctattctctgaccaaagtgttgggaaaagaaggaatttgttaccattttcatttc

SEQ ID NO: 29873 - DNA, 201 bp, Homo sapiens
atatacctagataaatctttaacctagtctaaaaaatgtatgtatgtgtgtgtgtatgtgtgtgtgaaaaacttaagaacattgacaataacatactcttytttgtttttttcatatgaactgccagattatacaaaatatgacaaaaattcctcagaattatgaagccatgtgtatttcattcatgtattttatctttca

SEQ ID NO: 29874 - DNA, 201 bp, Homo sapiens
ggcctgtcctcttctagacttcgttgcggcaaggacttttagtagtgtgctggtatttttccatccatctggccattcatttcttctaattttacgggacwgcaaactgaagcaagcttctctctgtgtcctgaagaagatgaagtatgccaaaaaggacataatctctcatttttataaacatgcctgatatgagtgatg

SEQ ID NO: 29875 - DNA, 201 bp, Homo sapiens
gactattacaacaatatggatagtagggaggaggaaaacaagaggagaatgggatcaacagaaggcatatatggggagtgtctggatggctggaaaattcyattttttgaccaagatgtggtaaacacggggagtaaagttataactttttctcttactgtgcttttaggttttgttgctttctgtctgtatgctatgttc

SEQ ID NO: 29876 - DNA, 201 bp, Homo sapiens
aaccaactagagagacatgtttacaagaaatgtatataacaaagaaaataaacaaatttgagctgattagataatactcacaagtgtaagaggatctatcmatagtgaaaaacattcattttaattccatttatataaagttttcaaaaatatatctttaatacattgcaatttattacattggtgacaaaactctaaagt

SEQ ID NO: 29877 - DNA, 201 bp, Homo sapiens
ttcccatgacacctatattaaatgtataaacatttttatatttcaacactttgtatgagtcctttcagggcctgttaaacactccaaatttcccttgcaayatgccaataactaatcatattttctcaaaatgatctgacataatgtttgactgaaggcatatctctggtataattctatttgctgatatcaaatgagaat

SEQ ID NO: 29878 - DNA, 201 bp, Homo sapiens
tgaaatagtcatagaatgaaaaagattaatgtaattcattgaagtaaacatacattctgaataagaatagaaaaggacttggaaaatattgtttaataatrttttatataaatacaaaaatgtatatattagcccaacattatttattttggaaaggatatgacacaatgggaattttcatacactactcctagaattata

SEQ ID NO: 29879 - DNA, 201 bp, Homo sapiens
tttccatactagtaatggtggaatttgtattttcccatgacacctatattaaatgtataaacatttttatatttcaacactttgtatgagtcctttcaggrcctgttaaacactccaaatttcccttgcaacatgccaataactaatcatattttctcaaaatgatctgacataatgtttgactgaaggcatatctctggt

SEQ ID NO: 29880 - DNA, 201 bp, Homo sapiens
acttgcctttttttaaggtgtgtttgttcagttcatgggaagtttactaccaatcatttttttccatactagtaatggtggaatttgtattttcccatgayacctatattaaatgtataaacatttttatatttcaacactttgtatgagtcctttcagggcctgttaaacactccaaatttcccttgcaacatgccaata

SEQ ID NO: 29881 - DNA, 201 bp, Homo sapiens
gatcatgcccagtgatattagacttgcctttttttaaggtgtgtttgttcagttcatgggaagtttactaccaatcatttttttccatactagtaatggtrgaatttgtattttcccatgacacctatattaaatgtataaacatttttatatttcaacactttgtatgagtcctttcagggcctgttaaacactccaaat

SEQ ID NO: 29882 - DNA, 201 bp, Homo sapiens
gttattcactgaacagccaagctttgtgctactatgggatttcgttttctgcggttccaagtcttgatccacgtcctgccacaggatcactgaagtagagyccattttcttacactctcgccattagttcaaaagcttgcagcattttatgtctggtacttggaggatgattttcctgtacagttttgcgtttttttcacc

SEQ ID NO: 29883 - DNA, 201 bp, Homo sapiens
ctcataaagcctactcaaggagggtattgttattgtgtgcgttttacagatggctatcctaaggctgatagtagttgtaaaatatagtctaagttcatatytatatgaaacagagtatctgggtttctgtcctggccatcagacttgaagatcatttcttagaaacaattatattatcaaaactgaaaagaaatacaatcc

SEQ ID NO: 29884 - DNA, 201 bp, Homo sapiens
atgtgcccaaatggagtttggctggagacaaagaataaagactagaaagaacaattaccctaggccagacatggtgttggacggggcaagatgtttactayttaaagccatagaacactgtttgctggacacaatgagtggaatatagaacaatgcaactattttaacactttacccctcttagtggtttattagttaatt

SEQ ID NO: 29885 - DNA, 201 bp, Homo sapiens; identical to SEQ ID NO: 4922

SEQ ID NO: 29886 - DNA, 201 bp, Homo sapiens
cacaccctgtgcatcccctttgagatctcatcagccactctctgatgctaccggaagtggaagaagatgtaagggaaagcaggattgttactacactgagygtcaaccaggaactcaacatagaagggcccctgtttgtcctctcatgattccttaagccttagtgcttatttagttaaagggctcttgagtatttcaatg

SEQ ID NO: 29887 - DNA, 201 bp, Homo sapiens
gattgtgtggttcattttagattacatgccatgtacagatgagaagaatgtgtgttctgttcttttggggtgaactgttctgtggtggtctattaggttcrtttggtcaagtgtttagttcagattctgagtacctttgtcagttttctgtcttgatcatctgtctaatgctgtctgtggggtgttgaattctcccactag

SEQ ID NO: 29888 - DNA, 201 bp, Homo sapiens
cagggatgtcctgcaattaagctactaagacttccatagtttcttcatttgtagtaggcttttgggaaggtccttgggccttttagttgtcccaagagcaytgctgaaatttgtatttgtggagagtaggggtaaggggaggtttacttatattttgaaaagatctcatgacttgacctggtggtaatcctgctgagcaaa

SEQ ID NO: 29889 - DNA, 201 bp, Homo sapiens
gtacccaaaattcattcaggagagggttgtttaatttccatgtaattatatggttttaagctattgtcttagtatttacttacatttttatagggctgtgrtccaagaacgtgactggtatattttttgttgttttgtatttgctaggaattgttttatgttagattgtgtggttcattttagattacatgccatgtacag

SEQ ID NO: 29890 - DNA, 201 bp, Homo sapiens
gcattccctttcatcacaaccttgacagagtctgtttttgtttgtttgtttgtttgtttgttttgtaataggcattctgaggggtgtgagaggttatctcrttgtggttttgatttgcatttctttaatgattcattcatattgagcattttttcatatgcttgttggctgtgtgtatgtcttcacttgaaaattgtctat

SEQ ID NO: 29891 - DNA, 201 bp, Homo sapiens
atagtgatatatagtcttgatgcagctgtgtcaggtgtctgaattggagacaaggtaaaacatcaaaattagatggcaccttggaaggctgaggcgggcgratcacgaggtcaggatatcgagaccatcccggctactatggtgaaaccccgtctccactaaaaatacaaaaaaattagctgggagtggtggtgggcacct

SEQ ID NO: 29892 - DNA, 201 bp, Homo sapiens
tagaaactggcagggatgtcctgcaattaagctactaagacttccatagtttcttcatttgtagtaggcttttgggaaggtccttgggccttttagttgtyccaagagcattgctgaaatttgtatttgtggagagtaggggtaaggggaggtttacttatattttgaaaagatctcatgacttgacctggtggtaatcct

SEQ ID NO: 29893 - DNA, 201 bp, Homo sapiens
tttttttaatctgctgaacataatctctaattctctgccaatgatcttagttacagtatttcattatttggtggtgtgatttttttctccctctttttggytgatgaaaagttgtacccaacttccctcactaataatatgaatgatctccatttctctttattgttcattgatgcatgccactattttacagtggctaag

SEQ ID NO: 29894 - DNA, 201 bp, Homo sapiens
ttcttacagtgttttctgtaatgtatgtgtatgaataatttccaaacatatacctagataaatctttaacctagtctaaaaaatgtatgtatgtgtgtgtrtatgtgtgtgtgaaaaacttaagaacattgacaataacatactcttttttgtttttttcatatgaactgccagattatacaaaatatgacaaaaattcct

SEQ ID NO: 29895 - DNA, 201 bp, Homo sapiens
aggagagaagccttcatctccatagattcagaagaggggcattgtgtgtcttctagcagaaaacaaactggtggtgtatgaaacattttatatttcttacwgtgttttctgtaatgtatgtgtatgaataatttccaaacatatacctagataaatctttaacctagtctaaaaaatgtatgtatgtgtgtgtgtatgtgt

SEQ ID NO: 29896 - DNA, 201 bp, Homo sapiens
agtctcctttgctagttcttcctcttgtctgtaaactgaaaatatcagattgcccaaggtctaaattcttcaatctctaatcaattatgtctggtttttttggtgatctcatgcagtctccttacagataatgtagccacatggttcaatagagaggaataaggctgattattcatatatgttatttatttatatacatat

SEQ ID NO: 29897 - DNA, 201 bp, Homo sapiens
ctcacttctctctgcagttttaaattttttttagattttattttaggttcagaggtatatgtgcaggtttgttatataagtaaattgcatggcatgggaayttgctgtatagattatttcatcactggggtgataagcagagtacctgataggtaactttttgatcctcacccccctcctgccctccgtcttcaagtgggc

SEQ ID NO: 29898 - DNA, 201 bp, Homo sapiens
atccagaagtaaaaatttgccaccgtatcccatggaccactgtgtcttttggggtacccagatattagtgttagttcaggctccaaacttaaaagtctcarataatatggacgtgtgttctgttctctgaggactgttttctggggaatagctacaggtctttgagaaagcaacatatgatacatcctgagtgttcttgca

SEQ ID NO: 29899 - DNA, 201 bp, Homo sapiens
agatcttgtctctaaaaagaaacaaacaaaaacaacaaacaaaagcccaaaaagggcctggtgcggtggctcatgcctgtaatcccagcactttgggtggstgagtggttggatcacttgaggtcaggagttcgagatcagcctggccaacatggtgaaaccccacctctactaaaaatacaaaaattagccaggtgtggt

SEQ ID NO: 29900 - DNA, 201 bp, Homo sapiens
gatgttaaggtcaagaccttaaaggaaatcttgaccagtgatatcaggcttgcctttaaaaaaattcagacatgataaatttactaccaatcattttttcwtcaacaataatatatttatattttcccatggacacctacattaaacttatagactctttttatttttcaactttttttctttgagtccttttaagagttg

SEQ ID NO: 29901 - DNA, 201 bp, Homo sapiens
gcagctcatacctgtaatcctaataatttaggaggccgaagtgggaggatcactttaggctgagagtttcagatcagccttggcaacatagtaagaatctrtaaaaaaaaaaaaaaaaattagttgtttgtggtagtgtgtgcctgtagttacagctacccagaagactcaggcaggaggattgctttagcccaggaattc

SEQ ID NO: 29902 - DNA, 201 bp, Homo sapiens
agtcctattgaggcagctcatacctgtaatcctaataatttaggaggccgaagtgggaggatcactttaggctgagagtttcagatcagccttggcaacayagtaagaatctgtaaaaaaaaaaaaaaaaattagttgtttgtggtagtgtgtgcctgtagttacagctacccagaagactcaggcaggaggattgcttta

SEQ ID NO: 29903 - DNA, 201 bp, Homo sapiens
gcaaataatacaatgagacagtgtgttgatatattcagtaatagcaagttctattataggaagaaaatgtataacatcattaaacaattaaattctataarctgtattaattcttggagttatgaaattttaacaatattatctaaaccttgggacaaatcatctctacatctgatttagttatttgtttgtttatcatat

SEQ ID NO: 29904 - DNA, 201 bp, Homo sapiens; identical to SEQ ID NO: 2822

SEQ ID NO: 29905 - DNA, 201 bp, Homo sapiens
caatgatctcctctatcttccatacttgaaattctttttaaacttcacataaaagaacttgagtcttccctaccttagaaaaatactctatgtaaaaatastatagaaattataaaaatcatttgaattaaactttttgcaaatgttaaaatggcatctatgaaatctatgtattaatgatagaaaacatctaaaatatat

SEQ ID NO: 29906 - DNA, 201 bp, Homo sapiens
tctaccataaacagtactgaggaataatagacttaatacaaatatgtgaacatttgagaaaaaagtcatttctataataaggatgaagaaagaaacaccgygatgacttatgttgtcataagtctcaacatgcagttagaaaagtcatttcttccagtttttgagttaaagaaaaccttttttgaagttgagatctgatgt

SEQ ID NO: 29907 - DNA, 201 bp, Homo sapiens
tgagacagggtcttgctctgcagccctggctggagtgcagtggcatgatcacagctgttttctttttttttttaatctgctgaacataatctctaattctmtgccaatgatcttagttacagtatttcattatttggtggtgtgatttttttctccctctttttggttgatgaaaagttgtacccaacttccctcactaat

SEQ ID NO: 29908 - DNA, 201 bp, Homo sapiens; identical to SEQ ID NO: 5675

SEQ ID NO: 29909 - DNA, 201 bp, Homo sapiens
catacttccagtgcactcatctgttacattgcttaatgctgtgtacaagacctaggccctgagctagattattgccaagaataaatcttcatttagaaaaytgatcagatggttggcttgataaattcagaaaaatgttaggcaatatttttttgggaaggttatttgtagaagaaatcccaggtgacagataaactattt

SEQ ID NO: 29910 - DNA, 201 bp, Homo sapiens
atttcatgatcaagctcttatttctaaagagaggattttagggctaaacaaatcaaataagtaagccctcccccacatcttctctatttcatgtaggtaakgatggagttcaaaggcacagagccccatttctacaacataagcaaagtgaaaattaattcatggaatacaatgacatagctgtggttgatgaactatatt

SEQ ID NO: 29911 - DNA, 201 bp, Homo sapiens
gttaaggcataaaacatatgtagtataactacttggactgctataataaaatcacccagattttgtgacagtagctgagaatgtaaataagcagtagagakaatttaacttgttaatgatgctattaaaagatgaaatgaagcttattcactctataattgcaaagagtatttgtgtaagttcataggaaagtggaacaaa

SEQ ID NO: 29912 - DNA, 201 bp, Homo sapiens
aactgaaaacagaagtgacatagccatgacataaaacagtgaagcagtgcttttgttcttacctcaccaaaacaaatcattttgattttctctcccaatcgatgtagattaaaaagcattcaccaaatcaaacgcctcatacaaagaaccagaaaccatgttttctcagtgaaggtaccacatcctagagagcatctgcaa

SEQ ID NO: 29913 - DNA, 201 bp, Homo sapiens
taaactgaaaacagaagtgacatagccatgacataaaacagtgaagcagtgcttttgttcttacctcaccaaaacaaatcattttgattttctctcccaaycgatgtagattaaaaagcattcaccaaatcaaacgcctcatacaaagaaccagaaaccatgttttctcagtgaaggtaccacatcctagagagcatctgc

SEQ ID NO: 29914 - DNA, 201 bp, Homo sapiens
tgtataagtgcacatatcttttctattgcgaatgatatatttatattgtggtatttctagctggttattatataaacaaaaatgacatttcatttaaaaaatttagttaccaactatcttactaaaatataatctttatttagtatttttaatatcctttctaaatgaccactttaatcaccatattataaactgatggaa

SEQ ID NO: 29915 - DNA, 201 bp, Homo sapiens
ttggattcagctgttcttcagcccacccgttcatcctgatttggggaaacaagaagctaaagcagacttatctttcagttttgtggcaaatgaggtactgrgtgaaaggagagaagccttcatctccatagattcagaagaggggcattgtgtgtcttctagcagaaaacaaactggtggtgtatgaaacattttatattt

SEQ ID NO: 29916 - DNA, 201 bp, Homo sapiens
tccccacacctgatttatgtaattttttaatcatatatcttcctcagtacaatgtaagaactgtaaagaaagagatcatgtctgtcttgctttctgttgaytcccaggacctagaacccagcaccaagaatagatggccaaaaatgatactttaatgaacaaataaatgggtggctaaaatggataagttgatgtggtaaa

SEQ ID NO: 29917 - DNA, 201 bp, Homo sapiens
caagctattggattcagctgttcttcagcccacccgttcatcctgatttggggaaacaagaagctaaagcagacttatctttcagttttgtggcaaatgasgtactgagtgaaaggagagaagccttcatctccatagattcagaagaggggcattgtgtgtcttctagcagaaaacaaactggtggtgtatgaaacattt

SEQ ID NO: 29918 - DNA, 201 bp, Homo sapiens; identical to SEQ ID NO: 5660

SEQ ID NO: 29919 - DNA, 201 bp, Homo sapiens
accttaagataaatcatccccacacctgatttatgtaattttttaatcatatatcttcctcagtacaatgtaagaactgtaaagaaagagatcatgtctgwcttgctttctgttgattcccaggacctagaacccagcaccaagaatagatggccaaaaatgatactttaatgaacaaataaatgggtggctaaaatggat

SEQ ID NO: 29920 - DNA, 201 bp, Homo sapiens
gttgtcagtgatgaaagtgttttgacatattcattaacaggaagttctattataagaaagaaatgtacagtcttgttcacagctaaattctatatgactayattaattcttggtgttatgaagttttaacaatgttatttaatgttatttaaaccttaagataaatcatccccacacctgatttatgtaattttttaatca

SEQ ID NO: 29921 - DNA, 201 bp, Homo sapiens
atttgagctgttttgaaaataagaatgttttccataaagatgacatcaaactcatccattagcataagctggtactttcttgtttgacactggtcacagtrtttaaaagtaaaaagaatgttactgcacattcagaaatcagatgcacataaaatttaaggtcagagtattaaagaaatcacaaccagtgatattaggctt

SEQ ID NO: 29922 - DNA, 201 bp, Homo sapiens
tttcacttcaacttcattatgaataattcaagcccatcacaagaacggacattgaatgaatgagttaatttgagctgttttgaaaataagaatgttttccrtaaagatgacatcaaactcatccattagcataagctggtactttcttgtttgacactggtcacagtatttaaaagtaaaaagaatgttactgcacattca

SEQ ID NO: 29923 - DNA, 201 bp, Homo sapiens
attttctgttcatcaaagaaagttgtgtgagtgagctccgagtccaggggacagataatcaccctgcttatggtgggaggatactgcaaaattatgtgtcrtagggtgtggtactcaggaatatttacaaaattgttgaacattttaattaaataataaatacttaaacattaaatagacttgagagtaagtttaccaaat

SEQ ID NO: 29924 - DNA, 201 bp, Homo sapiens
atatggaagccatctcaaacctcggtgtgaaatctaccaattttctgttcatcaaagaaagttgtgtgagtgagctccgagtccaggggacagataatcamcctgcttatggtgggaggatactgcaaaattatgtgtcgtagggtgtggtactcaggaatatttacaaaattgttgaacattttaattaaataataaata

SEQ ID NO: 29925 - DNA, 201 bp, Homo sapiens
gctcagatccccagtggaaaggtgagtcacagagggaggctctctgcctctctcacctactggagcttcattcacttttttaactgggtgccatcatgggkgctgtttgcccatgttcccctccctgggatctgtgtgtccttatgattctggtagattcccactttccttcttgaaataaagctcacagagttaaccttt

SEQ ID NO: 29926 - DNA, 201 bp, Homo sapiens
gaatcatgtcttcagtgtgtttcaaaaccaaagcggactttaacaaatagaaattcaaaagaatattttttagataaaaggaaaattactaaaaatataamgctgaacatgcatgaaggaataataaataatagaagtggtaaatatgtgcataagtctaaataaattttgactgtataaagtggtggtgtctttttgggt

SEQ ID NO: 29927 - DNA, 201 bp, Homo sapiens
tgtaaaaagaaacaactgtctaaatgacaatcttattttcaacagacaaaattgaagctagaattcaatggaatcatgtcttcagtgtgtttcaaaaccawagcggactttaacaaatagaaattcaaaagaatattttttagataaaaggaaaattactaaaaatataaagctgaacatgcatgaaggaataataaataa

SEQ ID NO: 29928 - DNA, 201 bp, Homo sapiens
agccattaaaatttagatgagataactaaaaccaattaaaaacaaatgccacaggatatcaaagaccaatcgaaaatctgaaaagtaggtagaggaaaaastttatgtaaaaagaaacaactgtctaaatgacaatcttattttcaacagacaaaattgaagctagaattcaatggaatcatgtcttcagtgtgtttcaaa

SEQ ID NO: 29929 - DNA, 201 bp, Homo sapiens
cacattctctattctatttcgctgctctatgtgtctgtttttatgccagtaccatgctgttttggttactatagctctgtaatatactttgaagtcaggtratgtgattcctccagttttgttctttttgctcaggataactttggctattctgagacatccgtatattttcagaagccattaaaatttagatgagataac

SEQ ID NO: 29930 - DNA, 201 bp, Homo sapiens
caccatttagtgaagagactgtcctttccccagagtatgttcttggcacctttgtcatgagttctctataggtgtggatttgtttccacattctctattcyatttcgctgctctatgtgtctgtttttatgccagtaccatgctgttttggttactatagctctgtaatatactttgaagtcaggtgatgtgattcctcca

SEQ ID NO: 29931 - DNA, 201 bp, Homo sapiens
ttttgctagacacctttttttcttatttccaatttagatatttatgatcacaacatttcaaagtggcagaaattagtgaatttccaatatatagtaatatmgatattaaatatacaggacaattttctaaatttatccctaaatgaaataataatacacatatttttaccattcaaagattataataccatgcatgtgtac

SEQ ID NO: 29932 - DNA, 201 bp, Homo sapiens
gtgctgttgatgccaatatttaattcttcagctcagaagtcaatcctggtctctagaatcctttctctaagaagtcatttgacatcttcatttggatgtcktaacaagaacttgaactaacatgtccaaatcaaaatagtgatcttccctctagtctccagcgttgtttcttctatagcctttccctcttctgttaatgac

SEQ ID NO: 29933 - DNA, 201 bp, Homo sapiens
gttaaaatagtatctatgaaatctatgtattaattatgggatgtgccttaccattgtaattttgttgtcagtgatgaaagtgttttgacatattcattaayaggaagttctattataagaaagaaatgtacagtcttgttcacagctaaattctatatgactacattaattcttggtgttatgaagttttaacaatgttat

SEQ ID NO: 29934 - DNA, 201 bp, Homo sapiens; identical to SEQ ID NO: 5658

SEQ ID NO: 29935 - DNA, 201 bp, Homo sapiens
ttaagctggtgcttttctgttgacattgttcacagaatttaaaagtataaagaatgttattgaacattcaggaatcaagtgcatatttaatttaaagtcttgaatatcagaggagtcaccatcagtgacattaggcctgaattttttacttgcttttttgtttagacatgatgagttttctacacattgttttttccattc

SEQ ID NO: 29936 - DNA, 201 bp, Homo sapiens
aaagcctaagcatgagagatatgtttcatgaatattattcattggctgaaaatctggcatgggaaaaataggactaattccaccaggacgagctcctggawactcattttccatgtcataagttacaagaaagcaattcctttcatccttgaagagtgaaagtgtgtgtgtgtctgtgtgtgtgtttatgagcttgttaat

SEQ ID NO: 29937 - DNA, 201 bp, Homo sapiens
tttttactcccacttcttaggtaagttcatctagtcataaccttagttactttctgtgtgctgttgatgccaatatttaattcttcagctcagaagtcaaycctggtctctagaatcctttctctaagaagtcatttgacatcttcatttggatgtcgtaacaagaacttgaactaacatgtccaaatcaaaatagtgatc

SEQ ID NO: 29938 - DNA, 201 bp, Homo sapiens
atgatataagtaaggaaatatacagatagaataatgattgattaacccattttgacttattgtacttggtacagttaatgtcttagtatctcagtaatctstttttatatttttctctatgatcaattaattatgagttaatttttatatatggtatgaaataatggtctacactcatgtttttatcattctgtttttact

SEQ ID NO: 29939 - DNA, 201 bp, Homo sapiens
ttatatacatatagttacatatatcaaattatgtaaccctttttttcaaatgtcaaagttacatttaaaagtcacaatactaaaaatctatggagaaggtyggagcatcaataatgtttttacttgaatttctgctaaatcagagtgatggtgaccagatagctaattaagttttatttaaaatagccatgtagattgata

SEQ ID NO: 29940 - DNA, 201 bp, Homo sapiens
aaccatgcacaaaaagtgaaaaattacacaagacctactcaaggtctgaaatggaaagtgcagctggtgattctgagtagtatattttatgaattgatgarcagggaatttctaggtatcacagagcaatcagcagctgaggagagagcgacaaaaccaggactctgacagggctttttggaaacttaatttttggagcaa

SEQ ID NO: 29941 - DNA, 201 bp, Homo sapiens
atgttatttatttatatacatatagttacatatatcaaattatgtaaccctttttttcaaatgtcaaagttacatttaaaagtcacaatactaaaaatctrtggagaaggtcggagcatcaataatgtttttacttgaatttctgctaaatcagagtgatggtgaccagatagctaattaagttttatttaaaatagccat

SEQ ID NO: 29942 - DNA, 201 bp, Homo sapiens
aggctgattattcatatatgttatttatttatatacatatagttacatatatcaaattatgtaaccctttttttcaaatgtcaaagttacatttaaaagtmacaatactaaaaatctatggagaaggtcggagcatcaataatgtttttacttgaatttctgctaaatcagagtgatggtgaccagatagctaattaagtt

SEQ ID NO: 29943 - DNA, 201 bp, Homo sapiens
ttacagataatgtagccacatggttcaatagagaggaataaggctgattattcatatatgttatttatttatatacatatagttacatatatcaaattatrtaaccctttttttcaaatgtcaaagttacatttaaaagtcacaatactaaaaatctatggagaaggtcggagcatcaataatgtttttacttgaatttct

SEQ ID NO: 29944 - DNA, 201 bp, Homo sapiens
ctttcaaaaactcatactccaggactggtgaggtggctcacacctgtaatccaaacaatttgggaggctgaggtgggaggagcacttgaggccaggagttscagatcagcctgggcaagacagcaagaccctgtttgttaaagaaaataaactgattgtagtactgcgtgcctgtagttccaactacccaggaagttctgg

SEQ ID NO: 29945 - DNA, 201 bp, Homo sapiens
ctggaagagataataaatataaacccattacatccaccttaggttgaacatgagccaaagctttatgcagcatctgactttcaaaaactcatactccaggmctggtgaggtggctcacacctgtaatccaaacaatttgggaggctgaggtgggaggagcacttgaggccaggagttccagatcagcctgggcaagacagc

SEQ ID NO: 29946 - DNA, 201 bp, Homo sapiens
gcggttagtatgttttactcattttcttgccagaagaggagaattaccgaggactctttttggtcctacttacagtaatgtcccttaatatacaggtctgraagcaatgtgagagttctgctagctgttgaaactgttaatttcatttaacattctggaagagataataaatataaacccattacatccaccttaggttga

SEQ ID NO: 29947 - DNA, 201 bp, Homo sapiens
gttttattccattatgaattcctattttatgtttagtaaaaagcaatcagaattattgttacaaaacaatgaacacaataaaatttgagtgacaagtataygtagagtaaatttcatgtatgtgtaccataaacagtactgaggaatattagatttaatacaagtatgtgaatagcttagaaaaaaatctctgctataaga

SEQ ID NO: 29948 - DNA, 201 bp, Homo sapiens
ctggaacttttgagttttttgtcatgtcggtgaccaattctattccttggacaatgcggttagtatgttttactcattttcttgccagaagaggagaattwccgaggactctttttggtcctacttacagtaatgtcccttaatatacaggtctggaagcaatgtgagagttctgctagctgttgaaactgttaatttcat

SEQ ID NO: 29949 - DNA, 201 bp, Homo sapiens
atttctatgcaaagtgtattaattttttgttcatcaaagtaagttaaatgattgaacttcaagttcaggggaaaggtagtcagtcttcgtgtgatgggagkatactgcaagattatatatcaaagggtctggtactcaggaatacttataaaattgctgaacattttaattaaataataaatatttaaatattagacttga

SEQ ID NO: 29950 - DNA, 201 bp, Homo sapiens
tggtattatgagtattttatttatccatagaaataacttacagaaatagagtgaaagtttctttctaccaccaaaataatgactgaaaaaattaatattamgaattcaatatttaacaatcaattagatttaacaatcagttagaaatggtagaataaagaattagtgaattggaagataactacacagagtgaagcataa

SEQ ID NO: 29951 - DNA, 201 bp, Homo sapiens
taatgccaaactagaaaaaaagtacgtttccttttggacactgatcagtactcaaccctttggtttgctatctgcctgataatttttggaggtgggggtgsttcacaatagctaatttttctcagccatttttcctttggataaagtgtagaattaattatgtgaatattatgattctgatggagtccttggtttattaac

SEQ ID NO: 29952 - DNA, 201 bp, Homo sapiens
gaagaaaattgttagcattttcatgtcaagcatacgaaaaacaaaaaaacaaagccaaccaactgaacaaagaacccaactttttttaaaaaacttggtgrtaagagtgctttgttctgcttctccatagataatgatttatagaaggagaacaaaatataatttctgctactaaaacaataatagcaaaaaataaataat

SEQ ID NO: 29953 - DNA, 201 bp, Homo sapiens
aaacaagaagctaaagcagacttatctttcagttttgtggcaaatgaggtactgagtgaaaggagagaagccttcatctccatagattcagaagaggggcrttgtgtgtcttctagcagaaaacaaactggtggtgtatgaaacattttatatttcttacagtgttttctgtaatgtatgtgtatgaataatttccaaaca

SEQ ID NO: 29954 - DNA, 201 bp, Homo sapiens; identical to SEQ ID NO: 4923

SEQ ID NO: 29955 - DNA, 201 bp, Homo sapiens
aagttttcactggcaccttctaaatatctagtaacacaggatcaaatcagtaactaaccatctttgttttttcctgtcccagacaggtaaaatggaaagcagttatacaaatgctatactaactcctcacaaagactacccaaagataatattatcatctgtgttttttggtgatcatactgaggcagagagcagttgtga

SEQ ID NO: 29956 - DNA, 201 bp, Homo sapiens
gaagttttcactggcaccttctaaatatctagtaacacaggatcaaatcagtaactaaccatctttgttttttcctgtcccagacaggtaaaatggaaagcagttatacaaatgctatactaactcctcacaaagactacccaaagataatattatcatctgtgttttttggtgatcatactgaggcagagagcagttgtg

SEQ ID NO: 29957 - DNA, 201 bp, Homo sapiens
tgtccaggagttcaagactacggcgaggtatgattgtgccactgcactccagcttgggtgagagagcaagagcctgtctcagaaaaaaaaaaaaaaaaaaagaaaaggagaaaagaaatggaagttttcactggcaccttctaaatatctagtaacacaggatcaaatcagtaactaaccatctttgttttttcctgtccc

SEQ ID NO: 29958 - DNA, 201 bp, Homo sapiens
gtgtccaggagttcaagactacggcgaggtatgattgtgccactgcactccagcttgggtgagagagcaagagcctgtctcagaaaaaaaaaaaaaaaaaaagaaaaggagaaaagaaatggaagttttcactggcaccttctaaatatctagtaacacaggatcaaatcagtaactaaccatctttgttttttcctgtcc

SEQ ID NO: 29959 - DNA, 201 bp, Homo sapiens
ttgagcccaattattggagaccaacctgggaaacatggtgaaacccagtctctagtaaaaatacaacaattagccaggtatagtggtgtccacctgtagtyctagctacttgggaggccaaggtgggaaacagattgaggctgggagctatagattgcagttagccaatctcaaaccactgcactccagtttaggctccag

SEQ ID NO: 29960 - DNA, 201 bp, Homo sapiens
atatttttccttcaaatgtcaaatgtacattttgaagtaacagtaccagggtggatgctgtggcttaagcctgtaattgagcaccttgggaggcttaggcrggcagatttcttgagcccaattattggagaccaacctgggaaacatggtgaaacccagtctctagtaaaaatacaacaattagccaggtatagtggtgtc

SEQ ID NO: 29961 - DNA, 201 bp, Homo sapiens
aaactgaaaacagaagtgacatagccatgacataaaacagtgaagcagtgcttttgttcttacctcaccaaaacaaatcattttgattttctctcccaatsgatgtagattaaaaagcattcaccaaatcaaacgcctcatacaaagaaccagaaaccatgttttctcagtgaaggtaccacatcctagagagcatctgca

SEQ ID NO: 29962 - DNA, 201 bp, Homo sapiens
gtaaatatttttccttcaaatgtcaaatgtacattttgaagtaacagtaccagggtggatgctgtggcttaagcctgtaattgagcaccttgggaggcttrggcaggcagatttcttgagcccaattattggagaccaacctgggaaacatggtgaaacccagtctctagtaaaaatacaacaattagccaggtatagtgg

SEQ ID NO: 29963 - DNA, 201 bp, Homo sapiens
tcttcccttagggtcttgtgttccttttcccatgattcagccccttagggtgggctgctcacatgtgtggtggcctgctaacactttggaggtgagcatgygcagtgtgtttactggagttgtacacatgcttgcatgaggcattcttcccttttttggtggaatgcccccagaaggttgttttctaccgttttctctctt

SEQ ID NO: 29964 - DNA, 201 bp, Homo sapiens
gtgccattcagatgtgctcatgccctccaatcatggctgactatgagcatataatttccactgttgcacagggtcttgtgcttagagacgcacacgcttaraagggctttatacatgggttaattttctgcacctgctgttttgtttttgagacagagggcactcctctgctaaagagggaatggtcttgcactaattggc

SEQ ID NO: 29965 - DNA, 201 bp, Homo sapiens
tacaggtcaggaagaaagtgagagtcctgccagctgccatgtgtgtccattacacattcaagaagaggcaataacggcaaactgattagatccaccttggkatggacatgagtcaaaactctaggtagcatctgaccttcaaaactccctctgcaggctgggtatgatggctcatgcccgcagtccccgcacttttggagg

SEQ ID NO: 29966 - DNA, 201 bp, Homo sapiens
ttaaaaattgagtttgtaaccagtcacctttcttacacattatttgtatatttttttagtatcctttctaaatgaatgttttaattgccatgttataaacrcatggaaaagtgatgcaactgaatgtatatcttagcttttggtgtctaaaactagagccaatgtctgagtttacagtgatgacatttatttgggaaggca

SEQ ID NO: 29967 - DNA, 201 bp, Homo sapiens
catttctgttctggtttcagattgaagttacaggattatccaagaagaagaagaatttctcagagcaaaagtttggctattccacaattctaggggaaatrtcactataatatagcagtgatgcagctatatcagatgtgtgacacaaagacaaagtggaaaataaaaagatggcatttattacaatactttttactaagc

SEQ ID NO: 29968 - DNA, 201 bp, Homo sapiens
ctccacatctgatttgtttgtttatcatatatcttacctggtacaatgtaaataccataaaagtagagatcatatagatcttgcttactgtagactcccargacataaagatagcacatagaataggtattgaaaaatgatactttgatgaacaagttaattggtgaatgaatgaatatgaactatattggggtggtgaac

SEQ ID NO: 29969 - DNA, 201 bp, Homo sapiens
aaattttccttactttaaaaagaagctcaatctaaagagggtatagaaactatggcatctatgaaatctatatattaatgataggaaatgtcttaaagatrtgttttattataatcttggtgtaaataatgaaatgagagaaagtgtgttgacatattcactaatagcaagttctattacaagaagaaaatgtataaccta

SEQ ID NO: 29970 - DNA, 201 bp, Homo sapiens; identical to SEQ ID NO: 5655

SEQ ID NO: 29971 - DNA, 201 bp, Homo sapiens
ccagccttacaaaatgttgggattatgggtgtgagccaccctgcctggccaataaagagacttattgaaaatattaagttgaatatgcaagaaggaatacraattaatgaaagtggtaaatatgtgcataattgtaaatgaatgtttactgtataaaataataatgtcttgagggtgattatataattgataagacatatg

SEQ ID NO: 29972 - DNA, 201 bp, Homo sapiens; identical to SEQ ID NO: 5656

SEQ ID NO: 29973 - DNA, 201 bp, Homo sapiens
tggctgaaaatctggcatgggaaaaataggactaattccaccaggacgagctcctggaaactcattttccatgtcataagttacaagaaagcaattccttycatccttgaagagtgaaagtgtgtgtgtgtctgtgtgtgtgtttatgagcttgttaatagtgatgccatatagaagtattggttaacagcaaccaaatta

SEQ ID NO: 29974 - DNA, 201 bp, Homo sapiens
atgccagtaacatgctgttttggttactacagcctctgtagtataatatgaagtcaggtaacatgattcctccacttttgttcttttttcttaggatactyttggctattctgggtcagttgtggctccatataaattttaggattgttttctctatgtctgtgaagaatgtttttagtattttgataggaattacattga

SEQ ID NO: 29975 - DNA, 201 bp, Homo sapiens
atgccaaaatgtgtctctaaatgaaatatgtatattcatattgttagcattctaatttcacaatactattcatgtgtacacctgcattttgggttaaataytttgttactatatattttttggttctgcattagagaagaaaaatcataggcaaatttgttaaggtgtaaaacatatttagtatgatctttgagtatgttt

SEQ ID NO: 29976 - DNA, 201 bp, Homo sapiens
gtcattttaaaatgtacaactgaattatcattgattatagtcaccctgctgtgctatcaaatagtaggtcttattaattctttctatttttttttttttttggtaaccattaaccagccactccttccctttagcctccactacctttcccagcctttgtttagcatccatgtactctctatgtccatgccttctgtgcaa

SEQ ID NO: 29977 - DNA, 201 bp, Homo sapiens
ttggtattttaacattatgtggacatattaatttaccttatcagtaaacagatataggaagtttaggaatttctttttttaaaatgtatttttaagtttcrtggatacatactaggtgcatacatttattgggtacatgagatgtgttgatacaggcatgcaatgtcacataatgaagaatggggtagccatcccctcaaa

SEQ ID NO: 29978 - DNA, 201 bp, Homo sapiens
cactaatcaaagtaattctctttcaaggagaaaactggaagttatgtaattgaggactattaaaaataactattttggcagatgtgcaaaattctcaagcrcatatattacaactttctatagtcatatacatcctttttacacttgcttgaattggtctacaaaacccccatgtttcatagtgtaatccaaacaaatagc

SEQ ID NO: 29979 - DNA, 201 bp, Homo sapiens
tccattctggtttctaccttggttctaactcctacttttattaattacactaatcaaagtaattctctttcaaggagaaaactggaagttatgtaattgargactattaaaaataactattttggcagatgtgcaaaattctcaagcacatatattacaactttctatagtcatatacatcctttttacacttgcttgaat

SEQ ID NO: 29980 - DNA, 201 bp, Homo sapiens
aatatacatacaacatttttttcttacactaaagatcaaataaaacccataggaccaagcctcccacagatactttttataaattctggataaaatatttwaaaaaacagccattcattggcaatggagaatgaacaaaataggcagatactagagagaggtcagcacttggaagaagggaatagcaaggagtgagtttcc

SEQ ID NO: 29981 - DNA, 201 bp, Homo sapiens
tgtaaaatgcaccaatcagtgctctgtaaaaggcaccaatcagcactctttaggtagcatggggattataaaatgcaccaatcagcactctttaggtagcrtgggaattataaaatgcaccagtcaacactctgtaaaaatgcaccaatcagcactctagctagccagaggattgtaaaatgcaccaatcagctctctgta

SEQ ID NO: 29982 - DNA, 201 bp, Homo sapiens
tgtagctagggttgaggtgctataatttatttattggaatggcatcttgagatccagcacagctcattgaatttccctgtggggagagtttgtggtgaagrctcatcaacagacaagctgctatccccacccaaaaaaaaaaactactaacatcacatcaatttccaggttcttccaacttgcggaaggatgtgtagacca

SEQ ID NO: 29983 - DNA, 201 bp, Homo sapiens
actgtgttgcacaggctggtcttgaactcctgggtgctcctgccccagccttacaaaatgttgggattatgggtgtgagctaccctgcctggccaataaakggtcttattgaaaatattaagttgaatatgcaagaaggaatacaaattaatgaaagtggtaaatatgtgcataattctaaatgaatgtttagaaaataat

SEQ ID NO: 29984 - DNA, 201 bp, Homo sapiens
tattatgtagaacttaaaataagttaactccacatcatatatatatctatgtatctatatctatatctatagacatatatatatatatatatatatctctygcttatcatacgtcctccctagtacaatgtaatcaccataaaaagagaggtcatatctgtctcgctttctcttgactcacaggacctaaaagccagcaca

SEQ ID NO: 29985 - DNA, 201 bp, Homo sapiens
aacattattatgtagaacttaaaataagttaactccacatcatatatatatctatgtatctatatctatatctatagacatatatatatatatatatatawctcttgcttatcatacgtcctccctagtacaatgtaatcaccataaaaagagaggtcatatctgtctcgctttctcttgactcacaggacctaaaagcca

SEQ ID NO: 29986 - DNA, 201 bp, Homo sapiens
ataatttttttatctgtagttagaaaagtcattgcttccactttttgaattaaaggaaaccttttgtgaagttgacatctgatgtcaagtatttccatttrtttttcttagccaccttgagcccctgaatttccaattttctcctttgtctcccattcctaatattcctcaaaaaaactcaaatattctctatcttaaaaa

SEQ ID NO: 29987 - DNA, 201 bp, Homo sapiens
tcattatgaattcttattttatgcttagtagaaagcaaatagaattgttgttagttaatgatgcacacaataaaattggagtgaaaaacatatgtagagtaaattttgtatatgtataccaaaacagtactaaagaatactagatttaataccagtatgtgaatagcctagaataaaaatcatttctataataggaatgaa

SEQ ID NO: 29988 - DNA, 201 bp, Homo sapiens
ttcattatgaattcttattttatgcttagtagaaagcaaatagaattgttgttagttaatgatgcacacaataaaattggagtgaaaaacatatgtagagtaaattttgtatatgtataccaaaacagtactaaagaatactagatttaataccagtatgtgaatagcctagaataaaaatcatttctataataggaatga

SEQ ID NO: 29989 - DNA, 201 bp, Homo sapiens
tttcattatgaattcttattttatgcttagtagaaagcaaatagaattgttgttagttaatgatgcacacaataaaattggagtgaaaaacatatgtagagtaaattttgtatatgtataccaaaacagtactaaagaatactagatttaataccagtatgtgaatagcctagaataaaaatcatttctataataggaatg

SEQ ID NO: 29990 - DNA, 201 bp, Homo sapiens
tataattttatttaaaaaattacaaattgggagaaatgtcacgtaaaaattattaattgctctgctcattatatacctagggggaaaatccaccatttacrtacattcttatacaactcaagagagctaaagtgaattcttattttagttgcaaaatggagaaatttgagatgctgttacctacagcctccagatctttcc

SEQ ID NO: 29991 - DNA, 201 bp, Homo sapiens
atttcattatgaattcttattttatgcttagtagaaagcaaatagaattgttgttagttaatgatgcacacaataaaattggagtgaaaaacatatgtagagtaaattttgtatatgtataccaaaacagtactaaagaatactagatttaataccagtatgtgaatagcctagaataaaaatcatttctataataggaat

SEQ ID NO: 29992 - DNA, 201 bp, Homo sapiens
attgcttatctcaggagatgtgaataaaggtttaggggcttggaaagtggcctggaagtggacctagtctgtttgcagtgttccatgtcttatcctgcatratggttacataagtgtttatgatacattgctcttacctatttttgttttggcccatttctaagtgtgcattataattttatttaaaaaattacaaattgg

SEQ ID NO: 29993 - DNA, 201 bp, Homo sapiens
tatttcattatgaattcttattttatgcttagtagaaagcaaatagaattgttgttagttaatgatgcacacaataaaattggagtgaaaaacatatgtagagtaaattttgtatatgtataccaaaacagtactaaagaatactagatttaataccagtatgtgaatagcctagaataaaaatcatttctataataggaa

SEQ ID NO: 29994 - DNA, 201 bp, Homo sapiens; identical to SEQ ID NO: 5650

SEQ ID NO: 29995 - DNA, 201 bp, Homo sapiens
agtgcaagaagccatgaacaagaagaacacacaggactgcacctatacacagttcaaagcaggacagaccaagctgtggagtttagggttgtgaacctagytggtaaagtataaagaaattcaagcaaatgatcatcatagattatgaatattgcttatctcaggagatgtgaataaaggtttaggggcttggaaagtggc

SEQ ID NO: 29996 - DNA, 201 bp, Homo sapiens
tccaggggactgaatggttctgtcttgctggcattccaggcaccactggggtatgacaaaaaacttctgcagctagcttggtgtctgcccaaatgatcgcycagttttatgcttgagacccatggccctggtggcataaacactggaggaaatctcctggtttgtgggttacgaagaccatggggaaagtgtagtatctgg

SEQ ID NO: 29997 - DNA, 201 bp, Homo sapiens
gccatatactgtaaaaaagattgtttcaacgtgtggtctagggacactgaatgctttaaaacatcacctatgctgtaggtccctgaatcttctcaggttgrtttcttttcttctggtattttacttccattcatcgttagagtattttactatagttaagaaacttgccacttcctgattattgtaccaagtaatatatta

SEQ ID NO: 29998 - DNA, 201 bp, Homo sapiens
atgggaggaggcaaggaggtgtccagtcctttgtgcatctatcccctggcattctcccatcctgccccaagtcatcagcccacacaggttgctggcacatytaaagtgagaattttaggactaaataaatcaaatagaagtaagccctcacatcttctatatctcacctgatagtgaagaagtttgaaggtacagagctcc

SEQ ID NO: 29999 - DNA, 201 bp, Homo sapiens
cattggtggcaaaactgtaaagcgaaacatataagtgattatcataactgggatacttgggagggaggaaacaaaagggaaatcatatcaacaagaaagcmtatatggggaatgtcttcattgctggcaaattctactttttgacgaaagtgtggaatatgagtgttaatgttacattcttttttccttttactgtgcatt

SEQ ID NO: 30000 - DNA, 201 bp, Homo sapiens
atacactgctcctaggattataaatcagtgcaattactttgtctgagtgtgacattatttgaataagatgaaggatcacatcctaagacccaggatttgcwctcatatcagaatacatatacaagtatatatcgctgagttttaatagctaaagttgagaagtctcccaaatgaccatcagtaataaaatggataaataaa

SEQ ID NO: 30001 - DNA, 201 bp, Homo sapiens
gcttaagcacgagagataagtttataaatattgaaaattgactgaaaagggtgagagggaaaatagggctatttcaacctggacgacttgcctgaaattgrttttccattttggaaattacagcacaataattcctcccatccatgaggggcgtgtatgcatgtgtgtgtttgtgttaatgagcttgttaacaatagactt

SEQ ID NO: 30002 - DNA, 201 bp, Homo sapiens
cccaaggaatattttaaaaattgctgaatattttaattaaacaattcatatttaaatattagctagattcgagagaataacttattcaaaagcttaagcaygagagataagtttataaatattgaaaattgactgaaaagggtgagagggaaaatagggctatttcaacctggacgacttgcctgaaattggttttccatt

SEQ ID NO: 30003 - DNA, 201 bp, Homo sapiens; identical to SEQ ID NO: 5686

SEQ ID NO: 30004 - DNA, 201 bp, Homo sapiens
ctcctcacaaagactacccaaagataatattatcatctgtgttttttggtgatcatactgaggcagagagcagttgtgaaatggagtctcagaatcgtcgstatatgaagcagaaaaactggtttcctctcttggcagtctgactccaagatctcttagaaacaattatactgtaaaaacctgaaaaagaagtaaaaaaca

SEQ ID NO: 30005 - DNA, 201 bp, Homo sapiens
aaatttgatcatgccattcttcagctttagatttttcagtggcttctcatctcattagagtaaggccaaaatccttacaaagtcctataatcatttgaatratcggattttgtctgcctgtctgtcctaaaatgcctggctatcccatgctagcaacactggactttgtgtaatttcttgaatgtaccaagaattgcctca

SEQ ID NO: 30006 - DNA, 201 bp, Homo sapiens
aaatgctgaatacaaattatggagaggttaaacaaggaaaaacattgcaaaacaatgaaaaagaatatgtctttttttgcatactagcaaacgggaattcrcctttcacttcaacatcagttttaaaaatttcagcgtatagcaagaacagacagtggaataggattcaatttcagctattttgggaataagaaaattttc

SEQ ID NO: 30007 - DNA, 201 bp, Homo sapiens
tgatatgtgtattgggttttaaaatttccctatgtaacaactgacgatgctggacacaaattatggagaggttagcaaggacaacaattgcaaaacaattwaaaaaatgcctttatttgcatactaacacatgagaatttacttttcacttcatcctcaatataaaatatttcagcatatagtaagacagacagtgtatga

SEQ ID NO: 30008 - DNA, 201 bp, Homo sapiens
aatattagagaagaattagtagaaagataattttgttgaggcataaagcatatttagtgtaactactttgactgctgtaataaaatcacccagattttgtsacagtagctgagattaaaaataaacagtagagagaatttcacttgttaataatgctattaaaagatgaagcttatacactttataattgcacagagtatt

SEQ ID NO: 30009 - DNA, 201 bp, Homo sapiens; identical to SEQ ID NO: 5590

SEQ ID NO: 30010 - DNA, 201 bp, Homo sapiens
ataaattatagtaatatagatattaaatacacaggacaatttttataaatttatctctaaatgaaataattatgcccatttttaccattcaaagattataycatgcatgtgtacacatatgtgaggaaaaatattttgatagtacaaagtttttgaatattagagaagaattagtagaaagataattttgttgaggcataa

SEQ ID NO: 30011 - DNA, 201 bp, Homo sapiens
gttcataataaaagagcacttaaaactttaaaaaatattagaaaaacgaataaaggaaaatgaatacatatataaaatatataattcattattaataaatrtgcataaaatcacactcatagaatttaaaaagagtaacaatttttgaattaaggatacattctaaattataatagaaaaaggcttataaaatgttagttt

SEQ ID NO: 30012 - DNA, 201 bp, Homo sapiens
gccttacagtatgctgttaactaatcatattttctcaaagtcatttggcataatatttggttaaaagaagtatgtctagtataattacatgtgttcataayaaaagagcacttaaaactttaaaaaatattagaaaaacgaataaaggaaaatgaatacatatataaaatatataattcattattaataaatgtgcataaa

SEQ ID NO: 30013 - DNA, 201 bp, Homo sapiens
tgtgttaatgagcttgttaacaataagttatacaaaattattagttggcagcaacgagatttttaggaatattggccttcctgggcttcccaagaaaacgytggatgcttttggtaggaaaagttaggactcactaaatctggcacagaaaaggtgaatcaacagtggtcgtgattctagttttgaccgagctgcatataa

SEQ ID NO: 30014 - DNA, 201 bp, Homo sapiens
ataacttctcataaaagaaattttattttaagtttttataattcttataatttgaaataaattcttataatttattacattggtggcaaaactgtaaagcraaacatataagtgattatcataactgggatacttgggagggaggaaacaaaagggaaatcatatcaacaagaaagcatatatggggaatgtcttcattgc

SEQ ID NO: 30015 - DNA, 201 bp, Homo sapiens
ggcttgtcagagacatgcacagagtcctataatgcccactatgcatgcctctagcagctttgaattccgctggatcatctggcacagtggccagagcagcytggaccagagcctatatcttctgtagagccctctttagttctgggctccatttgagaccagtagcctttagaaacatcgttcgtgagtcagagcaatatt

SEQ ID NO: 30016 - DNA, 201 bp, Homo sapiens
aataattctagcctgtaacaagaacaaacagtgaatgaatgagttaatttgagttgtttgaaaataagaatgttttccataaagagatcattgaactcatyagttaacacgccatggtgatttctggcttgacactggtcacaacgtttaaaagtaaaaagaatgacccagcagatttacaaattaggtgcatatagaatt

SEQ ID NO: 30017 - DNA, 201 bp, Homo sapiens
tggagaggttaaacaaggaaaaacattgcaaaacaatgaaaaagaatatgtctttttttgcatactagcaaacgggaattcacctttcacttcaacatcasttttaaaaatttcagcgtatagcaagaacagacagtggaataggattcaatttcagctattttgggaataagaaaattttccataaatgcagcattgaac

SEQ ID NO: 30018 - DNA, 201 bp, Homo sapiens
acacaaagaaaaattgcaaactctgaaagagagtacattcttatttgtgtactagcaaatgaggattcaggtttccagtcaatttcagtatgaataattcyagcctgtaacaagaacaaacagtgaatgaatgagttaatttgagttgtttgaaaataagaatgttttccataaagagatcattgaactcatcagttaaca

SEQ ID NO: 30019 - DNA, 201 bp, Homo sapiens
tatgtattgggttataaaacttcccaaacaactgaagttgctaaacacaaatgatggagaggttacacaaagaaaaattgcaaactctgaaagagagtacrttcttatttgtgtactagcaaatgaggattcaggtttccagtcaatttcagtatgaataattctagcctgtaacaagaacaaacagtgaatgaatgagtt

SEQ ID NO: 30020 - DNA, 201 bp, Homo sapiens
agagagcaacatgccatatactgtaaaaaagattgtttcaacgtgtggtctagggacactgaatgctttaaaacatcacctatgctgtaggtccctgaatsttctcaggttgatttcttttcttctggtattttacttccattcatcgttagagtattttactatagttaagaaacttgccacttcctgattattgtacca

SEQ ID NO: 30021 - DNA, 201 bp, Homo sapiens
gctgaagagagaatggtcttacactaattccatagggatttgctctcccctctccaacaggcttgtcagagacatgcacagagtcctataatgaccactaygtatgttctagcatctttgaatcctgctggatcatctggcacagtggccagagcagcttggagcagagtctatatcttctgtagagccctcatttgttct

SEQ ID NO: 30022 - DNA, 201 bp, Homo sapiens
attaatattctgcacttgctattttgtttgtcagacagaggatacttgtctgctgaagagagaatggtcttacactaattccatagggatttgctctcccstctccaacaggcttgtcagagacatgcacagagtcctataatgaccactatgtatgttctagcatctttgaatcctgctggatcatctggcacagtggcc

SEQ ID NO: 30023 - DNA, 201 bp, Homo sapiens
gattaatattctgcacttgctattttgtttgtcagacagaggatacttgtctgctgaagagagaatggtcttacactaattccatagggatttgctctccyctctccaacaggcttgtcagagacatgcacagagtcctataatgaccactatgtatgttctagcatctttgaatcctgctggatcatctggcacagtggc

SEQ ID NO: 30024 - DNA, 201 bp, Homo sapiens
acttgtgcttagagggactctatgcttggattaatattctgcacttgctattttgtttgtcagacagaggatacttgtctgctgaagagagaatggtcttrcactaattccatagggatttgctctcccctctccaacaggcttgtcagagacatgcacagagtcctataatgaccactatgtatgttctagcatctttga

SEQ ID NO: 30025 - DNA, 201 bp, Homo sapiens
aagagaataaaagattattctgaacactaaaacaataagactaaaaaaatgaaatatcagtactgagaatccaatagaaagagtcaaccagttagagcackagaagagataattagtgaattagaagatagctacacagaatgaagcatagagagaaagaaatggaaaatgcaaggctagagggtaacacactgatgctat

SEQ ID NO: 30026 - DNA, 201 bp, Homo sapiens
tagggacttgtgcttagagggactctatgcttggattaatattctgcacttgctattttgtttgtcagacagaggatacttgtctgctgaagagagaatgktcttacactaattccatagggatttgctctcccctctccaacaggcttgtcagagacatgcacagagtcctataatgaccactatgtatgttctagcatc

SEQ ID NO: 30027 - DNA, 201 bp, Homo sapiens
ctaagctgggtttgggtggatcactctggtaatatgagatgggccatgttctgcatcttgaagttagagtttggccaatttaggctacatctggagggggkgatctcattctcattctgcttctgggaatggtgtactagtgtggggatgtgcttgtggtaaatggagaagagcaagaaactccaatgtggaagccatctc

SEQ ID NO: 30028 - DNA, 201 bp, Homo sapiens
tgacgtccacagttgcatagggttttgtgcttatagggacttgtgcttagagggactctatgcttggattaatattctgcacttgctattttgtttgtcasacagaggatacttgtctgctgaagagagaatggtcttacactaattccatagggatttgctctcccctctccaacaggcttgtcagagacatgcacagag

SEQ ID NO: 30029 - DNA, 201 bp, Homo sapiens
ccaaaaatgatgaaatgtatatatttccatctctatatatttaggagccatcaaattttggacaagataactaaaaaatttaaaataaaatgacacaggayatcaaagaccaatagaaaatctgaaaagtagctagaggtgaaaggtagattatgttaaaaagagccacattctaaataacaaactgattttcaacagaaa

SEQ ID NO: 30030 - DNA, 201 bp, Homo sapiens
catatgacgtccacagttgcatagggttttgtgcttatagggacttgtgcttagagggactctatgcttggattaatattctgcacttgctattttgtttktcagacagaggatacttgtctgctgaagagagaatggtcttacactaattccatagggatttgctctcccctctccaacaggcttgtcagagacatgcac

SEQ ID NO: 30031 - DNA, 201 bp, Homo sapiens; identical to SEQ ID NO: 5584

SEQ ID NO: 30032 - DNA, 201 bp, Homo sapiens
ctttatgagcatatgacgtccacagttgcatagggttttgtgcttatagggacttgtgcttagagggactctatgcttggattaatattctgcacttgctrttttgtttgtcagacagaggatacttgtctgctgaagagagaatggtcttacactaattccatagggatttgctctcccctctccaacaggcttgtcaga

SEQ ID NO: 30033 - DNA, 201 bp, Homo sapiens
ccagagttgggaatagaagaaaattgttactattttcatggctagagtactaacaactccagaaaaatacaaggctggagggtaagagacactgacgctayggtcagaatatctaacatacttctggagttctggaggattagagatgagaaatggggcaaaagcaatgtttgggaaatttttccaaaaatgatgaaatgt

SEQ ID NO: 30034 - DNA, 201 bp, Homo sapiens
ccagtcatggctggctttatgagcatatgacgtccacagttgcatagggttttgtgcttatagggacttgtgcttagagggactctatgcttggattaatrttctgcacttgctattttgtttgtcagacagaggatacttgtctgctgaagagagaatggtcttacactaattccatagggatttgctctcccctctcca

SEQ ID NO: 30035 - DNA, 201 bp, Homo sapiens
attatctgaccagagttgggaatagaagaaaattgttactattttcatggctagagtactaacaactccagaaaaatacaaggctggagggtaagagacaytgacgctatggtcagaatatctaacatacttctggagttctggaggattagagatgagaaatggggcaaaagcaatgtttgggaaatttttccaaaaatg

SEQ ID NO: 30036 - DNA, 201 bp, Homo sapiens
tttattctattatctgaccagagttgggaatagaagaaaattgttactattttcatggctagagtactaacaactccagaaaaatacaaggctggagggtragagacactgacgctatggtcagaatatctaacatacttctggagttctggaggattagagatgagaaatggggcaaaagcaatgtttgggaaatttttc

SEQ ID NO: 30037 - DNA, 201 bp, Homo sapiens
aagctgcttattgaatttccatatgaggagagtttgtgtgaggacccagcaacagacaagctgttttccagaaaaagctactcacatcaaattaatatccrgtttctttaaaattgcaggaacatggctagaccaagcttttattctattatctgaccagagttgggaatagaagaaaattgttactattttcatggctag

SEQ ID NO: 30038 - DNA, 201 bp, Homo sapiens
atcttctctgtctcgcttgggtaatgatggagttcaaagtcacagagccccatttctacaacataaacaaagtaaaaattagttcataaaatagaatgatktagttgtggtttagggactattttttatttattggaattgcattttgagatccaaagctgcttattgaatttccatatgaggagagtttgtgtgaggacc

SEQ ID NO: 30039 - DNA, 201 bp, Homo sapiens
tagaaaggcaattaaactgtttcatgatcaagctcttattcctaaagagaggattttagattaaataaatcaaacagaagtaagccctcacatcttctctrtctcgcttgggtaatgatggagttcaaagtcacagagccccatttctacaacataaacaaagtaaaaattagttcataaaatagaatgatttagttgtgg

SEQ ID NO: 30040 - DNA, 201 bp, Homo sapiens
tcaagctgaatacatttagatttagaaattaagtgaagtttagtttaaaatgcattgcttaagcaagtaattgtagatgaccttaaactaatccattgaakgctataagaaagagtttgattttagtgtaaataaaattccttaattagaaaggcaattaaactgtttcatgatcaagctcttattcctaaagagaggatt

SEQ ID NO: 30041 - DNA, 201 bp, Homo sapiens
ttgtgttaatgagcttgttaacaataagttatacaaaattattagttggcagcaacgagatttttaggaatattggccttcctgggcttcccaagaaaacsttggatgcttttggtaggaaaagttaggactcactaaatctggcacagaaaaggtgaatcaacagtggtcgtgattctagttttgaccgagctgcatata

SEQ ID NO: 30042 - DNA, 201 bp, Homo sapiens
aagaaataatatccaatattgaagaccgatttttaacatctattcatcttaaaccattaaataataaaaaatacattagagaaaaataaaagtgaaaattyacatacagagaagtgtaggctcttcaatggaatacacatgttttttaagtgcccaaggaatatttacaaaattgctaaatattttaattaaacaattcat

SEQ ID NO: 30043 - DNA, 201 bp, Homo sapiens
ctcagatcatagctataccaagcagggaatctggtttcctgtcctggcagtctgactccaagatcccctcttagaaaccatcatactgtaaaaactgaaargaaataaaaatccaagattggagactgattttaacatctattcatctaaaccattaagtaatcaaaaatgaattaaatagaggaaaatacaactgactat

SEQ ID NO: 30044 - DNA, 201 bp, Homo sapiens
gtgcagtggtgtgatctcgactaactacaacctccacctcctgggttcaaatgattcttttgctgcagccatctgagtacctgggattacagacgggcacyaccacacctggctaatttttgcatttctagtggatatagagtttcaccatgttggccatgctggtcttgaagtcctaacctcaggtgatccacctgcctc

SEQ ID NO: 30045 - DNA, 201 bp, Homo sapiens
ggtgtgcagtggtgtgatctcgactaactacaacctccacctcctgggttcaaatgattcttttgctgcagccatctgagtacctgggattacagacgggyaccaccacacctggctaatttttgcatttctagtggatatagagtttcaccatgttggccatgctggtcttgaagtcctaacctcaggtgatccacctgc

SEQ ID NO: 30046 - DNA, 201 bp, Homo sapiens
tatacatgagccatgctggtgtgctgcacccattaactcgtcatttagcattaggtatatctcctaatgctatcccttccccttcccccgaccccacaacwgtccccagaatgtgatgttccccttcctgtgtccatgtgttctcattgttcaattcccacctatgagtgagaacatgcagtgtttggttttttgtccttg

SEQ ID NO: 30047 - DNA, 201 bp, Homo sapiens
agttacatatgtatacatgagccatgctggtgtgctgcacccattaactcgtcatttagcattaggtatatctcctaatgctatcccttccccttcccccraccccacaacagtccccagaatgtgatgttccccttcctgtgtccatgtgttctcattgttcaattcccacctatgagtgagaacatgcagtgtttggtt

SEQ ID NO: 30048 - DNA, 201 bp, Homo sapiens
tgttacaaacccaggagttcaaggctgtagtgagtaatgatcatgccactgtactagatacagcctgggtgacagattgaggctgtgtctctaaaaaaaayctaaggcaaataacacaaaaaacaaaagaacattaaaaagaaaatctcccattccatctcatggaacacgttgtctttggggtacctagatattagtgtt

SEQ ID NO: 30049 - DNA, 201 bp, Homo sapiens
atctattttttctttcggctcctcaattcctgacacaacaaagttgtacatatttcccacactcttggtttagcagagttcttttatcagttatgtttttmtgcaagagaagaccctctaaaacattagacatatatatctcacatgtctttggatttcatttgtgtgtgtgtgtgttttctgttttttgagatggagtct

SEQ ID NO: 30050 - DNA, 201 bp, Homo sapiens
ttgtgccactgaggcgtgctcataccctccagtcatggctggctttatgagcatatgacgtccacagttgcatagggttttgtgcttatagggacttgtgyttagagggactctatgcttggattaatattctgcacttgctattttgtttgtcagacagaggatacttgtctgctgaagagagaatggtcttacactaat

SEQ ID NO: 30051 - DNA, 201 bp, Homo sapiens
tatggatgaccttcaatgaatcctcctttcactatgatcatgatagaaacaatttagattttcgtgtaaataaaattccttaataagaaagataaagcgartaacacattttttgagcacgcttttatttctaaagagcggattttaggaccaaactgtcaaacagaggtaagaccccagatcttctgtcacacttgagtg

SEQ ID NO: 30052 - DNA, 201 bp, Homo sapiens
tgaacaaataaatgggtggctaaaatggataagttgatgtggtaaaccagtgaaaaggaaactcacacaaaatctgcagttgcatgaattcccctgttccrgtctcaggttaagattacaggcttatccaagcagaatccttctcctaaggaaaagtttggctattccacaattttaggggaaatatgacaataatatagt

SEQ ID NO: 30053 - DNA, 201 bp, Homo sapiens
gctttctgttgactcccaggaactcgaaaccagcaccaagaatagatggtcaaaaatgatactttaatgaacaaataaatgggtggctaaaatggataagytgatgtggtaaaccagtgaaaaggaaactcacacaaaatctgcagttgcatgaattcccctgttccagtctcaggttaagattacaggcttatccaagca

SEQ ID NO: 30054 - DNA, 201 bp, Homo sapiens
gtcttgctttctgttgactcccaggaactcgaaaccagcaccaagaatagatggtcaaaaatgatactttaatgaacaaataaatgggtggctaaaatggrtaagttgatgtggtaaaccagtgaaaaggaaactcacacaaaatctgcagttgcatgaattcccctgttccagtctcaggttaagattacaggcttatcc

SEQ ID NO: 30055 - DNA, 201 bp, Homo sapiens
agtacaatgtaaggactgtaaaaaaagagataatgtctgtcttgctttctgttgactcccaggaactcgaaaccagcaccaagaatagatggtcaaaaatratactttaatgaacaaataaatgggtggctaaaatggataagttgatgtggtaaaccagtgaaaaggaaactcacacaaaatctgcagttgcatgaattc

SEQ ID NO: 30056 - DNA, 201 bp, Homo sapiens
cttcctcagtacaatgtaaggactgtaaaaaaagagataatgtctgtcttgctttctgttgactcccaggaactcgaaaccagcaccaagaatagatggtsaaaaatgatactttaatgaacaaataaatgggtggctaaaatggataagttgatgtggtaaaccagtgaaaaggaaactcacacaaaatctgcagttgca

SEQ ID NO: 30057 - DNA, 201 bp, Homo sapiens
aattttggccttttattactcttatcctagttgttgcagaaggatatcttgcctttctgaaccttctgtattctgctcaaaaatggaagttctcagctagrtgcagttcacgcctgtatccaagcattttgggagaccaaggtgggaagatcgtatgagcccatgttttcaagaccatactgggcaacatagggagacccc

SEQ ID NO: 30058 - DNA, 201 bp, Homo sapiens
tcttcctcagtacaatgtaaggactgtaaaaaaagagataatgtctgtcttgctttctgttgactcccaggaactcgaaaccagcaccaagaatagatggycaaaaatgatactttaatgaacaaataaatgggtggctaaaatggataagttgatgtggtaaaccagtgaaaaggaaactcacacaaaatctgcagttgc

SEQ ID NO: 30059 - DNA, 201 bp, Homo sapiens
atcttcctcagtacaatgtaaggactgtaaaaaaagagataatgtctgtcttgctttctgttgactcccaggaactcgaaaccagcaccaagaatagatgrtcaaaaatgatactttaatgaacaaataaatgggtggctaaaatggataagttgatgtggtaaaccagtgaaaaggaaactcacacaaaatctgcagttg

SEQ ID NO: 30060 - DNA, 201 bp, Homo sapiens
tcaattcttcaatctctacaatgatgcctgttgtgttggtgatctcatgtaatctctttactgacaatgtagccaagtgattcaacagacaggaataaggmtgattatccatttatattatttatttattcacgcatgttggcatatagcacattatgtaaatatttttccttcaaatgtcaaatgtacattttgaagtaa

SEQ ID NO: 30061 - DNA, 201 bp, Homo sapiens
tatcttcctcagtacaatgtaaggactgtaaaaaaagagataatgtctgtcttgctttctgttgactcccaggaactcgaaaccagcaccaagaatagatkgtcaaaaatgatactttaatgaacaaataaatgggtggctaaaatggataagttgatgtggtaaaccagtgaaaaggaaactcacacaaaatctgcagtt

SEQ ID NO: 30062 - DNA, 201 bp, Homo sapiens
cactgcattccggcctgggcaacagagcgagactctatctcaaatataaattaattaattaattaattgatttttcaacatgtggaccaggaatatgggayccctgaaaacaatatctgcgttggtgttctctaaatattttcaggcatgtctctttcttctgatattttatttctatttaatgtttaagtattttactat

SEQ ID NO: 30063 - DNA, 201 bp, Homo sapiens
agagaactcaaatcctctctttttgaaaaataaaatcaatgtaaatataatatataaattgtggaaaatatttcagtcaaactttttgtaaatgttaaaawagtatctatgaaatctgtgtattaattatgagatgagccttaacgttgtaattttgtcatcaatgatgaaatgaaagggtgttgacatattctttaatag

SEQ ID NO: 30064 - DNA, 201 bp, Homo sapiens
gggagaccaacgcaggcagatcactggaggccaggagtttgagactagcctgagcaacatggtgaaaccccatctctacttaaaaaaaaatacaaaaaaakttagccaggcatggtggccaatgcccgtaaacccagctactcaggaggctgaaggatttgaattgattgaacccaggaggcgaagtttgcagtgagccgg

SEQ ID NO: 30065 - DNA, 201 bp, Homo sapiens
agcagatgccttgtgtagttgcacggggtcttgtgcttgaggggctttttgcttggattaatgttctgcacttgcatttttatttttcagacagcggatamtcctccactgaagagggaatagttctgcagtaattccctaggggtttgctttctcctctcctacgggcttgatggagacaggcacagagtcctatgatgc

SEQ ID NO: 30066 - DNA, 201 bp, Homo sapiens
tcttgttaattagactttacatgaagtgagcaactaagcttttctgttacaagacttcatgcccacagatacattcaagtcccaggtggaaggatgatctrgatcaggcaaggtgctgaccatgggaacaggagacagtcaagggaatctgaggaagcacatgtttgtgtccaatatagtcccctccttgtgccactcaga

SEQ ID NO: 30067 - DNA, 201 bp, Homo sapiens
taaaaccatgtgtcgtgatgttgatatgattttgctggtggccacttcacaattagtgagacagacagcatggtggtcatcagatgcatgcacttggctcyccatacttttccagaagggttacaaggggaagccacaacaaatattagtccgtggaagagagaaaagggagaatgtatcctagctgtcttctgtcttcta

SEQ ID NO: 30068 - DNA, 201 bp, Homo sapiens
attattatgtagaacttaaaataagttaactccacatcatatatatatctatgtatctatatctatatctatagacatatatatatatatatatatatctmttgcttatcatacgtcctccctagtacaatgtaatcaccataaaaagagaggtcatatctgtctcgctttctcttgactcacaggacctaaaagccagca

SEQ ID NO: 30069 - DNA, 201 bp, Homo sapiens
ttcagaaattttagtacttctgctataggagataaggacttttttgaagacagtcgtaggaatgttatgttagtttacataatccgaagctagtaattcaragccttaagttcataatttttctttctccaagttttctagcacacttataagtcagcaacgaaccctattctacttatgttcactaaaatgttctatggc

SEQ ID NO: 30070 - DNA, 201 bp, Homo sapiens
tgttatgaaattttaacattattatgtagaacttaaaataagttaactccacatcatatatatatctatgtatctatatctatatctatagacatatatayatatatatatatatctcttgcttatcatacgtcctccctagtacaatgtaatcaccataaaaagagaggtcatatctgtctcgctttctcttgactcaca

SEQ ID NO: 30071 - DNA, 201 bp, Homo sapiens
ttttcaagatgatttatttattgcagaaattgatttgagtttgcttttcagaaattttagtacttctgctataggagataaggacttttttgaagacagtygtaggaatgttatgttagtttacataatccgaagctagtaattcagagccttaagttcataatttttctttctccaagttttctagcacacttataagtc

SEQ ID NO: 30072 - DNA, 201 bp, Homo sapiens; identical to SEQ ID NO: 5680

SEQ ID NO: 30073 - DNA, 201 bp, Homo sapiens; identical to SEQ ID NO: 5653

SEQ ID NO: 30074 - DNA, 201 bp, Homo sapiens
agataaccactggataagatacttggagttgtcaacatgcctagacagacttttcagttgttcttttgaaggcagctccaagagattccctgggtgacttyatctgcataataagacaacctttgttcacagtgaagttctggccctaaccttccctccacctcccgtagagctcagaggaaatttgtcctaggccattgc

SEQ ID NO: 30075 - DNA, 201 bp, Homo sapiens
tttagggacttggaaagtggcatggaggtggacctaggttgtgtttggtgttccttgtcttgcctgcatcatggttacttgaatgtttatgatacactgcrgtatttcccatttttgttttggttcatttctaagtgtgcattataattttaatgtaaaatgtttaattaggagatatgtctcatagaaattattattatt

SEQ ID NO: 30076 - DNA, 201 bp, Homo sapiens
ttccattatccccatctctttcaggtacaccagtgaatcataggtttggtcttttcacatagtccaatatttcttgaggctttgtttgttccttttcattsttttttctctaatctcatcttcatgcattatttcattaaattgatcttcaatgtctgatatcctttcttccgcttgattggttcacctattgatatttgt

SEQ ID NO: 30077 - DNA, 201 bp, Homo sapiens
tggcagaactgtttgataggaacgaaaatgtttttatgttaatataaaatttgtgcccacatgtatgaaggatttttctattaaaactctacaattaagcrgaagatgtgacacactgcaagaaatatggcaccatgaaactaactacaactgtatactattggggctcagaaaatgatactgaaaatatatcgctctttg

SEQ ID NO: 30078 - DNA, 201 bp, Homo sapiens
gttggccagtcttgctaagttgggtaagttctcctggataatatcctgaagagtgttttccaactttgttccattatccccatctctttcaggtacaccastgaatcataggtttggtcttttcacatagtccaatatttcttgaggctttgtttgttccttttcattgttttttctctaatctcatcttcatgcattatt

SEQ ID NO: 30079 - DNA, 201 bp, Homo sapiens
ctagctatatatccaagagaagtgcattaaatgacatgtaaaataatgcccatggtagtattatttgtaattgttctaaaaagaaacagctcaaatacctrtaaattaaggaaggattaataattatagcaaattcatataatggaacaatatagagaaattgaaagcaatgaaccacatgtacatgcaacaaagtggata

SEQ ID NO: 30080 - DNA, 201 bp, Homo sapiens
gcttgaacaaatgatttataaataatcttaaactcatcagaggctaactaccagaaatatttagtttttagtgtaaatagcatttgtataataagagagakaaagtcaataaaccattttataattaaactcttatttcaaaagagaggctttaaaagtcaatgaaccaaacagaaataagccctcacatcttcaatatca

SEQ ID NO: 30081 - DNA, 201 bp, Homo sapiens
tagtctgatgggcttctctttttggtgactcagcctttctgtctggctgttcttaacattttttccttcatttcaaccttggtgaatctgactattatgtrtttttgggtgctcttctcaaggagtatctttgtggtgttctctgtattccctgaatttgaatgttggccagtcttgctaagttgggtaagttctcctgga

SEQ ID NO: 30082 - DNA, 201 bp, Homo sapiens
  misc_feature (101)..(101): n is a, c, g, or t
ccagcactgttgtttgaggtaacttttaccataattttaaaaatggaataaagggaaaaaatagctggtaaatcatgggaagtatgttggttttatattantcttcatgaagtagtaggtgaaaatattcttccaggttaagccctgatgcagagaatggtgtaagaatgataaggccatagggaagaattgttgttttct

SEQ ID NO: 30083 - DNA, 201 bp, Homo sapiens
catttaaggttaatattgttatgtgtgatttttttcctataattatgatgctagctggttattttgcttcattagttgatgtagtttcttcatagtgccartggtctttacaatttggtgtttttctgaagtggctggtactggtttttcctttccacatttagtgcttgcttcagaagctcttgtgaggcaggcctggtg

SEQ ID NO: 30084 - DNA, 201 bp, Homo sapiens
caccaagaatttgcagctcaactctctgggctcaagggactccagcacagaggcccataaaagggccatgaaaatggtgatagccttcctcctcctttttwttattaactttatttccactttaataggagattggatcttccttgaggtagagaattatcaggtcatgatgtttattatgatgattttacttgcctttcc

SEQ ID NO: 30085 - DNA, 201 bp, Homo sapiens
ttccaagattgccttggggtcaccttattccaggcagccaggagcagaaaaggtgcatggaggaggatgcatggcaaatttttatgggacgggcctggaartagtgcacataatttccactcacattacattgttcagcttttagtcacattgcatctgtaagagaggcttggaaatatagtctatatgcttagaaaaaag

SEQ ID NO: 30086 - DNA, 201 bp, Homo sapiens
acagggtctcaattcttcaatctctacaatgatgcctgttgtgttggtgatctcatgtattctccttactgacaatgtagtcaaatcagtcaacagacagkcataagggtgattatccatttatattgtttatttattcacatatcttggtatatagcacattatgtaaatatttttccttcaaatgtcaaatttacattt

SEQ ID NO: 30087 - DNA, 201 bp, Homo sapiens
aacagtaccagggtggatgctgtggcttaagcctgtaattgagcaccttgggaggcttaggcaggcagatttcttgagcccaattattggagaccaacctrggaaacatggtgaaacccagtctctagtaaaaatacaacaattagccaggtatagtggtgtccacctgtagttctagctacttgggaggccaaggtggga

SEQ ID NO: 30088 - DNA, 201 bp, Homo sapiens
gactctattcaatttgctggtctgtgccttttaattggggtatttttcccatttacatttaaggttaatattgttatgtgtgatttttttcctataattaygatgctagctggttattttgcttcattagttgatgtagtttcttcatagtgccagtggtctttacaatttggtgtttttctgaagtggctggtactggtt

SEQ ID NO: 30089 - DNA, 201 bp, Homo sapiens
tcagcttggtccagagctgagttcaagtcctaatatccttgttaattttctgtctcattgatctgtctaatattgactgtggggtgttaaagtctctcackattattgtgtgggagtctaagtctctttgtaggtctctaagaacttgctttatgcatctgggtgcccctgtattgggtgcacatatatttaggatagtta

SEQ ID NO: 30090 - DNA, 201 bp, Homo sapiens
ttagtcaccatagctaagaatgagaaaaagcatttgtgatagtttgctgagaatgccgtcattttttgataaagttttaagtactgttttactatttgatsttttaaagattgttaaaaactaagaagtgttgatttctgctaataaaaacagcttaaaatttatatcatggaatagaatggtggagctgtggcggagata

SEQ ID NO: 30091 - DNA, 201 bp, Homo sapiens
tttgagatgatgttatcctccaaccccagaactttccaatggatttcttctagccttaattatcgacctcacaagaacaaacctttgcaatttcccatctrtttttgcttttggctcctgaattcctgacacaacaaggttgtacatatttcccacactcttggtttagcagagttgatttatcagttatgtttttctgca

SEQ ID NO: 30092 - DNA, 201 bp, Homo sapiens
tatatccttaccttccatttatgaaattccttctaaacttcagataagagaactcaaatcctctctttttgaaaaataaaatcaatgtaaatataatatakaaattgtggaaaatatttcagtcaaactttttgtaaatgttaaaaaagtatctatgaaatctgtgtattaattatgagatgagccttaacgttgtaattt

SEQ ID NO: 30093 - DNA, 201 bp, Homo sapiens
ctaattatatccttaccttccatttatgaaattccttctaaacttcagataagagaactcaaatcctctctttttgaaaaataaaatcaatgtaaatatartatataaattgtggaaaatatttcagtcaaactttttgtaaatgttaaaaaagtatctatgaaatctgtgtattaattatgagatgagccttaacgttgt

SEQ ID NO: 30094 - DNA, 201 bp, Homo sapiens
catgctcttttctgtttttttcatacaaactgccaaattatacaaaatatgacaaaaatttcttagaattttgaagccatgtatatttcattcatgtattttatatttcatttgtagaatttatgatgtctatttataattattaagaagtaacagcttatcccaggataaatattgctcttttctattgttatttgaacc

SEQ ID NO: 30095 - DNA, 201 bp, Homo sapiens
acatgctcttttctgtttttttcatacaaactgccaaattatacaaaatatgacaaaaatttcttagaattttgaagccatgtatatttcattcatgtattttatatttcatttgtagaatttatgatgtctatttataattattaagaagtaacagcttatcccaggataaatattgctcttttctattgttatttgaac

SEQ ID NO: 30096 - DNA, 201 bp, Homo sapiens
aacatgctcttttctgtttttttcatacaaactgccaaattatacaaaatatgacaaaaatttcttagaattttgaagccatgtatatttcattcatgtattttatatttcatttgtagaatttatgatgtctatttataattattaagaagtaacagcttatcccaggataaatattgctcttttctattgttatttgaa

SEQ ID NO: 30097 - DNA, 201 bp, Homo sapiens
taacatgctcttttctgtttttttcatacaaactgccaaattatacaaaatatgacaaaaatttcttagaattttgaagccatgtatatttcattcatgtattttatatttcatttgtagaatttatgatgtctatttataattattaagaagtaacagcttatcccaggataaatattgctcttttctattgttatttga

SEQ ID NO: 30098 - DNA, 201 bp, Homo sapiens
tccacccattcatcctgatttggggaaacaagaagctaaagcagacttttctttcagttttgcggcaagtgaggtactgggtgaaaggagagaagccttcrtctccatagattcatgagaggggcattgtgtgtcttctagcagaaaacaaactggtggtgtatgaaacattttatatttcttactggtttttctatactg

SEQ ID NO: 30099 - DNA, 201 bp, Homo sapiens
aaagagataatgtctgtcttgctttctgttgactcccaggaactcgaaaccagcaccaagaatagatggtcaaaaatgatactttaatgaacaaataaatrggtggctaaaatggataagttgatgtggtaaaccagtgaaaaggaaactcacacaaaatctgcagttgcatgaattcccctgttccagtctcaggttaag

SEQ ID NO: 30100 - DNA, 201 bp, Homo sapiens; identical to SEQ ID NO: 5689

SEQ ID NO: 30101 - DNA, 201 bp, Homo sapiens; identical to SEQ ID NO: 5691

SEQ ID NO: 30102 - DNA, 201 bp, Homo sapiens; identical to SEQ ID NO: 5692

SEQ ID NO: 30103 - DNA, 201 bp, Homo sapiens
caaatcctctaaacaaattctcccactttcagttccaatttctgtgttagactgggtagacaaactgcatcacaaatagctccaaaatgtaaaacgtttcraacaatatgatttaattttgttcttttaatggtactgatatgtctgagtaaccttccctatgtagttattcactaaaataggctgatcacttggtgacct

SEQ ID NO: 30104 - DNA, 201 bp, Homo sapiens
gcagaagacgccgtacgaggtgggtgtcgcggcggggcttgaggctctgacggccaaggaggacggagccgccgcgggggccatgagccaggtgtcgccgsccgcccagcgtctgtagcgagggttgccgcagggcccgcggacctcctagcgacggctgggaccggcaggacggtaagcaaagcggctcccgggctcaca

SEQ ID NO: 30105 - DNA, 201 bp, Homo sapiens
tgcgcagctgccaggccagctcgaagaaggcgagcagggtgcgggagagccccttgcagaagacgccgtacgaggtgggtgtcgcggcggggcttgaggcyctgacggccaaggaggacggagccgccgcgggggccatgagccaggtgtcgccggccgcccagcgtctgtagcgagggttgccgcagggcccgcggacct

SEQ ID NO: 30106 - DNA, 201 bp, Homo sapiens
aaactatggatcacaattgaatgaaacattctgcaaatattgaaaattatctgtctaatctatatattgatgataggaaatgtattaatcatatgtttcaytgtgggtgggcagtgagctgaggctcctcaagcatctctttctatttttattttgtttcttgacataggttctccagcatttggctcaaggccccaaggg

SEQ ID NO: 30107 - DNA, 201 bp, Homo sapiens
aagaaaaaacaacaacaaaaaattagtttggcatggtggtgctcacctgtagtcccagttatccaggaggctgaggcaggatactcccttgaacctaaaarcaatatgtgagtcagttgctggccacatccagagtactgttaacaagagtgatgcctggtagaaaagtaatgaatttattccaaacctagcttggggaag

SEQ ID NO: 30108 - DNA, 201 bp, Homo sapiens
aatgagttaaggagtagtccctctttttccagtgttttgaatagtttcagaaagaatggtaccatctcctctttgtacctctggtagaatttggttgtgartatgtctgttcctggactttttttggttgctaggctattaattactgtctcagtttcagaacttgttattggtctattcagggatttgacttcttcctgg

SEQ ID NO: 30109 - DNA, 201 bp, Homo sapiens
tcccagggttgaagacgacttgatcttggtggataagcctttttatatgctgctggatttggcttgccagtattttattgaggattttcgcatcgatgttyatcaaggatattggcctaaaattttctctttttgctgtgtctctatcaggttttggaatcaggatgatgctggcctcataaaatgagttaaggagtagtc

SEQ ID NO: 30110 - DNA, 201 bp, Homo sapiens
tgttctgtcttacatcatccagtcccttggtggtggtcatgaaagtcagacctcatgcccacagtgtggtgatgcattcaagtcccaaatagaaggatgayctggatcaggcaaggtgctggccaggggaattggacatagtgaagagaatctgagaaagcacatgtttgtgtccagtaccgccactccttgtgccactga

SEQ ID NO: 30111 - DNA, 201 bp, Homo sapiens
ccaggtccactttctggaggtaaaaattctgtggcgggtgtgctttggtctgcaaattgactgtcagttctcaggagaatctgtcttggagcactaagttwgaaaatgtgccctgtagggaatgtctagtgagtgggagtgaaaggttatatttgcatttatgaagggctaagcaggatacagggaacaaagagaaagggg

SEQ ID NO: 30112 - DNA, 201 bp, Homo sapiens
ggaatttccaggtccactttctggaggtaaaaattctgtggcgggtgtgctttggtctgcaaattgactgtcagttctcaggagaatctgtcttggagcastaagtttgaaaatgtgccctgtagggaatgtctagtgagtgggagtgaaaggttatatttgcatttatgaagggctaagcaggatacagggaacaaagag

SEQ ID NO: 30113 - DNA, 201 bp, Homo sapiens
ttttaatctcttctgtgacctaagtattacaaaaagaagaaaatcactacaattttcatgtcaggtgtgctaaaaatttataaaaactattttttaagaasttggtgttataaatactttgtttagtttctccattaaaaatgatttatagcaagagaataaaagttcatttctacccctaaaacaataagataaaaaaga

SEQ ID NO: 30114 - DNA, 201 bp, Homo sapiens
acatgccatggttatttctggcttgacactggtcacaacaattaaaagtaaaaagaatgtcacagcacattcacaaatcaggtgcatatagaatttaaggycaggatattcaagcaatcacacccagttatattacattgagagatgaagcgagctatactttctgaatcgagtggggacttggagaacgtttctgtagct

SEQ ID NO: 30115 - DNA, 201 bp, Homo sapiens
tcattttttattttggaaattacaagaaaataatttgttccattcataagtggtgtgcacatgtgtatatttgtgtgcatatttatgagtttgtgaataaygaagttatacgaaagtgttagcagcaaccagatcttatggagtagtggcctgcctgtggttctcaagaaaatctgagatgcctttgataaaagcagttag

SEQ ID NO: 30116 - DNA, 201 bp, Homo sapiens
aattgctaaatattttttataataatatttaaacattagacttgagagaaactttaccaagtcctaagaattagagataatgtttttgataaataaatatkattcatgggctgaaaaccctgagtgggaaaataggactaatttcatctgcacagcctcttggaaactcattttttattttggaaattacaagaaaataat

SEQ ID NO: 30117 - DNA, 201 bp, Homo sapiens
tggatggctgtggtgatttgagatgggccaaattctacatcttggaggacgttagagttttgccaatttaatctggatcaggtggcagcaatctcacgtcwttagtttctcattcttcttctgggaacagtgtactagataggccatactcttatggtaaatggaaagaagaagaatccccagtatggaagccatctcaaa

SEQ ID NO: 30118 - DNA, 201 bp, Homo sapiens
acctccgcctcccgggttcatgccattctcctgcctcagcctcccgagtagctgggaatacaggtgcacaccaccatgccctgctaatttttgtatttttrgtagagatggggtttcaccatgttggccaggatggtctccatctcttgacctcgtaatctgccttcctcaacctcgcctgcgctgggcctggattttatt

SEQ ID NO: 30119 - DNA, 201 bp, Homo sapiens
attgagctgttttgggaattattgtgttctccataaagacagcctcaaactcatccattagcacaccctggtgctttcctgtttgacactggtcagagaaygtaaaaggaaaaagaacattactgcacattcagaaatcaggtgcacatagaatttaaggtcaggaccttacagagaatcttgtccagtgataatacgcct

SEQ ID NO: 30120 - DNA, 201 bp, Homo sapiens
ttgttttgttttgttttgttttgttttttgacagagtcttgctgtgtcgcccaggctggagtgcagtggcataatctcagttcactgcaacctccgcctcycgggttcatgccattctcctgcctcagcctcccgagtagctgggaatacaggtgcacaccaccatgccctgctaatttttgtatttttagtagagatggg

SEQ ID NO: 30121 - DNA, 201 bp, Homo sapiens
agcatgaaaaatttcatcttatagccaggacatagtgtttgaatagaaatttaattgagctgttttgggaattattgtgttctccataaagacagcctcaractcatccattagcacaccctggtgctttcctgtttgacactggtcagagaatgtaaaaggaaaaagaacattactgcacattcagaaatcaggtgcaca

SEQ ID NO: 30122 - DNA, 201 bp, Homo sapiens
ccaaagtattacaaaaagaaaaatatggttaccattttcatgtcaggtatactaaaagtttaaaaaaactctttttttaataacttggttttaggaatacytggtttagtttctccgttagaaaaatgatttatataaggagaacaaaagttcatttctacttctaaaacaataagacaaaaacaaaaagagtaatcaatt

SEQ ID NO: 30123 - DNA, 201 bp, Homo sapiens
aattacgtgttgggttttaaaatttccataacaactgacattgctgaacacaaattatggagaggttaaacaaggaaaaatattgcaaaacaatgaaggaraatatgtctgtatttgcatgctagcaaatgagaattcacctttcacttcaacaacagcatgaaaaatttcatcttatagccaggacatagtgtttgaata

SEQ ID NO: 30124 - DNA, 201 bp, Homo sapiens
cattcgactgtatttaatactatttgattcatttataatggtattgtcccctcatctatataccatccgtaaactagtaaaactgtttactattctttggkcattaattaatcagttaagtatctagtttgccacctgcctaagcattttctacttgcttaagatagccaatttctcccacttatttttttgcctggctga

SEQ ID NO: 30125 - DNA, 201 bp, Homo sapiens
ttgaccaaagtattacaaaaagaaaaatatggttaccattttcatgtcaggtatactaaaagtttaaaaaaactctttttttaataacttggttttaggamtacttggtttagtttctccgttagaaaaatgatttatataaggagaacaaaagttcatttctacttctaaaacaataagacaaaaacaaaaagagtaatc

SEQ ID NO: 30126 - DNA, 201 bp, Homo sapiens
tacataaatctgacattgaaaaaataaattcacagtggtcatgattctggttatgaccaagttccatatgacagtttagacatccaatgtaggaattacgwgttgggttttaaaatttccataacaactgacattgctgaacacaaattatggagaggttaaacaaggaaaaatattgcaaaacaatgaaggaaaatatgt

SEQ ID NO: 30127 - DNA, 201 bp, Homo sapiens
ggtgggtggatcacgaggtcaggagatggagaccatcctggcgaacacagtaaaaccctgtctctactaaaaatacaaaaaattagccaggcgtggtggcrggctcctgtagtcccagctactccggaggctgaggcaggagaatggcgtgaacccgggggacagagcttgcagtgagccgagatcgcgccactgcactcc

SEQ ID NO: 30128 - DNA, 201 bp, Homo sapiens
tctacataaatctgacattgaaaaaataaattcacagtggtcatgattctggttatgaccaagttccatatgacagtttagacatccaatgtaggaattaygtgttgggttttaaaatttccataacaactgacattgctgaacacaaattatggagaggttaaacaaggaaaaatattgcaaaacaatgaaggaaaatat

SEQ ID NO: 30129 - DNA, 201 bp, Homo sapiens
ggccgaggtgggtggatcacgaggtcaggagatggagaccatcctggcgaacacagtaaaaccctgtctctactaaaaatacaaaaaattagccaggcgtkgtggcgggctcctgtagtcccagctactccggaggctgaggcaggagaatggcgtgaacccgggggacagagcttgcagtgagccgagatcgcgccactg

SEQ ID NO: 30130 - DNA, 201 bp, Homo sapiens
ttaatgagcttgttaagaataaagttatacaaaagtattagttagcagcaaccagattttaaggaatgttggccttcctgggcttcccaagaaaaccttgragtcttttaataagaaaactttggattctgtctacataaatctgacattgaaaaaataaattcacagtggtcatgattctggttatgaccaagttccata

SEQ ID NO: 30131 - DNA, 201 bp, Homo sapiens
aatattgaaaatgggctgaaaacatgattgggaaattagggctatttcaacttggatgacctgcctgaaattcattttccattttggaaattacaggacamtaattcctcccatccatgaggagcatgtatgtgtgtgggcacataagtttgtgttaatgagcttgttaagaataaagttatacaaaagtattagttagca

SEQ ID NO: 30132 - DNA, 201 bp, Homo sapiens
acttactcaaaagcctaagcatgagacacaagtttataaatattgaaaatgggctgaaaacatgattgggaaattagggctatttcaacttggatgacctrcctgaaattcattttccattttggaaattacaggacaataattcctcccatccatgaggagcatgtatgtgtgtgggcacataagtttgtgttaatgagc

SEQ ID NO: 30133 - DNA, 201 bp, Homo sapiens
tcaagaaaatgacttactcaaaagcctaagcatgagacacaagtttataaatattgaaaatgggctgaaaacatgattgggaaattagggctatttcaacktggatgacctgcctgaaattcattttccattttggaaattacaggacaataattcctcccatccatgaggagcatgtatgtgtgtgggcacataagtttg

SEQ ID NO: 30134 - DNA, 201 bp, Homo sapiens
aagatcgtatgagcccatgttttcaagaccatactgggcaacatagggagaccccatttctacaaaaaaactgaaaaattagctggctgtgttggtgcacrcccatagtcacagctactccagaagctgaggtgggaggatctcttgagcccaggagtacaaagctgaagtgaactaccactgcactccagcctaggcgac

SEQ ID NO: 30135 - DNA, 201 bp, Homo sapiens
tgttcttttggcttaggattgtcttggcaatgcaggctcttttttggttccatatgaactttaaagtagtttttttccaattctgtgaagaaagtcattgktagcttgatggggatggcattgaatctataaattaccttgggaagtatggccattttcatgatattgattcttcctatccatgagcatggaatgttcttc

SEQ ID NO: 30136 - DNA, 201 bp, Homo sapiens
tttcttgttttggtcaggtttgccaaagatcagatggttgtagatgtgtcatattatttgtgagggctctgttctgttccattggtctatatctctgtttwggtaccagcaccatgctgttttggttactatagccttgtagtatagtttgaagtcaggtagcgtgatgcctccacctttgttcttttggcttaggattgt

SEQ ID NO: 30137 - DNA, 201 bp, Homo sapiens
aggtgtaaggaatggatccagtttcagctttctacatatggctagccagttttccagcaccatttattaaatagggaatcctttccccatttcttgttttkgtcaggtttgccaaagatcagatggttgtagatgtgtcatattatttgtgagggctctgttctgttccattggtctatatctctgttttggtaccagcac

SEQ ID NO: 30138 - DNA, 201 bp, Homo sapiens
ctccagtacttagaaacaagcctgaaatcacactgatcaaatagcattctccctttcacctgccatcatcattatcatcatcgtctatatcttcatctatmtcatgaagtggtttgtttttgaaatatttaaatacataatttggaaaataagtaattttaaaaagatcatcattgtgggaaagttacaatagtaaacagc

SEQ ID NO: 30139 - DNA, 201 bp, Homo sapiens
gttggttttacattattcttgatgaaataccatgtgagggtacttgtctaggcctaatgctgagaatcatagaagaatcatgaggccatgaggaagaatartagtgttctctcatcacgctgagctccagtacttagaaacaagcctgaaatcacactgatcaaatagcattctccctttcacctgccatcatcattatca

SEQ ID NO: 30140 - DNA, 201 bp, Homo sapiens
caaataaatcgttgaaaatatgttggttttacattattcttgatgaaataccatgtgagggtacttgtctaggcctaatgctgagaatcatagaagaatcrtgaggccatgaggaagaatagtagtgttctctcatcacgctgagctccagtacttagaaacaagcctgaaatcacactgatcaaatagcattctcccttt

SEQ ID NO: 30141 - DNA, 201 bp, Homo sapiens
tcattacagcctcaaccttctgggctcaagtgattctcccacttccgcatttctagcagctgggactgcaggggtacaacaccttgcctggctaattttgktatttcctgtagggctaggatttcaccatgttacccaggctggtctcaaactcctgggctgaagtgatctgtctgtgtcggcctccaaaagtgctgggat

SEQ ID NO: 30142 - DNA, 201 bp, Homo sapiens
ggcttgctaatgatgctattaaaagataaactaaagttgatatactgtattattgcatagactatttgtccatgtttgtattcaaaaatgccaaaaaaaawcccaaaatagaatcctaattgttggaggtcgtgtttcttatcgaattttaaaatgtagtaaaagaaaaaaaagcaaataaatcgttgaaaatatgttggt

SEQ ID NO: 30143 - DNA, 201 bp, Homo sapiens
aaaacatatttagcatgatctttgagtatgtttgtgcatatataattctactttgactgctatagtaaaatgatccagatttagtcaccatagctaagaakgggaaaaagcatttgcaagaatttggcttgctaatgatgctattaaaagataaactaaagttgatatactgtattattgcatagactatttgtccatgtt

SEQ ID NO: 30144 - DNA, 201 bp, Homo sapiens
gtgatctggtcactgggtattttcagatatattttaggactggtttttcactttttgcaaaacaggcttgttgggatttgatagggattgcactgagtatrtaagttgacccttcacctgcaaagactctccttgtgctggatttcagttcagctggccctccttgcttgtacaactctgtgatgaattgaatatataatt

SEQ ID NO: 30145 - DNA, 201 bp, Homo sapiens
tattcacatgtacacctgtaagttgggttaaatattttgttactataaattttttggctctacattagagaaaaataccatagaaaggcaaattttttaasgtataaaacatatttagcatgatctttgagtatgtttgtgcatatataattctactttgactgctatagtaaaatgatccagatttagtcaccatagcta

SEQ ID NO: 30146 - DNA, 201 bp, Homo sapiens
catttttgaaatcaattaccatcaatgtcagtgttaatttctggactctcagttgtgtttcattgttcttttgtctactgtaatgccagtaccacagaatyctgattagtgcagctttgtagttagctttgaaaccagaaagtgtaatcctccaaatgtgttattttatcaagatttattttggtgatctggtcactgggt

SEQ ID NO: 30147 - DNA, 201 bp, Homo sapiens
tgtttctgttgtgttattactctctatgtgtatgttatgctccacaataaaaaatgttaaaaaagcagaaacataaagtatatttctaagtataaaattarggtgatacagcatattctcatagataccattgtaattagagtttttgctgaataaaggagaatagagcattatggtactaagaaatccaaattaaaattt

SEQ ID NO: 30148 - DNA, 201 bp, Homo sapiens
atggtgtgaaataagaatagaaatttatctttatgcatgtggatattcaatgttctcagtatcatttgttgaaaaaatgattaattcctattgaactgcartggtaccatttttgaaatcaattaccatcaatgtcagtgttaatttctggactctcagttgtgtttcattgttcttttgtctactgtaatgccagtacca

SEQ ID NO: 30149 - DNA, 201 bp, Homo sapiens
gttgagaagtcctccaaatgtctatcagtcctccaaatgaataaacaaattgtggcatacttatacaatggaatactatacagtgatcaaaattaacaaasaagactgacatgtttacaacagaataatacaacagagaaaatgaacaaatttgagctacataaataataatacagatatgagaagaattatcaagatgga

SEQ ID NO: 30150 - DNA, 201 bp, Homo sapiens
actttttacatttagctctataatcaattaaatatgagttattttttgtgtatggtgtgaaataagaatagaaatttatctttatgcatgtggatattcartgttctcagtatcatttgttgaaaaaatgattaattcctattgaactgcagtggtaccatttttgaaatcaattaccatcaatgtcagtgttaatttctg

SEQ ID NO: 30151 - DNA, 201 bp, Homo sapiens
ttatactcttatcagaatacatatacattcacatgcatatcactgagtttcaatagctaaagttgagaagtcctccaaatgtctatcagtcctccaaatgrataaacaaattgtggcatacttatacaatggaatactatacagtgatcaaaattaacaaacaagactgacatgtttacaacagaataatacaacagagaa

SEQ ID NO: 30152 - DNA, 201 bp, Homo sapiens
gtatggcattatctgattaagatgaaggatcacatcctaagacccagcatttatactcttatcagaatacatatacattcacatgcatatcactgagtttyaatagctaaagttgagaagtcctccaaatgtctatcagtcctccaaatgaataaacaaattgtggcatacttatacaatggaatactatacagtgatcaa

SEQ ID NO: 30153 - DNA, 201 bp, Homo sapiens
caattcttaacacgttgctgcatcaattcaaatgtctgaagtccaaagtctcatttgagactggaagtcaagttccttccagctatgagcctgtgaaatamaaaacaatttatttccttccaagatacagttgttgtacaggcattggatagacattctcattccaaaagggagaaatcagccacaagagaggagcagtag

SEQ ID NO: 30154 - DNA, 201 bp, Homo sapiens
gtcctgaatattcttgtggtgaattttcagcatccttttcaaggggacttacactttccttcaattattgaattcttgttctcggaattggctcagtcctkacaacaggttgaggttctttgattttccacttcaaaggctgacctcaggaatcagtttttcagcctttgaagtgaaaaggcttgctcttggtttataagt

SEQ ID NO: 30155 - DNA, 201 bp, Homo sapiens
atcccaatatgagttctgatggggacaaacaaaccgtgtacaaaccatagcattctgacttggtcccctgaaaactcgtgtccttctcacataaaaaaaaatgtaatctttccatcccaacaatagtcccccaattcttaacacgttgctgcatcaattcaaatgtctgaagtccaaagtctcatttgagactggaagtca

SEQ ID NO: 30156 - DNA, 201 bp, Homo sapiens
gcttgcatgaggcattcttcccttttttggtggaatgcccccagaaggttgttttctaccgttttctctcttaacacgtatgcctcagcctactcgccctmttcctgagctgctgactagcaattttaagcatctttacttattgtgaaattgcctctccctggtgcctgtgagcaattatcatttttagagaggcagtgt

SEQ ID NO: 30157 - DNA, 201 bp, Homo sapiens; identical to SEQ ID NO: 21209

SEQ ID NO: 30158 - DNA, 201 bp, Homo sapiens; identical to SEQ ID NO: 21218

SEQ ID NO: 30159 - DNA, 201 bp, Homo sapiens
ccagtaccatgctgttttggttactgtagacttgtagtatactttgaagccaggtagtgtgatgcctcctgctttgttctttttgcttaggattgtcttgrctacacgggctcttttttggttccatgtgaatttctaagtagtgttttccaattctttgaagaaagtcaatggtatgaaatgtttttccatgtgtttgtg

SEQ ID NO: 30160 - DNA, 201 bp, Homo sapiens
ttagccctttgtcagatgggtagattgtaaaaattttctccttctgtaggttgcctgttcactgtgacggtagtttcttttgctgtgcagaagctctttaktttaattagatcccatttgtcaattttggcttttgttgccattgcttttggtgttttagccatgaagtccttgcccatgcctgtgtcctgaatggtattg

SEQ ID NO: 30161 - DNA, 201 bp, Homo sapiens
aatttgtttaagttctttgtagattctggatattagccctttgtcagatgggtagattgtaaaaattttctccttctgtaggttgcctgttcactgtgacrgtagtttcttttgctgtgcagaagctctttattttaattagatcccatttgtcaattttggcttttgttgccattgcttttggtgttttagccatgaagt

SEQ ID NO: 30162 - DNA, 201 bp, Homo sapiens
ttcccttttatatagatataacctggcccctgaactttgaagcttctattattttccttttagacttcagtttgagatactttcacagttttcaaaaaccwattaaaaagtgaaaatgatctcttgaacaacagttctttttttaaacatctcgtatttttggctttttgtttttttgagacagggtcttgctctgcagcc

SEQ ID NO: 30163 - DNA, 201 bp, Homo sapiens
agcttcccttttatatagatataacctggcccctgaactttgaagcttctattattttccttttagacttcagtttgagatactttcacagttttcaaaamccaattaaaaagtgaaaatgatctcttgaacaacagttctttttttaaacatctcgtatttttggctttttgtttttttgagacagggtcttgctctgca

SEQ ID NO: 30164 - DNA, 201 bp, Homo sapiens
agattcactttgggatggacatgagtcaaaactctaggtagcatctaaccttcaaaaactcccagtgcaggctgggtatgacggctcatgcttgcagtctycacactttggtaggcacagttgggaatatctattgaggccaggagttccagaccaccctgggcttcatggtgagagcctgtctgtacaaaaactaaaaaa

SEQ ID NO: 30165 - DNA, 201 bp, Homo sapiens
gtacaacaccttgcctggctaattttggtatttcctgtagggctaggatttcaccatgttacccaggctggtctcaaactcctgggctgaagtgatctgtytgtgtcggcctccaaaagtgctgggattacagtcatgtgccacagggcccggtttgtaatattactaatatattaaattagcacgatgttttaaaaaatg

SEQ ID NO: 30166 - DNA, 201 bp, Homo sapiens
ttgacataatgattgattaaaggaagtatctccagtataagtacacttgcttataacaaaagagtatttgaaattgacattacttattttggaaaggataygacacaatgggaattttcatacaccactcctagaattataaatctgtgacatcatttcggccgagtatggcattatctgattaagatgaaggatcacatc

SEQ ID NO: 30167 - DNA, 201 bp, Homo sapiens
ttttaagagttgttcaacaatcctgaaatatcccttacagtatgctgttaactaattatattttttcaaagtcatttgacataatgattgattaaaggaartatctccagtataagtacacttgcttataacaaaagagtatttgaaattgacattacttattttggaaaggatatgacacaatgggaattttcatacacc

SEQ ID NO: 30168 - DNA, 201 bp, Homo sapiens
gactacattaattcttggtgttatgaagttttaacaatgttatttaatgttatttaaaccttaagataaatcatccccacacctgatttatgtaatttttkaatcatatatcttcctcagtacaatgtaagaactgtaaagaaagagatcatgtctgtcttgctttctgttgattcccaggacctagaacccagcaccaag

SEQ ID NO: 30169 - DNA, 201 bp, Homo sapiens
caataagttatacaaaagtattagtagccaccaggatttaaggattattggcctttctgaggttcccaagaaaaccttaaatgcttttggtaggaaaagaygggattcattctacatattactggcgttgaaaatataaatctactttggtgatgatcctagttatgcccaagctccctttaccaggtaataaaaccaatg

SEQ ID NO: 30170 - DNA, 201 bp, Homo sapiens
gttatgttgtagtctgctattctttctttccttccttcctatttttcattagtgaaggttattttctctggtgatatgatatagtttcttgctttttattkttttgtgtatccattctatgctgttaggtttgagattaccatgaggcttgcaaatgctatcttctaacccatcatttcaagctaataaccacttagtact

SEQ ID NO: 30171 - DNA, 201 bp, Homo sapiens
tgaccttctttatgtcctcatagtttttgtcttgaaaactattttgtctaatattagtataggtactctacttttttgttttgttttttttttttttttttggtttgccttgacatggaatatctttttccatccctttattttctctctgtgcatgtctttataggcaaagtgtgtttcttagaggcaacagattggagt

SEQ ID NO: 30172 - DNA, 201 bp, Homo sapiens
tgattgaacccaggaggcgaagtttgcagtgagccgggattgcaacactgcattccggcctgggcaacagagcgagactctatctcaaatataaattaatwaattaattaattgatttttcaacatgtggaccaggaatatgggacccctgaaaacaatatctgcgttggtgttctctaaatattttcaggcatgtctctt

SEQ ID NO: 30173 - DNA, 201 bp, Homo sapiens
gtgaccttctttatgtcctcatagtttttgtcttgaaaactattttgtctaatattagtataggtactctacttttttgttttgttttttttttttttttttggtttgccttgacatggaatatctttttccatccctttattttctctctgtgcatgtctttataggcaaagtgtgtttcttagaggcaacagattggag

SEQ ID NO: 30174 - DNA, 201 bp, Homo sapiens
gaattgattgaacccaggaggcgaagtttgcagtgagccgggattgcaacactgcattccggcctgggcaacagagcgagactctatctcaaatataaatwaattaattaattaattgatttttcaacatgtggaccaggaatatgggacccctgaaaacaatatctgcgttggtgttctctaaatattttcaggcatgtc

SEQ ID NO: 30175 - DNA, 201 bp, Homo sapiens
atagattttggtatgttttgtttccactatcatttgtttctagcaattttccatttccttttaaatttatttgttgacctactggtcattcaggagcataytgtttcatttccatgtgtttatatagtttccaaaattattcttgttattgatttctagttttatcccattgtggccagagttgatgcttggcaatatttc

SEQ ID NO: 30176 - DNA, 201 bp, Homo sapiens
atttagccaggcatggtggccaatgcccgtaaacccagctactcaggaggctgaaggatttgaattgattgaacccaggaggcgaagtttgcagtgagccrggattgcaacactgcattccggcctgggcaacagagcgagactctatctcaaatataaattaattaattaattaattgatttttcaacatgtggaccagg

SEQ ID NO: 30177 - DNA, 201 bp, Homo sapiens
tttttattatttgtgttctactaattttgggtttgggttacttttgtttttctagttctttaagatacacaattaggttgtttatttgaatttttcttcttttctgatgtaggcttttatagctgtaaatttccttcttagtattgtttttgctgtatttcatagattttggtatgttttgtttccactatcatttgtttc

SEQ ID NO: 30178 - DNA, 201 bp, Homo sapiens
atttttattatttgtgttctactaattttgggtttgggttacttttgtttttctagttctttaagatacacaattaggttgtttatttgaatttttcttcttttctgatgtaggcttttatagctgtaaatttccttcttagtattgtttttgctgtatttcatagattttggtatgttttgtttccactatcatttgttt

SEQ ID NO: 30179 - DNA, 201 bp, Homo sapiens
aatttttattatttgtgttctactaattttgggtttgggttacttttgtttttctagttctttaagatacacaattaggttgtttatttgaatttttcttcttttctgatgtaggcttttatagctgtaaatttccttcttagtattgtttttgctgtatttcatagattttggtatgttttgtttccactatcatttgtt

SEQ ID NO: 30180 - DNA, 201 bp, Homo sapiens
aactgttgcaatcatgtatccttcattccactcattcatcctgattatgggaagtaggaagctaaaacagacctttctttcagttttgtggcagatgacaygctgagtgaaagaagagaaaccctcaactccatagattcacaaggggagcatcgtgggtcttctagcagaaaacaaactgatggtgtctggaacatttta

SEQ ID NO: 30181 - DNA, 201 bp, Homo sapiens
taagtgtgcagtctagctatatgataaaaattattaattaggagaaatggtccatgaaaattattattactctgctcattatatactgaagggaaaaatcmactatttgtatacattcatgtgtaactctaagagattttaagtagaaactttctgattttagttgcaactttaggaaacttgacatgatgttacctgcca

SEQ ID NO: 30182 - DNA, 201 bp, Homo sapiens
tgggcatattagtttaccttatcagtaaacaggtatgggaagtttaggaatttcttttttttaaatgtatttttaagttttgtggatatatagtaggtctrtattgagtacacgggatgtgttgatacaggcatgcaaagagtaataatcacataagaatggggtagccatcccctcaaacatttactcttttttgttaca

SEQ ID NO: 30183 - DNA, 201 bp, Homo sapiens
ctaatgccaaactagaaaaaaagtacgtttccttttggacactgatcagtactcaaccctttggtttgctatctgcctgataatttttggaggtgggggtrgttcacaatagctaatttttctcagccatttttcctttggataaagtgtagaattaattatgtgaatattatgattctgatggagtccttggtttattaa

SEQ ID NO: 30184 - DNA, 201 bp, Homo sapiens
tctgaaattcgtcaggtgttttaggatgcacactttcttagatcttttcgagggtcttaactgcagttctgtttccggaatggcgtattttctttctaggrattgtaggctcccggccgccccctgaggagctccgctagcagctaagagggcagccacgaagagcgcctgagcactctcgcgagactgtggggctcgcca

SEQ ID NO: 30185 - DNA, 201 bp, Homo sapiens
cttggtttagcagagttcttttatcagttatgtttttctgcaagagaagaccctctaaaacattagacatatatatctcacatgtctttggatttcatttktgtgtgtgtgtgttttctgttttttgagatggagtctcactctgttgcccaggctggagtgcagtggcactatcttggctcactgcaacctccacctcca

SEQ ID NO: 30186 - DNA, 201 bp, Homo sapiens
ggttttattctcttctttgaccaaagtattacaaaaggaagaaaatcattaccattttcatgtcaggagggtggcatggagatggacttagcctattttcrgtgttccatctcttgccctttataagggttagttgactgtttatgatacattccggtatttcccatttttgttttggttcatttctaagtgtgcattata

SEQ ID NO: 30187 - DNA, 201 bp, Homo sapiens
gttaatccactttcttagtgctaatatgaatttgaaacatcaaaatttgaatatccatgattgatagacaccttttttcttatttccaatttaattatttwtgatacacatttgaaagtgtaagaaattcaggaatttacaataaattatagtacgatggatattaaatatattaaattaaatgtattaaaaatgtgtctc

SEQ ID NO: 30188 - DNA, 201 bp, Homo sapiens
gtacaatagaacactatacagcaatcaaaatgaaccaactagagagacaagtttacaaagaatataaataaaaaggaaaatgaacgtatttggacaacatygatatgagaggaattattaaaattgaaaaaagattcagtataattccatttatataaagtttacaaaaaatatttttaataaattacaatttattacatt

SEQ ID NO: 30189 - DNA, 201 bp, Homo sapiens
tgttcatactagtcactaatatttctttgaatttctgttgtatcagttgtaatatctccattttcatctctgattttattaatttggatctttttttcttrgtctgcctaaacgtttgtcaatgttgtttaacttttcaagaaaacaagtttttgtttcattgatcttttgtattgttttcttcatttcaatttcatttat

SEQ ID NO: 30190 - DNA, 201 bp, Homo sapiens
aggcaggagaatggcgtgaacccgggaggtggcgcttgcagtgagtggagagcatgccactgaactccagcctgggtgacagagtgagactctgcctcaaaaaaaaaaaaaaaaaaaaaaaagaatgagcctggaagtagtccctctttctctattttttcagaagagtttgagtaggattggcatcagttctttaaatgt

SEQ ID NO: 30191 - DNA, 201 bp, Homo sapiens
caagactgacatgtttacaacagaataatacaacaaagaaaatgaacaaatttgagctacatagataataatactcacagatgtgagaggaattatcaagrtggaaaaatacatttactgtaatctcatcgacgtaaagtttgaaaaactttatttttaatacattgtcattcattacattggtgataaaaccctacagtg

SEQ ID NO: 30192 - DNA, 201 bp, Homo sapiens
gaggcaggagaatggcgtgaacccgggaggtggcgcttgcagtgagtggagagcatgccactgaactccagcctgggtgacagagtgagactctgcctcaaaaaaaaaaaaaaaaaaaaaaaagaatgagcctggaagtagtccctctttctctattttttcagaagagtttgagtaggattggcatcagttctttaaatg

SEQ ID NO: 30193 - DNA, 201 bp, Homo sapiens
tgaggcaggagaatggcgtgaacccgggaggtggcgcttgcagtgagtggagagcatgccactgaactccagcctgggtgacagagtgagactctgcctcaaaaaaaaaaaaaaaaaaaaaaaagaatgagcctggaagtagtccctctttctctattttttcagaagagtttgagtaggattggcatcagttctttaaat

SEQ ID NO: 30194 - DNA, 201 bp, Homo sapiens
ctgaggcaggagaatggcgtgaacccgggaggtggcgcttgcagtgagtggagagcatgccactgaactccagcctgggtgacagagtgagactctgcctcaaaaaaaaaaaaaaaaaaaaaaaagaatgagcctggaagtagtccctctttctctattttttcagaagagtttgagtaggattggcatcagttctttaaa

SEQ ID NO: 30195 - DNA, 201 bp, Homo sapiens
gtgccactgcactccagcctgggtgacagggagactatgtctcaaaaaaaaaaaaaaaaattaatgacaatgaaaactaagtgtgtaattctaaataaatkttgactatataaaacaatagtgtcttcttggattgaatgtataattgataagatatatgcaaatagcaataaagaggctggagataaaggtaacaggaat

SEQ ID NO: 30196 - DNA, 201 bp, Homo sapiens
ccccgtctctactaaaaatacaaaaatttagccgggcgtggtggtgggcgcctgtagtcccagctactcgggaggctgaggcaggagaatggcgtgaaccygggaggtggcgcttgcagtgagtggagagcatgccactgaactccagcctgggtgacagagtgagactctgcctcaaaaaaaaaaaaaaaaaaaaaaaag

SEQ ID NO: 30197 - DNA, 201 bp, Homo sapiens
acaagcccagtaaaaagtaccagaagctctgctctgcttagtgaagacagcacatcctggaaagcatttgtgagtgttgatttaagtttctggtagtctgyattcattctataacccgtctggttttgatagaggccagataggtttagtgaatcggcttatagaaaggactaccatcccctgtaactttcaagtgttttg

SEQ ID NO: 30198 - DNA, 201 bp, Homo sapiens
cccacttggccatgaggaattatctttttaatgtattatttaatttgattcgctagtatattgttgagactttagcatcaatgttcatcagggatatttayttgtagttttcctttttcaatgtgtctttgtctggttttggtatcagggtaataagattttcaagaataagcctgggccgggcctggtggctcacgcctg

SEQ ID NO: 30199 - DNA, 201 bp, Homo sapiens
tcctatgtggatgctctttatttatttttcttgcatgattgctctagctagagcttctactattatgttgaatagcagcagtgattgtgagcatttttggmatgttccagatcttagaggaaagtcttttagtttttcccaattcagtatgatactagttgtgggtctttctatatgatttttattatgtttagattttcc

SEQ ID NO: 30200 - DNA, 201 bp, Homo sapiens
tccccaccttgtgccactcagatgtcctcatgccctccaattgtggctggttttataagcacatgactagtgtagttgcacgcggtcttgtgcttttgggmtttttgcttggattaatgttctgcacttgcatttttatttttcagacagcggatactcctccgctgaagagggaatagttctgcagtaattccctagggg

SEQ ID NO: 30201 - DNA, 201 bp, Homo sapiens
gtatactgcaaatttattgagtttgtttatcaattctaatagttttttggtacagtcttcaggttttataaatataagatcatattgtttgaaaacagggrtaatttggcttattcttttcctatgtggatgctctttatttatttttcttgcatgattgctctagctagagcttctactattatgttgaatagcagcagt

SEQ ID NO: 30202 - DNA, 201 bp, Homo sapiens
acgttgccaatattcccctccattccatcatgagccgttctctgtaattcagaatctgtggactaagctgtaaaactaatgactgtcaatctattctacawgaaatagtgggccaaagaaaaaggaaaacatgataagcagtaaaaatatatacacaacattttttgcttacactaatgatcaaataacacccataggacc

SEQ ID NO: 30203 - DNA, 201 bp, Homo sapiens
gattagacatttcctgccatgtcaagtgttgtctgtaatcttccttgtttgcttgtctttttcaggaagtgaataagaagataacagtgtttcaaatgccktgaaacatggcatcatgctctaacttcagtataccaataaaacaatcagcttgcaatttctgctggtggtgtctctttctgagtgtttgggactctagaa

SEQ ID NO: 30204 - DNA, 201 bp, Homo sapiens
caagcaatcagcacagtgtcaggattgaactttagacatcatttgtttttcaatctgtttggaaagactgctattctgctttccactgtgcttttcatttstgtgtatgtgagtttgtgtgggtgtgtcagggggttgggcagcaatcctacagctaacagtgaagacggtcaatatgtctgactcttttgatagcctatt

SEQ ID NO: 30205 - DNA, 201 bp, Homo sapiens
aggggaacaggagacacagtcaagggaatctgaggaagtgcatgtttttgcccagtacagtccccaccttgtgccactcagatgtcctcatgccctccaaytgtggctggttttataagcacatgactagtgtagttgcacgcggtcttgtgcttttgggatttttgcttggattaatgttctgcacttgcatttttattt

SEQ ID NO: 30206 - DNA, 201 bp, Homo sapiens
cgcccgtaaaccccaatcagagtcacaatatcttcccccaattcggcttaccttcatctaagtcctgagctgagctgaaggccagcagggccactgacagsagaatcagaagcatcttgcagaaggctctggtgtcactcccaactttatgctgggagaaacgtgtcagctccctttataaagacaagcaggacaatggcg

SEQ ID NO: 30207 - DNA, 201 bp, Homo sapiens
tgacaatatttcactctggtgattctctaactctatgtagacagaggcaagtgtttacccaattctctgcctcagcaatagctctgacatgtgtttatctmcttcatggatactcatccactgtccagcaaggccaccatcatccctgtctactgggatcagtataggatcttcacagctgcacttccctgaatctgtctt

SEQ ID NO: 30208 - DNA, 201 bp, Homo sapiens
aatagcaataaggagactggagacaaagtgacaggaataaatttagtcaaactgttttgggcttttctatgtctgtgagtagaatttgaatatcataatcmaggaccgtataaatctacacccagatatatatacacaaaggaattgtagcaaatgatatgtgaaagaatgttcattgtagcattattaataatagctcaa

SEQ ID NO: 30209 - DNA, 201 bp, Homo sapiens
ggccaaggtgggcagatcacttgagaccatgagtttgagaccagcctggataacatggtgaaaccctgtctctacttaaaaaaaaaaaaaaatgccagtcmtggtggcacatgcctgtaaacactgctactcaggaggctgaaagatttgaactgattgaacccaggagacaaagcttgcagtaagccgagattgcactag

SEQ ID NO: 30210 - DNA, 201 bp, Homo sapiens
agacttgacagttgatttgcagacaaaagtatgccctcatggaactgtcacctccagggtttagcttagacctcacatccattaggaggggatgtggagasgatgcccaggtggccacttctacaatggctgtcctgctcatttccttcccaactttaaaaaaaaatccactttctgctccaaaggtgaagtgtcacatta

SEQ ID NO: 30211 - DNA, 201 bp, Homo sapiens
gaggccaaggtgggcagatcacttgagaccatgagtttgagaccagcctggataacatggtgaaaccctgtctctacttaaaaaaaaaaaaaaatgccagkcctggtggcacatgcctgtaaacactgctactcaggaggctgaaagatttgaactgattgaacccaggagacaaagcttgcagtaagccgagattgcact

SEQ ID NO: 30212 - DNA, 201 bp, Homo sapiens
tcttctgcatagggatattcagttgtcccagcaccatttattgaagagactgtctttttccagtgtacgttcttggcatctttttcaaaaatgagttcacygtaggtgtgtggatttgtttccaagttgtctattctattccgttggtctatgtgtctgtcttaatgccagtaacatgctgttttggttactacagcctct

SEQ ID NO: 30213 - DNA, 201 bp, Homo sapiens
aagctccttttatattctggttattaatcccttgtgagatgagtagtttgcaaatattttctcccattctgtgggttgtctctttactttgttgattgtamcctttgctgtgcagaagtattttttaacttgatgtcatcccaattgtgcatttttgacttggttccctgtgcttgtggggtattactactcaagaaattt

SEQ ID NO: 30214 - DNA, 201 bp, Homo sapiens
ccattaaccagccactccttccctttagcctccactacctttcccagcctttgtttagcatccatgtactctctatgtccatgccttctgtgcaaacattgcagttgtttctgatgtattcaacttaacataataatctccaattctatccatatattgctgcaaatgacaggatctcattttttaatggctcaattgtac

SEQ ID NO: 30215 - DNA, 201 bp, Homo sapiens
ttctctattaaatttcatcatattttacttagatattaactactataatgagtttaatatatttttaaggtcattttgtatataagtcactccatattgtrtatctgtaaaaactgtgttcagtttttcatgtttgcttttcagaatgtaggaaaaactcatcttttaaaacacttgtttaagctttacctgattactctg

SEQ ID NO: 30216 - DNA, 201 bp, Homo sapiens
accattaaccagccactccttccctttagcctccactacctttcccagcctttgtttagcatccatgtactctctatgtccatgccttctgtgcaaacattgcagttgtttctgatgtattcaacttaacataataatctccaattctatccatatattgctgcaaatgacaggatctcattttttaatggctcaattgta

SEQ ID NO: 30217 - DNA, 201 bp, Homo sapiens
tacaactgaattatcattgattatagtcaccctgctgtgctatcaaatagtaggtcttattaattctttctatttttttttttttttggtaaccattaacmagccactccttccctttagcctccactacctttcccagcctttgtttagcatccatgtactctctatgtccatgccttctgtgcaaacattgcagttgtt

SEQ ID NO: 30218 - DNA, 201 bp, Homo sapiens
gtgtgcaccaggcagaggactaaaacgtcagaagaaaactgtagacttactgggttgaagtaacagaggactgagtttggcataacacgagcagcaggagrtcaggagaaaatctgagaaaggagaaggccagaaaaggggagccccaacttctgaatataaactatccaaagctttgtctggtccctataccatgcatgt

SEQ ID NO: 30219 - DNA, 201 bp, Homo sapiens
tgtatatatttgaataatttcaaaacagatacctagaaaagtcatctatctatctatctatctatctatctatctatctatcacacacacacacacatatrtgtgtgtgggtatatgtgtgcatgtgtgtgaataacaacattgaccacaaattatgaagccgagtatatttcacatatatatgtaggtatattttatgat

SEQ ID NO: 30220 - DNA, 201 bp, Homo sapiens
cattcgtttttccttagtgtatatatttgaataatttcaaaacagatacctagaaaagtcatctatctatctatctatctatctatctatctatctatcayacacacacacacatatatgtgtgtgggtatatgtgtgcatgtgtgtgaataacaacattgaccacaaattatgaagccgagtatatttcacatatatatg

SEQ ID NO: 30221 - DNA, 201 bp, Homo sapiens
tccattcgtttttccttagtgtatatatttgaataatttcaaaacagatacctagaaaagtcatctatctatctatctatctatctatctatctatctatyacacacacacacacatatatgtgtgtgggtatatgtgtgcatgtgtgtgaataacaacattgaccacaaattatgaagccgagtatatttcacatatata

SEQ ID NO: 30222 - DNA, 201 bp, Homo sapiens
aaaacaaactgacggtatctggaacattttatatttccattcgtttttccttagtgtatatatttgaataatttcaaaacagatacctagaaaagtcatctatctatctatctatctatctatctatctatctatcacacacacacacacatatatgtgtgtgggtatatgtgtgcatgtgtgtgaataacaacattgacc

SEQ ID NO: 30223 - DNA, 201 bp, Homo sapiens
ccctgtaattttacccaaaggtatatatacagaggaattgcatcaaatgatatatgaaagaattctctagtagaattattcataacttcaaaaaagaagcwgaccaaatgtacattaaggatgggtgaatcattacattaattccatgcaacggaacaatatagagaagtgaaaaaaaaccacatgtacttgcaactatgt

SEQ ID NO: 30224 - DNA, 201 bp, Homo sapiens
aatattttaaaaccctttctaaatgaacatttaaattgccatattaaaaacccacagaaaaatgcataaataacaattataacactaaacgagtatcttasccttgggtgtctagaactagagccaatgtctgatgttaaagtgataacatttatttggaagataagtccagggcagcaatggccaggacatgtggaaatt

SEQ ID NO: 30225 - DNA, 201 bp, Homo sapiens
gcatagggttttgtgcttatagggacttgtgcttagagggactctatgcttggattaatattctgcacttgctattttgtttgtcagacagaggatacttstctgctgaagagagaatggtcttacactaattccatagggatttgctctcccctctccaacaggcttgtcagagacatgcacagagtcctataatgacca

SEQ ID NO: 30226 - DNA, 201 bp, Homo sapiens
ttcttcaatgtttgataaacttgtaagtactgttttactctttgatcttttaaagattgttataaatgaagaagccttgatttctgcttataaaaacagagtaaaatttaaatcgtggaatagattggtggagctgtggttgagatactatattttattaattgtaatgacattttgagatctagtgctgctcactgaatt

SEQ ID NO: 30227 - DNA, 201 bp, Homo sapiens
gtcccaaatagaaggatgacctggatcaggcaaggtgctggccaggggaattggacatagtgaagagaatctgagaaagcacatgtttgtgtccagtaccrccactccttgtgccactgaggcgtgctcataccctccagtcatggctggctttatgagcatatgacgtccacagttgcatagggttttgtgcttataggg

SEQ ID NO: 30228 - DNA, 201 bp, Homo sapiens
gttcttcaatgtttgataaacttgtaagtactgttttactctttgatcttttaaagattgttataaatgaagaagccttgatttctgcttataaaaacagagtaaaatttaaatcgtggaatagattggtggagctgtggttgagatactatattttattaattgtaatgacattttgagatctagtgctgctcactgaat

SEQ ID NO: 30229 - DNA, 201 bp, Homo sapiens
caagtcccagatggaaagatgatctggatcaggcaagatgctgaccaggggaacaggagacacagtcaagggaatctgaggaagtgcatgtttttgcccartacagtccccaccttgtgccactcagatgtcctcatgccctccaattgtggctggttttataagcacatgactagtgtagttgcacgcggtcttgtgctt

SEQ ID NO: 30230 - DNA, 201 bp, Homo sapiens
catgcccacagtgtggtgatgcattcaagtcccaaatagaaggatgacctggatcaggcaaggtgctggccaggggaattggacatagtgaagagaatctragaaagcacatgtttgtgtccagtaccgccactccttgtgccactgaggcgtgctcataccctccagtcatggctggctttatgagcatatgacgtccac

SEQ ID NO: 30231 - DNA, 201 bp, Homo sapiens
tcattatcattatctatatccacatctatctcattaaatgatttatttttgaaatatttaaacacataatttggaaaataagtaattttaaaaagatcatmattattggaaagttacaggagtaaacagcaaagtttaagtcaagctcaatacacttagatttagaaattaagtgtagtttattttacaatacattgctta

SEQ ID NO: 30232 - DNA, 201 bp, Homo sapiens
gtggtcatgaaagtcagacctcatgcccacagtgtggtgatgcattcaagtcccaaatagaaggatgacctggatcaggcaaggtgctggccaggggaatwggacatagtgaagagaatctgagaaagcacatgtttgtgtccagtaccgccactccttgtgccactgaggcgtgctcataccctccagtcatggctggct

SEQ ID NO: 30233 - DNA, 201 bp, Homo sapiens
agtcccttggtggtggtcatgaaagtcagacctcatgcccacagtgtggtgatgcattcaagtcccaaatagaaggatgacctggatcaggcaaggtgctrgccaggggaattggacatagtgaagagaatctgagaaagcacatgtttgtgtccagtaccgccactccttgtgccactgaggcgtgctcataccctccag

SEQ ID NO: 30234 - DNA, 201 bp, Homo sapiens
cgtacttttccagaagggttacaaggggaagccacaacaaatattagtccatggaggagagaaaagggagaatgtatcctagctgtcttctgtcttctatyttcctttggccaaagattgtttgaggcagaactaccatctttgcttttcttccttacattatccaaccccttggtggctgtttgggaaagtcacactaac

SEQ ID NO: 30235 - DNA, 201 bp, Homo sapiens
tccagtcccttggtggtggtcatgaaagtcagacctcatgcccacagtgtggtgatgcattcaagtcccaaatagaaggatgacctggatcaggcaaggtrctggccaggggaattggacatagtgaagagaatctgagaaagcacatgtttgtgtccagtaccgccactccttgtgccactgaggcgtgctcataccctc

SEQ ID NO: 30236 - DNA, 201 bp, Homo sapiens
ttgtaatttgttacattggtgatgaaactctacagtgaaatatatgaatgatcatcataacaattgggataatcaggagggaggaaataaaagggaaataycaacaagaagacgtatattgggagtatctggattgctggcaaattctattttctgaccaaggtttggtaacatcaatgttaatgttataattttttctta

SEQ ID NO: 30237 - DNA, 201 bp, Homo sapiens
atgagccttaacgttgtaattttgtcatcaatgatgaaatgaaagggtgttgacatattctttaataggaagttctattataagaaagaaatgtacagtcytgttcacagctaaattctacttgactgtattaattcttggtgttatgaaatttaaacaatgtgatttaaaccttaagatgaatcatccccccacctgatt

SEQ ID NO: 30238 - DNA, 201 bp, Homo sapiens
acaacaggataatacaacaaaggaaatgaacaaatttgagctacatagataataatactcacagatgtgaaaggaattatcaagatggaaaaatacatttrgaatgatcttttacataaagtttggaaaaaaaatttttaatacattgtaatttgttacattggtgatgaaactctacagtgaaatatatgaatgatcatc

SEQ ID NO: 30239 - DNA, 201 bp, Homo sapiens
tcaccattctgtcatgagatggtatctcattgtggttttgatttgcatttctctaatgagcagtgatgatgagcttctttctttcccatattttcttgggmacataaatgtcttcttttgagaagtgtctgctcatatcctccacccactttttgatggggttgtttgtttaatagattgcaaaaattttctcccattctg

SEQ ID NO: 30240 - DNA, 201 bp, Homo sapiens
tacaaaacttccctaacaactgaagtcactaaagataaatgatggagaggttacacaaggaaaaattgcaaacactgaaagtgaatatgtccctatttgcrtactagcaaatgaggattcaggtttcacgtcaatttcagtgtgaataattccagcctataacaagaacagacagtgaatgaatgagttaatttgagttgt

SEQ ID NO: 30241 - DNA, 201 bp, Homo sapiens
gtcagtcctccaaatggataaacaaattatggcatacttatacaatggaatactatacagtgatcaaaattaacaaagaagactgacatgtttacaacagkataatacaacaaaggaaatgaacaaatttgagctacatagataataatactcacagatgtgaaaggaattatcaagatggaaaaatacatttagaatgat

SEQ ID NO: 30242 - DNA, 201 bp, Homo sapiens
gtaaaatggaaagtagttatacaaagggtatattatattaactcctaacaaaattaaacaaagccagttttttttcatctcctttcattttttttttttttgaaacagggtgttgctctgtctccccgttggagtgcagtggtgtgatctcgaccaattacaacctccgtctcctgggttcaaatgattctcctgccgcag

SEQ ID NO: 30243 - DNA, 201 bp, Homo sapiens
tgggaaacaagaagctaaagcagatttttctttcagttttgcggcatgtgaggtactgggtgaaagacagaagccttcgtctccatagattcacaagaggrgcattgtgtgtcttctagcagaaaacaaactggtggtgtatgaaacattttatatttcttactgggttttctgtaatatatgtatatgaataatttccaa

SEQ ID NO: 30244 - DNA, 201 bp, Homo sapiens
acccacccattcatcctgattttgggaaacaagaagctaaagcagatttttctttcagttttgcggcatgtgaggtactgggtgaaagacagaagccttcrtctccatagattcacaagaggggcattgtgtgtcttctagcagaaaacaaactggtggtgtatgaaacattttatatttcttactgggttttctgtaata

SEQ ID NO: 30245 - DNA, 201 bp, Homo sapiens
aaaacatatttagtatgatctttgagtatgtttgtgcatatataatgctactttgactgctatagtaagataacagatttagtcaccatagctaagaatgkgaaaaagcatttacaagaatttggcttgctaatgatgctattaaaagatgaaataaaattgatatgctgtatattgcatagagtatttgtctattttcat

SEQ ID NO: 30246 - DNA, 201 bp, Homo sapiens
gattgctagacacctttattcttatttccaatttaattattcataattcacatttcagtgtcagaaagtcatgaatttccaataaactatagtaagatggrtattacatatatagacctattatgccaaaatgtgtctctaaatgaaatatgtatattcatattgttagcattctaatttcacaatactattcatgtgtac

SEQ ID NO: 30247 - DNA, 201 bp, Homo sapiens
gtatatgaaataactatcatagaatgaaatttattgaagtaaaaatacattctaaattagaataggaaagaacttggaaactattgtttaataatatgttwtataaatacaaaactgtaaatattactcttacgttacttattttggaaaggatatgaaacaatgggaattttcatattctactcctaggatgataaatct

SEQ ID NO: 30248 - DNA, 201 bp, Homo sapiens
gcccacaggtatattcaagtcccagatggaaagatgatctggatcaggcaagatgctgaccaggggaacaggagacacagtcaagggaatctgaggaagtrcatgtttttgcccagtacagtccccaccttgtgccactcagatgtcctcatgccctccaattgtggctggttttataagcacatgactagtgtagttgca

SEQ ID NO: 30249 - DNA, 201 bp, Homo sapiens
ctacattagagaaaaataccatagaaaggcaaattttttaaggtataaaacatatttagcatgatctttgagtatgtttgtgcatatataattctactttsactgctatagtaaaatgatccagatttagtcaccatagctaagaaggggaaaaagcatttgcaagaatttggcttgctaatgatgctattaaaagataaa

SEQ ID NO: 30250 - DNA, 201 bp, Homo sapiens
tagtaaccagctactttactaaaatgttttttatgtattacctgttattaaggtgatgacatttatttagaaatcaagttcaagacaaaaatggcaaggayatgtggaaattgagacaggaacaaatgtgaaacaatgtgtggtgatgtctggtatgactctgctggcagccacttcacagtgaggtgagagagacagcat

SEQ ID NO: 30251 - DNA, 201 bp, Homo sapiens
tctttgtgtccatatgtatttaatgtttagctcccacttgtaagtgagaacatgtggtacttgctttgctgtttctgttttacattcccaccagcagtatraaagcattccctttcatcacaaccttgacagagtctgtttttgtttgtttgtttgtttgtttgttttgtaataggcattctgaggggtgtgagaggttat

SEQ ID NO: 30252 - DNA, 201 bp, Homo sapiens
ccaagttgcaggagaatgcctagaccatgattttaatctcttctgtgacctttgtattacaaaaagaagaaaattgtgaccattttcatgtcaggtatackaaaaatttataaaaactcctttttaaagaacttgtgagtagcttcactatgcctggctaacattttcatttattgtagagggagtttcggtgtattgcac

SEQ ID NO: 30253 - DNA, 201 bp, Homo sapiens
tgtgtttgaataggagttaatttgagctgttttggaaattatcatgttttccataaagacagcattgatttcatccattagcatattgagatgatttcctstttgacgttggtcacagaatttaaaaggaacaagaacattactgcacattcaggaatcagttacacatagaagttaaggtcaggaccttaaagggaatct

SEQ ID NO: 30254 - DNA, 201 bp, Homo sapiens
caaaaagaagaaaattgtgaccattttcatgtcaggtatacgaaaaatttataaaaactcctttttaaagaacttgtgagtagcttcactatgcctggctmacattttcatttattgtagagggagtttcggtgtattgcacaggctggtcttgaactcctgggtgctcctgccccagccttacaaaatgttgggattatg

SEQ ID NO: 30255 - DNA, 201 bp, Homo sapiens
ttctgctccaaaggtgaagtgtcacattagaaggcaggatgctttgtgctccttcccgcaagctaacttccaaatacattctctatttttatatcagactyttttattactttttattattttttatattagactttacatgaagtgagccgttaaccttttttgttacaagacttcatgcccacaggtatattcaagtcc

SEQ ID NO: 30256 - DNA, 201 bp, Homo sapiens
tatagacaaagtgtgtttcttagaggcaacagattggtgttttgtttgtttgtttgtttttccatttagccagactatgtcttttgattggagagtttagyccatttacattcaatgttagtattggtagttaggacttacttttgtcattttgttatttgttttctggttatgttgtggtctgctcgtctttctttccta

SEQ ID NO: 30257 - DNA, 201 bp, Homo sapiens
ccagtgttgagtgcatatatatttacaattgcaatatcattttgatgaattgacccctttatcattatatggtgacctttatctcctcatagtttttgtcytgaactctattttgtctaatacttgtataggtactccactttttttggcttccattgccatgaattatctttttccatcccgttgttttctttctgtgca

SEQ ID NO: 30258 - DNA, 201 bp, Homo sapiens
ggacaatggcgcatttgagctccctaccaggtgggcctcctcgcctcagagactgggttctgctttgcttacttcaggtcaagtgtatccctcatttcttytgggactctagcctagcaggaagggttggggaggatgttgtttgtggctaatttctaaaaggtacaactatgacttggacaaatgttttgacggaactgt

SEQ ID NO: 30259 - DNA, 201 bp, Homo sapiens
cagctactcgggaggctgaggcagaaggatcgcttgaacctgggaggcggaggttgcagtgagctgagattgtgccactgcagtacagcctgtgtgatggrgtctcactctgtctcaaacaaacaaacaaacaaacaaacaaaaattccagttcaaactgaatgtccctaacctcagagaactatagtcaattcttcactg

SEQ ID NO: 30260 - DNA, 201 bp, Homo sapiens
aaacagatagttgatgcacgattagggaaaaataaggcaacctatgaaaatggccttatggattaaaagaagtgagctcctatatggtcagtggaatccasgaaaaatttaatggaaaaagcgccacctaagcttagctttaaaacacagagtatcttcaggtagaaaaggctataggagaatgtgcccaaatggagtttg

SEQ ID NO: 30261 - DNA, 201 bp, Homo sapiens
taccgggtgtaaaattgaataggatatagtgtcttccctcacagagctgccaattatgttggaggatgtaataaatacaaagtctgtttcttcatcttcgrtttaacaaatgactgatgtgaggaaaaaagttgtaggaatatgttcacatagtcacccaaatggagcatcctactctgtcaccatttcaggattaagact

SEQ ID NO: 30262 - DNA, 201 bp, Homo sapiens
tggtcttgaactcctgggtgctcctgccccagccttacaaaatgttgggattatgggtgtgagccaccctgcctggccaataaagagacttattgaaaatrttaagttgaatatgcaagaaggaatacaaattaatgaaagtggtaaatatgtgcataattgtaaatgaatgtttactgtataaaataataatgtcttgag

SEQ ID NO: 30263 - DNA, 201 bp, Homo sapiens
gttgggattatgggtgtgagccaccctgcctggccaataaagagacttattgaaaatattaagttgaatatgcaagaaggaatacaaattaatgaaagtgrtaaatatgtgcataattgtaaatgaatgtttactgtataaaataataatgtcttgagggtgattatataattgataagacatatgcaaatggcaaaaaat

SEQ ID NO: 30264 - DNA, 201 bp, Homo sapiens
gccaataaagagacttattgaaaatattaagttgaatatgcaagaaggaatacaaattaatgaaagtggtaaatatgtgcataattgtaaatgaatgtttrctgtataaaataataatgtcttgagggtgattatataattgataagacatatgcaaatggcaaaaaatagactggaggtaaaggtgacaggagtaaattt

SEQ ID NO: 30265 - DNA, 201 bp, Homo sapiens
ataattgtaaatgaatgtttactgtataaaataataatgtcttgagggtgattatataattgataagacatatgcaaatggcaaaaaatagactggaggtraaggtgacaggagtaaatttacttgaagtagtttttgaacttttctatgtctatgaggagattttgaacaatgaccctgtaattttacccaaaggtatat

SEQ ID NO: 30266 - DNA, 201 bp, Homo sapiens
gactaaatttcagaaacataatgttgagtccaagaagccacaaacaacaagaacatgtaggaatgcacctacacagagttcaaagcaggccagaccaagckatggagtttagggttgcatacctagttggtaaagtatgaagaaaattaaggaaataatcaatataaattatggatattgcttatctcaggagatgtgaag

SEQ ID NO: 30267 - DNA, 201 bp, Homo sapiens
gccacaaacaacaagaacatgtaggaatgcacctacacagagttcaaagcaggccagaccaagctatggagtttagggttgcatacctagttggtaaagtrtgaagaaaattaaggaaataatcaatataaattatggatattgcttatctcaggagatgtgaagaagggtttagggggttggaaagtggcatggaggtgg

SEQ ID NO: 30268 - DNA, 201 bp, Homo sapiens
ccagcaccaaggtccacataaaagctttgcaaactgtgacctcctttcttctgttatgtgccatttactttctgtccatgatcatatcagtttgtaatttkgggaggctggaaaagcaacctgtcttcatgttctgccaagctattatattcagctatccttcaacccacccattcatcctgattttgggaaacaagaagc

SEQ ID NO: 30269 - DNA, 201 bp, Homo sapiens
ctcaccttacttacaaattatttgtatattattttgtttagtatcctttctaaatgaatgttttaattgccacgttataaacacatggaaaagtgattcaratgaatgtatatcttagctttgggtgtctagaactagagccaatgtctgattttacagtgatgacatttatttgggaaggcaagtccagggcagcaatga

SEQ ID NO: 30270 - DNA, 201 bp, Homo sapiens
taagtgtagtttattttacaatacattgcttatgcaaataattatttatggatgaccttcaatgaatcctcctttcactatgatcatgatagaaacaattyagattttcgtgtaaataaaattccttaataagaaagataaagcgaataacacattttttgagcacgcttttatttctaaagagcggattttaggaccaaa

SEQ ID NO: 30271 - DNA, 201 bp, Homo sapiens
aaattgagttagtaaccactcaccttacttacaaattatttgtatattattttgtttagtatcctttctaaatgaatgttttaattgccacgttataaacrcatggaaaagtgattcagatgaatgtatatcttagctttgggtgtctagaactagagccaatgtctgattttacagtgatgacatttatttgggaaggca

SEQ ID NO: 30272 - DNA, 201 bp, Homo sapiens
ttggctctacattagagaaaaataccatagaaaggcaaattttttaaggtataaaacatatttagcatgatctttgagtatgtttgtgcatatataattcwactttgactgctatagtaaaatgatccagatttagtcaccatagctaagaaggggaaaaagcatttgcaagaatttggcttgctaatgatgctattaaaa

SEQ ID NO: 30273 - DNA, 201 bp, Homo sapiens
tcatcactgacttaattggcaaggaacaggatatctgcttcaatgacctcattctcaccagcttatctcatacgtacaaatatatacatatctgtatataygagtctcacccatgtatacatatatttaaatgtatacatatatatgagtctcactgtcacccaggctgactggcagtggcataagcatggctcactgcag

SEQ ID NO: 30274 - DNA, 201 bp, Homo sapiens
ctttaattctggtatattttgtttattctgtttagctcctgtaacattgcatacaaattatttatattaatagttttaggacttgggtgaaattcttgaaytatgaataattttaggaacttatttctataaatcatattgcatcaacaaaaatgcttggtatgtagaaggatgttactgaatgagagacaaataattact

SEQ ID NO: 30275 - DNA, 201 bp, Homo sapiens
cgtgagtcagagcaatattctcaaatgtggaatatgttgtctccaaaatcccagtaggcccccaaaacatagtgtctcttttgtagtgataggaaatatayagagagagcaaaatgccgtttactgtaaaaaagattgtctcagcatgtggactagggacactaaaaaccttaaaacatcacctatgttgtcggtccctga

SEQ ID NO: 30276 - DNA, 201 bp, Homo sapiens
aagctccttttatattctggttattaatcccttgccagatgagtagtttgcaaatattttctcctattctgtggattgtctcttcactttgttgatcatamctttgctgtgcagaagtattttttaacttgatgtgatcccaattgtgcattttttacttggttgcctgtacttgtagggtattactacttaagaaatttt

SEQ ID NO: 30277 - DNA, 201 bp, Homo sapiens
ctagaacccagcacaaggaatagatggtcaaaaatgatattttaatgaacaaataaatgggtggataaaatgggtaagctgatgtggtaaaccaatgaaarggaaactcatcacaaaatctgcagttgcatgagttcccctgttctggtctcaggttaagattacaggcttatccaagcagaatccttcctcagaggaaaa

SEQ ID NO: 30278 - DNA, 201 bp, Homo sapiens
gatatatttgtattgtgatattttttagctggttattagatacacaaaaaaggtatttcatttttaaaaattgagttagtaaccactcaccttacttacamattatttgtatattattttgtttagtatcctttctaaatgaatgttttaattgccacgttataaacacatggaaaagtgattcagatgaatgtatatctt

SEQ ID NO: 30279 - DNA, 201 bp, Homo sapiens
atgtttttaacgtaatacctgatattaaagtgatgacatttatatggaaggccaattcaagacaaaaatggcagggacatgtggaaattgagacaagaacsgatgtgaaacaatgtgtggtgatgtctggtatgactctgctggcagccacttcacagtgaggtgagagagacagcatggtggtcatcagatgcatgcact

SEQ ID NO: 30280 - DNA, 201 bp, Homo sapiens
aagtgatgacatttatatggaaggccaattcaagacaaaaatggcagggacatgtggaaattgagacaagaacggatgtgaaacaatgtgtggtgatgtcyggtatgactctgctggcagccacttcacagtgaggtgagagagacagcatggtggtcatcagatgcatgcacttgactcccagaacttttccagaagggc

SEQ ID NO: 30281 - DNA, 201 bp, Homo sapiens
ttttccaaaaggtataaaatgtatccctgaatatatttttagtaatctcaaacttcaggcatgataactaaaaccaaattaacataaaataatacaggacrcaaaagaccaatagaaaatctgaaaagtagctagaggtagaagatagagtatgttgaaaagaactgtattctaaatacaacctgattttaacagaaaaca

SEQ ID NO: 30282 - DNA, 201 bp, Homo sapiens
aagtaagttaaatgattgaacttcaagttcaggggaaaggtagtcagtcttcgtgtgatgggaggatactgcaagattatatatcaaagggtctggtactsaggaatacttataaaattgctgaacattttaattaaataataaatatttaaatattagacttgagagaaactttaccaaaggcctaagaattagagatat

SEQ ID NO: 30283 - DNA, 201 bp, Homo sapiens
tgcttgcctttctgcacaaacattgcagttattttttacttattcaacttaacataataatctccaattccatccgtattgctgcaaatgacaggatctcrttttttaaatggctgaatagtactccactgtgtatatgtaccacattctctctccctcttttttttttttttttttttgagatggagtctcgctctgtct

SEQ ID NO: 30284 - DNA, 201 bp, Homo sapiens
aaacataattttacattttttggtattttaacattatgtgggcatattagtttaccttatcagtaaacaggtatgggaagtttaggaatttcttttttttwaatgtatttttaagttttgtggatatatagtaggtctatattgagtacacgggatgtgttgatacaggcatgcaaagagtaataatcacataagaatggg

SEQ ID NO: 30285 - DNA, 201 bp, Homo sapiens
cttcccagtagctgctaaacacacttttgtttttagggaatgtctctttctccttcattatgacttatgctgccttcaatgctttgctgatacaaaagaastgaactcaaaagaagtaaaaataaaagctagcaaactttgcaactggttaagctggttgtaaacgtacctaatcactttctactgtgaatgatatatttg

SEQ ID NO: 30286 - DNA, 201 bp, Homo sapiens
aagcccagctaaaataataaaattgatttcagttatcatcaagcacagtgaggacagaaatagcaacaaaacacattactttaggcaaagatactcttttyttgaaaacccaaactacattccattacctttcataacagtcatattccttgtccattcttgtttctaccatggttctaactcctacttttattcattaca

SEQ ID NO: 30287 - DNA, 201 bp, Homo sapiens
tgtgcaccaggcagaggactaaaacgtcagtaaaaaagctgtagagttactgggttgaagtaacagaggactgagtttagggtaacatgagccgcaggagrtcaggagaaaatctgagaaaggagaagtccagaaaaggggagccccagcttctgactataaactatccaaagctttgtctggtccctacaccacacatgt

SEQ ID NO: 30288 - DNA, 201 bp, Homo sapiens
cggaaatattaacagcttttcaatagattcactggcacaatgaagttggagaactgtagcagttggagcctttgatggataataaactggaatcatacctrtcattgaatcctagattactgaggagactgcccctgtggaggtccttgtgggcggcccccttggggaggtggtccctggggctttccaggaggaggtggg

SEQ ID NO: 30289 - DNA, 201 bp, Homo sapiens; identical to SEQ ID NO: 5583

SEQ ID NO: 30290 - DNA, 201 bp, Homo sapiens
tatatctgctcagctgtcttctgtcttctatttcccactggccagggtttccctgaggcagaactaccatctctgctgttctgctttccatcatccaatcycttgatggaggttatgaaagtcagacctcatgcccacaatgtggtgatccattcaagtcccaaatggaagggtgatgtgggtcaggcaaggtgctgacca

SEQ ID NO: 30291 - DNA, 201 bp, Homo sapiens
tgctttctacttaactttttagacatgcacatagaactgtttactttcccctcaccagacagtcccttcgggcaagttcatctaactgtgtgctccacgarggatctctccttgagacttgacagttgatttgcagacaaaagtatgccctcatggaactgtcacctccagggtttagcttagacctcacatccattagga

SEQ ID NO: 30292 - DNA, 201 bp, Homo sapiens
tcctgctttctacttaactttttagacatgcacatagaactgtttactttcccctcaccagacagtcccttcgggcaagttcatctaactgtgtgctccamgagggatctctccttgagacttgacagttgatttgcagacaaaagtatgccctcatggaactgtcacctccagggtttagcttagacctcacatccatta

SEQ ID NO: 30293 - DNA, 201 bp, Homo sapiens
gctgctcggggctagctgaccccatgacaagaatgttagggaacttcccagtagctgctaaacacacttttgtttttagggaatgtctctttctccttcawtatgacttatgctgccttcaatgctttgctgatacaaaagaagtgaactcaaaagaagtaaaaataaaagctagcaaactttgcaactggttaagctggt

SEQ ID NO: 30294 - DNA, 201 bp, Homo sapiens
tacatgtaagatgttaaggcaaatattgccattttttttctcatttagagtagtttattatgctaagggcctgggaaacactttagattcagtaaaaaaaactacctagaagaataaagcagaatgaatactagaaaaagactgaaagaaaaaaaatgtgtaaagacgcacagaatgaggaacatctgttggtaaaatata

SEQ ID NO: 30295 - DNA, 201 bp, Homo sapiens
cctcttcaaggagaactacaaaccactgctcaatgaaataaaagaggatacaaacaaatggaagaacattccatgctcatgggtaggaagaatcaatatcrtgaaaatggccatactgcccaaggtaatttatagattcaatgccatccccatcaagctaacaatgactttcttcacagaattggaaaactactttaaagt

SEQ ID NO: 30296 - DNA, 201 bp, Homo sapiens
gcccaaagtctccttaagctgataagcaacttcagcaaagtctcaggatacaaaatcaatgtacaaaaatcacaagcattcttatacaccaataacagacwaacagagagccaaatcatgagtgaactcccattcacaattgcttcaaagagaataaaatacctaggaatccaacttacaagggatgtgaaggacctcttc

SEQ ID NO: 30297 - DNA, 201 bp, Homo sapiens
aaacggtattcagttaggaaaagaggaagtcaaattgtccctgtttgcagacgacatgattgtatatctagaaaatcccattgtctcagcccaaagtctcsttaagctgataagcaacttcagcaaagtctcaggatacaaaatcaatgtacaaaaatcacaagcattcttatacaccaataacagactaacagagagcca

SEQ ID NO: 30298 - DNA, 201 bp, Homo sapiens
ttgctaccactcagtctttgggtccacaccgtctttaagagctgaaaccttgctactgctcagccctggggccatgccatctttaagagctgtaacatcaytgcaaaggtccgtgcctccattcttgaagtcagcgagaccacgaacccacctgcaggaaccaactccggatacaacaccagcattttaaaaatttctttt

SEQ ID NO: 30299 - DNA, 201 bp, Homo sapiens
ttacattatccaaccccttggtggctgtttgggaaagtcacactaaccaatacccccatttttctaagagatagtttttttttaatttattttttctcttytcctctcccctttccctatgtttcctgctttctacttaactttttagacatgcacatagaactgtttactttcccctcaccagacagtcccttcgggcaa

SEQ ID NO: 30300 - DNA, 201 bp, Homo sapiens
gaaataaacggtattcagttaggaaaagaggaagtcaaattgtccctgtttgcagacgacatgattgtatatctagaaaatcccattgtctcagcccaaartctccttaagctgataagcaacttcagcaaagtctcaggatacaaaatcaatgtacaaaaatcacaagcattcttatacaccaataacagactaacagag

SEQ ID NO: 30301 - DNA, 201 bp, Homo sapiens
gcacaagacagggatgccctctctcaccactcctattcaacatagtgttggaagttgtgaccagggcaatgaggcaggagaaggaaataaacggtattcarttaggaaaagaggaagtcaaattgtccctgtttgcagacgacatgattgtatatctagaaaatcccattgtctcagcccaaagtctccttaagctgataa

SEQ ID NO: 30302 - DNA, 201 bp, Homo sapiens
tgaaaactggcacaagacagggatgccctctctcaccactcctattcaacatagtgttggaagttgtgaccagggcaatgaggcaggagaaggaaataaasggtattcagttaggaaaagaggaagtcaaattgtccctgtttgcagacgacatgattgtatatctagaaaatcccattgtctcagcccaaagtctcctta

SEQ ID NO: 30303 - DNA, 201 bp, Homo sapiens
atagaaaaagagggaatcctccctaactcattttatgaggccagcatcatcctgataccaaagctgggcagagacgcaaccaaaaaagagaattttagacyaatatccttgatgaacattgatgcaaaaatcctcaataaaatactggcaaaccgaatccagcagcacatcaaaaagcttatccaccatgatcaagtgggc

SEQ ID NO: 30304 - DNA, 201 bp, Homo sapiens
aactattccaatcaatagaaaaagagggaatcctccctaactcattttatgaggccagcatcatcctgataccaaagctgggcagagacgcaaccaaaaaagagaattttagaccaatatccttgatgaacattgatgcaaaaatcctcaataaaatactggcaaaccgaatccagcagcacatcaaaaagcttatccacc

SEQ ID NO: 30305 - DNA, 201 bp, Homo sapiens
cctttgtccttttgctcttaacaataaaccttgctaccactcagtctttgggtccacaccgtctttaagagctgaaaccttgctactgctcagccctgggkccatgccatctttaagagctgtaacatcactgcaaaggtccgtgcctccattcttgaagtcagcgagaccacgaacccacctgcaggaaccaactccgga

SEQ ID NO: 30306 - DNA, 201 bp, Homo sapiens
attccttctgaaactattccaatcaatagaaaaagagggaatcctccctaactcattttatgaggccagcatcatcctgataccaaagctgggcagagacrcaaccaaaaaagagaattttagaccaatatccttgatgaacattgatgcaaaaatcctcaataaaatactggcaaaccgaatccagcagcacatcaaaaa

SEQ ID NO: 30307 - DNA, 201 bp, Homo sapiens
ccacggggcaacccactcaggcccccttccaccctgtggaacctttgtccttttgctcttaacaataaaccttgctaccactcagtctttgggtccacacmgtctttaagagctgaaaccttgctactgctcagccctggggccatgccatctttaagagctgtaacatcactgcaaaggtccgtgcctccattcttgaag

SEQ ID NO: 30308 - DNA, 201 bp, Homo sapiens
actagaaaatctagaagaaatggataaattccttgacacatacactctcccaagactaaaccaggaagaagttgagtctctgaatagaccaataacaggakctgaaattgtggcaataatcaatagcttaccaaccaaaaagagtccaggaccagatggattcacagccgaattctaccagaggtacaaggaggaactggt

SEQ ID NO: 30309 - DNA, 201 bp, Homo sapiens
cctatttctccacatcctctccagcacctgttgtttcctgactttttagtgattgccattctaactggtgtgagatggtatctcactgtggttttgatttkcatttctctgatggccagtgatgatgagcattttttcttgtgttttttggatgcataaatgtcttcttttgagaagtgtctgttcatatccttcacccac

SEQ ID NO: 30310 - DNA, 201 bp, Homo sapiens
tcattgttggacatttggattggttccaagtctttgctattgtgaatagtgctgcaataaacatacgtgtgcatgtgtctttatagcagcatgatttatartcctttgggtttatacccagtaatgggatggctgggtcaaatggtatttctagctctagatccctgaggaatcgccacactgacttccacaatggttgaa

SEQ ID NO: 30311 - DNA, 201 bp, Homo sapiens
gaaaagttgtttcttccactttttgaattaaagaaaaccttttttttttgaaattgacatctgatgtcaagtatttccatttattttgcttagccacctcygagcccttgaatttccaattttccctttgtctcccattcttaatatttctcaaaaaaattcaattattccctctcttaaaataaactcaatgtaaacagg

SEQ ID NO: 30312 - DNA, 201 bp, Homo sapiens
gtttggttttttgtccttgccatagtttactgagaatgatgatttccaatttcatccatgtccctacagaggacatgaactcatcattttttatggctgcwtagtattccatggtgtatatgtgccacattttcttaatccagtctatcattgttggacatttggattggttccaagtctttgctattgtgaatagtgctg

SEQ ID NO: 30313 - DNA, 201 bp, Homo sapiens
aacagtcagggtcctctgctgcaagtctgctgtagtttgctggaggtccactccagaccttgtttgcctgggtatcaccagtggaggctgcaaaacagcaratattgctgcctgttccttcctctggaagcttcatcccagagggttacccgccagatgtcaggcagagctctcctgtatgaggtttctgtccaccattgc

SEQ ID NO: 30314 - DNA, 201 bp, Homo sapiens
tttgagatgatgttatctgccaagcgcagatctctccaaaggatttcttctagccttaattatccacctcacaggacaaacctttgccattccccatctaytttttctttcggctcctcaattcctgacacaacaaagttgtacatatttcccacactcttggtttagcagagttcttttatcagttatgtttttctgcaa

SEQ ID NO: 30315 - DNA, 201 bp, Homo sapiens
tcctctggaagcttcatcccagagggttacccgccagatgtcaggcagagctctcctgtatgaggtttctgtccaccattgctgggagatgtctcccagtmaggaggcacagaggtcagggacccacttaaggaggcactctgtcctttagcagagctcaagtgctgtgctgggagatctgctgctcttttcagagtgtca

SEQ ID NO: 30316 - DNA, 201 bp, Homo sapiens
ccctttataagggttagttgactgtttatgatacattccggtatttcccatttttgttttggttcatttctaagtgtgcattataattttaatattaaagkttttgattaggagaaatgtctcatagaaattattattactcatctgattatatactgaagggaaaaatcaattagttgtatatacattcttatacaactc

SEQ ID NO: 30317 - DNA, 201 bp, Homo sapiens
accacatcctagagagcatctgcaagtgtgatttaagtttatgctaatgtgcattcatctgataatccatctggctttggcagaagccagataggttaacwgaatagggatcaaaaatggacaaccacctcctggaacttttgagttttttgtcatgtcggtgaccaattctattccttggacaatgcggttagtatgttt

SEQ ID NO: 30318 - DNA, 201 bp, Homo sapiens
atcacttcctgcttatgggtaacagttaatgcaatattattaatatattgagttagcatgatgttttgcaaaatgccaattaaactgaaaacagaagtgasatagccatgacataaaacagtgaagcagtgcttttgttcttacctcaccaaaacaaatcattttgattttctctcccaatcgatgtagattaaaaagcat

SEQ ID NO: 30319 - DNA, 201 bp, Homo sapiens
tatatttgagaaactcatcacttcctgcttatgggtaacagttaatgcaatattattaatatattgagttagcatgatgttttgcaaaatgccaattaaaytgaaaacagaagtgacatagccatgacataaaacagtgaagcagtgcttttgttcttacctcaccaaaacaaatcattttgattttctctcccaatcgat

SEQ ID NO: 30320 - DNA, 201 bp, Homo sapiens
gggtgatgtgggtcaggcaaggtgctgaccaggggaataggagacagtcaagtaaatctgaggaagcacatgtttgtgtcccatgcagtccactccttgtkccattcagatgtgctcatgccctccaatcatggctgactatgagcatataatttccactgttgcacagggtcttgtgcttagagacgcacacgcttagaa

SEQ ID NO: 30321 - DNA, 201 bp, Homo sapiens
taggggaaatatgacaataatatagtcttgatgcagctgtatcaggtgtctgagttggagacaaggtagaacaccaaaattagatggcacctattataatrgtttgaaaaatcatataaacaactttggtctatttgaatatgtatttttttctattgtcaattatttgtattatgatattttctagttgattatttaaac

SEQ ID NO: 30322 - DNA, 201 bp, Homo sapiens
ccattaaaaatgatttatagcaagagaataaaagttcatttctacccctaaaacaataagataaaaaagagtaatgaatattgagaatccaatagacagakttgagaaccagttaaacataagaaagaattagtgaattggaagataactgcccagaatgaagcataaagagaccaagaggtagaaaatataaggctagag

SEQ ID NO: 30323 - DNA, 201 bp, Homo sapiens
gactcccaggaactcgaaaccagcaccaagaatagatggtcaaaaatgatactttaatgaacaaataaatgggtggctaaaatggataagttgatgtggtwaaccagtgaaaaggaaactcacacaaaatctgcagttgcatgaattcccctgttccagtctcaggttaagattacaggcttatccaagcagaatccttct

SEQ ID NO: 30324 - DNA, 201 bp, Homo sapiens
aagctacatataacagtgtaggcatccaatgtatgatttatgtattaggttggaaaatttccctaacaactcacattgctgaacgcaaattatggagacaytaaacaaggaaaaaattgcaaaatgatgattaagtgtatgacttgatttgcatgctagcaaatgagaattcagctttcacatcaacatcagtatgaaaaa

SEQ ID NO: 30325 - DNA, 201 bp, Homo sapiens
aaagggaaacttgtccattggtattaggcctgccttaaaaaatgcggacatggtatgtttactactcatcattattttccataacagtaatggtagaattygtattttcccatgggcaccttcattaggcttatagactattttgatatttcaacatattattttctttgagtccttttaatgagttgttaaacaatgcta

SEQ ID NO: 30326 - DNA, 201 bp, Homo sapiens
aattcgtattttcccatgggcaccttcattaggcttatagactattttgatatttcaacatattattttctttgagtccttttaatgagttgttaaacaaygctaaaatttgccttacagtatactgttaactaatcatattttcccaaagtcatttgacataatgtttggttaaaggaaatatgtctagtacagttacac

SEQ ID NO: 30327 - DNA, 201 bp, Homo sapiens
atagactattttgatatttcaacatattattttctttgagtccttttaatgagttgttaaacaatgctaaaatttgccttacagtatactgttaactaatsatattttcccaaagtcatttgacataatgtttggttaaaggaaatatgtctagtacagttacactctaggattgtaatcctagaattgtaaatcagtgca

SEQ ID NO: 30328 - DNA, 201 bp, Homo sapiens
tttaattacaatggttttccttcctttccttttttacctgagtagaatctcttgttattttctggacagaaaaacagatctgcatgtggtggtaattttastccttccatttgaatatatgtatctctgttatgtgcttgtttatctaatattaaataaaattattcactttctaattatccacaacattgacaagctttt

SEQ ID NO: 30329 - DNA, 201 bp, Homo sapiens
tgatggatcacatctgaagacccactattgcactcttatcagaatacatatacacacacatgcatatcactgagttttaattgctaaagttgacaagtctstcaaatgtccatgggtgataaaatggataaataaattattgcatagtcatacaatagaatactatacagcaatcaaaatgaaccaactagagagacgttt

SEQ ID NO: 30330 - DNA, 201 bp, Homo sapiens
catatacacacacatgcatatcactgagttttaattgctaaagttgacaagtctctcaaatgtccatgggtgataaaatggataaataaattattgcatastcatacaatagaatactatacagcaatcaaaatgaaccaactagagagacgtttataaagaatgttaataaaaaggaaaatgaacaaatttgcactacat

SEQ ID NO: 30331 - DNA, 201 bp, Homo sapiens
aacaaatttgcactacatagatacgagagatattaagatggaaacatgattccgtataattacatttatataaagtttacaaaactatatttttaatgaaytgcaatttattacattgttgtcgaaattctaaagtgagacccaagagtgattattgtaacaactggcacagtagggacggaggaaacaaaagggaaatga

SEQ ID NO: 30332 - DNA, 201 bp, Homo sapiens
gtggtaacatgacccttaatgctataatttttttctatactgtaccttcaggctttattaatttatatatatgttatgtttcatagtaatgaaaatatttwaaaagcagaatcatataataaatgaatgaatataaaataggctgaaaaaacattcttgtagacaccatggtaattagaatttttgctgaataaagaagaa

SEQ ID NO: 30333 - DNA, 201 bp, Homo sapiens
tcttctgtgtcagttctgtgacagaacatttacttaacacatcatgaaggctagtttggatgtggaggggaatagactccatctatccatatgaggtgagycaaagcacttagacgtgttttcaaaccactaatcttgatgattcagaaatgtgctcccttttccaatttcatcctgatacaaatgtatcatctccggatg

SEQ ID NO: 30334 - DNA, 201 bp, Homo sapiens
atcctgaattctttgctaaaaatttgttctggggtttgaattaaataataacattcccctctccccttaaaaaaagatgagggctgtttactaaacatacstccttactgaaaatgctaataaccaatctgcttcagaaagactgttatggactgacttgtttgtctccaaaatccatgtgttgaagcccacactctcaat

SEQ ID NO: 30335 - DNA, 201 bp, Homo sapiens
taagttatttaaaaatctaaacacccgactgtaaaaataatacctatgtattattgctatattataaaattttagatctggctaccatcatgaaaaaaaaatatgacataccaaagaaatgctgattccagaaatgtgaagatggtttaacccatggtaatatattatgataatcaactcactaatagatttaagagggaa

SEQ ID NO: 30336 - DNA, 201 bp, Homo sapiens
atttcccaactatgaggtgtgtgtatgtgtgtgtgtgaacgtgtttgtgttaatgagcttgttaacaataagttatacaaaattattagttggcagcaacsagatttttaggaatattggccttcctgggcttcccaagaaaacgttggatgcttttggtaggaaaagttaggactcactaaatctggcacagaaaaggtg

SEQ ID NO: 30337 - DNA, 201 bp, Homo sapiens
ccatctctactaaaaatacaaaaaaattagccgggcatggtggcaggtgcctatagacccagctactcgggaggctgaggcaggagactggtgtgaacccrggaggcagagcttgcagtgagccaagatcgcgccactgcactccagcctgggtgacagagcaagcctgcgtctaaaaaaaaaaaaaaaaattggtgtttt

SEQ ID NO: 30338 - DNA, 201 bp, Homo sapiens
atcatgtgtcatgatgttgatatgactttgccagttgtcgcttcacaatgaggtgagacagacagcatggtggtcatcagatacatgcacttggctccccrtacttttccagaagggttacaaggggaagccacaacaaatattagtccatggaggagagaaaagggagaatgtatcctagctgtcttctgtcttctatct

SEQ ID NO: 30339 - DNA, 201 bp, Homo sapiens
gcaggcagatcacgaggtcaggagatcgagaccatcctggctaacatggtgaaaccccatctctactaaaaatacaaaaaaattagccgggcatggtggcrggtgcctatagacccagctactcgggaggctgaggcaggagactggtgtgaacccgggaggcagagcttgcagtgagccaagatcgcgccactgcactcc

SEQ ID NO: 30340 - DNA, 201 bp, Homo sapiens
agttaggactcactaaatctggcacagaaaaggtgaatcaacagtggtcgtgattctagttttgaccgagctgcatataacagtgtaggcatctgatgtasgatctatgtattaggttagaaaatttcccttacaactgccattgctcagcacaaattatagagaggttaaacaaggaataaatggcaaaatgatgaataa

SEQ ID NO: 30341 - DNA, 201 bp, Homo sapiens
aggcagaaggatcgcttgaacctgggaggcggaggttgcagtgagctgagattgtgccactgcagtacagcctgtgtgatggagtctcactctgtctcaaacaaacaaacaaacaaacaaacaaaaattccagttcaaactgaatgtccctaacctcagagaactatagtcaattcttcactgaagcatttgtatcttcct

SEQ ID NO: 30342 - DNA, 201 bp, Homo sapiens
ggagtgcagtggcgcgatctcggctcactgcaagctccgcctcccgggttcacgccattctcctgcctcagcctcccgagtagctgggactacaggcgccygccaccatgcccggctaattttttgtattttttggtagagatggggtttcaccgtgttagccaggatggtctcgatctcctgacctcgtgatctgcccgc

SEQ ID NO: 30343 - DNA, 201 bp, Homo sapiens
ctatatcatttggataatgatgtaattcaaaggcacagagcaccttttcaacaacataagcaaagtgaaaattatgtcatggaatacaatgatgtatctgyggttaatgaactatattttatctattgcaatgatattttgaaatccagtgctgctctttgagttccctttgagcagagtttgtggtggggacccagcaac

SEQ ID NO: 30344 - DNA, 201 bp, Homo sapiens
gagtctcgctctgtcgcccaggctggagtgcagtggcgcgatctcggctcactgcaagctccgcctcccgggttcacgccattctcctgcctcagcctccygagtagctgggactacaggcgcccgccaccatgcccggctaattttttgtattttttggtagagatggggtttcaccgtgttagccaggatggtctcgat

SEQ ID NO: 30345 - DNA, 201 bp, Homo sapiens
ctttattagttgttattactctgtatctgtatgttttgctccacaataaaaaatgttaaaaaagcagaaacctaaagtacatttctaagtgtaaaattagrgtgatgcagcatattcttatagatatcattgtaattagagtttttgctgaataaagaatagaggattatggtactaagaaatccaagttaaaatttaaaa

SEQ ID NO: 30346 - DNA, 201 bp, Homo sapiens
atgagaggctaagtttgataaagattgaaaatgcactgaaaagcccaagtaagaaaattattttttcattttagaaattataggacaataatatttcccarctatgaggtgtgtgtatgtgtgtgtgtgaacgtgtttgtgttaatgagcttgttaacaataagttatacaaaattattagttggcagcaacgagattttt

SEQ ID NO: 30347 - DNA, 201 bp, Homo sapiens
agggacaaactgactccattattttctcattctccttctgggaacagagtagtagccaggcaatgttctcataataaacagaaaaggaaaagaaactccartgtggaaaccatctcaaacctctgtgtgaagtctaccaattttctgttaatcaaagcaagctatgtgagtgtactcagagtccaggggcaaggtagtcac

SEQ ID NO: 30348 - DNA, 201 bp, Homo sapiens
atacaatggcaaattctattttcttaccaaggtatggtaacatcaattttaaccttataattttttatcttactctttattagttgttattactctgtatmtgtatgttttgctccacaataaaaaatgttaaaaaagcagaaacctaaagtacatttctaagtgtaaaattagggtgatgcagcatattcttatagatat

SEQ ID NO: 30349 - DNA, 201 bp, Homo sapiens
taataaagaaaaaaagagagaagaatcaaatagacacaataaaaaataataaaggggatatcaccaccgatcccacagaaatacaaactaccatcagagartactacaaacacctctacgcaaataaactagaaaatctagaagaaatggataaattccttgacacatacactctcccaagactaaaccaggaagaagttg

SEQ ID NO: 30350 - DNA, 201 bp, Homo sapiens
gtctttggattcagtttttctaagctgggtttgctggatggctctggtgatatgagatgggccaagttctgcatcttggaattagttagagtttggacaawgtaggctggatcaggcagggacaaactgactccattattttctcattctccttctgggaacagagtagtagccaggcaatgttctcataataaacagaaa

SEQ ID NO: 30351 - DNA, 201 bp, Homo sapiens
accttgcatgacaaaactttgccattccttatctatttttcttttggctcctctattcctgacacaacaagggtggacatatttcccacacgcttggtttwgcagagtacctatatcagttaggtttttctgccagagaaacctctccaacactacattacatattgatatctcacatgtctttggattcagtttttctaa

SEQ ID NO: 30352 - DNA, 201 bp, Homo sapiens; identical to SEQ ID NO: 5659

SEQ ID NO: 30353 - DNA, 201 bp, Homo sapiens; identical to SEQ ID NO: 5662

SEQ ID NO: 30354 - DNA, 201 bp, Homo sapiens; identical to SEQ ID NO: 5663

SEQ ID NO: 30355 - DNA, 201 bp, Homo sapiens
ttgggaggctgaggcaggataatcaattgaaccagggaggcagaggctgcagtgagccaatattgcgccattgcactgcagcctgggtgacaagagtgaarctccatgtcaaaaaaaaaaatcgtaaatccatgagaaagaataatagtgttctcccactacccttaactctagtacattgaaaagaagacccaaatcaca

SEQ ID NO: 30356 - DNA, 201 bp, Homo sapiens
tgaaaagaagacccaaatcacatttatcaaataacattctcccttttagctgacattatcatcattattataatcatctacatttacatctatcttattawatgatttatttttgaaatatttacatacataatttggacaccgtttacataagttctaagagatatcattgtgggaaatttacgttagtaaacagcaaag

SEQ ID NO: 30357 - DNA, 201 bp, Homo sapiens
gcagaaaacaaactggtggtgtatgaaacattttatatttcttactggtttttctatactgtatgtgtatgaataatttcccaacgtatacctagaaaagyctttgacctaatattagtctagaaaaaaatatatatatatgtgtgtgtgtgtttatgtgtgtatgaaaacttaagaacattgacaataacatgctctttt

SEQ ID NO: 30358 - DNA, 201 bp, Homo sapiens
ccttttagctgacattatcatcattattataatcatctacatttacatctatcttattatatgatttatttttgaaatatttacatacataatttggacamcgtttacataagttctaagagatatcattgtgggaaatttacgttagtaaacagcaaagttcaagtcaagttgaatacatttagatttagaaagttaagt

SEQ ID NO: 30359 - DNA, 201 bp, Homo sapiens; identical to SEQ ID NO: 5690

SEQ ID NO: 30360 - DNA, 201 bp, Homo sapiens
ccaaaaaagctacttatatgaacttcatttccggtttctttcaaattgaaggtaaattccaagatgaagcttttattctattctctgaccaaagtgttggraaaagaaggaatttgttaccattttcatttctaacatactaaaacagaaaacaaaaaaccccaaaatcaaaaacacttttaaaaagaacatgccgttaag

SEQ ID NO: 30361 - DNA, 201 bp, Homo sapiens
gtgttgggaaaagaaggaatttgttaccattttcatttctaacatactaaaacagaaaacaaaaaaccccaaaatcaaaaacacttttaaaaagaacatgscgttaagattagtttgttcagtttccctgtagaaaataatttatggaaagataataaaagattattctgaacactaaaacaagaaaactaaaaaatgaat

SEQ ID NO: 30362 - DNA, 201 bp, Homo sapiens
ttgtatacattcatgtataactctaagagattttaagaagaaactttctgattttagttgcaacttttggaaatttgacatgatgtttcctgccaaccccrgatttttcaacaggtttttcttttaggtttaattattgacttcatatgacaaaactttgacattctccaactatttttcccttgtatcctgaattcctga

SEQ ID NO: 30363 - DNA, 201 bp, Homo sapiens
aatcatcatgttttccataaagacagcattgatttcatccactggcatattgagatgctttcctgtttgacattggtcacagaatttaaaaaggaacaagracattcctgcaaattcaggaatcaggtacacatagatgttaaggtcaagaccttaaaggaaatcttgaccagtgatatcaggcttgcctttaaaaaaatt

SEQ ID NO: 30364 - DNA, 201 bp, Homo sapiens
tatcaattctggtagtgtttgcatttgttcttggaaatgttgccaatggcttcatagctctaattaatgtcaatgactgggttaagacacaaaagatctcmtcaactgaccaaattgtcactgctctggcattctccagaattggtttactttgatcatattattacattggtatgcaactgtgtttaattcagctttata

SEQ ID NO: 30365 - DNA, 201 bp, Homo sapiens
tttttataaatatatgtggttcaaagataattttgttacatgtatacattgcataatggttaaatcatggccttagggtttccataacaagaataacaaayattgcatttactaattaatgtctaactcttaattccctcccacccactcactcttccaaggcttcagtgtctatagttctcccctctatatctatgtaaa

SEQ ID NO: 30366 - DNA, 201 bp, Homo sapiens
aatgttactgcacatttagaaatcaagtgtttatcgaagttaatgtctggatattaagggaatcacaaccagtgttattaagcctgcatttttttttttgttgttgttcaaacatatgtgttctgctcatcattttatcaattctggtagtgtttgcatttgttcttggaaatgttgccaatggcttcatagctctaatta

SEQ ID NO: 30367 - DNA, 201 bp, Homo sapiens
caggcagaagaaatctctagctgaactttataacaatttgaactggtcaagaagcctcctggccagaactcgggggaggatgtgaatcgggcatgcagacktcacaggctggggaagaactaaagcccttttctctcatggctgggaggcagatagccttgggcaagttttcaagcccattttgccctctgcctggaaata

SEQ ID NO: 30368 - DNA, 201 bp, Homo sapiens
gaggttggatcaatagaaattatatactctaaacaatacagggtaaaataattgaaaaaattatacatcatatcatgaatatgaaaggctataacaaatgrtgtactattcatgcattctgagtttcagaaaagcagaagaggttgatgttgaaaaaggactcagagaaataatgatcaaaaattttccaaacacagcaaa

SEQ ID NO: 30369 - DNA, 201 bp, Homo sapiens
actcatccactgtccagcaaggccaccatcatccctgtctactgggatcagtataggatcttcacagctgcacttccctgaatctgtcttgcattctccayatccttcccagcagtcccatgtctctataaatgcaaatctcactctctcactcccccggtacaaattctttattgggttctatttgtgcaatcaataaat

SEQ ID NO: 30370 - DNA, 201 bp, Homo sapiens
cacgtgccaccacaccctaatctcttatttttaaaaagaggattttaggactaaacaaatcaaatgtaagtttcccctcacctctttgatctctcacttgrgtaatgatgcagtttgaaggcaaagagccccatttctacattataagcaaaataaaagttaattcatggaatacaatggtgtatttgtaattgaggtact

SEQ ID NO: 30371 - DNA, 201 bp, Homo sapiens
ttatttttgtttattatttttattatttatttatttttcttttgagacggagtcttgctctctagcccaggctggagtgcagtggctccatctcagctcaytgcaacctccgcctcttgggttcaaacgattctcctgcctcagcctcctgagtagctgagatgacaggcacgtgccaccacaccctaatctcttattttt

SEQ ID NO: 30372 - DNA, 201 bp, Homo sapiens
tcatgatcaatctattatttttgtttattatttttattatttatttatttttcttttgagacggagtcttgctctctagcccaggctggagtgcagtggckccatctcagctcattgcaacctccgcctcttgggttcaaacgattctcctgcctcagcctcctgagtagctgagatgacaggcacgtgccaccacaccct

SEQ ID NO: 30373 - DNA, 201 bp, Homo sapiens
tacaattcttcaatcagagagataaaccatttcatgatcaatctattatttttgtttattatttttattatttatttatttttcttttgagacggagtctygctctctagcccaggctggagtgcagtggctccatctcagctcattgcaacctccgcctcttgggttcaaacgattctcctgcctcagcctcctgagtag

SEQ ID NO: 30374 - DNA, 201 bp, Homo sapiens
atgtcctccatcaaaggtattatttcagtctaagccctgatgctgagaataatatgagaatcataaagccaggagaaagaataattgtgttatcccattaycctgaattgtagcacttagaaaaatgaatggtcacatttattagctagcagtctaccttgtagctatcatcatcatctctatctacatctatcccattaa

SEQ ID NO: 30375 - DNA, 201 bp, Homo sapiens
ccctgccagccctaaagcagctggctggttctagcgtcagtgagccccagttccctcccatgaaggggtaagggaaatgtcctccatcaaaggtattattycagtctaagccctgatgctgagaataatatgagaatcataaagccaggagaaagaataattgtgttatcccattaccctgaattgtagcacttagaaaaa

SEQ ID NO: 30376 - DNA, 201 bp, Homo sapiens
tcccgagttaaaaatcttaagatttctttgtccaaaaaatctaagtagaatagtctctgatattgtttttttctaggctttcaaacaaaataggaacacaytgagtatccatatttttttttagcattttctttcttatcagacccgtaaaattctaattaggttttttttaaaaaaaatagtatctgcttatggaaattt

SEQ ID NO: 30377 - DNA, 201 bp, Homo sapiens
tccctcatttaccattctccaattcggttgtgcaacctcatttttcttggaagctggacaagagctcaggagccaggaatgcagatacgaaaagttgttamactgaacctctgcccttgctggcaagaggcagccgcctcaagcgaaaaggcaaagggcccactgagctactaacacttaagacgtctgcagatagcagag

SEQ ID NO: 30378 - DNA, 201 bp, Homo sapiens
gccggacttcaggggaagattaccttcctgcttcacattccctttccagctccccttcctgctgagagtcacttccatcaaaataaaatctccctcatttmccattctccaattcggttgtgcaacctcatttttcttggaagctggacaagagctcaggagccaggaatgcagatacgaaaagttgttacactgaacctc

SEQ ID NO: 30379 - DNA, 201 bp, Homo sapiens; identical to SEQ ID NO: 29096

SEQ ID NO: 30380 - DNA, 201 bp, Homo sapiens; identical to SEQ ID NO: 29842

SEQ ID NO: 30381 - DNA, 201 bp, Homo sapiens; identical to SEQ ID NO: 29306

SEQ ID NO: 30382 - DNA, 201 bp, Homo sapiens; identical to SEQ ID NO: 30016

SEQ ID NO: 30383 - DNA, 201 bp, Homo sapiens; identical to SEQ ID NO: 29309

SEQ ID NO: 30384 - DNA, 201 bp, Homo sapiens; identical to SEQ ID NO: 30018

SEQ ID NO: 30385 - DNA, 201 bp, Homo sapiens; identical to SEQ ID NO: 30019

SEQ ID NO: 30386 - DNA, 201 bp, Homo sapiens; identical to SEQ ID NO: 30135

SEQ ID NO: 30387 - DNA, 201 bp, Homo sapiens; identical to SEQ ID NO: 30242

SEQ ID NO: 30388 - DNA, 201 bp, Homo sapiens; identical to SEQ ID NO: 30136

SEQ ID NO: 30389 - DNA, 201 bp, Homo sapiens; identical to SEQ ID NO: 30137

SEQ ID NO: 30390 - DNA, 201 bp, Homo sapiens; identical to SEQ ID NO: 29167

SEQ ID NO: 30391 - DNA, 201 bp, Homo sapiens; identical to SEQ ID NO: 30141

SEQ ID NO: 30392 - DNA, 201 bp, Homo sapiens; identical to SEQ ID NO: 29048

SEQ ID NO: 30393 - DNA, 201 bp, Homo sapiens; identical to SEQ ID NO: 4926

SEQ ID NO: 30394 - DNA, 201 bp, Homo sapiens; identical to SEQ ID NO: 30298

SEQ ID NO: 30395 - DNA, 201 bp, Homo sapiens; identical to SEQ ID NO: 4921

SEQ ID NO: 30396 - DNA, 201 bp, Homo sapiens; identical to SEQ ID NO: 29933

SEQ ID NO: 30397 - DNA, 201 bp, Homo sapiens; identical to SEQ ID NO: 29054

SEQ ID NO: 30398 - DNA, 201 bp, Homo sapiens; identical to SEQ ID NO: 29408

SEQ ID NO: 30399 - DNA, 201 bp, Homo sapiens; identical to SEQ ID NO: 29411

SEQ ID NO: 30400 - DNA, 201 bp, Homo sapiens; identical to SEQ ID NO: 30049

SEQ ID NO: 30401 - DNA, 201 bp, Homo sapiens; identical to SEQ ID NO: 30160

SEQ ID NO: 30402 - DNA, 201 bp, Homo sapiens; identical to SEQ ID NO: 30161

SEQ ID NO: 30403 - DNA, 201 bp, Homo sapiens; identical to SEQ ID NO: 29719

SEQ ID NO: 30404 - DNA, 201 bp, Homo sapiens; identical to SEQ ID NO: 30305

SEQ ID NO: 30405 - DNA, 201 bp, Homo sapiens; identical to SEQ ID NO: 30307

SEQ ID NO: 30406 - DNA, 201 bp, Homo sapiens; identical to SEQ ID NO: 30165

SEQ ID NO: 30407 - DNA, 201 bp, Homo sapiens; identical to SEQ ID NO: 30168

SEQ ID NO: 30408 - DNA, 201 bp, Homo sapiens; identical to SEQ ID NO: 30314

SEQ ID NO: 30409 - DNA, 201 bp, Homo sapiens; identical to SEQ ID NO: 30316

SEQ ID NO: 30410 - DNA, 201 bp, Homo sapiens; identical to SEQ ID NO: 29873

SEQ ID NO: 30411 - DNA, 201 bp, Homo sapiens; identical to SEQ ID NO: 29953

SEQ ID NO: 30412 - DNA, 201 bp, Homo sapiens; identical to SEQ ID NO: 4923

SEQ ID NO: 30413 - DNA, 201 bp, Homo sapiens; identical to SEQ ID NO: 29731

SEQ ID NO: 30414 - DNA, 201 bp, Homo sapiens; identical to SEQ ID NO: 30090

SEQ ID NO: 30415 - DNA, 201 bp, Homo sapiens; identical to SEQ ID NO: 29732

SEQ ID NO: 30416 - DNA, 201 bp, Homo sapiens; identical to SEQ ID NO: 29734

SEQ ID NO: 30417 - DNA, 201 bp, Homo sapiens; identical to SEQ ID NO: 29735

SEQ ID NO: 30418 - DNA, 201 bp, Homo sapiens; identical to SEQ ID NO: 29334

SEQ ID NO: 30419 - DNA, 201 bp, Homo sapiens; identical to SEQ ID NO: 29335

SEQ ID NO: 30420 - DNA, 201 bp, Homo sapiens; identical to SEQ ID NO: 4922

SEQ ID NO: 30421 - DNA, 201 bp, Homo sapiens; identical to SEQ ID NO: 29337

SEQ ID NO: 30422 - DNA, 201 bp, Homo sapiens; identical to SEQ ID NO: 29737

SEQ ID NO: 30423 - DNA, 201 bp, Homo sapiens; identical to SEQ ID NO: 30185

SEQ ID NO: 30424 - DNA, 201 bp, Homo sapiens; identical to SEQ ID NO: 29738

SEQ ID NO: 30425 - DNA, 201 bp, Homo sapiens; identical to SEQ ID NO: 29340

SEQ ID NO: 30426 - DNA, 201 bp, Homo sapiens; identical to SEQ ID NO: 30186

SEQ ID NO: 30427 - DNA, 201 bp, Homo sapiens; identical to SEQ ID NO: 29891

SEQ ID NO: 30428 - DNA, 201 bp, Homo sapiens; identical to SEQ ID NO: 30187

SEQ ID NO: 30429 - DNA, 201 bp, Homo sapiens; identical to SEQ ID NO: 29894

SEQ ID NO: 30430 - DNA, 201 bp, Homo sapiens; identical to SEQ ID NO: 29184

SEQ ID NO: 30431 - DNA, 201 bp, Homo sapiens; identical to SEQ ID NO: 29895

SEQ ID NO: 30432 - DNA, 201 bp, Homo sapiens; identical to SEQ ID NO: 30345

SEQ ID NO: 30433 - DNA, 201 bp, Homo sapiens; identical to SEQ ID NO: 30348

SEQ ID NO: 30434 - DNA, 201 bp, Homo sapiens; identical to SEQ ID NO: 29190

SEQ ID NO: 30435 - DNA, 201 bp, Homo sapiens; identical to SEQ ID NO: 29981

SEQ ID NO: 30436 - DNA, 201 bp, Homo sapiens; identical to SEQ ID NO: 29286

SEQ ID NO: 30437 - DNA, 201 bp, Homo sapiens; identical to SEQ ID NO: 29755

SEQ ID NO: 30438 - DNA, 201 bp, Homo sapiens; identical to SEQ ID NO: 29288

SEQ ID NO: 30439 - DNA, 201 bp, Homo sapiens; identical to SEQ ID NO: 29757

SEQ ID NO: 30440 - DNA, 201 bp, Homo sapiens; identical to SEQ ID NO: 29289

SEQ ID NO: 30441 - DNA, 201 bp, Homo sapiens; identical to SEQ ID NO: 29090

SEQ ID NO: 30442 - DNA, 201 bp, Homo sapiens; identical to SEQ ID NO: 29091

SEQ ID NO: 30443 - DNA, 201 bp, Homo sapiens; identical to SEQ ID NO: 29915

SEQ ID NO: 30444 - DNA, 201 bp, Homo sapiens; identical to SEQ ID NO: 29916

SEQ ID NO: 30445 - DNA, 201 bp, Homo sapiens; identical to SEQ ID NO: 29919

SEQ ID NO: 30446 - DNA, 201 bp, Homo sapiens; identical to SEQ ID NO: 29092

SEQ ID NO: 30447 - DNA, 201 bp, Homo sapiens; identical to SEQ ID NO: 29917

SEQ ID NO: 30448 - DNA, 201 bp, Homo sapiens; identical to SEQ ID NO: 29093

SEQ ID NO: 30449 - DNA, 201 bp, Homo sapiens; identical to SEQ ID NO: 29920

SEQ ID NO: 30450 - DNA, 201 bp, Homo sapiens; identical to SEQ ID NO: 29094

SEQ ID NO: 30451 - DNA, 201 bp, Homo sapiens
taagaagagtattgagtaggtggacgggaaagatattcagaaggaaaactgtgctctgtagttggtgggtgacaaagcagtgtcttgagtcagaaagactrgtgcaagataaaactggaaaggtcagtgggtcattagctgctgggctgtgaagtttggtcttcattgagcaatgagtcatgggaagatgtttgaccagat

SEQ ID NO: 30452 - DNA, 201 bp, Homo sapiens
ataaaatgatgggcatgtccaaatttgggtatctgcctttctcgtggttaggctgttttcatttcttcacatgtaccttgaaaggctttaaatcatagackttacctggcccttgattatgaaggtgatgttaaattgctacctctcttaatccttggagtgtttaaatgaatgttctgtaattgatggatcaaagtgtcc

SEQ ID NO: 30453 - DNA, 201 bp, Homo sapiens
aatgttattggtttgatttttttatatgggctggttagttaattccgtagctattaacgctcctgacactggtccactattgtcttcatatttcccatccrtcttaaggaacagaaaaacagaacaggtaagcagtgtgagcaacattcaccaatgtctggttaatggaagaataggcttttgttttacagatttaaattt

SEQ ID NO: 30454 - DNA, 201 bp, Homo sapiens
agaaaagttgcatgccggaaagtacaggattgacatgtggttggacttttctttaatctggcgtttctcatggaccattttaggagattctcttccctcargatgctccatgagcaaatcagtttgagaatcatgaacagtagttctcatcttagagattcacatatagagtaaaaagcaaggccttgggaagtcttggca

SEQ ID NO: 30455 - DNA, 201 bp, Homo sapiens
caccagatgatagcccacaattctagttacatatgaagtggtggtgtggtgaaataacattgcagctcctcactaaaccaaaaactgcagcaagcttgtcrcagagagaccctcattttcccagctgtcaacctgactgatattttaatttttttgccctgtagaaaacttcagtctcttatccaatagataaatgagtga

SEQ ID NO: 30456 - DNA, 201 bp, Homo sapiens
cttgagtcagattatatcgtttctttgctgaaaaccgtccatgcttttccatagccgttagaataaaatccaaacccattacatgcctgttaaagaagaarggaagccaataaggcctgaacatggggattgtctgatgtgctggactggatataagatggtgtaagaaagaaagatgattcctgtatctctggcttcagc

SEQ ID NO: 30457 - DNA, 201 bp, Homo sapiens
tcatttacttgcagaaaaaaggattctactacaattatacttttttccacttgccctgaacttttgtcttctaataataatgttcccaaggtcattcctcmtacttttaggccaatatttagagctagcgaagaggatacagattaagagctggcacctttgggcccataagccgtaggtaggcagagggccaggttaaaa

SEQ ID NO: 30458 - DNA, 201 bp, Homo sapiens
ttattgcaagttttcttgtatgtatgtcaatgtgtttgctagcactgcaatgctgagttatttaattaaacctttccagctttctaggagtgttatcctcrtgttttagacaagtacagtgagacacagtaagggtatgtactttatccaaggtcgcgggaatagtaagtggcaaaaccaggaagtgaaccctggcagtct

SEQ ID NO: 30459 - DNA, 201 bp, Homo sapiens
gaatcctggggcataacttcctgcaaatttaggtttagtcacacaagtttactgtcactttccattctaagactgagtgtgcacttgtttcaactctctcrtttcaggtcagagatgtttctcctatcctagaactatttgaacttcaacttccccaggctctgcctcaaaattaactttagtaattaatgaccttcagta

SEQ ID NO: 30460 - DNA, 201 bp, Homo sapiens
ttgagggtaacatcaactttctgtaacccttatcaactttctgaggttgcagtgagccgagattgcgccattgcactccagcctgggtggcagagcaataytctgtctcaattaatcaatcaaccattcaataaatgtcaggcataaataaataaataagtaaatgtcagtgtttcttcgtaacagaaagaatattaactg

SEQ ID NO: 30461 - DNA, 201 bp, Homo sapiens
gagatccatcaggttaaattatcagatgaagaccccaatacattggttgcctcaagtagttctttctgaaaataaacattaaataggtaagttcctttgargaccggaactcattcccctttaatcactgtgatagtgcctggcacataataaaccttggataaatttttttaaaattaatgtgttcgtccaggaatgggg

SEQ ID NO: 30462 - DNA, 201 bp, Homo sapiens
ctgggcaaaagagaataatacaaagagaatggtgaaaaataaattgccattaagaagaaaagtatattactagtttgtcacctgtggagagagttgctaaytaaattctaaggtcatgcttacatcaaatgagcaatttttaaaagtctctcacttatggcagatgacatgtcttttattgcatcataaagtgttgggctc

SEQ ID NO: 30463 - DNA, 201 bp, Homo sapiens
tgaagaaacagacaggaaatgatattaggagatgttttgttgttttcgtaagctactggcaaccagataaaaatgatgaatctggaaaaaaacaagacaartgacctaacttttattatcatcctcactgtagaagtttctctgtaaatttctcgtcattgtgaaaaataagaaagatttgccagtttgtgttaagtatat

SEQ ID NO: 30464 - DNA, 201 bp, Homo sapiens
agccctgccccactgctatctcacctcttacctgccttttgtctagcaaactcctgctcattgttcagatccctgcctagaaaccacttaccccaggaaayttttcatgacacccagtcctggtgagatgccccacctgtgtgggcctgtggtacctgtgcacgtctctcgtagcacacgtcacgtggttctgccattgcc

SEQ ID NO: 30465 - DNA, 201 bp, Homo sapiens
cacataatggagacttgacttttcctcaaatcgcattagagtctataggtaagcctttcctttcttagcaatccagcactcatatagaagttgtattttcttttttttttttttcttttttctttttctttttcttttttttattgatcattcttgggtgtttctcgcagagggggatttggcagggtcacaggacaatag

SEQ ID NO: 30466 - DNA, 201 bp, Homo sapiens
cctttggattagatgactattaataagctgtagccagaaagaaagggaggccacaagttctgggtagctcaagaagggattgtataggcatgactggcctrgaaattgacatggatagaacagtattgttagagaaggcattttgttttaaagaatacattgaattttttttaaactcagaaggcatctttgtaatgttgg

SEQ ID NO: 30467 - DNA, 201 bp, Homo sapiens
accccatctctaccaaaaataaaattagctgggcatgatggtgcacactggtggtcccagctactcaggaggctgaggtgggaggatcacttgaagccccrgaggttgaggccacagtaagccatgattccaccactgcattccaacctgagtgacagagtgaggccttttctttttaaaaaaggcatagtaagagattaa

SEQ ID NO: 30468 - DNA, 201 bp, Homo sapiens
gagtaggcagaatatgggaatggacctggcctggactcacatgagtgagttgcattgcagtgggatactggcagtttttaaaactctggtgttctatttgrtgtttggaaatggtgaactgagtactgatgattaatgagcacagggattagtggtgatattagtaattttgcttggcacaggtcacatttaatgcctatg

SEQ ID NO: 30469 - DNA, 201 bp, Homo sapiens
ggtagggaagaacaatagttgattgaggaatgtcttccagcccaccccgcacacacacacacacacacacacacacacacacacacacacacacacacacmccctctgagggaaaaagcctcctttctaccttgacgttgttggtgatgtgccctgccacacagtgtgatagtttgggaccctatgacttccctgggctaa

SEQ ID NO: 30470 - DNA, 201 bp, Homo sapiens
gcaccttctgctatcaatttcagtctcgccactagttgctgtttctcagaagcacatctgacgacagatgtgagccattgggctagttctggcaaagtgcmgggatcaacagtgttggccccagtctctgtgactgttcctgagataaccttttggttttcatgtccctgtcaactggtttgggtgggtgagggatgggga

SEQ ID NO: 30471 - DNA, 201 bp, Homo sapiens
tgaaagggatttgcccagagatgtctgcatttgaccttaggttcctttttcttccagctgacttcatgattgtctagctccagcatcttagtaaatacatagcagcagtgcccattccagtgaaggatgctacaggggaggatgcatggggaggagtatagatattttctaaacaatagtaataggtcaagcatgagcatt

SEQ ID NO: 30472 - DNA, 201 bp, Homo sapiens
aagaggtgggctcccatggccttagatagcttcgcccctgtgtttttgcagggtactgcccccatgctgctctcatgggctggcattgagtgcctgtgacrtttccaggtgcactgtgcaagctgtcagtggatctaccattctggggtctagaggacagtggccctcttctcacaggtccactaggcagtgccccagtag

SEQ ID NO: 30473 - DNA, 201 bp, Homo sapiens
aagttacttccaagataaagtgggggtactggcattgggtaagcgctctcattccaaatcagagaaattggccaaaataaggaggctacaggccccacgcragtctgaaatccagcagggcagtcatgaagtcttaaagctctaaaataatctcctttgactccatgtctcatgtctagttcaccctcatgcaagaggtgg

SEQ ID NO: 30474 - DNA, 201 bp, Homo sapiens
gttatttttagtgtagtgtgcaataatggttgcagaaaatctttaaaaacaaatctttatgttgaatagggctgaaaattgctacaaatgtttgattagtmattttttacattttcttctcttaacttcaagccagcatgagaagaaataaagtcagagcaatgggaagtacactgctgtcaagaggcaggagtcccagaa

SEQ ID NO: 30475 - DNA, 201 bp, Homo sapiens
tcctttcaacaggccctttaatggtttccctactggcattctcccctctttctaatccatcctacataccaagattaatcttcctaaaatactgtttccaytgtgctcaaaaacctttagcggcccccccatggcctacaggatgaagtccagacctcttagccagttaagtcttcctacagactagttctcacttatttt

SEQ ID NO: 30476 - DNA, 201 bp, Homo sapiens
acctgagtgacagagtgaggccttttctttttaaaaaaggcatagtaagagattaatagcaataactaataataaattaaaacaattataacaatatactrtaataaaagttatgtgaatatcatctctctcactcaatatcttattgtacagtactcacttattttcggactatggttgaccttggataaagggggaact

SEQ ID NO: 30477 - DNA, 201 bp, Homo sapiens
taaaacattttcttggtgttaaaaaaagaatgatgatatatggatacatttaaaattggaatttgttctaaagtatgatttgttgtaggtagattttttttcctacctcctgtgttacggagttagcgtgatgatcatgatgattcaatatactgaagtaatgatagatgacacttaaaatttattacattgtaggtactc

SEQ ID NO: 30478 - DNA, 201 bp, Homo sapiens
aaagtctgttgtttaatctttttccatagggttgtatataacagttttagattctgtccagattcaaaataataaactagacagcagggtccaaagttctrccattatatctaatgattgtaatttttaaaaacaacaatgcagtcataaacttggattcagtctgtaacatttgcatgcactcagactttattataaatg

SEQ ID NO: 30479 - DNA, 201 bp, Homo sapiens
agtagtggtgtaagtatatttcaagtatatataattggtttgaattctttggtagagagaaatttataaaattatagtatcattatgagtgtagtttaackttttgcttaatgtatatatagaccctcaaatcttttttaaattggagccataatttactcaaatataataaaagagcgaaaatattgttcagtttacata

SEQ ID NO: 30480 - DNA, 201 bp, Homo sapiens
aatgtaagtaacagaaactaaataaaaaccttacattactgtcctgaaggtgtaacttggggatgaagtggggatggggacccgtgtcccgtgtaaataargcatttaattaagtgcaattttaacatttaaagttggcacctggacaaatttttactcccaacatttacatcttaaaaagtagtaaactttgctggaaag

SEQ ID NO: 30481 - DNA, 201 bp, Homo sapiens
ggaagcaataaagaagtgcaggaattactttaattaatgattgcagaggggaaaaatatttacgtttctctctatattcattcttagacttttttttttttaaaatggaagactggcttattctgttattttatatatttgtgttgcttgatatgctgggtttttggcttgtagtgtctgttgttagtatttatttgcctt

SEQ ID NO: 30482 - DNA, 201 bp, Homo sapiens
caccatcctcctaaggctgttcttgtgatagatttctcatgagatctggttgtttaaaagtgtgtgacagtccctctccctctttctcttttcctccttctctggccataaaagatgtgcctacttcatcttgcccttctgccataattgaaagtttcctgaggcctcccaaaatgctgccatgcttcctgtacagcctgt

SEQ ID NO: 30483 - DNA, 201 bp, Homo sapiens
gcaccatcctcctaaggctgttcttgtgatagatttctcatgagatctggttgtttaaaagtgtgtgacagtccctctccctctttctcttttcctccttctctggccataaaagatgtgcctacttcatcttgcccttctgccataattgaaagtttcctgaggcctcccaaaatgctgccatgcttcctgtacagcctg

SEQ ID NO: 30484 - DNA, 201 bp, Homo sapiens
agcaccatcctcctaaggctgttcttgtgatagatttctcatgagatctggttgtttaaaagtgtgtgacagtccctctccctctttctcttttcctccttctctggccataaaagatgtgcctacttcatcttgcccttctgccataattgaaagtttcctgaggcctcccaaaatgctgccatgcttcctgtacagcct

SEQ ID NO: 30485 - DNA, 201 bp, Homo sapiens
gactggcctagaaattgacatggatagaacagtattgttagagaaggcattttgttttaaagaatacattgaattttttttaaactcagaaggcatctttktaatgttggttaaaatgcattaggatgtctaaaacatttttggattgtctgtttgattagaccacttatatgtgtttgaatcataaaacatgaaggcact

SEQ ID NO: 30486 - DNA, 201 bp, Homo sapiens
ttggatcatgggtgtggtttctaatggtttagcaccatcctcctaaggctgttcttgtgatagatttctcatgagatctggttgtttaaaagtgtgtgacagtccctctccctctttctcttttcctccttctctggccataaaagatgtgcctacttcatcttgcccttctgccataattgaaagtttcctgaggcctcc

SEQ ID NO: 30487 - DNA, 201 bp, Homo sapiens
agtgaaggcttggatgtttagactgcgtcttgaaaggtgactccctcccaatggtacaggagagagggcaatgtaggcgtgtgtaaaggcaaggagatggrcgtagaacaggatatgtaatattaaggaagaaaactgtagaatttgaggttggagagttaggccatcaccaaatgatgaagtcttgaatgctgtacaaag

SEQ ID NO: 30488 - DNA, 201 bp, Homo sapiens
ggtgattggatcatgggtgtggtttctaatggtttagcaccatcctcctaaggctgttcttgtgatagatttctcatgagatctggttgtttaaaagtgtrtgacagtccctctccctctttctcttttcctccttctctggccataaaagatgtgcctacttcatcttgcccttctgccataattgaaagtttcctgagg

SEQ ID NO: 30489 - DNA, 201 bp, Homo sapiens; identical to SEQ ID NO: 18884

SEQ ID NO: 30490 - DNA, 201 bp, Homo sapiens
attacaggtgtgtgccaccatgcccgggtaatttttgtattttttagtagagacggggtttcaccatgttggccaggatggtctcgaactcctgacctcargtgatctgcccaccttggccctcccagagtgctgggattacaccgtagttcttaatgagtaaatctgtcttactcatttgtgtcaccttttatatgtcaa

SEQ ID NO: 30491 - DNA, 201 bp, Homo sapiens
aaagagtggaaacacgttctgggtcacctggtagccacttgttgccttgtgatgtcaataactgcgtgtgcttttgcagttgctttagggccagttggatkgcagagcacgtaacagtgccctgcataaaggtccacagaagggtgggcttcattaggggaaagaagaaagatgagacatgtacatcaatgtttgaatcag

SEQ ID NO: 30492 - DNA, 201 bp, Homo sapiens
tgggaatagggtaatagtgcttggagttggcagaggtgcaacagtagatggccatgggtgctgctttggaagggcctaaggatacagttgttgaatgattktaagaacaagagaaaggtggagtctcaataaggcagccgtacaatatgtttatcaagccttcaataggtttagtatatactcctttggcgcatgcttaca

SEQ ID NO: 30493 - DNA, 201 bp, Homo sapiens
ataacattctaaagtactacacaactattagttattattcttctttgttatttagaagcagctttccccagactcgtgagttcagggatctattcctttgygtctgtcttccattttgttcaagtgtccacaggaccctaaatgagcctgcctggcctggacccagtacttacaagggcttatgcttgtgactttcttctt

SEQ ID NO: 30494 - DNA, 201 bp, Homo sapiens
gattagtgatgtctgtcactggcttaagcattgaatgagtaggcatttttcctttgtatttgctactcctgctttagaagcatatataaaaatttgttcamcccttgactgacggtgcgtaaaccagaaataggaaggatctggttggggaaggggagagaaaggaggaagagagagaaggaaaaaagaaggacgaaagcc

SEQ ID NO: 30495 - DNA, 201 bp, Homo sapiens
tgaagagactgtgaaccaagttttctgtggagtagcagggcagctttaggtatgtttgctactgcagtgaaaaaggagaaacgtgttttgtttcagtttgmctgcctaggctgcacgttaagatcccaaagaatgaataggactgcgattacagatttaaagtttgcttgtatcctgaaaacttgcccagattaatatatt

SEQ ID NO: 30496 - DNA, 201 bp, Homo sapiens
attgataattagctgaagggtaataactggattcactcagtttttctgtcaacctggattccaaagaaataataattcaaggtcttctgattctttatgaraatctttaaaatttgttttctctgtcctgtggttatttctatgattactataatcatattttcggtcaataggatggaccttacaaatttgagaaacact

SEQ ID NO: 30497 - DNA, 201 bp, Homo sapiens
gtttgtctggaaaatacaagttaggctgaagttgggatgacccaaggtaagttttaaatataacggtacatgctacttgtattttcccaaatcactacttstgcacttctacaacaaacttctgctttctcacaggacttttatggaaggaagaaaagtaatttgaatcccttgggcctttttataggtccattgtcagcg

SEQ ID NO: 30498 - DNA, 201 bp, Homo sapiens
ttttttataaagctcttttattccaggcatgttcattatggcaactgaaggaaactgaagtacaaaaatattatttctccacttgtatcttttccatattgtgcgggagatagtataagaaatgtgttataaatagaaattgagaagatgcagaatagtctcatctttatcatcttgtaccccttgtcagacctaccaaag

SEQ ID NO: 30499 - DNA, 201 bp, Homo sapiens
attaacttgattgtggtagtcattttatattgtatatgtatatataaagtcatcatgctgcatacctaaaacatatgtaatttttacttgtcagttacacmccagtaaaactggggaaaaataaagaaccggtgggaaaaaataattaagtgacccaaatttttgtatcatagtggatgaaacccctttgctgtctctaag

SEQ ID NO: 30500 - DNA, 201 bp, Homo sapiens
gtcagttgtgttctggcactgcttcttctacatcttctcattgtctggcgctgtttcgaaagcactcatcaccataatgtcgtccatcttctgttaattcstctggtgtggtgtctgttagttctggaatttctccaaggtccatcttgaagcccttcatctcccaccttttttggttatattcacaatctctttcatgat

SEQ ID NO: 30501 - DNA, 201 bp, Homo sapiens
ttaagctttgaaagaaaggtgataaagattatgtaccttgaagaagtagtttttttgggtggttttccttaaaggtattaatatgtttgagagtcgagggwaagaagccaatggcaagagaaggataaaaaatgtaagaaagaggtgataataagttgatggagcaaaatctcaggatttgaggagggagtaggttcgagg

SEQ ID NO: 30502 - DNA, 201 bp, Homo sapiens
tccatctgaccaacaggtttattgcttttgaaacttaaaaattaatatggtaaatatatcctgcagtgtccatagtgggtctgaaaaaaaataaactattyatcattcaggagcacttccaatgttacctgaaggtcccttgggtttgcaactcaaaattttgttctatttctgactcacagctggctgttttcttgcttt

SEQ ID NO: 30503 - DNA, 201 bp, Homo sapiens
atcacaggtcttggctttatagtttaattacttgcttaacaattgctagtgattcactaaatcacaaggcttccaaacaaataacatcagtaactctgctrtgcctgagcaactccaattttcttgacaatggctaccaaactgtgtttagcctaatataaactgttagtttaactgcaagcaatgggggcttcaagcatg

SEQ ID NO: 30504 - DNA, 201 bp, Homo sapiens
ttcttcatttcattatgaacaaagagaattacttgtgtgctttttcagaggacatttgtgttatatgtttttctccattcatgttttatagatgttgtcayagagcatcttcatgtctgtaataccagtctagatcccatcatattatttttagctcttcaatgtatttcttatggatatcttcttttaatataaaaacac

SEQ ID NO: 30505 - DNA, 201 bp, Homo sapiens
tcttttttaatatctactgatatattttttcatatttaatgttttacaacagaattatgaagagggcagaacacaaagtatcccatattcctaaacacaaytgagaacctcctggaggaaagctgatgtggtcaggtttatacagctgaccattggaagggccagagcttctaacttgtgtctactttttgtgtctagact

SEQ ID NO: 30506 - DNA, 201 bp, Homo sapiens
ctttaaaaaagccaaatgacctctttacttttgaaacatgcaaatcaatgtatacttttctcacagttatttgaataatagttatatttactaaggatgcwcttttttaatatctactgatatattttttcatatttaatgttttacaacagaattatgaagagggcagaacacaaagtatcccatattcctaaacacaac

SEQ ID NO: 30507 - DNA, 201 bp, Homo sapiens
tttgaaggaaatgcatactttatttagaagttagtgagaataaagatgcattttttttcctatccaagtttacagatctcttgaattcccaggttaagaaytacttcatcagattataccggtctctcatgtttataaacatttatgccacctgctggatctgctcttaaaaaacagaataaacaattacaaaagcaaaaa

SEQ ID NO: 30508 - DNA, 201 bp, Homo sapiens
agaagcttagagtggctgccatatacaccagagcaaggcggacccccatgtgccttggaagcacatggcaggcctgctgctgccctaaccctcctgcctgwccctctgcctgggacatcctcccctgctttctaccacacctctcagccctcttttaaactttgcctttcatttcatcccatagcataaatatctcattct

SEQ ID NO: 30509 - DNA, 201 bp, Homo sapiens
tggggtcttccttgatgacttctgctttactcccacatctactcagatactgggtagtgatgctgagggatgtttgagtgggatcttttttttttttttttgagacggagtctcactctgttgcccaggctgtggcgcgatctcactgcaagctctgcctcccgggttcacgccattctcctgcctcagcctcctgagtag

SEQ ID NO: 30510 - DNA, 201 bp, Homo sapiens
aagaagcttagagtggctgccatatacaccagagcaaggcggacccccatgtgccttggaagcacatggcaggcctgctgctgccctaaccctcctgcctrtccctctgcctgggacatcctcccctgctttctaccacacctctcagccctcttttaaactttgcctttcatttcatcccatagcataaatatctcattc

SEQ ID NO: 30511 - DNA, 201 bp, Homo sapiens
cctctcaaccactgctccaaaatttgtctctggatggttgcctgaggataatccctgaccctgtgtccacaaaggacgtgggttctgccagccctgacagyttcttccacattctcctaaactgtcaggccagcaaaatgtctagtgtcgtggccatgagcttcctcttgtaacagagccatgtaatcagacataggtgac

SEQ ID NO: 30512 - DNA, 201 bp, Homo sapiens
gatctttgtagccttaccaatattataattttcatactgcactcctaactcctttgtgaagaggtggtatttttttctatatttttttcttggtgattagraagcaaataatttgattttcacaagtcttaagacatattttattaactttagggtctgaatattggtttctcttatttgtttgaaatactgacactatat

SEQ ID NO: 30513 - DNA, 201 bp, Homo sapiens
attaaggtgcaaagggctggttataattccatcactttatgatgacgtggcattcattgtgaacatatttacttcattgcctggtctgttggaattttatygaactgacatcataatctcatttcctactaaagaggctaagaaatacagcccttggtatttgctttaacctgcaacaaattaaaagttaagcataatcaa

SEQ ID NO: 30514 - DNA, 201 bp, Homo sapiens
tgtcattctctattttctgctttctcctactgcagggaactactaatctactttctgtgtctatggacttttctattctggacatttcacatgaatggatrtagcaggtgacctttcatgtctgacttctttcccttagcgtagtgttttcaagattcatcatgttgtagcatgtatcagtagttcattaatttttatggc

SEQ ID NO: 30515 - DNA, 201 bp, Homo sapiens
ttttcactttcagtctcatatgattccactccccttttcatcctccccctcttcatttttatttatttatttaatttttgagacagaatctctctctgtcrcccaggctggagtgcagtggtgcgatctcggctcactgcaacctccatctcctcagttcaggattctgctgcctcagcctcccgagtagctgggattaca

SEQ ID NO: 30516 - DNA, 201 bp, Homo sapiens
ctggtccaagccctttgcacatgtgattatttaaccttcatagcagccctatggggcaggttctgacctgctagtctcctcactttgtagatgaagtagcygaaacacagaggtcacttgcttatagccacatagccagaaagcagaggagctggaatttgaacgcaggcagtcggcatctgcagtcacccatacttacca

SEQ ID NO: 30517 - DNA, 201 bp, Homo sapiens
tgtgtgtttaaactacattctggatttaaaagcctgggctaactcaatcacaggtgcagccttgtttctatgaaaggagataaattcctatagagagtgaraaagggatgcggaagccatagcaaagagaagcctccctcccttccagtccctcctgttgttttcaaacattttttgttagcagttagcggaatcctaata

SEQ ID NO: 30518 - DNA, 201 bp, Homo sapiens
ccccacagtcttagattttatatctgtgaaatggtaataacagagctgttatattggaattaaatgaggtccatttatgtttttagcatatcctaagcagkgaatagtgagctattaataattactgtagtcacaatagttgaattttctgttgggtgaattttgtgtttttttaattgatgctcatcatatgatctaata

SEQ ID NO: 30519 - DNA, 201 bp, Homo sapiens
acagaatggagatatctgctctacttggcccctcagtgggactgctgctgtcctggtggcttttctgggcaggattttgtggaatgttgggaattgtaccmtctgaggaattgggcctgctgctgtgggctccccttgtctctgaacattgtagagtccgtcttttgttgagatgctgaagacagcccaggttgagggctg

SEQ ID NO: 30520 - DNA, 201 bp, Homo sapiens
gatggcttcccactttgcaattccttgatgtttttgctcagagaggaaacccatctctgcggtacatggtatggcctccatttttgaggaattttgtggargacaaggtcatggagcttgagacacatgcagtctgtgatcaggcttatgctttatctgagtaggaccacaatgagcctccgtcagggcaagctgtatgga

SEQ ID NO: 30521 - DNA, 201 bp, Homo sapiens
aggtcattgtacaggaaaaggctttgcttaaacaagtgcccggttcaggaaaagatatgtttcctgaagaagatactttttttttttttttttttttttttgagatagaatctcattctcttgcccatgctggagtgcagtggtgcgatctcggctcattgcaacctccaccttctgggttcaagcgattttcctacttca

SEQ ID NO: 30522 - DNA, 201 bp, Homo sapiens
atgttttgaatgagaatgtaaggcagatgagctccttatattcttacagcaatctttccagattgtcttcatggcaagtcacacaactgtcagttctgatrcagttcttgtgacttgttttcaacctattgtgcatggacctcaggtttagtgaattcagtattacattgaacagcaatattatttaccatgtgataaact

SEQ ID NO: 30523 - DNA, 201 bp, Homo sapiens
tatactggttcatattagattgtgtttgaaaacaaccttgcaaatgtcaccatctgtccttcactttgaggccagaataggtaatagtggtttaacagaartttcagtgggtactctttcttgcaacatcacaagtaataccttgtgaggaggcaggggatatgataaatattttggaagtaaaattagctttggtaggtg

SEQ ID NO: 30524 - DNA, 201 bp, Homo sapiens
cgttagacaccactcccagccctgaccttttgatgtcggttattgaaggtttggcctcccctcccctcccttcccctcccctctcttctcctcccctcccytcccctcccctctcttcccctcccctcccctcccctctcctccttttctttcttagttttgagacaggatttggctctgtcgcccatggtggagtgcagt

SEQ ID NO: 30525 - DNA, 201 bp, Homo sapiens
tgttagttacagtgagaagccataaaattcttcctatgcaggaaaatggtagaagcattttttgtgtctaaaattgttctttcttaaaaagaaaagaaaaraatctttttctggtgtggtaacaaaaaattgaaatagcaaattcaaatagtagaaagtgtaaaaattcacaactgatgaggtgatagcatactttttttt

SEQ ID NO: 30526 - DNA, 201 bp, Homo sapiens
agcctaactacaagcaaggtttctagtatcagtaacttcatatcatttgaaatacaaaaattagcaatcaatgtaaaaaacgtcctgggctaagcatagcrtgaagtctgacttcagtgtagcattgaggagggtcctggcctcagatactgcaccagttgtttgttcagctctgggcaagaacattagtcagatcattag

SEQ ID NO: 30527 - DNA, 201 bp, Homo sapiens
gttatatggcttcgtatatgtgtttcccacagtggctggatcagtgcacctcatccaaatggttgatcaacaaatattcccaacaggttatagaaagaagrttctcagagtaatgatgtgtttctattgcttctttctaaatacttcccttctccttgcacccctccctgtaaagccagggactctatttcttgattcatt

SEQ ID NO: 30528 - DNA, 201 bp, Homo sapiens
ccatgctacttatagtcttgtgaggattcccacttttgggaaagccaggactttgtctttcttttaactaattgctatgtttgcatttatttattcaacaygtaattgagtgcctaatatatgccagtgctgagcaaacagtaagcagtcaatacatatttgttgattgaataaatgactgattgcatctactgaagccct

SEQ ID NO: 30529 - DNA, 201 bp, Homo sapiens
ggatacatgcttatctacaacttaaactacctctttctaaggagtccataacatgaggtgaattatcccatcgtgagtagactttttaaaggaaaaaatamactgtcttctttatgacatgcagtgtgtggatgctcatttttacagtcttttcccgtatgttaatgaggaagggctgcatatctggtcagggttgttcta

SEQ ID NO: 30530 - DNA, 201 bp, Homo sapiens
gctctgggcaagaacattagtcagatcattaggtatttttgtccctttctgcattgtccttcgtcatatatttattaaacacctactgtatcctaggcagyatttcccagggatgcaaagatgaattagatctggttgcttttcttcagagtctgaagttaagtgtcaggtttgtggggaaggttattcttgccttgtgta

SEQ ID NO: 30531 - DNA, 201 bp, Homo sapiens
cctcatatctatcttgagaccacctcagcctggacttcattgtccatatcactatcagcattttggtcaaaaccgttcaacaagtctctcagaagttccaractttcccatatcttcctttcatcttctgagatctccaaattgtcccaacgtctgtccattacccagttccaaacttgcttccacattttctgtatcttt

SEQ ID NO: 30532 - DNA, 201 bp, Homo sapiens
tataaactacgctttccctcccccgctgactttatccccacagctcatggctgtctccacgaagtaagtgattctgtctgagtaggtattttttttttttytatttaacctaggatcagacctaagggagttttgttgttgtcgttgttgtttttgagacagagtttcgctcttgttgcccagcctggagtgcaatggcgt

SEQ ID NO: 30533 - DNA, 201 bp, Homo sapiens
tctccttgcctcagcctcccgagtagctgggattacaggcgctaccaccatgcctggctaattttttgtatttttaatggagatggggtttcgccatgttrgctaggctggtctcgaactcctgacctcaggtaatccacccgtcttgcctcccaaagtgctgggattacaggcatgagctgccgcgcctggccaatttta

SEQ ID NO: 30534 - DNA, 201 bp, Homo sapiens
ccaccatgcccagctgatttttttttaaatcttttgtagagatgaggtctcatgttgcccgggctggtcttgaactcctgacctcaaatgatccccccacytcagcctcccaaaatgctggcattacaggcatgagccaccatgcctgtcctttgttcaagtatttttgatagctgagaaatatggcatcagacgtcactc

SEQ ID NO: 30535 - DNA, 201 bp, Homo sapiens
gtcccccagcagtgccagcccaccggcgctgcgctcgatttctcgccgggccttagctgccttcccgtggggcaaggctcgggacctgcagcccgccatgygtgagcctcccacccgctccgtgggctcctgtgcggcccgagcctcctcgacgagcgccaccccctgctccacagcgcccagtcccatcgaccacccaag

SEQ ID NO: 30536 - DNA, 201 bp, Homo sapiens
tttcaccatgttggccaggctggtctcgaactcctgaccttgtgatatgcccgcctctgcctcccaaagtgctgggattacaggcatgagccaccgtgccyggcctataaaatattttaagccaatgtaatgactagctgcacgcccacacctcatttttaaaaatatagcaacccagcaaagcccgtgttcccatacttt

SEQ ID NO: 30537 - DNA, 201 bp, Homo sapiens
aactaagcctagcacaaggccatttacattcagctgctgatggatttggtctggttacatttgggtcacactgagcaataaggcgacgttcagacacagcstggttattgcagacttttctttgccctgtaatgtctatgagtgtgtactaggaaaaggaatcatttcagagcctaattcacattattcaccccgattcca

SEQ ID NO: 30538 - DNA, 201 bp, Homo sapiens
cttaataactatacattctttaacagctttacttatttatttagagacagggtcttgctctgttgcccaggctggagagcaggggcgcatttatagctcayggtggcctccaagtcctgggttcaagtgatcttcccacgtcagcttccagaataaataggactatatgtgcataccactatgcctagctaatacttttaa

SEQ ID NO: 30539 - DNA, 201 bp, Homo sapiens
gaatgcctgttgaaactaagcctagcacaaggccatttacattcagctgctgatggatttggtctggttacatttgggtcacactgagcaataaggcgacrttcagacacagcgtggttattgcagacttttctttgccctgtaatgtctatgagtgtgtactaggaaaaggaatcatttcagagcctaattcacattatt

SEQ ID NO: 30540 - DNA, 201 bp, Homo sapiens
agatgattgttagcattttttagtgataaagtatttttaaattaagattatgtactttttttgacataatgctattgcacgcttaacagactacagtgtaktataaacatgacttttatacgcactgggaaaccaaaaagtttgcatgactcactttattgtgatagtgtgaaaccaaacctgcagtatctccaaagtatg

SEQ ID NO: 30541 - DNA, 201 bp, Homo sapiens
ataatcaatatcctattgtcagattatatcttatttacccaaacatctattgttcactcttagttgttgctttaaataatgctggttgcattttcttagaygtaaatactcttatattttaatatttgctaggattgaatgcctggaagtgaaattggccacataagaagattaatgataataatgatttatacacacatt

SEQ ID NO: 30542 - DNA, 201 bp, Homo sapiens
ttatttatttatttatttatttatttatttaagaaacagcattttgccacgttgcccaggctggtctcaaactcctgtgctcaggagatcctccctccttygcctcccaaagtgctgggattacaggcgtcagccacagcacccggccagaaatacctaggatcttaacatcaccaaatagcctctgagaagctcaatatt

SEQ ID NO: 30543 - DNA, 201 bp, Homo sapiens
attttgttttattttatttatttatttatttatttatttatttatttatttatttaagaaacagcattttgccacgttgcccaggctggtctcaaactccygtgctcaggagatcctccctcctttgcctcccaaagtgctgggattacaggcgtcagccacagcacccggccagaaatacctaggatcttaacatcacca

SEQ ID NO: 30544 - DNA, 201 bp, Homo sapiens
aaagtaggagaagcagctagggtatgacttggcaaagactctggaagtaatatccaagagtggtttggaacatgggtgcagggctgggtcagtgcatggtratgtggtgattccgaagagtcaacatgggcacccaagtcttctgtctcctcactgagtttcttactgtgtcatagtgctaataacatccaaattatgaaa

SEQ ID NO: 30545 - DNA, 201 bp, Homo sapiens
gatggctgtgagagacctctttagaacacttcaaaggtcttttgaaaagtgcagtattttactgccaccttccctgttgtcataattctttagtgccttgrggccaactcccattggaaaggtggacacttaaaatccttttgtaggtaatgagcatttggttttactgcagccaataatttggactccagtggaaagctg

SEQ ID NO: 30546 - DNA, 201 bp, Homo sapiens
ccacctcagcgtctcgagtaactgagactacaggcacacaccaccatgcccagctaatgtttttgtttttggtagagattgggtttcattgtgttgcccargctgatttcaagcttctgggctcaagtgatctgcccactttggcctcccaaagtgctaggattacaggcgtgagctactgcgcccggccttgttggggtt

SEQ ID NO: 30547 - DNA, 201 bp, Homo sapiens
gtattacatgacttctgtagggttccgatgtctaatagctgaggtaacaaagaaaataagtcacagtccttggaatttacattctagtaaatgtaggttgytaaattgtattagactatggtgtagtcagtgtcacatgcatggcaagaaaagtgaatacgggaccaatggggtcaccataaagggaatgatagactgtac

SEQ ID NO: 30548 - DNA, 201 bp, Homo sapiens
aagaccaacctggccaatatggtgaaaccccgtctctactgaaaaacaaaaacaaaaacaaaaattagctgggtatggtggcgggcaccagtaatcccagytacttgggaggctgaggcaggagaatcgctccacggcggaggttgcagtgaaccgagattgcgccattgtactgcagcctgggtgacaagagcaaaactc

SEQ ID NO: 30549 - DNA, 201 bp, Homo sapiens
gatgaggtctcactatgatgtctaggctgattttgaactcgtgggctcaatcgagcctcctttctaggcctcccaaagtgctgggatgacaggtgtgagaygctgcatcctgagcccctttttttgtttgttttttgttttggcgatagagtctgtcacacaggctggagtgcagtggcaccatatttgctcactgctacc

SEQ ID NO: 30550 - DNA, 201 bp, Homo sapiens
tcactaagtatccttttctttttttcttctttaacacagaagcatccagggccataacttcactgccaccttttacctgttccacattgactcttgccaastgaactactttctgtctaccctctttggctttcatttggttttctgtgcccttgttccaacaaacatttatttatttattactggctatgtgccagacac

SEQ ID NO: 30551 - DNA, 201 bp, Homo sapiens; identical to SEQ ID NO: 4929

SEQ ID NO: 30552 - DNA, 201 bp, Homo sapiens
gccagatgtaatccttcccttttgtattttactgttgccagatgtgtccctttaaagcagttcttaatgggctagataggtctgcctgactcagtctcttkgtcttgtcccacagtgcctagtatctcacaggcactctaaaggatatggaattgacctcatcctgccacctccatttcttcttcactgcccactttcttc

SEQ ID NO: 30553 - DNA, 201 bp, Homo sapiens
ctgcctaagccctttccattcttgaagaccctagtgaaattccattatctcatctaaaacttttcctagtcatctccagccagatgtaatccttccctttkgtattttactgttgccagatgtgtccctttaaagcagttcttaatgggctagataggtctgcctgactcagtctctttgtcttgtcccacagtgcctagt

SEQ ID NO: 30554 - DNA, 201 bp, Homo sapiens
acttgatgggaatgtcatggtctgcttgcagaatgtgtccttgatgaaagtgttttggctctttaatctgtatgtaaatttccatgtgaatcttaaaaaamaaaaaagtctgttagagatgtcactgcctccagctctagccttttcttctctcttcttttgctgcctttccttcatttacttgtctgtctagaatgcctt

SEQ ID NO: 30555 - DNA, 201 bp, Homo sapiens
tatatatatatatatatatttatgtgtatgttagcatatacatggtatatgattttaaattaaacttgtgaaatcatgagctcatgcagaataagtaatcmttgctgtctagcatccataaactcttattccattttccattactcattaaccattcattttactgcacgtctgttttggagagcaagaaaggacttgggc

SEQ ID NO: 30556 - DNA, 201 bp, Homo sapiens
gaattgtggtgcccaggcatctagagggaaaagcaaacttcattacagcaatttctcggaggatacaatatatataaataaaatgccgtatatttttgaayattatttcttgataagcaatatatgcacatgatagaaaatgtaaatattatatgcaaaagtcaatctccttcataactctttggccacctatccaactcc

SEQ ID NO: 30557 - DNA, 201 bp, Homo sapiens
ataatgtgttggtttctctgtgtcttttctcacaaggttactgagatactaaatcagaagggtttgtgccaaacttgtgctgaaggctgataatgtagggrgcattatgaattgtttcccagcttacattttggtctttgtgtagagtttgcatgtgggatttcatatctgtcgtctttaagttttcaatcagttttctat

SEQ ID NO: 30558 - DNA, 201 bp, Homo sapiens
aatccataaattacagggcattttgacttcctgatggggttgttggattaaaaccaaatgataccaaaaaaagtaccccacaaagtcaactgaaaccactratgtgacaagtgtctactagttaagaaacacttatgcaacagagtttctgcaattcttccattatttctaccgaaccaggtaggtttgacataggaaatt

SEQ ID NO: 30559 - DNA, 201 bp, Homo sapiens
agggatatgttggaatttaatgccttcttatggcatcagtactgaatatttaatcagaacaaaaagagaaacatgttagaattttcaaattacagagttaycgtgtggatgcttcacagaggtacgtgcagttcagtgtgcttatacacccgtatgaacttctcacatttattagctataaaatacttcgaaggtgtattt

SEQ ID NO: 30560 - DNA, 201 bp, Homo sapiens
attctacaaagaacagctggctagactggaggagagggtatgactattttttatcattgattctattaccacatctgctgttttcttgtatatttatttaraaattaataaattagaacttcaactgcttttcctggttgtaaagtggccaggaagtgaagaagcaaagcaggtagttagttcgtcctctgtaacaatgtc

SEQ ID NO: 30561 - DNA, 201 bp, Homo sapiens
ggaggcaggggttacatcttgtaggacctagtaggtcataatcactattttggatgtatcccaagagaggtaggaaatcttgaagagttagggttgtaacytagaagttgtgagaccagatttgtggtttaaaaggggcactctggttgttgttgttttgataatgaattgtggtagagatgagggtaagagaccaaaaat

SEQ ID NO: 30562 - DNA, 201 bp, Homo sapiens
ttgttttcaggcgatatgagtctcatccagtctgtgctgatctgcaggccaaaattcttcagtgttaccgtgagaacacccaccagaccctcaaatgctcygctctggccacccagtatatgcactgtgtcaatcatgccaaacaggtaggtgtgccagccaggccactgggggcactgggcaaattgaaaactggatgac

SEQ ID NO: 30563 - DNA, 201 bp, Homo sapiens
acctcttttgaacatttggaaagtgaagcgctgagaagctgatataataggagaattgaaaaccaaaatgtatacacatcttcaccttttctaacagacgmcaagacaaatgaaaaatacatcctcagaacttgatgatgcaaagaaaataggattgttgctccagaaagtgcattaggctgggatctttaaaagaggccg

SEQ ID NO: 30564 - DNA, 201 bp, Homo sapiens
gaatatgatctgtacattatagtatttatggctgttaatgtcctaatttgatcatggtgctgtagttatataacagattgtccttgtgttttggaaattaygttggaatatttaggggtaaaggcatcatgtctgcaatttatcgtcatgtgtttcagaagaaaatatttgtgtgtgtatgtgcgtgttatgtttgtatag

SEQ ID NO: 30565 - DNA, 201 bp, Homo sapiens; identical to SEQ ID NO: 18851

SEQ ID NO: 30566 - DNA, 201 bp, Homo sapiens
ggggagagagaagagcaaagagacctccaggaccatcactccaaggaactccaacattgagggatcagttagaagacaatgagccagagagccgggaggaraaacaggagagtgtagtattatggaagccaagaaactcttttcaagaaaggggcaatttactggaacaagtctgtgctgatcgggtcctataagatgtct

SEQ ID NO: 30567 - DNA, 201 bp, Homo sapiens
caaggggagaactggatgtttctaaaactgtgtgtggtgaggaaatagttccccagcaggaaatcatgatgagcattccataaggagggggaacggatgcygggtggctgaatttctttgcatgcccctgattttaagattttagtgtatttggtgtaccctatgaaatatattgctgcaagttttaacacaatactttat

SEQ ID NO: 30568 - DNA, 201 bp, Homo sapiens
ccacttttttgctctgcatgtttgtctaattcattcctttactttgtagattttcactgtacgaatacccagtagttatccgttctctcattggaaaacakaatgagtgttttttgttgggttggttgtttttttttttttgttgttgttgtttgtttttttttttttgaatgagttctgtccatttgtaaaagtgtcttc

SEQ ID NO: 30569 - DNA, 201 bp, Homo sapiens
cagatttaaatttttattaaaatggcttttttaaaaaaccaccccaccccacactatacagtttttttccccctgttcaaataatttttaataataggtcrcattcctaagtccctggtgctacaaagagttttacatatattaccttatttaatccccagagaatcctattaggtaatcattgttacactagtcctgttt

SEQ ID NO: 30570 - DNA, 201 bp, Homo sapiens
cttttactatataatgaactaccacaaacttagtggcttaaaacagctaccattttactcacatcctgattctgcaggttaccaatttggactgttatcarctgggctcactcctgctgagttggctgaggtttggctgctctaggctgtcctcaccatagatagcctgtagtctctctcccgcttgcaggctagcctggg

SEQ ID NO: 30571 - DNA, 201 bp, Homo sapiens
ggtcatttcagtagaggaagacaaggatactttgtggtgttgtgtaatttcctcctaggtagttttggttgtgaatttctgagagagagtgggtgcaggasccatggatataggaacattaacttatgaactaaaatcagaatacttttcaaatataaatgtatttttcagtgcagtaggagaaaatatttaagaagaagg

SEQ ID NO: 30572 - DNA, 201 bp, Homo sapiens
cagatctggcgtaaatgtgatttagttaactggtgagtattacaccttatctataaatgtataattgtgccataagatcaaatgtcacagaagaaataaamcagctttgtgacatttctagctttataagtaaaacaataccctctatatagtagatactaaataaatacttgttgattattgaatttgaccattccttca

SEQ ID NO: 30573 - DNA, 201 bp, Homo sapiens
gccataggtcatttcagtagaggaagacaaggatactttgtggtgttgtgtaatttcctcctaggtagttttggttgtgaatttctgagagagagtgggtscaggagccatggatataggaacattaacttatgaactaaaatcagaatacttttcaaatataaatgtatttttcagtgcagtaggagaaaatatttaaga

SEQ ID NO: 30574 - DNA, 201 bp, Homo sapiens
ttagttgtctgtacatacaaaatcctgtcactgagacctatatgtagctggcgagatacaacagatatgcaataggtgagatatgatatagctgggaatastctaattgccctggagtggactcagtatttctaaaattgccacagcagatctggcgtaaatgtgatttagttaactggtgagtattacaccttatctata

SEQ ID NO: 30575 - DNA, 201 bp, Homo sapiens
caaagaagtggccataggtcatttcagtagaggaagacaaggatactttgtggtgttgtgtaatttcctcctaggtagttttggttgtgaatttctgagaragagtgggtgcaggagccatggatataggaacattaacttatgaactaaaatcagaatacttttcaaatataaatgtatttttcagtgcagtaggagaaa

SEQ ID NO: 30576 - DNA, 201 bp, Homo sapiens
tgggaggttggggctgcagtgagtcgtgattgggccactgcattctagcctaggcaacaaagcaagaccctctctctctcaaaaaaaaaaaaaaaaaaaaagaaggaaacttgagaacaagtacaaagtagcacgtagtctcataactgcaaagtaacatagtacaattttaaaagaatataatgatgagatgtaatcaac

SEQ ID NO: 30577 - DNA, 201 bp, Homo sapiens
gacaaagaagtggccataggtcatttcagtagaggaagacaaggatactttgtggtgttgtgtaatttcctcctaggtagttttggttgtgaatttctgaragagagtgggtgcaggagccatggatataggaacattaacttatgaactaaaatcagaatacttttcaaatataaatgtatttttcagtgcagtaggaga

SEQ ID NO: 30578 - DNA, 201 bp, Homo sapiens
ctgaggtgggaggatcatgaggtcaggagatggagaccatcctggccaacatggtgaaaccccatctctactaaaaatacaaaaaaattagctgggtgtgktgacacgcacctgtagtcccagctactccggaggctgaggcaggagaattgcttgaacctgggaggcggaggttgcagtgagccaagattgcgccactga

SEQ ID NO: 30579 - DNA, 201 bp, Homo sapiens
ttgaacctgggaggttggggctgcagtgagtcgtgattgggccactgcattctagcctaggcaacaaagcaagaccctctctctctcaaaaaaaaaaaaaraaaaaaagaaggaaacttgagaacaagtacaaagtagcacgtagtctcataactgcaaagtaacatagtacaattttaaaagaatataatgatgagatgt

SEQ ID NO: 30580 - DNA, 201 bp, Homo sapiens
tacagatgcgcgccatcacccctggctaattttttgtatttttttgtgtagacatggttttgccatgttacctaggctggtcttgaactcccgggcccaarcaatctgcctcactgacttcccaaaatgctgggattacaggcgtaagccaccgagccgagccctgtgttttaatcaatttaaattttaggtgtttctgat

SEQ ID NO: 30581 - DNA, 201 bp, Homo sapiens
tgttgcaaactttgggaacatagtagttaaaccagtgttgtgttatgcccatatgaccatggttgctcgtatctgtttatttggctagtattttcattaawtttatttatttatttatttatttatttatgagacggagtcttgctctgttgcccaggctggagtgcagcggcgcgatctcagctcactgcaacctctacc

SEQ ID NO: 30582 - DNA, 201 bp, Homo sapiens
ggtactatgcattgtgtacatccttgttccaagattgttgggaaagaaatagtaatatcagtgtcagtaccatcaacgtcatcattaaaacatccaccatyggcacccgcctgtagtcccagctattcgagaggctgaggcaggagaatcacttgaacctgggaggcagaggttgcagggagccgagattgcgccactgca

SEQ ID NO: 30583 - DNA, 201 bp, Homo sapiens
ttctcttaaacaccagattctgaaccgcagaccaagactgatggttaaagcaaacaattcctaatacctcataatgatttgtcccaaatttccttctcttycattaattatattttccttaattaattaattttatgttagaatagcgtgactgatctcttaaatatatccgtggcctatcttcaaattgcctagtttcgg

SEQ ID NO: 30584 - DNA, 201 bp, Homo sapiens
aaatttatagtcattaaagcagcttaaaaatttcttcttgaggtcttcattcacttgctcatactttgattaatactgccttccatcttttcatctctttscatcttctggaaagaaagcaaaccttttttttttttttttttttttttttttttacttttgacaaagtgttctgatagttatttcatcagagtttggatc

SEQ ID NO: 30585 - DNA, 201 bp, Homo sapiens
gtgatttgtctagagtcaccagtcagtttggctccagactcatgctctgggctactatgccaaaccatctctttagtataaatgtgttttcttagtataaytgtgaacattaccagttcagatataggcactatatgaaatatgacccttcttggtatagatggatatttacaaaaattttaaaattacaacctgcaagaa

SEQ ID NO: 30586 - DNA, 201 bp, Homo sapiens
caaattgcctagtttcggtggtgattctatttggagatttttctgtggcatagtcatggtatgtattgtgttaattcttgtacatttccctgggtttttgrccgtggtttgtttttttcagttctgcagttcactgccctctcactagaatttatacctttcctttagaagatatttagaaagggctggtagaaacatagc

SEQ ID NO: 30587 - DNA, 201 bp, Homo sapiens
ttgaaacatttttttttctctgtatgtctgtgttctttagaggatagtaggaagtcagggaaccaccaacatgctttgcatttctattctagtaaaatatrtattagcttagtgtactggataaaaataatgagacaaatcatcacccaggcgtttccttattgatgagaaatattccccctgtgttctctaggggttttg

SEQ ID NO: 30588 - DNA, 201 bp, Homo sapiens
gcaggagaaagaggagatatgcggcaaacgtgagatcaattttggacactttgggtgtgaggtgcttctggtttgccagaaggaaggtgttcattaggcamttcagtgtggagaccgggcttctgagagataggtcttaagctcgagtgaatgcatttattaatggaatttattagtttatcaacaacagttagaaatcaa

SEQ ID NO: 30589 - DNA, 201 bp, Homo sapiens
gaggtggaggttgtggtgagccaagatcgcgccactgcactccagcctgggcaataagagcgaaactccgtctcaaaaaaaaaaaaaaaaaaaaaaaaaagagaaatcatgcacctagcatggtgcttttcacatagtaaagtctcacaagtatttgttcagttgaatgaatcactgggtctggaaaatcatgataacctt

SEQ ID NO: 30590 - DNA, 201 bp, Homo sapiens
ctacattatattaaaataaaaacttaaattatctctttgaaattggctactgaccagagactatagatacttgtcttaaaaatctttcttttaatttagtwtagtgttgaacacttgttttcctgtcatagacacaaattacacagttatgaaaattacataccttcaacctgcatgtaatttctaggtgtaagtaattaa

SEQ ID NO: 30591 - DNA, 201 bp, Homo sapiens
atctcggtttaagatgcctctaaatattcagttcaagttagacaaagaagtggccataggtcatttcagtagaggaagacaaggatactttgtggtgttgkgtaatttcctcctaggtagttttggttgtgaatttctgagagagagtgggtgcaggagccatggatataggaacattaacttatgaactaaaatcagaat

SEQ ID NO: 30592 - DNA, 201 bp, Homo sapiens
agctgatgatctcggtttaagatgcctctaaatattcagttcaagttagacaaagaagtggccataggtcatttcagtagaggaagacaaggatactttgkggtgttgtgtaatttcctcctaggtagttttggttgtgaatttctgagagagagtgggtgcaggagccatggatataggaacattaacttatgaactaaa

SEQ ID NO: 30593 - DNA, 201 bp, Homo sapiens
taaaactaagatttaaaactgtccaacttagaagtcagtttaactaatcccatggtagaattgagttatggtatatgtccaaaaagagactgagaacgagmcaataactaaagacatgggcacaatcaagtgggtctctcctaggtctgcccctgcttgcttctctctcttaccttgtgccattgtcaattctttattagc

SEQ ID NO: 30594 - DNA, 201 bp, Homo sapiens
cactgcatttgtagtttagaaatgaatgtctccttcaggagaggtagataggagctgaatagcagaagttaaacatgagttaggagaaggaaaagagatayggcgtcaagtcagcatgggtctagaattggacagagatggacaaaagaaggcagtgagtttaagaatgagagtttgagcaccttatcagtgcccttttca

SEQ ID NO: 30595 - DNA, 201 bp, Homo sapiens
ttctagtttatattatttgtgtatatttcttttgttgtttttcggtggggagaggagtgggggatgaggcttcttttttcagtgctctatatgttaataayattaactctcccagttacatgttgggatttcttttcctgtttttgttacttgcttcttctttggattttataatgcttttgttttatgcagtttcttatg

SEQ ID NO: 30596 - DNA, 201 bp, Homo sapiens
aaattaaatttgttgattgatgcggtgtcctcagcaggctcaagtgttgaattctcttagtgttttctaaataatgataatggaatatccattatgatttyttttgcattttaaaaaatctcactttgtgaacaaagggaacattacctagtatgagtgttttaatagccagggtagataatgccatacattgaatggggg

SEQ ID NO: 30597 - DNA, 201 bp, Homo sapiens
tagaattcaattaattgaatacatggctactttaattattctgttaacagctaattgatattcacagtgatcatgttttacagcttctaaatgcaatattmccttacaagtttatggttcggcctcctttgatatttcagttctttttctgttttatgtcagcatataattttcttaggttcgtatatattgcacctcata

SEQ ID NO: 30598 - DNA, 201 bp, Homo sapiens
ttttcccagagctgcgtatgatcttccttccttccctcctgttgctggtgtcagacctgcagcacagtctgaggctctcctgctttcttctgctccttctytcctccacccttcccacacatgcccccataatcagtctcttgtactttatgtcttagtgagaggtgacagcgtgctggcagtcctcacagccctcgctcg

SEQ ID NO: 30599 - DNA, 201 bp, Homo sapiens
cagagaggttaatacctttcccaaagttcccctagattgttgatggccatggtgggattagacattaaatagtttttcctctattccctgattccctgtayagtgttctttttattcttttctttcctcttcctctccccccctccctccctccctcccttccttccttctcttcatttctttctttctccctctctctct

SEQ ID NO: 30600 - DNA, 201 bp, Homo sapiens
gattttcccagagctgcgtatgatcttccttccttccctcctgttgctggtgtcagacctgcagcacagtctgaggctctcctgctttcttctgctccttytctcctccacccttcccacacatgcccccataatcagtctcttgtactttatgtcttagtgagaggtgacagcgtgctggcagtcctcacagccctcgct

SEQ ID NO: 30601 - DNA, 201 bp, Homo sapiens
agtttcttatgacccttgaatgacctgagcgttaggaacactgatcccttgtgcagttgaaaatctgtatataacttttggctccctaaaaactgaactastaatagtcatctattgaccggaagccttaccaatagcagagtagattaacacatattttgtatgttatatgtattacatactgtattcttacaataaagt

SEQ ID NO: 30602 - DNA, 201 bp, Homo sapiens
ttctagttggcacagtgcatgtgggctgctgagcagaaccaagtattgtcattgtggcagttacagtttttatttaacaaacatatagaaaatttaagcastttacatattaaaccatttgacctcataacatctttatgtgggaggtactgttagtagtcccatctttggccgggcgcagtggctcatgcctgtaatccc

SEQ ID NO: 30603 - DNA, 201 bp, Homo sapiens
actgggctcagtctgttttaaggtgtttcccagttgtcctgtccctgaccccatgtttccccaaagtccgttcctccttaccatagctcgaaatccttgcygctctcttccagtggatgaccttgagagcttgttgaggtaaataggattgcagagtgtttttttgttgatttggtttttttttttttgagatggagtact

SEQ ID NO: 30604 - DNA, 201 bp, Homo sapiens
tgagaccagcctgggcaaatatagagagaccccatctctaccaaaaataaaattagctgggcatgatggtgcacactggtggtcccagctactcaggaggytgaggtgggaggatcacttgaagccccggaggttgaggccacagtaagccatgattccaccactgcattccaacctgagtgacagagtgaggccttttct

SEQ ID NO: 30605 - DNA, 201 bp, Homo sapiens
aaagatccacattgcagttgaaaagttgaataaagaaatgtttggctgtataatacagatacttagttaaaagaggagagggttgaggggatcactttttyctactatgtgcagaagtatgatatagaggattacgactggctcttttctagttatgtctgagtatgggattaatttttttttttgtaagaattcaatttc

SEQ ID NO: 30606 - DNA, 201 bp, Homo sapiens
agctcttctttatttcagtatatttacctatcaattgggattgttgatacctccttcaaataaatattgggtttatttactgtttacttttaggatgagcstaatatgcagagacttgcagattattaatcttattactttgaaaaagaactgtttcaaggggtgaatactgaaacttgtcccagtacttggaattttctt

SEQ ID NO: 30607 - DNA, 201 bp, Homo sapiens
ctaggttatatacaaatatgatgccattttacatgagggacttgagcatctgtggactttggtatctgaagggggtcctggaaccaatcctctgcagatamcaggggatgactatatatcaaaagtgcagcttacagaatgcaaatatgtacattatctcatttgcgcctcacaaattccttttacggatagaatacttcc

SEQ ID NO: 30608 - DNA, 201 bp, Homo sapiens
actatgttggccaggctggtcttgaactcctgacctcaggtgatccacccaccttggcctcccgaagtgctgggattacaggcgttagccaccacacctgkccccatttattctttagagtaggaggctaagacagcccaaggggtacacagtcagataagacacttgtgatgcaattctattccagtgtcctgagaagtg

SEQ ID NO: 30609 - DNA, 201 bp, Homo sapiens
gaggctgaggcaggggaattgcttgaaccagggaggtggaggttgcagtgagcggagattgcaccactgcactccagcctgggtaacagaacgagactccygtctcaaaaaaaaaaaaaaaaaaaattaggagtgggaggttaagaaggaggaagtgagttaggcaacaccataaagcttactccggcttgaagactgata

SEQ ID NO: 30610 - DNA, 201 bp, Homo sapiens
tttttgctttgtcttagtgtctgcatgtgtttgacaagtgaacaataaaatgtgctgtttgattccacactgtcttgattcttttctgtgtccctcctgcmatctttctttttcatgtcacattacatgaggctcttttcacctctctctcctgaccctgagttctagtgttcattgctctctctcacccaggatgtgctc

SEQ ID NO: 30611 - DNA, 201 bp, Homo sapiens
aaccatgagctaaacaaacttcttttctttacaaattacccagtctttggtattctgttacagcagcagaaattgactaaacaccctatgatagaaaggargcttagaaaagtgaagtgatttgtctagagtcaccagtcagtttggctccagactcatgctctgggctactatgccaaaccatctctttagtataaatgt

SEQ ID NO: 30612 - DNA, 201 bp, Homo sapiens
tattcccgacaatgctaagaagaatgtcttcttggctaaatcttagccaatctgcactcctgctctctcagatcactcagccctgctagagtcttgatagmggagcagttggagaatcaagggagatgatgatattaaaaccaacagtactgtgttcctaatttttgggttgccagcagttgtaaggcaccctgtgtcacc

SEQ ID NO: 30613 - DNA, 201 bp, Homo sapiens
tattttggatatttgaccatttttccatttttggatatttgtggtgttttcttttttttttttctttatccttttttactattcccgacaatgctaagaaraatgtcttcttggctaaatcttagccaatctgcactcctgctctctcagatcactcagccctgctagagtcttgatagaggagcagttggagaatcaagg

SEQ ID NO: 30614 - DNA, 201 bp, Homo sapiens
ttgtggtgataagtagtggcaaataataacttttttttttaacagcttgccttgcaaccacaagatgctcatccatcaatctgatccaaatgattaaaagygaaataagtttctgcttcaaagttaaataatcgacattatctaataaatcataatatagaagttgggacaaacagccaaaactttaaatattaaaccaca

SEQ ID NO: 30615 - DNA, 201 bp, Homo sapiens
gagtctcgcactgtcacccaggctggagtgcagtggcgcgatcttggctcactgcaacctctgcctcctgggttcaagcgattctcctgcctcagcctccygattagctgggcttacaggtgcacaccaccgtgcctggccaatttctgtgttttttaatagagatggggtgtcacatgttggccaggctggtctcaagct

SEQ ID NO: 30616 - DNA, 201 bp, Homo sapiens
aaaataaaccaaaattacacattatatattccctctcccaaaggaatctccttgggaagctgttacgttttctactatagctgcccttatcgaagtttcgrtcctaccctcccttctccttctccgtccctcactcttccaccattttcttcccctctttcttttctttctgtctatcaagagttgcatgaaaaagcacat

SEQ ID NO: 30617 - DNA, 201 bp, Homo sapiens
ttcttgtcctcagagtgatttgatgggatatgggcaatattctaaacaatattaaatcaggaaggctttagttttctaacatacaaactctcagagagctraagactaaaaatttatttttctttgtataaccagtacctggcacaatactaggctattcatgctttgttgaactgagggctaaaactcagaaagttgata

SEQ ID NO: 30618 - DNA, 201 bp, Homo sapiens; identical to SEQ ID NO: 18870

SEQ ID NO: 30619 - DNA, 201 bp, Homo sapiens
gcaaattgttctgagtttcagtgtgttcctgtacttttttttttttttttttttttgagacagagtctcgcactgtcacccaggctggagtgcagtggcgygatcttggctcactgcaacctctgcctcctgggttcaagcgattctcctgcctcagcctcccgattagctgggcttacaggtgcacaccaccgtgcctgg

SEQ ID NO: 30620 - DNA, 201 bp, Homo sapiens
gtatattttggatatttgaccatttttccatttttggatatttgtggtgttttcttttttttttttctttatccttttttactattcccgacaatgctaaraagaatgtcttcttggctaaatcttagccaatctgcactcctgctctctcagatcactcagccctgctagagtcttgatagaggagcagttggagaatca

SEQ ID NO: 30621 - DNA, 201 bp, Homo sapiens
ttattatacaaaatgtttattatacaaaaatttgcaccagtagatttgaaaacgtaaaacatccataatcctaccactcctgatgactagtgttaatactkgctgtttgattcctgtttttaccatgcatatatacttctggggagtgtatggataggatggaggaggtacaaatttcggctcatattttactactattta

SEQ ID NO: 30622 - DNA, 201 bp, Homo sapiens
gacaaggtcatggagcttgagacacatgcagtctgtgatcaggcttatgctttatctgagtaggaccacaatgagcctccgtcagggcaagctgtatggaygtctagaggtacaggcagatggcgagggacgtcgagtgcatacagaatggagatatctgctctacttggcccctcagtgggactgctgctgtcctggtgg

SEQ ID NO: 30623 - DNA, 201 bp, Homo sapiens
ctgcataggtagggaagaacaatagttgattgaggaatgtcttccagcccaccccgcacacacacacacacacacacacacacacacacacacacacacamacacacaccctctgagggaaaaagcctcctttctaccttgacgttgttggtgatgtgccctgccacacagtgtgatagtttgggaccctatgacttccct

SEQ ID NO: 30624 - DNA, 201 bp, Homo sapiens
gtgtaggtagaataacattgtgatttgaggctactgccaggttatgccttttcaaaaatagacttttcactcatttggcatggcctcccctttcttctctrtttggcctgaaattcttaatttccctctctctcaagatagaattaagggcaagtgtgctggaagtgtttaatttggcaagaccaccattgatagacacat

SEQ ID NO: 30625 - DNA, 201 bp, Homo sapiens
ttcccatcattccctgtcatgcacaggtgatagaagaatgtattggtgcttcaaactgattattactttttacctccttgatgaactcaatatattattamgagagtggctcagtttcaaccctggaggcatcaaaaagaacaagttctaaataacatcctcctttagaatgcagcatattttaactgtgtctctccatct

SEQ ID NO: 30626 - DNA, 201 bp, Homo sapiens
tgtcattgctagagttttagtaagaagaaagtggaatgggcaaaaaagaggtgaagaatttcattcagacctatagattaatattctatattgtgggtgarttgaggaaaaaccattgttttggaaattttcttttcatgaactaaaaatgctttcagcatctgtatagatcccgtatcttcaaaatgcagcaggcatcca

SEQ ID NO: 30627 - DNA, 201 bp, Homo sapiens
tgactttgcagttatattttctttttaaaattccagttaaaattttgactcactcttttttatgtcttactacattatgctggtttaatgttagatttttwaaattttaattatttttaaaaatttaagtagagacagagtcttgctatggatcttgaactcctggctcaagtgatccttctgccttggtctcccagggtg

SEQ ID NO: 30628 - DNA, 201 bp, Homo sapiens
aatgcctagcacagtgcctggtgtgcattcagtaaatggacgagttgagtaagtttggagaaagagacgatggttaccttcaaatatttgtcatgtagatkgctttttttttttttttttaaacggagtctcattcgcccaggctagaatgcagtggcatgatctcagctcactgcatcctctacctcccaggctcaagca

SEQ ID NO: 30629 - DNA, 201 bp, Homo sapiens; identical to SEQ ID NO: 18883

SEQ ID NO: 30630 - DNA, 201 bp, Homo sapiens
aatgtggggattacaatggtatataagacaaagttctacccccatgccacttattttaatggtatctgtatatttgtgtgtgtgtgtgtgtgtgtgtgggkgtgtgtgtgtgtgtattttctgtaagaatgcaggctctgaagttgggctgagtttaattctggctatacctctcactggttttattttgggtaaatttga

SEQ ID NO: 30631 - DNA, 201 bp, Homo sapiens
atttaatgtggggattacaatggtatataagacaaagttctacccccatgccacttattttaatggtatctgtatatttgtgtgtgtgtgtgtgtgtgtgkgggtgtgtgtgtgtgtgtattttctgtaagaatgcaggctctgaagttgggctgagtttaattctggctatacctctcactggttttattttgggtaaat

SEQ ID NO: 30632 - DNA, 201 bp, Homo sapiens; identical to SEQ ID NO: 18889

SEQ ID NO: 30633 - DNA, 201 bp, Homo sapiens
aaatgctttctgtcaaattattaaccaacagttagcagcactactcaaaataataattctgttttaatatgctacatgagaactacataatgtggttagamatacatacgcaatggtatgctcagacaaaatgcagccattgttagttcatgatatagttctcacctaaaaccttgtcatagttttagaatatttttcttc

SEQ ID NO: 30634 - DNA, 201 bp, Homo sapiens
cttcctaagtcaaagcctcaagatcagtgcatatggaggaatttgccctggcacaatttctgtccgccttctgaaggacaatttcatctccccggtgaacygtatttatattagaccaggattctgctcctaagtctgtgacatattttgagtatgaaggggtcctgaaaacatagtagtagcttttgcttaaaaatcaag

SEQ ID NO: 30635 - DNA, 201 bp, Homo sapiens
ggatcttgaactcctggctcaagtgatccttctgccttggtctcccagggtgttgggattatagatgtgagccaccatgcccagccacatatttcttgttmtcatcacagaactatgtagtattttctcttcttttcttttttttttaaatctaaatgttaaaaagaagtctcaatttacttacttaaggcaatatttact

SEQ ID NO: 30636 - DNA, 201 bp, Homo sapiens
ctgttgcccaggctggagtgcaggggtgtgatctcagcttactgcaacctctgcttcctgggttcaagcgattctcctgcctcagcctcccaagtagctgrgattacaggcacccgacaccacatccagatgatttttgtatttttagtagagacggggtttcatcatgttggccaggctggtctcaaactcctgacccca

SEQ ID NO: 30637 - DNA, 201 bp, Homo sapiens
taactttgggataactttttagcactatttttgaagctcaggactctgtgaatggggaaaaacaaagagtggaaacacgttctgggtcacctggtagccasttgttgccttgtgatgtcaataactgcgtgtgcttttgcagttgctttagggccagttggatggcagagcacgtaacagtgccctgcataaaggtccaca

SEQ ID NO: 30638 - DNA, 201 bp, Homo sapiens
aaggaggagggaagagttctgaaacaaacaggagtttgtgggtagcatcatgtttaaaatacatgatacaagaaatcatgtggctgggcctggtggctcaygcctgcaatcccagcactttgggaggctgaggtgggcagatcacctgaggtcaggagtttgagaccagcctgaccaacatggtgaaaccccatctctact

SEQ ID NO: 30639 - DNA, 201 bp, Homo sapiens
ctatgtcttttctttgctgcgttctgatcttttctcttttgtttgctcacatacctgcttggaatggatatattgtttttacctcttaaacatgcttttakgtatataatttgatgctcaaaagatgagtaataggaaaggtttttttttttttttttttttgagatggagtctcactctgtcacccaggctggagggcag

SEQ ID NO: 30640 - DNA, 201 bp, Homo sapiens; identical to SEQ ID NO: 2078

SEQ ID NO: 30641 - DNA, 201 bp, Homo sapiens; identical to SEQ ID NO: 2079

SEQ ID NO: 30642 - DNA, 201 bp, Homo sapiens; identical to SEQ ID NO: 2081

SEQ ID NO: 30643 - DNA, 201 bp, Homo sapiens; identical to SEQ ID NO: 2083

SEQ ID NO: 30644 - DNA, 201 bp, Homo sapiens
ctttgtagatgaagtagctgaaacacagaggtcacttgcttatagccacatagccagaaagcagaggagctggaatttgaacgcaggcagtcggcatctgsagtcacccatacttaccatcactcgatcagactgtgtttcagaggctaaattattttctgatccagcagtaatgttacctattatatgtctgtctgaatg

SEQ ID NO: 30645 - DNA, 201 bp, Homo sapiens; identical to SEQ ID NO: 2086

SEQ ID NO: 30646 - DNA, 201 bp, Homo sapiens
actagattagataaccttggttaggaccttctgaccctgcaatactaaaaaacgtttaaagaaaataattcaaccattaggtttttttttcctctttccartttttcaaaacttcctgattataactctcccttttttttttttttttttttaaccatgattggtgcttcaaccctggagttgagtgagttggaaataagt

SEQ ID NO: 30647 - DNA, 201 bp, Homo sapiens; identical to SEQ ID NO: 2076

SEQ ID NO: 30648 - DNA, 201 bp, Homo sapiens
tttccatctgaatctgaaggtgacccttgtttaaaacttcatactctgggcggtctttttgtgtcagccttgctttttgccattttctttttcagatgacrcaaaacagacaagatcagctgggagcccttcaaagccagctctaaatggaattaaaagaaggtattctgaggcaggaaatagttgttagatgaagggcct

SEQ ID NO: 30649 - DNA, 201 bp, Homo sapiens
cccgggttcaagcaattctcctgcctcagcctcccgagtagctgggtgggactacaggcatgcaccaccacgcccagctaatttttatatttttagtagasacggagtttcgccatgatggccaggctggtctcagactcctgacgtcaggtaatctgcccgccttggcctcccaaagtgctgggattacaggtgtgagcc

SEQ ID NO: 30650 - DNA, 201 bp, Homo sapiens
gattaaaggttcttaacctgctttgtgccaagttgcactttggcattctggtgaagcctgtggatccattttacttttaaatacaaaaaatatggccgggygcggtggctcacgcctgtaatcccagaactttgggaggccgagacgggcagatcacgaggtcaggagattgagaccatcctggctaacacggtgaaaccc

SEQ ID NO: 30651 - DNA, 201 bp, Homo sapiens
gaatctcatgggattgagcccaaatactgcttttgtacaagaccttgctggcagacagacctttgtctgttgtgttgaacttctttgtctagtcatattgwagttcttgtatatcctcagacttatccttttgagtttttttatttttgagttggagttttgctgttgttgcccaggctggagtgcaatgcctcaatcttg

SEQ ID NO: 30652 - DNA, 201 bp, Homo sapiens; identical to SEQ ID NO: 18881

SEQ ID NO: 30653 - DNA, 201 bp, Homo sapiens
cttcattattcagcttccatttgctctgccttggctcatgaaagggaaagggcagatgagatgaataaaaggtgccagtgaaagccaatttcatatctcasgtggaatggggtgggcagcctagctgtaacctggacaaatgactattgataaagaatttattttctgtcacctttaaggagagcagagggtggtacagcc

SEQ ID NO: 30654 - DNA, 201 bp, Homo sapiens; identical to SEQ ID NO: 18882

SEQ ID NO: 30655 - DNA, 201 bp, Homo sapiens; identical to SEQ ID NO: 2077

SEQ ID NO: 30656 - DNA, 201 bp, Homo sapiens; identical to SEQ ID NO: 2080

SEQ ID NO: 30657 - DNA, 201 bp, Homo sapiens; identical to SEQ ID NO: 2084

SEQ ID NO: 30658 - DNA, 201 bp, Homo sapiens
attagagtctataggtaagcctttcctttcttagcaatccagcactcatatagaagttgtattttcttttttttttttttcttttttctttttctttttcytttttttattgatcattcttgggtgtttctcgcagagggggatttggcagggtcacaggacaatagtggagggaaggtcagcagataagtgaacaaaggt

SEQ ID NO: 30659 - DNA, 201 bp, Homo sapiens
cattagagtctataggtaagcctttcctttcttagcaatccagcactcatatagaagttgtattttcttttttttttttttcttttttctttttctttttyttttttttattgatcattcttgggtgtttctcgcagagggggatttggcagggtcacaggacaatagtggagggaaggtcagcagataagtgaacaaagg

SEQ ID NO: 30660 - DNA, 201 bp, Homo sapiens
attccacctctgaaatactcgtgtatgagactcatcataatcatttggagaatctgtgtggtagattgttgttttctatacttcgtagttggtcttgttcrttttagtctcagcagcagactagaatgttaagccaatttgctaaatcttgcctgtcctctgtaaaatgcttaaatccgtttatataatacaaagggatat

SEQ ID NO: 30661 - DNA, 201 bp, Homo sapiens
ccaatatatttatactctaattaaaaatggaatatatttttataaaattagactaggagactcatcatttttggatataaatttttggagttaattcttartgacctgtaacaataaaagtttaatgtttgccattccctactgagtggagctccaaatgacatgaaattccagttttaactcagatcttgagcaaactga

SEQ ID NO: 30662 - DNA, 201 bp, Homo sapiens
cctcccaggtagctgggattacaggaatgtatcaccacgcccagcgaagttttgtatttttagtagagacggggtttcaccatgttggccaggctggtctygaactcctgacctcaagtggtccacttgccttggtctcccaaagtgctgggattacaggtgtgagctgccaccacgcctggcctagatggtttgttaatt

SEQ ID NO: 30663 - DNA, 201 bp, Homo sapiens
tgtgatttattgttttctgccttcttaaagtttctattttattgtattttcatattaaaaatgctagtgtgatatgctaaaatgatataatagtccaatartaggtagcaacctccagtctgaaaaatcactgagagtcagtgctggccttgtagggttcatgtggctgagcgaaatctgtgttccactagttttactttt

SEQ ID NO: 30664 - DNA, 201 bp, Homo sapiens
gctggagtgcaatggcgtgatctcagctcactgcaacctctgcctcccgggtttaagcaattctccttgcctcagcctcccgagtagctgggattacaggygctaccaccatgcctggctaattttttgtatttttaatggagatggggtttcgccatgttggctaggctggtctcgaactcctgacctcaggtaatccac

SEQ ID NO: 30665 - DNA, 201 bp, Homo sapiens
gaaaaattggttgacagctcatctaccttttgcagatggctgttgaatagtatagctccatgcggtataaaaccaaggggccagagaggaagctttgaaartaattgggggtttctgaaaacataagcagtttttctttgcaaagtggttttggctcagtaaagaatttacaggaaccattgaaagaggaaacttagaaga

SEQ ID NO: 30666 - DNA, 201 bp, Homo sapiens
ctgggttcaagcgattctcctgcctcagcctcccgattagctgggcttacaggtgcacaccaccgtgcctggccaatttctgtgttttttaatagagatgrggtgtcacatgttggccaggctggtctcaagctcctggcctcaggtgatccacctgccttggcctcccaaagtgctgggattacaggtgtgagccaccgt

SEQ ID NO: 30667 - DNA, 201 bp, Homo sapiens
ctcaggaggcagaggttgcagtgaggtgagattgcaccactgcattccagcctgggctacagcaagactccatctcaaaaaaaaaaaaaaaaaaaaaaaaraaaagaaaagaaaaaaaggaagtggtcaattctagatctattagaatttagactagactacgtgacagaatggatattgggaatgaaagggggaaagggg

SEQ ID NO: 30668 - DNA, 201 bp, Homo sapiens
tttgagaccagcctgtccaacatggtgaatccctgtctttacaaaaaaaaaaaaatacaaaaattaaccaggtgtggtggcgcatgcctatagtcccagcyactggggagggaggctcaggtgggaggatcacctgagcctaggaggcaaaggttgcagtgagctgagatagcaccactgccttccagcctgggcaacaga

SEQ ID NO: 30669 - DNA, 201 bp, Homo sapiens
tgttcccacctgttggttatgagtctctgtagttaattgataattagctgaagggtaataactggattcactcagtttttctgtcaacctggattccaaaraaataataattcaaggtcttctgattctttatgagaatctttaaaatttgttttctctgtcctgtggttatttctatgattactataatcatattttcgg

SEQ ID NO: 30670 - DNA, 201 bp, Homo sapiens
tcatatgattccactccccttttcatcctccccctcttcatttttatttatttatttaatttttgagacagaatctctctctgtcgcccaggctggagtgyagtggtgcgatctcggctcactgcaacctccatctcctcagttcaggattctgctgcctcagcctcccgagtagctgggattacaagcgtgcaccaccat

SEQ ID NO: 30671 - DNA, 201 bp, Homo sapiens; identical to SEQ ID NO: 18864

SEQ ID NO: 30672 - DNA, 201 bp, Homo sapiens; identical to SEQ ID NO: 18868

SEQ ID NO: 30673 - DNA, 201 bp, Homo sapiens; identical to SEQ ID NO: 18871

SEQ ID NO: 30674 - DNA, 201 bp, Homo sapiens
cagcaagaaaaaggcaaaagaaaaagcagaaaaaaggaggagggaagagttctgaaacaaacaggagtttgtgggtagcatcatgtttaaaatacatgatmcaagaaatcatgtggctgggcctggtggctcacgcctgcaatcccagcactttgggaggctgaggtgggcagatcacctgaggtcaggagtttgagacca

SEQ ID NO: 30675 - DNA, 201 bp, Homo sapiens; identical to SEQ ID NO: 2085

SEQ ID NO: 30676 - DNA, 201 bp, Homo sapiens
tttcctcaaatcgcattagagtctataggtaagcctttcctttcttagcaatccagcactcatatagaagttgtattttcttttttttttttttctttttyctttttctttttcttttttttattgatcattcttgggtgtttctcgcagagggggatttggcagggtcacaggacaatagtggagggaaggtcagcagat

SEQ ID NO: 30677 - DNA, 201 bp, Homo sapiens; identical to SEQ ID NO: 18873

SEQ ID NO: 30678 - DNA, 201 bp, Homo sapiens
atcctgccttttgaaatgcagcctcaagaagtggctgcttgaatgttgcagtgcccccactggcttacaagaaccttgtcagtgtttggagaagtttaaakctagcaggtgtaattgttgttatgctttctggcttggctgtggtctttttctgaaggaactcttcaagaacattgagcagtattctctgtgcttgaaata

SEQ ID NO: 30679 - DNA, 201 bp, Homo sapiens; identical to SEQ ID NO: 18874

SEQ ID NO: 30680 - DNA, 201 bp, Homo sapiens
gaaacattgatgtggaggttcatgtcctcctcctagttactaatttagtttagaaaggaaatcatctgtgtagacttgacaagttttggtgagtgctgtaktgagttgggattttcccttctcggaccctcccgctctcagttcctgctaccctcctcactttcctcctccattgggtcgaagttaatctgacattagtac

SEQ ID NO: 30681 - DNA, 201 bp, Homo sapiens
ttgacttttcctcaaatcgcattagagtctataggtaagcctttcctttcttagcaatccagcactcatatagaagttgtattttcttttttttttttttyttttttctttttctttttcttttttttattgatcattcttgggtgtttctcgcagagggggatttggcagggtcacaggacaatagtggagggaaggtca

SEQ ID NO: 30682 - DNA, 201 bp, Homo sapiens
atgaaagctgctaaggcttggggcttgcaccctctgaagcagtggcctgagctataccttggcctcttttagccacggctagagctggagctgctgggacycagggcaccaagtcctgaggctgcacacagcagcagtgccctgggtctggtccaggcaaccgtttttccttcctaggcctctggacctacgatgggaggg

SEQ ID NO: 30683 - DNA, 201 bp, Homo sapiens
cagaaaatgagtaatgaatggatgggttttgttccgataaaactttatttccaaaaggcaagatttgggccatagtttgttgatgccagcattagagtgayaattcttgttctttgtgtattcatttatacagccctgctccatggactactcatgttataataaagggatagagaagggcatgatgacgatgtgcgttcc

SEQ ID NO: 30684 - DNA, 201 bp, Homo sapiens
tgcaagctccgcctcccgagttcacgtcattctcctgcctcagcctcccgagtaactgggactacaggcgcccgccaacacacccggctaattttttgtawttttagtagagacgggggtttcaccgtgttaaccaggatggtctcgatctcctgacctcgtgatctgcccgcctcagcctctcaaagtgccgagattaca

SEQ ID NO: 30685 - DNA, 201 bp, Homo sapiens
ccttcaaatatttgtcatgtagattgctttttttttttttttttaaacggagtctcattcgcccaggctagaatgcagtggcatgatctcagctcactgcrtcctctacctcccaggctcaagcagttctcctgcctcagcctcccaggtagctgggattacaggaatgtatcaccacgcccagcgaagttttgtattttt

SEQ ID NO: 30686 - DNA, 201 bp, Homo sapiens
ggtgagcacactccctcagcatcgcaccgctgcctcttccctttgcttatctcttccacattaggttgctgattagcgacagggcttggaaggattgccamttctgtaacgattcaatttgggggactgcataggcactgatacctttacaaagcaacgccgacattagtttattaccttctcaattttagcaactctgaa

SEQ ID NO: 30687 - DNA, 201 bp, Homo sapiens
ccctggttgactctgttgtaaatcatgtgcaatatctggacacagtttcctccaggaggagtttgttgttttgggcttgatgactttcatggctttttctktaacaacagtggcatcttcatgaggtaatcctttcagacttcatgatgttctctctgtccgggttctcttccatagtgttgacagtccttttcatagatt

SEQ ID NO: 30688 - DNA, 201 bp, Homo sapiens
cttgacttttcctcaaatcgcattagagtctataggtaagcctttcctttcttagcaatccagcactcatatagaagttgtattttctttttttttttttycttttttctttttctttttcttttttttattgatcattcttgggtgtttctcgcagagggggatttggcagggtcacaggacaatagtggagggaaggtc

SEQ ID NO: 30689 - DNA, 201 bp, Homo sapiens; identical to SEQ ID NO: 18891

SEQ ID NO: 30690 - DNA, 201 bp, Homo sapiens
gattagggcataacttgtgtccgatcattgtcaaagagcccatatcttccttatgtacaactcatttacttgcagaaaaaaggattctactacaattatamttttttccacttgccctgaacttttgtcttctaataataatgttcccaaggtcattcctcatacttttaggccaatatttagagctagcgaagaggatac

SEQ ID NO: 30691 - DNA, 201 bp, Homo sapiens
aatctatcacataatggagacttgacttttcctcaaatcgcattagagtctataggtaagcctttcctttcttagcaatccagcactcatatagaagttgwattttcttttttttttttttcttttttctttttctttttcttttttttattgatcattcttgggtgtttctcgcagagggggatttggcagggtcacagg

SEQ ID NO: 30692 - DNA, 201 bp, Homo sapiens
gttcatgactgaagtatgcagttgttacagtataaaattatgggcattataaggattaaacctagcttgtcaattgtgggtgaacgtcttttttattggartatgctacagtgtaaagataaaggcataacaactgttttaaattgtttttctttctcattttctctgtggtacgaaatatggtaaaaatacctgctaact

SEQ ID NO: 30693 - DNA, 201 bp, Homo sapiens
ctgtgatatcctttaagtgtcttttgtcatgtaggatttttattttattacgaagcaagtgaatttagcaaaatacaggttctgtattcttaatctgtgtwcaaattctggctctgctgtggaattcaaccaagtcaaccaatacttcttcaactgcaaaaagggggcaaatggaagaactaatttttaggcttacagtga

SEQ ID NO: 30694 - DNA, 201 bp, Homo sapiens
tgagttagagatggggagtgactgtaaagtagtgagcccatttttcttgagtttttggaaggcaaagaaggaaatcccaaaacaggaaatctcagtttatkgtgtatatttgttaaaaacaaaagaaaacaaaacaaaaaactagtcttgtttgataatgacattgcaagttttgtatattatttatttatttttgtattt

SEQ ID NO: 30695 - DNA, 201 bp, Homo sapiens
cacttttcctacccttccaaatagattcatggtctctagatcatgataatatgcccttgtatttcaggggacaagcctatgttaaatccactttggattcmgaaaatatggtcatcatattgatgcttttcagttaaggaagttggaaactgaaaccatttcattccctgcaactcctcaaaccaagtcaattctgtggca

SEQ ID NO: 30696 - DNA, 201 bp, Homo sapiens
atgtgtcaaccttgctcaggggctgtgctaatctctgtattgttcaaattgtcctagatgtgttgccaaagcaatcacttttacactgtttttgctgtagmttttctatgtttacatatatttgtacacacaaataccactgtgttacaattgcctacagtatttagtacagtgacatgctgtacatctttgcagcctggg

SEQ ID NO: 30697 - DNA, 201 bp, Homo sapiens; identical to SEQ ID NO: 18858

SEQ ID NO: 30698 - DNA, 201 bp, Homo sapiens
tctcagaagtagtcttcattaagctaccctacgactgtaatgaaacgctaagttttgagccaggaatttgtgtatagaacactaggaatggcttcattagkatcatgcatctttttcattaaactgtgagtccctttgagagaaagattgtgtctctgaacttagtggcctaaatttctagaattatgtcttcaaaaagtt

SEQ ID NO: 30699 - DNA, 201 bp, Homo sapiens
tattaacactgagtaattttcttctttcttaacttgtagttgttagagaacaatttagaaaattgatgcttctgtcaaaagtctggatgggtaggatacaygctcagtgtggatatgacaacattaagaactccacaacttttactaactatgaaaaaaagaatatattttatactccattaaactgttacacatcatcaa

SEQ ID NO: 30700 - DNA, 201 bp, Homo sapiens
ccagcacccgccgggtcaccttcgaggcggacgagaatgagaacatcaccgtggtgaagggcatccgggtgagtgcccgtggacgggcggagggccagtgsttggactcggaccccaaggccccatcttctccggacccgctcagcctgggtttctcccgtcctggaccctagcgtattaaggccagaagcccaggtgtct

SEQ ID NO: 30701 - DNA, 201 bp, Homo sapiens
cagagtcactcctatagtgttctgtattaggccaaatcagtgctaccagggaacagtaagtgcttttaagtcccccttttaaaccttctctgcccccaggrctacttgacactttgttgacagctgtcactgtacttgagtattccttgaaaagcctcgggaacccatgtggatcattatagaaggatctccaaactttat

SEQ ID NO: 30702 - DNA, 201 bp, Homo sapiens
taaaatttctgatgaatgacatttgataagtggtgtgatcctgtgaatactgataagcactcgaaattcagttggtgaagcatcaatttcacacctgagaycccagttccaagtttaggttaaaggtttgcctggcgtccgcagtctttttctcaggtcccttgataagtgcagtcattccaaaccacatttttcttctgc

SEQ ID NO: 30703 - DNA, 201 bp, Homo sapiens
tagtaattctaaaatttctgatgaatgacatttgataagtggtgtgatcctgtgaatactgataagcactcgaaattcagttggtgaagcatcaatttcayacctgagaccccagttccaagtttaggttaaaggtttgcctggcgtccgcagtctttttctcaggtcccttgataagtgcagtcattccaaaccacattt

SEQ ID NO: 30704 - DNA, 201 bp, Homo sapiens
aaagtgctgggattacaggtgtgagccaccgtgtccagtcgattttgtctatttttgaaactgtaacagttaagtcagttttgtccacattaaaaaatatrgttggtccacaaatgaaatacaatatagtgtcatatttaaatttttttcataattaaaggctgcaacaagttaaattttatcttgatataaatggtataa

SEQ ID NO: 30705 - DNA, 201 bp, Homo sapiens
agttatttggaaagttacattagatttgtaagacttcaaataatctatctggtataatgagtggtttaataaattagtcataaattttatcagccatctgkgttagagtatagtgtagtccttttatttttccattgatagcattgttgatatcatcaaataagggcttaaaacttatttgtaccttttagtttctcatac

SEQ ID NO: 30706 - DNA, 201 bp, Homo sapiens
caggaatttcccagtcgatcagcaaatgtatgcatcattgaaaattatattgcctgccacaggcactaaagtaaatattttggctcatgatgaatatcgtrtgtgatacatagtgcccggattaacaaatagcactaattattattctgttcacgtaaaaaaattaggatgttacagacataagtaaggttggaaataaaa

SEQ ID NO: 30707 - DNA, 201 bp, Homo sapiens
gaggctgaggcacgagaatcacttgaacctgggagccagaggttgtagtaagccgagatcacgccactgcactttagcctgggtgacaagagtgagacccygtctcaaaataaaagaaagtctatgagggcaaaattcattgtctgtcatatagtaggtaccaaaaagggattttatattaaattacgataatattttact

SEQ ID NO: 30708 - DNA, 201 bp, Homo sapiens
ctcaatgactctggtggcaattaaggtctcatattgaacgaagagtattacctgtcattggcaaatgtatcaagttttctgcagtgtaaatttttaagcarttttgtttctctttgtcactttttgaaataattgttgataaaattgctgatctgataaaagtgagataggtgaatttagtagcattatataatgtcatga

SEQ ID NO: 30709 - DNA, 201 bp, Homo sapiens; identical to SEQ ID NO: 18887

SEQ ID NO: 30710 - DNA, 201 bp, Homo sapiens
ttagacctcctgtgaaccatagagtaactgggaaacttttgatattcgcagagtgtaagagagtgatgagttcaagcattggtctctgacaaaatttgttytggattgctgtgaacacatttggtctcttgctgtttttttttttttttttttttttttttttacaaccctgttagttacagtgagaagccataaaattct

SEQ ID NO: 30711 - DNA, 201 bp, Homo sapiens
agagaaagggataacattgtgtttggcttttaaaaaagacattctgaaaggagatccggagggttagcagtacctgactctgctaatgtagttaatgcccygaaatgaaggtagtcagtggctttgcacacaaatatgtaattttaagaattctcatttatatgccagaaggtaacatgcaaggattgagggcattgaata

SEQ ID NO: 30712 - DNA, 201 bp, Homo sapiens
attttatttcctctcttaggtggggaatcataagctgtttcttctaaactgttaagcccctctgtctgagttgctccagagatactaagtaactcggatgstgttgacaggaaaagctttaggtagaggggaaaaaaacgactgagcacatttaccgctcagcagggttgccatgctcccctaaccccgcatcatgcagtg

SEQ ID NO: 30713 - DNA, 201 bp, Homo sapiens
atgtccaagagtgacaggggctaacatagctataaataagcaactattaagaaattgtaaaaagcagtgactgccaagagaaaaatatagagaaaatgccktgtgaatttggaggaagtttagagtgataggagctgtgtgccaaagccactagtctttcttgggcaattcccattatggaacaaagggatccagaatgca

SEQ ID NO: 30714 - DNA, 201 bp, Homo sapiens
taagcctgaaaaggtttgttttattgcttttcactgggtgagtctgaacctcttcgtcagttgtcaggcctgacagcttaagtgtattgtagttgcttccrtccttacctaaaatctagttctactctttcttttgttaattaaatgggaggcattcacttaaatgcattttatttcctctcttaggtggggaatcataag

SEQ ID NO: 30715 - DNA, 201 bp, Homo sapiens
aattatatataattaaaaaaacccaagtttgtaatatacactgacttactagcacattaaataaaatgacctggtgttgggtgtattaactactattattkcaaagtagtgatgagcatgaatatttggaatgtctgaaactattgtaatgtgttatgaaaatgtgtgatttctattggtgacaaatcacaggtactgtgg

SEQ ID NO: 30716 - DNA, 201 bp, Homo sapiens
cttttatattctagccaaacaaaatcttgtattgttaacccctttggagggaggtgggagtaatacaatttttgtctgtattataaaatattaaaaaaaawttttttttttctcgagatggagtcttgctctgtcgcccaggctggaatgcaatggcgcgatcttggctcactgcaacctccacctcctgggttcaagtga

SEQ ID NO: 30717 - DNA, 201 bp, Homo sapiens
gatgctcaaaagatgagtaataggaaaggtttttttttttttttttttttgagatggagtctcactctgtcacccaggctggagggcagtggcgcgatctytgctcactgcaagctccgcctcccgagttcacgtcattctcctgcctcagcctcccgagtaactgggactacaggcgcccgccaacacacccggctaatt

SEQ ID NO: 30718 - DNA, 201 bp, Homo sapiens
gataatataatgcccctctgttttatttatcccctgccaccacctttttcaagattttttatggaatgaggaataatatgtttaaggtatagactttttakaatgtttatatgcaaaggaccataagattatatagtagttcaaccttcaaattttaaaactgaggaaactgaggcttattagattgtacagctaagttgt

SEQ ID NO: 30719 - DNA, 201 bp, Homo sapiens
tgtttgagttccctaatcaataattgtaaaataactagaaattgatctatgccagctgtaaacccatgcatgcatttattttttctttttctttttctttyttttttttttttttgagacggagttttgctctgtcgcccaggctggagtacagtggcacgatctcggctcactgcaacctctgtctccagggttcaagtg

SEQ ID NO: 30720 - DNA, 201 bp, Homo sapiens
aagaatagtacaaagagcttgactctgattcatctgtttttaggcatttaccacactttatcattctatttctgcctacatatattatatatatatatatwtttttttttatttgggggaggggatcaattgagcatgggtagaagacatgctcatttacctcttaatacttctgcctcttagaaatcagtgtttcttaca

SEQ ID NO: 30721 - DNA, 201 bp, Homo sapiens
ggtaatgctgtgttaggaacactggagaagagtgtgaggtccttctgtgcaggatctggaaatactggagaatattcagagagagtccctgtttcccctcytgacctccatagctttgccaatatagcctcgagctaaaaaggaatgtgggcaacacagttgtaaatcaaatgtaaattttctctccagattataatactt

SEQ ID NO: 30722 - DNA, 201 bp, Homo sapiens
tgccccactgctatctcacctcttacctgccttttgtctagcaaactcctgctcattgttcagatccctgcctagaaaccacttaccccaggaaacttttmatgacacccagtcctggtgagatgccccacctgtgtgggcctgtggtacctgtgcacgtctctcgtagcacacgtcacgtggttctgccattgcccgtta

SEQ ID NO: 30723 - DNA, 201 bp, Homo sapiens
gatgtggacataaggggaacctaggtgaaggatagatgggaatcttttgcctattttctgtaactttaaaattttttcacaataaaaatgaagagagtatrtttgcttagtattgtgtatacactgcaacagtttagtattcaagaatatataaaatccccacttagccaaccttttcaggatgtgcccgccctgcccaat

SEQ ID NO: 30724 - DNA, 201 bp, Homo sapiens
ccatacataagtaaactaaaatggaaaaaaaaagtagtaatttttaaacagtactttaaaattagatacaccaaatgtggtagatgtgataattcagttgwacagaattcattttatgttcatgaactaataatagaatttgaataaacattttatatatgtttgtaaagtgcctagcacagtgcttagtagttgatccat

SEQ ID NO: 30725 - DNA, 201 bp, Homo sapiens
gcatcctttgatcttacaagggtagattccaaataatggcaatctaaagaatctttccaaaatgttaggaattttctccaaaggatcaaatgataaggaaytgtaactgtgaacgtttactctgtaattataatccgcataccaacaactctactgttatttaaacgagtagctttacatgtgttttataagtatccatgc

SEQ ID NO: 30726 - DNA, 201 bp, Homo sapiens
catgttttgcttctttttcattaacttgccaaaatccttatgatcctgtatttcttaaagttgaaccatgtagaactccatatgtaattaaaatctaagcyatacataagtaaactaaaatggaaaaaaaaagtagtaatttttaaacagtactttaaaattagatacaccaaatgtggtagatgtgataattcagttgaa

SEQ ID NO: 30727 - DNA, 201 bp, Homo sapiens
cttttataagtatgggggatatagcagtgaacaaaaatagggcaaatcgttgtccttatggagctatggacaagagggaaaggaagcagcttgtgaaaggktctagctgctggagttagtagagtcaatttgtgattttagaagtccttagagatcataaaaataaagcagaatttattggtgaaaaattggaaaagatga

SEQ ID NO: 30728 - DNA, 201 bp, Homo sapiens
aattacttcattgaattacccagcttagctcttctgtttaaaaatggatggtaaacagtatcttgaatgctggttcggcaggttctgacaaaatatgatgygttaaaataaaattcattgttagcattaaaatgacctttgaggttgtcgtcactcatttttctctttcagtgtttgaaatagcctttctgcatcaagtgc

SEQ ID NO: 30729 - DNA, 201 bp, Homo sapiens
tgagaagtgttaagcttctctgttcccttatttttgtcaagtcttattaatcaaaaactgtatacgtgttttgtccttatttttaatagtctaataattayttcattgaattacccagcttagctcttctgtttaaaaatggatggtaaacagtatcttgaatgctggttcggcaggttctgacaaaatatgatgcgttaa

SEQ ID NO: 30730 - DNA, 201 bp, Homo sapiens
ttccaggatttgaaacgatttgagctgagaagtgttaagcttctctgttcccttatttttgtcaagtcttattaatcaaaaactgtatacgtgttttgtcmttatttttaatagtctaataattacttcattgaattacccagcttagctcttctgtttaaaaatggatggtaaacagtatcttgaatgctggttcggcag

SEQ ID NO: 30731 - DNA, 201 bp, Homo sapiens
ggcatggagttgggtacagagggaagaactctctgttgagatgacatttgggaagaggcctatggtaatagggaagcaagccattgccaaaaccgtgaagmaggcgtgaacttggcatgtttgggaaggctggggggtttgggagcagatgaaccctctggctgctgtgttgggcaagagttgaagcaacagagaattagt

SEQ ID NO: 30732 - DNA, 201 bp, Homo sapiens
gggagaccgtggggagagggagaccgtggggagagggagaggagggagagggagaggaggagcctttccgagaagttgtattttcaatacaagattaaaargtatttctcaaaacatgcaggggttttggacctgctggcatagctgcattgaaggcttcgtgaattttcttttctttttctacaacagtccttatgctgg

SEQ ID NO: 30733 - DNA, 201 bp, Homo sapiens
atctgggagttgtcagcccatgaggggagtttaaagccatgagactggaagagcttcgctaagagaccaagtgtaggtcaaggagaaaagtggaccttgarcagccctgaggtctgaactgggggttacttcttaagggaagacaagagtccagtggaattcctccacagggactgaaggggaaggaggcaggagttgtgc

SEQ ID NO: 30734 - DNA, 201 bp, Homo sapiens
taggaattttctccaaaggatcaaatgataaggaattgtaactgtgaacgtttactctgtaattataatccgcataccaacaactctactgttatttaaaygagtagctttacatgtgttttataagtatccatgccacctatacaagaaagtcttctactgcttgagtggctgaaacaaggttttatgtgttttttgaag

SEQ ID NO: 30735 - DNA, 201 bp, Homo sapiens
caattgtgccataaactcaactgcatttgcacaaaactagtagagatagcctatcccttcctatcttaaatctttgtacttgcttctcttctttactaatrtatgtctttcatgccatttattttctagagtagggcacttttgtctgcattaaaaatctgttcaggcagttatcctttcttctcaatgattttcttaatg

SEQ ID NO: 30736 - DNA, 201 bp, Homo sapiens
gtgcagcctccaaatcctgcagtcaagtgattctcctgctgtagcctccctagtagcttggacttacaagcaggtgccaccacacctgactgataaaaaawtttttttttgttagagatgggggctcactatgttgcccaggctggttctgaactcctggcttcaagtgatcctcccacctcatcctcctgagcagctggg

SEQ ID NO: 30737 - DNA, 201 bp, Homo sapiens
gagtcctggcaaaaacgtgtcccttatgaaaaagaaacgtaagtgcaaaacaatgtaaatgatgtatgttttgtctacagaagtgtactgagattctcacrttatttcatagcttacggtcctctttatgagaccccacccatgtctctcaggtcacggaaccaggattattgccctagtttctgtcttcaggaggaagcc

SEQ ID NO: 30738 - DNA, 201 bp, Homo sapiens
cgagtcctggcaaaaacgtgtcccttatgaaaaagaaacgtaagtgcaaaacaatgtaaatgatgtatgttttgtctacagaagtgtactgagattctcayattatttcatagcttacggtcctctttatgagaccccacccatgtctctcaggtcacggaaccaggattattgccctagtttctgtcttcaggaggaagc

SEQ ID NO: 30739 - DNA, 201 bp, Homo sapiens
ttacaatggtaatgtcatctctttgtctggcctaaggtttccctagccttatcaatgaacataatttcaaaattcgagtcctggcaaaaacgtgtcccttrtgaaaaagaaacgtaagtgcaaaacaatgtaaatgatgtatgttttgtctacagaagtgtactgagattctcacattatttcatagcttacggtcctctt

SEQ ID NO: 30740 - DNA, 201 bp, Homo sapiens
aaaaaggtagaaataattctggttttttctcagtatatctaaaataataacataaggagtataaaatttattttcataccaagtgttcaaaatccagtgtrtattttatgattaagcaagtcttggattggactagccacatttctgggctcagtagccgcatgtggctaatggggactgtattggacattgcagctccac

SEQ ID NO: 30741 - DNA, 201 bp, Homo sapiens
tacaaggaaattatttccataggaactaatgtacagtgccccagattgccctatcttgcactttttacttattaactctgccctaaaattctttaagtaaycctttaatgttaaaacattaagatgaaatagacattttaaaaatggagaggattctgggagttggagacttgaagcatctctgcaccttctgctatcaat

SEQ ID NO: 30742 - DNA, 201 bp, Homo sapiens; identical to SEQ ID NO: 18854

SEQ ID NO: 30743 - DNA, 201 bp, Homo sapiens
ggttccccttcctttaaaacagtttcttttgtcttaagttttcatttctaggttcctcccttccttcagtcttgtaatgatggtctcaagcagtaacaatrgtaactgctgtaatgacgatctcaaaatagtaaccatggcagtcggccacggatggatctgtattcaccacctccatggtccctttcctgcttttgttaa

SEQ ID NO: 30744 - DNA, 201 bp, Homo sapiens
ctaacaatcctaccaagctattcaaaatgaagagtaacatttattgcaagttttcttgtatgtatgtcaatgtgtttgctagcactgcaatgctgagttayttaattaaacctttccagctttctaggagtgttatcctcatgttttagacaagtacagtgagacacagtaagggtatgtactttatccaaggtcgcggga

SEQ ID NO: 30745 - DNA, 201 bp, Homo sapiens
gtattataaaatattaaaaaaaatttttttttttctcgagatggagtcttgctctgtcgcccaggctggaatgcaatggcgcgatcttggctcactgcaayctccacctcctgggttcaagtgattctcctgcctcagcctcctgagtagctgggattacaggcatgagccaccacgcctggctaatttttttgtattttt

SEQ ID NO: 30746 - DNA, 201 bp, Homo sapiens
agttagagctcatttgggagttaggtgtaggtagaataacattgtgatttgaggctactgccaggttatgccttttcaaaaatagacttttcactcatttrgcatggcctcccctttcttctctatttggcctgaaattcttaatttccctctctctcaagatagaattaagggcaagtgtgctggaagtgtttaatttgg

SEQ ID NO: 30747 - DNA, 201 bp, Homo sapiens
gctaggtgacccccactctgccatcaaactgaggagcaattggatgtggtagctctgctttctacaggtttattttacaaaagtagcttggagtgggcaastaccttgacctgacaacaggcagcatcaggttcaaatccagttctcttttactccaagcccgttcccaacatttcagattttcatagtgtttaggaagtg

SEQ ID NO: 30748 - DNA, 201 bp, Homo sapiens
gtatatcctactacataccctacatacctaggctatatggtataaccatgcacagtcaccgttcagtatgcagtctgtcactgaccaaagtgtagttatakggcttcgtatatgtgtttcccacagtggctggatcagtgcacctcatccaaatggttgatcaacaaatattcccaacaggttatagaaagaagattctca

SEQ ID NO: 30749 - DNA, 201 bp, Homo sapiens
gaaggtatttatcatgcagttaaccacaagaaatcttgaatgagatcatcatcaagtaacttaaataaaacagttattttctgacactttatcaccagagycattctttaggacacttagcattattatgtatgcatttttctttttcatataattgccaactattttgaagaatgggatgcttcagattaacgtcttggg

SEQ ID NO: 30750 - DNA, 201 bp, Homo sapiens
ctgcctcaaaattaactttagtaattaatgaccttcagtacatgtaccactcaattaactaccctcaagccagccgtacttttaaccttcctcgatggcasattcttgtccatctcctgccacagcattccttcctaggagatctccatgcttgcgttctctctgcagattgctctgcctgtgttgggcatccccttattt

SEQ ID NO: 30751 - DNA, 201 bp, Homo sapiens
ttcttttgaggttgtaaggagttgaggtaaaaaatatagggccatctttattcagaagtaagactgttggaaattgttttctaaggcctatgtttaactasctaataataacaattgttgtgattgtgttcaatgatataaaatttgattcttaagaggcgatttatccttttgctggagtgggtttcaagtagtttttca

SEQ ID NO: 30752 - DNA, 201 bp, Homo sapiens
agggaatactagaaataaaacatctgtcaaggaatgaattttttgcagatgagtagtgtcagagaggcatgaaattgattgctgtgatctaaggagaatgygctgtggagcaggcatggtgggtgctgatgttgtctgttggtctctctgtgtatgccaaggtgactttcaacagaaagatgagcttggtctaggggataa

SEQ ID NO: 30753 - DNA, 201 bp, Homo sapiens
aataaccctacaatgacctctgagtgttcaattgaaaggaagagtcacacatctttctttaaatcaaaagctagaaatgattaagcttaatgagaaggatrtgtgcaaagcctaggtaagctaaaagctgtgccgtttgcaccaaacaattggccaagttgtgaatgcaaaggaagtgttcttgaaggaaattaaaagtgc

SEQ ID NO: 30754 - DNA, 201 bp, Homo sapiens
gaaccagccgaaccagacccaattgcaaaggccaactgaaatcaccatctgtgctttactggcagtgatgtaatgtgattgcatgctttcagaaatagggytacagaggaaatgaaccccagttcttcacatgggaaatggaaaggtggtagttaaatcaccactgaatagaggagagagagagagagtgagctcatgtgg

SEQ ID NO: 30755 - DNA, 201 bp, Homo sapiens
tcaggtcccttgataagtgcagtcattccaaaccacatttttcttctgcatcaaatccaggcagcactcggaatcattaaatattaaaacttatattcagraacattattcattcataaatatttcattgcagcctaaactgcattgttcaaaacattttaggatgttatgcaactctgtcaaagtacattaacaaactta

SEQ ID NO: 30756 - DNA, 201 bp, Homo sapiens
gttatatatgctatggtgatctatgatgtgatctttgatgttactattgtaattgttttgggacaccacagaccacacccatataaaaagctgaacttaaytgataactgttacgtgtgtgttctgactcctccacccatcagccatttccccatctcttttccctcccctgagaggcctccttattccctgagacgcaac

SEQ ID NO: 30757 - DNA, 201 bp, Homo sapiens
tcttcagagcactgtgattttgggtattagttaactgatttgtcagtaaatcctcttctccttgctgttttaatgctaatttttaagacaggattgtttgyaaatgagacaaatccaataatctgtgcagattacccattgatttgattaaattgactcattgaccaactttgctgtgtgatattttagattaggtacttc

SEQ ID NO: 30758 - DNA, 201 bp, Homo sapiens
ttgctgaattcaagaataactattctctaatttcttagtctcatctgtaatttagaatactttcaaataattttttggacttttataaagctttaaaaagyaataccttttaaggctttaaggttttaaaaggtatgactttaacaacattttaatgtaatttaatacccttgtttctaacagtttaagacttttgccaaa

SEQ ID NO: 30759 - DNA, 201 bp, Homo sapiens
gttgtgccttcagatatacccagatattagtaacatttttattcgtaaagatatagtgctggttttcttattgatatttttatatccaataaacaaatccragtggtaagaatatgtattttccaccatagtactaaataaaaccattttcatcttcagttaagtaaagaagcagccccataagcatttttgtttgtccgt

SEQ ID NO: 30760 - DNA, 201 bp, Homo sapiens
tggtgctcagcacgaatgatttttcattgaaattgtagcatcaattcttttaaatggtttaacagaagaaattgactctcaatgactctggtggcaattarggtctcatattgaacgaagagtattacctgtcattggcaaatgtatcaagttttctgcagtgtaaatttttaagcagttttgtttctctttgtcactttt

SEQ ID NO: 30761 - DNA, 201 bp, Homo sapiens
gcataacagggtattggtataagtctttctgccttatactttctcatcattcatttactctaaaattagtaaaagcaataaaattctgtatgtgcatgatrcatattttaagtaacctggaatattgactttaatgtatttctattattgtattagtaactttctttatctgtggacgttttaaggagagagaagggtttg

SEQ ID NO: 30762 - DNA, 201 bp, Homo sapiens
attgtgctcggtaaaaatgttctaaatgaacatctatatgcctttttgtctcagttactcatacttgagaaaagtctaattactgaatctgtgtacctttrcagagataccactgttacctgataggattaggactggtgctcagcacgaatgatttttcattgaaattgtagcatcaattcttttaaatggtttaacaga

SEQ ID NO: 30763 - DNA, 201 bp, Homo sapiens
atgaaattttcatttctaaagaaaaatgtactgggtcagacttaattctggcacatctcatcattttgtgcaacttatgcaagagtctattaaaaggactmaccaaagagcaaaatcaccaaagcccttttcgttataaaactaaaggtctcagcatatgttggccagctcagaaaaccttcacagacggctgtgttaacc

SEQ ID NO: 30764 - DNA, 201 bp, Homo sapiens
tgcaaggattgagggcattgaatagtaggttaaacacaggccttgcagagagaaattaaatcatttttggtgagggagatgccatctaaagctatgccttrataaagatcttagaaattaacagtcacacagctgtatgttatgaggcgagaactgatgagaagttgtaacatgtacctctgtattgctttgaagttttgg

SEQ ID NO: 30765 - DNA, 201 bp, Homo sapiens
gcgcccattgttttatttaatagtgaatcttgtttaaagagaagttgaaccagctttattacagggcatgattagatacagttaattagtacggctatagygtataggctaaattgataggaaaggtgctgaaagtaaggaaattgtaaaggatctgtgaactgggtcttattcctctgaggggatgcagagaaaagaagc

SEQ ID NO: 30766 - DNA, 201 bp, Homo sapiens
gagatccggagggttagcagtacctgactctgctaatgtagttaatgccctgaaatgaaggtagtcagtggctttgcacacaaatatgtaattttaagaaytctcatttatatgccagaaggtaacatgcaaggattgagggcattgaatagtaggttaaacacaggccttgcagagagaaattaaatcatttttggtgag

SEQ ID NO: 30767 - DNA, 201 bp, Homo sapiens
aaatatttactctctggccttttatggcaaaagtttgtcacctcctgctttagacatcttttttcccctagaagttcctgaggataattgattgtggacayatccaactatgttccaagacatgggctggggacacaggaaaaagcaacaaacaaggagaacctgtttcccaccatcacagagctcagagtctagcgagtg

SEQ ID NO: 30768 - DNA, 201 bp, Homo sapiens
gatgggatttcaccatgtctgcccggctgatgtcgagctgacctcaagtgatctacctgcctcggcctccctaagtgctgagattacaggcataagccacmgagtccggccctccccctctttaaaaagatttttggtggaggtgggcctgacattttttgtttagaaccactagagtcaagtaacagattctcaactgag

SEQ ID NO: 30769 - DNA, 201 bp, Homo sapiens
acttgttgattattgaatttgaccattccttcatttttttgaaggataacttgatgtttgccttttgcttgttacatacaaaaaaaggaaaatcaaataamtttgtagattgaaatgaaaactccatgagaagcgaaaatcagtgactgagctttgggcttaaaaaattatatagcgtatacttttgtgatttttgtttct

SEQ ID NO: 30770 - DNA, 201 bp, Homo sapiens
tcaggattctgctgcctcagcctcccgagtagctgggattacaagcgtgcaccaccatgactggctaatttgtagagatgggatttcaccatgtctgcccrgctgatgtcgagctgacctcaagtgatctacctgcctcggcctccctaagtgctgagattacaggcataagccaccgagtccggccctccccctctttaa

SEQ ID NO: 30771 - DNA, 201 bp, Homo sapiens
agagtggctagtttctctctacccttgtgtctttaaatgttggagggacctggagtgagcagccgtagtgatgatactgctgccattctgcacactgctgrtgcggggccagccattccgttaggattggtttctggacactgacctgcttgctagggtctcaaaaggtgagtgtcagaaaagctagcttataagtaaagg

SEQ ID NO: 30772 - DNA, 201 bp, Homo sapiens
tgagggattattataagctaggcagtgcttgaaattagttaacataatactgtattctatccctagaacaaaccattaggggaaggtatttctttgccagscaaccagttgatttgttgagtctgaaagacattgagtaacttgacctgggattcttagctggtgcacccaggcctctgtcttcctcctcaccaatggcct

SEQ ID NO: 30773 - DNA, 201 bp, Homo sapiens
ttctgttccatcagagcctcaaggtttctgtgaccctctagaaagaatctataggacttgctattcttttgtgaggaagcagtaaggtttacttacatagsgtagaaagtgcgcctttgtatctggagaataagtttgatgatggtcagtaatcacatgctctgcaatttaatttgtcttcgtaaaacgtttagaactgga

SEQ ID NO: 30774 - DNA, 201 bp, Homo sapiens
gtagcatgccaccaatggaaagtctgaaccagaatattcttcccttttatgaaatgaagtaggaaggtaattaaattggataaattactcctgtggatctytacaaatcttcccgcaagtgttgccaagatatggtgctgaaggagcaagtgaaagagatatcaacatcttctgttccatcagagcctcaaggtttctgtg

SEQ ID NO: 30775 - DNA, 201 bp, Homo sapiens
tgattgttcttcaggttcatgcagagttgcataggtaaatgaatggaaatccaggctctttggattacctagggagccaagggttgctggcaagaatggtrttgtgatggagaaccactgccttccacaaggagaaaccaggccctatgccaagtactgaacttacatagtcccactgatacagtcatcctgaaagataaa

SEQ ID NO: 30776 - DNA, 201 bp, Homo sapiens
tactggatctgatatactgtgaatatgaaccgatgttggcaatttgcaatctatttaaattagctttgatttttctgtctgaggacagcattctcctgggrgcattgagtaaagacggagggtaggggataaaaggagagagtccagtgaagtggactcaaggccataggtttaagaagtttcagtaataaaatattcttt

SEQ ID NO: 30777 - DNA, 201 bp, Homo sapiens
cagccagtgtggtattgtaccttgaaggtacaggaccagacttgtttctgccaccattctcttggtgctaaggatctgtggagttgccaccatccttgaayggacaggcaatcgtcttgttcttttctgggaaatagtgtcaggccaccagaatttaaattgtacttcagccctcatgtgttacatagtcatgccctaatc

SEQ ID NO: 30778 - DNA, 201 bp, Homo sapiens
agcctttgaaagaagtgtatgttcgcttcccatgttctgtacgctcagccacagtgaccgtattataaagttaggtgcctcataaatgtttgtggaatgcrtgagctaaagcaaatcagataatgaagcctgatatgtacaagtgcctgtgtccactaagaggcaagcaggaaaaggggtctttctcttaggttggttcca

SEQ ID NO: 30779 - DNA, 201 bp, Homo sapiens
gtacaggaccagacttgtttctgccaccattctcttggtgctaaggatctgtggagttgccaccatccttgaacggacaggcaatcgtcttgttcttttcygggaaatagtgtcaggccaccagaatttaaattgtacttcagccctcatgtgttacatagtcatgccctaatctccatatgaagcattctataaaagaac

SEQ ID NO: 30780 - DNA, 201 bp, Homo sapiens
tttagtactgatccttgtaatagtatgtacttcattgtgttacaattacatgtttacttgtctgtttttcccatttgattatgagcctttgaaagaagtgwatgttcgcttcccatgttctgtacgctcagccacagtgaccgtattataaagttaggtgcctcataaatgtttgtggaatgcgtgagctaaagcaaatca

SEQ ID NO: 30781 - DNA, 201 bp, Homo sapiens
catgccctaatctccatatgaagcattctataaaagaactgacaagagccagttacatttttcttatgacctctttgatttgttctttttgtacatgcgaygggtatgatcatactagttataataaaacaagattcagaatctgagaaaatattgcacgaatactgtgtgtgtatgtgcatgttttcttttgatcaaatt

SEQ ID NO: 30782 - DNA, 201 bp, Homo sapiens
ccacggccagcccagagaaacttgggaatgatgcccactcttgttgattctcgtttccttccgtacggtctagaaactttgttcttggggatgaagatacmagatgggtaaatcccccccataccccaaattagtttaaggagagattggaaagaaatattggaatacttgcatctaaaatcaaccactttgttttgtact

SEQ ID NO: 30783 - DNA, 201 bp, Homo sapiens
aataggtcacattcctaagtccctggtgctacaaagagttttacatatattaccttatttaatccccagagaatcctattaggtaatcattgttacactaktcctgttttacagaggaaaagtaactgttgaggttaagtaacttactcagtttcacaagggtagggccatgatttggccatctggctccaaagtccatgt

SEQ ID NO: 30784 - DNA, 201 bp, Homo sapiens
catggtaggtgcaagacaaaagccagcgctttggggaagtaaaaggatgaaatgatgcctttctctccgtccttggagagctccctgctgatggcatcacagctctgccaggtcacagtagctttccagaccactgcttgggaagagtgttgtgatttatatgaggctgtggagtggtacattccaatcagtttctcactt

SEQ ID NO: 30785 - DNA, 201 bp, Homo sapiens
gcatggtaggtgcaagacaaaagccagcgctttggggaagtaaaaggatgaaatgatgcctttctctccgtccttggagagctccctgctgatggcatcacagctctgccaggtcacagtagctttccagaccactgcttgggaagagtgttgtgatttatatgaggctgtggagtggtacattccaatcagtttctcact

SEQ ID NO: 30786 - DNA, 201 bp, Homo sapiens
ttaggccaatatttagagctagcgaagaggatacagattaagagctggcacctttgggcccataagccgtaggtaggcagagggccaggttaaaaaaaaaacaaaacaccaccgttcagtcactgtccaacgcttccaccagttgatagagttcacttagttggacagggaaagggaaaccagagatagcattttaaaaag

SEQ ID NO: 30787 - DNA, 201 bp, Homo sapiens
ctagccaaagctaaccttttcttttaaagcccaagctgtagctatttgattaaatagtatggccctcattacaggtcatagtctgctctcagtgtgactggttcgttgagctaagtactgagctaggtgatgtccaggttggcattcctttctctggtaacagtggaggctgcttggcattttgtgttgtgatggtagaaa

SEQ ID NO: 30788 - DNA, 201 bp, Homo sapiens
cagccaatccctctgttttttctccacctgccagattcgtgcaggtggagaaaaaacagagggactggctgggcacagcaacccaccaccgggaagagtgkattccttccctttctcctctagttccaatagattattttgcttcctaatatctttctgctttcctcaacttatcccagttcctcctgtcttccttctgtt

SEQ ID NO: 30789 - DNA, 201 bp, Homo sapiens
tactttgggaggccaagaagggcagatcacttgagcccagaagtttgagaccagcctgggcaacatggtgaaaccccatctcagcaaaaaaaaaaaaaaaatcacaaaaattagccaagtgtggtggtacacgcctgtagtcccagctactcaggaggctgaggtgggaggatcacctgagcccaggaggtcaaagctaca

SEQ ID NO: 30790 - DNA, 201 bp, Homo sapiens
actggaagagcttcgctaagagaccaagtgtaggtcaaggagaaaagtggaccttgaacagccctgaggtctgaactgggggttacttcttaagggaagasaagagtccagtggaattcctccacagggactgaaggggaaggaggcaggagttgtgctaatttatccagggaagcagttctccatcatctttagaggaag

SEQ ID NO: 30791 - DNA, 201 bp, Homo sapiens
atgggtgactcacttgcttttgcttgggttagcacatatttctccaaagctttccttttttctttctttctttcttttatttttatttttattttttttttgagacagggtctcactctgtcactcaggctggaatacagtggcatgatcatagctcactgcagccttgacctcctgggtcaagtggacctcctgggtcaa

SEQ ID NO: 30792 - DNA, 201 bp, Homo sapiens
gagattctagacaacgataggttggtagtgtatactgaacaaacaagattcttcctaacgtgttctgtagtcacttgctcagcatttgggccatatatatwtttttttttccagaagtaaaaaggacagtgtggctaagtgtctagattagtccccaaaagcccgtttaacccctgcagttcagaaaagaagactagatgt

SEQ ID NO: 30793 - DNA, 201 bp, Homo sapiens
aaatttcagtgggtactctttcttgcaacatcacaagtaataccttgtgaggaggcaggggatatgataaatattttggaagtaaaattagctttggtagrtggaggagagggagaaggaagaatgctgttgactcctgggaaagattggcattttgcaggctattcattcactagaattcgtgtagatgaacacaaaaag

SEQ ID NO: 30794 - DNA, 201 bp, Homo sapiens
tatctgttgtgacatatatttgaaaggtgtatgctttgtgcctataagagcaagacaatattctgattgtcttgaattcctattctaagtgactgtttcaktctggtgttccttcttggccgttttcagatcctgcatgttggggaatgagtaggtttttcacatgatgattgtacatgtaagttttaatgctcagcacaa

SEQ ID NO: 30795 - DNA, 201 bp, Homo sapiens
gccagagagtaattccaggaaggctgtaatgaattagaggacattttcaaagggcaagtaaattaatcaggaagctaaaaatcagaaagttgggacacgtrtattgtagcatgggaggagacagggaggctcagcagagatgtagcagggcatccctaaggaggtccagagagtggctagtttctctctacccttgtgtct

SEQ ID NO: 30796 - DNA, 201 bp, Homo sapiens
tggtagtataagttctttaatacaatttatactaatcatccagtttaacattttcttacctttctattccttgacacctgaggcttaaaatttggatagaycaggcatcagcaaactgataataatttatacatttttaaatggttggggaaaaaattcaaaagaataattttatgacacaacaattctatgaaattcaaa

SEQ ID NO: 30797 - DNA, 201 bp, Homo sapiens
taattcatggttttaatataatagtcctgttgtttatgggacatataatatcagatgttgagaagccagagagtaattccaggaaggctgtaatgaattaraggacattttcaaagggcaagtaaattaatcaggaagctaaaaatcagaaagttgggacacgtgtattgtagcatgggaggagacagggaggctcagcag

SEQ ID NO: 30798 - DNA, 201 bp, Homo sapiens
aacaaattcaccagtcagggaacaaagtgagagaaaaatgaagaacaatattagaaaagaatcctttgggaagctgcacaaaaaatgttatattaaaatcrataccagggcttgaccttttgtggtagtgtatattttaaagcctcctattgattctcttttaataacatgtttattctagtttactgacataagcctaca

SEQ ID NO: 30799 - DNA, 201 bp, Homo sapiens
attacaggtgtgagccaccgtggccagcccttgtgcgttttgagttgaagattatctcttgcttcttggcctcttgtatctgtcctcccactgactacctktgtgttctggtttttgttgttgttgttttttttttttttggtcttttttgttttttcatttgccagcagcttgtcataggaatgacacatactcagcaga

SEQ ID NO: 30800 - DNA, 201 bp, Homo sapiens
tttttttttttttttctagatagggtcttgctctgttgcccaagctggagcacagtggcatgatcatggctcattgcagccttgacctcctgggctcaagygatcctccctcctcagcctcccgagtagcaattcaacacttgatgaatttactgagttgtgcaaacatcactacaatgcaattttagaatatttttatca

SEQ ID NO: 30801 - DNA, 201 bp, Homo sapiens
catgacgaaaccctatgtctactaaaaatacaaaaattagccaggtatggtggcaggcatccgtagtcccagctactcaggaggctgaggcacgagaatcrcttgaacctgggagccagaggttgtagtaagccgagatcacgccactgcactttagcctgggtgacaagagtgagaccctgtctcaaaataaaagaaagt

SEQ ID NO: 30802 - DNA, 201 bp, Homo sapiens
gtatttatttgccttttgtatgatagtcagtcatcacatttagtctacaaacttagatgttttgaaatcaattaaaaacttagctgctgggacaatttgcygttggaactagaatattgaatttatctgtcaaaatattcagccacgatgggagcaattgttagttatatgctatttacaattgcttccttacatataaac

SEQ ID NO: 30803 - DNA, 201 bp, Homo sapiens
attctgttttaatatgctacatgagaactacataatgtggttagacatacatacgcaatggtatgctcagacaaaatgcagccattgttagttcatgatayagttctcacctaaaaccttgtcatagttttagaatatttttcttcacttgagattctagacaacgataggttggtagtgtatactgaacaaacaagattc

SEQ ID NO: 30804 - DNA, 201 bp, Homo sapiens
actgaatttcacattttttctctttctatacatgtttctaccattttgaggtgaaaattaaaaaatctagtatactgcttagtgtggctttaaaatcaatrtatttgtttttgaatttttttagtgtgatttcatagggaatactagaaataaaacatctgtcaaggaatgaattttttgcagatgagtagtgtcagagag

SEQ ID NO: 30805 - DNA, 201 bp, Homo sapiens
ttctcttttcctccttctctggccataaaagatgtgcctacttcatcttgcccttctgccataattgaaagtttcctgaggcctcccaaaatgctgccatrcttcctgtacagcctgtagaaccgtgagctaattaaacgccttttctttataaattacacagtctcagatatttctttatagtgatgcaagaacagacta

SEQ ID NO: 30806 - DNA, 201 bp, Homo sapiens
acttttaaagattctttacattttaggaaggctcagcaggctgttttatttgaaaaacaattatttactcactttactttctttgagctcctttcttgctrttgataagaatattacagccaggaaatcattatgtttcctgcgtatgagattgaaattggctaaatcctttgaattttcttcacatccaatttcaaagtt

SEQ ID NO: 30807 - DNA, 201 bp, Homo sapiens
cttccaggaatatgtgagagacatttaggtctctaatgatgaagtattttctaggcgtaatgcaaaagattgtaaagagattttcttctgtattgtgatgrcagtgagaattacaatgtctaactatttctattaggaattctgcacacacttttgtattagacagtgtaaaaatgctgaatccattaattcgtattgtaa

SEQ ID NO: 30808 - DNA, 201 bp, Homo sapiens
aaagccccttgaaagctggaaagagcttaacaaatatcagctgttgccatgaaagaatatttgcttactttccattgtgtataagataacgataatcatakaattaatattattcaacttccttgtgtcttttgcacatttctgtacagtcctgtttttgtttgttactgtcattctcaaagtactcaagttgaattttgt

SEQ ID NO: 30809 - DNA, 201 bp, Homo sapiens
aggtggaatatatacactgctgttacttaatactcgataactccacattaagtaaaagaaagaatgttagacaaggagtcagaaggtatgcttttgtcatstggctgttcggcaattcacctaatcccttgtggtgtctggttctttatctgcaaaatggggatatactctgttccttgctcatcttcatggtgattgggg

SEQ ID NO: 30810 - DNA, 201 bp, Homo sapiens
gatggaaaacatgttttatgcttatatcaaacaataagactttctgttttaaagaaagaaattattaaatcacacctttgatatttgaattaaatcacatktacctgccacaaatttacattaaccgtaccattggacaaatcatgtcaagtattttttctgctgtttatggggcaggacaatatgcagagtgaatatgaa

SEQ ID NO: 30811 - DNA, 201 bp, Homo sapiens
ccacttggatgtctaacggtggcaaattctggttttcatctgtactttaatgtgatttttctcacccaggagcactttcatcctactgcatctcttcctakcttttactcctccttaccttgtaaatcttccctaatcctctgttccagccctgccttcaaagcctggctacatgtgctgcccattgtgttttctgtatac

SEQ ID NO: 30812 - DNA, 201 bp, Homo sapiens
ggagtgcagtggcacaatcttggctcactgcaacctctgactcctgggttcaagcaattctcatacctcagccagccgagtagcagggactacaggtaccygcaaccacagctggctaatttgtatttttagtagagatgaggtttcaccacgttatcctggctggtcttgaattcctggcctcaagtgatccgcccgcct

SEQ ID NO: 30813 - DNA, 201 bp, Homo sapiens
ctttggcaggcaggcctggcatcaggggaagtgaacttgagccaaacttgaggctaagagggatgggaggggggttagagtagaaggtaatcctggtagarttagcacacagaccagattaattcagataaaggtttcttgtagggtctcatgggtgggtaggttgaagtcaatgagtttaattctatcctatagggcctg

SEQ ID NO: 30814 - DNA, 201 bp, Homo sapiens
catatagttttcacacatcacaaaattttgcttaaatttttttccaaccacttaaaaatgtaaaaccaaaaacaggtactgggcctgatttggctccctcrttgtagtgggcagaactctgatttagagcacaaggctctgatgtcagatgccttggattcaaatttctgacctggcatttccctgctgtgtaatgtggag

SEQ ID NO: 30815 - DNA, 201 bp, Homo sapiens
gatcctagctactcgggaggctgaggcaggagaatcacttgaacctgggaggcggaggttgcagtgagccgagattgtgccactggactccagcctgggcraaagagtgagattccatcttaaaacaaataaacaaaaacgaaagaaatctatgtaccatcagaacactacagtaatcattgctgcaggcaggactcgcca

SEQ ID NO: 30816 - DNA, 201 bp, Homo sapiens
atgtctccttcaggagaggtagataggagctgaatagcagaagttaaacatgagttaggagaaggaaaagagatacggcgtcaagtcagcatgggtctagwattggacagagatggacaaaagaaggcagtgagtttaagaatgagagtttgagcaccttatcagtgcccttttcaataaagtagattggttatctagatt

SEQ ID NO: 30817 - DNA, 201 bp, Homo sapiens
accacaccacatgactgctgccactcggagatcatcagtggaacttggtgtttactattcttgttcattacttttcacttttccaatcttggcataaggtrcatcgtactgatcagatctaccacttttttgctctgcatgtttgtctaattcattcctttactttgtagattttcactgtacgaatacccagtagttatc

SEQ ID NO: 30818 - DNA, 201 bp, Homo sapiens
gttgaatgattttaagaacaagagaaaggtggagtctcaataaggcagccgtacaatatgtttatcaagccttcaataggtttagtatatactcctttggygcatgcttacaagtttactgaactataaccaaacatcccactgggaaatgttttgaattgatgtgagaatttgacattaagtagcaacttgggacatcag

SEQ ID NO: 30819 - DNA, 201 bp, Homo sapiens
tatttttatcaccccaataagatctcttgtgcctgtttacagttaatccctattcccaccccagctctaggcaactacttaatctactctatagggatgcyttttctgggtgtttcatataaatagaatcattcaatatgtggcccttgtgtttgcttctttcacttagcttaatgatttttaggtctatctgtacggtag

SEQ ID NO: 30820 - DNA, 201 bp, Homo sapiens
ttttggttttcatgtccctgtcaactggtttgggtgggtgagggatggggagagactttctccaggttttcttaagagggggctgcaaactcatcagctgstggcataccactgggcctcagcagcagaggctgcctcatctcccaccacttagtggatccttccacttaaggcagcccaacagtgggacctgagctctgg

SEQ ID NO: 30821 - DNA, 201 bp, Homo sapiens
tattatcatccatactcgatgggttaggaacactggaagggaagctgggggagattaaagacctgctcaaggtcacagaacagaaccagaaaccagatctktcagcttagtcctgtctctctccagatattacagttccagtgcttaaactaagcaaaagtattaattaagatgttattgcttagccagcattttaataga

SEQ ID NO: 30822 - DNA, 201 bp, Homo sapiens
tggtgagccaagatcgcgccactgcactccagcctgggcaataagagcgaaactccgtctcaaaaaaaaaaaaaaaaaaaaaaaaaagagaaatcatgcamctagcatggtgcttttcacatagtaaagtctcacaagtatttgttcagttgaatgaatcactgggtctggaaaatcatgataaccttttttctagaaggt

SEQ ID NO: 30823 - DNA, 201 bp, Homo sapiens
atctgtcagcttagtcctgtctctctccagatattacagttccagtgcttaaactaagcaaaagtattaattaagatgttattgcttagccagcattttartagatagttcagtaacataatacccactcaacagttcattagagtaatttgggagtttctcatctttagtgagagtaactattgttagtgattagtaact

SEQ ID NO: 30824 - DNA, 201 bp, Homo sapiens
taaatcgtagcccaaataagattatagtaaatgttagcatcgtaggggactataggttgatagaaagccattcatcatctcaaatggtgacctgtctatgkctctagccaccctgagtctgctatctaatcacatacctattgattttatctacatccaagaatcctggatgtgactgtcattggacaaccaagattgtta

SEQ ID NO: 30825 - DNA, 201 bp, Homo sapiens
ttcccaatttatttaccagatttctccctttattgttgttatttattattatggaagacatacatattcattggatcaagattagaaaataaatacaaagrgatactaaaatcactcaatgtactacaattcagagatagttactgttaacattttggtttgttgtgtttatattcctttttacttcccactgagttggta

SEQ ID NO: 30826 - DNA, 201 bp, Homo sapiens
ataggcatgagccataccatcttgatgacaaaaatattgtgtagaaagaaatgatctttaatatcctagtaggaacaccaatggaataatatataaatacraatgtgtgtgaatttcagtttttgatctcaggcatcctttgatcttacaagggtagattccaaataatggcaatctaaagaatctttccaaaatgttagg

SEQ ID NO: 30827 - DNA, 201 bp, Homo sapiens
ggctaatctaaatttaattctggatcttgtaatatatagtttaggagttcatttaaatttaatttacatagggtgaaaataagctttgacctttataattsctgtatcagtaaagtcacaggttcattgacttgttagccaatttttcctgtgttacttttcttctggttttgttgttgttgtttcagtttgtaatataca

SEQ ID NO: 30828 - DNA, 201 bp, Homo sapiens
tgatacatctatttgtacttcatgtcataaaattctacctttatatgctacagtatctaggaagtagacgtaagaaagagcaaatgtttaatatactacargttttgctgtagcatctaccagaaaatatgcttattttctctcgtctgtggttcctggtcttcctgatttctttttaagtttattaggacttctcttcat

SEQ ID NO: 30829 - DNA, 201 bp, Homo sapiens
aaggtaatagtattcaattagaggctaaatgccacctcctacacaaagccttctaattgttttgtatagatggtgatctcttttcataaggcattcaatayagtgatctggaaatcagtacgttaatacagtgatttgcaaatcactgtactgtagctgttaagcatattacctctggagctcggctgcttggatttgacc

SEQ ID NO: 30830 - DNA, 201 bp, Homo sapiens
gctgtttcacgtgtatttgtatctgcagctgacaggtatcctgaacatcttctctaacacgtattgatgtctacttataacctactttagtgctgtgtgaatggatctaatataccaaatgtacatgataaatgttttatctctgattctcattgatcagttttgaaatgatcaaatggtgtatctcagtaagacactaat

SEQ ID NO: 30831 - DNA, 201 bp, Homo sapiens
gaggaaaaaagtgaagatgccaggtgctcatgcctgtaatcccagcactttgggaggctgaagcaggtggatcacctgaggtctggagttcaagaccagcytggtcaatgtggtgaaaccccatctctactgaaaattcaaaaatcagccaggcgtggtggagtgtgcctgtagtcctagctactcgggaggctgaggcag

SEQ ID NO: 30832 - DNA, 201 bp, Homo sapiens
cagcacttagggaggccgaggcgggtggattgcttgaccccaggattttgagaccagcctgtccaacatggtgaatccctgtctttacaaaaaaaaaaaaatacaaaaattaaccaggtgtggtggcgcatgcctatagtcccagccactggggagggaggctcaggtgggaggatcacctgagcctaggaggcaaaggtt

SEQ ID NO: 30833 - DNA, 201 bp, Homo sapiens
aggctgccttctgagatttgccagtctccctgtcaccagtagtgtttcaggcacaatgagaacaatcacttgtcggggatactgtaaagaagattcttggraaaggatttgatgacctggaaggtctttacacgttaaagttcaatgattctagctccagtttcatggatttaataagacagcctctcttcctagctcctt

SEQ ID NO: 30834 - DNA, 201 bp, Homo sapiens
gatctgatgcttaatcatattttattcgatatttatctagatgcaggtcttgctataattagtcacttagtggtatctgtgcctatactctttgaagcacrgctgattccttttaaatcctgatgttcgtggtaaaggattagggaaatctgtgtccagaaaaattcacagacatctgaagtttgaaatcttaaagcatgg

SEQ ID NO: 30835 - DNA, 201 bp, Homo sapiens
tttgagccttaagtatttcatctttaaaatgagggttgtgaaaaattattatttaatatttcttttgacaaactaactcccaatttacacaaaatatacasaacagaatatgaattttagattaagactgctattttcttaggaaatagagaaggcttatgacttacaatttaaaaaatcaagatttaattagtactgcca

SEQ ID NO: 30836 - DNA, 201 bp, Homo sapiens
acagagtgagattatgtcttaaaagaagaaaaagaaaaaacaatcagatgggaagtctctacaagtgcaagagaaaaaaaaagttgttgaaagtttagacrtggcgccaggcgtgatggctcacacctgtaatcccagcactttgggagactgaggcaggcagatcacttgaggccaggagttcaagatcagcctgggcaa

SEQ ID NO: 30837 - DNA, 201 bp, Homo sapiens
gtggaatattagttcaccagatgatagcccacaattctagttacatatgaagtggtggtgtggtgaaataacattgcagctcctcactaaaccaaaaactscagcaagcttgtcgcagagagaccctcattttcccagctgtcaacctgactgatattttaatttttttgccctgtagaaaacttcagtctcttatccaat

SEQ ID NO: 30838 - DNA, 201 bp, Homo sapiens
atttgaacttcaacttccccaggctctgcctcaaaattaactttagtaattaatgaccttcagtacatgtaccactcaattaactaccctcaagccagccstacttttaaccttcctcgatggcagattcttgtccatctcctgccacagcattccttcctaggagatctccatgcttgcgttctctctgcagattgctct

SEQ ID NO: 30839 - DNA, 201 bp, Homo sapiens
cccagtagttatccgttctctcattggaaaacagaatgagtgttttttgttgggttggttgtttttttttttttgttgttgttgtttgtttttttttttttgaatgagttctgtccatttgtaaaagtgtcttctgaggccaaaggagatctctactctttctgaactccagtaacacttatctatgacttttaactcggc

SEQ ID NO: 30840 - DNA, 201 bp, Homo sapiens
atgtgcctctattcacatgcatatttctctgccaagtctttcaaaaaggcctttcctttgaaatacaaaaagataaacacatctttgaaatagattgatgrtcctttgccacttttgagctttctccaattcatatctgagattattaacccttaagactgacttttctgttcacctgtgtaactttacgtgtgttgctag

SEQ ID NO: 30841 - DNA, 201 bp, Homo sapiens
tgggatactgagcttgtttgtggcactcatcctttatgagaggtgcgtattttctgtggtgctggaaaggtattacttttgagcaaatagatttgattctkctggaattacagctcatctggtgctgaggagcacagcaagtatcatgcctgtgaaagagttcagaggtttgctcaatcttcaggaaagtttttcttaggt

SEQ ID NO: 30842 - DNA, 201 bp, Homo sapiens
agtcttggataatctgaacccttgtgccagattgtctaatgtcagttgtgttctggcactgcttcttctacatcttctcattgtctggcgctgtttcgaargcactcatcaccataatgtcgtccatcttctgttaattcctctggtgtggtgtctgttagttctggaatttctccaaggtccatcttgaagcccttcatc

SEQ ID NO: 30843 - DNA, 201 bp, Homo sapiens
tactttgtagattttcactgtacgaatacccagtagttatccgttctctcattggaaaacagaatgagtgttttttgttgggttggttgtttttttttttttgttgttgttgtttgtttttttttttttgaatgagttctgtccatttgtaaaagtgtcttctgaggccaaaggagatctctactctttctgaactccagt

SEQ ID NO: 30844 - DNA, 201 bp, Homo sapiens
ttgtggcactcatcctttatgagaggtgcgtattttctgtggtgctggaaaggtattacttttgagcaaatagatttgattctgctggaattacagctcakctggtgctgaggagcacagcaagtatcatgcctgtgaaagagttcagaggtttgctcaatcttcaggaaagtttttcttaggtagattttctgaatcaga

SEQ ID NO: 30845 - DNA, 201 bp, Homo sapiens
ttactttgtagattttcactgtacgaatacccagtagttatccgttctctcattggaaaacagaatgagtgttttttgttgggttggttgttttttttttkttgttgttgttgtttgtttttttttttttgaatgagttctgtccatttgtaaaagtgtcttctgaggccaaaggagatctctactctttctgaactccag

SEQ ID NO: 30846 - DNA, 201 bp, Homo sapiens
accaggggtaaaatggagtgcaagcctgagatgtgttggcaatacgaatgtgacacgttctgtataaagccatccagtggatgtgctattaaatgtgcacrtggcatcacctcattgagcacttcccaaggaaaacttatgacctggagagtgactgtgtcacatcacacagcccttgagagaatgggaggttcctgtgct

SEQ ID NO: 30847 - DNA, 201 bp, Homo sapiens; identical to SEQ ID NO: 18877

SEQ ID NO: 30848 - DNA, 201 bp, Homo sapiens
acatcttagggcttacagaggtctattcctgattactttcaccctgtctatcataaaaatagaatggctgacataagaagtagatttttttcttgtttaayaaaaggctggcatggtggcttcagtgtcatcagagccccagacacctattattccattgcagcaccctaacacaggcttttgctctttaaggtcagctta

SEQ ID NO: 30849 - DNA, 201 bp, Homo sapiens
atgccagaagcagctctaaatagctctgtttctttatataagaaagagtaaagatggaacgaaagggtaattataaaagcagtttattaattttgccaagscacccaggagataatggggttttcatgaaatgtgacttctcagagatggtaagatttgatgctagagttcaacatggctttgacattttttaattcttcc

SEQ ID NO: 30850 - DNA, 201 bp, Homo sapiens
ttgagtgttacgatgatcctgatttgtggtgataagtagtggcaaataataacttttttttttaacagcttgccttgcaaccacaagatgctcatccatcratctgatccaaatgattaaaagcgaaataagtttctgcttcaaagttaaataatcgacattatctaataaatcataatatagaagttgggacaaacagcc

SEQ ID NO: 30851 - DNA, 201 bp, Homo sapiens
taactctcccttttttttttttttttttttaaccatgattggtgcttcaaccctggagttgagtgagttggaaataagtagtcacactgaagctaaatgaraaggttcttttcagacataggagtaccagtgctctgtgatatcctttaagtgtcttttgtcatgtaggatttttattttattacgaagcaagtgaattta

SEQ ID NO: 30852 - DNA, 201 bp, Homo sapiens
tctttccaatttttcaaaacttcctgattataactctcccttttttttttttttttttttaaccatgattggtgcttcaaccctggagttgagtgagttgkaaataagtagtcacactgaagctaaatgagaaggttcttttcagacataggagtaccagtgctctgtgatatcctttaagtgtcttttgtcatgtaggat

SEQ ID NO: 30853 - DNA, 201 bp, Homo sapiens
tctttacaaattgtgtgaactttcctttctttgggatgacttaagtcatcctgcctggggcaagaactagattagataaccttggttaggaccttctgacyctgcaatactaaaaaacgtttaaagaaaataattcaaccattaggtttttttttcctctttccaatttttcaaaacttcctgattataactctccctttt

SEQ ID NO: 30854 - DNA, 201 bp, Homo sapiens
acacccctactgggtaggcattactgttatcctcattttataaatgaggaaacagagagggtaagaaacttaccaagttatatggtttggttctatgtccscacccacatctcatgttgaaatataatccccagtgctggaagtggggcctgtaggaggtgattggatcatgggtgtggtttctaatggtttagcaccatc

SEQ ID NO: 30855 - DNA, 201 bp, Homo sapiens
tttgctgtttttttaaatgctttattgcattgctgttgttttatactcatacttttccatttgattctgcttaacaattgataaaaagacctaaccagttstgaatgtagtaggaacacgtcctagccacccagtatttttcactggaaggtgattggaagtgctgtgtctgtactaggtattggaatcttgtgccatctg

SEQ ID NO: 30856 - DNA, 201 bp, Homo sapiens
ttagtttctcatactaatggtgaaatttacagggatggtaccatctgtttaagttcattatatatgataatttatcttgatttttattattacatatgttstgcctttgaaaaaggcagcaagaaaaaggcaaaagaaaaagcagaaaaaaggaggagggaagagttctgaaacaaacaggagtttgtgggtagcatcatg

SEQ ID NO: 30857 - DNA, 201 bp, Homo sapiens
tacttgtattttcccaaatcactacttctgcacttctacaacaaacttctgctttctcacaggacttttatggaaggaagaaaagtaatttgaatcccttrggcctttttataggtccattgtcagcgtcttgtgtctgccttgacccatttgcattctggtggttgctgggaacagtaagataacctatgaatagtcctt

SEQ ID NO: 30858 - DNA, 201 bp, Homo sapiens
ttctagtttctgatgaagaattgaaaagaagagtagctgaggagctggcattggagcaagccaagaaagaatccgaagatcagaaacggtgagttttgtgrtatcagagagaggttttggtgggttttgtcatatttaccagtatttttagagaagaatgattgtgataagtctcattatttgtgtatgactgaacttcag

SEQ ID NO: 30859 - DNA, 201 bp, Homo sapiens
ccaagttttctgtggagtagcagggcagctttaggtatgtttgctactgcagtgaaaaaggagaaacgtgttttgtttcagtttgcctgcctaggctgcaygttaagatcccaaagaatgaataggactgcgattacagatttaaagtttgcttgtatcctgaaaacttgcccagattaatatatttctgaaatgtacatt

SEQ ID NO: 30860 - DNA, 201 bp, Homo sapiens
ttttgtgttttgttgttgttgttgttgttgttgttgttgtgtgtgtcatatatttctgttttgtatttaataaaggtctcaagctcttctttatttcagtrtatttacctatcaattgggattgttgatacctccttcaaataaatattgggtttatttactgtttacttttaggatgagcctaatatgcagagacttgca

SEQ ID NO: 30861 - DNA, 201 bp, Homo sapiens
acctattgtgcatggacctcaggtttagtgaattcagtattacattgaacagcaatattatttaccatgtgataaactatgtgatataccatgtgcaatgrcgcctgcttcattttcgtgtattggatgttaaatttttcacagtgttgaatatcacagctctgtattccttttctgtatccgtgcttttattgctttgat

SEQ ID NO: 30862 - DNA, 201 bp, Homo sapiens
tcagagttctacagagtcaccactgaacaatatcagaaagctgctgaagaggtggaagcaaagttcaagtaagtttttaatagtattataattatttactrttcttaacaagatgaaagcacagttttagtgctttttgcacagatcatagtttgttatatagcactctagaatacttggaagagttttggggtggttgag

SEQ ID NO: 30863 - DNA, 201 bp, Homo sapiens
tgtattccataatagagagctgcttataaaaagacatctcagtagagattcttggtaaacaggatggattctgatgttttgttaaaacgaaaatacctatrcagttacccctctgtatccatgggttttgcatttttaaattcacccatccatggattaaaaatatttggaaaaaaaaacaacaatacaacaacaaaaaat

SEQ ID NO: 30864 - DNA, 201 bp, Homo sapiens
gatgtttgaccagatgagcactctgatttctgggctcctgaaggaaaagtaacctggcagtggatgtgaggtttagttggagacatgaaaaataagaactygaagaatgagataaggtcagctgtggtggttcacacctgtaatcccagcattttgagaggctgaggcaggaggatcgcttgaggcctgaagttcaaaacc

SEQ ID NO: 30865 - DNA, 201 bp, Homo sapiens
cttttagttctcactgacctttaaagaaaacagttgaaaatgtagataatctgcagagaactcagcagaaccatactggaggaaaagggctgatactcatrtgagacaattgggaaataatttgttacttagatatgttattgcaactttattgtgaagtacatacatatctttttaattgtttttcacttactggtctcg

SEQ ID NO: 30866 - DNA, 201 bp, Homo sapiens
agagaaggagagttaggtccagtaagtccctcccagtgaaatgctattcagctaaacctttaatctgccagggtggaaatcatcaggtgccccagctttaytcacttctgcaatacccattaagtttaggctgaaggcaaggcaacttcttctgtacctttgacatccacccacaacccagataggctacctgaaacaagt

SEQ ID NO: 30867 - DNA, 201 bp, Homo sapiens
ttggctgtcacatggactcggttatttagaacacaaaattcctcaggcaggttatttattatgtctttgacttgtgtcttccatctataaaatgtaaattrtaactgtcaccttctgtagggcatataagctgagaaagtttaaaagttaactgagaaagttgtctttgatccttatctaaaaaatggtcgtaagttgttt

SEQ ID NO: 30868 - DNA, 201 bp, Homo sapiens
atattcaaggaaggcagctgtgttttcctttaagcaaatgtaattgttgggggaaggcatctcagtttatcccatggacaaatacattatgggtaatgccmaaaaaaaaaaaagaaagaaagcttgggaccccaggaaaattacatgaatcttttcaactcttcataaagcagatgagtgctgcccttttctttagagctg

SEQ ID NO: 30869 - DNA, 201 bp, Homo sapiens
gtgaaataagctgctgatggtgcagccagattggccacgtccttcgtaagtccatgacctggagcattcttctctgttcttgctgtggcagttggggtttrttggtgttgcaccaagcatcttctttcctttcgtataagtggtttatgtgtaaacatgtaaatgatcaaaccattcttgtggcagctcttaggtttgtgg

SEQ ID NO: 30870 - DNA, 201 bp, Homo sapiens
gagtcctaggagaaccaggacagcaggatgtcagaaaagccaagggagggctttccagaagacgggagtggccagaggtgttagatgctaaagggaagccrtataaataaggcattttataaatataaaatatttatttacataaatatcaaaagttatttatttggtcattggtgacttctaccagagaatgttcactgt

SEQ ID NO: 30871 - DNA, 201 bp, Homo sapiens
acacctatgttcatagcaggtttattcatagtatcaaaaactagcaacaatccgaatggtcatcattgagggaatggagaaacaaaacagacagtattccrctcaactcagtggtatcctgcagaaaggggcaggagagatggcaaagctgattggaatatagggataaaaagcgcagttttctactttatattcatacag

SEQ ID NO: 30872 - DNA, 201 bp, Homo sapiens
attcagcaatagagaagagcaaactatcgatacatgtaacagcacggatggatctcaaacatcatggtacacacaaagaagccagatgcaaaacagtactwcctatgtggttcatttaaacgatgttcaaaaataggcaacatttgcctgtggtgggaatagaggagatttgattggaaagggacccaagcagcatttctg

SEQ ID NO: 30873 - DNA, 201 bp, Homo sapiens
tttgtgttgcttgatatgctgggtttttggcttgtagtgtctgttgttagtatttatttgccttttgtatgatagtcagtcatcacatttagtctacaaayttagatgttttgaaatcaattaaaaacttagctgctgggacaatttgccgttggaactagaatattgaatttatctgtcaaaatattcagccacgatggg

SEQ ID NO: 30874 - DNA, 201 bp, Homo sapiens
tgtgacaggtcacagtcaaaggcaggtccacaacatgtagtctgttgactgtgcctcaggaagaaaatgaccttcaggctatgtatagtatatatgaaacrtaaatggattccatattttggttggggtcccatccccaagatatgtctttatgcatatgcaaatattccaaattccagaacccaaattcaaaaacacttc

SEQ ID NO: 30875 - DNA, 201 bp, Homo sapiens
agaagcttgcttggcctgctttatgctgggcctccaactatgaagccatcagttctgaaaaaggggtgtgttggcaaggaggagaagagagaagggtatcratccttgatctgttaccatgttttgtgcttgtgcaagctgtgggcaggaggtcaatgcctcacacctttgtttcccaagcagagctcttgaacaagatga

SEQ ID NO: 30876 - DNA, 201 bp, Homo sapiens
gagacattctactcctactacctagagagcatagatagagaaaaataagcaccttctatacccataccaggacttaggcagctgctgcttgcaatagctgyaggcctggtcctcatgcaccttacagagaacgagtcagtacaagctcagacccagttgataaaaatgaaccaaaatgaattaaaaaagtccctgtggttg

SEQ ID NO: 30877 - DNA, 201 bp, Homo sapiens
tgttttgtgcttgtgcaagctgtgggcaggaggtcaatgcctcacacctttgtttcccaagcagagctcttgaacaagatgaagtgatcaaagctgggtgstagtgcattatcacagtctcattactttgcaagctgcatgcccagatgctgctgttttctgcatcaggcttcgctgatttacattcgtaacacctccatt

SEQ ID NO: 30878 - DNA, 201 bp, Homo sapiens
actgaaatcaccatctgtgctttactggcagtgatgtaatgtgattgcatgctttcagaaatagggctacagaggaaatgaaccccagttcttcacatggraaatggaaaggtggtagttaaatcaccactgaatagaggagagagagagagagtgagctcatgtggtgtatatttagtgttcaaagggcttttgccattt

SEQ ID NO: 30879 - DNA, 201 bp, Homo sapiens
ctaaggttttccttgtgtagtggcagggctgtcaatgaatctaggattcctattctaattagaaaaccaaatcaagaaaaaaaaaaaaacaaaaaaaaaamcctgagactctaattaatgaagtttctaaagctcctggaataaaactagaaatgccagaagcagctctaaatagctctgtttctttatataagaaagagt

SEQ ID NO: 30880 - DNA, 201 bp, Homo sapiens
agtctaggaagaccaagaggaataagtttgttcattgaaacaaacaaaaaacaatgtgggattgtgttctctctctctctctctctttctctctctctctmtctatctatctataaaaaaaaatctgtttatttttgagatcgagtctcactccatcacccagactggagtgcagtggcacaattttggctcgccacaacc

SEQ ID NO: 30881 - DNA, 201 bp, Homo sapiens
atagaaccagttactgagtctaggaagaccaagaggaataagtttgttcattgaaacaaacaaaaaacaatgtgggattgtgttctctctctctctctctytttctctctctctctatctatctatctataaaaaaaaatctgtttatttttgagatcgagtctcactccatcacccagactggagtgcagtggcacaatt

SEQ ID NO: 30882 - DNA, 201 bp, Homo sapiens
atttcattcgtttcttctttccctcctttctttcttccctccttccttccttcatttcatccatccatccatccatccatccatccatccatccatccathagcaaacattaagtgctggatttcaagattcatagacatgattcctttttcttaaggtacagtaggttagtgggaaggaatatagggattattttatggt

SEQ ID NO: 30883 - DNA, 201 bp, Homo sapiens; identical to SEQ ID NO: 18852

SEQ ID NO: 30884 - DNA, 201 bp, Homo sapiens; identical to SEQ ID NO: 18853

SEQ ID NO: 30885 - DNA, 201 bp, Homo sapiens
cacttgctcatactttgattaatactgccttccatcttttcatctctttccatcttctggaaagaaagcaaaccttttttttttttttttttttttttttttttacttttgacaaagtgttctgatagttatttcatcagagtttggatcgttgtgtgttcttcaggaaaatgtgtatttttcaggagtctgttggtcctg

SEQ ID NO: 30886 - DNA, 201 bp, Homo sapiens
cagttctccatggctagggaggcctcaggaaacttacaattacggcagaaggtgaaagggaagcaggcacctttttcacatggtggcaggagagagagaatgcgtgcaggggaaactacttttaaaccatcagatctgagaactctctcacttatcacaagaacagcctggggaaaccacacccatgatccagttacctcc

SEQ ID NO: 30887 - DNA, 201 bp, Homo sapiens
acagttctccatggctagggaggcctcaggaaacttacaattacggcagaaggtgaaagggaagcaggcacctttttcacatggtggcaggagagagagaatgcgtgcaggggaaactacttttaaaccatcagatctgagaactctctcacttatcacaagaacagcctggggaaaccacacccatgatccagttacctc

SEQ ID NO: 30888 - DNA, 201 bp, Homo sapiens
gtggtgataagaagtgcccttcaggctttgcaggctgccttaggaccattttctaatggaaaaatgcattcagaattccaaacacttgccttagaatttartcctcagaaaatgacttaatccttttttgtgttttgttgttgttgttgttgttgttgttgttgtgtgtgtcatatatttctgttttgtatttaataaagg

SEQ ID NO: 30889 - DNA, 201 bp, Homo sapiens
ccctttcttccagctaggcctctcccctcaggattctgtgtgtgctaggcttcttcccctgctgaatcctggccaccgctttctcccctcactcctcccaktcccaccccagtcctccacctggattctctccatggtggaaggtccttggagaagccttccctgctcgctccagctacagggttgccctctgcaccaggc

SEQ ID NO: 30890 - DNA, 201 bp, Homo sapiens
ctactaaaaatacaaaaaaattagctgggtgtggtgacacgcacctgtagtcccagctactccggaggctgaggcaggagaattgcttgaacctgggaggyggaggttgcagtgagccaagattgcgccactgaactccagcctggcgacagagcgagactctgtctcagaaaaataaaagatacatacagtaatagatca

SEQ ID NO: 30891 - DNA, 201 bp, Homo sapiens
aactgcaaagtaacatagtacaattttaaaagaatataatgatgagatgtaatcaacactctgctactgaccagggatatagagattaaaaagacatagtwtctgctctaaagattcatacagtaaggttgggagcggtggctcacgcctataatcccagcactttgggaggctgaggtgggaggatcatgaggtcaggag

SEQ ID NO: 30892 - DNA, 201 bp, Homo sapiens; identical to SEQ ID NO: 18855

SEQ ID NO: 30893 - DNA, 201 bp, Homo sapiens
actctgtctcagaaaaataaaagatacatacagtaatagatcagcacataattggattcatacagtaatagatcagcacataattgaagctcaaaaatgcractgcattgtagatgcctttggcataagagaatgccatggtgtgttgtggcctgctgcttttaatgttgagagggattaattgaagaatagtaccatcat

SEQ ID NO: 30894 - DNA, 201 bp, Homo sapiens; identical to SEQ ID NO: 18856

SEQ ID NO: 30895 - DNA, 201 bp, Homo sapiens; identical to SEQ ID NO: 18859

SEQ ID NO: 30896 - DNA, 201 bp, Homo sapiens; identical to SEQ ID NO: 18861

SEQ ID NO: 30897 - DNA, 201 bp, Homo sapiens
gtatttcaaccttaagtgctaaaatttcatctgagtagctgtgactaatctagtctttatttgtaacacattcaaattaggaggtgtatgttcttgtccaygtactttctcattagcactaatattgctaatgggagtgacaaatgtattatgttttttccttcgatcactcacgccttttagataactagctttttagag

SEQ ID NO: 30898 - DNA, 201 bp, Homo sapiens; identical to SEQ ID NO: 18863

SEQ ID NO: 30899 - DNA, 201 bp, Homo sapiens
gatatcttcttttaatataaaaacacaggagaaacagaaaattcttccaatgtataaagccgcaggattcaataatgtaaaattacagtgggttctgttaraatcttcagagaattgcaattattaacactgagtaattttcttctttcttaacttgtagttgttagagaacaatttagaaaattgatgcttctgtcaaaa

SEQ ID NO: 30900 - DNA, 201 bp, Homo sapiens; identical to SEQ ID NO: 18866

SEQ ID NO: 30901 - DNA, 201 bp, Homo sapiens; identical to SEQ ID NO: 18867

SEQ ID NO: 30902 - DNA, 201 bp, Homo sapiens
aaaaatggaatatatttttataaaattagactaggagactcatcatttttggatataaatttttggagttaattcttaatgacctgtaacaataaaagttkaatgtttgccattccctactgagtggagctccaaatgacatgaaattccagttttaactcagatcttgagcaaactgagcaacaccatagaggagctctt

SEQ ID NO: 30903 - DNA, 201 bp, Homo sapiens
gcattgaatagtgaaaatggctgaaacagtgtgggagaggtctagtggaatatgagaccacaaagcaagactggagtcagacttgaagaacttgaaatgcygtattttaaaaggcagagttaatagggcataaagattcaaccaagtgttctacctacttggtggccgagcgtggtggctcatgcctgtaatcccagcact

SEQ ID NO: 30904 - DNA, 201 bp, Homo sapiens
caactgagaacctcctggaggaaagctgatgtggtcaggtttatacagctgaccattggaagggccagagcttctaacttgtgtctactttttgtgtctaractagccattctgtgctactctacaatgatctttgtagccttaccaatattataattttcatactgcactcctaactcctttgtgaagaggtggtatttt

SEQ ID NO: 30905 - DNA, 201 bp, Homo sapiens
gaaaaagagcctcatcttttcataccaattgaaatggtatatgattagttttcattactcctagctatgatatctttgaatggtgtcctaagaattcacawggtaccaggttctttgtgtcattgcaatgaatgtgtgagagacaaacgtatgtggtttattcagatgtgttttatctggatgtctaatttttaatttatg

SEQ ID NO: 30906 - DNA, 201 bp, Homo sapiens
gaagagggcagaacacaaagtatcccatattcctaaacacaactgagaacctcctggaggaaagctgatgtggtcaggtttatacagctgaccattggaarggccagagcttctaacttgtgtctactttttgtgtctagactagccattctgtgctactctacaatgatctttgtagccttaccaatattataattttca

SEQ ID NO: 30907 - DNA, 201 bp, Homo sapiens
cctgaagaaccaggcgcaggtttcagtagcatgccaccaatggaaagtctgaaccagaatattcttcccttttatgaaatgaagtaggaaggtaattaaaktggataaattactcctgtggatctctacaaatcttcccgcaagtgttgccaagatatggtgctgaaggagcaagtgaaagagatatcaacatcttctgtt

SEQ ID NO: 30908 - DNA, 201 bp, Homo sapiens
aggcctgtttccctagcatctgtcacaattcagagtcattagcatacctttaatggtttcttttcaaaataatttctactagggcatttagaatgcatcarggaaaaatattgagttgtagagatgaggaattttaaatgtagacaaatggttttcattcccttggatgtaattttgataaaatcaagaaaccacatagca

SEQ ID NO: 30909 - DNA, 201 bp, Homo sapiens
ctggtcctggagaactcactgccaagactctgggggcctatccagtcaacacggtgttgccattctccaaggaactgtgtcagactgtgtggccttttggrcagtgattagaaaagaagacagcacagttgagtagaatgctattgatgttcttggcaacaattagtcatatttaaggacagctagggggaataactctgc

SEQ ID NO: 30910 - DNA, 201 bp, Homo sapiens
aaaagcaaaaagaaaaaaaaaagtgcgttttctcgtgtgtgtgcatttaaactacattctggatttaaaagcctgggctaactcactcacaggtgcaaatragagtgtttttactctgaaagggatctaatatagctctgaatttacactagaggaaactgttgtctaaaaactaagaattatagacttgggagtttgaag

SEQ ID NO: 30911 - DNA, 201 bp, Homo sapiens
ttacaggctgttaatacagggctgatttttgttggacattagctaattgccagagttcatctctagtacatgccagatagaagctgggcttttctcttgayggtatcaataggataattaagactatagcaaaattcaaaacatgatggagtatttattacattaagacttgtcattaattgggaattccttcagttcaga

SEQ ID NO: 30912 - DNA, 201 bp, Homo sapiens
ctcaagcttgataaacatacaaataataaatttttcctctaattattttttcctgtcctattaaacatacctctactgacataggcactatttcataaccygtgttcatcttttttgcaaaaatgacatttacaaaagtgatgacataaaacttgttaaaaatggtgattttaaaaattgttcatgattgattataggact

SEQ ID NO: 30913 - DNA, 201 bp, Homo sapiens
tataggcattttctgagcaaagcactgatgaaactaagacatagaggagaaaattcctgtgtactttaaggataagagaaccattcctttttctggctcarttaaaactggactgattgtcaagtcccattaacctagtgggtcactaccttgcttgcattagtggcagccccaccgtaatgtggagcagtcttgccacgt

SEQ ID NO: 30914 - DNA, 201 bp, Homo sapiens
aagacagggatgccctttgtgtctcttgtctgtttttcaggcagccacatttgtcatagttgaacctacttccattttgatattccagggttttttttcargcttttgtatgccatttattgaattctggcaagatttggccgttctcggatcttctttatctagggaaatcctttgtgcaaatgtgggaggcaatcctct

SEQ ID NO: 30915 - DNA, 201 bp, Homo sapiens
catattaacctttggtacatttttgaaatagtctcctgggcaaaggccttagtttataagcagggaaataagacttcagtcagatggcctcactcctaaayactggaagaaggaaatgctccatctgttaaacagttctttcagtctaaatgttggcacttataaccaatattggagatctaaaagtggctggatttgatg

SEQ ID NO: 30916 - DNA, 201 bp, Homo sapiens
agagaagagtaagagtgatcacttggggtttttagtatcactgaaattagccaggtgaacgaaattgcagtgtaagcagtggtttcccgggttcttttatkgggcatttaaagataattttagaaatctgttgtttttgggtgcaatttagacttggattataacctctgttaaaactctctctggttatgtatgttgtgt

SEQ ID NO: 30917 - DNA, 201 bp, Homo sapiens
attcattttactgcacgtctgttttggagagcaagaaaggacttgggctggaagtactggacactcagtataagtgtgaggtgaagcccatcagtaaatgmgtaaatatattcctgccttagatatacttaccttatatgtaaaattagatgctgtagtggaaagtacagcctggggggcagagaggacctggagtatccc

SEQ ID NO: 30918 - DNA, 201 bp, Homo sapiens
ggctgttgaaatagtccaggcaagtggttatggtggttcagactaggataatggcaatggaaatacaaagtggtccattccaggccaggcgcggtggctcrtgcctgtaattccagcattttgggaggccgagatgggtagatcacttgaggtcaagagtttgagaccaacctggccaacatggtgaaaccccatctctac

SEQ ID NO: 30919 - DNA, 201 bp, Homo sapiens
tgcatagggtaaaggtagagacactaggaaattacaatttttttttttttttgagatggagtctcactgtatcgcccaggctggaatgcagtggtgcagtytccgctcactgcaagctccacctcctgggttcactccattctgcctcagcctcgcgagtagctgggactacaggcgcccattaccatgcctggctaattt

SEQ ID NO: 30920 - DNA, 201 bp, Homo sapiens
gagatttttgaggaggctgcagatggcatgaataatcctagtaatagggggagagtgagtttaccaaagaagtgccataacattgtggcaggatttagtgyctgtgaatttatagtgattctagtttccctagttttgtgatttttctccagacatactcaactggagagtagtattaaggggctgtcataaggcagccat

SEQ ID NO: 30921 - DNA, 201 bp, Homo sapiens
tgttcttggcaacaattagtcatatttaaggacagctagggggaataactctgcttagaatgtgttctcatattttctaagtgtgattttgaaaattcatyaagttacttgcaaaccagttggttcagggcagttcttgttgagtggtgtcctgtgtgttagccgtaataacttattgacatcctatcacttgggtcatta

SEQ ID NO: 30922 - DNA, 201 bp, Homo sapiens
gaggaccccctgcctccctcctgtggcctttgcctttgcctcagggtggcttctttaatgggcagatgatggcatgtctctcttcagtcacctccatcccrgcactgaggtggctgatttccatcctatcttgtgtgcgctgttgctttctattcagatgactcgtgctttgagcgcattctcttctttccattgctccct

SEQ ID NO: 30923 - DNA, 201 bp, Homo sapiens
tagggccatctttattcagaagtaagactgttggaaattgttttctaaggcctatgtttaactagctaataataacaattgttgtgattgtgttcaatgakataaaatttgattcttaagaggcgatttatccttttgctggagtgggtttcaagtagtttttcagaataaaattagttttgcagcatatattcctttgga

SEQ ID NO: 30924 - DNA, 201 bp, Homo sapiens
tgaggtcaggagtttaagatcatcctggccaacatggtgaaaccccatctctactaaacacacacacacacacacacacacacacacacacacacacacacgccaggcatggtggtgggcatctgtaatcccagctactcgggaggctgagacaggagtgtcacttcaacccaagaggcagaggttgcagtgagccaagat

SEQ ID NO: 30925 - DNA, 201 bp, Homo sapiens
atgcttagatattgagataaagtgcctcctgtttctggttatttctactacatggcttatttcattcaatttttgtttaataaaattatgccttcaactaygataataataaatttaaagcattaacagtagtgattagctaattataagaaagttattttattaagatatctaattgtctacttgctttaaaaataacca

SEQ ID NO: 30926 - DNA, 201 bp, Homo sapiens
atgaggtcaggagtttaagatcatcctggccaacatggtgaaaccccatctctactaaacacacacacacacacacacacacacacacacacacacacacacgccaggcatggtggtgggcatctgtaatcccagctactcgggaggctgagacaggagtgtcacttcaacccaagaggcagaggttgcagtgagccaaga

SEQ ID NO: 30927 - DNA, 201 bp, Homo sapiens
catgaggtcaggagtttaagatcatcctggccaacatggtgaaaccccatctctactaaacacacacacacacacacacacacacacacacacacacacacacgccaggcatggtggtgggcatctgtaatcccagctactcgggaggctgagacaggagtgtcacttcaacccaagaggcagaggttgcagtgagccaag

SEQ ID NO: 30928 - DNA, 201 bp, Homo sapiens
tcatgaggtcaggagtttaagatcatcctggccaacatggtgaaaccccatctctactaaacacacacacacacacacacacacacacacacacacacacacacgccaggcatggtggtgggcatctgtaatcccagctactcgggaggctgagacaggagtgtcacttcaacccaagaggcagaggttgcagtgagccaa

SEQ ID NO: 30929 - DNA, 201 bp, Homo sapiens
aaggcatagtaagagattaatagcaataactaataataaattaaaacaattataacaatatactgtaataaaagttatgtgaatatcatctctctcactcaatatcttattgtacagtactcacttattttcggactatggttgaccttggataaagggggaactactgtaattttctaccatgttcttttcattctagag

SEQ ID NO: 30930 - DNA, 201 bp, Homo sapiens
aaaggcatagtaagagattaatagcaataactaataataaattaaaacaattataacaatatactgtaataaaagttatgtgaatatcatctctctcactcaatatcttattgtacagtactcacttattttcggactatggttgaccttggataaagggggaactactgtaattttctaccatgttcttttcattctaga

SEQ ID NO: 30931 - DNA, 201 bp, Homo sapiens
agtcacccatacttaccatcactcgatcagactgtgtttcagaggctaaattattttctgatccagcagtaatgttacctattatatgtctgtctgaatgyttttttttttttttttttttgaggcggagtcttgctctgttgcccaggctggagtgcaggggtgtgatctcagcttactgcaacctctgcttcctgggtt

SEQ ID NO: 30932 - DNA, 201 bp, Homo sapiens
aaaaggcatagtaagagattaatagcaataactaataataaattaaaacaattataacaatatactgtaataaaagttatgtgaatatcatctctctcactcaatatcttattgtacagtactcacttattttcggactatggttgaccttggataaagggggaactactgtaattttctaccatgttcttttcattctag

SEQ ID NO: 30933 - DNA, 201 bp, Homo sapiens
aaaaaggcatagtaagagattaatagcaataactaataataaattaaaacaattataacaatatactgtaataaaagttatgtgaatatcatctctctcactcaatatcttattgtacagtactcacttattttcggactatggttgaccttggataaagggggaactactgtaattttctaccatgttcttttcattcta

SEQ ID NO: 30934 - DNA, 201 bp, Homo sapiens
gaatggatatattgtttttacctcttaaacatgcttttatgtatataatttgatgctcaaaagatgagtaataggaaaggtttttttttttttttttttttgagatggagtctcactctgtcacccaggctggagggcagtggcgcgatctttgctcactgcaagctccgcctcccgagttcacgtcattctcctgcctca

SEQ ID NO: 30935 - DNA, 201 bp, Homo sapiens
aataaaatcccatttccagcagtcattttgctaattagcaaaacatcactgttgattaagacatggatgactgaagcccttctagtagcctcctacttttygagcttctaataagaatacttgctgattgctcctggattgtgcattcctgagtaacatgctggcagcacctaattcagagcttacataataatgtacata

SEQ ID NO: 30936 - DNA, 201 bp, Homo sapiens; identical to SEQ ID NO: 18885

SEQ ID NO: 30937 - DNA, 201 bp, Homo sapiens
cattcttttatatttatttaccacaaaaataaagttctggaataccatgccttacttgaaaagcattatttctgagtattttcacatttatttaattaatygttttaatgttaggtagtgctggcttaaggggaacctttttgaaagctgaatttttaaaacaatgaaaacccaagaagtcttcatgatttttaatggcaa

SEQ ID NO: 30938 - DNA, 201 bp, Homo sapiens
atacagagaatgatgatcattgatagacctcattctgtgattataatgacattatattgtacttatgtggaattataataaagcttttacaatttataacwtgacttgcctgtcataaccaatgcccattgttttagcaagagtggactttttcttctcgctcttctttatgtctgtactgatgtgtgtttgtgtatgtat

SEQ ID NO: 30939 - DNA, 201 bp, Homo sapiens
gaattccagtgtgtagtttttgttgagtactgtagtgagaaatctcaggattacagtagaagtatatgtgcccatcgagtagaaattataacagtatcaasctgggagataatataatgcccctctgttttatttatcccctgccaccacctttttcaagattttttatggaatgaggaataatatgtttaaggtatagac

SEQ ID NO: 30940 - DNA, 201 bp, Homo sapiens
aaaattattgttgttttgtagtcacttcaagttatatgtgcatattattttcccagcccagtgtcagagtactagcagatataagcagatataaactacgytttccctcccccgctgactttatccccacagctcatggctgtctccacgaagtaagtgattctgtctgagtaggtattttttttttttttatttaaccta

SEQ ID NO: 30941 - DNA, 201 bp, Homo sapiens
tgtgagccttaggaacatgtacactggtcccgtagagtgacacaacaaaagcaggctcttggtgtagtcaggttttgtccttgtaaatgacatggtacaartgcatgcggtggattaaaatatgttcaccctgacagaaatcttttagttgaagtgaaaaagcctccgtcaattctgattgcaacaaaggttgctgctgcg

SEQ ID NO: 30942 - DNA, 201 bp, Homo sapiens
cttccaagctgctgactctcattctgcatttttttttttttttttttttttttttttttttttaagacacagcctcctctgttactcagcttaggtacagkggcaagatcttggctcactgcaacctccacctttcgggttcaagcaattcttgtgcctcagtctcctgagtagctgggattacagacatgcagcaccaca

SEQ ID NO: 30943 - DNA, 201 bp, Homo sapiens
atagttctacagtatttttaataatactctattgtatacttgaaatttgccaagggaatggatcttaaatgttcttaaccgcacgcatgcattgtgtgcgwgcacacgcacaggtgtgagatgatagatgtgttaattaacttgattgtggtagtcattttatattgtatatgtatatataaagtcatcatgctgcatacc

SEQ ID NO: 30944 - DNA, 201 bp, Homo sapiens
agagtgagctcatgtggtgtatatttagtgttcaaagggcttttgccatttaatagttgtgtgatcatggacaagttgtctcatttttcttcagaataaartggggagactaatgccaatttctcatggttgccatggagactaaatgagaaaatatacaggtgctgagtgaaatatagcaggtgatcactaagtatcctt

SEQ ID NO: 30945 - DNA, 201 bp, Homo sapiens
tgcttagtgaaataatgtatgcacaatcataatgctatcagggattgagaataatttgtttaccagcgtgggtgagaaatattagcactaccatttccatmgaaaccattttgcatttaaaaagttctggcatgtcaaactgtaaatttcagtatttaaaaacattctcttatgtgaatccctgtattgcaaaagatactg

SEQ ID NO: 30946 - DNA, 201 bp, Homo sapiens
ttctgtatccgtgcttttattgctttgatatgattcctaaatggcactgagttatgctttttctgtgtttcttgatgttctgacctgtgtcctgatttggsgatgggggcaggtggcagctatcttcatgtatcttgtaactattcccttacccataaagacattggacattttcttgctcactcttttctttactaactg

SEQ ID NO: 30947 - DNA, 201 bp, Homo sapiens
gccattgagcctggcctgaactgaaactttttaaggctatgttatattttgattgagaactacctttttctctccatccaagtaaaattcttttagttgawcaaacacctccctattcccagccctgcagcatcatctgtgatgtgcctcaataggtgtaacttgaaccagccgaaccagacccaattgcaaaggccaact

SEQ ID NO: 30948 - DNA, 201 bp, Homo sapiens
ccctgagctgactcttgaagtatgagtaggatttgctcccaaggttgaggagtgggatgaaacagccttaggtattgcaggcaaaagcttggaaacgtggrgatagggggacactactagaagttgctgagtgggaatcattgtggcagttagaacatagtctgttctttaagtgggtgtgtgtgtgcaggggattcacga

SEQ ID NO: 30949 - DNA, 201 bp, Homo sapiens
ctgaatatttaatcagaacaaaaagagaaacatgttagaattttcaaattacagagttaccgtgtggatgcttcacagaggtacgtgcagttcagtgtgcytatacacccgtatgaacttctcacatttattagctataaaatacttcgaaggtgtattttcttctagtttttatatttaatttatggaatattaagtagg

SEQ ID NO: 30950 - DNA, 201 bp, Homo sapiens
cactaattactaaattaatacaagaatattatagaacacttggaaaacaaaaaattacaaagaaaatcagtattgttataattctgtcatctatcattaakgtttagaggtataaagttctttctcccttccccatatgtatatattttatacatgctttagggtctcagattatgtatcccaccaccctccaaaccagta

SEQ ID NO: 30951 - DNA, 201 bp, Homo sapiens
aggtaggttgtataatgtagattagaaatatagtaatgtcgtggagtcacagtactcaggagctggaagttaactcgggagttatgacctagtaatttcamtgacagcagagaaaaaagacgctgttttaaagaagctccccatttttgctgctgtagattctggacactaactttaaatggaattatgggatagtggatt

SEQ ID NO: 30952 - DNA, 201 bp, Homo sapiens
gatttgttactcaacataactaaaatattaagcaacatgttttgattggaatagcatatctgcagtctgttctgttttacctaataaatcttgtctattgwctgtctttactgctttgtgtagctggtgaagcatgagaaactggcctcgtacattctgatttgtagatctcttatttacagattctggttgtgtggtata

SEQ ID NO: 30953 - DNA, 201 bp, Homo sapiens
agctgaaggattttttgaggaagctgaaaaaatatcaggtcagtgggttgaaaagtcatttctatgtatattaaagtctccaaatttggaagctaaggatktagtggaggaggttaatagtgctcatgtttgaggaaggtacgagagcaaaactcttagtttccagcgggcagaagaataccttggttggcatttctcttt

SEQ ID NO: 30954 - DNA, 201 bp, Homo sapiens
acccagcaaaccatttccttccactcctccccatctcaccagcctcattttgtaatatccttcactgtggacacccttcttaggaaatcgaagtgttattycttaaccacaccaggtctgcaaggaccatgccctcctttctgcctgcccttctttgtctttctttcaaagaattgaaaactcactcttttcacactacct

SEQ ID NO: 30955 - DNA, 201 bp, Homo sapiens
aacagtcttttctaagataatttttttaaaaagaaaatattttttaatcttttaaaagattacatagacatgtttttgttgttgtctttaaaagtattacyaacagacagaagaaggtttaaaagacacccatcaatctgtctttctgatataaccatggtttacaccagtgtgtgttttcctcgagattatttttttcta

SEQ ID NO: 30956 - DNA, 201 bp, Homo sapiens
ccatgcctccattcttgccggatcattctcttcatcagcttgtttcatctttatagctgggtgctgctccactgacctctctgccatggagttccacttcyatccatctgatttatttttacactggatccgccttctcaagatggtacctttataacttcaccctctcatttagaaaggccagtggcttgtcaacacctg

SEQ ID NO: 30957 - DNA, 201 bp, Homo sapiens
cacttctatccatctgatttatttttacactggatccgccttctcaagatggtacctttataacttcaccctctcatttagaaaggccagtggcttgtcawcacctgcaggatagactctaggtgtgctgtctcttcttggcagactgtccatatcccggcccctcccttcttagcactacccaacccttccaaccctcta

SEQ ID NO: 30958 - DNA, 201 bp, Homo sapiens
taaactgttcttgacttctcttggtattaaaagcactctcttaaatttgatcacggcagggaagaggtaggggtactggaatgtatttttatgcatggackactcaaatgaaatttcaccaaacttcgcaccacccgagtcacccctcagctgagaatgagcatataaaattcatcccaaagggcaattctttgtgaaaaa

SEQ ID NO: 30959 - DNA, 201 bp, Homo sapiens
aaccaaccctcatgtttttaatcctaagaccaattttgatgaacattccaaagtagcatcatgagggattggaaataactcacaaagcctcgagggtatcmccataagtagaatacattatatagatatttaagaaaatagttatttaaggaaaaatctatgattgatgcattgtatatggctcatgatgaacatatttct

SEQ ID NO: 30960 - DNA, 201 bp, Homo sapiens
caggcagcaggggagtcccatcgtgtcagggtgtgttactctcccctgagcaccacagagaagacaccaacccctaccagctgtcacgtggccacatgttrttagagtcctgctctcctaggtttttccaccctgccccccatcatttccaaggacccaatattattgaaaaagaaaaacatattgcaaaattgaaaagtt

SEQ ID NO: 30961 - DNA, 201 bp, Homo sapiens
ggaggcggagcttgcagtgagccgagatcgcgccactgcactccagcctgggcgacagagcaagactccgtctcaaaaaaaaaaaaaaaaaaaaaaaaaaagaataaacccaactatataggattagagtaaaattaatgatgatgatgattcagatacagtataagctcttatctgaccttcacagaatctacctcgtgg

SEQ ID NO: 30962 - DNA, 201 bp, Homo sapiens
cagaattccaaacacttgccttagaatttagtcctcagaaaatgacttaatccttttttgtgttttgttgttgttgttgttgttgttgttgttgtgtgtgtcatatatttctgttttgtatttaataaaggtctcaagctcttctttatttcagtatatttacctatcaattgggattgttgatacctccttcaaataaat

SEQ ID NO: 30963 - DNA, 201 bp, Homo sapiens
tgagtgtcactgacaatttccttttctaaattaagatactttgtgaactatcaaaatatgacattaatgaaagtttagacattagaaaatgtttaacccaygtatttgtgcttatttttaaatactttaatcaatgcttaaaacatgtaatatcaaattgaataatagatcattgtcactgacaatttccttttctaaatt

SEQ ID NO: 30964 - DNA, 201 bp, Homo sapiens
tcagaattccaaacacttgccttagaatttagtcctcagaaaatgacttaatccttttttgtgttttgttgttgttgttgttgttgttgttgttgtgtgtgtcatatatttctgttttgtatttaataaaggtctcaagctcttctttatttcagtatatttacctatcaattgggattgttgatacctccttcaaataaa

SEQ ID NO: 30965 - DNA, 201 bp, Homo sapiens
aatgcattcagaattccaaacacttgccttagaatttagtcctcagaaaatgacttaatccttttttgtgttttgttgttgttgttgttgttgttgttgttgtgtgtgtcatatatttctgttttgtatttaataaaggtctcaagctcttctttatttcagtatatttacctatcaattgggattgttgatacctccttc

SEQ ID NO: 30966 - DNA, 201 bp, Homo sapiens
aattaaagccgtttgccatcaattctgttgagttcccctcactgcttagtcacaagtagcagccctgccaccagcagtgggtaaatctatgccaagtgtarttacttcaaatacaattccatttattcatagggtggactgttgctccccgtgagcacgtacttggggaaagaaaagatatgtaggtttatgttcattatg

SEQ ID NO: 30967 - DNA, 201 bp, Homo sapiens
tttcttgcattccaatttccattcgataggcacttttccttagacaatattataaggagtagttagtttacctgggactcctgagttttgatggtgatgtactttagctgtgtattgaattaaataagaacttgcctaggctgcctgtgttgatttccaaaattaaatttcaagtgactctggaaccacccatttccaagt

SEQ ID NO: 30968 - DNA, 201 bp, Homo sapiens
ctttcttgcattccaatttccattcgataggcacttttccttagacaatattataaggagtagttagtttacctgggactcctgagttttgatggtgatgtactttagctgtgtattgaattaaataagaacttgcctaggctgcctgtgttgatttccaaaattaaatttcaagtgactctggaaccacccatttccaag

SEQ ID NO: 30969 - DNA, 201 bp, Homo sapiens
gctttcttgcattccaatttccattcgataggcacttttccttagacaatattataaggagtagttagtttacctgggactcctgagttttgatggtgatgtactttagctgtgtattgaattaaataagaacttgcctaggctgcctgtgttgatttccaaaattaaatttcaagtgactctggaaccacccatttccaa

SEQ ID NO: 30970 - DNA, 201 bp, Homo sapiens
agctttcttgcattccaatttccattcgataggcacttttccttagacaatattataaggagtagttagtttacctgggactcctgagttttgatggtgatgtactttagctgtgtattgaattaaataagaacttgcctaggctgcctgtgttgatttccaaaattaaatttcaagtgactctggaaccacccatttcca

SEQ ID NO: 30971 - DNA, 201 bp, Homo sapiens
cataaaataagtcatttgtagtcttggataatctgaacccttgtgccagattgtctaatgtcagttgtgttctggcactgcttcttctacatcttctcatygtctggcgctgtttcgaaagcactcatcaccataatgtcgtccatcttctgttaattcctctggtgtggtgtctgttagttctggaatttctccaaggtc

SEQ ID NO: 30972 - DNA, 201 bp, Homo sapiens
atagctttcttgcattccaatttccattcgataggcacttttccttagacaatattataaggagtagttagtttacctgggactcctgagttttgatggtgatgtactttagctgtgtattgaattaaataagaacttgcctaggctgcctgtgttgatttccaaaattaaatttcaagtgactctggaaccacccatttc

SEQ ID NO: 30973 - DNA, 201 bp, Homo sapiens
catatataaataacttaattgtagttcactattagacatttacggttccaaataaatggttcagaatgtttcacttttatgaacactctgcattggatatycttattattaaatttacacatatccagtgttatttccttagggtaaatccctagaaatggaattactaggtcaaaggttatactaaatattattattgtc

SEQ ID NO: 30974 - DNA, 201 bp, Homo sapiens
ttttctctttctatacatgtttctaccattttgaggtgaaaattaaaaaatctagtatactgcttagtgtggctttaaaatcaatgtatttgtttttgaayttttttagtgtgatttcatagggaatactagaaataaaacatctgtcaaggaatgaattttttgcagatgagtagtgtcagagaggcatgaaattgattg

SEQ ID NO: 30975 - DNA, 201 bp, Homo sapiens
ggggtgtcacatgttggccaggctggtctcaagctcctggcctcaggtgatccacctgccttggcctcccaaagtgctgggattacaggtgtgagccaccrtggccagcccttgtgcgttttgagttgaagattatctcttgcttcttggcctcttgtatctgtcctcccactgactacctttgtgttctggtttttgttg

SEQ ID NO: 30976 - DNA, 201 bp, Homo sapiens
tttctaaattaagatactttgtgaactatcaaaatatgacattaatgaaagtttagacattagaaaatgtttaacccacatatttgtgcttattttcctcytttatagaaacagaataaggcaatatacaaagtgccatttccttttattataataaccataatggaaatttcagtaaagaaagtataactaaagcagtac

SEQ ID NO: 30977 - DNA, 201 bp, Homo sapiens
aggggagaaacattcaagccataagcacaaacagacaaaaaacccaagacaacaataagaaagatgtgatacaattttattagtttacttagaacactgaycccagtgcatcatagttactctctgaggttttacagaagcctagttttaattgaattaaattaaattgaattttgattgagaatcctgttgaattttgcc

SEQ ID NO: 30978 - DNA, 201 bp, Homo sapiens
gatagttttaaaacagataaccgagtgtaactgtgttatagagtcttaagaggggacttctgaatactcccttggctttgtttttgctaaaactgttttcrtttctctttgatcagttaatttaacttacaggaaagtctcctaaggtaataatcagaaatggtagttaataatttatgtccttcaccatgttttttaagc

SEQ ID NO: 30979 - DNA, 201 bp, Homo sapiens
ttatttttaaatactttaatcaatgcttaaaacatgtaatatcaaattgaataatagatcattgtcactgacaatttccttttctaaattaagatactttrtgaactatcaaaatatgacattaatgaaagtttagacattagaaaatgtttaacccacatatttgtgcttattttcctcttttatagaaacagaataagg

SEQ ID NO: 30980 - DNA, 201 bp, Homo sapiens
agaacagatcaccaaacaggaaatcaagagccctggaagtgagtagtattgatttgtggtgataaaagtatattttgacacatttcaaatcataaataackcatggactttaacttgcatgactaatagctcaacccaggatacatgcttatctacaacttaaactacctctttctaaggagtccataacatgaggtgaat

SEQ ID NO: 30981 - DNA, 201 bp, Homo sapiens
gtgtgtggatgctcatttttacagtcttttcccgtatgttaatgaggaagggctgcatatctggtcagggttgttctagccttccctcctcacctccttcsccctgcttttaaatctgagacacattggagacacgatcagttgtcaacactaggatagaatgtaaccttgctttcctatgagctattagtcattagtcat

SEQ ID NO: 30982 - DNA, 201 bp, Homo sapiens
ggaaacgttgattccttctgctgacaaactccatagatttgaccttctaacccaactaaatctagtgtttaagttacacagcatgcctttctgcagtctartttgatgtagttataataatatcacttggtgtaaaatttttatactctacaaatatccgacgggagggttagtattatctggatagctggaaaataaagt

SEQ ID NO: 30983 - DNA, 201 bp, Homo sapiens
ctccttgtgaatttaggctaacctcatgaccccagctgtgcccctgttaagagactccggcaagatacgtagtcccgactgcctattttagcagttcctcrtgggccaacttcttacattttcttcttatgtttcctgttaaatccagagaacaagctggacatgctaaacatggaaaatactatacatgacaacaagcca

SEQ ID NO: 30984 - DNA, 201 bp, Homo sapiens
ctggcagaggtctcatcagaccaaccctaggaatgaatctttagccttaagaacaaattggaagatgatgtgggaatcggatggaagccttgaaaagagayccccttcccctcttctcttgctcccattgaaacagtaggtgaccccagtcccctggctagctcacagctgtgaccagaccctcccttggttctactgctc

SEQ ID NO: 30985 - DNA, 201 bp, Homo sapiens
gctcccagtcaccctgcttctctccccgacccacatcagggtccccccgatgtacacggtggccactttcagagagcacgaagataatcaagaaggttaaytttctgggaagccccccaggagcatgtttttattgtgttcgaaagctgctttatcattatcgcttgatgacatttattaattgcccagctgggatgctgg

SEQ ID NO: 30986 - DNA, 201 bp, Homo sapiens
taatttatcttgatttttattattacatatgttctgcctttgaaaaaggcagcaagaaaaaggcaaaagaaaaagcagaaaaaaggaggagggaagagttytgaaacaaacaggagtttgtgggtagcatcatgtttaaaatacatgatacaagaaatcatgtggctgggcctggtggctcacgcctgcaatcccagcact

SEQ ID NO: 30987 - DNA, 201 bp, Homo sapiens
gcttctctccccgacccacatcagggtccccccgatgtacacggtggccactttcagagagcacgaagataatcaagaaggttaactttctgggaagcccyccaggagcatgtttttattgtgttcgaaagctgctttatcattatcgcttgatgacatttattaattgcccagctgggatgctggtcacagggtgactga

SEQ ID NO: 30988 - DNA, 201 bp, Homo sapiens; identical to SEQ ID NO: 18876

SEQ ID NO: 30989 - DNA, 201 bp, Homo sapiens
ataccattttttatctttgattttttttttaatggaatgcttcagaaattcatgtgtcaaccttgctcaggggctgtgctaatctctgtattgttcaaatkgtcctagatgtgttgccaaagcaatcacttttacactgtttttgctgtagcttttctatgtttacatatatttgtacacacaaataccactgtgttacaa

SEQ ID NO: 30990 - DNA, 201 bp, Homo sapiens
gatagctttcttgcattccaatttccattcgataggcacttttccttagacaatattataaggagtagttagtttacctgggactcctgagttttgatggtgatgtactttagctgtgtattgaattaaataagaacttgcctaggctgcctgtgttgatttccaaaattaaatttcaagtgactctggaaccacccattt

SEQ ID NO: 30991 - DNA, 201 bp, Homo sapiens
cagatatacccagatattagtaacatttttattcgtaaagatatagtgctggttttcttattgatatttttatatccaataaacaaatccgagtggtaagwatatgtattttccaccatagtactaaataaaaccattttcatcttcagttaagtaaagaagcagccccataagcatttttgtttgtccgtaattggccct

SEQ ID NO: 30992 - DNA, 201 bp, Homo sapiens
ggatagctttcttgcattccaatttccattcgataggcacttttccttagacaatattataaggagtagttagtttacctgggactcctgagttttgatggtgatgtactttagctgtgtattgaattaaataagaacttgcctaggctgcctgtgttgatttccaaaattaaatttcaagtgactctggaaccacccatt

SEQ ID NO: 30993 - DNA, 201 bp, Homo sapiens
gggatagctttcttgcattccaatttccattcgataggcacttttccttagacaatattataaggagtagttagtttacctgggactcctgagttttgatggtgatgtactttagctgtgtattgaattaaataagaacttgcctaggctgcctgtgttgatttccaaaattaaatttcaagtgactctggaaccacccat

SEQ ID NO: 30994 - DNA, 201 bp, Homo sapiens
tggggatagctttcttgcattccaatttccattcgataggcacttttccttagacaatattataaggagtagttagtttacctgggactcctgagttttgatggtgatgtactttagctgtgtattgaattaaataagaacttgcctaggctgcctgtgttgatttccaaaattaaatttcaagtgactctggaaccaccc

SEQ ID NO: 30995 - DNA, 201 bp, Homo sapiens
tatggggatagctttcttgcattccaatttccattcgataggcacttttccttagacaatattataaggagtagttagtttacctgggactcctgagttttgatggtgatgtactttagctgtgtattgaattaaataagaacttgcctaggctgcctgtgttgatttccaaaattaaatttcaagtgactctggaaccac

SEQ ID NO: 30996 - DNA, 201 bp, Homo sapiens
ttatggggatagctttcttgcattccaatttccattcgataggcacttttccttagacaatattataaggagtagttagtttacctgggactcctgagttttgatggtgatgtactttagctgtgtattgaattaaataagaacttgcctaggctgcctgtgttgatttccaaaattaaatttcaagtgactctggaacca

SEQ ID NO: 30997 - DNA, 201 bp, Homo sapiens
cttatggggatagctttcttgcattccaatttccattcgataggcacttttccttagacaatattataaggagtagttagtttacctgggactcctgagttttgatggtgatgtactttagctgtgtattgaattaaataagaacttgcctaggctgcctgtgttgatttccaaaattaaatttcaagtgactctggaacc

SEQ ID NO: 30998 - DNA, 201 bp, Homo sapiens
ggcttatggggatagctttcttgcattccaatttccattcgataggcacttttccttagacaatattataaggagtagttagtttacctgggactcctgagttttgatggtgatgtactttagctgtgtattgaattaaataagaacttgcctaggctgcctgtgttgatttccaaaattaaatttcaagtgactctggaa

SEQ ID NO: 30999 - DNA, 201 bp, Homo sapiens
tgtggcttatggggatagctttcttgcattccaatttccattcgataggcacttttccttagacaatattataaggagtagttagtttacctgggactcctgagttttgatggtgatgtactttagctgtgtattgaattaaataagaacttgcctaggctgcctgtgttgatttccaaaattaaatttcaagtgactctg

SEQ ID NO: 31000 - DNA, 201 bp, Homo sapiens
ctgtggcttatggggatagctttcttgcattccaatttccattcgataggcacttttccttagacaatattataaggagtagttagtttacctgggactcctgagttttgatggtgatgtactttagctgtgtattgaattaaataagaacttgcctaggctgcctgtgttgatttccaaaattaaatttcaagtgactct

SEQ ID NO: 31001 - DNA, 201 bp, Homo sapiens
aagcccaggaaggttgcggtttggtttggcttctgggtaggggttggaaggaaggtccaatgcttgggccagtcctcccagtgtggggacgactgggagaycagggagctagctcagggagctccccgtgtgctcaaacacacagaagcatctgaggagccctaactaataaagagctaagaaaacctctagaatttgctt

SEQ ID NO: 31002 - DNA, 201 bp, Homo sapiens
gataaggtaaagaaaggatgttagttggaaactagcaatcaggaaggtcagctgctgcctggtctaggtagagtggcagggcagaggagggcttggctggwtatggtaactactgctccatggatgggtagtgacagtccttgactcacgcttcagtccttttctccccaggcctaggacaccttttctctgtgctacttg

SEQ ID NO: 31003 - DNA, 201 bp, Homo sapiens
aggccctctgtaaaaatccaaggatctctgcagctggaatgttgcagtgttagatgtgagagaaagggataacattgtgtttggcttttaaaaaagacattctgaaaggagatccggagggttagcagtacctgactctgctaatgtagttaatgccctgaaatgaaggtagtcagtggctttgcacacaaatatgtaatt

SEQ ID NO: 31004 - DNA, 201 bp, Homo sapiens
ttgttgatgatcttgtttttccttgttaaaaaaaaaaaaaatttaaaagtaaggtctgacccagcatttcatttctttcctttaccctctcctgcctccckggtttattcagagtcactcctatagtgttctgtattaggccaaatcagtgctaccagggaacagtaagtgcttttaagtcccccttttaaaccttctctg

SEQ ID NO: 31005 - DNA, 201 bp, Homo sapiens
tgctagattatgtgtgtgtgtgtgtgtgtgtgtgtataatcgtttgtgttgcatagggtaaaggtagagacactaggaaattacaatttttttttttttttgagatggagtctcactgtatcgcccaggctggaatgcagtggtgcagtctccgctcactgcaagctccacctcctgggttcactccattctgcctcagcc

SEQ ID NO: 31006 - DNA, 201 bp, Homo sapiens
ttttgacagtggtgtggaagtgacaagcgttcagtaaactcagcttctggcattaccttcagcaaaatccgttgtaaaccaaggagcatctataatttcakcttcctttatttttttcatataatgacttgggttcattcccttaatataaatatgttggcaattatgaggtttttttgagttggagtctccctgtgttgc

SEQ ID NO: 31007 - DNA, 201 bp, Homo sapiens
ttttttgacagtggtgtggaagtgacaagcgttcagtaaactcagcttctggcattaccttcagcaaaatccgttgtaaaccaaggagcatctataatttsatcttcctttatttttttcatataatgacttgggttcattcccttaatataaatatgttggcaattatgaggtttttttgagttggagtctccctgtgtt

SEQ ID NO: 31008 - DNA, 201 bp, Homo sapiens
tcgacttaggattttttgacagtggtgtggaagtgacaagcgttcagtaaactcagcttctggcattaccttcagcaaaatccgttgtaaaccaaggagcwtctataatttcatcttcctttatttttttcatataatgacttgggttcattcccttaatataaatatgttggcaattatgaggtttttttgagttggagt

SEQ ID NO: 31009 - DNA, 201 bp, Homo sapiens
aggatggttcgacttaggattttttgacagtggtgtggaagtgacaagcgttcagtaaactcagcttctggcattaccttcagcaaaatccgttgtaaacmaaggagcatctataatttcatcttcctttatttttttcatataatgacttgggttcattcccttaatataaatatgttggcaattatgaggtttttttga

SEQ ID NO: 31010 - DNA, 201 bp, Homo sapiens
taggatggttcgacttaggattttttgacagtggtgtggaagtgacaagcgttcagtaaactcagcttctggcattaccttcagcaaaatccgttgtaaamcaaggagcatctataatttcatcttcctttatttttttcatataatgacttgggttcattcccttaatataaatatgttggcaattatgaggtttttttg

SEQ ID NO: 31011 - DNA, 201 bp, Homo sapiens
actgtggcttatggggatagctttcttgcattccaatttccattcgataggcacttttccttagacaatattataaggagtagttagtttacctgggactcctgagttttgatggtgatgtactttagctgtgtattgaattaaataagaacttgcctaggctgcctgtgttgatttccaaaattaaatttcaagtgactc

SEQ ID NO: 31012 - DNA, 201 bp, Homo sapiens
ggactgtggcttatggggatagctttcttgcattccaatttccattcgataggcacttttccttagacaatattataaggagtagttagtttacctgggactcctgagttttgatggtgatgtactttagctgtgtattgaattaaataagaacttgcctaggctgcctgtgttgatttccaaaattaaatttcaagtgac

SEQ ID NO: 31013 - DNA, 201 bp, Homo sapiens
ctcaacttgacatatcccaaatcaacctttattttcacccccagacttgcttttcttctctgtctttcccactaaatggcacaggtagtcaggtccccaaytggggattcatccttgttttcttttttccttacaccttacatcagactgttagctagtcttgtcaactccatctctaaaacatgtctaaatatgttcctt

SEQ ID NO: 31014 - DNA, 201 bp, Homo sapiens
tggactgtggcttatggggatagctttcttgcattccaatttccattcgataggcacttttccttagacaatattataaggagtagttagtttacctgggactcctgagttttgatggtgatgtactttagctgtgtattgaattaaataagaacttgcctaggctgcctgtgttgatttccaaaattaaatttcaagtga

SEQ ID NO: 31015 - DNA, 201 bp, Homo sapiens
tttcactgttctctttctctttctctctgtctgtatataacagtgagaaatgtgtgtacattatatgtatatgtgtgtgtatacacacacacacacacacatatataaaggccaagtaaatttttagttaaattgaattattccttaatggttacgtgagaatatcttatcaagtctaaatatagtaatcatcagtatgat

SEQ ID NO: 31016 - DNA, 201 bp, Homo sapiens
ttttcactgttctctttctctttctctctgtctgtatataacagtgagaaatgtgtgtacattatatgtatatgtgtgtgtatacacacacacacacacacatatataaaggccaagtaaatttttagttaaattgaattattccttaatggttacgtgagaatatcttatcaagtctaaatatagtaatcatcagtatga

SEQ ID NO: 31017 - DNA, 201 bp, Homo sapiens
tttttcactgttctctttctctttctctctgtctgtatataacagtgagaaatgtgtgtacattatatgtatatgtgtgtgtatacacacacacacacacacatatataaaggccaagtaaatttttagttaaattgaattattccttaatggttacgtgagaatatcttatcaagtctaaatatagtaatcatcagtatg

SEQ ID NO: 31018 - DNA, 201 bp, Homo sapiens
atttttcactgttctctttctctttctctctgtctgtatataacagtgagaaatgtgtgtacattatatgtatatgtgtgtgtatacacacacacacacacacatatataaaggccaagtaaatttttagttaaattgaattattccttaatggttacgtgagaatatcttatcaagtctaaatatagtaatcatcagtat

SEQ ID NO: 31019 - DNA, 201 bp, Homo sapiens
agtaataaagatgcaagtttgcataaaaatagaatccatcactgtggagctcagtctgatatataccaggttttactccatatttataaaattataaaccratatatttatactctaattaaaaatggaatatatttttataaaattagactaggagactcatcatttttggatataaatttttggagttaattcttaatg

SEQ ID NO: 31020 - DNA, 201 bp, Homo sapiens
agaggtgtttgctttgttcacgaccatggttgtgggtcttttctgcataggtagggaagaacaatagttgattgaggaatgtcttccagcccaccccgcacacacacacacacacacacacacacacacacacacacacacacacacacaccctctgagggaaaaagcctcctttctaccttgacgttgttggtgatgtgc

SEQ ID NO: 31021 - DNA, 201 bp, Homo sapiens
tagaggtgtttgctttgttcacgaccatggttgtgggtcttttctgcataggtagggaagaacaatagttgattgaggaatgtcttccagcccaccccgcacacacacacacacacacacacacacacacacacacacacacacacacacaccctctgagggaaaaagcctcctttctaccttgacgttgttggtgatgtg

SEQ ID NO: 31022 - DNA, 201 bp, Homo sapiens
aaaaataacaagtggtattatagtgtccttactatttttatgagctgctttatttttgctcataatatatcataaaaatatgttgtcagtacatatataartaacttaattgtagttcactattagacatttacggttccaaataaatggttcagaatgtttcacttttatgaacactctgcattggatatccttattatt

SEQ ID NO: 31023 - DNA, 201 bp, Homo sapiens
ctttggatatacaacttctgggcttaagtggtcctcctgctctggcctctcagaaagctgagtttctaccatggcattagttaacctgacctctaggctasatggttttaaatccctcttgtatttgaattttacctttacttacaagctagctgtgctgtcacttaccttttgcttttacagctcacctttgcagtcagt

SEQ ID NO: 31024 - DNA, 201 bp, Homo sapiens
gagttttttttttttctcttgcatcattttgaagctatgcaggcatatttccagattgcaacaaaattttattgtgaattaaaataaaatcaccttttctmtgttcctttggaaaggaaggaaaccttgacttaaattctgagtgccattttcaatgctatttacacagaaatgtagatgaccaaaataaatgtcctcttg

SEQ ID NO: 31025 - DNA, 201 bp, Homo sapiens
gacaccactcccagccctgaccttttgatgtcggttattgaaggtttggcctcccctcccctcccttcccctcccctctcttctcctcccctcccttcccytcccctctcttcccctcccctcccctcccctctcctccttttctttcttagttttgagacaggatttggctctgtcgcccatggtggagtgcagtggtgc

SEQ ID NO: 31026 - DNA, 201 bp, Homo sapiens
gtaagtaattaaaaaaacttttcagggaatcagtactattgataactaatattgatcaaggcttataaaggcatagttttgaaatgatcttatgagatcasttagcagtcagtatattctcaatgcagtcacaactgacacaggcaaatgaatttcacttgtaatttataaatagttgcaaagaaggttattgcagaaatt

SEQ ID NO: 31027 - DNA, 201 bp, Homo sapiens
agacaaagcaaaataagttttgagtgagaagacattggttagaaaaaaatgtataaatccatattctcgtgctttagtacagacacagtgctaacagcaamcaaaatcgaaagagaatgtggccacagcacagagattcatatcaagtattagataaggttggatggaataactgtgacagcagggataggtattctatta

SEQ ID NO: 31028 - DNA, 201 bp, Homo sapiens
ggcctttctgaatcctaggcatccctagaagcttctggagtcctgggtcttcacatcagtgctctgtatttgtgagactaaactattttttttttttttttgagacagagtctaactctgttgcccaggctggagtgcagtggtgcaatttcagctcactgcaatctctgcctcccaggttcaagcgattctcatgcctca

SEQ ID NO: 31029 - DNA, 201 bp, Homo sapiens
taaaatgtttaaaaactttttcttctgaaactgttaccttgagaataatttattaaacttttcttcatagaaactcagactgtcgaactcagtttttggtmtgtgaccagtatttctttatatcatgctaattaatggtagtactacattttgtaataaaatatctgaggctgtattctttgagttattgtgtttcagtta

SEQ ID NO: 31030 - DNA, 201 bp, Homo sapiens
caaagcatgtgctcacttagtgtctctgtgccacattttggtagttcccataatatttcaaactttttctttgttgttatatatgctatggtgatctatgrtgtgatctttgatgttactattgtaattgttttgggacaccacagaccacacccatataaaaagctgaacttaattgataactgttacgtgtgtgttctg

SEQ ID NO: 31031 - DNA, 201 bp, Homo sapiens
gtgagaaaatgaaggagcacataggcctgatgccttttgttaggatgagttggaattgtatgttattgtagacaccttaagagcaagtcctaggttttacrctctgtctcctgccggccaattccgcagcttcacactatggcctgcacattagattcacaaaaagtgcttttaaatgcacttcaatttcaggttacttca

SEQ ID NO: 31032 - DNA, 201 bp, Homo sapiens
gtgtgtgtgtgtgtgtgtgtgtataatcgtttgtgttgcatagggtaaaggtagagacactaggaaattacaatttttttttttttttgagatggagtctyactgtatcgcccaggctggaatgcagtggtgcagtctccgctcactgcaagctccacctcctgggttcactccattctgcctcagcctcgcgagtagctg

SEQ ID NO: 31033 - DNA, 201 bp, Homo sapiens
tcctgagtagctgggactggaggcacattccaccatgtctggctaattttgttttattttatttatttatttatttatttatttatttatttatttatttaagaaacagcattttgccacgttgcccaggctggtctcaaactcctgtgctcaggagatcctccctcctttgcctcccaaagtgctgggattacaggcgtc

SEQ ID NO: 31034 - DNA, 201 bp, Homo sapiens
ctcctgagtagctgggactggaggcacattccaccatgtctggctaattttgttttattttatttatttatttatttatttatttatttatttatttatttaagaaacagcattttgccacgttgcccaggctggtctcaaactcctgtgctcaggagatcctccctcctttgcctcccaaagtgctgggattacaggcgt

SEQ ID NO: 31035 - DNA, 201 bp, Homo sapiens
cctcctgagtagctgggactggaggcacattccaccatgtctggctaattttgttttattttatttatttatttatttatttatttatttatttatttatttaagaaacagcattttgccacgttgcccaggctggtctcaaactcctgtgctcaggagatcctccctcctttgcctcccaaagtgctgggattacaggcg

SEQ ID NO: 31036 - DNA, 201 bp, Homo sapiens
gttaatctgacattagtacctttgtcccctggaattttaggctaggagttttaggtgaggtttggttagggtgtctagaggtaggtccctaacttggaaamcaagttacccctggcttccttttctagtagaacccgctgctctcttcctgttgtcaaaactctgggacacttgagagtggagcttttcttcactctatct

SEQ ID NO: 31037 - DNA, 201 bp, Homo sapiens
acctcctgagtagctgggactggaggcacattccaccatgtctggctaattttgttttattttatttatttatttatttatttatttatttatttatttatttaagaaacagcattttgccacgttgcccaggctggtctcaaactcctgtgctcaggagatcctccctcctttgcctcccaaagtgctgggattacaggc

SEQ ID NO: 31038 - DNA, 201 bp, Homo sapiens
aggtttgtggggaaggttattcttgccttgtgtattttgtcccaacttaagctataatttttgaatttgtaaaaccttatactgtttagaaaaaaaaaaaacacagtaaaaaaaaaaaggatgggtgaatgcataaatttagtttttgaaaatttaagcgactgtttctccaaaatgtcacttttcatccccagtttgcct

SEQ ID NO: 31039 - DNA, 201 bp, Homo sapiens
tatagtagagacggggtttcactatcttggccaggctggtcttgaactcctgaccatgtgatccacccgcctcggcttcccaaactgctgggattacaggygtgagccaccgagcccggcctgtcttctttttttgtcctttgcctttggttttattgtctttgaaacctcaggggtcagcaatgtaggcttctttctctc

SEQ ID NO: 31040 - DNA, 201 bp, Homo sapiens
ttcccgtatgttaatgaggaagggctgcatatctggtcagggttgttctagccttccctcctcacctccttcgccctgcttttaaatctgagacacattgragacacgatcagttgtcaacactaggatagaatgtaaccttgctttcctatgagctattagtcattagtcatgtatttgctaggttcagctgatctgatg

SEQ ID NO: 31041 - DNA, 201 bp, Homo sapiens
tatttaatgtagcctgggattatatcacagatgtgccacatctaacatggtggctaggcccttggaggatacagtttgtctcgttagttgtttcttatatrccatcgccttgtgttcttttgcagtttgttttccttgttttgtttgtggttagaaatatgccatttatttatttattcattcattcattcacacatgcat

SEQ ID NO: 31042 - DNA, 201 bp, Homo sapiens
tgttggaggggctctggactgttgtggcacctcctgttgtaggctatttaatgtagcctgggattatatcacagatgtgccacatctaacatggtggctargcccttggaggatacagtttgtctcgttagttgtttcttatatgccatcgccttgtgttcttttgcagtttgttttccttgttttgtttgtggttagaaa

SEQ ID NO: 31043 - DNA, 201 bp, Homo sapiens
tgcctcagagacccttctaagtgtcacaggaatctaactgaaggaaatcctttcttggtgcttctggacccaactgatgtttcctctgcctaagacactttctccttccccatgttgctcagttaatgtcctgtagagctcaagttaaatatcagtcccacccatgcagtgtcatagatacctacctaactttttaaaaat

SEQ ID NO: 31044 - DNA, 201 bp, Homo sapiens
gacagatcacctgaggtcaggagttcgagaccagcctggccaacatggtgaaatcccgtctctaccaaaaataacacaaattagctgggcatggtggcgcrtgcctgtaatcccagctactcgggaggctgaggcaggagaatcacttgaacccaggaggcggaggttgcagtgagccaagatcacggcactgcactccaa

SEQ ID NO: 31045 - DNA, 201 bp, Homo sapiens
tcatctggaagggggagatgaaagctagttaggattatggctgtaggtaatccataattatagtcctaggctttcagttatgggctgagttttttttttttctcttgcatcattttgaagctatgcaggcatatttccagattgcaacaaaattttattgtgaattaaaataaaatcaccttttctctgttcctttggaaa

SEQ ID NO: 31046 - DNA, 201 bp, Homo sapiens
ttagagaaatttggtttgtatgagtgtcattgtgcttattgcttaggaagtttcccaaaggttacttttgcattagagaatttcgaaatacagattttaasttgtttctagtcctctttttttttatttaagacacaaaactacacagctttgatttttaggggaaaaggatgataactttggaatatatctcacaaggtg

SEQ ID NO: 31047 - DNA, 201 bp, Homo sapiens
cgtggggagagggagaccgtggggagagggagaccgtggggagagggagaccgtggggagagggagaccgtggggagagggagaggagggagagggagagkaggagcctttccgagaagttgtattttcaatacaagattaaaaagtatttctcaaaacatgcaggggttttggacctgctggcatagctgcattgaaggc

SEQ ID NO: 31048 - DNA, 201 bp, Homo sapiens
ccttactatttttatgagctgctttatttttgctcataatatatcataaaaatatgttgtcagtacatatataaataacttaattgtagttcactattagwcatttacggttccaaataaatggttcagaatgtttcacttttatgaacactctgcattggatatccttattattaaatttacacatatccagtgttattt

SEQ ID NO: 31049 - DNA, 201 bp, Homo sapiens
tgaaaggtgactccctcccaatggtacaggagagagggcaatgtaggcgtgtgtaaaggcaaggagatgggcgtagaacaggatatgtaatattaaggaaraaaactgtagaatttgaggttggagagttaggccatcaccaaatgatgaagtcttgaatgctgtacaaagaatttgaatttttctgtaaacagacagtag

SEQ ID NO: 31050 - DNA, 201 bp, Homo sapiens
aagagtattgagtaggtggacgggaaagatattcagaaggaaaactgtgctctgtagttggtgggtgacaaagcagtgtcttgagtcagaaagactggtgsaagataaaactggaaaggtcagtgggtcattagctgctgggctgtgaagtttggtcttcattgagcaatgagtcatgggaagatgtttgaccagatgagc

SEQ ID NO: 31051 - DNA, 201 bp, Homo sapiens
atccctggtgtcattgccctagtctggccaccattatctttttcctgcattaccctgacagtctcttgcttggggtccctgcctttagtcttgcattcccyggtctattctcactgcagccctagtttctttccaaagcatgaaactaatcatgccattcctctgttagaaacttgagccctccaccccaccccggccttc

SEQ ID NO: 31052 - DNA, 201 bp, Homo sapiens
gaaaaggctttgcttaaacaagtgcccggttcaggaaaagatatgtttcctgaagaagatactttttttttttttttttttttttttgagatagaatctcrttctcttgcccatgctggagtgcagtggtgcgatctcggctcattgcaacctccaccttctgggttcaagcgattttcctacttcagcttcccaagtagc

SEQ ID NO: 31053 - DNA, 201 bp, Homo sapiens
ctacctttttctctccatccaagtaaaattcttttagttgaacaaacacctccctattcccagccctgcagcatcatctgtgatgtgcctcaataggtgtracttgaaccagccgaaccagacccaattgcaaaggccaactgaaatcaccatctgtgctttactggcagtgatgtaatgtgattgcatgctttcagaaat

SEQ ID NO: 31054 - DNA, 201 bp, Homo sapiens
actttttagttgagcctttaagaagagtattgagtaggtggacgggaaagatattcagaaggaaaactgtgctctgtagttggtgggtgacaaagcagtgkcttgagtcagaaagactggtgcaagataaaactggaaaggtcagtgggtcattagctgctgggctgtgaagtttggtcttcattgagcaatgagtcatgg

SEQ ID NO: 31055 - DNA, 201 bp, Homo sapiens
tgaacacctgatgccactgagtaaataactgtttcagagcttctgtgcctggaattgtatctgcgcagcaattaatgcagcattaaattgggtccccaagygcttaactctcacctttgggaaaacatacttgcctacatctagctgattatgtatcatagttcctgggtgaggattataacaaaaactataattaagact

SEQ ID NO: 31056 - DNA, 201 bp, Homo sapiens
tgggaggctgaagcaggtggatcacctgaggtctggagttcaagaccagcctggtcaatgtggtgaaaccccatctctactgaaaattcaaaaatcagccrggcgtggtggagtgtgcctgtagtcctagctactcgggaggctgaggcaggcgaattgcttgaacctgtgaggctgaggttgcagtgagctgagatcgta

SEQ ID NO: 31057 - DNA, 201 bp, Homo sapiens
gtgttttaatcaatttaaattttaggtgtttctgatacaattgatttcaataaaacatttggaccattgagtatggaatcagaggcaaggtctgggctggstatatagatctgggagttgtcagcccatgaggggagtttaaagccatgagactggaagagcttcgctaagagaccaagtgtaggtcaaggagaaaagtgg

SEQ ID NO: 31058 - DNA, 201 bp, Homo sapiens
tggcactatttacctagttatgattatctcatcagataagttctaggcaagtgagtgggtgtttgtctgtttaggttcctgcaattgatttgtgttggggkggccctcccaaatatagacaagtggatatggattcatatattagacctcctagttattggctatttattcttagataaatcatgtaacctgtttgaccct

SEQ ID NO: 31059 - DNA, 201 bp, Homo sapiens
gcagggtcacaggacaatagtggagggaaggtcagcagataagtgaacaaaggtctctggttttcctaggcagaggaccctgcggccttccgcagtgtttrtgtccctgggtacttgagattagggagtggtgatgactcttaacgagcatgctgccttcaagcatctgtttaacaaagcacatcttgcaccacccttaat

SEQ ID NO: 31060 - DNA, 201 bp, Homo sapiens
ttagtagagacggggtttcatcatgttggccaggctggtctcaaactcctgaccccaggtgatccacccaccttgacctcccaaagtggtgggattacaarcgttagacaccactcccagccctgaccttttgatgtcggttattgaaggtttggcctcccctcccctcccttcccctcccctctcttctcctcccctccc

SEQ ID NO: 31061 - DNA, 201 bp, Homo sapiens
cttttctttttttcttctttaacacagaagcatccagggccataacttcactgccaccttttacctgttccacattgactcttgccaactgaactactttytgtctaccctctttggctttcatttggttttctgtgcccttgttccaacaaacatttatttatttattactggctatgtgccagacactgtactaagtgc

SEQ ID NO: 31062 - DNA, 201 bp, Homo sapiens
ggtcctctcttttggattttcctgggtttagggcttttactcagggtcctaacactggagtggaaggctggcagtgctttcccctcctgccctccaggtcrcgttccccacgtagatctgactgtggaattgtgaacctgacatctttttccaaagtcaacagtggattaaaattaaaatgttaagtcttaaagtattttc

SEQ ID NO: 31063 - DNA, 201 bp, Homo sapiens
agagtagggcacttttgtctgcattaaaaatctgttcaggcagttatcctttcttctcaatgattttcttaatggcatctgggaactggtttgctgtttcytggtcagcagaagctgcttctcctattatcttgacatttttaagtaaaacctctttctcaaattatcaaaccatcctttgctggtattaaattcgccttt

SEQ ID NO: 31064 - DNA, 201 bp, Homo sapiens
tggcatctgggaactggtttgctgtttcttggtcagcagaagctgcttctcctattatcttgacatttttaagtaaaacctctttctcaaattatcaaacyatcctttgctggtattaaattcgcctttaatctatcacataatggagacttgacttttcctcaaatcgcattagagtctataggtaagcctttcctttct

SEQ ID NO: 31065 - DNA, 201 bp, Homo sapiens
gtaaaaccacatactaaaattgaaaccagaactttcaggatacattgtatttaaacttgtattcttgttgctcatttgaatgtataattaccaagtcaccyctcatggtttcagtcttgtcaagtattcttatttctggctcttctgatttttcttaagagataagcaaacaaaatacaaaaattgttagattggacctta

SEQ ID NO: 31066 - DNA, 201 bp, Homo sapiens
caaaatctcaggatttgaggagggagtaggttcgagggtagaaatagtccttggaaagagaaggagaaccctgcttcagggtaagagacggagaaaagcarggatgacctgagcaaatttaaaagggagggaggattcctcctgaatggcctccattttctcaattaagggatttattgatattttgtatccttctacgtt

SEQ ID NO: 31067 - DNA, 201 bp, Homo sapiens
tgttgtctcctgaatgtttccagccaatgaatataggcctagaattgtatagggacccagcagggatagttcaggaagtcacgtgacttagagtgatttgytttctagctctactgctttctgaatatattcctttgggcacagtccagtctttgtatctcagttttctcatctttcaaatgagcataggtacttacttca

SEQ ID NO: 31068 - DNA, 201 bp, Homo sapiens
ttttcttctcattgttggcttgggttcctttctctctgtttgcaaccagaccctttattacttgtgcatggttggacatgctgtaagcaatagagacctcytgcagcaaaccagatacctagtggtaggctgcacatgggatgtagcttttcttattaacaaaccacgttagtttattcacctttgaacttattgtagcca

SEQ ID NO: 31069 - DNA, 201 bp, Homo sapiens
ttttatttggatcgtttaaaaatctttcatactttcataaagagctctaatacttgcctgaatgcaaacagaattctgttctaggggtttcctaagttttrtttgaccccttcaaagtagaggcttatatttttctcatgctatatagactatgaagtaggagagaggcaaaacagaagcatagtatacagttggaagggt

SEQ ID NO: 31070 - DNA, 201 bp, Homo sapiens
gtttttcaagctctattctggagatacgtttgttacttggttctcagctttgacttggttataatcttgtcttggcttgttctctttccagaatacactasttttcatttttctttggccttttctcaagatttatgaaagggggtatttagctttttgtctggcaaatagcaaaggctgtttgagttccctaatcaataa

SEQ ID NO: 31071 - DNA, 201 bp, Homo sapiens
ttcttcacaacttctcagaatggatcttttaaattccttgtttcttggtgccattttgtcaaggttgatttagattaaaacaaaaatctcataaaaatccrtaaattacagggcattttgacttcctgatggggttgttggattaaaaccaaatgataccaaaaaaagtaccccacaaagtcaactgaaaccactaatgtg

SEQ ID NO: 31072 - DNA, 201 bp, Homo sapiens
ccttaaatgaaggaagcaattttttataacttgcaaagcttctccctcattctttagggaatttcctatgttaatttatgcagtgttaaatttatgcagcrttgaaattcagcccaacagcagtacttacggaaccaatacagagacagtagaacctataaggtgaaagctgaataacacagaccccaccagactacggat

SEQ ID NO: 31073 - DNA, 201 bp, Homo sapiens
aaaaaaaaaaggatgggtgaatgcataaatttagtttttgaaaatttaagcgactgtttctccaaaatgtcacttttcatccccagtttgccttttgtctsaaatgcaccagtgaagcaatcaagaagaagaattgattaattttgtgctgtatgcctttcagttctgtattttgtttgtgcttcaaactgtgacagttga

SEQ ID NO: 31074 - DNA, 201 bp, Homo sapiens
ccaagtgccaggtattatttaatgtggggattacaatggtatataagacaaagttctacccccatgccacttattttaatggtatctgtatatttgtgtgkgtgtgtgtgtgtgtgtgggtgtgtgtgtgtgtgtattttctgtaagaatgcaggctctgaagttgggctgagtttaattctggctatacctctcactggt

SEQ ID NO: 31075 - DNA, 201 bp, Homo sapiens
tgtaataatatttattataggagatttggctggcttttaggaattcattttgctggtgtaccttaagtccctcgcctgattgacaatatactgaggaaagrgctaagttgctagggcttgaggtctaagggcagcactgactggtatttgtttcattaagcttaggcaagctatccaattacttaatgcaaacaagaaaag

SEQ ID NO: 31076 - DNA, 201 bp, Homo sapiens
aatctattagttactttagctattttctgtggctaaatacttgtttttcatttttcagtatgatgaactccacaatgaacaaatttttagctaaatttttrtatacattcatgattatttcacatatttccagacatgaagcctttgagtcagagtacattcgaaaggcatttgaaacatgttgccgtaaattgtaccaat

SEQ ID NO: 31077 - DNA, 201 bp, Homo sapiens
tctctcccgcttgcaggctagcctggggtgattgacatggccctgtgcagggttgcaagagagaggcccaggtttgaaactggtacaccatcactgttgtygtattctggtgcccagagcaagacacaaacacagcccagactgaagggatggggaagtaaactccatactctcatcatgagagaagctgtgaagtcatgt

SEQ ID NO: 31078 - DNA, 201 bp, Homo sapiens
tgattggatcatgggtgtggtttctaatggtttagcaccatcctcctaaggctgttcttgtgatagatttctcatgagatctggttgtttaaaagtgtgtgacagtccctctccctctttctcttttcctccttctctggccataaaagatgtgcctacttcatcttgcccttctgccataattgaaagtttcctgaggcc

SEQ ID NO: 31079 - DNA, 201 bp, Homo sapiens
attggatcatgggtgtggtttctaatggtttagcaccatcctcctaaggctgttcttgtgatagatttctcatgagatctggttgtttaaaagtgtgtgacagtccctctccctctttctcttttcctccttctctggccataaaagatgtgcctacttcatcttgcccttctgccataattgaaagtttcctgaggcctc

SEQ ID NO: 31080 - DNA, 201 bp, Homo sapiens
cttcttttggtgatttacccagctgtttataaaaggagtttctgcaggcccagatacgtgaatgatgagcaaaagcaaggaatttctttctccacattaarattaagtgttagcagttccttaaatgaaggaagcaattttttataacttgcaaagcttctccctcattctttagggaatttcctatgttaatttatgcag

SEQ ID NO: 31081 - DNA, 201 bp, Homo sapiens
atttgaggcaagcggttaggatggttagtaaggttttaataagcggaaatgacacgcaatctcaggtctccaggggcgctgttcttatttgtgagctgccrgttgttcttcagtggctggaatgagaaaaagacttgggaaaagagcagtgttcatgcctgaaccactctcttcttttggtgatttacccagctgtttata

SEQ ID NO: 31082 - DNA, 201 bp, Homo sapiens
aatatgtaacaattatattataattaattataataaatatataacaattataattaattacataacataattataattaattataataaatacataacaawtataattatgattactatataacataactattataattatataacataattataattaattataatcaaatatataatacaactaattataaatatataa

SEQ ID NO: 31083 - DNA, 201 bp, Homo sapiens
atgagattactgcttaacagaaatatttgaggcaagcggttaggatggttagtaaggttttaataagcggaaatgacacgcaatctcaggtctccaggggygctgttcttatttgtgagctgccggttgttcttcagtggctggaatgagaaaaagacttgggaaaagagcagtgttcatgcctgaaccactctcttcttt

SEQ ID NO: 31084 - DNA, 201 bp, Homo sapiens
agtagctggcatgctgctatgatagtcaacccctccaagaaagctgtgattcaaaaatcagttgatgagattactgcttaacagaaatatttgaggcaagyggttaggatggttagtaaggttttaataagcggaaatgacacgcaatctcaggtctccaggggcgctgttcttatttgtgagctgccggttgttcttcag

SEQ ID NO: 31085 - DNA, 201 bp, Homo sapiens
actccctataggtcaaagctacctggcagaggtctcatcagaccaaccctaggaatgaatctttagccttaagaacaaattggaagatgatgtgggaatcrgatggaagccttgaaaagagacccccttcccctcttctcttgctcccattgaaacagtaggtgaccccagtcccctggctagctcacagctgtgaccaga

SEQ ID NO: 31086 - DNA, 201 bp, Homo sapiens
cctatgaacaggcatgcttatgcacaccacctaccttacaggagaaatggaaaggagcgggaatgagaagccaatagtatttgctcatgggtagaccaaamtgtgcccaagttctgttttttaaaaaaggggaagggtgtcgaaagggtttgctgtcagatctgcattacgtctgggaccattccctgggacataccacct

SEQ ID NO: 31087 - DNA, 201 bp, Homo sapiens
gtatcttgaaagtctgcctttcattatttttgcctaataggggctttttccatcagcaggaatgaaagcagtcaataaaagtcaattgctgactctatgawtatatggagggtttaccataatgcatattggaaatgttttgaaacctttatcctgaatggaaggtgccatggcttgtgttttatggccttctaatgttag

SEQ ID NO: 31088 - DNA, 201 bp, Homo sapiens
agccaatttcatatctcaggtggaatggggtgggcagcctagctgtaacctggacaaatgactattgataaagaatttattttctgtcacctttaaggagrgcagagggtggtacagcctttgtattattttttcttttttaaaaaaagttttgtttgaagcctccttcatgaaaacttcagctgtcaaatcttggcaaaa

SEQ ID NO: 31089 - DNA, 201 bp, Homo sapiens
ttcttgaccctgaaacctaattgagatattcaaataaaaagtttggtctgtgttaagattacttggtctcattcacacattgatatatcctttggagattyggatttaacagtttcattccaatacctgtggatcttttgaaaggacaaagagaataatcttcaaatttgcaattattataaccaagggctacttctatgg

SEQ ID NO: 31090 - DNA, 201 bp, Homo sapiens
ctgggtgctagtgcattatcacagtctcattactttgcaagctgcatgcccagatgctgctgttttctgcatcaggcttcgctgatttacattcgtaacamctccattacagctcatttgatactgctcataatcaaccagttcttgtcttttcctgatagtgtttctccaatacaaaagacgctagtgtaatgaagaaaa

SEQ ID NO: 31091 - DNA, 201 bp, Homo sapiens
actctcctcctcttcaacctaggaccttgtaggtaggcttggataaggtttgaaaattacttttgataaagggatttcaaaggcagtatttgtgaatgaawcatttgtacagtagcactggtacttttcaatataataatcatatgcagtaatttgttcatactatttattgagtcctggcagaatgcttgaaaacttgta

SEQ ID NO: 31092 - DNA, 201 bp, Homo sapiens; identical to SEQ ID NO: 18878

SEQ ID NO: 31093 - DNA, 201 bp, Homo sapiens; identical to SEQ ID NO: 2087

SEQ ID NO: 31094 - DNA, 201 bp, Homo sapiens; identical to SEQ ID NO: 2088

SEQ ID NO: 31095 - DNA, 201 bp, Homo sapiens
ccctagaatagagtagagggattgaatctggaaacacaggttgaattctatttgaagtatttatctttttttttttttttttggtgagataggtctcgcastgtcacccaggctggagtacagtggcgtgatctctgttcaccgcaacctctgcctcccaggctcaagcaatcctcccacttcagcctcctgaatacctga

SEQ ID NO: 31096 - DNA, 201 bp, Homo sapiens
atggcctcccctttcttctctatttggcctgaaattcttaatttccctctctctcaagatagaattaagggcaagtgtgctggaagtgtttaatttggcargaccaccattgatagacacatatgttgcccgggcaaaaaagatgctggttaatatttggatgagaagggtacatgttttcttcctctcccagttgtggtg

SEQ ID NO: 31097 - DNA, 201 bp, Homo sapiens
gttagtgtcttgaagcttatgagctttgctgataagcagcatcacagtaaaagcaatatttgtttttagatttagttttttttttttttcatttaactaaragccttcaactgtactatcttcttgggtgtttgatatgggcaggacatctatcattgattcctattagagatgataaagcaaacattcaaagagactgtg

SEQ ID NO: 31098 - DNA, 201 bp, Homo sapiens
gaaatacagattttaacttgtttctagtcctctttttttttatttaagacacaaaactacacagctttgatttttaggggaaaaggatgataactttggamtatatctcacaaggtgacttttttttttctgttgtagttgatttctgagaattccagagtatcaggatgatgtagcaatttaaaaatagtaacacaaaat

SEQ ID NO: 31099 - DNA, 201 bp, Homo sapiens
tgaacacatcaatgataagaaagtgaaacagctttattactgctgtggagaaagattcgtggtttggtggaatatcagaccagccacaacattcccttaarccacagcctaatctagagtaagaccctaattttcttaagttctacgaaggctgaaagaggcaaggaagcttcagaggaagcattggaagctatcacaggt

SEQ ID NO: 31100 - DNA, 201 bp, Homo sapiens
tcatgccattctcctgcctcagcctcctgagaaaagttcctacttcttaacagagactccaagattgactatcttaatttgttttgattatttacaaattsactttgacatatttcttgtctacctgattgtattatggacaattttaaacatatacaaaattataatataatagccactcatgttctgatcactcaactt

SEQ ID NO: 31101 - DNA, 201 bp, Homo sapiens
ccaaaatgtgatggtctgttagtcagcatctggtaatgcggccatattttgcattcaggctccagtatgacaaagtgcagttgtacgttgacatctccccygggactgtggactggaaccacatctactttgaaaggtaatactgcaaggggggtgcttagccttcttttagggtactccactcaactacctacataattt

SEQ ID NO: 31102 - DNA, 201 bp, Homo sapiens
taaactgctatatattatttcactttaatgaaaaaattttagtatatttattactaaggagcatttacgggatcttaccaattttttcctattagaagtgragagcagtaaacatctttttatgcacatctccttagtcacatgaatgagagtttatttcaagtataacacctagaagtggtaaggatgtcttcactgttg

SEQ ID NO: 31103 - DNA, 201 bp, Homo sapiens
atttttggccagtctgaataaagctgctataaacattcttgtacaggattttgtgaattatgtttatatttctcttggattaatacttaggagaattgctrctaggataggtgtctgtttaactttcaagaaactgtgcaacagctttatactgtgaaatagtgattgtcctgactacaaacctccatggtgctgagacca

SEQ ID NO: 31104 - DNA, 201 bp, Homo sapiens
attctctcctccaccttttactctcaacctgatgaccccatacttaatctttcaggacttggctccagggccacgtgcttccacagtattttctcacttgyttgctttatgcagtttatttattgagacataatttacatagggggaaatgctcagatactgtctactgtccagtcagttttgtgggaagaatatcaaggc

SEQ ID NO: 31105 - DNA, 201 bp, Homo sapiens
agatttaatatcatttcatttttattggctgtttaggttcctccttctgtgaatttcctgttcataaaagttttttctgactcacagcagattttggagtytcaaatgtgttcactcttaattatatagacaagttaattcttttgggatagctttaatagattttgtactttgagtggttttcagagaaatcatgtttac

SEQ ID NO: 31106 - DNA, 201 bp, Homo sapiens
cccctccccttcaaagcagcgactcctctgcaatccatcaccatgggtgaatttcgctgattctagaatggaatggaatggaacactttgtgccttttggkgcctagcttttttcactcagcatattatttttgagaggcaaccatgttgttgcatgagcccatagttggttcccttgtattatgtttcattgatgaatat

SEQ ID NO: 31107 - DNA, 201 bp, Homo sapiens
agcataagccctgaaaaataccaagttttgcaaatgcaaagtacttttcattggcatggaaattggagggaaaaaacacaatgaatattttggccaaaatrtgatggtctgttagtcagcatctggtaatgcggccatattttgcattcaggctccagtatgacaaagtgcagttgtacgttgacatctcccccgggactg

SEQ ID NO: 31108 - DNA, 201 bp, Homo sapiens
ttatgtttcattgatgaatattccaaagtttacttatcccttccttgttgatggacatctggcttatttctaatttttggccagtctgaataaagctgctrtaaacattcttgtacaggattttgtgaattatgtttatatttctcttggattaatacttaggagaattgctgctaggataggtgtctgtttaactttcaa

SEQ ID NO: 31109 - DNA, 201 bp, Homo sapiens
tgtgaatttcctgttcataaaagttttttctgactcacagcagattttggagtctcaaatgtgttcactcttaattatatagacaagttaattcttttggratagctttaatagattttgtactttgagtggttttcagagaaatcatgtttacaatgacacgtgaacactttaagattcgaaaaggacattcgtgagaac

SEQ ID NO: 31110 - DNA, 201 bp, Homo sapiens
cctccccttcaaagcagcgactcctctgcaatccatcaccatgggtgaatttcgctgattctagaatggaatggaatggaacactttgtgccttttggggyctagcttttttcactcagcatattatttttgagaggcaaccatgttgttgcatgagcccatagttggttcccttgtattatgtttcattgatgaatattc

SEQ ID NO: 31111 - DNA, 201 bp, Homo sapiens
aagatttacctaaggaaaaatgtaggcttccaaagggtgtagttatgcaggataggtttctgagccttttgctgaacaatttcatagtaaggctgttcaartttaattattttcacagtgactcttttccatactctttttgtacaagttttattacactatggctttttctttctaaaacataacatggtgaatgtttgt

SEQ ID NO: 31112 - DNA, 201 bp, Homo sapiens
ttcataaaagttttttctgactcacagcagattttggagtctcaaatgtgttcactcttaattatatagacaagttaattcttttgggatagctttaatakattttgtactttgagtggttttcagagaaatcatgtttacaatgacacgtgaacactttaagattcgaaaaggacattcgtgagaactaagctctttcta

SEQ ID NO: 31113 - DNA, 201 bp, Homo sapiens
ccatagaagggtcctgatcaccagtatagctgagctcacctcctgcagttaaatctcccaacactcccattcaagaccctcccaaacctcctttttcatcyccccctaccctttggttcacctgcacaaatacatgtttcagccaaacttgacaactctccctactttgtgacatcttgcattctctcccctttgcaatgg

SEQ ID NO: 31114 - DNA, 201 bp, Homo sapiens
gcaggccgctccccagaaagttggcttttttgccaaggtacttagaagtccctggtctctagagccttaagaggaattcagagtcatgaaaatactacccyattcttgaggttgatgacctgtatgtcatttaattcagcgcgctcagaaaaagttctgacttctttttatttatttatttatttattttgagacggagtc

SEQ ID NO: 31115 - DNA, 201 bp, Homo sapiens
gaagggtcctgatcaccagtatagctgagctcacctcctgcagttaaatctcccaacactcccattcaagaccctcccaaacctcctttttcatccccccytaccctttggttcacctgcacaaatacatgtttcagccaaacttgacaactctccctactttgtgacatcttgcattctctcccctttgcaatggccaca

SEQ ID NO: 31116 - DNA, 201 bp, Homo sapiens
tcacctcctgcagttaaatctcccaacactcccattcaagaccctcccaaacctcctttttcatccccccctaccctttggttcacctgcacaaatacatrtttcagccaaacttgacaactctccctactttgtgacatcttgcattctctcccctttgcaatggccacagactccacccagaaggcctgccacatgcag

SEQ ID NO: 31117 - DNA, 201 bp, Homo sapiens
tttaaaatgttttggtttatgctaaacaagcagtctgagataaagcatggtaaaaaaaaatcaaatactaaatttgtctttatgagctccctttctctgahgagctggctatgagtccgttaccttcatgaatatggagcaaaaagcctaaatctgaactctgtcggctggaagcgaacaaagtactgggaaaaattacat

SEQ ID NO: 31118 - DNA, 201 bp, Homo sapiens
atccaatttattttatttattgagacataatttacatagagtgaaatgcttagcaatatcatttttgaccagaatgaccaagaactgaatcagaccagacrtgttcctgtgaggaactgccattcaggatgaaaaaataatgaatccaacccccattgcctgcagccaagtttcggtaaatgttgactgaaaacacacttt

SEQ ID NO: 31119 - DNA, 201 bp, Homo sapiens
acaaacgcaaggctgtggctgtggttcggaaagatgtttcagggtttggtttcttagcagatgtcatttcaaacaaataagaattaaaaaaataatgtttytcatttttaaaaggaaaaaagttttatgttttcctgaatactgtgaatatcaatttctcaaaccagaataggtatgtaagttctttgacatctcataatt

SEQ ID NO: 31120 - DNA, 201 bp, Homo sapiens
attttgtagttgataaagaggaaaaaacaatcatttgtagaccttagaagtacccccagcacttcgggaagccgaggccagcagctcatttgaggtcaggmtttcgagagcctgaccaacatggtaaaaccccgtctctactaaaaatacaaaaattagccaggcatggtggcaggtgcctttaatcccagctacgtggga

SEQ ID NO: 31121 - DNA, 201 bp, Homo sapiens
tgtagttgataaagaggaaaaaacaatcatttgtagaccttagaagtacccccagcacttcgggaagccgaggccagcagctcatttgaggtcaggctttygagagcctgaccaacatggtaaaaccccgtctctactaaaaatacaaaaattagccaggcatggtggcaggtgcctttaatcccagctacgtgggaggct

SEQ ID NO: 31122 - DNA, 201 bp, Homo sapiens
ttgaagcggatcttaaacagtatctataagtatttattcatccataagcatttcagtatttgtctctaaaagataaggctctctttttaaaatcattatcrcacctaagaaaaagttaataattccataatatcaacatatagtcatatgtttagattgccagttgtttcacaaatgttatgtgtgtgtatacttttcaca

SEQ ID NO: 31123 - DNA, 201 bp, Homo sapiens
cttccttgttgatggacatctggcttatttctaatttttggccagtctgaataaagctgctataaacattcttgtacaggattttgtgaattatgtttatrtttctcttggattaatacttaggagaattgctgctaggataggtgtctgtttaactttcaagaaactgtgcaacagctttatactgtgaaatagtgattg

SEQ ID NO: 31124 - DNA, 201 bp, Homo sapiens
gttcagtctctgaaaacataaattcaggaagagatagctgaatatactagatggagtttaaggccagaggcttaaaacttggagaaacccttctccccaamtccagctccccaaattctgtgatggtattgaggagggccaccctctgactgtgcagctaatgagaagtaagatacatggataggaatttgttgctagaat

SEQ ID NO: 31125 - DNA, 201 bp, Homo sapiens
caaattctgtgatggtattgaggagggccaccctctgactgtgcagctaatgagaagtaagatacatggataggaatttgttgctagaatcatgcttcccwtagctggctatgcatcagagtttgctgtggtgaacaaaaaaaaatacaggttcctctattcagagattgtgatttgaatcagggcttggctggagcctgc

SEQ ID NO: 31126 - DNA, 201 bp, Homo sapiens
cttagccttcttttagggtactccactcaactacctacataatttggtttttaaaatgttttggtttatgctaaacaagcagtctgagataaagcatggtaaaaaaaaatcaaatactaaatttgtctttatgagctccctttctctgatgagctggctatgagtccgttaccttcatgaatatggagcaaaaagcctaaa

SEQ ID NO: 31127 - DNA, 201 bp, Homo sapiens
aatcatgcttcccttagctggctatgcatcagagtttgctgtggtgaacaaaaaaaaatacaggttcctctattcagagattgtgatttgaatcagggctyggctggagcctgcaaacttgtgtatctaacattcttcttagttgattctgaagcagccagcctgacgcatgtccccggattgctggcctgggatactgga

SEQ ID NO: 31128 - DNA, 201 bp, Homo sapiens
catcagagtttgctgtggtgaacaaaaaaaaatacaggttcctctattcagagattgtgatttgaatcagggcttggctggagcctgcaaacttgtgtatstaacattcttcttagttgattctgaagcagccagcctgacgcatgtccccggattgctggcctgggatactggacttgatataagagaactttgcttcaa

SEQ ID NO: 31129 - DNA, 201 bp, Homo sapiens
tctattcagagattgtgatttgaatcagggcttggctggagcctgcaaacttgtgtatctaacattcttcttagttgattctgaagcagccagcctgacgyatgtccccggattgctggcctgggatactggacttgatataagagaactttgcttcaaaccctggactctggctcctactgccgtgggatccctaagtct

SEQ ID NO: 31130 - DNA, 201 bp, Homo sapiens
cctgacgcatgtccccggattgctggcctgggatactggacttgatataagagaactttgcttcaaaccctggactctggctcctactgccgtgggatccytaagtcttagtttccccatctgtacaaatgggaaggaagtgttaacataattattttaaaaaatgcctggcctgtcccggggatccagtgagcatcagct

SEQ ID NO: 31131 - DNA, 201 bp, Homo sapiens
ttaacagttcagtgcatctccccaggcaaaaacaattagtatttgtttagttaaatatgctcctagaatgtgaaccaatttccctggcatggccttctagktatcagccttaaaatgttgcctgaaacatcaaatatttattatagcaaacttaaaatgaagtgtggttgaatcttaagaaatagatccctttgctttacc

SEQ ID NO: 31132 - DNA, 201 bp, Homo sapiens; identical to SEQ ID NO: 4930

SEQ ID NO: 31133 - DNA, 201 bp, Homo sapiens
atgcctggcctgtcccggggatccagtgagcatcagcttccttcctacattctggaaataatgtattccgattgtgattcaggggtcgcctgccaacaaartgaaagtgtttcctaaacgttgttagaaagccaatagtttaaaatataaaataattagctgtaaattgggaaatttttcactcagattggaaatacatta

SEQ ID NO: 31134 - DNA, 201 bp, Homo sapiens
cagccttaaaatgttgcctgaaacatcaaatatttattatagcaaacttaaaatgaagtgtggttgaatcttaagaaatagatccctttgctttaccccakactgactgaaacatacttgtgttcttagtgggtcacttttcagacacagctaaggaggaagagttgttctgctcagacctttgaccagatgataaataag

SEQ ID NO: 31135 - DNA, 201 bp, Homo sapiens
attcaggctccagtatgacaaagtgcagttgtacgttgacatctcccccgggactgtggactggaaccacatctactttgaaaggtaatactgcaaggggrgtgcttagccttcttttagggtactccactcaactacctacataatttggtttttaaaatgttttggtttatgctaaacaagcagtctgagataaagcat

SEQ ID NO: 31136 - DNA, 201 bp, Homo sapiens
cttcttccttttgttcctctgtctactggaacaagttacgtaagtcaaccacatttttagaaccagatataaacacccaaatgtcagatactctgacaacrtgactgaacatcacctccatttgggatggaaagcttcctatctacagaccatccaacacttgttggttacattatgcaaatatacccccaggaagacttc

SEQ ID NO: 31137 - DNA, 201 bp, Homo sapiens
caaatgtcagatactctgacaacatgactgaacatcacctccatttgggatggaaagcttcctatctacagaccatccaacacttgttggttacattatgyaaatatacccccaggaagacttctaattgtactttggtttctggagtgggctctcctactagaaagaaaatgtcaaaagcagcctacaggaatattctag

SEQ ID NO: 31138 - DNA, 201 bp, Homo sapiens
tttgtacaagttttattacactatggctttttctttctaaaacataacatggtgaatgtttgtattaaatacagaatatttggatcatccactagaaattygggagactctgcttctctgatgaattgaggctgtttttaaggaatggtgctgtaaggctttggaagaaccgtttacaagcaaaacattggcagagtttta

SEQ ID NO: 31139 - DNA, 201 bp, Homo sapiens
tgaatatggagcaaaaagcctaaatctgaactctgtcggctggaagcgaacaaagtactgggaaaaattacatcaaagtatgctactggtagaagttatcrttggtcttggcaagactacagagggtttttttcaaatgctgctgcccagtaaattaaaatattttctctttgtatttgtcaggtaagagatacagatata

SEQ ID NO: 31140 - DNA, 201 bp, Homo sapiens
gcctactatgatagccagtcccttcaccccctctaccataggatagacacacaattgaattcttctttgtctaaaacaaggtgggcttaaggtaaaacatkgatcttctcaaacaaacttacaggacttctggtggtgactattttcagtttctttagagagactgttggctaactttgaggatgtatggttcaggaaagt

SEQ ID NO: 31141 - DNA, 201 bp, Homo sapiens
cttctcaaacaaacttacaggacttctggtggtgactattttcagtttctttagagagactgttggctaactttgaggatgtatggttcaggaaagtttcrgaaaatatgttgcatgaagggataattaaatgactgagttaacactaacccagaaaaaaacactagggttgaaacaaaccctagcttcttctggtcaaaa

SEQ ID NO: 31142 - DNA, 201 bp, Homo sapiens
agactctaaaatgctttatccaatttattttatttattgagacataatttacatagagtgaaatgcttagcaatatcatttttgaccagaatgaccaagarctgaatcagaccagacatgttcctgtgaggaactgccattcaggatgaaaaaataatgaatccaacccccattgcctgcagccaagtttcggtaaatgtt

SEQ ID NO: 31143 - DNA, 201 bp, Homo sapiens
gtgaagaaaagaatggatgaacacatcaagtgcactttatttatactgaacaatggagatgacaggctggcatagtgattaagatggaaggcttgggaatyatgcctaggttcagattccagctcagtcatttattatctatgaaattttaagcaggtgtttaaacttacttggtgtctcagtttcctcatctctacagtt

SEQ ID NO: 31144 - DNA, 201 bp, Homo sapiens; identical to SEQ ID NO: 4931

SEQ ID NO: 31145 - DNA, 201 bp, Homo sapiens
aataggtatgtaagttctttgacatctcataattttgtagttgataaagaggaaaaaacaatcatttgtagaccttagaagtacccccagcacttcgggargccgaggccagcagctcatttgaggtcaggctttcgagagcctgaccaacatggtaaaaccccgtctctactaaaaatacaaaaattagccaggcatggt

SEQ ID NO: 31146 - DNA, 201 bp, Homo sapiens
gagaaaaaatgaatgctctgtccatcaaggagatggaaattttattggctaaatgtgggctgattataggcaggcaaaaacaagagagacatagcttcctycttactgtgctcttggacttgcctctctcgtttcagggtggcagcatgtgcaggtaaaatcaggtgtgcaagttgacacaggccatagaagggtcctgat

SEQ ID NO: 31147 - DNA, 201 bp, Homo sapiens
cataatttacatagagtgaaatgcttagcaatatcatttttgaccagaatgaccaagaactgaatcagaccagacatgttcctgtgaggaactgccattcwggatgaaaaaataatgaatccaacccccattgcctgcagccaagtttcggtaaatgttgactgaaaacacacttttccaatgtaatgagccttatgtaca

SEQ ID NO: 31148 - DNA, 201 bp, Homo sapiens
gcaaaaacaagagagacatagcttccttcttactgtgctcttggacttgcctctctcgtttcagggtggcagcatgtgcaggtaaaatcaggtgtgcaagytgacacaggccatagaagggtcctgatcaccagtatagctgagctcacctcctgcagttaaatctcccaacactcccattcaagaccctcccaaacctcc

SEQ ID NO: 31149 - DNA, 201 bp, Homo sapiens
tgtggacaatgttcattagccacttagcaggatattctgcttttattctacttgtctgtgtatttctgctctgtgaggtaataggcttcttaagggacacrtatgtagtggccctcagcagtctgataggagctgaggctgctggccactaagtagctgatgctagtcttcatgatccttgctcttgatggccgattccat

SEQ ID NO: 31150 - DNA, 201 bp, Homo sapiens
tcttagtaggttgcccaggctggcctgagactcctgggttcaagtgatccccctgcctcagcctcctcagtagctgggactataggcacgagccacaacayctggctttatgttctcttttgattgctgttttggtactttaagggcctaatttttcttctgttttacaaactgcctaattttataattgtataattccta

SEQ ID NO: 31151 - DNA, 201 bp, Homo sapiens
tatgaaagttttaatcgtgaatatttttaaagtatagaaattatgtattaggcatgcaattaacaaatgtttccattttgccatatttatttcagatcttygcctttttgcttttttagagaaataaaatgttacagatattgctaaaggcccttacccatatcttttcctttgtttttcctacttagggttagcaaatat

SEQ ID NO: 31152 - DNA, 201 bp, Homo sapiens
cactttgggaggctgatgtggaaggattgcttgagcccaggagttcaagaccagcttgggcaacatagcgagagcccatcactaaaaaaaaaaataaaaawaaaaaataaaaaacttagccaggcatggcggagtgcacctatagtcttagctacttggggggctgaggcaggaggatcacatgagcctgggaggctgcag

SEQ ID NO: 31153 - DNA, 201 bp, Homo sapiens
gggaaagatggctccaaggagtaaaggaatagagcaatttatcatgagactgggtcttagtaggttgcccaggctggcctgagactcctgggttcaagtgrtccccctgcctcagcctcctcagtagctgggactataggcacgagccacaacatctggctttatgttctcttttgattgctgttttggtactttaagggc

SEQ ID NO: 31154 - DNA, 201 bp, Homo sapiens
tgggttcaagtgatccccctgcctcagcctcctcagtagctgggactataggcacgagccacaacatctggctttatgttctcttttgattgctgttttgrtactttaagggcctaatttttcttctgttttacaaactgcctaattttataattgtataattcctaaaaatgtttaagtttaatttctagaaatatggaa

SEQ ID NO: 31155 - DNA, 201 bp, Homo sapiens
ttaatcccagctacgtgggaggctgaggcaggagaatggcttgaacccgggaggtggaggttgcagtgagctgagatcgcgccactgcactccagcctggrtgacatagtcctactctttctcaaaaaacaacaacagcaaaaaaattaaaaattaaaaagaattggttgccaatttttaagaagtctggtaataacataa

SEQ ID NO: 31156 - DNA, 201 bp, Homo sapiens
taccctattcttgaggttgatgacctgtatgtcatttaattcagcgcgctcagaaaaagttctgacttctttttatttatttatttatttattttgagackgagtctcgctctgtcacccatgctggagtgtagcggtgtgatctcagctcactgcaagatccgcctcccaggttcatgccattctcctgcctcagcctcc

SEQ ID NO: 31157 - DNA, 201 bp, Homo sapiens
atttgggatggaaagcttcctatctacagaccatccaacacttgttggttacattatgcaaatatacccccaggaagacttctaattgtactttggtttcyggagtgggctctcctactagaaagaaaatgtcaaaagcagcctacaggaatattctagtgtaaactatttgtcattttaagtctaaagattctgttctag

SEQ ID NO: 31158 - DNA, 201 bp, Homo sapiens
ctgaatcaatttgtacttgttagttctggagaaactgataaaagtcatggttcagcatcgccagaaagcatctcttgttagcacttataatttgaattatrtggggtaataatttatgtaatgtctgtcccactagagaggaagcttcatgtgggtagagcattacatatttctctcttgttaactgctctatcaccagca

SEQ ID NO: 31159 - DNA, 201 bp, Homo sapiens
agggttgtgaggcaggccgctccccagaaagttggcttttttgccaaggtacttagaagtccctggtctctagagccttaagaggaattcagagtcatgaraatactaccctattcttgaggttgatgacctgtatgtcatttaattcagcgcgctcagaaaaagttctgacttctttttatttatttatttatttatttt

SEQ ID NO: 31160 - DNA, 201 bp, Homo sapiens
agttctggagaaactgataaaagtcatggttcagcatcgccagaaagcatctcttgttagcacttataatttgaattatatggggtaataatttatgtaaygtctgtcccactagagaggaagcttcatgtgggtagagcattacatatttctctcttgttaactgctctatcaccagcagcaagtagtgtttgatatatg

SEQ ID NO: 31161 - DNA, 201 bp, Homo sapiens
aaaacctttctttaggatccagtgctagtcacaggtcagatgttgtcaggaagcacagatatcaaaagctagattattgctatatatcatttgtatgcacwaaacaatttaaagtcatctcccatagggaaagatggctccaaggagtaaaggaatagagcaatttatcatgagactgggtcttagtaggttgcccaggct

SEQ ID NO: 31162 - DNA, 201 bp, Homo sapiens
acatttatgaaatgaatggaggagtccaggtccacactcattagcagaaatgaaagcaaccatgagctgaagccacacagttgactcttttactgaggcaytgaaagaagttgaggtatcagagaaatggggtgtgtgatggtggttatcacaggcaggatagatgagtgtctccggctagctaactggatcaagtgtttg

SEQ ID NO: 31163 - DNA, 201 bp, Homo sapiens
ggaggatcacctgagcccagaagttgaggctgcagtgagctaggattgtgccattgtactctagccagggcaacagaatgagacaagaaagaaagagagaragagagacagagaaagagagaaagggagaaagggagagagagagagaaagagagaatgagagagagagagagagagagagagagagagagagagaaagac

SEQ ID NO: 31164 - DNA, 201 bp, Homo sapiens
aggatcacctgagcccagaagttgaggctgcagtgagctaggattgtgccattgtactctagccagggcaacagaatgagacaagaaagaaagagagaaaragagacagagaaagagagaaagggagaaagggagagagagagagaaagagagaatgagagagagagagagagagagagagagagagagagagaaagaccg

SEQ ID NO: 31165 - DNA, 201 bp, Homo sapiens
tttcccaaggtttctttcaggacatcttaatttaggcaatgggaagccagagacatggaatgaggcatcagatagcaagccttatcacctgcacttactcyagggccagggattttcatgcttgagggtttgctttttattttctatgggctttggcgaagtctcttctctgcttctacagtctcaaaacattttcctcat

SEQ ID NO: 31166 - DNA, 201 bp, Homo sapiens
tctgggagcagtccagtgctgagcccacgggtggcgggacccgcccgctccacaaccagctcgtccattctcccagcaagcaggcctgacgcacccctgacagtcagccgctcaggatttgaagtgtgattcacagctagaaaataccggtttttcattactatgcaaatgccacctgggtggggtttaggtaaatccgga

SEQ ID NO: 31167 - DNA, 201 bp, Homo sapiens
acctgagcccagaagttgaggctgcagtgagctaggattgtgccattgtactctagccagggcaacagaatgagacaagaaagaaagagagaaagagagasagagaaagagagaaagggagaaagggagagagagagagaaagagagaatgagagagagagagagagagagagagagagagagagagaaagaccgaccgac

SEQ ID NO: 31168 - DNA, 201 bp, Homo sapiens
ctgggagcagtccagtgctgagcccacgggtggcgggacccgcccgctccacaaccagctcgtccattctcccagcaagcaggcctgacgcacccctgacagtcagccgctcaggatttgaagtgtgattcacagctagaaaataccggtttttcattactatgcaaatgccacctgggtggggtttaggtaaatccggat

SEQ ID NO: 31169 - DNA, 201 bp, Homo sapiens
ccagaagttgaggctgcagtgagctaggattgtgccattgtactctagccagggcaacagaatgagacaagaaagaaagagagaaagagagacagagaaaragagaaagggagaaagggagagagagagagaaagagagaatgagagagagagagagagagagagagagagagagagagaaagaccgaccgaccaccacaa

SEQ ID NO: 31170 - DNA, 201 bp, Homo sapiens
tgggagcagtccagtgctgagcccacgggtggcgggacccgcccgctccacaaccagctcgtccattctcccagcaagcaggcctgacgcacccctgacagtcagccgctcaggatttgaagtgtgattcacagctagaaaataccggtttttcattactatgcaaatgccacctgggtggggtttaggtaaatccggatg

SEQ ID NO: 31171 - DNA, 201 bp, Homo sapiens
tgccattgtactctagccagggcaacagaatgagacaagaaagaaagagagaaagagagacagagaaagagagaaagggagaaagggagagagagagagaragagagaatgagagagagagagagagagagagagagagagagagagaaagaccgaccgaccaccacaagagcaagtaagttcaggttaaattaagaaaaa

SEQ ID NO: 31172 - DNA, 201 bp, Homo sapiens
gggagcagtccagtgctgagcccacgggtggcgggacccgcccgctccacaaccagctcgtccattctcccagcaagcaggcctgacgcacccctgacagtcagccgctcaggatttgaagtgtgattcacagctagaaaataccggtttttcattactatgcaaatgccacctgggtggggtttaggtaaatccggatgt

SEQ ID NO: 31173 - DNA, 201 bp, Homo sapiens
ccattgtactctagccagggcaacagaatgagacaagaaagaaagagagaaagagagacagagaaagagagaaagggagaaagggagagagagagagaaaragagaatgagagagagagagagagagagagagagagagagagagaaagaccgaccgaccaccacaagagcaagtaagttcaggttaaattaagaaaaatg

SEQ ID NO: 31174 - DNA, 201 bp, Homo sapiens
tgatcaccctcgtgatgacaccaggtcaacaggcagctgtgggctcattaagatgtaagccggccgggcgcggtggctcacgcctgtaatcccagcacttygggaggcccaggcgggcggatcacgaggtcaggagatcgagaccatcctggctaacacggtgaaaccccgtctctactaaaaaatacaaaaaattagccg

SEQ ID NO: 31175 - DNA, 201 bp, Homo sapiens
tcgtgatgacaccaggtcaacaggcagctgtgggctcattaagatgtaagccggccgggcgcggtggctcacgcctgtaatcccagcactttgggaggccyaggcgggcggatcacgaggtcaggagatcgagaccatcctggctaacacggtgaaaccccgtctctactaaaaaatacaaaaaattagccgggcttggtg

SEQ ID NO: 31176 - DNA, 201 bp, Homo sapiens
gctttgagggacaaagagcttgctggaaatagtgatcaccctcgtgatgacaccaggtcaacaggcagctgtgggctcattaagatgtaagccggccgggygcggtggctcacgcctgtaatcccagcactttgggaggcccaggcgggcggatcacgaggtcaggagatcgagaccatcctggctaacacggtgaaaccc

SEQ ID NO: 31177 - DNA, 201 bp, Homo sapiens
tgggctttgagggacaaagagcttgctggaaatagtgatcaccctcgtgatgacaccaggtcaacaggcagctgtgggctcattaagatgtaagccggccrggcgcggtggctcacgcctgtaatcccagcactttgggaggcccaggcgggcggatcacgaggtcaggagatcgagaccatcctggctaacacggtgaaa

SEQ ID NO: 31178 - DNA, 201 bp, Homo sapiens
gacacgctcacaaacagacacaaaggcagacccctccctctagtttttctaacataccagagccccctgcaaacacctgaggccctcaatgctgattttcrctggaatctcatcacagttgaacagggtagaagcagcttaacctctctccttgtgcctcgctggaaccagtggctcgtcttccacgggctgcccctgatc

SEQ ID NO: 31179 - DNA, 201 bp, Homo sapiens; identical to SEQ ID NO: 4933

SEQ ID NO: 31180 - DNA, 201 bp, Homo sapiens
gatgtcaaaatagtctccaaaggactacatacatacatggtggcattatgaagacgattgttatttgacctaatcaaaatgtctgtggatctgaaaccacrtgaaagaccaacttaagcatcatctatggtcaaagatatgaagccctcaagtccagataaacatgaaggccatggctaatgtctttgaaatatccaagct

SEQ ID NO: 31181 - DNA, 201 bp, Homo sapiens
agagagagagagagagagagagagagagagaaagaccgaccgaccaccacaagagcaagtaagttcaggttaaattaagaaaaatgttggtggtaacaaayggcctgtcagatcattcatttccctgtttctttacaaatcccttgcattgttttttcagcacaagttcttacccagctatcctctaaaacaaatctttga

SEQ ID NO: 31182 - DNA, 201 bp, Homo sapiens
gtgacacacaccagccccgcaggcaactgtgcctgctttaagaaactcctaagcaaagtactgaggcagaaccagagggagaagtgaggggaaaagcagcttttttttttttttttttttttggtcatctgagcttgagttaatcggcagcactcggctttctaacctttgaggcatttctaaatctgatcccacacactc

SEQ ID NO: 31183 - DNA, 201 bp, Homo sapiens
cggagtctcgctgtcacccaggctggagtgcagttgtgtgatctgggctcactgcaagctccgcctcctgggttcacgccattctcctgcttcagcctccygaaaagctgggattacagttgcccgccacctcgcccggctaattttttgtatttttagtagacacggagtttcaccgtattagccaggatggtctctatc

SEQ ID NO: 31184 - DNA, 201 bp, Homo sapiens
gtggcaaagcccaaatcaccaactgtctcaacaccagtgtttggtcaaattgtttcatccagaaaggcagtgcagtcatgtgaatgtgcttcatttgtggycatatctgccttaaaagcataccaggttggagcttctagaacaacagaataaagaaaggcagggctgtaacatccaaatgcttaggaaccacccagagga

SEQ ID NO: 31185 - DNA, 201 bp, Homo sapiens
gaaaatcacaatttctccttcattctatttctacttcaaatgtggggactgtgctttttttttcccaaggtttctttcaggacatcttaatttaggcaatrggaagccagagacatggaatgaggcatcagatagcaagccttatcacctgcacttactctagggccagggattttcatgcttgagggtttgctttttatt

SEQ ID NO: 31186 - DNA, 201 bp, Homo sapiens
ctcccacctcagcctcccaagtagctgggattataggtatgcaccactatccctggctaaagagtttttaaaagcgcaaggtacaagtactggtaaatatrtacctgggaggaacccctctctgcttctgtggccatctttgttgcccactgaaggaagagaaaggagttaggaggcaggacctgactcaggtctggcctt

SEQ ID NO: 31187 - DNA, 201 bp, Homo sapiens
ctcctactgctaacagtttctactaaaatgtaaaactaagccttttgaaaaccagtgttggttctgttccttcaggaaaatcacaatttctccttcattckatttctacttcaaatgtggggactgtgctttttttttcccaaggtttctttcaggacatcttaatttaggcaatgggaagccagagacatggaatgaggc

SEQ ID NO: 31188 - DNA, 201 bp, Homo sapiens
gacctgactcaggtctggccttaccagaaaataaaacactggggcctaggggaagcatcaggatgggtgcccaagtcgctgggactgctacgttatcccgycttgtcactgtccctctgcactttctcaagcagggtcatgcactccaggcaggaatctgttttcaggaagcatcagtcccagttccagatctttggctaa

SEQ ID NO: 31189 - DNA, 201 bp, Homo sapiens
aaatcctcctactgctaacagtttctactaaaatgtaaaactaagccttttgaaaaccagtgttggttctgttccttcaggaaaatcacaatttctccttmattctatttctacttcaaatgtggggactgtgctttttttttcccaaggtttctttcaggacatcttaatttaggcaatgggaagccagagacatggaat

SEQ ID NO: 31190 - DNA, 201 bp, Homo sapiens
gcagctgttttcactgacctatgaccttatgatgcgtcccactttgttgttattctctgttgaccagatattccatatcttggccatgcatttctttggcwgctggctcaatatcacctcaacacaaagatatctgaacgaaacactctgggccacaaaatcagcctctaagactgagatagcagtggtatggtcagaacc

SEQ ID NO: 31191 - DNA, 201 bp, Homo sapiens
gggtcatgcactccaggcaggaatctgttttcaggaagcatcagtcccagttccagatctttggctaagtactggcacgctcctggataagtcacctgagyttcctggcctcagtgtcctcatctgccatttagggaaggctggatacatctttcagcttctgtgttctctgattccctgaggttgactttgatctgagtt

SEQ ID NO: 31192 - DNA, 201 bp, Homo sapiens
ggtatggtcagaaccaaaataaggcaaagcagacagacacacacacacacaaagcaaatcctcctactgctaacagtttctactaaaatgtaaaactaagscttttgaaaaccagtgttggttctgttccttcaggaaaatcacaatttctccttcattctatttctacttcaaatgtggggactgtgctttttttttccc

SEQ ID NO: 31193 - DNA, 201 bp, Homo sapiens
atctttggctaagtactggcacgctcctggataagtcacctgagcttcctggcctcagtgtcctcatctgccatttagggaaggctggatacatctttcarcttctgtgttctctgattccctgaggttgactttgatctgagtttgttttgattctcaaatcaagacttggtagacttcactaggtggtaatgcaactaa

SEQ ID NO: 31194 - DNA, 201 bp, Homo sapiens
gatgtctaaatgaagctgttagtgggctatgttgaatctcaaaattatctttctccttttttttttaagagatgatctcattctgttgcccaggctggagkgcagtggctcaatcatagctcactgcagcctcgaactcctgggctcaagtgatcctcccgcctcagcttcccaaggagctgggatgtgccagcatacttg

SEQ ID NO: 31195 - DNA, 201 bp, Homo sapiens
tctttttgagacagagtctcactctgtcacccaggctggagtgcagtggcctgatcatggctcactgcagcctcaacctcctgggctcaggtgatcctccygcttcaacctcccgagcagctgggactacaggtgagtaccactatgcctggataattttttcttttcttttcttttttttttttctttggagacagagtc

SEQ ID NO: 31196 - DNA, 201 bp, Homo sapiens
gtctgctttgtctcatcttgtccatccccttcccaaatttccattttggtatgtgttccctggcagctcttttttaaatgcatctttttgtctgtccctcygcatgtctcagacatacaacaaaaccaggaaaagaatgaacttccaggtctctgaacacagttttggcctttatttgataatatttctaccaacttattt

SEQ ID NO: 31197 - DNA, 201 bp, Homo sapiens
ctgaagtgacttacaatacttttctcttttttttttttttttgagacagggtcttgctgttacccagactggagtgcagtggtgcgatactggctcactgyagcctccacctcccagattcacagaatcctcccacctcagcctcccaagtagctggcattacaggtatgagccaccattgtgcccagctaatttttttgt

SEQ ID NO: 31198 - DNA, 201 bp, Homo sapiens
tgacttacaatacttttctcttttttttttttttttgagacagggtcttgctgttacccagactggagtgcagtggtgcgatactggctcactgcagcctmcacctcccagattcacagaatcctcccacctcagcctcccaagtagctggcattacaggtatgagccaccattgtgcccagctaatttttttgtatattt

SEQ ID NO: 31199 - DNA, 201 bp, Homo sapiens
aatggtttctttcttttcaattgagagcagatgaaaaagcaaagattaggtaaatggtcatgtcattgaggtaacccgaactcagggatgcatgacacacrtatcctgtttcagacatgattgcatagaactatatccttttttttgtgatcaagaggaaacattttattttatttttattatttttatattctttttgag

SEQ ID NO: 31200 - DNA, 201 bp, Homo sapiens
agtctcaaaacattttcctcatgggaaagacagttagttaacttctcaagcactaggaagaactgagatctctgctgcctccactccaaggattgccactrtgggctccaagccagatcaacactgtctgtgtgcagagttgtagtcaggcaggaacaagatgggacatgccagacctcatctgcactttgcgaaggtgac

SEQ ID NO: 31201 - DNA, 201 bp, Homo sapiens
agagttgtagtcaggcaggaacaagatgggacatgccagacctcatctgcactttgcgaaggtgacacacaccagccccgcaggcaactgtgcctgctttwagaaactcctaagcaaagtactgaggcagaaccagagggagaagtgaggggaaaagcagcttttttttttttttttttttttggtcatctgagcttgagt

SEQ ID NO: 31202 - DNA, 201 bp, Homo sapiens; identical to SEQ ID NO: 21622

SEQ ID NO: 31203 - DNA, 201 bp, Homo sapiens; identical to SEQ ID NO: 21623

SEQ ID NO: 31204 - DNA, 201 bp, Homo sapiens; identical to SEQ ID NO: 21624

SEQ ID NO: 31205 - DNA, 201 bp, Homo sapiens; identical to SEQ ID NO: 21447

SEQ ID NO: 31206 - DNA, 201 bp, Homo sapiens; identical to SEQ ID NO: 4936

SEQ ID NO: 31207 - DNA, 201 bp, Homo sapiens; identical to SEQ ID NO: 21674

SEQ ID NO: 31208 - DNA, 201 bp, Homo sapiens; identical to SEQ ID NO: 21675

SEQ ID NO: 31209 - DNA, 201 bp, Homo sapiens; identical to SEQ ID NO: 21459

SEQ ID NO: 31210 - DNA, 201 bp, Homo sapiens; identical to SEQ ID NO: 21570

SEQ ID NO: 31211 - DNA, 201 bp, Homo sapiens; identical to SEQ ID NO: 21571

SEQ ID NO: 31212 - DNA, 201 bp, Homo sapiens; identical to SEQ ID NO: 21490

SEQ ID NO: 31213 - DNA, 201 bp, Homo sapiens; identical to SEQ ID NO: 21493

SEQ ID NO: 31214 - DNA, 201 bp, Homo sapiens; identical to SEQ ID NO: 21527

SEQ ID NO: 31215 - DNA, 201 bp, Homo sapiens; identical to SEQ ID NO: 21682

SEQ ID NO: 31216 - DNA, 201 bp, Homo sapiens; identical to SEQ ID NO: 21528

SEQ ID NO: 31217 - DNA, 201 bp, Homo sapiens; identical to SEQ ID NO: 21529

SEQ ID NO: 31218 - DNA, 201 bp, Homo sapiens; identical to SEQ ID NO: 21630

SEQ ID NO: 31219 - DNA, 201 bp, Homo sapiens; identical to SEQ ID NO: 21530

SEQ ID NO: 31220 - DNA, 201 bp, Homo sapiens; identical to SEQ ID NO: 21574

SEQ ID NO: 31221 - DNA, 201 bp, Homo sapiens; identical to SEQ ID NO: 21578

SEQ ID NO: 31222 - DNA, 201 bp, Homo sapiens; identical to SEQ ID NO: 21532

SEQ ID NO: 31223 - DNA, 201 bp, Homo sapiens; identical to SEQ ID NO: 21634

SEQ ID NO: 31224 - DNA, 201 bp, Homo sapiens; identical to SEQ ID NO: 21633

SEQ ID NO: 31225 - DNA, 201 bp, Homo sapiens; identical to SEQ ID NO: 21637

SEQ ID NO: 31226 - DNA, 201 bp, Homo sapiens; identical to SEQ ID NO: 21636

SEQ ID NO: 31227 - DNA, 201 bp, Homo sapiens; identical to SEQ ID NO: 21471

SEQ ID NO: 31228 - DNA, 201 bp, Homo sapiens; identical to SEQ ID NO: 21639

SEQ ID NO: 31229 - DNA, 201 bp, Homo sapiens; identical to SEQ ID NO: 21724

SEQ ID NO: 31230 - DNA, 201 bp, Homo sapiens; identical to SEQ ID NO: 4937

SEQ ID NO: 31231 - DNA, 201 bp, Homo sapiens; identical to SEQ ID NO: 21641

SEQ ID NO: 31232 - DNA, 201 bp, Homo sapiens; identical to SEQ ID NO: 4938

SEQ ID NO: 31233 - DNA, 201 bp, Homo sapiens; identical to SEQ ID NO: 21642

SEQ ID NO: 31234 - DNA, 201 bp, Homo sapiens; identical to SEQ ID NO: 4934

SEQ ID NO: 31235 - DNA, 201 bp, Homo sapiens; identical to SEQ ID NO: 21538

SEQ ID NO: 31236 - DNA, 201 bp, Homo sapiens; identical to SEQ ID NO: 21429

SEQ ID NO: 31237 - DNA, 201 bp, Homo sapiens; identical to SEQ ID NO: 21428

SEQ ID NO: 31238 - DNA, 201 bp, Homo sapiens; identical to SEQ ID NO: 21432

SEQ ID NO: 31239 - DNA, 201 bp, Homo sapiens; identical to SEQ ID NO: 21653

SEQ ID NO: 31240 - DNA, 201 bp, Homo sapiens; identical to SEQ ID NO: 21596

SEQ ID NO: 31241 - DNA, 201 bp, Homo sapiens; identical to SEQ ID NO: 21654

SEQ ID NO: 31242 - DNA, 201 bp, Homo sapiens; identical to SEQ ID NO: 21655

SEQ ID NO: 31243 - DNA, 201 bp, Homo sapiens; identical to SEQ ID NO: 21603

SEQ ID NO: 31244 - DNA, 201 bp, Homo sapiens; identical to SEQ ID NO: 21555

SEQ ID NO: 31245 - DNA, 201 bp, Homo sapiens; identical to SEQ ID NO: 21608

SEQ ID NO: 31246 - DNA, 201 bp, Homo sapiens; identical to SEQ ID NO: 21611

SEQ ID NO: 31247 - DNA, 201 bp, Homo sapiens; identical to SEQ ID NO: 21517

SEQ ID NO: 31248 - DNA, 201 bp, Homo sapiens; identical to SEQ ID NO: 4939

SEQ ID NO: 31249 - DNA, 201 bp, Homo sapiens
gtacatgtacaagtagcctacacaatcactctgctcactggcactacagataaagcacatgttgctatcctaacctagagggctcatgagatctagtcctytctttttgaccttatatctctgttctcttcagccaaactggggtttttcgctgttaacatgttcccttttaagcctccaccctgtcatccaagtttcacg

SEQ ID NO: 31250 - DNA, 201 bp, Homo sapiens
agcagtggtcacgccgcccgccttgcgtcccccgcgctgctccgcacgtggaatggcccatgacgtcacgaggccacggctcaatcagatgcggcgtttgrgaaattttaaatttaaaggcggggcggcctgtgagccctgaagtgccggccgcggagggtcctggccattttcctgggaccagttcagcctgataggatg

SEQ ID NO: 31251 - DNA, 201 bp, Homo sapiens
cagtctttgttcttatcccctgtgactgttagaaatcacttagctccatgtaacaaaaaacgtgaaaaacactaaagtttattgtcctcacataagaagtycagaggagttgttgccttgaggctgtcatcagggccgcaggctccttctcttgctggtccctgtcgttaatgtgtgcctctggcctcagatgaactcact

SEQ ID NO: 31252 - DNA, 201 bp, Homo sapiens
cgaatttttttaagtgttgaacacttagcactttcgtattttttttccagtttgccagtactgctaaatatatgaagaatactccttatgttaatgaggtrtcaactgatgaagctctcctgaaaaggtatagaaaagaaataatggatcttaaaaaacaattagaggaggtatgtatgaatcatttatttcattaaattg

SEQ ID NO: 31253 - DNA, 201 bp, Homo sapiens
ggtagttagagtgaagtaaagagtcaagagtttgattttttttttaagcaatatccttagactaataaaattttaaactaggcttaataagaattctaccwagtcaatggttttcaaaaatagaaactagttcccttgttttattatgtttgaatacagatctatatgacataattttgatttcttcttctttaggctaaa

SEQ ID NO: 31254 - DNA, 201 bp, Homo sapiens
aatccctttttacccccttgcttaaaaccctccataggcttcccctcacccttgagaataagatccaaacattttatcacagcccacaaggccccatgggkcctggacctggacctgcctacctctctccattgccacaaatgcttcagtcacagggccctcccctttgtgtctcagacagatgacaaactcgatcaagcc

SEQ ID NO: 31255 - DNA, 201 bp, Homo sapiens
ggacaaagtaggaaaaaaagaaaatggtagttagagtgaagtaaagagtcaagagtttgattttttttttaagcaatatccttagactaataaaattttaractaggcttaataagaattctaccaagtcaatggttttcaaaaatagaaactagttcccttgttttattatgtttgaatacagatctatatgacataatt

SEQ ID NO: 31256 - DNA, 201 bp, Homo sapiens
ttctttaaattgaaagaaactactttcatctaactcagtctaccatctaactcagtcctcactctgcaaggaaattaggcatattctgtgtatctttccaraaattatgtatgtatatccagacatattctgtgtacataaccgtgcaccttgaatttctcttaataaatgaaacatcttggatagctttctaaagtacac

SEQ ID NO: 31257 - DNA, 201 bp, Homo sapiens
attattcctcctatgacatgacttttatgactggttaaaatgcggtgtttttattcttttagagaagaatcacttggagaaactgcccaagtttactggamaactgacaataatgtcatttatcaagttgatggaagtaaatccttcaattttggtaagcttataatagcatcaaaagttaccttgttatccttttgctat

SEQ ID NO: 31258 - DNA, 201 bp, Homo sapiens
tttttttatttttatttatttttttattatactttaagttttagggtacatgtgcacaacatgcacgtttgttacatatgtatacatgtgccatgttggtrtactgcacccattaactcgtcatttacattaggtatatctcctaatgctatccccccctccccccaccccacaacaggccccggtgtgtgatgttcccct

SEQ ID NO: 31259 - DNA, 201 bp, Homo sapiens
tttttatttttatttatttttttattatactttaagttttagggtacatgtgcacaacatgcacgtttgttacatatgtatacatgtgccatgttggtatrctgcacccattaactcgtcatttacattaggtatatctcctaatgctatccccccctccccccaccccacaacaggccccggtgtgtgatgttccccttc

SEQ ID NO: 31260 - DNA, 201 bp, Homo sapiens
gaccagatcataaaggccctgtaagctattttaagaactctcatttctattctgggagagatggaaacaaaggcttctcaatgggaaaaggatagtctgaycaactaatgatgccagacaactgaacatccacaagcaaaaaaagacaaagaacttatacttttcacaaaaattaactcaaaatagatcataggcatacat

SEQ ID NO: 31261 - DNA, 201 bp, Homo sapiens
gtacccagtagtcattcaggagcaggttgttcagtttccatgcagttgagcggttttgagtgagtttcttaatcctgagttctagtttgattgcactgtgrtctgagagacagtttgttatcatttctgttcttttacatttgctgaggagtgctttacttccaactatgtggtcaattttggaataagtgtgatgtgctg

SEQ ID NO: 31262 - DNA, 201 bp, Homo sapiens
tctagagctttatacaaatagaatcatacagtatgtagtctcttatgtttgactttctacactcccttttactgccaaggaatagttcattgtattaataygccataatttttttattctttttcctattgatggaaatttgggttccgttcagtatttggctattttgaataaaactgctgtaaacattctcgtacaact

SEQ ID NO: 31263 - DNA, 201 bp, Homo sapiens
ggttatatggtaattctatttttaattttttgagaaagcaccataatgttttccataacagctgcaccattttacttcccaccaacaggacagaagtgttytggtttatatgcacctttgccaacacactattttctgtttttttttttttttttttttgatagtagccatcctaatggatgtgaggcagtatctcatcgt

SEQ ID NO: 31264 - DNA, 201 bp, Homo sapiens
agttgtgtatgtgtgtgtgtgtgtttacatatttttatgactattaacttattttataattatgtttaagatccaagagatttatgagaaagaggaacaayttaatataaaacaaattagtgaggttcaggaaaaagtgaatgaactgaaacaattcaaggagcatcgcaaagccaaggattcagcactacaaagtataga

SEQ ID NO: 31265 - DNA, 201 bp, Homo sapiens
caagcctggccagctactttagatgggcctcatgtgctttaataaacttttttttttaagagcagttttaggttcacagcaaaattgagcagaaagtacasagagttctcttataccccatctccacaaacacaatctcccctatcaacagcccacatcagggtggcacatttggcacaatcgatgaacctacattgatac

SEQ ID NO: 31266 - DNA, 201 bp, Homo sapiens
aaaacatgcaacatatgtaactgaacatgatgtcagaaataagggaattatgtttttaaaatattagtgactttgaattttactatgaatttaaactaatrtatataagttctgttttaatcccttagacttcaaatcagattctaaattgttactctctcctttgattcttttagaatgaactcagttcaaaagtagagc

SEQ ID NO: 31267 - DNA, 201 bp, Homo sapiens
gttcctcatgattaactatgatgttagctgtagttttttgtagacattctttatcaagttgtagaggttcatctctattgctgagagttttaaattatgartgggtattggattttgacaaattttttctgcatccattgatatgatcatgtgatttttcttctttagcctatgtgatggaacattaattgatttttgaat

SEQ ID NO: 31268 - DNA, 201 bp, Homo sapiens
tattacttgccacaaatagaaggtaacaaaaaaaattgtgtgtctgtctgtataacaaaataattctgaaattcctggtagttaactgttgccttcatttkctctgagcctaaggcctacattttctattttaaaaaggaaaggaaccagcctgaccaacatggagaaaccctgtctttactaaaaatacaaaattagcca

SEQ ID NO: 31269 - DNA, 201 bp, Homo sapiens
gatttttcttctttagcctatgtgatggaacattaattgatttttgaatgttaaaccagccttgcatacctgggataaatcccatttggtcatgtataatmatttttacacgtgattggatttgacttcctaatattttgttgagattttcacatctttttttacatctttgttttttattttattttattttattttttg

SEQ ID NO: 31270 - DNA, 201 bp, Homo sapiens
acatctctttttatgggagatactggtctgtagttttcttgtataatgtcatcatctggttttagtattagaataatgctgacatcatagaatgagtttcygtttctatcttctagaagagattgtaggttgtagagaatgggtatagttttttccttaaatttcttaaatatttggtagagttcaccattgaactcatct

SEQ ID NO: 31271 - DNA, 201 bp, Homo sapiens
caccattgaactcatctggacctggtgctttctgttttggaaagtttttaattactgactccatttctttgatagatataggcctaatcgaactgcctttyttgtgtattggtagattgtgtctttcaaagaattggtccatttcatttaaattatcaaatttgtgggttgttcataattgtgggttgtaataattgagtt

SEQ ID NO: 31272 - DNA, 201 bp, Homo sapiens
aaaacagaactctggaaaagataaatgtctaagaggcagtagcagaaaagggagcaacacatgggttcaaggttggaaaagtcaaagatacaggagagaamctagcaaaagtactgctacccaaatcagtggagaagagtatgtcaaagatgaagttatgagtggcaaatacttcagagagtcagaatatggactgaagat

SEQ ID NO: 31273 - DNA, 201 bp, Homo sapiens
agcttgaatagcttcagagaagtcagatgtaattcttatcttcactcccctataggtatggtgttttttcccttctagcttcttcaaagatttttttttayctttgatttttctgaagtttgaatatgatatgcttagatgttgttttttgtttttgggggttttttttcgggggtttttttggtttttttttttttttat

SEQ ID NO: 31274 - DNA, 201 bp, Homo sapiens
atgaaaactttctctacatgtgacaaaattttcatttaccaatttgtttaatttttttctgcaagtatgtgttaagctatgttacaaaaataaaagaagarcaacatgaatccatcaataaatttgaaatggattttattgatgaagtggaaaagcaaaaggaattgctaattaaaatacagcaccttcaacaagattgtg

SEQ ID NO: 31275 - DNA, 201 bp, Homo sapiens
gagattatcatcttgcagatcaatatgaatcctctctagtcattattcattttattgtcatcatccacatccaacatctgaaatttcagaaactgatgcamactacaaagaatgttcacattcttttaaagtactgttttagaatgttctaaataatgaacttcagcatatacactgtcctagaattctagggttttttga

SEQ ID NO: 31276 - DNA, 201 bp, Homo sapiens
ctaatgacataatagcaaaacttcaagccaaagttcatgaatcaaataaatgccttgaaaaaacaaaagagacaattcaagtacttcaggtaacttaaacrtaaaaataaaagttgtttgtttgtttgtttgtttaacctattgaattcagcaaatctccttgtgctctattcttccctctcacaacaacttactgttacc

SEQ ID NO: 31277 - DNA, 201 bp, Homo sapiens
cattttattgtcatcatccacatccaacatctgaaatttcagaaactgatgcaaactacaaagaatgttcacattcttttaaagtactgttttagaatgtkctaaataatgaacttcagcatatacactgtcctagaattctagggttttttgaagtttttttaaaatatgtatatcaagaccccccacccccgaggggat

SEQ ID NO: 31278 - DNA, 201 bp, Homo sapiens
ggcgattttttaagatataatacaagaagtgcaatccataaagaaaaaaactggtaagttggattttattgagacttaaacttctgctttacaaaagacaytgtcaggagaatcaagagaagccacagactggcagaaactgtatataaaagataaatctggtgaaggaatgttatacaaaatatacaaagaactcttaaa

SEQ ID NO: 31279 - DNA, 201 bp, Homo sapiens
tactgttttagaatgttctaaataatgaacttcagcatatacactgtcctagaattctagggttttttgaagtttttttaaaatatgtatatcaagacccyccacccccgaggggatgccatggatggtaccaaaccctatgtattctgttttttctatacatccatacctatgataaagtttaatttataaattagacac

SEQ ID NO: 31280 - DNA, 201 bp, Homo sapiens; identical to SEQ ID NO: 4940

SEQ ID NO: 31281 - DNA, 201 bp, Homo sapiens
actgttagtagacagaatatttcagagaagacagctcaagtagcaaatattcattgggatttaggaaattctgatggtgaattacaggaaaaagtgggacwtgttaaattggaaaatgacatctaattattgttactcatatcccttatgaaagaaagtactacatacattagattacaatgtaaaaatgattgccttatt

SEQ ID NO: 31282 - DNA, 201 bp, Homo sapiens
cagaaaagacaattcaaatttcagacattcaaaaggatttagataaatcaaaagatgaattacagaaaaaggtatgtgttgttttgttcttcttttggaaktaactgtgcccaaaattatttgtggaattaaaaagatatagatacagatatgtagatagatatgtgcatatagaacacaagtagacactatttgccttcc

SEQ ID NO: 31283 - DNA, 201 bp, Homo sapiens
tcctgtaagaagcagcattgtaactagaaaagcacagtgtaatatttattttacagtaagaaaggtacatcaaagattcatctatccaggagactaatttrtcaaattattgtggcaaagcatcaatagataagccactctggattatatcattgattcatttgaaaacctaatgttgtacttagagctttcttttcaaga

SEQ ID NO: 31284 - DNA, 201 bp, Homo sapiens
tcatgttggtatttctattgataagcaattagaactataaaacatgcaacatatgtaactgaacatgatgtcagaaataagggaattatgtttttaaaatwttagtgactttgaattttactatgaatttaaactaatatatataagttctgttttaatcccttagacttcaaatcagattctaaattgttactctctcct

SEQ ID NO: 31285 - DNA, 201 bp, Homo sapiens
aaaaaaaaaaaaaagtcatgcaacaagggaacagagctaaatagcccctgatgagctaaatagctatagtgggattaactaaattaatgatttggaaggayagcaacggcaatgagagcaagaggtctagtttatgactttcagataatgacaaggtccaggtgtggctttggtagcaactggcattaaactgaaggttat

SEQ ID NO: 31286 - DNA, 201 bp, Homo sapiens
tcaaatcaaagttaaagtagttatttaaataattcaaattttattaaggaaacaaaaaatatttgaattttctgattggaaaatctgttcttgtttataayaggagaatatagaaagtgagttgaactcacttcgtgctgactatgataatctggtattagactatgaacaactacgaacagaaaaagaagaaatggaatt

SEQ ID NO: 31287 - DNA, 201 bp, Homo sapiens
aggcaggagaatcgcttgaacctgggaggcggagcttgcagtgagccaagacccgttgcactccagcctgggtgacaagagtgaaactctgtctcaaacaratataaataaataaataaatagaaagtaatcataagttctttattctgaatctcctaagaatgatgcactagttgaaacacacatgagacaggtgttttt

SEQ ID NO: 31288 - DNA, 201 bp, Homo sapiens
cacaaattttatgttttttaagaatacaataaattgtcattaactatagtcaccttgctgtacaatagagctgttgaaatttattcctgctatctaactgkcattatgtcatctgaccaagatttccccattttcttctccctgaaaaacaccccagcctccaataaccaccattatactttgtacttctaagagatcagc

SEQ ID NO: 31289 - DNA, 201 bp, Homo sapiens
gagcttgaggacttatggtcaaaattccctgtcaggcacaggcaaacatacactttattgatatatttttaaaattctccttctttcaaaataatctattytaagttagctagtttgccaaaatgtagaactttagaaagatatcaaatcaaagttaaagtagttatttaaataattcaaattttattaaggaaacaaaaa

SEQ ID NO: 31290 - DNA, 201 bp, Homo sapiens
tattttgttgtgtaatcacataaatatatatagcataccatcatcttagcaaatgcttatactggacctactttgtgctgtgtattgttgtaataaatttrtatatatttcattaaatctgtcaataaccctatgagatagggactgttagtatatttgccattttagagataaagtcacatttgtggaaagttgatcatg

SEQ ID NO: 31291 - DNA, 201 bp, Homo sapiens
aataatttctctaatatttttctcacatcattaatatattaataagaaaaattgaagcttattgaattgagtcaacacagagaaagattacaaaaataccmcagaatatatgacatgtatcacactgcagtttttctcccattttaaccacagttgaggaggaagaatcctactccgttctttttaaatttctttttcttt

SEQ ID NO: 31292 - DNA, 201 bp, Homo sapiens
aggaatgagaaaaatctttaccgtctacctattttaacttggtgtatttaattttataatttttactacttggagatgtaagttaaatatttcatttcacytaatgacaattaccatttaaatctgcaatttaaatggtagcaatggattaactgtagatcagatcatatgtttaaatcatttttccttttcacacacttt

SEQ ID NO: 31293 - DNA, 201 bp, Homo sapiens
tgtgctttttggccatttgtttatcttccttgcagaaatgtctatttaagtcttttcccatttttatactgggttgtttgatttttgtcattgagttgtargagttctttatacttctgaatattacccctttatcagttatatgcaatattgcaaaaatttcctcccattccatcggctgtctttttactctgttgattg

SEQ ID NO: 31294 - DNA, 201 bp, Homo sapiens
taggatagatttttctaattctgcaaaagacaccattgggattttgatagggattacattaaatggtagattgttcggtagtattgatgtcttaaaaatawtgtcttctaatccatgaacatgggatgtcttaccatttgtgtcttctttaatttcttctcagcaacatttacagttttcagcagatgtctttcacctcct

SEQ ID NO: 31295 - DNA, 201 bp, Homo sapiens
atgacggtgttcatgttaagttttattaattttcctctaatcataaagggaccggaaataaaagaggaatcaaaaactgcttatattcaactgagtaccartaaactgttagtagacagaatatttcagagaagacagctcaagtagcaaatattcattgggatttaggaaattctgatggtgaattacaggaaaaagtgg

SEQ ID NO: 31296 - DNA, 201 bp, Homo sapiens
gttgcagtgagtcgagattgcgccactgcattccagcctgggcaacagagcaagattccatctcaaaaaaaaaaaattaataaaattaaagggaaagatawatatatattactttagagagtcaattaaccaatgtcctttgtttaagtggtgttcatgtaaaatatgagtgcctatttaatatgcttagcactatgctaa

SEQ ID NO: 31297 - DNA, 201 bp, Homo sapiens
gtagattgttcggtagtattgatgtcttaaaaatattgtcttctaatccatgaacatgggatgtcttaccatttgtgtcttctttaatttcttctcagcamcatttacagttttcagcagatgtctttcacctccttggttaagtttattcttagtattttgttcttttttgatgctattatacataaaattgtcttaatt

SEQ ID NO: 31298 - DNA, 201 bp, Homo sapiens
ccttctttgaaccaagtactactgttggcaagaatgaaatgatacagccttttaagcagataatttggtactgttcttgaaaagttcaagtctgcaattakcattttccttacggactttagcctacatatatactgttaaaggagtgtgtgtgtatatacaaacacaacgtatacatatgccacaggttatttattgtag

SEQ ID NO: 31299 - DNA, 201 bp, Homo sapiens
cattccagcctgggcaacagagcaagattccatctcaaaaaaaaaaaattaataaaattaaagggaaagataaatatatattactttagagagtcaattamccaatgtcctttgtttaagtggtgttcatgtaaaatatgagtgcctatttaatatgcttagcactatgctaactaataaatcgcataaccactgtgctgt

SEQ ID NO: 31300 - DNA, 201 bp, Homo sapiens
tgttcggtagtattgatgtcttaaaaatattgtcttctaatccatgaacatgggatgtcttaccatttgtgtcttctttaatttcttctcagcaacatttmcagttttcagcagatgtctttcacctccttggttaagtttattcttagtattttgttcttttttgatgctattatacataaaattgtcttaatttcttct

SEQ ID NO: 31301 - DNA, 201 bp, Homo sapiens
aaaaaattaataaaattaaagggaaagataaatatatattactttagagagtcaattaaccaatgtcctttgtttaagtggtgttcatgtaaaatatgagygcctatttaatatgcttagcactatgctaactaataaatcgcataaccactgtgctgtttttaactgcatgttttaagaatttgcagacagattataata

SEQ ID NO: 31302 - DNA, 201 bp, Homo sapiens
aaaatattgtcttctaatccatgaacatgggatgtcttaccatttgtgtcttctttaatttcttctcagcaacatttacagttttcagcagatgtctttcmcctccttggttaagtttattcttagtattttgttcttttttgatgctattatacataaaattgtcttaatttcttctttggatcgttcattgttagtgta

SEQ ID NO: 31303 - DNA, 201 bp, Homo sapiens
attactttagagagtcaattaaccaatgtcctttgtttaagtggtgttcatgtaaaatatgagtgcctatttaatatgcttagcactatgctaactaatawatcgcataaccactgtgctgtttttaactgcatgttttaagaatttgcagacagattataatataaacctttgacattttcaatccaaaaatcatcatct

SEQ ID NO: 31304 - DNA, 201 bp, Homo sapiens
gaaactattatttatctgtccctaaaaagccacctaacatattattttatgattatcttaagattcaagaacttaaggcaaatgaacatcaacttattacrttaaaaaaagatgtcaatgagacacagaaaaaagtgtctgaaatggagcaactaaagaaacaaataaaagaccaaagcttaactctgagtaaattagaaa

SEQ ID NO: 31305 - DNA, 201 bp, Homo sapiens
tctgtagattgaatgatgtttggcctctcttctatccattgttaatacaatctgtgaaaaattaacaatatctaaatatgatcatctctgtctcaaatttmtatactgtgattctgtcttgatgatagagcttatgaatgtgtgctttttctaatagaaaattcgagagctggaaaattcactgcatgaagctaaagaaag

SEQ ID NO: 31306 - DNA, 201 bp, Homo sapiens
cctgggcgacagagtgagactccatctcaaaaaaaaaaaaaaaaagaaatatgttctcacttactaatgcatcaccttacactgtttattctctctggtcstcgcattcataatcaataaggaaaggtttatttagaggatttgttaggatgcttcctggcttttaacacttttcattcttcctatataaatcttgaataa

SEQ ID NO: 31307 - DNA, 201 bp, Homo sapiens
cagaatataaacaattttaagtggcttttgtatgcctgaaagtgaacattaagagtgtgtgtgtgtgtgtgtgtgtgtgtatttagcagttttactaaggyttctgttggttctcttaatttcatttgttggccttactgtgtttctgtgtgaagattatatttccttttagtttatagttccctagggcccaagagcaaa

SEQ ID NO: 31308 - DNA, 201 bp, Homo sapiens
agatacagataattcatagtcattaagaaaggcagaaagtcttataatttatcgttactgattaatgcgtaaactaacaactcataaaatgtctctttctrctggagaacagtgatcagaatttgacctttgtagcaccttagaccagagctgcagtcagggtttgctttcctgaccatacagaaataaagctgcactttc

SEQ ID NO: 31309 - DNA, 201 bp, Homo sapiens
aactacctttattcatattctgtctgtcatgttccatttgaaaagaaagaatgcttgaacagtacttgagatagctttacgcagtagaacaagtactgaastaagatgcagatctcaatggctatatgaaatcgtggggttagcacctgaccttctaacttataagcatatatgtatgcttatatatatacttattataag

SEQ ID NO: 31310 - DNA, 201 bp, Homo sapiens
tcatggggaaagtaatttttagagctcatgtaataagtgtcttttttaaaaaagtgtatatacatatacacttatttatatacatgcacacgcacacacaygtacataaagatcaaaccgaaagttgtgggtaaaaacacattgaaaattccaaatactaagcaaaacataagatgatatttgcttgtattatagtccact

SEQ ID NO: 31311 - DNA, 201 bp, Homo sapiens
gaagtcttttttttttttttttttttttttgagacggagtcttgctctgttgcccaggctggagtgcagtggtgtgatgatctcggctcactgcaagctcygcctcccgggttcacgccattctcctgccacagcctccaagtagctgggactacaggcgcctgccaccacgcccagctaattttttgtatttttagtaga

SEQ ID NO: 31312 - DNA, 201 bp, Homo sapiens
aactaaaaactgctcgtatgctatcaaaagaacacaaagaaactgttgataaacttagagaaaaaatttcagaaaagacaattcaaatttcagacattcaraaggatttagataaatcaaaagatgaattacagaaaaaggtatgtgttgttttgttcttcttttggaagtaactgtgcccaaaattatttgtggaattaa

SEQ ID NO: 31313 - DNA, 201 bp, Homo sapiens
aagttatatattatatataatatatattataatatatataagtataacatatataagtaatatataagttatatattatatataagtaatatgtaagtaayatatataagtaatatataagtatatatagtaaatacttatataattagaagtattatacttataagtctatagaagtatatatacgagtatatgtactta

SEQ ID NO: 31314 - DNA, 201 bp, Homo sapiens
tgcctcttgaaagaacatagaaaagttgacttgtagtgtattttttgtgtgtgaaaatgaactcattttaccttagggaagggtattttcagagaaccaaraagttgaaaaaaatactgtgtcttaaatagttgatcatcctacattctgacagttttacttttgggaataattactaatttggaatgaaaacacagtgga

SEQ ID NO: 31315 - DNA, 201 bp, Homo sapiens
gtttgtattcactcaatgctgcagaaacattttagtcttgggcgtctgtgcaacaagcatgcatagttttacccattataggtttgtttttaatctttgcrtatgtgtgttttgttttttgcaggtactatatttgcctatggacagactgcttcaggaaaaacatataccatgatgggttcagaagatcatttgggagtt

SEQ ID NO: 31316 - DNA, 201 bp, Homo sapiens
ttcatgtgcttagagctattttcatttaccagaaattaaaaatacgttgcagagtgatacctggccagacataaagactggcaaataatggactagcctcycttcagacctcaatagatacaggaaaacttatgtctatgctgggagtcagaaaccgctttattacaacaactccacatggaatgtgttacttgcattcat

SEQ ID NO: 31317 - DNA, 201 bp, Homo sapiens
caactgtaggctaacaagtgttctgagcacatttaagtaggctcggctaagctctatgttcagtgaattaggtatattaaatacattttcaactgacaatrttttcaatttacaatgggcttattgggatgtaaccccactgaagcttgaggaaaaaaaaaaaaatatatatatatatatatgcagagagagagagagagg

SEQ ID NO: 31318 - DNA, 201 bp, Homo sapiens
tgtgtgaagtatctgtaccaagctgacaaataggtggtttgattcttaatcacttgttttatctgctaactcagactgcctactataaacataaaccagcmctcaaccatgaactacaatacatacttaattgaatttactcaaatttctcatcagactttgtcaatgttgattcatatcatggatattcaaaaaactaaa

SEQ ID NO: 31319 - DNA, 201 bp, Homo sapiens
ttagaaactatcattgatctttttatatctactgataatcctaacttattgtatgattatctcaagatccaagaacttcaggagaaagaacatcaacttcytttttttttttttttttttttttgagacagagtctcgctctgtcgcctggagtgcaacggcatgatctcggctcactgcaatgtctgcctcccgggttca

SEQ ID NO: 31320 - DNA, 201 bp, Homo sapiens
tcatatatcttaaaatatctaattaaatcctctttttgaaagtaacagagttcagacaagtttattaaaatctgtaaaaatcttttttattctcatatttytttatgtgggcctgaactaaatttatagagagatttaattcattcatcaaatattcttctaggtactgtagtgaacaagataagtgggagaaaatgtttt

SEQ ID NO: 31321 - DNA, 201 bp, Homo sapiens
acaacttcgttcttttgtgtgtggctattgttttcccaacaccattttttgaaaagatcatcctgtccccattgagtagtcttggcatccttgttgaagayactgtgaccatatacacaagcattaatttctggtctttctattctgttccaatggtttatatgtctgtctttatgctagcaccacattgttttgattact

SEQ ID NO: 31322 - DNA, 201 bp, Homo sapiens
ctgtaaaaatcttttttattctcatatttctttatgtgggcctgaactaaatttatagagagatttaattcattcatcaaatattcttctaggtactgtaktgaacaagataagtgggagaaaatgtttttgtttcactttatactttttaatcagaaatgcaaaatgtacacaggatatgaacttttccaaggtgctggg

SEQ ID NO: 31323 - DNA, 201 bp, Homo sapiens
catgaaaaccttgaagaaatgaaatctgtaatgaaagaaagagataatctaagaagagtagaggagacactcaaactggagagagaccaactcaaggaaascctgcaagaaaccaaagctagagtgagttgtgttctctctttaccctaccattatattcacatatttgggcaaaaatacagtgttcactgcagcgttgtg

SEQ ID NO: 31324 - DNA, 201 bp, Homo sapiens
aagtgaataatgcagagatttggaagagtaggaatcagaaattaaaatctaatttatttgttttcctggttgtttatttatttatttatttatttttataragacagggtctcactatgttgctgaggctggttttgagctcctgagctcaagtgatcctcctgcctcgatctcctaaagtgctaggattacaggcgtgag

SEQ ID NO: 31325 - DNA, 201 bp, Homo sapiens
ctctacatgtgacaaaattttcatttaccaatttgtttaatttttttctgcaagtatgtgttaagctatgttacaaaaataaaagaagaacaacatgaatscatcaataaatttgaaatggattttattgatgaagtggaaaagcaaaaggaattgctaattaaaatacagcaccttcaacaagattgtgatgtaccatcc

SEQ ID NO: 31326 - DNA, 201 bp, Homo sapiens
ctcctaaagtgctaggattacaggcgtgagctaccatgcctggccctaaaacctaatttgtagctatgaaaaacaaatcctgtctccaaaaattagatgayttttctacttttttaccaatgagttaaggtcactccctataaaacttactgatactattattcattttctgatcattttaacattgcttttgagtgacaa

SEQ ID NO: 31327 - DNA, 201 bp, Homo sapiens
ctaaaaccaaaaacaggaatcccctctccaacattccagattgattaacatctagcttttcttaaattattaaaaataaagggctcattcttgtgagaacrcccttgttttattgtttagcagcctgaactaaacatgttacctactacatgattacagtaacttgaattttacatgtttctctacctgtgctctgaccag

SEQ ID NO: 31328 - DNA, 201 bp, Homo sapiens
ccaaatatctaaatatgcttgacaaggaagtcttttttttttttttttttttttttgagacggagtcttgctctgttgcccaggctggagtgcagtggtgygatgatctcggctcactgcaagctccgcctcccgggttcacgccattctcctgccacagcctccaagtagctgggactacaggcgcctgccaccacgccc

SEQ ID NO: 31329 - DNA, 201 bp, Homo sapiens
acacttcagtcatggggaaagtaatttttagagctcatgtaataagtgtcttttttaaaaaagtgtatatacatatacacttatttatatacatgcacackcacacacacgtacataaagatcaaaccgaaagttgtgggtaaaaacacattgaaaattccaaatactaagcaaaacataagatgatatttgcttgtatta

SEQ ID NO: 31330 - DNA, 201 bp, Homo sapiens
tttagagctcatgtaataagtgtcttttttaaaaaagtgtatatacatatacacttatttatatacatgcacacgcacacacacgtacataaagatcaaaycgaaagttgtgggtaaaaacacattgaaaattccaaatactaagcaaaacataagatgatatttgcttgtattatagtccacttgtttccaaaaatagat

SEQ ID NO: 31331 - DNA, 201 bp, Homo sapiens
aggcatagaattaatggttggtcaaataagcagagggagtaaggtagaaggcagaagtcaagggtgacttccagggaaataagacttgagctgtttgggtytctataatggcttattgtacttggtagtatttcctttattttgaactttggagacaattaaaattatcacctatttgtatattttcctcccacagtgata

SEQ ID NO: 31332 - DNA, 201 bp, Homo sapiens
cttggtagagctcctgaaggtaaaatacaaaagtgtggcggccactgtatgactaggtctccgaagtttttaactctcagagttgccacactgagctccartaattcatcattgcagttcaggttttcctaccccataactggttcctgcaaagggtttctgctctaagttgtaattctctgtatctgcctctctgcctct

SEQ ID NO: 31333 - DNA, 201 bp, Homo sapiens
tgtgtttatggtagttcagacaaaaagtaattttagcatggactagcttggccccaatagggataaaaacaaggaagtgaatttgatagataggatgagaktgtatcaagagacttggatgacttaaaataaaagagagtgaggtctctaggattgcttcccaggtttctctccggaggaactggataaatgctggtggca

SEQ ID NO: 31334 - DNA, 201 bp, Homo sapiens
gaattctttggcagataatacatctccatcttttaggatcagtcaccagtatcttactttgtgcttttggtgacatcatgtttccctgatcatgatgcttrtggtcatgcagcagtgtctgcacattgaagatgaatgtagctatttgttttagtcttcaccatctttataaggtcttttcaagatctatagtatgactga

SEQ ID NO: 31335 - DNA, 201 bp, Homo sapiens
agatctggtagaatgaccacaaagcctggtagaatgaccacaaagccacaaagaagttagggatgagactaatggggcattcatgatgagagcagaaagtmcaatctgcaggaattaggaagtaaaaaagatatcaataatttcagagttagttagccttcaatataaaagagtattgttattccctgtacagaaatacaa

SEQ ID NO: 31336 - DNA, 201 bp, Homo sapiens
acctcttcattgtagacataaggaaacagtaccagagtttttatcaaagtaaagttttctaaacctggagtccccacagatagataaagcatatatggatrgacttcttgtaatctgtaaaatttttgaaattttttatgaacttttttgtgtggatttatttggggggaggggatactggggtttatactttgttttatc

SEQ ID NO: 31337 - DNA, 201 bp, Homo sapiens
tctatgttcagtgaattaggtatattaaatacattttcaactgacaatgttttcaatttacaatgggcttattgggatgtaaccccactgaagcttgaggaaaaaaaaaaaaatatatatatatatatatgcagagagagagagagaggatgtttattaggggaattggtttacacaattagggaggctgagaagtcccac

SEQ ID NO: 31338 - DNA, 201 bp, Homo sapiens
attttcaactgacaatgttttcaatttacaatgggcttattgggatgtaaccccactgaagcttgaggaaaaaaaaaaaaatatatatatatatatatgcrgagagagagagagaggatgtttattaggggaattggtttacacaattagggaggctgagaagtcccaccataggctgtctgcaagctggagagccaggga

SEQ ID NO: 31339 - DNA, 201 bp, Homo sapiens
cattattttactatatatttgttatgtattgtctgctgcttcccacaagaatgtgtttcataagaaactagcactcttaacccaccttatcactctctctytgtctcctgatcctattaatcattacattatgtgtgtgtgtgtgtgtgtgtgtgtgtgtgtgtgtgtgtgtgtagagagagagagagagagactgagatt

SEQ ID NO: 31340 - DNA, 201 bp, Homo sapiens
cagtctagcaataaaaaagagttgtttatactacctcacagctagttaaccaaaacaaatcttgaatgaatagactcatttttctttactgttcttatctmtaaactagtttctttaaattgaaagaaactactttcatctaactcagtctaccatctaactcagtcctcactctgcaaggaaattaggcatattctgtgt

SEQ ID NO: 31341 - DNA, 201 bp, Homo sapiens
gcacctgtgtggcaaacattgtgctgatggattcacaggcttagtcgttcctcctcaccacatccctgaggtaggtgctattttaccttcattttacagawgagaaacataagaggttcagagatttaagtgatttactcacttagctagtgagagagagatatgggacttgctctagtcttactgacgccacagtctttg

SEQ ID NO: 31342 - DNA, 201 bp, Homo sapiens
cactcttaacccaccttatcactctctctctgtctcctgatcctattaatcattacattatgtgtgtgtgtgtgtgtgtgtgtgtgtgtgtgtgtgtgtgkgtagagagagagagagagagactgagatttttctgtattacccatctcctctaagagaatagcaactctacaacaacaggtactgtgtctattctattta

SEQ ID NO: 31343 - DNA, 201 bp, Homo sapiens
tttcataagtttccaaaaggttttaagaattttaagcaagacagacataatcagagttgcattttgaatccatccctttgtttaccagtactgggggagarggtgagaatgaaagccttcacaagaaaacacttttgaggcggcagaaggtcactgaagctccatttaagagttgaatcctcaaagatggactttctgtca

SEQ ID NO: 31344 - DNA, 201 bp, Homo sapiens
tggaaaactgacaataatgtcatttatcaagttgatggaagtaaatccttcaattttggtaagcttataatagcatcaaaagttaccttgttatccttttsctattaaaagtacaaaaggcttatcaataatattagatttgtcactaaagattagactaagccttctataaactgcttcactggaaacaaaattgtttat

SEQ ID NO: 31345 - DNA, 201 bp, Homo sapiens
tgctttgtgactaagtgttttggctattctttttgtctagactactgtttcccttgatctttttgggaccagcttcctcttctcaggtcattcagatcgcwgcttaatgacaagccttccactgctatccagtcctatgaacctaaagctactggccccttttccagctctatttaaataatctctgttacacttatcaca

SEQ ID NO: 31346 - DNA, 201 bp, Homo sapiens
tggagcataataagcagccacttcttttcagtaatatttgtgaaatgaaagagaggtccagctcttaaagatgccacagtaaagtcatggtattgctacascatagtacagctagcatgcatgactagcccaacaaaataagtgctataaatgtaagtcgtatctataagtcatgtttataaagatttctggttatgcagt

SEQ ID NO: 31347 - DNA, 201 bp, Homo sapiens
ccaacaaaataagtgctataaatgtaagtcgtatctataagtcatgtttataaagatttctggttatgcagttcaaggagcagttcatctgaaatctggckgggaggaaggataaagtaggcaaagctatgctgaggagataatctttgtgcctggttcttgaataaagaataaggacagaatagaacattagaactaact

SEQ ID NO: 31348 - DNA, 201 bp, Homo sapiens
tgtcctggtggctggggcaggtgcttcacccagcagttcccaatacagtcgagatagcttcctgactgcagcaaagaggcattgaagctgagacagggccscttcagtctattgtgggatggaggactgcaagcctgacccagtggctcagacaggttcatctcttggcagttctctgtgtgggtgagagcagggaggctg

SEQ ID NO: 31349 - DNA, 201 bp, Homo sapiens
atcagtgtatttttgtgcatttgcaatgtttttctcaatagaaagaacttgcaactacatacaagcaaatggaaaatgatattcagttatatcaaagccarttggaggcaaaaaagaaaatgcaagttgatctggagaaagaattacaatctgcttttaatgagataacaaaactcacctcccttatagatggcaaagttc

SEQ ID NO: 31350 - DNA, 201 bp, Homo sapiens
ccatttctttgatagatataggcctaatcgaactgcctttcttgtgtattggtagattgtgtctttcaaagaattggtccatttcatttaaattatcaaawttgtgggttgttcataattgtgggttgtaataattgagttgttcctaatattttttaatgtccatgggctctatagtgatgtcctgtcatccatttctga

SEQ ID NO: 31351 - DNA, 201 bp, Homo sapiens
ttcaaagatttttttttacctttgatttttctgaagtttgaatatgatatgcttagatgttgttttttgtttttgggggttttttttcgggggtttttttkgtttttttttttttttatatttgtcccgtttagcattatgagttttctggattcctggtttggtgtacgttgttaatctgtggaaattcttagtcgttat

SEQ ID NO: 31352 - DNA, 201 bp, Homo sapiens
ataaatttatatatatttcattaaatctgtcaataaccctatgagatagggactgttagtatatttgccattttagagataaagtcacatttgtggaaagytgatcatgtcatcctttgagtaaatataaggaagttaaggacaggctcccattaaaaatcagtaagttttaggccagggcacagtggctcatccctgtga

SEQ ID NO: 31353 - DNA, 201 bp, Homo sapiens
ggacctgtgacagactggcagaagttgaagaaaaactaaaggaaaaggtgaatttttaaagttatttccctggccattttttctaactaaacttttttttkggtaatttttatttctgtagacctaaatccagaaatagcacatacctcccaaatgaacatatttcaatgctagtattttggacaattttaacttacactg

SEQ ID NO: 31354 - DNA, 201 bp, Homo sapiens
gttaaataattttacaaataactaactctgccatgagtgctattaaaaaagaaacaaaaacaaaaaggacattataaaagggttatattatgaaagagagmgatccaacgttatctaggtgttaggggtggagggttggttgatcaggaagccaacaaacaggcatacctcgttttattgcacttatctttctactataca

SEQ ID NO: 31355 - DNA, 201 bp, Homo sapiens; identical to SEQ ID NO: 4949

SEQ ID NO: 31356 - DNA, 201 bp, Homo sapiens
cattattttgtcaacagtagaaccaaggggtttcttagtttgttttacatacattttacctctttaagcacatgagcatttagcattaggttttcacaatyggatgcttcctggtgtttttatataattttttttcttctagtttcctgatagggaatttctcttacgtgtatcttacatggaaatatacaatgaaaccat

SEQ ID NO: 31357 - DNA, 201 bp, Homo sapiens
acagaagaagttgtatatacatcagaaatggctttgaaatggattacaaagggagaaagtaagactttatgctgtatttctttagaacacttgtaaaaacyatcttttcaatcaagcacgtttggacctcaaatcatacttttttaagttaaaataaaaattattgtgtttctatggattttattatatatgcagctgaaa

SEQ ID NO: 31358 - DNA, 201 bp, Homo sapiens
atgagactaatggggcattcatgatgagagcagaaagtacaatctgcaggaattaggaagtaaaaaagatatcaataatttcagagttagttagccttcartataaaagagtattgttattccctgtacagaaatacaagatattcagattaattaccaacaatcagtgagttattttccctattaacattgaggtttgta

SEQ ID NO: 31359 - DNA, 201 bp, Homo sapiens
gactaatggggcattcatgatgagagcagaaagtacaatctgcaggaattaggaagtaaaaaagatatcaataatttcagagttagttagccttcaatatraaagagtattgttattccctgtacagaaatacaagatattcagattaattaccaacaatcagtgagttattttccctattaacattgaggtttgtaatga

SEQ ID NO: 31360 - DNA, 201 bp, Homo sapiens
tggtagttagagtgaagtaaagagtcaagagtttgattttttttttaagcaatatccttagactaataaaattttaaactaggcttaataagaattctacsaagtcaatggttttcaaaaatagaaactagttcccttgttttattatgtttgaatacagatctatatgacataattttgatttcttcttctttaggctaa

SEQ ID NO: 31361 - DNA, 201 bp, Homo sapiens
tcgggaggctgaggcaggacaatcgcttgaatccaggaggtggaggttgcagtgagtcgagattgcgccactgcattccagcctgggcaacagagcaagaytccatctcaaaaaaaaaaaattaataaaattaaagggaaagataaatatatattactttagagagtcaattaaccaatgtcctttgtttaagtggtgttc

SEQ ID NO: 31362 - DNA, 201 bp, Homo sapiens
aacctttgacattttcaatccaaaaatcatcatctaaatgagggaaataacatgtctgtagattgaatgatgtttggcctctcttctatccattgttaatrcaatctgtgaaaaattaacaatatctaaatatgatcatctctgtctcaaatttctatactgtgattctgtcttgatgatagagcttatgaatgtgtgctt

SEQ ID NO: 31363 - DNA, 201 bp, Homo sapiens
atccaaattggcatatttaaatttgctgttctgctccagtgtcttttctctccagttaaaattaggaacacgtcaagaatgcctgctttattcattatttmacattgttctaaaaattctggtctattcagtgagacatgagcagagaggcaaaagaaaaaattaaatttgttttttcaacaattgttatagctagaaact

SEQ ID NO: 31364 - DNA, 201 bp, Homo sapiens
taaagttttagaatgttgtaattttttaatattacaaataattgatcacagtttttattcattcaacaaatatttgctgagcaccagctatgtgtcactcrctgttctagaggccaatgaaaaaacaaagaccatgccatcaaggaacttacattctagttgaaggagacagaatattaattaaaaatgtaaaacatagaa

SEQ ID NO: 31365 - DNA, 201 bp, Homo sapiens
ggacagcagtaagtggagaggattgctattgctgcagtcagggtgaaagagcttggtgatcaggatcaggatatgttagtggaattggttgagggggattytagaggcatagaattaatggttggtcaaataagcagagggagtaaggtagaaggcagaagtcaagggtgacttccagggaaataagacttgagctgtttg

SEQ ID NO: 31366 - DNA, 201 bp, Homo sapiens
ttctattgttttctaatgtgattatagattattataaaaacttttaaatacctgtgtaggcaatatggagctgtttgctgaactagtgtaatgtcatacartaataccctaaatttgtaccagcaatagtaatttcagtctctgtctccctttaccaataagttcacgtattaggttacatttggtcgtgacttatttatg

SEQ ID NO: 31367 - DNA, 201 bp, Homo sapiens
ccccgccagattatcagtcctgatatgttcaccttaaatcatttgtctcttctagagctttatacaaatagaatcatacagtatgtagtctcttatgtttsactttctacactcccttttactgccaaggaatagttcattgtattaatacgccataatttttttattctttttcctattgatggaaatttgggttccgtt

SEQ ID NO: 31368 - DNA, 201 bp, Homo sapiens
atttaagattaataagggtgggcatggtggttcatgcctttaatcccagcactttgggaggccaaggcaggcagatcacctgaggtcaggaattcaatacyagcctggccaacgtggtgaaaccccgtctctactaaaagtacaaaaattagctaggcgtggtggcacacacctgtagtcccagctactcgggaggctgag

SEQ ID NO: 31369 - DNA, 201 bp, Homo sapiens
aaaaaggtgattcaaggacaattaaaaattaaattacctgtttggcaacattggatctttatacaatttaccaaaactttctagatttgctctgtaatttrgaattggaaggaaagattactgatcttcagaaagaactaaataaagaagttgaagaaaatgaagctttgcgggaagaagtcattttgctttcagaattga

SEQ ID NO: 31370 - DNA, 201 bp, Homo sapiens
actggcagtgggggtgggcaagggtggaaacactgagattagctcagtgccagatgatgatatttcggaccaggtagctgaagcgtaagttgtgacaaacttttcatagtctgaaattttctcaaggtggccctgacagaattttcaggtgagaagctgagcagcatggctccagagtctgcacctggataactggaagga

SEQ ID NO: 31371 - DNA, 201 bp, Homo sapiens
gagctcagagctagataaccaaaacaaatctgaatgagtagactccattttacacactgatttatgtcaactaatttctttaacttgagagaaactaatawtcatgtggttaaaatattgttatgaaataatataaaatgaaaggtgaatctgttttccaactcagtcctttccctccaaagaaagctaggtgtattctgt

SEQ ID NO: 31372 - DNA, 201 bp, Homo sapiens
aagtatcaacccattactcaatgagtttttcagtcctcggtatttattttccctaattcaacctctgaggaagccacagctaatggaaacgagttacagaragagagaaacaggagaaaagcctaaactcagattttctaaggcgcacaacaggcttgtcacgtttctggactggacagcgaatttcaactcttgctgttg

SEQ ID NO: 31373 - DNA, 201 bp, Homo sapiens
gttttaacttacaattatatttcttagtttactttaaaatattaagaaatgatattaaaaggaagaaaagcaagagtccactaggtattgccctctttttwttttatatatatatatatatatatataaataaaatatttggatcaaaactttcctaatgtttaaacaatttgacgcttatttttcacacaggaaattctc

SEQ ID NO: 31374 - DNA, 201 bp, Homo sapiens
ccctctcctgtttagcagtggtcacgccgcccgccttgcgtcccccgcgctgctccgcacgtggaatggcccatgacgtcacgaggccacggctcaatcaratgcggcgtttgggaaattttaaatttaaaggcggggcggcctgtgagccctgaagtgccggccgcggagggtcctggccattttcctgggaccagttca

SEQ ID NO: 31375 - DNA, 201 bp, Homo sapiens
tgtataacttattttagtagactttaatcttgttttaatttaacaataaaaaaccaaaccctaacctctttagttttctcatccaagactgtgatatttcrtataattttaacttttaataatttagctttaatactcttggcatattcagtgatctacttgatgattttcctcatgttacgtgatgctctgtcatttgtg

SEQ ID NO: 31376 - DNA, 201 bp, Homo sapiens
actcttaacccaccttatcactctctctctgtctcctgatcctattaatcattacattatgtgtgtgtgtgtgtgtgtgtgtgtgtgtgtgtgtgtgtgtrtagagagagagagagagagactgagatttttctgtattacccatctcctctaagagaatagcaactctacaacaacaggtactgtgtctattctatttac

SEQ ID NO: 31377 - DNA, 201 bp, Homo sapiens
ttcatataattttaacttttaataatttagctttaatactcttggcatattcagtgatctacttgatgattttcctcatgttacgtgatgctctgtcattygtgttccatctgttccaaccctccagcctacccacttactctaagaatcttcttggaaagaagtctctaaagagtcatctctgtctctttagaggtggct

SEQ ID NO: 31378 - DNA, 201 bp, Homo sapiens
ctcttaacccaccttatcactctctctctgtctcctgatcctattaatcattacattatgtgtgtgtgtgtgtgtgtgtgtgtgtgtgtgtgtgtgtgtgkagagagagagagagagagactgagatttttctgtattacccatctcctctaagagaatagcaactctacaacaacaggtactgtgtctattctatttact

SEQ ID NO: 31379 - DNA, 201 bp, Homo sapiens
gcaaagtgcaaaatagtatgtatggactgttactattgatatcagtgaagaaggaaggaaataaatacatacgaacttgtatttttaaaaatctctaaagaaaaaaactaataacagtggtttcctggtagaggtataggaactggttgaatggggataaaagtggaagggagctttttcaaagtgtactttttttttaaa

SEQ ID NO: 31380 - DNA, 201 bp, Homo sapiens
atttgtatcttaccttcataatttttgccacacccaacactattttactgaaattgacttgatatttttaaaataactcactttttgtacttaatttattrtaaaaggaaactttaatattagtcctatcaatgggaaactattattacttgccacaaatagaaggtaacaaaaaaaattgtgtgtctgtctgtataacaa

SEQ ID NO: 31381 - DNA, 201 bp, Homo sapiens
tttattgtaagtctgagaaattattgattatggtaactgcattttggtgttctacagttagagtatattttatttcagtgaaattaaaattcttatagttyatatacaaatttaatattttattcttttatgctactttaaggttttaaaacttagccacatttattattaacataatccaatattgcattctataggttt

SEQ ID NO: 31382 - DNA, 201 bp, Homo sapiens
aagtgtttttttaatatattatccaggtgcagtgacatccacctgtggtctcagctatgtgggaggcttagctgggaggattacttgagcctgggagatcratactgcagtgagccatgatcatgccactgcacaccagcctaggcaacagagtgaggcactgcctcaaaaaaaaaaaaaaaaagaaagaaagaaaagatg

SEQ ID NO: 31383 - DNA, 201 bp, Homo sapiens
atagagggttcagaaatatacccaattaagtatgagaatttagtacaggtgtatgataacagtaacattcaattcagtgggaaaaaaaaatggtttacttkgccaggtgtgtgagtctgtaatcccagtactttgggaggccaaggttggaggattacttgagcctaggagtttaagataagcttggacaacatagtgaga

SEQ ID NO: 31384 - DNA, 201 bp, Homo sapiens
taatgagaactagatcactagtatacagtgttttgatttgtagggcattacagacctcagtcagctgctacagataaaatagaggaaagatgaaatccatytaccaatatagtaatttaaagaagcaaaaggaaagttggtcaatcttcaatgaccaaagaaaatagtctagcagataataaaatacatgctactatcatt

SEQ ID NO: 31385 - DNA, 201 bp, Homo sapiens
gcatatctaaattgccagcattactactcttgtgctttggggccattattaattaaaataagggttacttggacacaagtactgcaatacagcagcaatcrgataatcagggtggctatcaagtgaacaagtagtgtatgctggacaagaggatgatttacatcccaggcaggactgagcaggatgactcaaaatttcact

SEQ ID NO: 31386 - DNA, 201 bp, Homo sapiens
tagtttcgtctacaggttccaaactttttaaggatggggtggaggatgacgttcgctagcttttggcagataatagtattctggtattccaggaccaccaytctctgcccactcctgggagcccctcccttcggccctctcctccgactctctgctgggccctttaaatcccctctcctgtttagcagtggtcacgccgcc

SEQ ID NO: 31387 - DNA, 201 bp, Homo sapiens
cttgcttggcagctgcctcaggggaggccattattatttcctcaggcaatgcagggttaacccttcagacaaaggtggaaaggccattaccaaccccaatraggttggagaggccactacagctggtaaaaaaaaaaactcatcagaatgtaggaactggccaggcatggtggctcacacctgtaatcccagcactttggg

SEQ ID NO: 31388 - DNA, 201 bp, Homo sapiens
agctaggatgtggttcattaattgactgggtaagtatttgtcgagtgtttaatgtggcaggcacactcctaggttatagaaatgcaatgagaacaaggtgracaaaacccctaaaatccctctgatccatttgtagtgaaagaaagtagctgataaataagcaatcaaatgaacaagaaaacattaaatagtggtaaatgc

SEQ ID NO: 31389 - DNA, 201 bp, Homo sapiens
aggttgaatgaaaaatttcaagaaagtcaggaagagataaaatctctaaccaaggaaagagacaaccttaaaacgataaaagaagcccttgaagttaaacwtgaccagctgaaagaacatattagagaaactttggctaaagtaagtttcgtattttcctcccattttaacaagtgtcttataagaatcaaggcttgtgtt

SEQ ID NO: 31390 - DNA, 201 bp, Homo sapiens
catattagagaaactttggctaaagtaagtttcgtattttcctcccattttaacaagtgtcttataagaatcaaggcttgtgtttgtgttatagttataaygtttgtattataattatgttaccagtttttttaatgtctcttaatcatgaaatgactagaaacagaacaattaaaaattgctcttgaataccaagaaggt

SEQ ID NO: 31391 - DNA, 201 bp, Homo sapiens
atgcctaaacagtagcatgggagacatggatacagatcgaatattcagatataccatgtattaaaaatgttctttcagtagtttgaattttattatttcamattatctgccctaaggatttatttttatctatcttacagaatttggttgatcttgcaggcagtgaaagagctgctcaaacaggcgctgcaggtaattaaa

SEQ ID NO: 31392 - DNA, 201 bp, Homo sapiens
attttgtttaaactcaatcattaagtaaaggtaacgtgcctttatatcattacatttcttgatttcttctaaccataaaggatctggaaatacaacaggamctaaaaactgctcgtatgctatcaaaagaacacaaagaaactgttgataaacttagagaaaaaatttcagaaaagacaattcaaatttcagacattcaaa

SEQ ID NO: 31393 - DNA, 201 bp, Homo sapiens
tgctcttttggcttaggattgacttggcaatgcgggctcttttttggttccatatgaaccttaaagtagttttttccagttctgtgaagaaaagtcattgrtagctgatggggatggcaatgaatctataaattaccttgggcagtatggccattttcacgatattgattcttcctacccatgagcatggaatgttcttcc

SEQ ID NO: 31394 - DNA, 201 bp, Homo sapiens
attgagagtttttagcatgaagtgttgttgaattttgttaaaggccttttctgcatctattgagataatcatgtggtttttgtctttggttctgtttatakgctggattacgtttattgatttttgtatgttaaaccagccttgcatcccagagatgaagcccacttgatcatggtggataagctttttgatgtgctgctg

SEQ ID NO: 31395 - DNA, 201 bp, Homo sapiens
taaagttagaaaacactttaaaatgataggtaaggaaataaagacaatctgattatgtgcctttactattttccatgcagaccttactttctagaatacaragagattagaaaataaaacatcaaaggtagagttaaacaagctgagttagggaaaagtgacaataagagtactactatattgcctttccacagtcaaatt

SEQ ID NO: 31396 - DNA, 201 bp, Homo sapiens
caggctttggtttcaggatgatgctggcctcataaaatgagttagggaggattcccttgttttgtattgattagaatagtttcagaaggaatggtaccagytcctcctagtacctctggtagaattcggctgtgaatccatctggtcctgggcttcttttggttggtaggctgttaattattgcctcaatttcagagcctg

SEQ ID NO: 31397 - DNA, 201 bp, Homo sapiens
aataaaacatcaaaggtagagttaaacaagctgagttagggaaaagtgacaataagagtactactatattgcctttccacagtcaaatttttgctgaatgkaaataacttctctttttgcagagaaagctttttttcctaaaaattgcttcagtgaatcatatgttgctaacatccctaaattttatttcttttccataga

SEQ ID NO: 31398 - DNA, 201 bp, Homo sapiens
gttaactaaactaaatgtgggaggaaatctacaaattgtctgcttagtcttgtcagtatcatcaaattcctagctaaaatgtcgtaggaaaaattcagagratctttcttcctgttatgtcatggttgccatctcctaaaatttaaatgtcagggctatagggttataggaattgatgttttttctaaccactaatgcagt

SEQ ID NO: 31399 - DNA, 201 bp, Homo sapiens
tatgtgtccagcaatttatccatttcttctagattttctagtttatttgcatagaggtgtttatagtattctctgatggtagtttgtatttctgtgggatyggtgatgatatcccctttatcattttttattgggtctatttgattcttctctcttttcttctttattagtcttgctagcggtctatcaattttgttggtc

SEQ ID NO: 31400 - DNA, 201 bp, Homo sapiens
tccatttcttctagattttctagtttatttgcatagaggtgtttatagtattctctgatggtagtttgtatttctgtgggatcggtgatgatatccccttyatcattttttattgggtctatttgattcttctctcttttcttctttattagtcttgctagcggtctatcaattttgttggtcttttcaaaaaaccagctc

SEQ ID NO: 31401 - DNA, 201 bp, Homo sapiens
gtagactctggtgaaagaaaaacaacatagtgaacaaaattcttactttgttggtgtgattttttgtttgtttttaattgagtaggaatttatttattcartagactttttggggtgtgagggtgtcatggataagagaatgacctctggagctagacttcctggatttgaatctgtcatttcctgactcttggccttgga

SEQ ID NO: 31402 - DNA, 201 bp, Homo sapiens
gtctgctagcttttgaatgtgtttgatcttgcttttctagttcttttaattgtgatgttagggtgtcaattttagatctttcctgctttctcttgtgggcrtttagtgctataagtttccctctacacactgctttaaatgtgtcccagagattctggtatgttgtgtctttgttctcattggtttcaaagaacatcttta

SEQ ID NO: 31403 - DNA, 201 bp, Homo sapiens
tttaaatactgtgtatttcatatgtgattacaatggagactatgatttaaaataagtaattctaaaaatacaaaaaaactagctgtgcgtggttgcaggcrcctgtaatcccggctacttgggaggctgaggcaggagaatcgcttgaacctgggaggcggagcttgcagtgagccaagacccgttgcactccagcctggg

SEQ ID NO: 31404 - DNA, 201 bp, Homo sapiens
tgattatggtaactgcattttggtgttctacagttagagtatattttatttcagtgaaattaaaattcttatagttcatatacaaatttaatattttattyttttatgctactttaaggttttaaaacttagccacatttattattaacataatccaatattgcattctataggtttctttagagacgcgggctcaggcaa

SEQ ID NO: 31405 - DNA, 201 bp, Homo sapiens
tatagtcaccttgctgtacaatagagctgttgaaatttattcctgctatctaactgtcattatgtcatctgaccaagatttccccattttcttctccctgmaaaacaccccagcctccaataaccaccattatactttgtacttctaagagatcagctttttaagattctgcatgtgagtgagatcatgcagtatttgtct

SEQ ID NO: 31406 - DNA, 201 bp, Homo sapiens
taatgtaagcttttttaattttttttaaatgtacagataacattttatgtgtttattgtatacaacatgatgtatgatgttttgaagtatatatacattgkggaatggttaaatctagctaacaaatgtactacctcacatagttattgtttttgtggtgatagcacatagtatccacaaattttatgttttttaagaata

SEQ ID NO: 31407 - DNA, 201 bp, Homo sapiens
tgagtgagatcatgcagtatttgtctttctgttcctggtttataatgtcctttgggttcatccatattgttgcaaatggtaggatttcttttttttttttwaaatagctgaagaatattccattgtgactttataccaaattttctttatccattcttctgttggtagactcttaggttggttccatatcttggctgttgt

SEQ ID NO: 31408 - DNA, 201 bp, Homo sapiens
atggtaggatttctttttttttttttaaatagctgaagaatattccattgtgactttataccaaattttctttatccattcttctgttggtagactcttargttggttccatatcttggctgttgtggaaagtgctgcagtaaatatgggaatgcagatatttcttgaacatactcatttaagttcctttgggtacatgcc

SEQ ID NO: 31409 - DNA, 201 bp, Homo sapiens
tttctttgataggagactttttattactgattcaagtctcctttctcattactggcctgttcaggttttctatttattcataattcagtcctggtaggtartgtggtagaggaattcatttcttctaggtttttcaatttattggcatataattgttctttgtatttctgtggtatcaattgtaatgtctccttttttatt

SEQ ID NO: 31410 - DNA, 201 bp, Homo sapiens
tttattataggtttttttccttcgtggttaccatcaggcttacaagaaaaagtcttacagttatgcaggttattttaaactgataacagattatcattgaktactaaacaaacaaacaaactccacactttatctcctcccactttctgaatatttgattttctaacttttgatgttacaactgttttccttcagtacttt

SEQ ID NO: 31411 - DNA, 201 bp, Homo sapiens
gtatgtttctaaataattaaaacattagaatagctggagaagctaattttgtacgttttgtttttccttctccatctaagagagttatgtgaaaattagtrtaactaatactaaatagttataatggaatttatagaaacagatcactcattttctaagtataaaatattaggctacacgttaagagaacttaatccagaa

SEQ ID NO: 31412 - DNA, 201 bp, Homo sapiens
attaatactcatacacatattatgtctaaaagttacaaataatcttgtaactaatttaagaagaagatttaagaaatagaagtaacatacaatggagttgstgttttatagagagagagctatgagagggtgacatttgagtaaacactggaatcaatgggaaggagggaaacatgtatatctggagtgaaagccttccat

SEQ ID NO: 31413 - DNA, 201 bp, Homo sapiens
attacaggtgtgagccactgctctaggccctttacttttaattcgacacaaaatttaaggttacttaaaagattatgtaataaaaacatcctgttcaaaamcagttttgcagtatctagtccatgttaaactaaaaatataagtctatgtgtatgtagcaaaatatgttccaaaacctacattttggggaaaggtttagct

SEQ ID NO: 31414 - DNA, 201 bp, Homo sapiens
tgggaatatagtaacatgagatgcttaaatagtatgttttagagggagaatggaaaatgtcaagtatcaccatactcgaggaatgagaaaaatctttaccrtctacctattttaacttggtgtatttaattttataatttttactacttggagatgtaagttaaatatttcatttcacctaatgacaattaccatttaaat

SEQ ID NO: 31415 - DNA, 201 bp, Homo sapiens
aggctcggctaagctctatgttcagtgaattaggtatattaaatacattttcaactgacaatgttttcaatttacaatgggcttattgggatgtaaccccmctgaagcttgaggaaaaaaaaaaaaatatatatatatatatatgcagagagagagagagaggatgtttattaggggaattggtttacacaattagggagg

SEQ ID NO: 31416 - DNA, 201 bp, Homo sapiens
catgggagacatggatacagatcgaatattcagatataccatgtattaaaaatgttctttcagtagtttgaattttattatttcaaattatctgccctaargatttatttttatctatcttacagaatttggttgatcttgcaggcagtgaaagagctgctcaaacaggcgctgcaggtaattaaaactcatgaaatatgt

SEQ ID NO: 31417 - DNA, 201 bp, Homo sapiens
tgtgattttctgataaaagtttaacatagaaatcagcatctgtatctgcttaatttttattttagtctacaatagcatcaattaaaaaatgaaaattatayaattgatgggattgtacagcaggaaagcccatgagaattccataaaaaccatttaaactttcaaaataaggaaattaagaaagataatgtggtacaaaat

SEQ ID NO: 31418 - DNA, 201 bp, Homo sapiens
gtgtccaccaataataaggcactatctgtataatggaaaactaagcataagaatggggtattctttttgtgatattgatttagaaagatgtccaagtggtrtgaaaggagaaggctatgggtgaggctaccagcagaaaattttactttactcttctaatttaggaggttgtataatggttgtttttaactgtgagtgtat

SEQ ID NO: 31419 - DNA, 201 bp, Homo sapiens
agtcatagacaagcctggccagctactttagatgggcctcatgtgctttaataaacttttttttttaagagcagttttaggttcacagcaaaattgagcasaaagtacagagagttctcttataccccatctccacaaacacaatctcccctatcaacagcccacatcagggtggcacatttggcacaatcgatgaaccta

SEQ ID NO: 31420 - DNA, 201 bp, Homo sapiens
tgaattaggtatattaaatacattttcaactgacaatgttttcaatttacaatgggcttattgggatgtaaccccactgaagcttgaggaaaaaaaaaaawatatatatatatatatatgcagagagagagagagaggatgtttattaggggaattggtttacacaattagggaggctgagaagtcccaccataggctgtc

SEQ ID NO: 31421 - DNA, 201 bp, Homo sapiens
tcctcccactttctgaatatttgattttctaacttttgatgttacaactgttttccttcagtacttttactatatcattgcactccctcctggcctgtgarattcctctttgttgttgttgttgttgtttaattatactttaagttctggggtacatgtgcataacatacagatttgttacataggtatacatgtgccatg

SEQ ID NO: 31422 - DNA, 201 bp, Homo sapiens
agtgggaatatagtaacatgagatgcttaaatagtatgttttagagggagaatggaaaatgtcaagtatcaccatactcgaggaatgagaaaaatctttaycgtctacctattttaacttggtgtatttaattttataatttttactacttggagatgtaagttaaatatttcatttcacctaatgacaattaccatttaa

SEQ ID NO: 31423 - DNA, 201 bp, Homo sapiens
ggtgaaaagtaataatattgtaaaggcactgcatgaaacaaccctaatccaaacctagattccaaatcagaacttattaaaaagtacactaatgtagagcygatggatactttatgggaagaaaaaactttataagaattaatacatttctgtacttaactgactgaaaacaaaaatctactaaacgtgtatttttcaagg

SEQ ID NO: 31424 - DNA, 201 bp, Homo sapiens
gaattaatacatttctgtacttaactgactgaaaacaaaaatctactaaacgtgtatttttcaaggtttgattaccactttttaaatctctcctccaagtrgtgcatactaatttgctattgacattattgtagctttattaacagatgatatagctacttggtggggtcatgctgaggggtttttttttatttgtttgat

SEQ ID NO: 31425 - DNA, 201 bp, Homo sapiens
agtagttgtaatgatcagtgtatttttgtgcatttgcaatgtttttctcaatagaaagaacttgcaactacatacaagcaaatggaaaatgatattcagtwatatcaaagccagttggaggcaaaaaagaaaatgcaagttgatctggagaaagaattacaatctgcttttaatgagataacaaaactcacctcccttata

SEQ ID NO: 31426 - DNA, 201 bp, Homo sapiens
gtctcttaatcatgaaatgactagaaacagaacaattaaaaattgctcttgaataccaagaaggtattgaaacagagagaagatgtttcagagaaaagaaytgttttcttaaatattcaaaaaataatttagaaaaaataattctaaattacaagaaagggtgaaaccaaatatgagattgttttattttcttttttaaac

SEQ ID NO: 31427 - DNA, 201 bp, Homo sapiens
cgaagtgggagatcacttgagcccaggagttcaagaccagcctgggcaacatagtgagacctggtctgtacaaaatatacaaaaataagcctggcaggtaytgccagctacttgggtaactgaggtggcaggattgcttgagcctgggaggttgaggctgccatgagccgagatcatgccattgcactccagcctgggcaa

SEQ ID NO: 31428 - DNA, 201 bp, Homo sapiens
gcactcttaacccaccttatcactctctctctgtctcctgatcctattaatcattacattatgtgtgtgtgtgtgtgtgtgtgtgtgtgtgtgtgtgtgtrtgtagagagagagagagagagactgagatttttctgtattacccatctcctctaagagaatagcaactctacaacaacaggtactgtgtctattctattt

SEQ ID NO: 31429 - DNA, 201 bp, Homo sapiens
tcatgaaatgactagaaacagaacaattaaaaattgctcttgaataccaagaaggtattgaaacagagagaagatgtttcagagaaaagaactgttttctwaaatattcaaaaaataatttagaaaaaataattctaaattacaagaaagggtgaaaccaaatatgagattgttttattttcttttttaaacctgttcctt

SEQ ID NO: 31430 - DNA, 201 bp, Homo sapiens
gcagtagtatatagtcaagatcttaaatattaaactgggatattttttcacaattttatagctctagatgattttagttgatataagatcttggcattaamtaacattgaatctgatgatgatgtcatttaatcgcttcagtttgctttcagtatacctgattacttatatatgtttggttccagtttttaatactttttt

SEQ ID NO: 31431 - DNA, 201 bp, Homo sapiens
ctctctctgcccttatctttcacagtgattaaactgttaatatacaagatatgggttatttaaattatgtaattatttaaatattacttaagtggtacttytatttttatttttttcatggaccataccacttaagatacttcttaaataacaattttaaatgattaaacattacttaaattattcattgattaagttttt

SEQ ID NO: 31432 - DNA, 201 bp, Homo sapiens
cacacctgtaatcccagctactcaggagactgagacaggagaatctcttgaacccaggaggcagaagttgcagtgaactgagattgcgccactgcactccmacctgggcaacagagtgagatgccgtctcaaaaaaaaaaaaattatgatcataatctcctgatagtaaccttggtattttatgaatgtcctaagatccca

SEQ ID NO: 31433 - DNA, 201 bp, Homo sapiens
tctgaagtagaaaggctgaggaaagaggtaaacacatttataagcacttatcccttattttgaaataaaaacctttgcgataatagtgccttaaatatttyggtatagtttattttaaactagcagacaagagagatactgtaaacgttttgactagttagaaatagaaatgaatatagttcatcttctaatttgttctta

SEQ ID NO: 31434 - DNA, 201 bp, Homo sapiens
ttttttttgctgtcataatttttaaattttatttttaattgtttgttgttgatgtctgccaatattttcacacttaggttttctatgtttaggggtgatayaatgtgtataagtttaaataaatatttggagaagttcactgtggatcatagtagaatgcgaccatttgtattgttttaattttataagttttggggattg

SEQ ID NO: 31435 - DNA, 201 bp, Homo sapiens
tggtatagtttattttaaactagcagacaagagagatactgtaaacgttttgactagttagaaatagaaatgaatatagttcatcttctaatttgttcttwtgctactagattaaaaaatatattttttcaaggtgtatttaacagaatacttagtaatataatccatgtagcagccatttctgtagtcctcaaatgttgc

SEQ ID NO: 31436 - DNA, 201 bp, Homo sapiens
gtctttcatggtaatgaaactaccaaaaatgtgtatgaagaaatagcagcaccaatcatcgattctgccatacaaggctacaatggtttgtattcactcartgctgcagaaacattttagtcttgggcgtctgtgcaacaagcatgcatagttttacccattataggtttgtttttaatctttgcgtatgtgtgttttgtt

SEQ ID NO: 31437 - DNA, 201 bp, Homo sapiens
ttaattagtctctttgcttttttactttatctcatcttccccttatctccttaatcagtttatctccttaatcagcctgtatcagtttcctagggctgccwtagcaaattgctgtaaacttgatggcttacaatagagacatattctgtcacagttctgagtcctagaagtccaaatttaagtgtcagcaataccatattc

SEQ ID NO: 31438 - DNA, 201 bp, Homo sapiens
attcattcacattgtgatacaaccaatttccagaattcttttcatcttgcaaaaccaaaactatacccattgagcaacagctccccagttttccttcccayagaccctggctaccaccatttatttttctgtctttatgaatttgactactctgagtacctcatataagtggaatcatgcagtatttatcttttgtgactg

SEQ ID NO: 31439 - DNA, 201 bp, Homo sapiens
ccatagtagccccttttccagaatgtcatatgttggaatcatacagtatatagccttttcaggttgacaactttcacttagtaatatttatttacgttttstccatgtcttttcatggtttcatagcttatttctttttaatgctgaataatattccattgtgtgtatgtacctgtttatctacttacctaccaaaggata

SEQ ID NO: 31440 - DNA, 201 bp, Homo sapiens
atattgcaaaaatttcctcccattccatcggctgtctttttactctgttgattgtatcctttgatacacagaagtttttaatttcaatgtagtcaagtttrtttatttttactcttgttgcctgtgttttggtgtcatatccaagaaatcattgccaagacccttatcatgaatctgttcccctatgttttcttctaagag

SEQ ID NO: 31441 - DNA, 201 bp, Homo sapiens
atagagtaacagtgttattatttttactaagaaaatatatcactttattttttaaaaactaatattaagatatgtcactgtttttaaaatttctctaatgrtaaaggatctgaaaatacaagaggaactaagaattgctcacatgcatctgaaagagcagcaggaaactattgacaaactcagaggaattgtttctgagaa

SEQ ID NO: 31442 - DNA, 201 bp, Homo sapiens
ttctccagcaactctcttccgcagctcatggctttcagattctcaggtctctctacctgcagtacctccatactcctttttgcctaactaatgctcttatmcttcagatctcagttaaagctttctcctctaggaatcccttcctatcattcacaatagattatatttgacacttgggccgtaggagaagccagcatctct

SEQ ID NO: 31443 - DNA, 201 bp, Homo sapiens
ctgcaattagcattttccttacggactttagcctacatatatactgttaaaggagtgtgtgtgtatatacaaacacaacgtatacatatgccacaggttawttattgtagtgattttaattaaaaatctgaaacaatctaaatgttcctcagaaggaaacagtaaatatgaacaatatatcgaaatactatgcaacactta

SEQ ID NO: 31444 - DNA, 201 bp, Homo sapiens
agaaatattctctgttttaatctgggttgtagtttcatagatttacacctgtgtcaagaataattaagttatacattgaagatgagcatgctttatatatrttatacctcaaaagaaagtaaaattctgtgtggaattgtgcaggatatcagtgagagtaacatgggtagacagttgtcttaatcaatttagaaactatta

SEQ ID NO: 31445 - DNA, 201 bp, Homo sapiens
aaggatttagataaatcaaaagatgaattacagaaaaaggtatgtgttgttttgttcttcttttggaagtaactgtgcccaaaattatttgtggaattaaraagatatagatacagatatgtagatagatatgtgcatatagaacacaagtagacactatttgccttccttgaagaaactgcttacattctaacttgtttt

SEQ ID NO: 31446 - DNA, 201 bp, Homo sapiens
ccaacttgtcatggttcaacttgagatttttcaactttagggatggtgtgagagcgatacgcattcagtgaaaactttactttgaattctgatctcttcayaagatagcaatactctactgtgatcatgggcagtggcggcaagacacagctctcagtcagccacgggatcacgagtaaacaactgacactgttcagtgta

SEQ ID NO: 31447 - DNA, 201 bp, Homo sapiens
ccatctcctctaagagaatagcaactctacaacaacaggtactgtgtctattctatttactgttgtgcttcctgaccttagaaccgtatctggcacataayagttgttcaatgaatatttcttgatgaacaatttggaaagtcagatgaaaaaattggatagagagcatataatagagagcctggcatatagtaaatcttc

SEQ ID NO: 31448 - DNA, 201 bp, Homo sapiens
atcttatttgattctctcaacaaccttagggttgtgtatttcagatgtgattacaaccctagggttgccgagagagtcaaataagatgagatgatacttgyacccagtaaagagtcaagagaagaatggtggctatgaaacctggagaaacacacttaagaggcaggcacaggaagagaaactagcaaagcagagtgagtg

SEQ ID NO: 31449 - DNA, 201 bp, Homo sapiens
attttagtcttgggcgtctgtgcaacaagcatgcatagttttacccattataggtttgtttttaatctttgcgtatgtgtgttttgttttttgcaggtacyatatttgcctatggacagactgcttcaggaaaaacatataccatgatgggttcagaagatcatttgggagttatacccagggcaattcatgacattttcc

SEQ ID NO: 31450 - DNA, 201 bp, Homo sapiens
tgagactgtagatataaataagacattgttctttccccccattataaactagaaagaaaatcccttaattccaatatggtaaatgcagaaatacgcaaaawtacatggtaccactaatttatcatggaaagagaaatcaatctatacacatagaaaaattgagacatagcattggagcccatctgaaaatggagatcatac

SEQ ID NO: 31451 - DNA, 201 bp, Homo sapiens
tttaccctaccattatattcacatatttgggcaaaaatacagtgttcactgcagcgttgtgtctggtgactaaaacctagaaataatctaagtgtccaccaataataaggcactatctgtataatggaaaactaagcataagaatggggtattctttttgtgatattgatttagaaagatgtccaagtggtatgaaaggag

SEQ ID NO: 31452 - DNA, 201 bp, Homo sapiens
ttaccctaccattatattcacatatttgggcaaaaatacagtgttcactgcagcgttgtgtctggtgactaaaacctagaaataatctaagtgtccaccaataataaggcactatctgtataatggaaaactaagcataagaatggggtattctttttgtgatattgatttagaaagatgtccaagtggtatgaaaggaga

SEQ ID NO: 31453 - DNA, 201 bp, Homo sapiens
taccctaccattatattcacatatttgggcaaaaatacagtgttcactgcagcgttgtgtctggtgactaaaacctagaaataatctaagtgtccaccaataataaggcactatctgtataatggaaaactaagcataagaatggggtattctttttgtgatattgatttagaaagatgtccaagtggtatgaaaggagaa

SEQ ID NO: 31454 - DNA, 201 bp, Homo sapiens
tcatggctgagtagtattccatagtatgtatacaccacaatactctggattatcttattagaagcagccctgcctcttcacaatttagtcatgaaaaaggwtaatctctatgagctcagagctagataaccaaaacaaatctgaatgagtagactccattttacacactgatttatgtcaactaatttctttaacttgaga

SEQ ID NO: 31455 - DNA, 201 bp, Homo sapiens
tacaatgtttttatttctttctctggaaattcctatgaacagtaaaggacagtgggaaatggttactctaatttttacacaatagaaaacagttttaaaaraagcaaaaatattttcagaaaataacatttaattctttatttttataaactgtgttaaagcagtctatttcccttaatataacattttaaagtttttttt

SEQ ID NO: 31456 - DNA, 201 bp, Homo sapiens
tatttgtggaattaaaaagatatagatacagatatgtagatagatatgtgcatatagaacacaagtagacactatttgccttccttgaagaaactgcttayattctaacttgttttacaattatctcaagatccaagaacttcagaaaaaagaacttcaactgcttagagtgaaagaagatgtcaatatgagtcataaaaa

SEQ ID NO: 31457 - DNA, 201 bp, Homo sapiens
cctaaaaccaaaaacaggaatcccctctccaacattccagattgattaacatctagcttttcttaaattattaaaaataaagggctcattcttgtgagaaygcccttgttttattgtttagcagcctgaactaaacatgttacctactacatgattacagtaacttgaattttacatgtttctctacctgtgctctgacca

SEQ ID NO: 31458 - DNA, 201 bp, Homo sapiens
cttgggaggaaatgcaaagacacgtattatctgcacaattactccagtatcttttgatgaaacacttactgctctccaggtgagtttgatttttatctcarcttaatataggggaagatcagcttgaagaagaaaacattacctactaaaattaagcatagttttttttaattaactcgcctgttataatcgatatgttgt

SEQ ID NO: 31459 - DNA, 201 bp, Homo sapiens
cacttggagaaactgcccaagtttactggaaaactgacaataatgtcatttatcaagttgatggaagtaaatccttcaattttggtaagcttataatagcrtcaaaagttaccttgttatccttttgctattaaaagtacaaaaggcttatcaataatattagatttgtcactaaagattagactaagccttctataaact

SEQ ID NO: 31460 - DNA, 201 bp, Homo sapiens
tactttattatataaacgttctcaatctttttctcctgtaaacttattccttgctaagtggtttcataaattatcgagatagcaagttaacacgaattctycagaattccttgggaggaaatgcaaagacacgtattatctgcacaattactccagtatcttttgatgaaacacttactgctctccaggtgagtttgattt

SEQ ID NO: 31461 - DNA, 201 bp, Homo sapiens
gcaaaccagagatgctccatggaattccacagaatcatgaagaaactgaaggtaccatcttttttagtaatatccttttaaatatttcagttataaacatyaatgtatttaagtcctgcttcaggtgccggcatatttgctatttagtattcttactaccaaattaaagattatgtgggtctgagcatagtaatatgtagg

SEQ ID NO: 31462 - DNA, 201 bp, Homo sapiens
atcaactgtactgttttatgattctcttaagatccaggagtctcaaagcaaacaagaacagtccttaaatatgaaagaaaaagacaatgaaactaccaaartcgtgagtgagatggagcaattcaaacccaaagattcagcactactaaggatagaaatagaaatgctcggattgtccaaaagacttcaagaaagtcatga

SEQ ID NO: 31463 - DNA, 201 bp, Homo sapiens
acaaaagccctgtttattttctttttaccaaagcaggaccgacagaaccaccaagtaaaacctgaaaaaaggttactaagtgatggacaacagcaccttayggaaagcctgagagaaaagtgctctagaataaaagtaagtaccccctgttaaaactacaaatgattattggttgtcttccaaaggcttaccgaaacctga

SEQ ID NO: 31464 - DNA, 201 bp, Homo sapiens
ccggcatatttgctatttagtattcttactaccaaattaaagattatgtgggtctgagcatagtaatatgtaggatatcagcaacacctgaactctgcctrtgggcctagacattatgtcaggatgttcaggaggcagatgtgagttaacatctcaaagatctcatagtctggggtgagacagacatataaacaagtatta

SEQ ID NO: 31465 - DNA, 201 bp, Homo sapiens; identical to SEQ ID NO: 4944

SEQ ID NO: 31466 - DNA, 201 bp, Homo sapiens
tgtaatctagtacaggtgtgtgggtataatgcatatatacacacatacacaaacaacaatgggagcttgtgaatttaagtcctcaccagaaaagtgatacytgagcaaatacctgaacgaggtaaagggtcaggccatacagatgtctgaaaagaccattataggcaaagggaacagcgagtacaaagttcctgaggcaga

SEQ ID NO: 31467 - DNA, 201 bp, Homo sapiens
actgcttctgtaagaactgagccttttccacgagtagccttagagatcgtaagacatgagtctgtttcaagctatgggcagcaactgtggtaaagtcatakacaagcctggccagctactttagatgggcctcatgtgctttaataaacttttttttttaagagcagttttaggttcacagcaaaattgagcagaaagtac

SEQ ID NO: 31468 - DNA, 201 bp, Homo sapiens
tagagatcgtaagacatgagtctgtttcaagctatgggcagcaactgtggtaaagtcatagacaagcctggccagctactttagatgggcctcatgtgctytaataaacttttttttttaagagcagttttaggttcacagcaaaattgagcagaaagtacagagagttctcttataccccatctccacaaacacaatctc

SEQ ID NO: 31469 - DNA, 201 bp, Homo sapiens
tccagatttattgcatgtctactgtatgccaggtaccatactgggtgctttacctcatgatataggctttattgctccattcataaacaaggaaactgccttcctcagaaaggaagtttagcagttgcccaaggttacacagctagtaaattgttagaatcagaattttaaactaagtcagacttgtatctgacttagttc

SEQ ID NO: 31470 - DNA, 201 bp, Homo sapiens
cattttttttggtagtagtagtatcattatgttgaataaaagacagtaatgagggaaaagaggttgcactgataaagttttagaggttaatgcaaaccttrcaggctggtgaatgtttctgtaaatccatggcctgccagtttttctttctacttgtctaaaagaaaaatggcaaaaatttgagtacttactgtatggcaa

SEQ ID NO: 31471 - DNA, 201 bp, Homo sapiens
gcaatgatagaagtgtatgcaagttatatgacgtactaaataaaattacagaagatgaaactgtagtagaagccagactcaataacaaagcttggagttctttttgtagatggggaatcattagactattgttttaagtggtggtggtaacaggatctgattaccacttaggtactaaactaaagaatacagaagaaatga

SEQ ID NO: 31472 - DNA, 201 bp, Homo sapiens
aggtagttttttagtcccaataacccattatcaaactcataattgagccacataaatctgcctcctaaacccgtgattgtagctacacgctgtattgcccstctttactttgtccctcctttatctcttctttttttctcatctctctctgcccttatctttcacagtgattaaactgttaatatacaagatatgggttat

SEQ ID NO: 31473 - DNA, 201 bp, Homo sapiens
aggaagtttccaggaatttgcatatggaggaaaatacaggagaaactaaagatgaatttcagcaaaaggtaaagggtgtttattttcagagttttcatatrcttgtatatatactctttaacctcaaatacttaaatgcataatattctcaatttcatttgttactcacaatggtaataactaacaataattttacaagct

SEQ ID NO: 31474 - DNA, 201 bp, Homo sapiens
ttccacaatggctgaagtagtttacagtcccaccaacagtgtaaaagtgttcctatttctccacatcctctccagcacctgttgttccctgactttttaamgattgccattctaactggtgtgagatggtatctcattgtggttttgatttgcatttctctgatggccagtgatgatgagcattttttcgtgtgtcttttg

SEQ ID NO: 31475 - DNA, 201 bp, Homo sapiens
ctaaagtaggtttcatctttcaccatgtttttaaaaaatattttgtaaccaaatattattataaaccctaaatatttggaaaggggagttaattacaacawaatagttataatgtttctataaatttattggaatttcctctaataataaagcacctggaaactgaagaggaacttaaagttgctcattgttgcctgaaag

SEQ ID NO: 31476 - DNA, 201 bp, Homo sapiens
ggtgggtggcaggcggagtatatttccctgccttcacatggaaggcaagagccagctgaaacttagtatttccccctcctccagatatattaggccctgayaaaaccccagcatgttaggctctggtgaaatagtttctgctgaggtcaggccttaagaaaaaaaaaatgctgtgttttgttttaaaatggttccttttct

SEQ ID NO: 31477 - DNA, 201 bp, Homo sapiens
gcacttacctactgattcttatatttttcattaggttgaacattgcaacatttcgatgacactcaaatgtactgatttcttccatatattcaaaaacttayacatatgattataatctactgaatttactttctgttttaaatattttttagtagttttaatctgcctcatataacttgtaaactaatttttgaaactctg

SEQ ID NO: 31478 - DNA, 201 bp, Homo sapiens
ggagttgaaaacttacatccacacgaaaatctgagcatgaatgtttattcataattgccaaaatttggaaacaaacaaattattcttcagtaggtagatgwataaacaaactgtgatacatccagacagtggaatattatgcagtgctaaaatgaaatgagctatcaggccatgaaaagacatgaagaaaccttaaataca

SEQ ID NO: 31479 - DNA, 201 bp, Homo sapiens
tatagactgtattagagttggacagaatggaaatgtctatggatgctgtaagtatactctctttaccttattgtgttggtccattttcatgctgctgaaamagacatacccaagactgggcaatttacaaaagaaagaggtttaattgaactcacagttccacgtggctggggaggcctcacaatcgtgacagaaggcaag

SEQ ID NO: 31480 - DNA, 201 bp, Homo sapiens
tcctctgtctttggccctctagggcctagaattgcctgtcccttcataagtgtcaattagtactcttggaatgaatacaggaatgaattttattttattawtatgcagtctaaatactgacttttcatcagtccaggttatggaatgatgaaaagtcagtatttagactgcatattaatattattacctattcacattact

SEQ ID NO: 31481 - DNA, 201 bp, Homo sapiens
tctatgcaaaatactgtagagcagtgatttccaacttttttttttttttttactatgaccttatcatgtaaggaatacatttcaaactgtgaccctacatrtacagacacgtttgtgtgcatgtgtattaatatagataactgaaactaaaatttaacaattattcttccatgtataatacaataaaacatatcaaagtta

SEQ ID NO: 31482 - DNA, 201 bp, Homo sapiens
cctctgtctttggccctctagggcctagaattgcctgtcccttcataagtgtcaattagtactcttggaatgaatacaggaatgaattttattttattaawatgcagtctaaatactgacttttcatcagtccaggttatggaatgatgaaaagtcagtatttagactgcatattaatattattacctattcacattactc

SEQ ID NO: 31483 - DNA, 201 bp, Homo sapiens
ccgagattgcaccattgcactctagcataggcaacaagagcaaaacactgtctcaaatgaaaaaaaaatgctagaaataaaaaagatgatatctgagatgwcgcatttcttcaatgggcttatcaggagtttgaacatgtctggtgaaagaatcagtgaacttgaaaatagaaactatccaaactgaaacatagagataga

SEQ ID NO: 31484 - DNA, 201 bp, Homo sapiens
cctggatcccttgatccctggatcccttgagtcctctgactttccttttggcaggcaaggtggaggcagggaatggctagtcttctgtagcagcttcccarcacctggtactactctgaggcatttttctgggccaagcccaggggtccctggagccttcctgaattctggctgcctatactgtggctgcttgctatgttt

SEQ ID NO: 31485 - DNA, 201 bp, Homo sapiens
tccattgtggttagagaaaattctgtattatttaaattttcaaaaatttgttgaggtttgttttgtggtctgtcttgatatatattcttcgggcacttgartggaatgtgtattctgctgttggatagagtgttctataaatgtctactaaatcttggttgatggtattcttgagttcttctatatctttgctgattccct

SEQ ID NO: 31486 - DNA, 201 bp, Homo sapiens
tggatcccttgatccctggatcccttgagtcctctgactttccttttggcaggcaaggtggaggcagggaatggctagtcttctgtagcagcttcccagcrcctggtactactctgaggcatttttctgggccaagcccaggggtccctggagccttcctgaattctggctgcctatactgtggctgcttgctatgtttgg

SEQ ID NO: 31487 - DNA, 201 bp, Homo sapiens
acagttgcttttttaacttgtgactgggtatacaagtttgtaactatatttccatctgatgtggcacttatatggatctctcttgagtgcacactgccacrtggctggatgggtgatgatatccacattggtctttcttctgtgaaatagtatccacaattcaaaacaggccatatccaagtgaaaatatgttcttttcat

SEQ ID NO: 31488 - DNA, 201 bp, Homo sapiens
tgtggtattggcaaaagaatagtcaaacagattgaaggaacagaataggaagcccagaaatagacccacgtaagtgtagtcacatgatcattaacaaaggmgcaaagccaatacaatggagaaaagatagtcttttcaaacaaatgcagctggaacaataggacacccacatgaaaaaacaaaattagatcttttacaccc

SEQ ID NO: 31489 - DNA, 201 bp, Homo sapiens
gcttttggtagtgtttttaaaattttagccattctgataagtgtgtagtgatatctcattgtccttttactttgtgtttgcctgatggttaatgaattaarcatcttttagtgggcttatttgcaatctgtatatcatcctcagtaaaatgttccctcatgtcttttacccatttttgaattggattgtgtattttattac

SEQ ID NO: 31490 - DNA, 201 bp, Homo sapiens
aatatcatcttttcagtggaaccttcaatgacaaccctctttggccacctgctttaaaactgattaatcccctgcccctggtactcccttgtctttattcytcactttatttttctccatagcatttaacactatctgacagattttacttgtttcttttctcttctctgctcccatactagaatgtaagttccaggagag

SEQ ID NO: 31491 - DNA, 201 bp, Homo sapiens
caattcctcctacttcattcctctttttcaaaattgtttcagctatgctcattcctttggtttttcatacaaatttagaaaaaatataatctatgtctccygaaatcttgttggtattttgataggaattgtgttaaagctgtataccactttggggagaatcgccatatttaccatgctgaatttcccagtgtgtgcctc

SEQ ID NO: 31492 - DNA, 201 bp, Homo sapiens
caagtttagacaatgtcaagctggaaaaagactcttggtattcagagaagccttttccacagctgccagaaatgaaataatttatttggggggattgataytccttaattagagaaagcattactaggtttagctgtatccgtggtgagctgtgaatgagattgagaccattgttgctatttacaatgctggaaattctac

SEQ ID NO: 31493 - DNA, 201 bp, Homo sapiens
cttttttcgagatagggtctgactctgtcacccaggctggagttaaagtagtttgatttatcgatcttttattttatggcttatgctttggttttaagaamattttccctattcagatgtcataaaatgactctcatattttcttccaaaagtttgaaagatttgcctttcatatttcagctttttattcacctaaaattg

SEQ ID NO: 31494 - DNA, 201 bp, Homo sapiens
ttgttctaggttcttgaagtggaaagttagattattgatttgagatgttccatttttttctaatggttacatttccctctttgaatatgttacctgtatcycacaaatgttgattttttattttcattagttcagtgtattttttgatttcccgtgagacctttctctttgattcatgggaaaatacagaagtttgttgtt

SEQ ID NO: 31495 - DNA, 201 bp, Homo sapiens
ctggaatcaatcctactgaaactattcaaaaaattgaggaggaagtgttcctgtttaactcattctacaaagccaccatcaccctgataccaaaatctggmaaagacacaagaaaagaaaactgcaagtcagtattcctgacgaacatcaacataaaaatcctcaagaaaatactagcaaaccaaatccagtagcacatca

SEQ ID NO: 31496 - DNA, 201 bp, Homo sapiens
ttattcacctaaaattgttttttgtgtatgatataattgtattagtttcctatggctgctataactaattaccaccaacctagcagcttaaaacaacataratttattatcttacagttatggaagctagaagtctgaaatagttttcactgggctaaaatcaagatgtcagcagagctgcattcctagaggagaattttt

SEQ ID NO: 31497 - DNA, 201 bp, Homo sapiens
ggtttgctatttcttggtggattcatctcttttatcattttataatgtccctgtctgtctctggtgattttctcttctctgagatttactttacttgataytcatatagccactcctgctttcttttgattcacatttctatgatacattattttccattctttattttcaaccactgatactgttatatttgaagtgagt

SEQ ID NO: 31498 - DNA, 201 bp, Homo sapiens
gttttgccaaggcaccccttaagcttcctactataagtttggttacttttagagtgtggcaatggaacagagaaagcttatacaaatacatggatgccctrctattgataaccttataattagtgttaaaagaaaaagactcctccctcaaaacaaggtggcactcaagcctccccacaaagttaattgtctacttttttc

SEQ ID NO: 31499 - DNA, 201 bp, Homo sapiens
ctaaaatcaagatgtcagcagagctgcattcctagaggagaatttttaagttttttttttttttccaagttctatagggtgctggcttatggccccatttyatattgaaagccagcagtcagccaggtgtggtagctcatgcctgtaatcccagcactttgggaggctgaggttgtccttgagtctaggagttccagatca

SEQ ID NO: 31500 - DNA, 201 bp, Homo sapiens
gggtcactgggaggttggggggcaagactgaaccaatatttgtggtgcataaatgtgtattttacccttgacagacaccggaagaaatagaaagattgacrgtcgatgaagacctcagtgatattgaaagggctgtttatctgctcaggtatttcctagtctttctgtgaaattgctcttcttttttccctgtgcagcaga

SEQ ID NO: 31501 - DNA, 201 bp, Homo sapiens
tctgtggaggagaacacttactggtaagtattgaactcttattgtattatgtttcagaaaaatatgtttagaaaatcagttgatttttagcagtgatgaamtctcttagtctgtgctggtttcttaacagtggacagtcccagatgttgaagtcagcacaacaagagaaaaacccaaatcctgataagacttgaggatttt

SEQ ID NO: 31502 - DNA, 201 bp, Homo sapiens
ttgattttcaggtttatttttgagcactttaccttttcctctgcattgaatattatataaatgtataatatataacatgttatatatatattttctctctrcttttatgtgtcaggtttgtttctttagttcttttattttgtgtattgaaactattttggagtattatgttaaattagaattcaaagtcagatgtgtaag

SEQ ID NO: 31503 - DNA, 201 bp, Homo sapiens
atgtaattttagtaataaatgaaatgataaaatgggcttaagctgtagcatggtatgagatgtgtgtaaaagagaataagaaaagtttcctttgcttactrtttatctatttatgttaatggtgttagaattcttttagttattcaggctcaaatcctcaatcatcttagctttttaattcataatcactctttatattct

SEQ ID NO: 31504 - DNA, 201 bp, Homo sapiens
gcatgtttataattcatgtgctacttcttgcctgcttattaaataccaaatgaaaagaatggaatgttttataattatgatacaagagtaaagctgaagartattttggttgatggttgctagactcagatattctactgctacagccttttatcttagctatagacatttcaactgccaatccaaaattaaccattattt

SEQ ID NO: 31505 - DNA, 201 bp, Homo sapiens
ctgctttctgtatctatggatttgcctattctggagattcctaaacacggaatcatacagtatatggccttttgtgactgacttctttcacttagcataakgtgttcaaggttcacccatgttgtagcagctatcagtagtttattcctttttattgcagtgtagtattctactgtatggatatagcgcttttgtttagcc

SEQ ID NO: 31506 - DNA, 201 bp, Homo sapiens
tgaaatcttagatgtttgttagacttcaatatttgctttgaacttctcattatctagaagtgaaagaatttgattgtcaagataaatatccaaaatattawaccatggtcttttataaaattcagaataatagcgatataattacaccacataacgaaggtgattccattacaatccaatgcaaaaaacactctctactta

SEQ ID NO: 31507 - DNA, 201 bp, Homo sapiens
gtatttttctgtgcaactttgatttctctttttttgatcctctctccatttggcatgggttctctatttcacaccctttgctattccttctgaattttgtytattaaaggattctcctagagagtgatgagaacagtggaatgattatgatgtcctgtatttcatagcttaccgtatagcaacagaaaaagcctttcttca

SEQ ID NO: 31508 - DNA, 201 bp, Homo sapiens
tttgcttaataaaatttcagttttggttttaattttatatctaaatgatgtatttctggcttaaaacttagaagtctgagtgcttaacattcaaagcagtyatttttccaattagtccatactttttataactgtgcagaggaattcagcttataattataaattttaaatttgtgttttctttgtaagtgctggtcaaga

SEQ ID NO: 31509 - DNA, 201 bp, Homo sapiens
tcaaagcagtcatttttccaattagtccatactttttataactgtgcagaggaattcagcttataattataaattttaaatttgtgttttctttgtaagtkctggtcaagatgtccaaggaacaagtgtgattgcaaatctcccatttttgatgcgacagaatcccactgagacgcttcggagagtgttgccaaaagtcag

SEQ ID NO: 31510 - DNA, 201 bp, Homo sapiens
cttaattatatacttgtttattgtttttttgtgtatggccatgatattatataaatactgttagcctgatgaggataactgagtaaggccatgctgcctakgagttgagcagtggaatgacttaaaatagctatggctgtcttataaaacccacaaaatttaatatccttgaaagctgaagatccattaattcatcttatg

SEQ ID NO: 31511 - DNA, 201 bp, Homo sapiens
agtcagataaagagctttgcttttttttttttttttttcttttttcttttttaaagacagggtctcactgtgtttcccaggctggagtgcagtggctattmacaggcacggtcacagtgctctaactcctgggctaaaatgatcctcccacctcagctttctgaatagctgggactacagaaggcacacaccacctccaca

SEQ ID NO: 31512 - DNA, 201 bp, Homo sapiens
cacaatccaaacaggaaaacagaaattaaaacctctctaaagtttctactctgttgcttaaaggtttatgtactgtttataatttttattcaataaagcgrtggcaagttactttatcttataaaatcctaagacacttaaattttatgtagtgtaatgagttaaatgatcaggagcagattaatatagttctctgaaata

SEQ ID NO: 31513 - DNA, 201 bp, Homo sapiens
accatgtgagaactctggcgtacttcttcttgggttcaagactaggatagggtagcaatgagacagtaaggaagaactccagtgattaaagctttgctacycacctagcttttggttgtttttcttttaaaatacctatcttatttgctatcccaaagtggaaagttgtgtgaaaaactcctttgaatgccctccttttta

SEQ ID NO: 31514 - DNA, 201 bp, Homo sapiens
aatgatttaaatcttcatgaagatgttgctataattcacattttatagattaggaaataatgcagaaggattaatattcctaagatcactgatatgaaactattttatgactaagttccaggttgttctactgactttattatattataaaataggcatataagggaaattttcattattgccataattgagcaagtaata

SEQ ID NO: 31515 - DNA, 201 bp, Homo sapiens
agaatcccactgagacgcttcggagagtgttgccaaaagtcagagtaagttggtatgaaataagattggagtttcccattttttcccagtagcatgttgtyattgttgaaaggattttggagctttgatggctgatcttttgcacctaaaaattgagtggaggaagtgttattatatacattttgaattataatgaaaata

SEQ ID NO: 31516 - DNA, 201 bp, Homo sapiens
agagagtagcctattagcgacgagctttcagcttgcagttgcaagggagtagagagtattgcttaatcaggtcttttaacatcttgtcacatctcaaacayctttgtttgagagagatacataccatctcctttccaagtgtgctctgtgatgatcttgcttcattcttgatattcctctcctgtctctctgttgtatttg

SEQ ID NO: 31517 - DNA, 201 bp, Homo sapiens
agttggtatgaaataagattggagtttcccattttttcccagtagcatgttgtcattgttgaaaggattttggagctttgatggctgatcttttgcacctwaaaattgagtggaggaagtgttattatatacattttgaattataatgaaaatatttagggaaattagctgatggaaatggagaaatccagatcttaagtt

SEQ ID NO: 31518 - DNA, 201 bp, Homo sapiens
aagtctccaactgtaattgcaggtttgtctagtcctcctttaaaatatataattttttactagtagtttagtattttgaaactgtgtggtgaaatgcacawaaaattaggattattatgttttcttgaattgacccctttatcattatgtaatgtttattctttgaaatatactttgttaggccgggcgtggtggctcaca

SEQ ID NO: 31519 - DNA, 201 bp, Homo sapiens
atatagaagtccctattatttaatttcaaaataatcaatgctatctctaaaaatacacagatattttgtaattttagagttcctttaccttttactagcaytattcatgataaatatatttttcagttttattcaataagattcttttcagaatttgtgaaacttaaacacttgctcttttggagtaagccaatgatttat

SEQ ID NO: 31520 - DNA, 201 bp, Homo sapiens
aactcacagttccacgtggctggggaggcctcacaatcgtgacagaaggcaaggaggagcaagtcacatcttacatggatggcggcaggcaaagagagagyttgtgcagggaaactcccccttacaataccatcagatctcgagagactcattcactatcatgagaagagcataggaaagacccacccccataattcagtc

SEQ ID NO: 31521 - DNA, 201 bp, Homo sapiens
aataagattggagtttcccattttttcccagtagcatgttgtcattgttgaaaggattttggagctttgatggctgatcttttgcacctaaaaattgagtkgaggaagtgttattatatacattttgaattataatgaaaatatttagggaaattagctgatggaaatggagaaatccagatcttaagttgtaaaatttct

SEQ ID NO: 31522 - DNA, 201 bp, Homo sapiens
atgtatgaagagaagtaattagatgaagggcaagataaggggagataggaaagcaaacattcccagcattgagaaggaaagagaagcatgcagattgaatktagattcaaagaactgagagaaaatcagtgtgcctagagcataaagcaaaaggagttgccgagacagtgaaaaagcccaaattatgcagatccttaggtg

SEQ ID NO: 31523 - DNA, 201 bp, Homo sapiens
caattggaaactgaagtttttcttaaactatcaaaatagcattaaaataagtgatacttagagataaatctggtaaatgttacataagatctataaactgmaaactatagaacatttctgagaggaaataatgagagaactaagtgaactgaaatatagatcatattcgtggatcagaagactcaatattgtgaagatgtc

SEQ ID NO: 31524 - DNA, 201 bp, Homo sapiens
cggaggccgaggcaggtggatcatgaagtcaggagttcgaggccagcctggccaacatggtgaaaccccatccctactaaaaatacaaaaattagccaggygtggtggcaggcatctgtaatcccagctactcaggaagctgaggcaggagaattgcttgaacctgggaggcagagttgcagtgagccgagattgtgccac

SEQ ID NO: 31525 - DNA, 201 bp, Homo sapiens
acattgacttggcagagcataggaggaagaggtgcccaccacataaagtagttagcagtatcagctaagattttaacacatttttaaagggtgaatgtgcrctcgcacagtttatgtgtttaggataacttgtagcttagacacagaggagctttgcatccatttgcaagctcttttccatacgtttccactgtttgatct

SEQ ID NO: 31526 - DNA, 201 bp, Homo sapiens
tatcttccaccagtgtcccctaatgctaacatgttattaatacataatcatggtacatctttcaaaaattcagaaattaacattgatacatcactccaaaytaaacttcagactttatttggatttcactagttttttcacttttttttttttctgtttcaagatcaactccaggaaactgcattgtatttagttgtcatg

SEQ ID NO: 31527 - DNA, 201 bp, Homo sapiens
gatacaaactgttctatggtttacagcttaaaaaataaaggtacatttaatgctatgcattttgagaataatgtcttttatgctttttctttttacatatrtatctatttgtatttaaggacaaaatagattgacattactaattacttcactattaataattaaagttctgtgaaacatttactgagtatatagtttttc

SEQ ID NO: 31528 - DNA, 201 bp, Homo sapiens
atactgtagagcagtgatttccaacttttttttttttttttactatgaccttatcatgtaaggaatacatttcaaactgtgaccctacatatacagacacrtttgtgtgcatgtgtattaatatagataactgaaactaaaatttaacaattattcttccatgtataatacaataaaacatatcaaagttaatatcaaatg

SEQ ID NO: 31529 - DNA, 201 bp, Homo sapiens
aatattttgccaaaacccttgtgatatatgtccttaatttacacttctagttcttaagcttccttattttgttggtatgacattacatgtatgaagagaartaattagatgaagggcaagataaggggagataggaaagcaaacattcccagcattgagaaggaaagagaagcatgcagattgaatgtagattcaaagaac

SEQ ID NO: 31530 - DNA, 201 bp, Homo sapiens
ctttgaacttctcattatctagaagtgaaagaatttgattgtcaagataaatatccaaaatattataccatggtcttttataaaattcagaataatagcgwtataattacaccacataacgaaggtgattccattacaatccaatgcaaaaaacactctctacttatcgaggtattaaatttatttagttgtttttacact

SEQ ID NO: 31531 - DNA, 201 bp, Homo sapiens
tctcgtttagttagttgtaaaattttaggaaaattgaccaacaaatttgatgcccacacgtgagtatttgtatgtaattttcggtctactttattacattsgtttaaaatgtataatgactgtgtaacaatatatttgtgttatttcatactgcatacaaatttagttatcttaactattttaactttatggaattctcat

SEQ ID NO: 31532 - DNA, 201 bp, Homo sapiens
ggagtttcccattttttcccagtagcatgttgtcattgttgaaaggattttggagctttgatggctgatcttttgcacctaaaaattgagtggaggaagtkttattatatacattttgaattataatgaaaatatttagggaaattagctgatggaaatggagaaatccagatcttaagttgtaaaatttctttagtcatt

SEQ ID NO: 31533 - DNA, 201 bp, Homo sapiens
aaacaacacagattgagcattcctaatcctcaaatccaaaatcaaaatgctccaaaatttgaagctttttgagcataaatatgatgctacaagtagaaaaytccccatctgacctcatgcgatgaggtgcagttaaagtcaaaatgcagtcaaaacttagtttcatgcacaaaattatttaaaatattgtataaaattaca

SEQ ID NO: 31534 - DNA, 201 bp, Homo sapiens
ctgtcggctactattctgttttctgagtttgtcttactggctgggttggcagtatgttatcttagctagcccttttcccctgctatgtcttaacatatctrtatatttttaaaaagtattttaggctgggatggtggctcacgcctgtaatcctggcactctgggaggcagaggtgggtggatcacttgaggtcaggagtt

SEQ ID NO: 31535 - DNA, 201 bp, Homo sapiens
atgcccatagtctcagctgctcaggaggctggggcccaggagtttgaggctgcagtgaatagttactgactgcactccagctagggcggcatagcaagacyttgcctctaaaaaacaaaaaaaaaacagaaaaaaaaagaaagaaataataggaaaaaataataatttctcctaatatgattatttattatagaattttat

SEQ ID NO: 31536 - DNA, 201 bp, Homo sapiens
ttgtgtcattgcacttaagcctgggcgatgcagggagactctgtctcaaaaacataaataaataaataaataaaatagaaagtattttaaaggaatttttwctgctatttgttaatgaggaaatagaaaggctggttaaaaaaattaacaggagggagcttacaatgttcccagaactcttccaagtttatgtagttattc

SEQ ID NO: 31537 - DNA, 201 bp, Homo sapiens
taggaacagaatttgtttggaaatttgacacgtacatgtagaatggtatataacgctgatttatgttcgagagagactttttgggggtttggagaggattygggaaatatataataaagaaaggataaaagggacataatcaatgtgaaatgtgatttccttttatttcggtgcatgcccatagtctcagctgctcaggag

SEQ ID NO: 31538 - DNA, 201 bp, Homo sapiens
accctcgttggtataaagagggaggggaaaaataagctcatctgtttttttcaggcaaattttgagcctttatttattttttcgtttaagttgacatgtartaattgtatgtatttatgggatacagagcatatttcaatacatgtatgcagtgtgtaatgatcaaatcagagtagttagcattcatcaccttgaacattt

SEQ ID NO: 31539 - DNA, 201 bp, Homo sapiens
ctgttgttttaagccactcagtttgtggtaatttgttacagcagccacaggaaactaatgaaagtaacttcccatttcagatataatacaaccccctaccrtgtccttaaatcacccccatctacctttgtgacctcatcatctgccagtcttttccctttctttcataagggcagaatatttgtcagtctagtttctcac

SEQ ID NO: 31540 - DNA, 201 bp, Homo sapiens
gaagagccactcaaaaggcagtgttctctatatcattgatgataaaggtttaagctaaagaggagtttatctcttcgcaaggaacatgaaactttcgtatrctgttttgacatggcattgataataaaggatacatagtggactttattagtaaaataccttattgtaacataaatattaaatcatgaacataactcttac

SEQ ID NO: 31541 - DNA, 201 bp, Homo sapiens
catggtcttttataaaattcagaataatagcgatataattacaccacataacgaaggtgattccattacaatccaatgcaaaaaacactctctacttatcraggtattaaatttatttagttgtttttacacttacattttggcaaccataaatttgtcataaaattatataaaagaaatcgagcaattccaggcacagat

SEQ ID NO: 31542 - DNA, 201 bp, Homo sapiens
tattcattaaaacaaactgtttaataatttaatttgagtaaggaaataattaactatcaactatgtaaagtttagtttttattgtgaactcaaagcaaggytttgtggcatctgctttattgttataaattcaagcacagtatcagcagcttatgagttatattttggattttaagtgagagctgctaggagtaggatcac

SEQ ID NO: 31543 - DNA, 201 bp, Homo sapiens
aggaccaagtagttcaggtggagagaacggtaattagccctaaggtgaaagagctgggtgggactgagagagacaggtgtgttttggacccagtggatggkgtggggtgtgattgagaagaggttagagaaatggttgatgaaagagcatgcaaatgttggttttcattcttaggacagtgaaaagtcgttgaagtcttta

SEQ ID NO: 31544 - DNA, 201 bp, Homo sapiens
gatagcatctgctcatctcctctctcttgtctaagtggtttaggattaaacaaattatgagggtgtccaggctaggaaaagaggactttgtgctatgtagycaaaatttttagtgtgtgaatctatcttccttattagattttaagttcttagaggtaggagcaaggtacaagaatagatgaagataatattgttagtacc

SEQ ID NO: 31545 - DNA, 201 bp, Homo sapiens
atggcaaggaatgcctttctgaggagcagaaaactgaagggatggaaagaagcagccatttgagagtcaggaccaagtagttcaggtggagagaacggtarttagccctaaggtgaaagagctgggtgggactgagagagacaggtgtgttttggacccagtggatggggtggggtgtgattgagaagaggttagagaaat

SEQ ID NO: 31546 - DNA, 201 bp, Homo sapiens
agtaacttgcttattttgcttggatgcccaaaggatttttctttttctttaagattcaacagtaaatctcagtattggttatattggattgattttctcargtttgtggtatgtgcttttgaatctttttttttttttttgacttaaaaaaaattccttcccttgctttggttttggttttcttcttcaggaactcctatt

SEQ ID NO: 31547 - DNA, 201 bp, Homo sapiens
cagtgatgtaataaaattaatggattattagtctatagtggattattctggagtacagctcttattttcagtatgctgcatatagtgaagccagtctgtcmcatggaaattctgtagtataatgagacattagtatggaaaactcccaggaagctacacaaaacttttggataaaaattgaatagtttcatcagttttata

SEQ ID NO: 31548 - DNA, 201 bp, Homo sapiens
gctgctcaggaggctggggcccaggagtttgaggctgcagtgaatagttactgactgcactccagctagggcggcatagcaagaccttgcctctaaaaaasaaaaaaaaaacagaaaaaaaaagaaagaaataataggaaaaaataataatttctcctaatatgattatttattatagaattttatgtctcctgtatatgg

SEQ ID NO: 31549 - DNA, 201 bp, Homo sapiens
agataatcctgatactggaattagtagacaaggacttcaagataactgtgattaatatgatcaagataatagaggcaaacatgtagaaaatagataactcygttaatccaacccaatgaaaattttcagttttatgctttatttctgttttagaatttccatttgatttttttatgtagtccacttctatgtggaaattct

SEQ ID NO: 31550 - DNA, 201 bp, Homo sapiens
tgctgaatgtaatatagacatgtgatttttatatttttttgaaaagcaatatgctgtataatgcaatttttactctagaataccatattatttaacatgtrgtttcaaagattttagatatgtaatttattctaaacttttcacttctaaattatcaatgcatattcagtaattccagctactttgagaggaaacaagcca

SEQ ID NO: 31551 - DNA, 201 bp, Homo sapiens
agctgtggtggcatgtgcctgtaatcccagctactcaagaggctgaggcaggagaatcgcttcaacccgggaggcggaggtttcagtgagctgagattgcrccactgcactccagcctgggcaacaagagtgaaactccgtctcaaaaaaaaagtcatgaaaacagaggcaggacatggtaatggtgtatagagagctttg

SEQ ID NO: 31552 - DNA, 201 bp, Homo sapiens
attctctgaatatagtcttttctgtttctgtgacagaaaataactgcctaaggaagatcagggatatttacgattttccttttcaccctgggacaaagttygtgcttatattctgtttaacccccatgggtagctgtagtgcatgctgtttacctggtccccatcagatgttttagatggaaggaagagtaaaaagggctt

SEQ ID NO: 31553 - DNA, 201 bp, Homo sapiens
caatatatttgtgttatttcatactgcatacaaatttagttatcttaactattttaactttatggaattctcatgacgaatttacttattcagatgccttycttttcaatctcataacttttcagaattggtaaggttaacttttttcctacttcctatcttaatcttccctatctcataccaaatatagttttgaggata

SEQ ID NO: 31554 - DNA, 201 bp, Homo sapiens
attaatgttattctggcctcataaaacaagatggatggtattcccaccttctctattttctgaccaagtttgtataacttggttttatttttgccttaagwgttttatagaattcactagtgaagttatctaagcctggaattttcattttggaaagtattttgataattgattctatttccttagtagacattagataat

SEQ ID NO: 31555 - DNA, 201 bp, Homo sapiens
ttactttctttcatttttgaaaagtcgtttttgaaaattggccacttaatgtggtacagatgttaagagtacatgaatgaaaggcaggaaccagggtggaygttcagatgcttcaaaagaaaagcttcaagtctgataacagctgtaagattgtgaaattgatcactgaataacaaagattgaaatatgtaaatattacca

SEQ ID NO: 31556 - DNA, 201 bp, Homo sapiens
ttcttatatgtatggtgtgctttcccaataagactgaaagcttctggagagcaggaacagtatctttatgatttttcatattttctgcagcaactagcccmgtcactggtttttagtaagttcctgctacacatttattgatttgatttattttcttctattgcttattgtgcaggacagaacttacaaaaagtgtggtgc

SEQ ID NO: 31557 - DNA, 201 bp, Homo sapiens
ctcattcactatcatgagaagagcataggaaagacccacccccataattcagtcatctcccacccggtccctcccacaacatgtgggaattaggggagctrcaagatgaaatttggatggggacacagagtcaaaccatatcatttatattgaaaggaatattttaaacttggcagaaactcatcactaatgtttcacaat

SEQ ID NO: 31558 - DNA, 201 bp, Homo sapiens
gagttgatagtatatttgaatattaatttgatgagcctagttggtttataatgtcttaagaaactaagtcagtttacaaatgcaaatttattttaatttgktaagagctaaaatcaaggcaaaaacatttggtttatagtattgattctagaaatagttgcacacacctatatatacttagtgagtttgttaattattgta

SEQ ID NO: 31559 - DNA, 201 bp, Homo sapiens
tcaatattgtcaagacgtcagttcttcccaacttgatctataaactaaatgcagtctcagtcaaaatcccaacaagttatttggtggatatcaacaaactrttgcgaagtttacctagagaagaaaagtcccggaatagccaacatgataatgaagaagaacaaagctagaagattgacaccacctgacttcaggacttag

SEQ ID NO: 31560 - DNA, 201 bp, Homo sapiens
gtggtgaaatgcacaaaaaattaggattattatgttttcttgaattgacccctttatcattatgtaatgtttattctttgaaatatactttgttaggccgrgcgtggtggctcacacctgcaatcccagcactttgggagtccgaggtgggcagatcacaaggcaggagtttgagaccagcctggccaacatggtgaaacc

SEQ ID NO: 31561 - DNA, 201 bp, Homo sapiens
catgactatgccaaattaactttgtaatataattattggttgatttgcctgagtgattaacattaaattatgaagatacttccagaaggatgtaagttcartgagttgagaggcagtgaacactttagttttgtcaataacttaaaattgatttggtggggtcaaattatctagactagaattagcctagtgtaactgtct

SEQ ID NO: 31562 - DNA, 201 bp, Homo sapiens
gattaacattaaattatgaagatacttccagaaggatgtaagttcagtgagttgagaggcagtgaacactttagttttgtcaataacttaaaattgatttkgtggggtcaaattatctagactagaattagcctagtgtaactgtctgtcttacttacttcttcaagaatgttttacctgtccaaaaggcggcttcacgaa

SEQ ID NO: 31563 - DNA, 201 bp, Homo sapiens
ttttcggtctactttattacattggtttaaaatgtataatgactgtgtaacaatatatttgtgttatttcatactgcatacaaatttagttatcttaactrttttaactttatggaattctcatgacgaatttacttattcagatgcctttcttttcaatctcataacttttcagaattggtaaggttaacttttttccta

SEQ ID NO: 31564 - DNA, 201 bp, Homo sapiens
agggcattgggtaggtatactttgaattccttatgccatttccatgaaaacatgccattgaaaggctgtatttgatctttaaaaatgatcataacaagtamctcctctatgtctggattaaaagagataaagaggaatgtgcttagcatggtggtaggcgtttgattaatgttaatttctttttttctcaccttagttgct

SEQ ID NO: 31565 - DNA, 201 bp, Homo sapiens
tcaaaactttttaataggaagagttggtgagataataagctaactgagattaatagtcttggtgttgagatatatatgaagatgaattgtcaaaagatacygaaaagttcaacttaagacttttatgagcattttttaatgggaacaaatctagaagtttttcttttgtattttaaatgtgagaaaatacagaaagcacaa

SEQ ID NO: 31566 - DNA, 201 bp, Homo sapiens
tcaaataattgattaattttttaaagaagagccatctaagaagtaaaagtgatgaaattcaatacatagaacatattataagctaatgtaattttagtaawaaatgaaatgataaaatgggcttaagctgtagcatggtatgagatgtgtgtaaaagagaataagaaaagtttcctttgcttactatttatctatttatgt

SEQ ID NO: 31567 - DNA, 201 bp, Homo sapiens; identical to SEQ ID NO: 4979

SEQ ID NO: 31568 - DNA, 201 bp, Homo sapiens
ggattaatattcctaagatcactgatatgaaactattttatgactaagttccaggttgttctactgactttattatattataaaataggcatataagggarattttcattattgccataattgagcaagtaatacttcttgttgcctttacattacacacacaaacacacacactttctctctctatctctctctctcata

SEQ ID NO: 31569 - DNA, 201 bp, Homo sapiens
gtccactttgatgacaggaggcatggaataagcagtaatttctgacaagattcctgccactgcctcagtgcccctttcatcaacttcaatcactgttcttygtaaaacctggaaaaaggaaataatgtgaaaaaccatttgtgtggcagtgcaaaggaggaattaaatgagccccttgaaattcttcacagtggtcctacc

SEQ ID NO: 31570 - DNA, 201 bp, Homo sapiens
gagttcttcttttgtatccctaccatcttaccacctcctgggggaatgtgggatttcaccttagtccagctttgggagggatgatgccaagaatgcctgaragggtctttcttccctgggattcaggggaggggacaggattgtttcatagagatgttctgaactttgcctctgtttaggccttctcatcttctctcatgt

SEQ ID NO: 31571 - DNA, 201 bp, Homo sapiens
taccttaatttctctaagctctaatttccccatctacaacatgggataataataatatctacctaccttataaaattagtatgataattaaataagatgartgcaagtaaggtgcttatttattagcacaatgcctggcttatagtatattagatgctatttttattttgttgtgattagaaggaggttattaaagtaagg

SEQ ID NO: 31572 - DNA, 201 bp, Homo sapiens
gtggctcatgcctgtaatcccagcaatttgggaggcagagacgggtggatcacctgaggtcaggagttcaagacctgcctgaccaacatggcaaaaccctrtcaactaaaaatacaaaaatcagctgggtgtggtggtgtgcacctatggtcccagatactcgggaggctgagacaggagaatcgcttgaacctgggagga

SEQ ID NO: 31573 - DNA, 201 bp, Homo sapiens
gtttcacaatttcattttaaactttaaacagtttcagaaaaagttttatgagaaagatttgttggatcaagagaaagaaagagaagaactacttcttttgsaaatggtatgttgttttcacatgcacacacatatactcttttctgattaataactgtgtttttttattaaacttaatcatttctttccatttcaccattt

SEQ ID NO: 31574 - DNA, 201 bp, Homo sapiens
tattgctttataaatttcttcagaattagtttttctgctatgaacaaaaatgtttgatctattacattctttcttctgactaatatttattgattattaawataaaattaaataatttcaactattaaatatttagtaattatttatttgtacttatgtgcaaagtgcttttctttataagaacttgaatgaataaaacag

SEQ ID NO: 31575 - DNA, 201 bp, Homo sapiens
ggggttgcaccagggactgccacaggagtcttaaacaataccaggagacctcaggaacccaatgtgaagtattgtggaatatgtgaaacacattccgggcrtggactcaggatgcactcatgcatcaaatctttattgagcatgtaatttatgctactaattcttgagctgagctggtgctcctaaaaggttttcaagctg

SEQ ID NO: 31576 - DNA, 201 bp, Homo sapiens
cttaattattcttaaaaaaaagtatttagtattctgttgacttaaatctatattaatagtatttgtataacattgataatataattgagctgatattcctrataattgaccctatgatgacttctgaagaatcatcagataaagattgaattatagccatcacaattttagatgtgtatgtaatttattgctttataaatt

SEQ ID NO: 31577 - DNA, 201 bp, Homo sapiens
gagaggtgaaatactttgctgaagatagggagcagcagagtttgactcaaccccaagtacctgagcttcgaagtccatgtgcttagttagcaccatgctatttttttttttaattttattttttgacagggtctcattctgtcgctcaggcaagagtgtagtgatgcaatcttgacctcctgggctccagtgatcctcctg

SEQ ID NO: 31578 - DNA, 201 bp, Homo sapiens
gctgtgcaatgtgatgtcccaccagtccctcacttttaaaaatggctttactgagatataattcatagtccttgtagttcacccatttaaactgtacagttaagtgagttttagtatattcacagaattgtgcaaccatcactgcaatcaattttagaacattttcatcacccccaaaagaaaccttgtactattagcagt

SEQ ID NO: 31579 - DNA, 201 bp, Homo sapiens
ctgtgcaatgtgatgtcccaccagtccctcacttttaaaaatggctttactgagatataattcatagtccttgtagttcacccatttaaactgtacagttaagtgagttttagtatattcacagaattgtgcaaccatcactgcaatcaattttagaacattttcatcacccccaaaagaaaccttgtactattagcagtt

SEQ ID NO: 31580 - DNA, 201 bp, Homo sapiens
tgtgcaatgtgatgtcccaccagtccctcacttttaaaaatggctttactgagatataattcatagtccttgtagttcacccatttaaactgtacagttaagtgagttttagtatattcacagaattgtgcaaccatcactgcaatcaattttagaacattttcatcacccccaaaagaaaccttgtactattagcagttg

SEQ ID NO: 31581 - DNA, 201 bp, Homo sapiens
gtgcaatgtgatgtcccaccagtccctcacttttaaaaatggctttactgagatataattcatagtccttgtagttcacccatttaaactgtacagttaagtgagttttagtatattcacagaattgtgcaaccatcactgcaatcaattttagaacattttcatcacccccaaaagaaaccttgtactattagcagttgc

SEQ ID NO: 31582 - DNA, 201 bp, Homo sapiens
tgttgttgttctttcttgttcttcgctgtgatataaatatatgcctcttaatggaataaagagtatttaagatgaccatactgccagatgaattaaggaaytgatatttttgattttaggtattatgagtcatatcttgttccacaatttattatctatgtgacagtggtgaagttagttatggttttcgagccctgcttt

SEQ ID NO: 31583 - DNA, 201 bp, Homo sapiens
attgtcttgatttctgtttttgatgcttgcttcctttcagtattgttttagtgaggcatggtttgtgtgtgtgtgtatgtgtgtgtgtgagagagagaaaragagaggaagagagagagatcacatttgtgttgtgcatgcatgtgtatatgtgtatataggtggtcttgagtgaccagtattgcttgctcagttttcttt

SEQ ID NO: 31584 - DNA, 201 bp, Homo sapiens
aagaagactgggtatataggtccaaatcatggttatggagatgttagggtagaagacagcagtatggacatgatagaaagaggattgagaatacatttctrtgtgatccatttttgctttgccttctatctaattctgccaattcctaatctttaggactcacctcaaaatctcttgaagccactttttgggagatgtgca

SEQ ID NO: 31585 - DNA, 201 bp, Homo sapiens
tgtcttgatttctgtttttgatgcttgcttcctttcagtattgttttagtgaggcatggtttgtgtgtgtgtgtatgtgtgtgtgtgagagagagaaagaragaggaagagagagagatcacatttgtgttgtgcatgcatgtgtatatgtgtatataggtggtcttgagtgaccagtattgcttgctcagttttctttag

SEQ ID NO: 31586 - DNA, 201 bp, Homo sapiens
aggctggagtgcagtggtgcgatcacagctcacaataaccttgaacttctgggctcaagtgttcctcctgcctcaacctcctgagtagctgagactacagscactagccaccatgcctagctaattaagttttttttgtagagttaggggtcttgctctattgcccagtcttgtcttgaactcctggcctcaagtgatcca

SEQ ID NO: 31587 - DNA, 201 bp, Homo sapiens
ggctggagtgcagtggtgcgatcacagctcacaataaccttgaacttctgggctcaagtgttcctcctgcctcaacctcctgagtagctgagactacaggmactagccaccatgcctagctaattaagttttttttgtagagttaggggtcttgctctattgcccagtcttgtcttgaactcctggcctcaagtgatccac

SEQ ID NO: 31588 - DNA, 201 bp, Homo sapiens
ttacataaaactgtaaggaggccgggcgctgtggctcacgcctgcaatcccagcaccttgggaggctgaggtgggcagatcatgaggtcaggagatccggwtaatcctggctaacacagtgaaacactgtctctactaaaaataaaaaaaaaaaaatttagtcgggcgtggcgtcaggcgcctgtagttccagctactcag

SEQ ID NO: 31589 - DNA, 201 bp, Homo sapiens
acaggcagagatgtgtatagaataacattccattcacagtaccggtcataaacaaaagatgattgttggtgttttcagggagcagcagctgactagtttgrctggagtgtggagtgagtataatggagtagtgttacataaaactgtaaggaggccgggcgctgtggctcacgcctgcaatcccagcaccttgggaggctg

SEQ ID NO: 31590 - DNA, 201 bp, Homo sapiens
aaaatatttactatgtaatacatctataaagagaaaatggaagcagaacatcttttaacaaatttgtcagatgtttgcatagagaagagatcttatttgtyggactcaaaacaggcttcaagatgattatgtcatttgagatgaaccttaaggtatgctaggattttgacaggcagagatgtgtatagaataacattccat

SEQ ID NO: 31591 - DNA, 201 bp, Homo sapiens
gttatactgttttgaaatgtgctgtggggtgtgaggagaaagggaaggttgaaataattctaaactgtatcctaaggaatcagagggctgtttgtaccctygttggtataaagagggaggggaaaaataagctcatctgtttttttcaggcaaattttgagcctttatttattttttcgtttaagttgacatgtaataatt

SEQ ID NO: 31592 - DNA, 201 bp, Homo sapiens
ttgtatgattttgctgtagttgattttattgctgtccctgttgctatgactattaatgttttaccgtaataaaatgttaccatttatatatttttataaastatggcaaactggcaggtcacaggaaaaaatgaggtagaattaaaaaatatgtatttaataatagtctcgaaacttttagacttaagacatataaaacaa

SEQ ID NO: 31593 - DNA, 201 bp, Homo sapiens
ttaaaggattctcctagagagtgatgagaacagtggaatgattatgatgtcctgtatttcatagcttaccgtatagcaacagaaaaagcctttcttcatgrcagggcagcttcatttagaatcagaatatgtttctttctaatagaacttactctaaagcaaaaataatattattttaaaaactatgtaaaacatgtatta

SEQ ID NO: 31594 - DNA, 201 bp, Homo sapiens
tgatctttgttacttcttttcttctgctgggtttgggtttggtttgttgtttctctagttccttgaggtgcgacctcagctagtctatttgtgctctttcrgactttttgatgtagacatttaatgctatgaactctcctcttagcaccgcttttgctctatcccagtgattttggtaagttgtgtcactattattcagtt

SEQ ID NO: 31595 - DNA, 201 bp, Homo sapiens
ttgttatgttaatgtaaattagattacttttaaaattataatttatatttcttttctattatatggagaatataatatataaaagtagagatacttttatrtattgaccttgtattctgcatactgctagactcacttattctagccattttgtagattatttaggatattcaccatagacaactatgttgtttgtgaata

SEQ ID NO: 31596 - DNA, 201 bp, Homo sapiens
ttgggaaatggcagaatttggacgtgaaggcaggagttcctgtcctcacctaggtccgtgggcacaggcccaggggtggtaccctagtcagggaacagccyttcccttcccggcacttccctgcaccccctcccatatcaatattgttatgttaatgtaaattagattacttttaaaattataatttatatttcttttcta

SEQ ID NO: 31597 - DNA, 201 bp, Homo sapiens
tgtgctcttatgcggatgcgctcctcttgacggcctcttaacatctagctgcgtgtgttttcttccgctggagtgttcctttccacgtccagccacttgcrtctctgcctgctagggtcttggggtttttataggcacaggatgagggtgtggtgggccagggtggtcttgggaaatggcagaatttggacgtgaaggcag

SEQ ID NO: 31598 - DNA, 201 bp, Homo sapiens
agatgtatttatttgccatttttatattttctttggtgaggtgttcaaatcttttgtctgctttttattggatgttcttactcttgtagttaagaattctstatatattctagatacaagttgtttgctaaatatttattttgcaaatattttatgccagtctatggcttacattttcatttttgtaacagtgcctttgaa

SEQ ID NO: 31599 - DNA, 201 bp, Homo sapiens
tagtttaagacagacccagatttattcttggaggctgaggcttgctcatttacttactgagagaccttgggtaagttgcttatcttctgtgagcccaagtyccctaatgtaaaatgggaataaataggctgggcatagtggctttcacacttgtaatcccagcagtttgagaggtcaaggcaggaagatcagttgagccca

SEQ ID NO: 31600 - DNA, 201 bp, Homo sapiens
catttttggaaaataactttattgaagtataatttaaataaactaagtttatagtttgatgagttttgacaaatgggtacacctgtgtaactagcacaaamtatagaacattttcatcacccccacaaaagccactggtatctctttgcagttaatgccacaccctaaccctaagcaaccattaatctgctttttgtcact

SEQ ID NO: 31601 - DNA, 201 bp, Homo sapiens
caaatttaataacatgtaaaataccttgtaaactattattttttttctattaaagtacatttgttattattaaggtgagttaagattttaatgataattgyttgggaatattattctgaaacactcattcatttgcatgtttcttttctccccaccttcagcattaagcgagaaatacttcctctggtaaaatcactctgt

SEQ ID NO: 31602 - DNA, 201 bp, Homo sapiens
aaaaaaagaaaaaaaatatgttgttctgaaatctactttaatattcacatattcattccaactttcttttggctagcatttacaaagtatatctttttctstccttttaattaattttttaaatttcagaataattttaaattttcacaaacattgcaaagttagtatagaaagttcctatatatcttccaccagtgtccc

SEQ ID NO: 31603 - DNA, 201 bp, Homo sapiens
actttacctatttaggttagttaattgggtctcttctccttcctgtaatacttgtcaccccttcttcctgtaggtgccagggatttggcttgcttttatctttttttttttttttgagatagggtcttgctatattgcccagctggtctcaaactcctggcctcaagcaatcttcctgacttagcctctctagtagctggg

SEQ ID NO: 31604 - DNA, 201 bp, Homo sapiens
tacctttcaatattcctgctatagctcatatatttaggacagactttgataatattcccttttactctatgcaaaatactgtagagcagtgatttccaacttttttttttttttttactatgaccttatcatgtaaggaatacatttcaaactgtgaccctacatatacagacacgtttgtgtgcatgtgtattaatatag

SEQ ID NO: 31605 - DNA, 201 bp, Homo sapiens
tcttcatatatatgagtttacattttataaaaatcagaattaattttgaggtttttttataggccagtattttgtgagtgttcttctgtagggattgttayatttaaaaataagagacctccaacaattttcacaaaaataggtattctggcattctaggaagaatactgacatgatactatttaataatatcatagaatc

SEQ ID NO: 31606 - DNA, 201 bp, Homo sapiens
tgcctggcctcaaatcttttttatttaaaaatttttcttcttttcaccttttatttctcttgaagtattattgtgtttattcatctttttcttctttctartttagtcttttttgaaatattttcttctaattctttcctgagttctatcacttcatttctgagttttcataattacgattcatgtgttttttcatatctt

SEQ ID NO: 31607 - DNA, 201 bp, Homo sapiens
agctgccattcacacgtggcatgcatttttggtttgtgtgggaaatcttatcacgtagttatggtgtagatgttatgcatggtttattttatttattttgkttaattttattatttttgtcctagttgctctgtttttaatgagggattcaggaaattttaaaaaatgatgtgttcactgctgccatcttcataggggtac

SEQ ID NO: 31608 - DNA, 201 bp, Homo sapiens
caaaagttctgtttaaatgatttaaatcttcatgaagatgttgctataattcacattttatagattaggaaataatgcagaaggattaatattcctaagaycactgatatgaaactattttatgactaagttccaggttgttctactgactttattatattataaaataggcatataagggaaattttcattattgccata

SEQ ID NO: 31609 - DNA, 201 bp, Homo sapiens
agtaagaaataacttctttttatatctttttgtaatttttcttccttgtatacaaattgctgggaaagtcactctattagatgagatacagtaggataatrtatctcattctaaagcacttttcaccttctatcattaggtgttttggtagtttttaattggtagtaagggtaagagatacttcagtgagctcaaattaag

SEQ ID NO: 31610 - DNA, 201 bp, Homo sapiens
aaggaaaatattggaaattgtatttatttttatctactatagtgaacatatgcaaaatcttttccttagccaattaaaaacttaagtcaagaatttacacrtgctttgaaattcttagtattcataattgatgggcatcagtaagacttggaagcatactctttcaacactgtctcagatcttttgtctttactgggttga

SEQ ID NO: 31611 - DNA, 201 bp, Homo sapiens
tcatatagccactcctgctttcttttgattcacatttctatgatacattattttccattctttattttcaaccactgatactgttatatttgaagtgagtktcttgtagacagtatatagtcgaatcatttttaaaatccactctgccaattccggtcttaaattgatatatttagaccacttatatttaatgtaattgtt

SEQ ID NO: 31612 - DNA, 201 bp, Homo sapiens
ttatttggatcttctctcttcttggttaatctcgctagtggtctatcaatgttgtttatcttttcaaagaaccagctttttgtttcacttatcttttgtattttttttttgtttccctttcatttagtcctgttctgatctttgttacttcttttcttctgctgggtttgggtttggtttgttgtttctctagttccttga

SEQ ID NO: 31613 - DNA, 201 bp, Homo sapiens
tatttggatcttctctcttcttggttaatctcgctagtggtctatcaatgttgtttatcttttcaaagaaccagctttttgtttcacttatcttttgtattttttttttgtttccctttcatttagtcctgttctgatctttgttacttcttttcttctgctgggtttgggtttggtttgttgtttctctagttccttgag

SEQ ID NO: 31614 - DNA, 201 bp, Homo sapiens
ttccctcttaaaattgctttggccagtctagggcctttgcattttgatatgaagtctggaatttatttctacgtattttatgtttttggcattattataartggaagtatacatttttttatttcactttccagttttttgttgctggagtataagaatactgttgatttttatatattaaccttgtatcttataaacttt

SEQ ID NO: 31615 - DNA, 201 bp, Homo sapiens
tcttttcttctgctgggtttgggtttggtttgttgtttctctagttccttgaggtgcgacctcagctagtctatttgtgctctttcggactttttgatgtrgacatttaatgctatgaactctcctcttagcaccgcttttgctctatcccagtgattttggtaagttgtgtcactattattcagttgaaagaatttttta

SEQ ID NO: 31616 - DNA, 201 bp, Homo sapiens
agtgtgttcttcagttgttgggtagcatgttctgtagatcatctgttaagttcatttgttctagggtatagtttaagtccattgttgccttgttgactttmtgtcttgatgacctttctagtactgtcagtgaggtattgaagtcccccactattattgtgctgctgtcttaggtctagtagtaattgttttataaatttg

SEQ ID NO: 31617 - DNA, 201 bp, Homo sapiens
tttactgagtatatagtttttctgggtatatatagttatattagctggtatgcattatagacctaaaaatattgcctttcagtaaattcctagtggacacyagtgttttcacatatgcttcctagtcattcagtcatttgttatttttaccctatctgcaataaaaacgaacagaaacttctgaaattactttaaatgtgt

SEQ ID NO: 31618 - DNA, 201 bp, Homo sapiens
ctgaggcaggagaatagcttgaaccagggagtcagaggttgcagtgagccgagattgcaccactgcactccagcctggtgacagagccagactccatctcaaaaaaaaaaaaaaatctttttattttgagaaaactatagattcacatacagttgtaagaaataatacagaaatacccatgttctctttatccagttttcc

SEQ ID NO: 31619 - DNA, 201 bp, Homo sapiens
ttaaattggtgtcagttaagaacaggtggaatttccctctgaggtgatgccatgtttattagcatctttttgatatatatatctatatctatctatctatmtatatatatgtatatttcaagtactttcagaacttaggccactttggttatatttgaaaacagttttttgctgtttgtggaaatggtttttttgggaaga

SEQ ID NO: 31620 - DNA, 201 bp, Homo sapiens
aaaaatcagctgtgtttctacaaaccagcaaccaacaattggaaactgaagtttttcttaaactatcaaaatagcattaaaataagtgatacttagagatraatctggtaaatgttacataagatctataaactgaaaactatagaacatttctgagaggaaataatgagagaactaagtgaactgaaatatagatcatat

SEQ ID NO: 31621 - DNA, 201 bp, Homo sapiens
aataggccgggcgtggtggctcacgcctgtaatcccagcactttgggaggctgaggtgggcggatcacctgaggtcaggagtttgagaccagtctgaccarcatggagaaaccccatctctagtaaaaatacaaaattagccaggcgtggtggcacatccccgtaatcccagctactcaggaggctgaggcaggagaatcg

SEQ ID NO: 31622 - DNA, 201 bp, Homo sapiens
tttcaggtctcctagatattgttttatctaaccaatatctatttagatttacccacatagctatcattttttattacctgtagtatttccatttggaatcttttttttttttctgcctgaagaacaccttttagtattcagtacaagtctgctggtaacaaattatctttgtttttgtctgtttgaaaatgtcttccacat

SEQ ID NO: 31623 - DNA, 201 bp, Homo sapiens
ttgaaaaaaagagtcatcagccaatgaaatgtcctctactgacttcattaagtgtctttgtcctttctttgtcttcatacagtttatggtcctgtcacaaygcttaaatactggcttgaaaatgggaagattttctagttataaggatgtttgcatacttgatgccaaacatctagatgattatgcatatttaagtgctga

SEQ ID NO: 31624 - DNA, 201 bp, Homo sapiens
tgaggcaagagaatggcgtgaacccgggaggtggagcttgcagtgagccgagatcgcgccactgcactccagcctgggcgacagagcgagactccgtctcaaaaaaaaaaaaagagaaatagcgagattatttggacaaactagagaactgggactagaatcagagtctgatcttcatagtgttttatggtctgtcaggct

SEQ ID NO: 31625 - DNA, 201 bp, Homo sapiens
tttttaacgcgaactttgaatgtatgcagaaatgtgcacaaatcataatacagcttgttgaattttcacaagtgaacacacccatgtacccagtatccagrttaaagcatagaacattatcatgttagcttagtagcttcctttgtattcctgtcccagtgccctgtacttcctgcaaagggtagctactctactgacttc

SEQ ID NO: 31626 - DNA, 201 bp, Homo sapiens
ctgtgcaactttgatttctctttttttgatcctctctccatttggcatgggttctctatttcacaccctttgctattccttctgaattttgtctattaaargattctcctagagagtgatgagaacagtggaatgattatgatgtcctgtatttcatagcttaccgtatagcaacagaaaaagcctttcttcatggcaggg

SEQ ID NO: 31627 - DNA, 201 bp, Homo sapiens
taccatttatatatttttataaagtatggcaaactggcaggtcacaggaaaaaatgaggtagaattaaaaaatatgtatttaataatagtctcgaaacttytagacttaagacatataaaacaatagacaatcttgtttcagcacaagcataattaatatcttcatgtatttgttataagatttgcttaataaaatttcag

SEQ ID NO: 31628 - DNA, 201 bp, Homo sapiens
tttatatctgtttttcccagaatcatgccatgtttcaaaggaattaggcccacacagaccaggtttatttttacgttcaatttcagtgatactaactgacytacacttgtcagcatgacacctggaagtgccagttaaacaatagcagaaaggaacaggtatttaggtcctcttggctacagagttaatgtaagtaagcaa

SEQ ID NO: 31629 - DNA, 201 bp, Homo sapiens
tccattttgcctcctagagcaaactcacccagagaaatcttttaaaaagcatcaatcatatcttgtctcccacttgcatgaaaattacttaagtggtgtgrtaggtagaatcatgctccttcccaaaagatattgggccctaatccctagaaattgtaaatgttaccttatttggaaaaggggtctttacagatacagtta

SEQ ID NO: 31630 - DNA, 201 bp, Homo sapiens
gacattgttctaggtaggatgacaaactgtcacaatccaaacaggaaaacagaaattaaaacctctctaaagtttctactctgttgcttaaaggtttatgyactgtttataatttttattcaataaagcgatggcaagttactttatcttataaaatcctaagacacttaaattttatgtagtgtaatgagttaaatgatc

SEQ ID NO: 31631 - DNA, 201 bp, Homo sapiens
gtgttcagattctggatttgttttgaaggtagacccttcaggatttattggtcttttgactgtggggagtgagggaatgagaggagttaaggatgaccccrcagtttttgggctgagcagctggaatggcagagatgacatttactatttatcaggatgaggaagattacaggaggagcaggttttagggagagatcagtg

SEQ ID NO: 31632 - DNA, 201 bp, Homo sapiens
atttttgacaagtcaaaaacaaccctgttagagcaaagaattttaaaacactttctttatccagggaccattttttttttcaaataaaactttattcaagyccagtgtgttttagaaagaataaggtgaaatagaaactggtaaattcaccattgtgggctccgagtttataaggaggagacaaaaaaactactgtctaca

SEQ ID NO: 31633 - DNA, 201 bp, Homo sapiens
gaacaagacaaggatgcccactcataccactcctattaaacatagtactagaagtcctaggcagagcaatcaggcaaaagaaagaaattgaaggcatccarataggaaaagaggaagtcaaatgatctctctttgctgatgatatgattctatacctagaaaaccctaaggatcttgtcagaaggctcctagacctgataa

SEQ ID NO: 31634 - DNA, 201 bp, Homo sapiens
gaactctatgcatttttctgcgttataatcgtaaacaagaacagagacatgaggtcattcaaaaattaattgaacgtaagtaatcattgtctactattttraaaaaggaaagtaaacaaactagttggctttagttatgtctaacttatgtatcattttgctgtgaataattaggttactattgggttttataagatgatt

SEQ ID NO: 31635 - DNA, 201 bp, Homo sapiens
atttccaaatgtggctgtagccttggcctttccttctcaactttggatcatttctgtttgctgggcacctccaccagggtgtctccaccagaatgtcttgstggcttttcaaactcaatgtgctcgaaactgcatttatcactttttatctaaatatgcctctgcttgttattgaagcctgaccatctttctatatcatac

SEQ ID NO: 31636 - DNA, 201 bp, Homo sapiens
tatgtggaaattctttatcttattttctccatatttttccttagtttacatgtgcatttgaaaagaatatttattctccacttgttgactctagtattctrgcatgtcagttataccaagtttgttcagaacttgctgtgtttgttgattttcatgcctattctgttagcataagggcctcctgtgttttggtaacgtttt

SEQ ID NO: 31637 - DNA, 201 bp, Homo sapiens
ctcagcgtggctgtccagagcagggcttttcttcatcaaggacctaggtcctcttccttccacccacctcgccacgccctcggtgcccgagccccgagctstacttcgacggcacttttcaaacacaaccaaacacacccaggcttcaaccccggaccggcttgcttttattatttctcttgggaaagccttatcggtcgc

SEQ ID NO: 31638 - DNA, 201 bp, Homo sapiens
aaggacctaggtcctcttccttccacccacctcgccacgccctcggtgcccgagccccgagctctacttcgacggcacttttcaaacacaaccaaacacasccaggcttcaaccccggaccggcttgcttttattatttctcttgggaaagccttatcggtcgctaagattcagtttaagtgactcttctctgggaggcct

SEQ ID NO: 31639 - DNA, 201 bp, Homo sapiens
gtgactgacttctttcacttagcataatgtgttcaaggttcacccatgttgtagcagctatcagtagtttattcctttttattgcagtgtagtattctacwgtatggatatagcgcttttgtttagccattcatcagttgatggatattgggttgtttccacttaattcttcactttttgattcagtcatgctggcctttt

SEQ ID NO: 31640 - DNA, 201 bp, Homo sapiens
catttttcagaataataacactttggaaatatttttgacaagtcaaaaacaaccctgttagagcaaagaattttaaaacactttctttatccagggaccattttttttttcaaataaaactttattcaagcccagtgtgttttagaaagaataaggtgaaatagaaactggtaaattcaccattgtgggctccgagtttat

SEQ ID NO: 31641 - DNA, 201 bp, Homo sapiens
ttttgaaggttggccaaggcagttgatcatgtttctaagacttttcagcaagaagatggcagagtaagaaaatacaaatcctcaaaatgttatttgggggaaaaaaaaaaaccactactactatatagaaattgacatgtagaattaatctagcaaaaacatagtaatcactataacagtaatcaatatctctgttaaaag

SEQ ID NO: 31642 - DNA, 201 bp, Homo sapiens
tctcagatcttttgtctttactgggttgagagcagttagtcaaagccagattggtaagcttcttcggccatttggatatacacattgaaatgattagaagrttgagtagatgttattaatttatctaccattaaaactaaagaaaagacggtcagtagccttatcacttcaaagttgtttggtgagcatccgttagtttct

SEQ ID NO: 31643 - DNA, 201 bp, Homo sapiens
cacaatcgtgacagaaggcaaggaggagcaagtcacatcttacatggatggcggcaggcaaagagagagcttgtgcagggaaactcccccttacaataccwtcagatctcgagagactcattcactatcatgagaagagcataggaaagacccacccccataattcagtcatctcccacccggtccctcccacaacatgtg

SEQ ID NO: 31644 - DNA, 201 bp, Homo sapiens
atttcacattactcttttttcttcttaaatgatagtccagttttttgaaatctgttcttttatgaactagatagaaaactatatttgagagccttttaaaraaactactttgctgaagtataattgacaactacatatatttaaagtgtactatttaatgaattttgacatatcgatgaaaccatcaccacaatgaaaata

SEQ ID NO: 31645 - DNA, 201 bp, Homo sapiens
ttgtatcttataaactttctaaatttgtttattctaaaaattgttttttagattttctaaaactaaaattttatacgtaagtgatcatatcttctttaaawacagcaatattacttctttctattcaatatttatgccttttgtttctttcttttgtcttattgcaagatccaggacctccagtaaaattaaggtggtaca

SEQ ID NO: 31646 - DNA, 201 bp, Homo sapiens
ctagacaccgcacgcgcgcacacacacacccccctcacctctagacactgcgcgcgcgcacacacacacactcacccctagacactgcacgcgcgcgcgcrcacacaccctcacccctagacaccgcacgtgcgcgcgcgcacacacacacacacaccctcacccctagatacctcataaactgctgaaaataaaaaggat

SEQ ID NO: 31647 - DNA, 201 bp, Homo sapiens
ataatttgtgtactttctttatacatatttatgtatgtatatttgagatggagtctcactctgtcacccaggctggagtgcagtggcatggtccaggctcrctgcaacctccacctcccgggttgaagtgattctcctgcctcagcctcctgagtagctgggattacaggcgtgcatcaccatgcctggctaatttttttt

SEQ ID NO: 31648 - DNA, 201 bp, Homo sapiens
ttcaaagataaatcaatggtgatagaataatattttaaaaaatggtgctggatggaccaattcctggaaagacacaattcatccaggtgcagtggctcatgcctgtaatcccagcaatttgggaggcagagacgggtggatcacctgaggtcaggagttcaagacctgcctgaccaacatggcaaaaccctgtcaactaaa

SEQ ID NO: 31649 - DNA, 201 bp, Homo sapiens
ctgaaccttctggttggaacagacttttaacaagatttagattttcttttaaatgtattttagtgaatgcatgggcatttttgaataaagtttcttaaatrcattcttttgcaaaaactgtgctggagtcccttttaggatctgatttaggctgttttgcattgctataaagaaatacctgggcctgggtaatttatgaag

SEQ ID NO: 31650 - DNA, 201 bp, Homo sapiens
gtattttagtgaatgcatgggcatttttgaataaagtttcttaaatacattcttttgcaaaaactgtgctggagtcccttttaggatctgatttaggctgytttgcattgctataaagaaatacctgggcctgggtaatttatgaagcaaagaggtttaattggctcatagttctgcagactttacaggaagcatagcggc

SEQ ID NO: 31651 - DNA, 201 bp, Homo sapiens
gcatgggcatttttgaataaagtttcttaaatacattcttttgcaaaaactgtgctggagtcccttttaggatctgatttaggctgttttgcattgctatraagaaatacctgggcctgggtaatttatgaagcaaagaggtttaattggctcatagttctgcagactttacaggaagcatagcggcatctgcttctgggg

SEQ ID NO: 31652 - DNA, 201 bp, Homo sapiens
tgggaaattggactggatgctactttattcctctttctactatttttccacaaacaaatctgactaattgaacacaaacaaggtgacttaagaatgtcagwtagagttagtcctctgtctttggccctctagggcctagaattgcctgtcccttcataagtgtcaattagtactcttggaatgaatacaggaatgaatttt

SEQ ID NO: 31653 - DNA, 201 bp, Homo sapiens
aggcagaggtgggtggatcacttgaggtcaggagtttgagaccagcctggccaatatagtgaaaccctgtctttactaaaaaattagccaggtgtggtggygtgtgcctgtagccccagctactcaggaggctgaggcaggagaattgcttgaccccgggaggcagaggttgcagtgagccaagattgtgtcattgcactt

SEQ ID NO: 31654 - DNA, 201 bp, Homo sapiens
ttctctgaatatagtcttttctgtttctgtgacagaaaataactgcctaaggaagatcagggatatttacgattttccttttcaccctgggacaaagttcrtgcttatattctgtttaacccccatgggtagctgtagtgcatgctgtttacctggtccccatcagatgttttagatggaaggaagagtaaaaagggcttg

SEQ ID NO: 31655 - DNA, 201 bp, Homo sapiens
aataatacagaaatacccatgttctctttatccagttttcccctatagtaacatcttgacaggatgttgacattgataaaatcaggatacataagatttcyatcaccatgggatctctcacattacacttgtgtagtcacacctatttccctcctgctcctgtatctctccttagcccctggaattcactaacctgttctc

SEQ ID NO: 31656 - DNA, 201 bp, Homo sapiens
ccttgcccaatgtctccacactgtctatgctcctcgcccatgagtcacttagtagccttctctataatcagtttgactgttatggtattgcagtgcttgcrttcaagtaactcattttacttaatgttgttattattgttaatctcttactgtgcctaatttataaattaaactttatcataggtatgtatgtgtaggaaa

SEQ ID NO: 31657 - DNA, 201 bp, Homo sapiens
cttgcattatgtctagcatacatagtatgtgcagagtaaatatttgtgaaatttatatctctacgtataaatcagaataatagacacatatttggatcttycaaatatgatttttagttaaattacaattcagagaacatgatttcaatttaagtgaaacgattataatattaggtattgatgcatgtttttctttccttc

SEQ ID NO: 31658 - DNA, 201 bp, Homo sapiens; identical to SEQ ID NO: 4985

SEQ ID NO: 31659 - DNA, 201 bp, Homo sapiens
cggatcatgaggtcaggagattgagaccgtcctggctaacacggtgaaaccccgtctctactaaaaatacaaaaaattagctgggcgtggtggcaggcgcstgtagtcccagctactcgggaggctgaggcaagagaatggcgtgaacccgggaggtggagcttgcagtgagccgagatcgcgccactgcactccagcctg

SEQ ID NO: 31660 - DNA, 201 bp, Homo sapiens
attgaaggaacatacctcaaaataataatagctgtctatgacaaacccactgccaacatcaaactgattgggcaaaagctggaagccatccccttgagaaytggaacaagacaaggatgcccactcataccactcctattaaacatagtactagaagtcctaggcagagcaatcaggcaaaagaaagaaattgaaggcatc

SEQ ID NO: 31661 - DNA, 201 bp, Homo sapiens
atgtcacgaggcagactagaaagctggttatttgtgccactaatttttatagaatctaattttatatttgtgttataacatggctttattttagaagaaawatataacaaggatgtatttttaaaaattattattgtaacctgtatctgtctagtactctcaaatctgagagactttattgctatattttaggtatctaag

SEQ ID NO: 31662 - DNA, 201 bp, Homo sapiens
tggtggctcacgcctgtaatcccagcactttgggaggctgaggtgggcggatcacctgaggtcaggagtttgagaccagtctgaccaacatggagaaaccycatctctagtaaaaatacaaaattagccaggcgtggtggcacatccccgtaatcccagctactcaggaggctgaggcaggagaatcgcttgaacccggga

SEQ ID NO: 31663 - DNA, 201 bp, Homo sapiens
aaaaaactctgtgctactcagtgtgaataatttctcttgatgtatcttcagtgttaccaacccttccctgtcatctccattcagctgctgagcctatccarttaatttttttatttccaatattatatttttcagttctaaaatttccatttggttcttttagtgttttctatttctatgccaagaatttgtgtgactaaa

SEQ ID NO: 31664 - DNA, 201 bp, Homo sapiens
tataaatatctacctgaaagaccaagggaacattggcctgatccactgatggcattcttggatgagaagtaggaacagaatttgtttggaaatttgacacktacatgtagaatggtatataacgctgatttatgttcgagagagactttttgggggtttggagaggattcgggaaatatataataaagaaaggataaaagg

SEQ ID NO: 31665 - DNA, 201 bp, Homo sapiens
tttaggtctttgcttaaatatcatcttttcagtggaaccttcaatgacaaccctctttggccacctgctttaaaactgattaatcccctgcccctggtackcccttgtctttattcttcactttatttttctccatagcatttaacactatctgacagattttacttgtttcttttctcttctctgctcccatactagaat

SEQ ID NO: 31666 - DNA, 201 bp, Homo sapiens
gtggaggcagggaatggctagtcttctgtagcagcttcccagcacctggtactactctgaggcatttttctgggccaagcccaggggtccctggagccttmctgaattctggctgcctatactgtggctgcttgctatgtttgggaggcccttttttacagaaacaagatgtgatatgagtgatgtacctatataattact

SEQ ID NO: 31667 - DNA, 201 bp, Homo sapiens
aaacagccatggaaaaagagtagacttttagcttagcaaaggagagtatttcctctgaaatgcctcctcctggaaaggcttttttttaggctctgggattwactcttaacttcctggcattcttcaacctccttgtttcttcctttccaacccagtctagactgtggtagtgccttagaccaccttagactaggtcctttt

SEQ ID NO: 31668 - DNA, 201 bp, Homo sapiens
tgaattgacccctttatcattatgtaatgtttattctttgaaatatactttgttaggccgggcgtggtggctcacacctgcaatcccagcactttgggagkccgaggtgggcagatcacaaggcaggagtttgagaccagcctggccaacatggtgaaaccctgtctctactaaaaatacaaaaattacctgggtgtgttg

SEQ ID NO: 31669 - DNA, 201 bp, Homo sapiens
attgacccctttatcattatgtaatgtttattctttgaaatatactttgttaggccgggcgtggtggctcacacctgcaatcccagcactttgggagtccraggtgggcagatcacaaggcaggagtttgagaccagcctggccaacatggtgaaaccctgtctctactaaaaatacaaaaattacctgggtgtgttggtg

SEQ ID NO: 31670 - DNA, 201 bp, Homo sapiens
cctttatcattatgtaatgtttattctttgaaatatactttgttaggccgggcgtggtggctcacacctgcaatcccagcactttgggagtccgaggtggrcagatcacaaggcaggagtttgagaccagcctggccaacatggtgaaaccctgtctctactaaaaatacaaaaattacctgggtgtgttggtgggcacct

SEQ ID NO: 31671 - DNA, 201 bp, Homo sapiens
atactttgttaggccgggcgtggtggctcacacctgcaatcccagcactttgggagtccgaggtgggcagatcacaaggcaggagtttgagaccagcctgrccaacatggtgaaaccctgtctctactaaaaatacaaaaattacctgggtgtgttggtgggcacctgtaatcccagctactcgggaggctgaggcaagag

SEQ ID NO: 31672 - DNA, 201 bp, Homo sapiens
atataaatatctacctgaaagaccaagggaacattggcctgatccactgatggcattcttggatgagaagtaggaacagaatttgtttggaaatttgacaygtacatgtagaatggtatataacgctgatttatgttcgagagagactttttgggggtttggagaggattcgggaaatatataataaagaaaggataaaag

SEQ ID NO: 31673 - DNA, 201 bp, Homo sapiens
aggccgggcgtggtggctcacacctgcaatcccagcactttgggagtccgaggtgggcagatcacaaggcaggagtttgagaccagcctggccaacatggwgaaaccctgtctctactaaaaatacaaaaattacctgggtgtgttggtgggcacctgtaatcccagctactcgggaggctgaggcaagagaattgccccg

SEQ ID NO: 31674 - DNA, 201 bp, Homo sapiens
catcatatcagggggttcatgctatcaccgtggatttatcatcagttatgttaatttaggtcattcagttaaggaaatacctgccaggtttctccactgtrggagtggtgagagatgacttgcagcctttcctcatcttaggagaaagcattctgtctcttaccattaactatatataatgtggtggtacttttttttata

SEQ ID NO: 31675 - DNA, 201 bp, Homo sapiens
tgaaatttgctaagagagtagatcttaagtattctcaccacaaaaagtcagtatgtgaggtgatggacatgttgattagctttactgtagtaatcattttmcaatgtatacatatagcaaaatatcataatcactttgtagcctgtaaatacataatttattttttctcaatttacaattaaaaagggttaaaaaatccca

SEQ ID NO: 31676 - DNA, 201 bp, Homo sapiens
tctacctactagattacagtagtatttcctaaatgatgattaaaaaaaaatgtccctagaccatgagtagaggggaggggaagggggagatcactcctggktgagaaccactagctaacccagtttcttttccttcaaactcataatacccaatgtactacccataatgtatcagtttttctccctgggtaggaaaagggc

SEQ ID NO: 31677 - DNA, 201 bp, Homo sapiens
tgtctttttaaactgctgttgctttaaagtttgttttgtctgatgtaagaatagctactcctgctcacttttggtgaccgtttgcatggaatatctttttytacccctttaccttaagtttatgtgagtccttatgtgtgtttggtgagtctcttgaagacagcagctggttggtgaattcttatccattctgtgattctg

SEQ ID NO: 31678 - DNA, 201 bp, Homo sapiens
aatcgcttgaacctgggaggacgaggttgcagtgagccaagatcatgccagtgcacttcagcctgggagacagagtgagactccatctcaaaaaaaaaaamaacaacaacaacaacaaaaaaagactcaattcaaaactcacagaagaagaaatagacaatctgaataggctcatatctattaaagaaattgaattggtaa

SEQ ID NO: 31679 - DNA, 201 bp, Homo sapiens
aaaaatgaaatactcaggcataattctaacaaaatatgtacaagatctatataaggaaaactacaaaattctgataggagaaatcaaagaactaataaagraggagatgtctcatgttcattgctagaaatactcaatattgtcaagacgtcagttcttcccaacttgatctataaactaaatgcagtctcagtcaaaatc

SEQ ID NO: 31680 - DNA, 201 bp, Homo sapiens
cacaaaaatgtattcaaaaatgaatcgctgttctaaatgtaaaatgcaaaactataaaattcctagaagttaacataggagaaaatctagatgaccctgcttatggtaatgacattttagataccatgtcaaaggcgcaatctatgaaataaagaataagctgaaattcattaaaattaaaactactatttgaaaaatact

SEQ ID NO: 31681 - DNA, 201 bp, Homo sapiens; identical to SEQ ID NO: 4982

SEQ ID NO: 31682 - DNA, 201 bp, Homo sapiens
tagtgaagacttctacaatgttaagatttcccccgctcggttggaaaccctgaatttgtgtgtatgtatttgtgtaaggtaagttacattttttattggtstgcgtttttctgtcatgcctgtgtacttgggaaatctgaaactgagtgtcttaggaacttcttaaagcaaatgtgagggaacattaaaaagtatatttaa

SEQ ID NO: 31683 - DNA, 201 bp, Homo sapiens
tcttagaagttttagagatagaactaggaccaaaaagtatgaatcagaagttacaggactctctctctctctctctccatatatatatgtatgtctctctscatatatatatatatgtgtgtgtatatatatatacacacacacatatacacacatatacatttatacacacatacatatatacatatatatacacacata

SEQ ID NO: 31684 - DNA, 201 bp, Homo sapiens
gatagaactaggaccaaaaagtatgaatcagaagttacaggactctctctctctctctctccatatatatatgtatgtctctctccatatatatatatatrtgtgtgtatatatatatacacacacacatatacacacatatacatttatacacacatacatatatacatatatatacacacatatatatatatacatata

SEQ ID NO: 31685 - DNA, 201 bp, Homo sapiens
tgtctctctccatatatatatatatgtgtgtgtatatatatatacacacacacatatacacacatatacatttatacacacatacatatatacatatatayacacacatatatatatatacatataacaattttagctatttgtggattgggcagctcttcaaagaaatggtgagtttgatgtcactggaagcatgaagag

SEQ ID NO: 31686 - DNA, 201 bp, Homo sapiens
gcgcccgcccccagcgcccgccctcagccggctgcgggaggcaaaaggctctgcgcacgcgctgtggggtggggcacacttggttgggggcggacgggggwttaggaggacggcgaggagcgggcgcagaagggtggcggggccgccgggtcgttgcgcggcagttgcgtccggcctcttgcgcgcggcgcccgggaaggg

SEQ ID NO: 31687 - DNA, 201 bp, Homo sapiens
ctccatatatatatatatgtgtgtgtatatatatatacacacacacatatacacacatatacatttatacacacatacatatatacatatatatacacacwtatatatatatacatataacaattttagctatttgtggattgggcagctcttcaaagaaatggtgagtttgatgtcactggaagcatgaagaggaagaga

SEQ ID NO: 31688 - DNA, 201 bp, Homo sapiens
ccccagcgcccgccctcagccggctgcgggaggcaaaaggctctgcgcacgcgctgtggggtggggcacacttggttgggggcggacgggggtttaggagracggcgaggagcgggcgcagaagggtggcggggccgccgggtcgttgcgcggcagttgcgtccggcctcttgcgcgcggcgcccgggaaggggcggggcc

SEQ ID NO: 31689 - DNA, 201 bp, Homo sapiens
ccccctagtgatatgaaagagtgagatttctgcagtcaaatcagtggaaataaacaagtgttgtaccatgtgagaactctggcgtacttcttcttgggttmaagactaggatagggtagcaatgagacagtaaggaagaactccagtgattaaagctttgctactcacctagcttttggttgtttttcttttaaaatacct

SEQ ID NO: 31690 - DNA, 201 bp, Homo sapiens
caaagcaatccgtttcacttccatttaggatatagaaagctgcaagagaacatcactcttattctaataacagtaggttatccacaaaatccacacagtcrtaacttcttgagcacatcagagttggtcaccaggcagccaagtgagctgaattctcaagagtaacaaacccctcttaggatagatgggacacaggaacat

SEQ ID NO: 31691 - DNA, 201 bp, Homo sapiens
atctatgtctcccgaaatcttgttggtattttgataggaattgtgttaaagctgtataccactttggggagaatcgccatatttaccatgctgaatttccyagtgtgtgcctctctgattgcttagatatcctttgatttctttcagcattgtgtattttcagcctacaacttctgtacatattttgttagttttttggag

SEQ ID NO: 31692 - DNA, 201 bp, Homo sapiens
gcagtatataatggattccagctgtataccttccattattgctaaggccaaattactgaagtctttggcaaaccttgaattccctgttttggaaaagtackaggtctgtgaatataaagggtttggagattgtttcccatctctgtttccttgtcttttgttatgagaacaaccatgggaggcatctgtgtcttttttcct

SEQ ID NO: 31693 - DNA, 201 bp, Homo sapiens
atagtccttgtagttcacccatttaaactgtacagttaagtgagttttagtatattcacagaattgtgcaaccatcactgcaatcaattttagaacatttycatcacccccaaaagaaaccttgtactattagcagttgctcctcagtaccaaccctctcagcctttgggaaccactattctgctttctgtatctatggat

SEQ ID NO: 31694 - DNA, 201 bp, Homo sapiens
cttatttggatcttctctcttcttggttaatctcgctagtggtctatcaatgttgtttatcttttcaaagaaccagctttttgtttcacttatcttttgtwttttttttttgtttccctttcatttagtcctgttctgatctttgttacttcttttcttctgctgggtttgggtttggtttgttgtttctctagttccttg

SEQ ID NO: 31695 - DNA, 201 bp, Homo sapiens
agcttatttggatcttctctcttcttggttaatctcgctagtggtctatcaatgttgtttatcttttcaaagaaccagctttttgtttcacttatcttttktattttttttttgtttccctttcatttagtcctgttctgatctttgttacttcttttcttctgctgggtttgggtttggtttgttgtttctctagttcct

SEQ ID NO: 31696 - DNA, 201 bp, Homo sapiens
aagaacaaaaggaacactctcccctgccatccattgctggtatcctgtgtgtgtttgatacctcagattcagcatctactacagcacgaagtgcttatgcrtgtcctgaattataggagagtcggattcaccaccctgcccagaaacagaagcattccagaggtttcttcatagatcatgaaatgaaatggccggtccact

SEQ ID NO: 31697 - DNA, 201 bp, Homo sapiens
caaccatggtccaaaaacattaaatgaaaaattccagaaataaacaatctaaaagtcttaagcagcatgccattctgagtagtgggatggaatcttgcatygtcctgctctgtcccacccaggatgtgaattctccccttgcccaatgtctccacactgtctatgctcctcgcccatgagtcacttagtagccttctctat

SEQ ID NO: 31698 - DNA, 201 bp, Homo sapiens
aactgagataatatacataaattatctgaaaggtgtggtccctaatctcaagaatttgatcatctcatgggcccaggagtctcatagagatgaatcattaygatggcttgggtagcttctgctgaatatctgttttctagacatgccttgggttataaagaatggagtgtgcatagattgttaagtgtttttgtttttcct

SEQ ID NO: 31699 - DNA, 201 bp, Homo sapiens
acaaatatggtagttcattttgctgttcaggatatcctgtttgtattacttttgccgtgcaagctttatgattttgtctgaggggttttagaaatttggtygagcctactgtcatttcaatttcaaaccatctcacaggctctacagaattgcttaaggcaaatggttattgcaaatatttacaagatttttctgaactat

SEQ ID NO: 31700 - DNA, 201 bp, Homo sapiens
aatttcaaggatccccactataatatttgggatctttagtaattcaacattatatttgtatgtaaatcaagataatgaacatgaatttatactggacacartacgtctggttgagagatttttctctaatatatggtttgaacccaaacccaggaaagataaatggccatatttatttagaattaaggttctgcctagtgg

SEQ ID NO: 31701 - DNA, 201 bp, Homo sapiens
agtcatcttcctcccggcggctccaacctttagcgccagcaaacctagtttacggaccggacccctttcccctggccattgcttaattagctgccttagckcctctcactcccacctgccgcaatatctcaaatctctggtttttttccagccccggagtttatttccttccctcccccactccagatcttgtccttttca

SEQ ID NO: 31702 - DNA, 201 bp, Homo sapiens
atatgaggtacaaaatatacatgttttcatatgactgttatatatgtatttgaaattctatcagtatatataaaatgaaagaaaagaataatatgcttttrtttagttcaccatttatcaaaaattcattttccttaagtctaatcatgtttctgcttatgtatattttttaaattttcttttctaaatcataggaaatac

SEQ ID NO: 31703 - DNA, 201 bp, Homo sapiens
aagcctctgtgtaacctaagaaaagggtaggatttaggaggtcaaagcttattgacagtaataatatgtaatacattttactgtagttggaagagttgctrtgataatctgacaggaagaagaatgagttgtagtttttatttcaaaatttggttcccaggaatcatactttttacttaatgatttcttttaaaagtgttt

SEQ ID NO: 31704 - DNA, 201 bp, Homo sapiens
tggggccaagccttgacaggcattttgatggagacaaaccatattaaaaccagtaccctatggcatacagtgttgctacatattccatctctcttttctcycatcaaaacttaactgacttgtgtgtgtatagggctaagaatttgactttaactttttcacctaattgacattaagacagatcctgagacattgtctaca

SEQ ID NO: 31705 - DNA, 201 bp, Homo sapiens
tcttgatatatattcttcgggcacttgaatggaatgtgtattctgctgttggatagagtgttctataaatgtctactaaatcttggttgatggtattcttragttcttctatatctttgctgattccctgtgtagttctgtcagttgttgagagatgggttctgaaatctccagctgcacctgtgtatttttgtctgtttt

SEQ ID NO: 31706 - DNA, 201 bp, Homo sapiens
ttgaacctctaccctgggccaggcattgtcattttctttttctttcagattattctctttcagttctttagcagtgtagtaaatttatttcctctggttgktgtaacaaattaccgcaaaccaggtggcttaaaaataatagaaatttattctgtcacagttctagaaaacagaagtctgaagtcaagatgtcagcaggga

SEQ ID NO: 31707 - DNA, 201 bp, Homo sapiens
ttcatggcagggcagcttcatttagaatcagaatatgtttctttctaatagaacttactctaaagcaaaaataatattattttaaaaactatgtaaaacaygtattaaagtcttatgtacgtataactacaaatccatttgaagagataagtaaaaataattctaatcaataagtaaatattatggaatcagctatcaata

SEQ ID NO: 31708 - DNA, 201 bp, Homo sapiens
aattttatatctaaatgatgtatttctggcttaaaacttagaagtctgagtgcttaacattcaaagcagtcatttttccaattagtccatactttttatarctgtgcagaggaattcagcttataattataaattttaaatttgtgttttctttgtaagtgctggtcaagatgtccaaggaacaagtgtgattgcaaatct

SEQ ID NO: 31709 - DNA, 201 bp, Homo sapiens
gtgtcctccaagagtttacctactaatggggtcagtgaggttacatactaatgaggattatgtttgctaatagaggttggtagattttgctttgttttttwatttggatatagctcttgtcataatttttaatttatgtgtttaaaatactgaagttattattgagtccttgagttttatttttaggcatgtgtagcatgg

SEQ ID NO: 31710 - DNA, 201 bp, Homo sapiens
tcatcagggtcagaattaagaggtcttgtggtttaggaagcataaaattatgtaacttattgtttatttcactcagaaaataaaagtattaatgaaaggarttagagatgaacagattgatacaaactgttctatggtttacagcttaaaaaataaaggtacatttaatgctatgcattttgagaataatgtcttttatgc

SEQ ID NO: 31711 - DNA, 201 bp, Homo sapiens
acgcctgtaatcccagcactttgggaggctgaggtgggcggatcacctgaggtcaggagtttgagaccagtctgaccaacatggagaaaccccatctctastaaaaatacaaaattagccaggcgtggtggcacatccccgtaatcccagctactcaggaggctgaggcaggagaatcgcttgaacccgggaggcggaggt

SEQ ID NO: 31712 - DNA, 201 bp, Homo sapiens
caccgcacgcgcgtgcacacacacacacacacctcctcacccctagacaccgcacgcgcgcgcacacacacacaccctcacccctagacaccgcacgcgcrcacacacacaccctcacccctagacaccgcacgcgcgcacacacacacccccctcacctctagacactgcgcgcgcgcacacacacacactcacccctag

SEQ ID NO: 31713 - DNA, 201 bp, Homo sapiens
tgttattaatttatctaccattaaaactaaagaaaagacggtcagtagccttatcacttcaaagttgtttggtgagcatccgttagtttctagaggcccayttattcaaagaagtagaactgcttcaaagtcttcatcttgtcttctatgttttgccttatattattgaaatccagtaaaatgttaattgcatttgattaa

SEQ ID NO: 31714 - DNA, 201 bp, Homo sapiens
ttttgactctgtggcttattttctttggccagttttggaaaattctcaggtatctttttacatgtgcctctgcctaatcttctctctctcctccttctaakactccaattttatgtatattagatcttttaatagtatttccatgtcctttatcttcttttctttcttttccatccttttttctgtttgtgattcattggt

SEQ ID NO: 31715 - DNA, 201 bp, Homo sapiens
ggctctctataactacaaacatttgatatcctgcacatagttgaacagtagcaaagctggagttctcagatatagtactgactgattatgtcacgtcatcrtttttggatagcatctgctcatctcctctctcttgtctaagtggtttaggattaaacaaattatgagggtgtccaggctaggaaaagaggactttgtgct

SEQ ID NO: 31716 - DNA, 201 bp, Homo sapiens
tagccatttaccaatctgaaattgaaacgaccaaagtaatggatattttgctaatgtgatttaggaaataccgtctagaaaatgaagggtaattattacartgataccaaactcattgttttagcttgacaaaccctcaagggcataattctgtagatatgaaaagagcacaaatctgaaagaaccctgaattctttagac

SEQ ID NO: 31717 - DNA, 201 bp, Homo sapiens
taggtaaagaaatcaagaaatccaaactgattcgaagccagtcttttaataatcaagcttttcatgcaaaatatggcaacttagagaaatgtgctaggtaygatctgtaagcccttcaatttttaacataatttttatctttattcacatcttcatatatatgagtttacattttataaaaatcagaattaattttgaggt

SEQ ID NO: 31718 - DNA, 201 bp, Homo sapiens
agactgtgtgatatacataatttacaagtagctaataacatccaaatttaataacatgtaaaataccttgtaaactattattttttttctattaaagtacrtttgttattattaaggtgagttaagattttaatgataattgtttgggaatattattctgaaacactcattcatttgcatgtttcttttctccccaccttc

SEQ ID NO: 31719 - DNA, 201 bp, Homo sapiens
ctgggctcaagtgttcctcctgcctcaacctcctgagtagctgagactacaggcactagccaccatgcctagctaattaagttttttttgtagagttaggrgtcttgctctattgcccagtcttgtcttgaactcctggcctcaagtgatccacctgcctcaaccccgcaaggtgctgggattataggtatgagtcaccag

SEQ ID NO: 31720 - DNA, 201 bp, Homo sapiens
aggtaagttacattttttattggtctgcgtttttctgtcatgcctgtgtacttgggaaatctgaaactgagtgtcttaggaacttcttaaagcaaatgtgrgggaacattaaaaagtatatttaaaatatagaataggtccattttctaccttaaagagtagtatattaaatacaattattatgctgttgttgctttgcag

SEQ ID NO: 31721 - DNA, 201 bp, Homo sapiens
gaagcattccagaggtttcttcatagatcatgaaatgaaatggccggtccactttgatgacaggaggcatggaataagcagtaatttctgacaagattccygccactgcctcagtgcccctttcatcaacttcaatcactgttctttgtaaaacctggaaaaaggaaataatgtgaaaaaccatttgtgtggcagtgcaaa

SEQ ID NO: 31722 - DNA, 201 bp, Homo sapiens
tttgtgtgtatgtatttgtgtaaggtaagttacattttttattggtctgcgtttttctgtcatgcctgtgtacttgggaaatctgaaactgagtgtcttargaacttcttaaagcaaatgtgagggaacattaaaaagtatatttaaaatatagaataggtccattttctaccttaaagagtagtatattaaatacaatta

SEQ ID NO: 31723 - DNA, 201 bp, Homo sapiens
gcatccctttaaacacctagcttaaggatatggtatttaatcacccagtgtgcagaaagattggtaaagctgatgtcacttaagaaataagtggcagcatkgaacccagaattgtgagtccaataaactgaagagatttacagactgtacttgtgtcttgaagctgaggttataaagggcctcctttctccttttccccca

SEQ ID NO: 31724 - DNA, 201 bp, Homo sapiens
gcagcaagcaagagggtgtatgtaggggaactgcccttttataaaaccaccagatctcgtgagacttattcactatcacgagaacagcatgggaaaaattygcccccatgattcagttacctcccaccgggtccctcccacaacacatgggggttattacagttcaaggtgagatttgggtagcgacacagagccaaacta

SEQ ID NO: 31725 - DNA, 201 bp, Homo sapiens
taaggaaaaaaggctaaagccatctgtgttttactgaaaatgatggtagttggggagggaatgggggttggagcagccgaggatgaactgaatacattttycttttttctgcttattgctctaggtaaagaaatcaagaaatccaaactgattcgaagccagtcttttaataatcaagcttttcatgcaaaatatggcaac

SEQ ID NO: 31726 - DNA, 201 bp, Homo sapiens
tcatgttggcctggctggtctcaaactcctgatctcagatgactcacccatcttggcctcccaaagtgctgggattactggtgtgagccactgtgcccagsctctctatgtatattatacttaaataaagcatttaaaaatatccaagaccattttcttttctctcaatctttttaaagaaagatattatttagccattta

SEQ ID NO: 31727 - DNA, 201 bp, Homo sapiens
ggctggagtgcagtggcatggtccaggctcactgcaacctccacctcccgggttgaagtgattctcctgcctcagcctcctgagtagctgggattacaggygtgcatcaccatgcctggctaattttttttatgtttttagtagagatggggtttcatcatgttggcctggctggtctcaaactcctgatctcagatgact

SEQ ID NO: 31728 - DNA, 201 bp, Homo sapiens
ggttgttctactgactttattatattataaaataggcatataagggaaattttcattattgccataattgagcaagtaatacttcttgttgcctttacatyacacacacaaacacacacactttctctctctatctctctctctcatagagaagtacagtaatatctttgaggcttacgtagaaagatagtttttttgacc

SEQ ID NO: 31729 - DNA, 201 bp, Homo sapiens
ttgagatggagtctcactctgtcacccaggctggagtgcagtggcatggtccaggctcactgcaacctccacctcccgggttgaagtgattctcctgcctyagcctcctgagtagctgggattacaggcgtgcatcaccatgcctggctaattttttttatgtttttagtagagatggggtttcatcatgttggcctggct

SEQ ID NO: 31730 - DNA, 201 bp, Homo sapiens
gaaccatgtatgtatcatatagcactagtatctggagctccttttggcatgtttatattttgtattgtttctgcttattatcttatctccttatatatgtkgatattattgattatgtgcttggtcttgtatttgacaaattatttgtagaaatagtttgaggcctaggatgatatctttctcatggaaggaatatatttt

SEQ ID NO: 31731 - DNA, 201 bp, Homo sapiens
tggagctggttatacaagtgcgtctattttgggaaaattcattgagctatgaatttgtatacctataatttgtgtactttctttatacatatttatgtatstatatttgagatggagtctcactctgtcacccaggctggagtgcagtggcatggtccaggctcactgcaacctccacctcccgggttgaagtgattctcc

SEQ ID NO: 31732 - DNA, 201 bp, Homo sapiens
ctctattctacattcttctgcctttgccatgaccctgaagtaccagtcagatacactattgctatttgcttttatgaagtaagtctgaagacttgatatcrctttacgtttgttgttaattctacctatgtatactagatgattttgtgcttatagattataagatatagactggatatctctttcatgttctagtcttaa

SEQ ID NO: 31733 - DNA, 201 bp, Homo sapiens
gcatttgaaaagaatatttattctccacttgttgactctagtattctagcatgtcagttataccaagtttgttcagaacttgctgtgtttgttgattttcwtgcctattctgttagcataagggcctcctgtgttttggtaacgttttgtttcatgatattggagctggttatacaagtgcgtctattttgggaaaattca

SEQ ID NO: 31734 - DNA, 201 bp, Homo sapiens
ccagcctctctatgtatattatacttaaataaagcatttaaaaatatccaagaccattttcttttctctcaatctttttaaagaaagatattatttagccrtttaccaatctgaaattgaaacgaccaaagtaatggatattttgctaatgtgatttaggaaataccgtctagaaaatgaagggtaattattacaatgata

SEQ ID NO: 31735 - DNA, 201 bp, Homo sapiens
tggcacaatcttggctcactgcaacctccacccgccaggttcaagtgattcctcctgcctcagcctcccaagtggctgggattacagatgtttgccaccayacccagctaatttttgtatttttagtagagacggggtttcaccatgttggtcaagctggtcttgaactcctgacctcaggtgatctgcctgcgtcggcct

SEQ ID NO: 31736 - DNA, 201 bp, Homo sapiens
tctagtcttaaatcttgtttaaaaatttccttaattttcttcttttttagtatgtttactgaatcatttccataaatacattatatttgtgtattcttttwttaacccattcattcagcatatctataccaagtgtttaaaccagacattgtggtagatatgggtgatgcggattttaaagtaaaatcagtttttatatgc

SEQ ID NO: 31737 - DNA, 201 bp, Homo sapiens
atgcaaaagataaaatagatcatagacctaaatgttaaagactgaaattattaaaacttctagaggaaaccataagagaaaatttttgtgaccttgggttrggtaaaagtttcttacatatgactctagaagcatgatccttagaagaaaaatttgataaattagatctgttcttcagaagacactattaagtgaatgaaa

SEQ ID NO: 31738 - DNA, 201 bp, Homo sapiens
ttaaaacatatatctgagtacttatgtgctaggcatctcctggggaatgaaggtcattatactagcagatacttgtattcaaggagatagtttaaggaagsaaatgcatttttcttaaatttcagtagaatagaggttatccccaattaacaggtactgggagtcagtgtgttgtattggaaatagtttaagacagaccca

SEQ ID NO: 31739 - DNA, 201 bp, Homo sapiens
aaatttgtcataaaattatataaaagaaatcgagcaattccaggcacagataaaaataatgtagccaatatttattgaggtcttactatgtgtcaggcacygtattctgtcagatattctacacattttaatctgaatactcatagcagttctataatgatcacttgacagtggaagaaacaacttagttaagtaacttgc

SEQ ID NO: 31740 - DNA, 201 bp, Homo sapiens
atgcatattcagtaattccagctactttgagaggaaacaagccagttgactatagagtcatagaattttagaaattaaagagatcttagtaggacatattyttgtttccattttaaatagatgagaaactggagattagaaatagcgagattatgggctgggcgcggtggctcacacctgtaatcccagccctgtgggagg

SEQ ID NO: 31741 - DNA, 201 bp, Homo sapiens
gcaatctaagttcttcaaaaagttgctaaatttaacaaaatattattttccttaaatgacctatttctttagtactagatgtagtgttttcttaaatctawatctttatcaggtccctaagaaattaaacttttgtctagcaattgagaaaatatttgactaaactattttgtcttcactgtgtcaagactcaagagttta

SEQ ID NO: 31742 - DNA, 201 bp, Homo sapiens
ttatatccttccacatgtttaaaatcatctctagatgctaatagtacctaatacaatataaatgctatgtaaatagttatgctgtattgttcaggaaatawtgacaagaaaaaagtctgtacatgttcagtaaagaagaaatttttttctgaatattttctattcatggttggttaaatccacagatgtggaacctgcaga

SEQ ID NO: 31743 - DNA, 201 bp, Homo sapiens
gtagatccatcaagagtacctggccagtagagtgatctcaagatagaaaaaagagattataactaaagataagttttgtttccaagaaaattttacccatyttagctgccttgcttgaacctcaaaagaaaaactgtaattctgatgaagcaaaagtttaaggaaatgctttcaagttatagacgaagtaagtgttgtgag

SEQ ID NO: 31744 - DNA, 201 bp, Homo sapiens
acatgttcagtaaagaagaaatttttttctgaatattttctattcatggttggttaaatccacagatgtggaacctgcagatgttgagggccgactacackctaatggaagcctttctatagctcctgtgcaacttcaggcttccaatgtttgttttgttgctctccttgttctttttttttttttttttttttttttttt

SEQ ID NO: 31745 - DNA, 201 bp, Homo sapiens
tgtaggaaatgacaaactaattctaagattcgtatgagaatgtaaaggacctagaatagccaaaacaactttgaaaaataggaacaaaattggaggacttrcattacctgatttcaagacataatatatagccacagcagttaatactgtatgattggtgtaaagacagataaagtaatcaatgagacatagagaaagttt

SEQ ID NO: 31746 - DNA, 201 bp, Homo sapiens
gaacctgcagatgttgagggccgactacactctaatggaagcctttctatagctcctgtgcaacttcaggcttccaatgtttgttttgttgctctccttgktctttttttttttttttttttttttttttttgagagggagtctcactctgtcacccaggctggagtgcagtggcgcgatctcggctcactgcaagctccg

SEQ ID NO: 31747 - DNA, 201 bp, Homo sapiens
ttcaatcttagaagtgtgatattaaagggagtcttacctaaaaaccatcttgggaaatcttttcttttaaaaacaagattcaaaattggtacaaaaatcaytggaacctctcatttttagcagaagttgcactgatttcatctggttctttgttgcacaagctaggacaatcagattgtggtcattggtacctttgttaat

SEQ ID NO: 31748 - DNA, 201 bp, Homo sapiens
attagcatacatggtgagaaaagagagaattcttattttttctctttttttctagaaatcattgccagatgtcacatgaagaatcttttaattaagtgatytgatgacttagtatgaattagtatagttttagttttaatgaaatgtgaattcttctttcattaactggtataaccagaaatacgtagagttgcacatgca

SEQ ID NO: 31749 - DNA, 201 bp, Homo sapiens
agagagaattcttattttttctctttttttctagaaatcattgccagatgtcacatgaagaatcttttaattaagtgatttgatgacttagtatgaattastatagttttagttttaatgaaatgtgaattcttctttcattaactggtataaccagaaatacgtagagttgcacatgcatttaaatctacacacacacac

SEQ ID NO: 31750 - DNA, 201 bp, Homo sapiens
gttttcagaattttaagtgggttgtttattattgttgagaggtaagagcttttaatccattctgaatacaatttctttcacagatatacatattatgaatwttttcttggagtctgaggcttatctgttcatttattaatggtgtcttttgaacaacagaaatatttgattttgatgaagcccagtttatcaattctttct

SEQ ID NO: 31751 - DNA, 201 bp, Homo sapiens
ccagtttatcaattctttctttgataattcttttttgttccaagaatcctttgtctgtcccaagatcatagattttttcctctattttcttttaaaaattytcattttaggttttatatttaggtttatgatccatttcaagtacatttttatataatatatgtttatttttttccatagggaatattcatttattccagc

SEQ ID NO: 31752 - DNA, 201 bp, Homo sapiens
ccagctactcaggaggctgaggcaggagaatggtgtgaacccgggaggcagagcttgcagtgagccgggagagagagcgagactccatctccagaaaaaamaaaaacaaaaacaaaaacaaacaaacaaacaaacaaaactgtaaggaaaggtcagagtcagagcttggaatgccagattggatactttttacttaacacg

SEQ ID NO: 31753 - DNA, 201 bp, Homo sapiens
tttcttctgattcagtgccccatttacagtgataatcagtcaaatgaacagacaggagccactgtatattatttgggactctctttctgggtcagattatrcactctggatttcagtcatcatttccatggcatgatttccaaatgtggctgtagccttggcctttccttctcaactttggatcatttctgtttgctgggc

SEQ ID NO: 31754 - DNA, 201 bp, Homo sapiens
acttgaatgcctgggcctgagctggagtgatcttcctctcttagtctcttgactagctgggactataggcgcagtaccccacaccgggcaatacttggttyatttatactgattatgactaaagtcagcagaacaaaacaacatgttcacagccccaagaaattcccaggcatgcaagttaagaactcccattttaatgca

SEQ ID NO: 31755 - DNA, 201 bp, Homo sapiens
atccttgccaacatttggcacgttgagtccttataattttagttattttagtgaatgtgtagtgatatctcattgtggttgtaatgtaattttacctaacrattaaaattttgttgagcattttaagatgtatttatttgccatttttatattttctttggtgaggtgttcaaatcttttgtctgctttttattggatgtt

SEQ ID NO: 31756 - DNA, 201 bp, Homo sapiens
tgattctatttccttagtagacattagataatgtagatcttctgtttcttctgttgtcaattttggtaagttgcttcccttccaccccagtttacatgttrtttaaactgacaaatctgttggcatgaagttatttataatattctattatccttttaattatggcattaatctatgatgataaccattttattcttgtgt

SEQ ID NO: 31757 - DNA, 201 bp, Homo sapiens
gtctttgcttactggccatctttatctcttatttgataaagtttgttttcagaattttaagtgggttgtttattattgttgagaggtaagagcttttaatycattctgaatacaatttctttcacagatatacatattatgaattttttcttggagtctgaggcttatctgttcatttattaatggtgtcttttgaacaac

SEQ ID NO: 31758 - DNA, 201 bp, Homo sapiens
gaatagaatggctgatttgtatggcatgcttaacttaaaaataaaataaaactaaatttaaaaaaatggccgggtgtggtagctcatgcctgtaatcctarcacttttgggaggccgaggcagacggatcacgaggtcaggagatcaagaccatcccggctaacatggtgaaaccccatctctactaaaaaatacaaaaaa

SEQ ID NO: 31759 - DNA, 201 bp, Homo sapiens
gcgatctcggctcactgcaagctccgcctcccaggttcatgccattctcctgcctcagcctcccaagtagctgggactacaggtgcccaccaccacgcccrgctaattttttgtatttttagtagagacggggtttcaccgtgttagccaggatggtctcgatctcctgacctcgtgatccgcctgcctcggcctcccaaa

SEQ ID NO: 31760 - DNA, 201 bp, Homo sapiens
atgcctgtagacttggtcttcttaaggttaaaaactttcaaaagttaaaattgaccctggcatgattgtataaagattgattgtaagtacaatgtagaatkgggcagaactttagttttctgacttagtcttccccctagtgcagaagtcttctatttgaacctccatttgcaaaataagttgctgagaaatgattggttg

SEQ ID NO: 31761 - DNA, 201 bp, Homo sapiens
aataggaaaagttccccagaccgctcgcagggcgtgcagtgggggagtggcgtgcttctttggtgccccactgctcaaacctctagggggagcatgcagaygggcaggttgtggggctctgaccccatggcagtgtctagaggtagatgtttagagctcccgaagtcccagtgggcatgtgttacagggtgctctttcagt

SEQ ID NO: 31762 - DNA, 201 bp, Homo sapiens
ttatatgcatttggtatttgaaatatgcctgtagacttggtcttcttaaggttaaaaactttcaaaagttaaaattgaccctggcatgattgtataaagaytgattgtaagtacaatgtagaattgggcagaactttagttttctgacttagtcttccccctagtgcagaagtcttctatttgaacctccatttgcaaaat

SEQ ID NO: 31763 - DNA, 201 bp, Homo sapiens
aagacaaatagtaaattgagagaatattttcagagcagatataaaatttctacagaagggaactaaggattattaggccccatgatggcttgtctcattcrtatatagctaaaagactttttaaaacttcaaaagctacattatgtttctgaaaattcagaaaagattggcactgggagttactagaaattagttagatta

SEQ ID NO: 31764 - DNA, 201 bp, Homo sapiens
agacagccaaacatttaatcactcccatttcaaatgataaaatctgtgtttctgtgcatattattttaaattcattgtattcagattttgttatgacttaytggtactcctggttagcacctttgtcaattccacctcacttctgtgagtgtctactttccagtgatgaaatgctgacagcatctcgggtaactgctttat

SEQ ID NO: 31765 - DNA, 201 bp, Homo sapiens
atatatcttgcatgaataaatgaactctcaggctatctaaaacttgatttttgttttatgtttctgttattcttagttattaacttcactcaagagtaaayactattttattgtagaatgaaactttgctacctgttgcccaaagtgaaatctactctgaagattcctgctgataagcatctacttcagcagttagaaatg

SEQ ID NO: 31766 - DNA, 201 bp, Homo sapiens
aatagagtattgtgtgcttgtgacttgatgtaaaaatgctgaagaataaggcaaatgagaagggctttatgggggtaactccagtaataatgacttttatygatagtctaatatataatgtagacagccaaacatttaatcactcccatttcaaatgataaaatctgtgtttctgtgcatattattttaaattcattgtat

SEQ ID NO: 31767 - DNA, 201 bp, Homo sapiens
taatagacactccatgaatatatcttgcatgaataaatgaactctcaggctatctaaaacttgatttttgttttatgtttctgttattcttagttattaamttcactcaagagtaaatactattttattgtagaatgaaactttgctacctgttgcccaaagtgaaatctactctgaagattcctgctgataagcatctac

SEQ ID NO: 31768 - DNA, 201 bp, Homo sapiens
tttctgcttattatcttatctccttatatatgttgatattattgattatgtgcttggtcttgtatttgacaaattatttgtagaaatagtttgaggcctargatgatatctttctcatggaaggaatatattttcttctggcagacacctaactgcactagcaatagagtcttacttaacctgatttcaggtactggatga

SEQ ID NO: 31769 - DNA, 201 bp, Homo sapiens
atgaatgtttgacacataatagacactccatgaatatatcttgcatgaataaatgaactctcaggctatctaaaacttgatttttgttttatgtttctgtyattcttagttattaacttcactcaagagtaaatactattttattgtagaatgaaactttgctacctgttgcccaaagtgaaatctactctgaagattcct

SEQ ID NO: 31770 - DNA, 201 bp, Homo sapiens
acttaagtactttccaaagaatagaaaatgtctgtgatgagaaaatgttataaattaaagggtattattgtcacatgtgactctgttatgttagtttatayagaataacttatatatggcaaaggcattataaccttagggaatcaacaggaaacatttaaatggctcccactaatgtctgaaatctattttttttctatg

SEQ ID NO: 31771 - DNA, 201 bp, Homo sapiens
ctggataatcgtgggcaggcccattcctcttcttgtgcctcattttcttcttttgtaaaacaatggctgtaccatttgcatcttagggtcattgcagatgwaagtgttgctgtccagagcctgggtgcaggacctagatgtaggattctggttctgctacttcctcagtgacattgaatagctgacctaatctctctggct

SEQ ID NO: 31772 - DNA, 201 bp, Homo sapiens
ggtaagcactacgtacattttgctattcttctgattctttcagtgttactgatgtcggcaagtacttggcacaggctggtttaataatccctaggcacttycacgtggtgtcaatccctgatcactgggagtcatcatgtgccttgactcggggcctggcccccccatctctgtcttgcaggacaatgccgtcttctgtct

SEQ ID NO: 31773 - DNA, 201 bp, Homo sapiens
tctatggagacagaagtcagaacagaagttaccttcgggaggcattgatagaaagaggactttgtggatgggagaatttgctctgtcttgctcagaatggyggttacacagatgcacacacatgtaaaaatgtattgagctgtgtatttaggagttacagttttactacatgcaaataacacgtccataaaaagtaaatcg

SEQ ID NO: 31774 - DNA, 201 bp, Homo sapiens
gactcagcaagaagcataagcgcactgctgatattggtgacaacatagatcaatctcagaaacatgatgttgaactaaagaagacagacacaaaaacatargtagtgtattatcccatttacatgctcttctagaaggggaaaaaccagtctatggagacagaagtcagaacagaagttaccttcgggaggcattgataga

SEQ ID NO: 31775 - DNA, 201 bp, Homo sapiens
tcctccagacaggttctgcaggacgcagcctaggactcattatccccaaagtacacatggggaaactcaggcccagcaggtcaaatgctctgtccagtgtrggcctggaaggcaggtcttctccactgttaggcctggctgtccccaacagcacatacttcctcagtccatatgggatcacgataaacaactccatcctcc

SEQ ID NO: 31776 - DNA, 201 bp, Homo sapiens
ctgaaccataccacctcaccacactctccccttcgagggtcacgctaaacttctgcagaggtaattcctccttaaaccagaagggttgctggtggcccacwgctcacgcctagcacacttcatgagaaaaacaccctgtgcccagtgtggagcaggcattgagctgaaggtggtgagcagaagctcatccaccagatgttg

SEQ ID NO: 31777 - DNA, 201 bp, Homo sapiens
agaggctactggtctcccacaatgtcacacagctcataagtggcaaagctggcttgatgggctacttgttcctctgaaccataccacctcaccacactctycccttcgagggtcacgctaaacttctgcagaggtaattcctccttaaaccagaagggttgctggtggcccacagctcacgcctagcacacttcatgagaa

SEQ ID NO: 31778 - DNA, 201 bp, Homo sapiens; identical to SEQ ID NO: 4997

SEQ ID NO: 31779 - DNA, 201 bp, Homo sapiens; identical to SEQ ID NO: 4998

SEQ ID NO: 31780 - DNA, 201 bp, Homo sapiens
ttacttggcccagggccactggcacacctcacccccttacccgattccttgctgcagaccccaaatctcgactctcacatccctatccagcccataccacsaggctcccatctccaggcagggccctgtggtggggcagggcctcccccagatgccccttactcatgaccagctcacaggatcttcccatgatgcatttcc

SEQ ID NO: 31781 - DNA, 201 bp, Homo sapiens; identical to SEQ ID NO: 4999

SEQ ID NO: 31782 - DNA, 201 bp, Homo sapiens
cactgcttaaatacggacgaggacagggccctgtctcctcagcttcaggcaccaccactgacctgggacagtgaatcgtaagtatgcctttcactgcgagrggttctggagaggcttctgagctccccatggcccaggcaggcagcaggtctggggcaggaggggggttgtggagtgggtatccgcctgctgaggtgcagg

SEQ ID NO: 31783 - DNA, 201 bp, Homo sapiens
aaattacagatattcacaagtttgttaccaatgaccctgagctaggaatcagcctgggatcttttcccaggtctaccactaatgtgccacctaacactgcrgacatcctctcctctccctgagccccagtttcctcaccagagaatgtgagcattgaggtccctggagtcctgacattccatagagctctgagggcttcag

SEQ ID NO: 31784 - DNA, 201 bp, Homo sapiens
agcagaagtggatgagggtgtctaggtctgcagtcctggcaccccaggatgggggacaccagccaagatacagcaacagcaacaaagcgcagccatttctytctgtttgcacagctcctctgtctgtcgggggctcctgtctgttgtctcctataagcctcaccacctctcctactgcttgggcatgcatctttctcccct

SEQ ID NO: 31785 - DNA, 201 bp, Homo sapiens
ccgtgctctgtcagggaactaacagaggaataaattacagatattcacaagtttgttaccaatgaccctgagctaggaatcagcctgggatcttttcccargtctaccactaatgtgccacctaacactgcggacatcctctcctctccctgagccccagtttcctcaccagagaatgtgagcattgaggtccctggagtc

SEQ ID NO: 31786 - DNA, 201 bp, Homo sapiens
tcccattttacagatgaggaagatggggacagagaggtgaataactggccccaaatcacacaccatccataattcgggctcaggcacctggctccagtccycaaactcttgaacctggccctagtgtcactgtttctcttgggtctcaggcgctggatggggaacaggaaacctgggctggacttgaggcctctctgatgc

SEQ ID NO: 31787 - DNA, 201 bp, Homo sapiens
ctggacttgaggcctctctgatgctcggtgacttcagacagttgctcaacctctctgttctcttgggcaaaacatgataacctttgacttctgtcccctcycctcaccccacccgaccttgatctctgaagtgttggaaggatttaatttttcctgcactgagttttggagacaggtcaaaaagatgaccaaggccaaggt

SEQ ID NO: 31788 - DNA, 201 bp, Homo sapiens; identical to SEQ ID NO: 5004

SEQ ID NO: 31789 - DNA, 201 bp, Homo sapiens; identical to SEQ ID NO: 5005

SEQ ID NO: 31790 - DNA, 201 bp, Homo sapiens; identical to SEQ ID NO: 5006

SEQ ID NO: 31791 - DNA, 201 bp, Homo sapiens
tggataagtttttggaggatgttaaaaagttgtaccactcagaagccttcactgtcaacttcggggacaccgaagaggccaagaaacagatcaacgattasgtggagaagggtactcaagggaaaattgtggatttggtcaaggagcttgacagagacacagtttttgctctggtgaattacatcttctttaaaggtaagg

SEQ ID NO: 31792 - DNA, 201 bp, Homo sapiens; identical to SEQ ID NO: 5009

SEQ ID NO: 31793 - DNA, 201 bp, Homo sapiens
ttagagtgggggtcattgtgcagatgggaaaacaaaggcccagagaggggaagaaatgcccaggagctaccgagggcaggcgacctcaaccacagcccagygctggagctgtgagtggatgtagagcagcggaatatccattcagccagctcaggggaaggacaggggccctgaagccaggggatggagctgcagggaagg

SEQ ID NO: 31794 - DNA, 201 bp, Homo sapiens
gcttttaggagtgcagggtgctgcctctgatagaagggccaggagagagcaggttttggagtcctgatgttataaggaacagcttgggaggcataatgaayccaacatgatgcttgagaccaatgtcacagcccaattctgacattcatcatctgagatctgaggacacagctgtctcagttcatgatctgagtgctggga

SEQ ID NO: 31795 - DNA, 201 bp, Homo sapiens
agcatcaggaggggctttctgggcacacccagtacccgtctctgagctttccttgaactgttgcattttaatcctcacagcagctcaacaaggtacatacmgtcaccatccccattttacagatagggaaattgaggctcggagcggttaaacaactcacctgaggcctcacagccagtaagtgggttccctggtctgaat

SEQ ID NO: 31796 - DNA, 201 bp, Homo sapiens
cgtacaccatggggtacttggccagatggcgactttctcctctccagtcgccctcccaggcactagcttttaggagtgcagggtgctgcctctgatagaarggccaggagagagcaggttttggagtcctgatgttataaggaacagcttgggaggcataatgaacccaacatgatgcttgagaccaatgtcacagcccaa

SEQ ID NO: 31797 - DNA, 201 bp, Homo sapiens
ctggtagagccccaaggtggaggcataaatgggactggtgaatgacagaaggggcaaaaatgcactcatccattcactctgcaagtatctacggcacgtaygccagctcccaagcaggtttgcgggttgcacagcgggcgatgcaatctgatttaggcttttaaagggattgcaatcaagtggggccccactagcctcaac

SEQ ID NO: 31798 - DNA, 201 bp, Homo sapiens
aaccctgtacctcccctcccctccacccccagcagtctccaaaggcctccaacaaccccagagtgggggccatgtatccaaagaaactccaagctgtatayggatcacactggttttccaggagcaaaaacagaaacaggcctgaggctggtcaaaattgaacctcctcctgctctgagcagcctggggggcagactaagc

SEQ ID NO: 31799 - DNA, 201 bp, Homo sapiens
gacagggccctgtctcctcagcttcaggcaccaccactgacctgggacagtgaatcgtaagtatgcctttcactgcgaggggttctggagaggcttctgarctccccatggcccaggcaggcagcaggtctggggcaggaggggggttgtggagtgggtatccgcctgctgaggtgcagggcagatggagaggctgcagct

SEQ ID NO: 31800 - DNA, 201 bp, Homo sapiens
aggaacagacctgtgccaggcctcagccttacatcaaaatgggcctccccatgcaccgtggacctctgggccctcctgtcccagtggaggacaggaagctrtgaggggcactgtcacccagggctcaagctggcattcctgaataatcgctctgcaccaggccacggctaagctcagtgcgtgattaagcctcataaccct

SEQ ID NO: 31801 - DNA, 201 bp, Homo sapiens
ggctcaggcacctggctccagtccccaaactcttgaacctggccctagtgtcactgtttctcttgggtctcaggcgctggatggggaacaggaaacctggrctggacttgaggcctctctgatgctcggtgacttcagacagttgctcaacctctctgttctcttgggcaaaacatgataacctttgacttctgtcccctc

SEQ ID NO: 31802 - DNA, 201 bp, Homo sapiens
acttcctcagtccatatgggatcacgataaacaactccatcctccaggaccacactgcatcaacctgctgtgccctaacatcagctgaaggccaagctgcrgggcaccctgggtgttccaagtcactttccctctgcaggcaggaacctcatcctgctctgaaacagatgagagggaaacgcagaaaacagcttccagctc

SEQ ID NO: 31803 - DNA, 201 bp, Homo sapiens
catttactcactgtagcagcactgcgatgtgtgagtatatctgctgtgctcttaaactccaaatctgaggaaactgaggctcagagaggctactggtctcycacaatgtcacacagctcataagtggcaaagctggcttgatgggctacttgttcctctgaaccataccacctcaccacactctccccttcgagggtcacg

SEQ ID NO: 31804 - DNA, 201 bp, Homo sapiens
gctagtaagacctgcctttgagttggtatgatgttcaagttagataacaaaatgtttatacccattagaacagagaataaatagaactacatttcttgcayttatgagctttctgtgaatcagacatccctatgaagtacctcccctggctgtttctcatttactcactgtagcagcactgcgatgtgtgagtatatctgc

SEQ ID NO: 31805 - DNA, 201 bp, Homo sapiens; identical to SEQ ID NO: 5018

SEQ ID NO: 31806 - DNA, 201 bp, Homo sapiens; identical to SEQ ID NO: 5020

SEQ ID NO: 31807 - DNA, 201 bp, Homo sapiens; identical to SEQ ID NO: 5022

SEQ ID NO: 31808 - DNA, 201 bp, Homo sapiens
ctctccaggcaaatgggagagaccctttgaagtcaaggacaccgaggaagaggacttccacgtggaccaggcgaccaccgtgaaggtgcctatgatgaagygtttaggcatgtttaacatccagcactgtaagaagctgtccagctgggtgctgctgatgaaatacctgggcaatgccaccgccatcttcttcctgcctga

SEQ ID NO: 31809 - DNA, 201 bp, Homo sapiens; identical to SEQ ID NO: 5027

SEQ ID NO: 31810 - DNA, 201 bp, Homo sapiens; identical to SEQ ID NO: 5030

SEQ ID NO: 31811 - DNA, 201 bp, Homo sapiens
ggtgtatggccttttgtggtgtctgtgtggtccaggaagagaggggctgcaccgtgtgtgtgtgtgtgtgtgtgtgtgtgtgtgtgtgtgtgtgtgtgtgwttgtgtgtgtgcatctgagtatccgtgtctctgtgtgatgctatatgtcaatgtgtctttgtgtgtgtgtgtgtgtgtgtgtctctgtgtgttggcatgt

SEQ ID NO: 31812 - DNA, 201 bp, Homo sapiens; identical to SEQ ID NO: 5035

SEQ ID NO: 31813 - DNA, 201 bp, Homo sapiens
tgatgcccaccttcccctctctccaggcaaatgggagagaccctttgaagtcaaggacaccgaggaagaggacttccacgtggaccaggcgaccaccgtgwaggtgcctatgatgaagcgtttaggcatgtttaacatccagcactgtaagaagctgtccagctgggtgctgctgatgaaatacctgggcaatgccaccgc

SEQ ID NO: 31814 - DNA, 201 bp, Homo sapiens
tgaccaaggccaaggtggccagtttcctatagaacgcctctaaaagacctgcagcaatagcagcaagaactggtattctcgagaacttgctgcgcagcagkcacttcttggcattttatgtgtatttaatttcacaatagctctatgacaaagtccacctttctcatctccaggaaactgaggttcagagaggttaagtaa

SEQ ID NO: 31815 - DNA, 201 bp, Homo sapiens
cgtttaggcatgtttaacatccagcactgtaagaagctgtccagctgggtgctgctgatgaaatacctgggcaatgccaccgccatcttcttcctgcctgwtgaggggaaactacagcacctggaaaatgaactcacccacgatatcatcaccaagttcctggaaaatgaagacagaaggtgattccccaacctgagggtg

SEQ ID NO: 31816 - DNA, 201 bp, Homo sapiens
ttggtttcttcatctgtaaaagaaggatattagcattagcacctcacgggattgttacaagaaagcaatgaattaacacatgtgagcacggagaacagtgyttggcatatggtaagcactacgtacattttgctattcttctgattctttcagtgttactgatgtcggcaagtacttggcacaggctggtttaataatccc

SEQ ID NO: 31817 - DNA, 201 bp, Homo sapiens
ggtttatttattgcccagttcaacaggttgtttgaccataggcgagattctcttccctgcaccctgccgggttgctcttggtcccttattttatgctcccrggtagaaatggtgtgagattaggcagggagtggctcgcttccctgtccctggccccgcaaagagtgctcccacctgccccgatcccagaaatgtcaccat

SEQ ID NO: 31818 - DNA, 201 bp, Homo sapiens
gcaaagagtgctcccacctgccccgatcccagaaatgtcaccatgaagccttcattcttttggtttaaagcttggcctcagtgtccgtacaccatggggtmcttggccagatggcgactttctcctctccagtcgccctcccaggcactagcttttaggagtgcagggtgctgcctctgatagaagggccaggagagagca

SEQ ID NO: 31819 - DNA, 201 bp, Homo sapiens
acagtaaagccataaggagttaagtaacttgtccacagtaaactgagcctagctctaactctcccaaatctcataatcttgccatagtctacactatttcrggtggtgtcagggccatcattttttccagagcccttaaaataaggaaggagacccccaaaagtcttatgtggggatgttagtgtgtgtatgcacatgtgt

SEQ ID NO: 31820 - DNA, 201 bp, Homo sapiens
tggcgactttctcctctccagtcgccctcccaggcactagcttttaggagtgcagggtgctgcctctgatagaagggccaggagagagcaggttttggagwcctgatgttataaggaacagcttgggaggcataatgaacccaacatgatgcttgagaccaatgtcacagcccaattctgacattcatcatctgagatctg

SEQ ID NO: 31821 - DNA, 201 bp, Homo sapiens
taaaataaggaaggagacccccaaaagtcttatgtggggatgttagtgtgtgtatgcacatgtgtgcaaactgtttgtcttcagcaccctaagtgccttgycctgccctccctggtaaacctgagggctccatcccaagagagcagggcacttctccaagtgtgtcctcagctccctgaatcccatccacacagcttccag

SEQ ID NO: 31822 - DNA, 201 bp, Homo sapiens
atttccataagccatgaaggactgcacaaagttcagttgggaagtgaaagagaaattaaagggagatggaaatatacagcactaattttagcaccgtcttyagttctaacaacactagctagctgaagaaaaatacaaacatgtattatgtaatgtgtggtctgttccatttggattacttagaggcacgagggccaggag

SEQ ID NO: 31823 - DNA, 201 bp, Homo sapiens
tgaaagagtaaggaaatactatttattcaaccaggcactttctgtaatcctcactgcagccccaccatgtcaggactatcatctccattccacagataaargagatgaagtcgctggctctgggttcttggtggttaatggcagatctgggatttgaactatgtccaacttcttttccacttaattcctggaatccttcca

SEQ ID NO: 31824 - DNA, 201 bp, Homo sapiens; identical to SEQ ID NO: 5042

SEQ ID NO: 31825 - DNA, 201 bp, Homo sapiens
cgggaggcattgatagaaagaggactttgtggatgggagaatttgctctgtcttgctcagaatggcggttacacagatgcacacacatgtaaaaatgtatygagctgtgtatttaggagttacagttttactacatgcaaataacacgtccataaaaagtaaatcgataaagacagggaagggatggtggcacaggggaga

SEQ ID NO: 31826 - DNA, 201 bp, Homo sapiens; identical to SEQ ID NO: 4992

SEQ ID NO: 31827 - DNA, 201 bp, Homo sapiens
tagaactatagaacaaattgtaatacactgcataaagggatagtttcatggaacatactttacacgactctagtgtcccagaatcagtatcagttttgcartctgaaagacctgggttcaaatcctgcctctaacacaattagcttttgacaaaaacaatgcattctacctctttgaggtgctaatttctcatcttagcat

SEQ ID NO: 31828 - DNA, 201 bp, Homo sapiens
atgacccttgattaactcagttcatgaagcaacctttgatcacctattctgtgctcagtacaaagccacagagatggaaaaaacacagtccctgccctccrgttacttgcagcctggtgatgccaccgagctttggggtcatgcgcctcacagcctggttagaatctgccctccaccacttgccagctctgtgacccaggg

SEQ ID NO: 31829 - DNA, 201 bp, Homo sapiens
ggcatacagcaggtgatggactcttctgtatctcaggctgccttcctgcccctgaggggttaaaatgccagggtcctgggggccccagggcattctaagcyagctcccactgtcccaggaaaacagcataggggaggggaggtgggaggcaaggccaggggctgcttcctccactctgaggctcccttgctcttgaggcaa

SEQ ID NO: 31830 - DNA, 201 bp, Homo sapiens
gccaggcacagtggctcacacctgtaattccagcactttgggaggccgaggcgggcagataacttgaggccaggagtttgagaccagcctggccaacatgstgaaaccctgtcactactaaaaatacaaaaattaactggaattggtagcacatgcctgtaatgccagctactctggaggctgaggcacgagaatcgctcg

SEQ ID NO: 31831 - DNA, 201 bp, Homo sapiens
aacacacaggaagtggctcaggagattacacacagaaggaaagtgtgtctgctggggttttgcaagttggctaatttgaaaggtgactggaggaggtgaamaaatggtgcaaacttcattcattcattaaatgagttataagaagacagacacaagtgtccattatgctaacagagctctgtgttaaacaccccaccagca

SEQ ID NO: 31832 - DNA, 201 bp, Homo sapiens
agcctcagaagagctatgtgggaaagaaacttttatccctattttatagatgaggaaaccaaggctcagagaactgagggcctcccccggatccaagtccrcctagctgcagtcaccccacatcctctgcatgtcacaggtgctcagaaagatgctgaaggcacctggcccttcaccttcggaaagccaaaatgagcacgg

SEQ ID NO: 31833 - DNA, 201 bp, Homo sapiens
cgagggatgtgtgtcgtcaagggggctcagggcttctcagggaggggactcatggtttctttattctgctacactcttccaaaccttcactcacccctggkgatgcccaccttcccctctctccaggcaaatgggagagaccctttgaagtcaaggacaccgaggaagaggacttccacgtggaccaggcgaccaccgtga

SEQ ID NO: 31834 - DNA, 201 bp, Homo sapiens
aaagccccagctccccactgcaatcccttctgcacccagccaggtcctatgacacacacctccccagtgcacacagacctgcccaactgtggggctgcccrctgggcatttcataggtggctcagtcctcttccctctgcagctggccccagaaacctgccagttattggtgccaggtctgtgccaggagggcgaggcctg

SEQ ID NO: 31835 - DNA, 201 bp, Homo sapiens
ttggaggggcggcaacctcctgccagccttcaggccactctcctgtgcctgccagaagagacagagcttgaggagagcttgaggagagcaggaaaggtggracattgctgctgctgctcactcagttccacaggtgggagggacagcagggcttagagtgggggtcattgtgcagatgggaaaacaaaggcccagagaggg

SEQ ID NO: 31836 - DNA, 201 bp, Homo sapiens
cctgtgcctgccagaagagacagagcttgaggagagcttgaggagagcaggaaaggtgggacattgctgctgctgctcactcagttccacaggtgggaggracagcagggcttagagtgggggtcattgtgcagatgggaaaacaaaggcccagagaggggaagaaatgcccaggagctaccgagggcaggcgacctcaac

SEQ ID NO: 31837 - DNA, 201 bp, Homo sapiens
gctccatcccaagagagcagggcacttctccaagtgtgtcctcagctccctgaatcccatccacacagcttccagtacctgagcctaagtcgcttcacagrgtcttccctatctgcttcccacgtagccccgctggagaacagaggtagagggaagagggcagagaagtccagaacacacacgtcctcattgtttgctagg

SEQ ID NO: 31838 - DNA, 201 bp, Homo sapiens
agaggtggagtttgcagtaagccaagattgcgccactgtactccagcctgggtgactgagtgagactctgtctcaaaaaaaaaaaaaaaaagaagaagctrtgagtaggccacatagttccagaaaatgcagaaatcccccctcccctccccaacacacaggaagtggctcaggagattacacacagaaggaaagtgtgtc

SEQ ID NO: 31839 - DNA, 201 bp, Homo sapiens; identical to SEQ ID NO: 5000

SEQ ID NO: 31840 - DNA, 201 bp, Homo sapiens; identical to SEQ ID NO: 5001

SEQ ID NO: 31841 - DNA, 201 bp, Homo sapiens; identical to SEQ ID NO: 5002

SEQ ID NO: 31842 - DNA, 201 bp, Homo sapiens; identical to SEQ ID NO: 5003

SEQ ID NO: 31843 - DNA, 201 bp, Homo sapiens
gcctggttagaatctgccctccaccacttgccagctctgtgacccagggctaggtgctcgacgtctatgaacctcagtttcctcatctgtaaaatgggatracagaaatatcgacttcataggcttgatgtgaggacgaggagttaatctgtaaccaatgcttggaatggctctggcatgagccacgtgctcactgttacc

SEQ ID NO: 31844 - DNA, 201 bp, Homo sapiens
taatcccagctatttgggaagctgagacagaagaatttcttgaacccgggaggtggaggtttcagtgagccgagatcacgccactgcactccaccctggcrgataaagcgagactctgtctcaaaaaaaacccaaaaacctatgttagtgtacagagggccccagtgaagtcttctcccagccccactttgcacaactggg

SEQ ID NO: 31845 - DNA, 201 bp, Homo sapiens; identical to SEQ ID NO: 5011

SEQ ID NO: 31846 - DNA, 201 bp, Homo sapiens; identical to SEQ ID NO: 5015

SEQ ID NO: 31847 - DNA, 201 bp, Homo sapiens; identical to SEQ ID NO: 5016

SEQ ID NO: 31848 - DNA, 201 bp, Homo sapiens
tgtcgggggctcctgtctgttgtctcctataagcctcaccacctctcctactgcttgggcatgcatctttctccccttctatagatgaggaggttaaggtycagagaggggtggggaggaacgccggctcacattctccatcccctccagatatgaccaggaacagacctgtgccaggcctcagccttacatcaaaatggg

SEQ ID NO: 31849 - DNA, 201 bp, Homo sapiens
caggcacctggctccagtccccaaactcttgaacctggccctagtgtcactgtttctcttgggtctcaggcgctggatggggaacaggaaacctgggctgracttgaggcctctctgatgctcggtgacttcagacagttgctcaacctctctgttctcttgggcaaaacatgataacctttgacttctgtcccctcccct

SEQ ID NO: 31850 - DNA, 201 bp, Homo sapiens
ccagttcaacaggttgtttgaccataggcgagattctcttccctgcaccctgccgggttgctcttggtcccttattttatgctcccgggtagaaatggtgygagattaggcagggagtggctcgcttccctgtccctggccccgcaaagagtgctcccacctgccccgatcccagaaatgtcaccatgaagccttcattct

SEQ ID NO: 31851 - DNA, 201 bp, Homo sapiens
gttcagagaggttaagtaacttgtccaaggtcacacagctaatagcaagttgacgtggagcaatctggcctcagagcctttaattttagccacagactgaygctcccctcttcatttagccaggctgcctctgaagttttctgattcaagacttctggcttcagctttgtacacagagatgattcaatgtcaggttttgga

SEQ ID NO: 31852 - DNA, 201 bp, Homo sapiens; identical to SEQ ID NO: 5023

SEQ ID NO: 31853 - DNA, 201 bp, Homo sapiens; identical to SEQ ID NO: 5026

SEQ ID NO: 31854 - DNA, 201 bp, Homo sapiens
gaccataggcgagattctcttccctgcaccctgccgggttgctcttggtcccttattttatgctcccgggtagaaatggtgtgagattaggcagggagtgrctcgcttccctgtccctggccccgcaaagagtgctcccacctgccccgatcccagaaatgtcaccatgaagccttcattcttttggtttaaagcttggcc

SEQ ID NO: 31855 - DNA, 201 bp, Homo sapiens
ctcacccctggtgatgcccaccttcccctctctccaggcaaatgggagagaccctttgaagtcaaggacaccgaggaagaggacttccacgtggaccaggygaccaccgtgaaggtgcctatgatgaagcgtttaggcatgtttaacatccagcactgtaagaagctgtccagctgggtgctgctgatgaaatacctgggc

SEQ ID NO: 31856 - DNA, 201 bp, Homo sapiens; identical to SEQ ID NO: 5034

SEQ ID NO: 31857 - DNA, 201 bp, Homo sapiens; identical to SEQ ID NO: 5037

SEQ ID NO: 31858 - DNA, 201 bp, Homo sapiens
agaggaatgctgtgccatgccttgaatttcttttctgcacgacaggtctgccagcttacatttacccaaactgtccattactggaacctatgatctgaagwgcgtcctgggtcaactgggcatcactaaggtcttcagcaatggggctgacctctccggggtcacagaggaggcacccctgaagctctccaaggtgagatc

SEQ ID NO: 31859 - DNA, 201 bp, Homo sapiens
gaggacagggccctgtctcctcagcttcaggcaccaccactgacctgggacagtgaatcgtaagtatgcctttcactgcgaggggttctggagaggcttcygagctccccatggcccaggcaggcagcaggtctggggcaggaggggggttgtggagtgggtatccgcctgctgaggtgcagggcagatggagaggctgca

SEQ ID NO: 31860 - DNA, 201 bp, Homo sapiens
cagtatcactgggacaaggtcagggtgtcaggaaagccgagtgtccttggaggctctaggggatgtgccacttcttcctcttccaatttctggtggctgcyggcattccttgacttgttgcccctccagtcacggcctctgttgtcacactgccccctctttctccatctgtgtcaggtctccctccccctccccctcagg

SEQ ID NO: 31861 - DNA, 201 bp, Homo sapiens; identical to SEQ ID NO: 4995

SEQ ID NO: 31862 - DNA, 201 bp, Homo sapiens
ctagtagttaacaatgtggctgccgggcatattctcctcagctaggacctcagttttcccatctgtgaagacggcaggttctacctagggggctgcaggcwggtggtccgaagcctgggcatatctggagtagaaggatcactgtggggcagggcaggttctgtgttgctgtggatgacgttgactttgaccattgctcgg

SEQ ID NO: 31863 - DNA, 201 bp, Homo sapiens; identical to SEQ ID NO: 4996

SEQ ID NO: 31864 - DNA, 201 bp, Homo sapiens
tttcccttctgtgcagcagtttccctggccactaaatagtgggattagatagaagccctccaagggcttccagcttgacatgattcttgattctgatctgrcccgattcctggataatcgtgggcaggcccattcctcttcttgtgcctcattttcttcttttgtaaaacaatggctgtaccatttgcatcttagggtcat

SEQ ID NO: 31865 - DNA, 201 bp, Homo sapiens
cactaaggtcttcagcaatggggctgacctctccggggtcacagaggaggcacccctgaagctctccaaggtgagatcaccctgacgaccttgttgcaccmtggtatctgtagggaagaatgtgtgggggctgcagctctgtcctgaggctgaggaaggggccgagggaaacaaatgaagacccaggctgagctcctgaag

SEQ ID NO: 31866 - DNA, 201 bp, Homo sapiens
ccgctcacaccagaccctgctcagggtggcattgtctccccatggaaaaccagagaggagcactcagcctggtgtggtcactcttctcttatccactaaayggttgtcactgggcactgccaccagccccgtgtttctctgggtgtagggccctggggatgttacaggctgggggccaggtgacccaacactacagggcaa

SEQ ID NO: 31867 - DNA, 201 bp, Homo sapiens
gtttaggcatgtttaacatccagcactgtaagaagctgtccagctgggtgctgctgatgaaatacctgggcaatgccaccgccatcttcttcctgcctgaygaggggaaactacagcacctggaaaatgaactcacccacgatatcatcaccaagttcctggaaaatgaagacagaaggtgattccccaacctgagggtga

SEQ ID NO: 31868 - DNA, 201 bp, Homo sapiens
ttcctgggaggtgtccacgtgagccttgctcgaggcctgggatcagccttacaacgtgtctctgcttctctcccctccaggccgtgcataaggctgtgctkaccatcgacgagaaagggactgaagctgctggggccatgtttttagaggccatacccatgtctatcccccccgaggtcaagttcaacaaaccctttgtct

SEQ ID NO: 31869 - DNA, 201 bp, Homo sapiens
gcctcggcgccctcacctgcaagacaggtaaaataaaactcctaggttactttcatgaataatatgcaaagcatcaccctaaaaaagtgctgctacttaawtgaccaccaaacattaatgaatactgtggattccaaaaatattagttaatgtgagtggtgtggctaccttcccccagtgccccgtgctctgtcagggaac

SEQ ID NO: 31870 - DNA, 201 bp, Homo sapiens
tcattgcagatgtaagtgttgctgtccagagcctgggtgcaggacctagatgtaggattctggttctgctacttcctcagtgacattgaatagctgacctratctctctggctttggtttcttcatctgtaaaagaaggatattagcattagcacctcacgggattgttacaagaaagcaatgaattaacacatgtgagca

SEQ ID NO: 31871 - DNA, 201 bp, Homo sapiens
gaggcctgggatcagccttacaacgtgtctctgcttctctcccctccaggccgtgcataaggctgtgctgaccatcgacgagaaagggactgaagctgctkgggccatgtttttagaggccatacccatgtctatcccccccgaggtcaagttcaacaaaccctttgtcttcttaatgattgaacaaaataccaagtctcc

SEQ ID NO: 31872 - DNA, 201 bp, Homo sapiens
tcccctccaggccgtgcataaggctgtgctgaccatcgacgagaaagggactgaagctgctggggccatgtttttagaggccatacccatgtctatccccyccgaggtcaagttcaacaaaccctttgtcttcttaatgattgaacaaaataccaagtctcccctcttcatgggaaaagtggtgaatcccacccaaaaata

SEQ ID NO: 31873 - DNA, 201 bp, Homo sapiens
actccaagctgtatacggatcacactggttttccaggagcaaaaacagaaacaggcctgaggctggtcaaaattgaacctcctcctgctctgagcagcctrgggggcagactaagcagagggctgtgcagacccacataaagagcctactgtgtgccaggcacttcacccgaggcacttcacaagcatgcttgggaatgaa

SEQ ID NO: 31874 - DNA, 201 bp, Homo sapiens
gctgctcactcagttccacaggtgggagggacagcagggcttagagtgggggtcattgtgcagatgggaaaacaaaggcccagagaggggaagaaatgccyaggagctaccgagggcaggcgacctcaaccacagcccagtgctggagctgtgagtggatgtagagcagcggaatatccattcagccagctcaggggaagg

SEQ ID NO: 31875 - DNA, 201 bp, Homo sapiens
tgactcagtaaatggtagatcttgctaccagtggaacagccactaaggattctgcagtgagagcagagggccagctaagtggtactctcccagagactgtstgactcacgccaccccctccaccttggacacaggacgctgtggtttctgagccaggtacaatgactcctttcggtaagtgcagtggaagctgtacactgc

SEQ ID NO: 31876 - DNA, 201 bp, Homo sapiens
gtgagcgcttcctgggaggtgtccacgtgagccttgctcgaggcctgggatcagccttacaacgtgtctctgcttctctcccctccaggccgtgcataagrctgtgctgaccatcgacgagaaagggactgaagctgctggggccatgtttttagaggccatacccatgtctatcccccccgaggtcaagttcaacaaacc

SEQ ID NO: 31877 - DNA, 201 bp, Homo sapiens
aggtgtatggccttttgtggtgtctgtgtggtccaggaagagaggggctgcaccgtgtgtgtgtgtgtgtgtgtgtgtgtgtgtgtgtgtgtgtgtgtgtgattgtgtgtgtgcatctgagtatccgtgtctctgtgtgatgctatatgtcaatgtgtctttgtgtgtgtgtgtgtgtgtgtgtctctgtgtgttggcatg

SEQ ID NO: 31878 - DNA, 201 bp, Homo sapiens
ctctgcttctctcccctccaggccgtgcataaggctgtgctgaccatcgacgagaaagggactgaagctgctggggccatgtttttagaggccatacccakgtctatcccccccgaggtcaagttcaacaaaccctttgtcttcttaatgattgaacaaaataccaagtctcccctcttcatgggaaaagtggtgaatccc

SEQ ID NO: 31879 - DNA, 201 bp, Homo sapiens
aggaggtaaaggtctcgtccctggggacttcccactccagtgtggacactgtcccttcccaatatccagtgcccagggcagggacagcagcaccaccacaygttctggcagaaccaaaaaggaacagatgggcttcctggcaaaggcagcagtggagtgtggagttcaagggtagaatgtccctggggggacgggggaaga

SEQ ID NO: 31880 - DNA, 201 bp, Homo sapiens
caggtgtatggccttttgtggtgtctgtgtggtccaggaagagaggggctgcaccgtgtgtgtgtgtgtgtgtgtgtgtgtgtgtgtgtgtgtgtgtgtgtgattgtgtgtgtgcatctgagtatccgtgtctctgtgtgatgctatatgtcaatgtgtctttgtgtgtgtgtgtgtgtgtgtgtctctgtgtgttggcat

SEQ ID NO: 31881 - DNA, 201 bp, Homo sapiens
atgaggaggacagtacccaggggtgaggaggtaaaggtctcgtccctggggacttcccactccagtgtggacactgtcccttcccaatatccagtgcccarggcagggacagcagcaccaccacacgttctggcagaaccaaaaaggaacagatgggcttcctggcaaaggcagcagtggagtgtggagttcaagggtaga

SEQ ID NO: 31882 - DNA, 201 bp, Homo sapiens
gtcacagaggaggcacccctgaagctctccaaggtgagatcaccctgacgaccttgttgcaccctggtatctgtagggaagaatgtgtgggggctgcagcwctgtcctgaggctgaggaaggggccgagggaaacaaatgaagacccaggctgagctcctgaagatgcccgtgattcactgacacgggacgtggtcaaaca

SEQ ID NO: 31883 - DNA, 201 bp, Homo sapiens
tcaggtgtatggccttttgtggtgtctgtgtggtccaggaagagaggggctgcaccgtgtgtgtgtgtgtgtgtgtgtgtgtgtgtgtgtgtgtgtgtgtgtgattgtgtgtgtgcatctgagtatccgtgtctctgtgtgatgctatatgtcaatgtgtctttgtgtgtgtgtgtgtgtgtgtgtctctgtgtgttggca

SEQ ID NO: 31884 - DNA, 201 bp, Homo sapiens
gtcaggtgtatggccttttgtggtgtctgtgtggtccaggaagagaggggctgcaccgtgtgtgtgtgtgtgtgtgtgtgtgtgtgtgtgtgtgtgtgtgtgtgattgtgtgtgtgcatctgagtatccgtgtctctgtgtgatgctatatgtcaatgtgtctttgtgtgtgtgtgtgtgtgtgtgtctctgtgtgttggc

SEQ ID NO: 31885 - DNA, 201 bp, Homo sapiens
cacgtgagccttgctcgaggcctgggatcagccttacaacgtgtctctgcttctctcccctccaggccgtgcataaggctgtgctgaccatcgacgagaargggactgaagctgctggggccatgtttttagaggccatacccatgtctatcccccccgaggtcaagttcaacaaaccctttgtcttcttaatgattgaac

SEQ ID NO: 31886 - DNA, 201 bp, Homo sapiens
agttcaggcagcgccatccatgctccatgaggaggacagtacccaggggtgaggaggtaaaggtctcgtccctggggacttcccactccagtgtggacacygtcccttcccaatatccagtgcccagggcagggacagcagcaccaccacacgttctggcagaaccaaaaaggaacagatgggcttcctggcaaaggcagc

SEQ ID NO: 31887 - DNA, 201 bp, Homo sapiens
ctgggaggtgtccacgtgagccttgctcgaggcctgggatcagccttacaacgtgtctctgcttctctcccctccaggccgtgcataaggctgtgctgacsatcgacgagaaagggactgaagctgctggggccatgtttttagaggccatacccatgtctatcccccccgaggtcaagttcaacaaaccctttgtcttct

SEQ ID NO: 31888 - DNA, 201 bp, Homo sapiens
gcttccagaatgaggccaccactgagttcaggcagcgccatccatgctccatgaggaggacagtacccaggggtgaggaggtaaaggtctcgtccctgggracttcccactccagtgtggacactgtcccttcccaatatccagtgcccagggcagggacagcagcaccaccacacgttctggcagaaccaaaaaggaaca

SEQ ID NO: 31889 - DNA, 201 bp, Homo sapiens
ctcccctcttcatttagccaggctgcctctgaagttttctgattcaagacttctggcttcagctttgtacacagagatgattcaatgtcaggttttggagygaaatctgtttaatcccagacaaaacatttaggattacatctcagttttgtaagcaagtagctctgtgatttttagtgagttatttaatgctctttgggg

SEQ ID NO: 31890 - DNA, 201 bp, Homo sapiens
agggggagtgagcgcttcctgggaggtgtccacgtgagccttgctcgaggcctgggatcagccttacaacgtgtctctgcttctctcccctccaggccgtscataaggctgtgctgaccatcgacgagaaagggactgaagctgctggggccatgtttttagaggccatacccatgtctatcccccccgaggtcaagttca

SEQ ID NO: 31891 - DNA, 201 bp, Homo sapiens
gaaccccacatccctgggtcactgctactctgtataaacttggcttccagaatgaggccaccactgagttcaggcagcgccatccatgctccatgaggagracagtacccaggggtgaggaggtaaaggtctcgtccctggggacttcccactccagtgtggacactgtcccttcccaatatccagtgcccagggcaggga

SEQ ID NO: 31892 - DNA, 201 bp, Homo sapiens; identical to SEQ ID NO: 5031

SEQ ID NO: 31893 - DNA, 201 bp, Homo sapiens
ccaattaacaaggggcagggagccttagacagaaggtaccaaatatgcctgatgctccaacattttatttgtaatatccaagacaccctcaaataaacatrtgattccaataaaaatgcacagccacgatggcatctcttagcctgacatcgccacgatgtagaaattctgcatcttcctctagttttgaattatccccac

SEQ ID NO: 31894 - DNA, 201 bp, Homo sapiens
gatccactgcttaaatacggacgaggacagggccctgtctcctcagcttcaggcaccaccactgacctgggacagtgaatcgtaagtatgcctttcactgygaggggttctggagaggcttctgagctccccatggcccaggcaggcagcaggtctggggcaggaggggggttgtggagtgggtatccgcctgctgaggtg

SEQ ID NO: 31895 - DNA, 201 bp, Homo sapiens
ttccatcgggaccatcaagagggtgtttgtgtctaaggctgactgggtaactttggatgagcggtctctccgctctgagcctgtttcctcatctgtcaaaygggctctaacccactctgatctcccagggcggcagtaagtcttcagcatcaggcattttggggtgactcagtaaatggtagatcttgctaccagtggaac

SEQ ID NO: 31896 - DNA, 201 bp, Homo sapiens
ccactctgaggctcccttgctcttgaggcaaaggagggcagtggagagcagccaggctgcagtcagcacagctaaagtcctggctctgctgtggccttagkgggggcccaggtccctctccagccccagtctcctccttctgtccaatgagaaagctgggatcaggggtccctgaggcccctgtccactctgcatgcctcg

SEQ ID NO: 31897 - DNA, 201 bp, Homo sapiens
tccactctgaggctcccttgctcttgaggcaaaggagggcagtggagagcagccaggctgcagtcagcacagctaaagtcctggctctgctgtggccttastgggggcccaggtccctctccagccccagtctcctccttctgtccaatgagaaagctgggatcaggggtccctgaggcccctgtccactctgcatgcctc

SEQ ID NO: 31898 - DNA, 201 bp, Homo sapiens
agatgagagggaaacgcagaaaacagcttccagctcagccaggaaccttagagtcctgaccttttacctcgcctaggagtttgcaggggagagaacacacraatttcagattttaagcctaaataaaggaagccttagtttgaagtgcaagctctgccggacagggggcaccctgtgagccccatttgttaagaggacaat

SEQ ID NO: 31899 - DNA, 201 bp, Homo sapiens; identical to SEQ ID NO: 4993

SEQ ID NO: 31900 - DNA, 201 bp, Homo sapiens
gagggaaacgcagaaaacagcttccagctcagccaggaaccttagagtcctgaccttttacctcgcctaggagtttgcaggggagagaacacacgaatttyagattttaagcctaaataaaggaagccttagtttgaagtgcaagctctgccggacagggggcaccctgtgagccccatttgttaagaggacaatagtcag

SEQ ID NO: 31901 - DNA, 201 bp, Homo sapiens; identical to SEQ ID NO: 4994

SEQ ID NO: 31902 - DNA, 201 bp, Homo sapiens
agggaaacgcagaaaacagcttccagctcagccaggaaccttagagtcctgaccttttacctcgcctaggagtttgcaggggagagaacacacgaatttcrgattttaagcctaaataaaggaagccttagtttgaagtgcaagctctgccggacagggggcaccctgtgagccccatttgttaagaggacaatagtcaga

SEQ ID NO: 31903 - DNA, 201 bp, Homo sapiens
tgccggacagggggcaccctgtgagccccatttgttaagaggacaatagtcagagagcttccaggctctcacaccagaaacaggaaatacagatttcacaytgatctccttcccaggagcaacttgatcctctccataaatccgagcgggaagcatttatccaaacaacaaacaagcaaacatgagctgtgtatgggggat

SEQ ID NO: 31904 - DNA, 201 bp, Homo sapiens
tgtgctcctcccagctgtcaccccctcgccaccctccctgcaccagcctctccacctcctttgagcccagaattcccctgtctaggagggcacctgtctcrtgcctagccatgggaattctccatctgttttgctacattgaacccagatgccattctaaccaagaatcctggctgggtgcaggggctctcgcctgtaacc

SEQ ID NO: 31905 - DNA, 201 bp, Homo sapiens
ccagagggctgaggagggtgaaccccacatccctgggtcactgctactctgtataaacttggcttccagaatgaggccaccactgagttcaggcagcgccrtccatgctccatgaggaggacagtacccaggggtgaggaggtaaaggtctcgtccctggggacttcccactccagtgtggacactgtcccttcccaatat

SEQ ID NO: 31906 - DNA, 201 bp, Homo sapiens
aacaagcaaacatgagctgtgtatgggggatagagagaatgaaacccaggtccatcccggggagaatgctggtctatggcagtggggagcagtgaataaakgaggcgtacatccatggatctgggtggagagggtcagggtgtaacccaggacctttccagaggcatgagaaacagtcagcctacacccacagatgacctc

SEQ ID NO: 31907 - DNA, 201 bp, Homo sapiens
atcagtatcagttttgcaatctgaaagacctgggttcaaatcctgcctctaacacaattagcttttgacaaaaacaatgcattctacctctttgaggtgcyaatttctcatcttagcatggacaaaataccattcttgctgtcaggtttttttaggattaaacaaatgacaaagactgtggggatggtgtgtggcatacag

SEQ ID NO: 31908 - DNA, 201 bp, Homo sapiens
tgtctgcctcagtcatgctccatttttccatcgggaccatcaagagggtgtttgtgtctaaggctgactgggtaactttggatgagcggtctctccgctcygagcctgtttcctcatctgtcaaatgggctctaacccactctgatctcccagggcggcagtaagtcttcagcatcaggcattttggggtgactcagtaaa

SEQ ID NO: 31909 - DNA, 201 bp, Homo sapiens
gttgtgtcctgtttcccagtcctgcccggtcccccctcggtacctcctggtggatacactggttcctgtaagcagaagtggatgagggtgtctaggtctgyagtcctggcaccccaggatgggggacaccagccaagatacagcaacagcaacaaagcgcagccatttctttctgtttgcacagctcctctgtctgtcggg

SEQ ID NO: 31910 - DNA, 201 bp, Homo sapiens
caacccctccctcaaaagagttgccctctcagatccttttgatgtaaggtttggtgttgagacttatttcactaaattctcatacataaacatcactttaygtatgaggcaaaatgaggaccagggagatgaatgacttgtcctggctcatacacctggaaagtgacagagtcagattagatcccaggtctatctgaagtt

SEQ ID NO: 31911 - DNA, 201 bp, Homo sapiens
gggtttatttattgcccagttcaacaggttgtttgaccataggcgagattctcttccctgcaccctgccgggttgctcttggtcccttattttatgctccygggtagaaatggtgtgagattaggcagggagtggctcgcttccctgtccctggccccgcaaagagtgctcccacctgccccgatcccagaaatgtcacca

SEQ ID NO: 31912 - DNA, 201 bp, Homo sapiens; identical to SEQ ID NO: 5013

SEQ ID NO: 31913 - DNA, 201 bp, Homo sapiens
cactgtaagaagctgtccagctgggtgctgctgatgaaatacctgggcaatgccaccgccatcttcttcctgcctgatgaggggaaactacagcacctggwaaatgaactcacccacgatatcatcaccaagttcctggaaaatgaagacagaaggtgattccccaacctgagggtgaccaagaagctgcccacacctctt

SEQ ID NO: 31914 - DNA, 201 bp, Homo sapiens
gaagcagcagaggtgaggaccccgtgtgagtcccctgtggctgccgtagctgatttagctgattaccatgagctccgtggtttccaatagaatgcattctyttacagttctggaggccagaagtccagaacagtatcactgggacaaggtcagggtgtcaggaaagccgagtgtccttggaggctctaggggatgtgccac

SEQ ID NO: 31915 - DNA, 201 bp, Homo sapiens
cccattttacagatgaggaagatggggacagagaggtgaataactggccccaaatcacacaccatccataattcgggctcaggcacctggctccagtcccyaaactcttgaacctggccctagtgtcactgtttctcttgggtctcaggcgctggatggggaacaggaaacctgggctggacttgaggcctctctgatgct

SEQ ID NO: 31916 - DNA, 201 bp, Homo sapiens
gtgtatggccttttgtggtgtctgtgtggtccaggaagagaggggctgcaccgtgtgtgtgtgtgtgtgtgtgtgtgtgtgtgtgtgtgtgtgtgtgtgaktgtgtgtgtgcatctgagtatccgtgtctctgtgtgatgctatatgtcaatgtgtctttgtgtgtgtgtgtgtgtgtgtgtctctgtgtgttggcatgta

SEQ ID NO: 31917 - DNA, 201 bp, Homo sapiens
tggattgtcttctcctaccaagacccttaacgacatctgcaaggacatttcttccatagttggtaacatatctctggggggcgctgttgagcctgtagaaygccctactttaccagtgaggggatgatggggctggaagagggaaggaatgaaaggagtgtgaaggaagcgccaccaaggagagctgtggaagcccaaccc

SEQ ID NO: 31918 - DNA, 201 bp, Homo sapiens
gaaaggagggtggtacctactcccttcacagggtaactgaatgagagactgcctggaggaaagctcttcaagtgtggcccaccccaccccagtgacaccagcccctgacacgggggagggagggcagcatcaggaggggctttctgggcacacccagtacccgtctctgagctttccttgaactgttgcattttaatcctc

SEQ ID NO: 31919 - DNA, 201 bp, Homo sapiens
gctccagtccccaaactcttgaacctggccctagtgtcactgtttctcttgggtctcaggcgctggatggggaacaggaaacctgggctggacttgaggcytctctgatgctcggtgacttcagacagttgctcaacctctctgttctcttgggcaaaacatgataacctttgacttctgtcccctcccctcaccccaccc

SEQ ID NO: 31920 - DNA, 201 bp, Homo sapiens
ggccggccccacgtcagtctttcacctgtgtgccctgtgcccactgctgatctggggcagaggaggcacagggaaagggcccaggctgctcttaaaaatcrcatctcacattgagaccgacgcatggagactgcggcagaagcagcagaggtgaggaccccgtgtgagtcccctgtggctgccgtagctgatttagctgat

SEQ ID NO: 31921 - DNA, 201 bp, Homo sapiens
tatggtaagcactacgtacattttgctattcttctgattctttcagtgttactgatgtcggcaagtacttggcacaggctggtttaataatccctaggcayttccacgtggtgtcaatccctgatcactgggagtcatcatgtgccttgactcggggcctggcccccccatctctgtcttgcaggacaatgccgtcttctg

SEQ ID NO: 31922 - DNA, 201 bp, Homo sapiens
tcagggtgtaacccaggacctttccagaggcatgagaaacagtcagcctacacccacagatgacctcaaacaccccaagtgctccttgaaaggctgaggcytttgtgttgctcttggttggattattcacaggcaatgaagtaaacaaggcacaccacaggactcagaaccagggacagcttccgcaggaacctgggtcag

SEQ ID NO: 31923 - DNA, 201 bp, Homo sapiens
atttgttaagaggacaatagtcagagagcttccaggctctcacaccagaaacaggaaatacagatttcacactgatctccttcccaggagcaacttgatcytctccataaatccgagcgggaagcatttatccaaacaacaaacaagcaaacatgagctgtgtatgggggatagagagaatgaaacccaggtccatcccgg

SEQ ID NO: 31924 - DNA, 201 bp, Homo sapiens; identical to SEQ ID NO: 5133

SEQ ID NO: 31925 - DNA, 201 bp, Homo sapiens; identical to SEQ ID NO: 5036

SEQ ID NO: 31926 - DNA, 201 bp, Homo sapiens
ggtttttcagagccaggacacatccccaaaggtcatggcctttggtggttagcattgacttggggcccatcacatgccagaggctgcccgaagtgcttaartgttattatctcattcgatcttcacagtcctgatggaagtgactcttcttagagtcttcctatctcacagatgaggaaaccgaggcacagagaggttaag

SEQ ID NO: 31927 - DNA, 201 bp, Homo sapiens
ttcagctcccatgaagtccactgttgttctcctgaccagccactcagtcttgatttacttggcccagggccactggcacacctcacccccttacccgattycttgctgcagaccccaaatctcgactctcacatccctatccagcccataccacgaggctcccatctccaggcagggccctgtggtggggcagggcctccc

SEQ ID NO: 31928 - DNA, 201 bp, Homo sapiens; identical to SEQ ID NO: 5038

SEQ ID NO: 31929 - DNA, 201 bp, Homo sapiens; identical to SEQ ID NO: 5039

SEQ ID NO: 31930 - DNA, 201 bp, Homo sapiens
cataaacatcactttatgtatgaggcaaaatgaggaccagggagatgaatgacttgtcctggctcatacacctggaaagtgacagagtcagattagatccyaggtctatctgaagttaaaagaggtgtcttttcacttcccacctcctccatctactttaaagcagcacaaacccctgctttcaaggagagatgagcgtct

SEQ ID NO: 31931 - DNA, 201 bp, Homo sapiens; identical to SEQ ID NO: 5342

SEQ ID NO: 31932 - DNA, 201 bp, Homo sapiens
aatcagttttcccacttgcacgttgctctctcctgccctcccctcagtacaatctctgtgccctaggaaggaagggatgggactatgttgaatgaggattmattagtaactcaccagtttcgcaaaaaacagacaaaaacagaaaacaaaacaaaatgaaaaaaacagcaaacaaaacaaaacaaaaaaacaacaaatgtc

SEQ ID NO: 31933 - DNA, 201 bp, Homo sapiens
acggagttttgttcttgttgcccaggctgggcgcgatctcagctcactgcaatctccgcctcccaggttccagcaattctcctgcctcagcttcccgagcrgctgggattacaggcatgtgccactacacccggctaattttgtatttttagtagagatggggtttctccatgttggtcaggctggtctcgaactcccgac

SEQ ID NO: 31934 - DNA, 201 bp, Homo sapiens; identical to SEQ ID NO: 20193

SEQ ID NO: 31935 - DNA, 201 bp, Homo sapiens; identical to SEQ ID NO: 20194

SEQ ID NO: 31936 - DNA, 201 bp, Homo sapiens; identical to SEQ ID NO: 20196

SEQ ID NO: 31937 - DNA, 201 bp, Homo sapiens; identical to SEQ ID NO: 20197

SEQ ID NO: 31938 - DNA, 201 bp, Homo sapiens
tgccatgccaggcctctgtgatatccctgaggaccaagatatgattatatctgactcaaagtcagatagccagtcttggaatcccagctttacgactgagkttatgagacttgggcctcccttctgtaaaatggagatgatagtattacctgtttgtgagtaaagtctttggcacagaaacacatctttttagtgtggtct

SEQ ID NO: 31939 - DNA, 201 bp, Homo sapiens; identical to SEQ ID NO: 20200

SEQ ID NO: 31940 - DNA, 201 bp, Homo sapiens; identical to SEQ ID NO: 20201

SEQ ID NO: 31941 - DNA, 201 bp, Homo sapiens; identical to SEQ ID NO: 20203

SEQ ID NO: 31942 - DNA, 201 bp, Homo sapiens
cctcacaggtccacatccctagacctctggggaaagaactatatgaaagtctttttttttttttttttttttgagactgagtttggctctgttgcccaggmtggagtgcagtggcgtgatcttggctcactgcaacctccgcctcccaagttcaagcaattctcttgcctcagattcctgagtagctgggattacaggagc

SEQ ID NO: 31943 - DNA, 201 bp, Homo sapiens; identical to SEQ ID NO: 20205

SEQ ID NO: 31944 - DNA, 201 bp, Homo sapiens; identical to SEQ ID NO: 20204

SEQ ID NO: 31945 - DNA, 201 bp, Homo sapiens
ccctcacccagcacccaccccgctcctcgcgccctccccgcctgttcccgccctgtgctgaggctgcgcagtcggtgccatcttctacgcccctgggagcrttgtggctgctgtttccttcggctttcctcctcctgctccaccatgtggagccgacggcagggccgcctcaggcccacggtctgcggggtggaggagcta

SEQ ID NO: 31946 - DNA, 201 bp, Homo sapiens; identical to SEQ ID NO: 20207

SEQ ID NO: 31947 - DNA, 201 bp, Homo sapiens; identical to SEQ ID NO: 20208

SEQ ID NO: 31948 - DNA, 201 bp, Homo sapiens; identical to SEQ ID NO: 20209

SEQ ID NO: 31949 - DNA, 201 bp, Homo sapiens; identical to SEQ ID NO: 20211

SEQ ID NO: 31950 - DNA, 201 bp, Homo sapiens; identical to SEQ ID NO: 20212

SEQ ID NO: 31951 - DNA, 201 bp, Homo sapiens; identical to SEQ ID NO: 20215

SEQ ID NO: 31952 - DNA, 201 bp, Homo sapiens
ctcctttccctgccctgaactccaggtgcagcagttcctgcggcaagcccagcgggggacagaggaaaaggagagagagggggctctggtcagccttcgtsgaggcttgcagcaccctgaaacacagcaaaccttcatccggtcagtgtggatggtgtggtggagggaggagttggggctctgagggatggaccacaagct

SEQ ID NO: 31953 - DNA, 201 bp, Homo sapiens
catggtctagcctcttcctaactcaaattttatcagttttctcatcctacccaccgtcctctttttagttcctgcaacgatatatcggatttgtgtctcargcccttggcattcgctacgtctaacgttcgtttcttttggtattctgtcttgagagcctattttttttcttttcttttctttttttttttttgagactct

SEQ ID NO: 31954 - DNA, 201 bp, Homo sapiens
gcttcaagcgtttttggcagctctcatcagtgggatccgcattaatagtgaaacggcatcatggcgcttcccgcagttcgggattgttttgaactttcatytagagcgtattgtgggtggggaagttgtgtttgctgagtagattgtgacactgctggcttgggtcactcgaggtcagggatgagagactttttttcctag

SEQ ID NO: 31955 - DNA, 201 bp, Homo sapiens; identical to SEQ ID NO: 20218

SEQ ID NO: 31956 - DNA, 201 bp, Homo sapiens
cctgcccctgtaccctttccccattggccggggtcgggtcatacaatctgaactaatcccggttggctaaacatttgatttttttaggtaatgtgggcacstaaaagaaagtggagaggaaaggggaaggggtgcctgtaatgaactagaaagttagtcctctttccaaataatgaaaggaatgtgagctggtactgataa

SEQ ID NO: 31957 - DNA, 201 bp, Homo sapiens; identical to SEQ ID NO: 20221

SEQ ID NO: 31958 - DNA, 201 bp, Homo sapiens; identical to SEQ ID NO: 20226

SEQ ID NO: 31959 - DNA, 201 bp, Homo sapiens; identical to SEQ ID NO: 20227

SEQ ID NO: 31960 - DNA, 201 bp, Homo sapiens; identical to SEQ ID NO: 20228

SEQ ID NO: 31961 - DNA, 201 bp, Homo sapiens
tgatgcaatcttggctcatcgcaacctccacctcctgggttcaagcgagtctcctgcctcagtctcctgagtagctgggattacaagcacgtgccaccacrcctggttaattttgcatttttagtagagacggggtttcaccatgttggtcatgctggtctcgaactcctgacctcaggtgatccacctgcctccatctcc

SEQ ID NO: 31962 - DNA, 201 bp, Homo sapiens
accaggcactcctgacctcaggtgatccgcccgccttggcctctcaaagtgctgggattacaggcgagagccaccacacccggcctgaaagtcttttttayttttatttatttatttgagacggagttttgttcttgttgcccaggctgggcgcgatctcagctcactgcaatctccgcctcccaggttccagcaattctc

SEQ ID NO: 31963 - DNA, 201 bp, Homo sapiens; identical to SEQ ID NO: 20233

SEQ ID NO: 31964 - DNA, 201 bp, Homo sapiens
ctccatctcccaaagtgctgggattataggcatgagccaccttgctgggccaagtgtgggtcttagaagctagcctgggttaggtgcagtggctcatgccwgtaattctagcactttgggaggccaagctgaaaggatcatttaaggctgagttccaggctgtgataagccatgattgcactactgcactgcagcgtgggc

SEQ ID NO: 31965 - DNA, 201 bp, Homo sapiens; identical to SEQ ID NO: 20234

SEQ ID NO: 31966 - DNA, 201 bp, Homo sapiens; identical to SEQ ID NO: 20238

SEQ ID NO: 31967 - DNA, 201 bp, Homo sapiens; identical to SEQ ID NO: 20239

SEQ ID NO: 31968 - DNA, 201 bp, Homo sapiens; identical to SEQ ID NO: 20241

SEQ ID NO: 31969 - DNA, 201 bp, Homo sapiens
atgagagcacacctgaacaaaggggcacgagagcctttattcctgacgcaagtcctgcccctgtaccctttccccattggccggggtcgggtcatacaatstgaactaatcccggttggctaaacatttgatttttttaggtaatgtgggcacgtaaaagaaagtggagaggaaaggggaaggggtgcctgtaatgaacta

SEQ ID NO: 31970 - DNA, 201 bp, Homo sapiens
gtctttctctctttccccctcccctctcttcccttcctcctttcctcttttcttttctttctttcttttctccctttctttctttctttctttcttccttyctttctttcttttctttctcttaggaataacgctcaaaatcctaagggaaattgaacactcgaacaaaggattattagcaaagcaattttacttctgctc

SEQ ID NO: 31971 - DNA, 201 bp, Homo sapiens
caatgtctttctctctttccccctcccctctcttcccttcctcctttcctcttttcttttctttctttcttttctccctttctttctttctttctttcttycttcctttctttcttttctttctcttaggaataacgctcaaaatcctaagggaaattgaacactcgaacaaaggattattagcaaagcaattttacttct

SEQ ID NO: 31972 - DNA, 201 bp, Homo sapiens
tgtcccacaaaccaatgtctttctctctttccccctcccctctcttcccttcctcctttcctcttttcttttctttctttcttttctccctttctttcttyctttctttcttccttcctttctttcttttctttctcttaggaataacgctcaaaatcctaagggaaattgaacactcgaacaaaggattattagcaaagc

SEQ ID NO: 31973 - DNA, 201 bp, Homo sapiens; identical to SEQ ID NO: 20248

SEQ ID NO: 31974 - DNA, 201 bp, Homo sapiens
ttgtcccacaaaccaatgtctttctctctttccccctcccctctcttcccttcctcctttcctcttttcttttctttctttcttttctccctttctttctytctttctttcttccttcctttctttcttttctttctcttaggaataacgctcaaaatcctaagggaaattgaacactcgaacaaaggattattagcaaag

SEQ ID NO: 31975 - DNA, 201 bp, Homo sapiens
caagggaaagaaattggttttaagaataacctttttcctagatttgtacttaattgaacctttgcctaagttatatggctttttaaaaattagaggtttcytgtaaaaattcttaggtgccaccgggaccctaatcttctggagctgccaagggggtctgggaggagacaacatcaaataattacactataacttaatgat

SEQ ID NO: 31976 - DNA, 201 bp, Homo sapiens; identical to SEQ ID NO: 20250

SEQ ID NO: 31977 - DNA, 201 bp, Homo sapiens
ggtctcgaactcctgacctcaggtgatccacctgcctccatctcccaaagtgctgggattataggcatgagccaccttgctgggccaagtgtgggtcttaraagctagcctgggttaggtgcagtggctcatgccagtaattctagcactttgggaggccaagctgaaaggatcatttaaggctgagttccaggctgtgat

SEQ ID NO: 31978 - DNA, 201 bp, Homo sapiens
ataaggagctacgcatttacaacagccctcacaggtccacatccctagacctctggggaaagaactatatgaaagtctttttttttttttttttttttgakactgagtttggctctgttgcccaggctggagtgcagtggcgtgatcttggctcactgcaacctccgcctcccaagttcaagcaattctcttgcctcagat

SEQ ID NO: 31979 - DNA, 201 bp, Homo sapiens; identical to SEQ ID NO: 20252

SEQ ID NO: 31980 - DNA, 201 bp, Homo sapiens
caggctggtcttgaactcctgaccttgtgatccacccgcctcggcctcccaaagtgctgggattacaggcgtgagccactgtgcctggcagtactaacttycttaaaagtggatgtatttaacagagacacattggccaagtctctgggtcacttacactatccattttctgtcctgaaattgtgaagcaaggtattttga

SEQ ID NO: 31981 - DNA, 201 bp, Homo sapiens; identical to SEQ ID NO: 20253

SEQ ID NO: 31982 - DNA, 201 bp, Homo sapiens
tgggttcaagcaattctctgcctcagcctcccgagtagctgggattacaagtgcccaccaccacacccagctaatttttgtattttttagtagagacaggktttcatcatcttggccaggctggtcttgaactcctgaccttgtgatccacccgcctcggcctcccaaagtgctgggattacaggcgtgagccactgtgcc

SEQ ID NO: 31983 - DNA, 201 bp, Homo sapiens; identical to SEQ ID NO: 20254

SEQ ID NO: 31984 - DNA, 201 bp, Homo sapiens; identical to SEQ ID NO: 20255

SEQ ID NO: 31985 - DNA, 201 bp, Homo sapiens
agccagccctgtacaagacaggacatggggctggttcttacagggttaacagtgttgctagacaggtagatacagaaaggcaatttgggcagctgtagctrtctgagcagacactgggcagaatatagcttttggctgggaacttttttcatcttccccacctggagcacatgtgggttttgttgttgttgttattgttgt

SEQ ID NO: 31986 - DNA, 201 bp, Homo sapiens
agttccaagttaagaggggcagtgatggttctgcaaagatctccaactcacagcttgattcaacaaatgtctatcatttgtctaccgagtactagggttgstagaaagccctgggacacagacatgacaaagacaagtccctgaagtgctccaggaggtgggtagagcaaacatgaacccagaacttccgtccatagtgca

SEQ ID NO: 31987 - DNA, 201 bp, Homo sapiens; identical to SEQ ID NO: 20256

SEQ ID NO: 31988 - DNA, 201 bp, Homo sapiens
cgttgctctctcctgccctcccctcagtacaatctctgtgccctaggaaggaagggatgggactatgttgaatgaggattaattagtaactcaccagtttygcaaaaaacagacaaaaacagaaaacaaaacaaaatgaaaaaaacagcaaacaaaacaaaacaaaaaaacaacaaatgtcccagagaataaggagctacg

SEQ ID NO: 31989 - DNA, 201 bp, Homo sapiens
gtcgaggcttgcagcaccctgaaacacagcaaaccttcatccggtcagtgtggatggtgtggtggagggaggagttggggctctgagggatggaccacaarctaagcagggctctggtactcactcacataggctggagggcagcatgcggaccctggtcgggctcctgaccagcaaccaggccctgctgcagcttgaggc

SEQ ID NO: 31990 - DNA, 201 bp, Homo sapiens; identical to SEQ ID NO: 20261

SEQ ID NO: 31991 - DNA, 201 bp, Homo sapiens
tggtggagggaggagttggggctctgagggatggaccacaagctaagcagggctctggtactcactcacataggctggagggcagcatgcggaccctggtygggctcctgaccagcaaccaggccctgctgcagcttgaggcggctcggtgcctgcatgagctctctcactccgagcagtccactgttgctgaggcctgcc

SEQ ID NO: 31992 - DNA, 201 bp, Homo sapiens
tcctgcggcaagcccagcgggggacagaggaaaaggagagagagggggctctggtcagccttcgtcgaggcttgcagcaccctgaaacacagcaaaccttsatccggtcagtgtggatggtgtggtggagggaggagttggggctctgagggatggaccacaagctaagcagggctctggtactcactcacataggctgga

SEQ ID NO: 31993 - DNA, 201 bp, Homo sapiens; identical to SEQ ID NO: 20263

SEQ ID NO: 31994 - DNA, 201 bp, Homo sapiens; identical to SEQ ID NO: 20264

SEQ ID NO: 31995 - DNA, 201 bp, Homo sapiens; identical to SEQ ID NO: 20267

SEQ ID NO: 31996 - DNA, 201 bp, Homo sapiens; identical to SEQ ID NO: 20266

SEQ ID NO: 31997 - DNA, 201 bp, Homo sapiens; identical to SEQ ID NO: 20271

SEQ ID NO: 31998 - DNA, 201 bp, Homo sapiens; identical to SEQ ID NO: 20272

SEQ ID NO: 31999 - DNA, 201 bp, Homo sapiens; identical to SEQ ID NO: 20273

SEQ ID NO: 32000 - DNA, 201 bp, Homo sapiens; identical to SEQ ID NO: 20274

SEQ ID NO: 32001 - DNA, 201 bp, Homo sapiens
attacaggcacccaccactactcccggctaatttttgtatttttagtaaagatggggtttcaccatgttggccaggctggtctcaaattcctgacctcagytgatccacccgcccaggcctcccaaagtgctgggattacaggcatgagccaccaggcccggcccaaccagtgtatttcttgaatgaactgaagtctcata

SEQ ID NO: 32002 - DNA, 201 bp, Homo sapiens
agacggagtttcgctcttgtaccccaggcaatggggcgcgatctcggcccactgcaatctccgcctcccgggttcaaacgattctcctgcctcaggctcccgagtagctgggattacaggcacccaccactactcccggctaatttttgtatttttagtaaagatggggtttcaccatgttggccaggctggtctcaaatt

SEQ ID NO: 32003 - DNA, 201 bp, Homo sapiens
tttctttctttctttcttttttttttttttgagacggagtttcgctcttgtaccccaggcaatggggcgcgatctcggcccactgcaatctccgcctcccrggttcaaacgattctcctgcctcaggctcccgagtagctgggattacaggcacccaccactactcccggctaatttttgtatttttagtaaagatggggt

SEQ ID NO: 32004 - DNA, 201 bp, Homo sapiens
atgtgccactacacccggctaattttgtatttttagtagagatggggtttctccatgttggtcaggctggtctcgaactcccgacctcaggtgattcaccygcctcggcctcccaaagtgctgggattacaggcatgagccaccgtgcccggcagaaagtcttttttaaattcccacttcctctttaattgagaaagaagt

SEQ ID NO: 32005 - DNA, 201 bp, Homo sapiens; identical to SEQ ID NO: 20278

SEQ ID NO: 32006 - DNA, 201 bp, Homo sapiens
tctggcttaccttcaaagcttgtgctcaactaagtcaatgcctaaagtgcctatcagcccccaggaatgccgttaaacaaaaacccttgctgaaggcctaygttcccttctcctgacactgctttgcaggtacctgcatcactttcccatccttgccccggtacaatgtgtagagctgatacgccctgaactcatggggtg

SEQ ID NO: 32007 - DNA, 201 bp, Homo sapiens
tcacaatgacaaccaagggtcagaataaggtccatagcaatactgcaggaaaaaattgcaggacatgaacagaacttttgagtctatgggagtagggcatrtgaggccgctgataacccctagaaaagtaacaagaaagcaaggccgtgtgataggtgacattgtgtcatccaagagcctgcaagcactcaggaggttaaa

SEQ ID NO: 32008 - DNA, 201 bp, Homo sapiens
ggttacctgtagaggactcacaagtagatggtgtggatttagctctgcaggccctagaatctccagaaagcttctgctccagattctgaatctttaacatrcaccaggtttttaattcatccaccaaggatatcttaaaaaaaaaaacaaaccccacaaataagtacatagaagaatcaagtgaatttgatacatggttta

SEQ ID NO: 32009 - DNA, 201 bp, Homo sapiens
aatactgcaggaaaaaattgcaggacatgaacagaacttttgagtctatgggagtagggcatgtgaggccgctgataacccctagaaaagtaacaagaaarcaaggccgtgtgataggtgacattgtgtcatccaagagcctgcaagcactcaggaggttaaacacagaagctccgcgttggttctgctgagctcaagtgc

SEQ ID NO: 32010 - DNA, 201 bp, Homo sapiens
tatttccaagtcttttgattcttcttctcacatgcctgaatgatcccttagaaaattgccaaaaaaagaacactttagagatagtccccaaatactttttmcattttaatttctagatgttaaggttcaagtatgctcatgaagttattttctgaagtgacacaagaaagagagaacgtgagaatctggttttgttcaccc

SEQ ID NO: 32011 - DNA, 201 bp, Homo sapiens
aaccactaaatacgtgttgaatacatgagtgaaatgaaagaaatctgatgcctctagaaatagatcataccaaagcttatattgccaataaggaaatatcratgatgtggaaaagcatttgcaccaagaaaattaaaaaccataggtttggataaacaaattgtggtagatccacacaatggaatactcctcagcaataaa

SEQ ID NO: 32012 - DNA, 201 bp, Homo sapiens
tgtttgtgtcaagggggtgaatgcctcatgactggcttggtaccatcctcacggttagtaagttcttgctctattagtttttttttttgtttgtttgtttkttttttgagatggaagtctcgctctgtcgcccaggctggagtgcagtggcacgatgtcggctcactgcaagctctgcctcctgggttcacgccattctcc

SEQ ID NO: 32013 - DNA, 201 bp, Homo sapiens
gaaataacatcaaattcagcctgggcaatatcatgagaccttatatctacaaaaaattagccaggactggtggcacacgcctgtagtcccaagctacttgsgaggttgaggcaggaggatcacgagcctgagaggccaaggctgcagtgaggtgtgatcatgccactgcactccagtctgggtgacagagcaagaccctgt

SEQ ID NO: 32014 - DNA, 201 bp, Homo sapiens
tcattttattgatgtctaattctctcattttattgataagcctaggacagcatgcttggaccagaaatcaaattgtcaaggctctttgcactcaccccaasctgcttccaacctgtgaagtcattaaccttaggacgagcctcagaaaaggtcagatgcatctgtggggttgggactgcctctttcataaagtaaagcata

SEQ ID NO: 32015 - DNA, 201 bp, Homo sapiens
ctcacataagcagggttttggcgctgttggtgcgcttgctcctgacctggaatatcaatcagcttctagccttttctgcaaatgaaacttctgggccgaayggaccttcaggttcctcgtgccactctgggctctcactcttctcactggaagaaggctcccacagggggagaaacccacagccatcctcacctgtgaatg

SEQ ID NO: 32016 - DNA, 201 bp, Homo sapiens
ggtgggtcacactggaagacacgctaagtaaaatatatgacaccagagggcaagggcagaccaagggggcaagaagtgctttaggaggccaaggcctgggyaccacccaccaaggagtgcttccctgcaaagaggggagggaacgtagcactcagacagcatccagggggaatgtttcagttggggaaacaccacagagga

SEQ ID NO: 32017 - DNA, 201 bp, Homo sapiens
gcgattctcctgccttagcctcccaagtagctggaattacagacatgcaccactatgccttgctaatttttgtatttttagtagagacagggtttcactaygttggctaggctggtcttgaactcctgacctcaagtgatccacttggcttcccacagtgctgggattacaggcgtgagccaccgtgcccggcctaatgtg

SEQ ID NO: 32018 - DNA, 201 bp, Homo sapiens
ttaaggctcctgatttgttttgccaaattgtctcccaaaggtggctattcgtatcacactttcccagcagcatctaggggagcccactttactaattttcrgtattagcattttaaagttcttttgctgatttttttaatgccaactccattgccatattttttgaatacaaaaaaactatgggacagtaatcgcatgtag

SEQ ID NO: 32019 - DNA, 201 bp, Homo sapiens
ccatcctcacctgtgaatgaggcattctagcatctgccaggcctcaccttgttcttggcaagcacgttggctcctgctttaacgagcagcttggctgactsgctgaaaccatgccaggatgcttcatgcaaggctgtattcccatcctaaggaagacacacaggtgggaaaggcacattacccaagacctaattcttctca

SEQ ID NO: 32020 - DNA, 201 bp, Homo sapiens
ggcactttgatttggaacatgttgacccatttgcgaagtacgtgaactgccagctctcagtttttctgagacagtgtttctcactttgggattttaagagytttggtgcctataaggtctaaatctttgttttgaaatactgttatttttctttcctacatggtgaaaaagagtgagtgtagtgttggcagatttcagtca

SEQ ID NO: 32021 - DNA, 201 bp, Homo sapiens; identical to SEQ ID NO: 5368

SEQ ID NO: 32022 - DNA, 201 bp, Homo sapiens
atttagctgggaccacaggcatatgccaccatgaccggctaattttttttacttttcagagagaggagggggaatctcactttgttgccaggctagtctcraactcctgggctcaagcaatccacctgcctcggtggccagagtgctaggattacaggtgtgagttgtttttttttttaaagagacagtcttacctcattc

SEQ ID NO: 32023 - DNA, 201 bp, Homo sapiens
gagcgtatgtggtttgcatttgcaagattcaactagcacagactccaagaaaacctaagtttttttgtttttttaaagcaggtaaggccgggcactgtggmttacacaagtaatccacacactttgggaggctgaggtgggtggatcactttaggtcaggatttcgagactagctaggccactagctagcctaacctggtg

SEQ ID NO: 32024 - DNA, 201 bp, Homo sapiens
aatactgttatttttctttcctacatggtgaaaaagagtgagtgtagtgttggcagatttcagtcatgcaagggtgcagtgtgcgcctcttcaagaggaamcacccccatgtggcacaggcagacatactgcaaggaagctcaagacaggttaggtgtgtaaagcaagttgctgacctctttttctctctctgatcttcta

SEQ ID NO: 32025 - DNA, 201 bp, Homo sapiens
acaggcgtgagccaccgtgcccggcctaatgtgttgcttttaaatagaagtcatttaatgaacatagctcatatttgcttagcttactattttaaacaaakaaatatcattaagtgcaatgaattgagtggggtgggggcgggaaggcaggagttccagggagggaagagcccggagaaggaagggtgcagggcaatcagc

SEQ ID NO: 32026 - DNA, 201 bp, Homo sapiens
tccattgccttcttggattctatgatgtggctggtcagagttttgtgaagtttcctggcagagcaccagaggggcaaagaaaacattctggggcgtccctsgtgcttggcccaaaagaggacagaggccatcataagataaaacagattttttaaaagaaggatgcactgctacctataaacaaccttaacgaaatactga

SEQ ID NO: 32027 - DNA, 201 bp, Homo sapiens
cactgaaccgtatacgtaaatatgttcagacagtaaatttaatgctatgtatattttattacaataaaaaatcctagttaaaactcaaaattgctttcttwaaattaaaaagtctccctttaaaaatccatgaaaggatttttctcttttaactttttatactttttaatattttccagctttttatatttaacacggata

SEQ ID NO: 32028 - DNA, 201 bp, Homo sapiens
taaaatttccgtaagatttccaagacttcccatttctctatcagaatggtgacggaatttcccaaaataggcctccagtgcaatgatgattactgacctgmtaagaaagacggtgcccttcttagcaagaaccacgcgactgcagctcacgctttcagggtagtgctgacttggttagatttccacttcttacaggctttt

SEQ ID NO: 32029 - DNA, 201 bp, Homo sapiens
gtgaggacagatcctaaccctttttattgatcagtgaatttttttttttaagtttagcagacatcttggaatatagtgccactgagctggtatatcttgaycattgcttgtaatgttaccgattttaaattattattttaaaatttagtattttaaaatatgtagataaaagagtatctacactcttcagcatcatcactt

SEQ ID NO: 32030 - DNA, 201 bp, Homo sapiens
aaaacatcaaattcattccatattcaggtaacagtgacatatatctactgaattatttatttttcttttaggaatgtctatatctatggattgtcactatmaaaaaaagaaaaaaccctaaaactgagcttgacaaagggaataaaagcatactttgtttttcttggtgtccccatgttaataaatcatttcttctctttg

SEQ ID NO: 32031 - DNA, 201 bp, Homo sapiens
atgtagcaggcgtttttccccaccctgagtagtgggtactgatttcccagacaggagctgctacatctgctgaataagaaggatctttctacgggctatgrctggtacaaaatgtccctccctttgagacgcatgagtttcctgacctgtccttctgaagccattttatttacacagaaacaatttctgggctgggtgcag

SEQ ID NO: 32032 - DNA, 201 bp, Homo sapiens
ggagttataagacttctaattcctatgcttgcttggtgggtttttttttttgttttttttttttttcctttaaagagacggggtctcattctgttgcccaractggtgtgcagtggcaagatcatggctcactcaccacagcttcaaactcctaggctcaaacaatccacctgcctcagcctcctgagtagctggaactac

SEQ ID NO: 32033 - DNA, 201 bp, Homo sapiens
gccagtgagccccactctgagggcacaggaggtgctctaggggaaaggagccaggaggaactccagaggtgggccagcagaggcttatagacagtgtcagrcaggagctttatgagaaggtcgctgagcagaggaagagcaggatgaaaggagggactagatttgagcctgccaatctgcttgaggcatctgaaataatcc

SEQ ID NO: 32034 - DNA, 201 bp, Homo sapiens
ctctgagggcacaggaggtgctctaggggaaaggagccaggaggaactccagaggtgggccagcagaggcttatagacagtgtcagacaggagctttatgrgaaggtcgctgagcagaggaagagcaggatgaaaggagggactagatttgagcctgccaatctgcttgaggcatctgaaataatccagggcatgcttaag

SEQ ID NO: 32035 - DNA, 201 bp, Homo sapiens
tcctggaagggcaggctaatgcaactgagatttaacttgttagcctttttcaagtcacccattcttgtatttttcttgaaacatcaaaattttaactatgracaccaggccctgcctttcaggcagtacagttgcatctatcacttaggacacagattgagaccctcttgctttttgggtccttcttgtttttgagaacct

SEQ ID NO: 32036 - DNA, 201 bp, Homo sapiens
aggaggacgcgcgtgctctgggagtggctgttctggcaggccaggtgcagagctgtgttccccgccttggagagaggcagagagagggaggacatattagyaacatgcttccgcacagacttgcatgccttgcagaggggcagtacttactcgggggaaaaggcaacgctcacattctctgcctcttgcccgatggtttca

SEQ ID NO: 32037 - DNA, 201 bp, Homo sapiens
gcatatgccaccatgaccggctaattttttttacttttcagagagaggagggggaatctcactttgttgccaggctagtctcaaactcctgggctcaagcratccacctgcctcggtggccagagtgctaggattacaggtgtgagttgtttttttttttaaagagacagtcttacctcattctgtcacccagaatggaat

SEQ ID NO: 32038 - DNA, 201 bp, Homo sapiens
ttataaaggaaatacagcttctttgtgaagaagcgatacccatgtgacctttccggtcagctcatcccaaggacgcctcagtcatcagtaggacctgctcrctatagatgctgggcatggggcattagaggacctcccctgtaaatggcaccagctcatatttgctgataatagtacaacactcaacactctatgtgggta

SEQ ID NO: 32039 - DNA, 201 bp, Homo sapiens
tttgagcaccatccacgtgccaggcagtataccaggggatagagatgatggaagagataggctcatccttgtcataactttggaacatcttataggccaarttttgggtgtagcagacactaaaattcagagggtaagatatggtccctctcctcaaggtgcttttatataccctggggcctcaagatacctagtcacctg

SEQ ID NO: 32040 - DNA, 201 bp, Homo sapiens
tgtcaactcctggggctgctcagagcaggggtacccttcaagtccaccccaatggccctgggggctgtggttccagcagagatcccccgtcttccagagtrcgctgggcctgggggtctgcaggggtttagtacacatcccattctggaaaggggtgggaaccactttagaaagcaatgttgcaactcaacttacattgtt

SEQ ID NO: 32041 - DNA, 201 bp, Homo sapiens
ctgggtaagctccagagcttgggaggtgtcccgaatgtgagggccagtctgctcgctgcctgtggctggtggcggctgcccacaggtgctgctggctgcgrgttgctgggcacgatgccttgttggcccactcttcccagacttcttagtttgagtgcctctgttgacgcagggcccagcctgctgatcagatctggctgc

SEQ ID NO: 32042 - DNA, 201 bp, Homo sapiens
aagacaggaattataatacctcgaggactcaaaagtttccagagcgggctcctccagctcccctgagccactggcttcccttgccttggggagtaaggaarctcagtgtccactcaccttgtcttgtctgtccagggcacacccttcgtggatgagcgccgcgatgatctccgtgttccccaccactgtggcccggtgcaa

SEQ ID NO: 32043 - DNA, 201 bp, Homo sapiens
gccaggctagtctcaaactcctgggctcaagcaatccacctgcctcggtggccagagtgctaggattacaggtgtgagttgtttttttttttaaagagacagtcttacctcattctgtcacccagaatggaatgactttctaaaattgcagaaagcagaacatattccttgctgtttataatattatagtcgtatcaaagg

SEQ ID NO: 32044 - DNA, 201 bp, Homo sapiens
actgggtaagctccagagcttgggaggtgtcccgaatgtgagggccagtctgctcgctgcctgtggctggtggcggctgcccacaggtgctgctggctgcrggttgctgggcacgatgccttgttggcccactcttcccagacttcttagtttgagtgcctctgttgacgcagggcccagcctgctgatcagatctggctg

SEQ ID NO: 32045 - DNA, 201 bp, Homo sapiens
tgccaggctagtctcaaactcctgggctcaagcaatccacctgcctcggtggccagagtgctaggattacaggtgtgagttgtttttttttttaaagagacagtcttacctcattctgtcacccagaatggaatgactttctaaaattgcagaaagcagaacatattccttgctgtttataatattatagtcgtatcaaag

SEQ ID NO: 32046 - DNA, 201 bp, Homo sapiens
ttaccagaaagaagagggaagacttctggatgaaacctctgtgagtaccttaacattcacatggaagtagtaaaaataagattctgggtgcagttctccartgacaggaaaaaaaacaaagagaatttgaagaatacgtcagagacaaatacattacaaccaaaattgacttcaaggcacttttgaaggagatcaaattta

SEQ ID NO: 32047 - DNA, 201 bp, Homo sapiens
agccacactggtcccatttaagccaaaaaagttgctggcttttccttcagcccgcctcaatctacctgagaaggctctggtcctgtttcctgatgcctaargatgatgccgctcaccaagtatctcaaagcagatttggacatttatctatgagaatatgtattcccattctctaatgtctgggcctattccctaccagtg

SEQ ID NO: 32048 - DNA, 201 bp, Homo sapiens
accacaggcgtgcgccaccaggcccggctaattttttgtattttagtagagacgaggtttcaccatgttggccaggctggtctcgaactcctgacctcaggtgatccacctcggtatcccaaagtgttgggattataggcatgagccaccgcacctggcctgagtgtttcttgatgggaagaagaaataatgtaaaaatgt

SEQ ID NO: 32049 - DNA, 201 bp, Homo sapiens
ctatctctagtaaatctaaaatcttgaaactcaaaatcatccttttatgggtgtagaagtcagtgatttaatgatgctcttcctaacagtggtgtgcatgsaaaggttttcattaaagagcgtatgtggtttgcatttgcaagattcaactagcacagactccaagaaaacctaagtttttttgtttttttaaagcaggta

SEQ ID NO: 32050 - DNA, 201 bp, Homo sapiens
tgcccaaagcatgagtctttgagcaaggagcatatgtgactcacgacagcattaccagtgtctagcaagagtgagccctttttttttttttttttttttttaaatagagctttgctcttgttgcccaggctggagtgcaatggcgcaatctcggctcactgcaacctccgtctcccaggttcaagcgattctcctgcctga

SEQ ID NO: 32051 - DNA, 201 bp, Homo sapiens
tgcaatcttggctcactgtaacctctgcttcctaggttcaagcgattctcctgcctcagcctcccaagtagctgggactacaggcatgagccaccattccyggataatttttgtatttttattagagatggggtttcaccatgttggccaggctggtctcaaacccttgacctcaggtgatccacccacctcagccaccca

SEQ ID NO: 32052 - DNA, 201 bp, Homo sapiens
tgtcttctttcatggctttcactgtggccacagcatcctggactatttctgaggcgggagctatgtgattgctcattgaccaatcagagatggcattagcrctccaatgagagttgacacgattggcaggaagcaagaaagaatttgctcctggagttgcataatctaaagaactggtttccacaggttgaaattcataat

SEQ ID NO: 32053 - DNA, 201 bp, Homo sapiens
gggggtctgcaggggtttagtacacatcccattctggaaaggggtgggaaccactttagaaagcaatgttgcaactcaacttacattgttaacaatggtcrtatctgctccggcttccagtaagattttggccaccttcttgtgatttagggcagcagcaacgtgaagtgctgtgtctccagcctggaattgattagaagg

SEQ ID NO: 32054 - DNA, 201 bp, Homo sapiens
tatgaagttaggagtaaattcttcatatcattaacattctctgtttctacccaccatccaagacaggtaacttctgagattttttcaaataactgatctcytagattctttaaaggacacacatcaagagttttcttccttgatttcttgcatgtatttcaaggctggtcatcaacagcatggtaaatacacagagaacag

SEQ ID NO: 32055 - DNA, 201 bp, Homo sapiens
gtatttcaaggctggtcatcaacagcatggtaaatacacagagaacaggcatggatcatattgctggcaaatgcatttcttcagaactagtgaaggtcaaktctaccttctccactcccaattatttcttgttgttgtatttttattttaatttatctgggagaagcaatatatgcattgtctctctaggacaaggaaaag

SEQ ID NO: 32056 - DNA, 201 bp, Homo sapiens
ttgtctctctaggacaaggaaaagatgcaagaaaataccttcaataaataaaagggactctctctgtctaaaagtagagctggcttttcttctgctgacaygtctcactttggctacctaagaaaattcttgcctgtttcacttcctaccttgcctggtataaacagcagcagttctaggaaattagcaaggcttttgctg

SEQ ID NO: 32057 - DNA, 201 bp, Homo sapiens; identical to SEQ ID NO: 5372

SEQ ID NO: 32058 - DNA, 201 bp, Homo sapiens
cacagccatcctcacctgtgaatgaggcattctagcatctgccaggcctcaccttgttcttggcaagcacgttggctcctgctttaacgagcagcttggcygactggctgaaaccatgccaggatgcttcatgcaaggctgtattcccatcctaaggaagacacacaggtgggaaaggcacattacccaagacctaattct

SEQ ID NO: 32059 - DNA, 201 bp, Homo sapiens
ctttgcatggcttccagcctttctcagcaaaccagaccatctacgaaatgggatgtcattaatcttttccagtccacagaagtgagggaatattgaccttsaggcctccaaaagtagtatcctatggctgggcatggtggctcacgtctgtaatcccagcactttgggaggccaaggtgggtggatcatctgaggtcagga

SEQ ID NO: 32060 - DNA, 201 bp, Homo sapiens
gtgtctcctgctgagacactgccctacagaaggaaaaagcccagagacccattgtgtttgcttccttggcctttttcactaatatggtcaaatattctttrcaagattccatatggtaagggacccacgagaacctttgcaaataacataaatttcagacataggaaacactgcttggtggtcttaactaacatagaacgt

SEQ ID NO: 32061 - DNA, 201 bp, Homo sapiens
gctgggggtgtctcctgctgagacactgccctacagaaggaaaaagcccagagacccattgtgtttgcttccttggcctttttcactaatatggtcaaatwttctttgcaagattccatatggtaagggacccacgagaacctttgcaaataacataaatttcagacataggaaacactgcttggtggtcttaactaacat

SEQ ID NO: 32062 - DNA, 201 bp, Homo sapiens
ggttcacatcgacaaccatttattggtgcctaagagagaaacaaaaaaggaatcaatcccttgttcattccttcatcaggtatgttttgagcaccatccaygtgccaggcagtataccaggggatagagatgatggaagagataggctcatccttgtcataactttggaacatcttataggccaagttttgggtgtagcag

SEQ ID NO: 32063 - DNA, 201 bp, Homo sapiens
atgaacaccgatgcctgttcctctttttagggtgattatgagcatgcaggttcttctggtgtccaggctgttggtcggctggtggggtggggtcagaaaaygctgacacctgtaagagaggaagagacaacacccctgaacgctttgacctctgcaagactgacaccagtcggtggcgcccatgtcaccccatttgggcaa

SEQ ID NO: 32064 - DNA, 201 bp, Homo sapiens
tcatatttcctctttattggtgctaattttccttctgcaccctagtccttagtttggcaagttcctcttctaaacttttaatgtgttccttcaatgtagcyttatcttgctgggctttctgattggcttggcttcgtgcttcttcaatcttcctttcataccacttttccatctgggtagaaacagcctcaaaaaaatact

SEQ ID NO: 32065 - DNA, 201 bp, Homo sapiens
aaaccaaagatgaggcatgaagggaaaatgatgggagaaaagcagtatttccaagtcttttgattcttcttctcacatgcctgaatgatcccttagaaaaytgccaaaaaaagaacactttagagatagtccccaaatactttttacattttaatttctagatgttaaggttcaagtatgctcatgaagttattttctgaa

SEQ ID NO: 32066 - DNA, 201 bp, Homo sapiens
aaggaacttaaaggattgcttcagagaacaagcagttgtcactttttaatcacatgcccttctggagtacccttcatcttggcatttcctgtgggaccccyacacctaggagggccaaactttcactgctttgacaaggaccaaagaatgaaaggaactattgttaggaagagccaatccgcgaaggctcactggtgagct

SEQ ID NO: 32067 - DNA, 201 bp, Homo sapiens
ccctcatgcttctctgtgtctgagtgctgttgcaggcggttcaggcactccgtcctctctgcagaaagtcgctcaaccatcagcttgtccaaaacacgcakctaggagtgaagtggagcagagtgtaagactgagatgatctcagggtgagccctggcttctcagctcctgcagaggggcttggggaaccaagtaggagcc

SEQ ID NO: 32068 - DNA, 201 bp, Homo sapiens
agggtagaaactatgtcttgttctaaaactgtaatggcctaacaatgcacaatacatggaatgagttcaggacagaaatggcatcttccccagcatgttcrgtcttcatctgttgccagcatattcagccacggacataaacagaactacaggttcttttctattaacctcatttcagtatcataaaaatgatacactata

SEQ ID NO: 32069 - DNA, 201 bp, Homo sapiens
acactctatgtgggtagagactttcttaaaacattaactggtttcctagtctgtaattggccagacacgtactgtaagaaatgataaaccaaagatgaggyatgaagggaaaatgatgggagaaaagcagtatttccaagtcttttgattcttcttctcacatgcctgaatgatcccttagaaaattgccaaaaaaagaac

SEQ ID NO: 32070 - DNA, 201 bp, Homo sapiens
gcacctggcctgagtgtttcttgatgggaagaagaaataatgtaaaaatgtctttctcacatattaatgtatagattcaacactacttcaaaattccaacsaagatcacaagatgatttggagggaaatgatacaaaacatttctaaagattatagagaacagtactaatggattttttacaagaaactagagtcctgcca

SEQ ID NO: 32071 - DNA, 201 bp, Homo sapiens
atctctgacaggtcctcaggaagctaagttgaggtaaatcaagctgagcctgtggtccagccttgaaagggaggatgggtgggcagtgtggaaatgttctkgtggaaagcaatgagcacgagacaaggggtcaggaggcctgggctgtgcatggcttgctagaagcctgtcaccctgctggacctcaggtgtgtcaccctg

SEQ ID NO: 32072 - DNA, 201 bp, Homo sapiens
tgtaagtaagtggcagtgcaaggaacagaacttagggagttataagacttctaattcctatgcttgcttggtgggtttttttttttgttttttttttttttcctttaaagagacggggtctcattctgttgcccagactggtgtgcagtggcaagatcatggctcactcaccacagcttcaaactcctaggctcaaacaat

SEQ ID NO: 32073 - DNA, 201 bp, Homo sapiens
caactttgtagtcccgcataatcagtaccatggaaagggcagtaaatcctacctggggagctttagtaaggagaagagcaacttccgggttattgtggtakcgggcagtctccagcggagtctggcctgcctgaggagaggcagagtaggacaggtgagaaagggccacgggtcccacacgcacatagcccagctggcaca

SEQ ID NO: 32074 - DNA, 201 bp, Homo sapiens
gagaaagtctggggcacatcccttacccccccgacccaggcctacataggtccttatttctagatttttttctttaccatttaagatttatgtggttgtcmctggtgccatagaacaaggaaaaagatttttaaaaaatacaattggcagctgggcacaatggctcatgccagcattttgggaggatgaggtgggaggagc

SEQ ID NO: 32075 - DNA, 201 bp, Homo sapiens
ccacagggagaagatgaggcggcccaggcatgaacacgaagagctggacttgatgcctttgactcccgtcatcctgggcccccatgcatgcctatacctcyactgcctggttacattccatatttaagttagtttgaagaggcttcagtagattgcaaccaggagtcccaacaactttgtagtcccgcataatcagtacca

SEQ ID NO: 32076 - DNA, 201 bp, Homo sapiens
ccacttttccatctgggtagaaacagcctcaaaaaaatactgggtaagctccagagcttgggaggtgtcccgaatgtgagggccagtctgctcgctgcctstggctggtggcggctgcccacaggtgctgctggctgcgggttgctgggcacgatgccttgttggcccactcttcccagacttcttagtttgagtgcctct

SEQ ID NO: 32077 - DNA, 201 bp, Homo sapiens
cagtcagaagatgacagctcctgctggagtctctgggtagcagtggagttgagggccttctctttgggcctaaccactggaggggagctgtcggaagctgytgctggacctgcagtcaccactaattggtccacacctggtttcagaaggaaaacaaacgtgagagcaaatccacattcacacagtcatatggctgcgggt

SEQ ID NO: 32078 - DNA, 201 bp, Homo sapiens
ggggaacagtggggcctaagttgagttatcgaatattttgccttcaccgcaaagcagtagaaagcttttgaggttaatgacagaattcaaaatgaaatacyttcaaaaaatagccttattcattataaaatgtagagcaaaaatctcaaattcagaaaggtattctgatataattgggtttgattaggaataggttataaa

SEQ ID NO: 32079 - DNA, 201 bp, Homo sapiens
ttaaaattaaaaagtctccctttaaaaatccatgaaaggatttttctcttttaactttttatactttttaatattttccagctttttatatttaacacggrtaacttttagcatcaggaaaaaccgctacttattagaagtctgagcagaaacaataccccagtaacaggactgtccctgtcacagactctcttcccactg

SEQ ID NO: 32080 - DNA, 201 bp, Homo sapiens
aaaaattgcaggacatgaacagaacttttgagtctatgggagtagggcatgtgaggccgctgataacccctagaaaagtaacaagaaagcaaggccgtgtrataggtgacattgtgtcatccaagagcctgcaagcactcaggaggttaaacacagaagctccgcgttggttctgctgagctcaagtgctgggtcaggctt

SEQ ID NO: 32081 - DNA, 201 bp, Homo sapiens
cccgggttcaagcgattctcctgcctcagcctcccaagtagctgagtttacaggcatgcgccaccatgccctgctaattttttgtatttttagtagaaacrgggtttcaccatgttagccaggctggtctcgaactcctgacctcaggtgatctgcccgccttggcctcccaaagtgttgggattataggcatgaaccact

SEQ ID NO: 32082 - DNA, 201 bp, Homo sapiens
atcctattttaccgacgagaaaacttcggccagcgcagcagctagggctcagtcccgaagcctcgcgctctcagtccgagagcaacccgcgggccgtctcytaggaaaccgggctcgccacaccccttggtcgaaccccacttccgctcctgcgcgctgaggctccggcggacctctggtggacatggctgcttcccgctt

SEQ ID NO: 32083 - DNA, 201 bp, Homo sapiens
ttcgctcttgttgcccaagctggaatgcaatggcacgatctcagctcactgcaacctccacctcccgggttcaagcgattctcctgcctcagcctcccaaktagctgagtttacaggcatgcgccaccatgccctgctaattttttgtatttttagtagaaacggggtttcaccatgttagccaggctggtctcgaactcc

SEQ ID NO: 32084 - DNA, 201 bp, Homo sapiens; identical to SEQ ID NO: 5399

SEQ ID NO: 32085 - DNA, 201 bp, Homo sapiens
cagaaggattttgcaaacaattcggcaagttccaaatgattctgatcgcaaatacctgaaagattgggcaagagaagaattcagaagaaacaaaagtgccmccgaagaggtgagaacaaaatcatggtgaggacagatcctaaccctttttattgatcagtgaatttttttttttaagtttagcagacatcttggaatata

SEQ ID NO: 32086 - DNA, 201 bp, Homo sapiens
taagatttccaagacttcccatttctctatcagaatggtgacggaatttcccaaaataggcctccagtgcaatgatgattactgacctgataagaaagacrgtgcccttcttagcaagaaccacgcgactgcagctcacgctttcagggtagtgctgacttggttagatttccacttcttacaggctttttaatataacca

SEQ ID NO: 32087 - DNA, 201 bp, Homo sapiens
tttttaagtttagcagacatcttggaatatagtgccactgagctggtatatcttgatcattgcttgtaatgttaccgattttaaattattattttaaaatktagtattttaaaatatgtagataaaagagtatctacactcttcagcatcatcacttgacttttatgttgtacattttatatgtatgtatgtggaactctt

SEQ ID NO: 32088 - DNA, 201 bp, Homo sapiens
aggtaggtgacatggcagcttcccagcagcctctgctcccgtttgcactaacagacctgtccggtagccttgtgggaagggtgctggcagccatgaagagratacatgcactgacctggttcttttcatggacagaacagaaagcagtgaggaggagcctaatgatggacaagtgattatagcgcgcagcaacgtgcaaac

SEQ ID NO: 32089 - DNA, 201 bp, Homo sapiens
aaaaaggcaaatctgcaatatatacaatagttgactccttgggcatagctattatgcagttgcaaaactggaaatcttcaagaatcctttcatatttcctytttattggtgctaattttccttctgcaccctagtccttagtttggcaagttcctcttctaaacttttaatgtgttccttcaatgtagccttatcttgctg

SEQ ID NO: 32090 - DNA, 201 bp, Homo sapiens
gttcaaggagtatcccacttcagttggaccccaatatcctatatggagctatgtagtaggggagctcataaggaagcaatcactgggagcaaaaaaagggyatgaagaaaaactcaggggcaggatgctcagtaagcacaacaggcagaaccctgttcccacaaagacaataaagaactggagacaaaaagctgcctgcag

SEQ ID NO: 32091 - DNA, 201 bp, Homo sapiens
ttcagcaagccgagatcgcgctccagcctggcaacagagtgagactctgtctcaaaacaaacaaacaaacaaaaaaacgtggtgattacaggccgggttcrgtggctcactcctgtaatcccagcactttgggaggccaaggtgagtggatcacctgaggtcaggatttcaaaaccagtctggccaacatggtgaaacgct

SEQ ID NO: 32092 - DNA, 201 bp, Homo sapiens
ggacactgaggacagatcactgtcctcagcactgccaccaccgacctccccccttcagcatcctaaactattattcctgttatcagttaggttcaggctgrttttcttctcatccaccttcccagaccccttattcaaagagaacccttgcagtggttaaaaaaagaatgtggccgctgggtcagtggctgcaggaggtag

SEQ ID NO: 32093 - DNA, 201 bp, Homo sapiens
tcatcatcaatctactgtatttgcttcctttgagaaaattttcctttgtgaaactctagctcaatgcaagcagctcaatctaactttcagttcagaccttrggaggacatttccagactagcaagactcaaggaaatctaatgacttgtgtgaggttgcggcgagaacacatagtgtcctaagctgctggcaaaggtcctg

SEQ ID NO: 32094 - DNA, 201 bp, Homo sapiens
gatttggaaataaaacaaacaagtatcctcaatgtgtggcctttattttttgagacagtcttgttctgtcacctagagtggagtgcagtggtgtgatctcrgctcactgccacctctgcctccagagttcaagcgattctcctgccttagcctcccaagtagctggaattacagacatgcaccactatgccttgctaattt

SEQ ID NO: 32095 - DNA, 201 bp, Homo sapiens
agggggaatctcactttgttgccaggctagtctcaaactcctgggctcaagcaatccacctgcctcggtggccagagtgctaggattacaggtgtgagttktttttttttttaaagagacagtcttacctcattctgtcacccagaatggaatgactttctaaaattgcagaaagcagaacatattccttgctgtttataa

SEQ ID NO: 32096 - DNA, 201 bp, Homo sapiens
tgcaggcggttcaggcactccgtcctctctgcagaaagtcgctcaaccatcagcttgtccaaaacacgcatctaggagtgaagtggagcagagtgtaagamtgagatgatctcagggtgagccctggcttctcagctcctgcagaggggcttggggaaccaagtaggagcccctgcatgcaaacttcaaccccttatctga

SEQ ID NO: 32097 - DNA, 201 bp, Homo sapiens
tggagtgtggtggcgcgaacatggctcactgcaaccttgagctcctgggctcaagagatccacctgcttcagattttcatttagctgggaccacaggcatrtgccaccatgaccggctaattttttttacttttcagagagaggagggggaatctcactttgttgccaggctagtctcaaactcctgggctcaagcaatcc

SEQ ID NO: 32098 - DNA, 201 bp, Homo sapiens
aaaaaatactgggtaagctccagagcttgggaggtgtcccgaatgtgagggccagtctgctcgctgcctgtggctggtggcggctgcccacaggtgctgcyggctgcgggttgctgggcacgatgccttgttggcccactcttcccagacttcttagtttgagtgcctctgttgacgcagggcccagcctgctgatcagat

SEQ ID NO: 32099 - DNA, 201 bp, Homo sapiens; identical to SEQ ID NO: 5381

SEQ ID NO: 32100 - DNA, 201 bp, Homo sapiens
agggggagaaacccacagccatcctcacctgtgaatgaggcattctagcatctgccaggcctcaccttgttcttggcaagcacgttggctcctgctttaaygagcagcttggctgactggctgaaaccatgccaggatgcttcatgcaaggctgtattcccatcctaaggaagacacacaggtgggaaaggcacattaccc

SEQ ID NO: 32101 - DNA, 201 bp, Homo sapiens
cgggttcaagcgattctcctgcctcagcatcccgaggagctgggattacaggcaccttacaggcctcccagagtgcttgggactgcaggtgagagccaccrcgcccggcctccttcactttcatttgaactctctttaccaggaactgtgttaagtgccctacctttcttctttatcaaaacgaccctatggtgcactgtt

SEQ ID NO: 32102 - DNA, 201 bp, Homo sapiens
agccagggtcagaaaccaccattccatggtatttttaatctacaccacaatctaatttttttttttttagttaagatttatgcactccaacaaagaaaagygaaacaatgtaccacataggtgtcaataaataccaagacaatctaattttcaaatccaatgactgctggaaattgtgcacatttctaaggaagacggtaa

SEQ ID NO: 32103 - DNA, 201 bp, Homo sapiens
ttccttctccatctctatccataccccaatcaaattaattaatcatcttgtccagtcaggcttctggatatcctgtcccatccctccccctccccctactscactgtgactgggactcttttaatctctagcagggactacttcaatggtatcctggccagtaacttctctttgcttgcttcacttcatcctattcacaac

SEQ ID NO: 32104 - DNA, 201 bp, Homo sapiens
ttgcatttatgtccatggtaggctgagctataatatgctggctttgcagcagaatgaaaaggatgagttggtgtagccttataaggaggcttataaaaatwaattatcctccataaatgatgatgttgcatcccactcacatttcattggctaaagccctctatggggcagggagtttaatcttccagtagggttgagtct

SEQ ID NO: 32105 - DNA, 201 bp, Homo sapiens
aacccgcgggccgtctcctaggaaaccgggctcgccacaccccttggtcgaaccccacttccgctcctgcgcgctgaggctccggcggacctctggtggayatggctgcttcccgcttacccccagcgacgctaacgttaaagcaggtaccggcggttctctgccttccaaagcagcttacctgggtctgagctggattct

SEQ ID NO: 32106 - DNA, 201 bp, Homo sapiens
atccacttggcttcccacagtgctgggattacaggcgtgagccaccgtgcccggcctaatgtgttgcttttaaatagaagtcatttaatgaacatagctcrtatttgcttagcttactattttaaacaaagaaatatcattaagtgcaatgaattgagtggggtgggggcgggaaggcaggagttccagggagggaagagc

SEQ ID NO: 32107 - DNA, 201 bp, Homo sapiens
tgaaagaagccggtcacaaaagatcacatgatgattccattcatacgaaatgtccagaataggcagaaagattagtggttgcctaggctggctgtagatgraatggagtaactgctaatgggtgtagggttccttttcagggtgatgaaaatatcctacagttagcttgtggtgtaggctgcacaactcttgaatatattc

SEQ ID NO: 32108 - DNA, 201 bp, Homo sapiens
tttagtactgaaagtcccacattccgggaaaccctttagcccagggcaaactgggacagtccatcaccccaggcctggtcttcaggttttttttttttttwagttttgttttttttcctttttcgtttgtttatagttccccaggagggtctaatgtgcagccaggtggagaaccactgctagtttagttctcagcaacaa

SEQ ID NO: 32109 - DNA, 201 bp, Homo sapiens
gaattgcacttaattgtgaagttttgtgttttaagattgtttgaaaatttaaaaacattaggttaatatgtaagaagtcattaggattccttaaataatcwatttttctttttcttttttttttgagacaagagtttcgctcttgttgcccaagctggaatgcaatggcacgatctcagctcactgcaacctccacctccc

SEQ ID NO: 32110 - DNA, 201 bp, Homo sapiens
tcactgcaacctctgcctcccaggttcaagcgattcttctgcctcagcctccagagtagctgggattacagacacttgccaccatgcctaattttttttttatatttttagtaaggtgtcaccatgttggccaggctggacttgaactcctggcctcaagtgatctgcccacctccacctcccaaagtgttgggattacag

SEQ ID NO: 32111 - DNA, 201 bp, Homo sapiens
ccttttacagttcgtaagaaggcaacaagttcttctcctctacagaaggattttgcaaacaattcggcaagttccaaatgattctgatcgcaaatacctgraagattgggcaagagaagaattcagaagaaacaaaagtgccaccgaagaggtgagaacaaaatcatggtgaggacagatcctaaccctttttattgatca

SEQ ID NO: 32112 - DNA, 201 bp, Homo sapiens
aggacactttagaaagaagcctcagatttatttatttatttagccaacgtggctaaggcaggggatttataaaggaaatacagcttctttgtgaagaagcratacccatgtgacctttccggtcagctcatcccaaggacgcctcagtcatcagtaggacctgctcactatagatgctgggcatggggcattagaggacct

SEQ ID NO: 32113 - DNA, 201 bp, Homo sapiens; identical to SEQ ID NO: 5417

SEQ ID NO: 32114 - DNA, 201 bp, Homo sapiens
agggcccagcctgctgatcagatctggctgcctcattcatgggtagcaaggctgtctggaccttgacgtttctcagtcgggagcctgtacagtcagaagaygacagctcctgctggagtctctgggtagcagtggagttgagggccttctctttgggcctaaccactggaggggagctgtcggaagctgctgctggacctg

SEQ ID NO: 32115 - DNA, 201 bp, Homo sapiens
taagaacatttaatttggagtctgaacaggcagaagagtcctatttgtcataaaaccttggttccaagtcctggctctgcaacttactaactaaaagccakccttttcaaatgctcaaattccttacctgggaaatggagcatgacccccacatcctaaaactatggggattgactcagagtgtctaggaaggtgttttct

SEQ ID NO: 32116 - DNA, 201 bp, Homo sapiens
ttttttgaatacaaaaaaactatgggacagtaatcgcatgtagattcccagcagcagtcaggggcctctcacataagcagggttttggcgctgttggtgcrcttgctcctgacctggaatatcaatcagcttctagccttttctgcaaatgaaacttctgggccgaatggaccttcaggttcctcgtgccactctgggctc

SEQ ID NO: 32117 - DNA, 201 bp, Homo sapiens
ggtgttttcttaacacacaatgctggacacatgcacagtactcaattcctatcagatgacttcctgccccacatgggcaatagctgtggttacaatccctrccaatggtgggctaaaaaaagtaaaactagccacttcctggaagggcaggctaatgcaactgagatttaacttgttagcctttttcaagtcacccattct

SEQ ID NO: 32118 - DNA, 201 bp, Homo sapiens
aggacaggtgagaaagggccacgggtcccacacgcacatagcccagctggcacagctctggccaggagcaggcagttccacacccagtcacacccagcacstacgtggcaaaacatggccacctatgtgatatggccctggtcatcagcctcagaccctccagtgagggaggtgggtcacactggaagacacgctaagtaa

SEQ ID NO: 32119 - DNA, 201 bp, Homo sapiens
ccacttggaaaattaatatggcaaagattcgctaactccacttctagtgatttaacccaaaggcatgtgtattgtgggaaagataaaacaactataaggamataaaagcaaaagcctgaggcttagggatgttaggctcctcgttattagtgatgaaaagtgcttaagactgaagtgggtgagccattcaaagctttgttt

SEQ ID NO: 32120 - DNA, 201 bp, Homo sapiens
gtcttcccctctggaaggcctcacagtgccctgagaagacggcagcttcattgattctgttgaacgcggcacctaaccatttatagtgccagcttctaggytgccgcttgtgccgtacaggcaccagtatgctgttccttaccctgttttcctattattgtctctgcacaaaagtttctgggtgtctgtattgatcacctt

SEQ ID NO: 32121 - DNA, 201 bp, Homo sapiens
caaagagggactatgatgaaaatgaggtggacccttaccatggcaatcaggaaaaggtgccagaacccgaggctttggaccttccagatgacttgaacctygacagtgaagacaagaatggtggtgaggacaccgacaatgaagaaggagaaggtgcgtctttcagaaacaaagagaccggttagaactcacattagtgaa

SEQ ID NO: 32122 - DNA, 201 bp, Homo sapiens
tctttcagaaacaaagagaccggttagaactcacattagtgaacagtaattgatttctcttttgaaagctagctcagtgtcatggccaggtgataaatcaygtttggtaggctcaatcccagtctgagaaaatggtttgcctttcctttgtagtatttctcatgtgattatccctacagctcatcaaccagcaggtatttc

SEQ ID NO: 32123 - DNA, 201 bp, Homo sapiens
aggtcactatcagatgcgctgggagagcagaggagctctgtcaaggagtaggggctctggaaggcagtctcccgcctccactgccgtagagggtaggcacstgagcctgtccaggtagagaggtggtgatgcacaggggtctgtagctgagtggtcaggggcagctccatacagctgaatcctcttctggctcaggctgtg

SEQ ID NO: 32124 - DNA, 201 bp, Homo sapiens
ttaaatgggcagatatttactgatgattttctagagtatttttgatagtatttttaagcataaaaggcctggctatcttaagtgataattgcattaaacartaatgccaaaatttgctgttaataggttttactgttgtatatctttaaggcatagagtgttttaaaaaatctgtatccttttttggttggaatcaagcaa

SEQ ID NO: 32125 - DNA, 201 bp, Homo sapiens
agtcttgctctgtcacccaggctggactgcagcggcgcgatctcaactcactgcaacctctgccccctgggttcaagcagttctcctgcctcagcctctcragtagccgggattacaggcacctgccactgcgcctggctaatttttgtatttttagtagagacggggtttcaccatgttagccaggctggtctcgaactc

SEQ ID NO: 32126 - DNA, 201 bp, Homo sapiens
atatggtctacagaaactgcacaactcctcctggtagtctctgatgggcgaggccttttccttgagggcaaagaaagagtcctggcagcagttcaggctgyccggaatgcaaatatctttgtcatctttgttgtattggacaatcccagttcacgggtgagtgactactaaaagccaccttttctggaggtaaagtgggga

SEQ ID NO: 32127 - DNA, 201 bp, Homo sapiens
cggtgaggatggcacagcagcaaagcacctggtaactaactgttctttacaaacttcttcctcttcagaatgcactgagcaaaggcagagtgggctttacytccctccacgtagataagtgccagagcaggcctcagtgccaaaatcactaagaacttggtctctttatttatacgtgcaaagtcattgacaagctttgaa

SEQ ID NO: 32128 - DNA, 201 bp, Homo sapiens
ccatggctcatgacacagccccaggagatcctgagaaaatgtgcccaaggtggtcgggctacagcttggttttatacattttagggagacctaagccatcwctcagtacatgtaagatgtacattgatttggtctggaaagctgggacaactcgaagggtgaggggggcggtcttccaagtcacaggtggattcaaagatt

SEQ ID NO: 32129 - DNA, 201 bp, Homo sapiens
aataatgacaacataggagtttcaggttattcctcaaggaaaaaaaaatgaaaatatgcccttgatggacgaaagctcttcccttcatataacatctgaaytcctgtgtctgaggtgcggtggctcatgcctgtaatcccagcactttgggaggccaaggcaggcagatcatttgagaccaggagttcgaaaccagcctgg

SEQ ID NO: 32130 - DNA, 201 bp, Homo sapiens
cgcctctcgagttcaagcgattcttctgtctcaacctcccgagtaactgggattacaggcgtgcgccaccatgcctggctaatattttgtatttttagtaragacagggtttcactgtgtgggtcaggctggtctcaaacccctgatctcaggtgatccacccgccttggcctcctaaagtgctgggattacaggcatgag

SEQ ID NO: 32131 - DNA, 201 bp, Homo sapiens
cacattccagaaacttgagagctttaggtagctactatagtattaggattacagttctctaggccaatgttgctttaggggagaatagcattcattagtcycaattagttcattgttgctgatgttgctgatgctctgtttctcaggctggagtgcagtggcacaatctcagctcactgcaatctctgcctcccaggttca

SEQ ID NO: 32132 - DNA, 201 bp, Homo sapiens
tgccccgactggtctggaacccctgggctcaagtgatcatcccgccttggcctcccaaagtgcagggattgtaggagtgagccaccgtgtccggcctaaawttttttttttttttttttttttttttgagacggaggcacgctctgtcgtccagactggagtgcaatggcccaccctctcagctcactgcaacctccgcct

SEQ ID NO: 32133 - DNA, 201 bp, Homo sapiens
aaacaatgtggtaaagtggtttaaggtgccattcattgtgtttttcccatgggtttctctgtacaggaacctcctcagctgtgtgcaagagattcacagcrggctgatggggccccaggcctaccccgtggccttcccccctcaggatggcgtgcagcagtggacagagcgcctgcagcacctggccatgcagtgccagat

SEQ ID NO: 32134 - DNA, 201 bp, Homo sapiens
gctgctttttttgaactttgtgatgcactagtcctgctctgggtacagtcctcccagggaatggtgtctgatgccagtgccaatgaggtaaggaactgcaycttgttttatttttaaacaacaaaatttatctttcttggcataaagattcttagggctaagactaactttagtgttgttatatgcccaatattatttaag

SEQ ID NO: 32135 - DNA, 201 bp, Homo sapiens
gtgggctggcgcaggtcgtggaggtttccgagcgtgtttgaggcgattggaaggagtcttttgtttttatctgggggagccttccagtacccttcccatcrcctctcacccctatgcaagcgctttggctgcttgtggcagaggtggccttcccaaaggaatgtggtttgtttttctgaaattgaggttgcgtttctgccg

SEQ ID NO: 32136 - DNA, 201 bp, Homo sapiens
ctcctcggcctcccaaaatgctgggataaagacatgcgccaccgcgcccggccgagaatcagcttttctctcacatctgatctttccgtgtgttaaggcaraagcaaggcacggtgggctgagactcacacgccccctctttcctccccggcctaacgcactcttctttctgtcccaccacgtgctgtgttcgcgagtccc

SEQ ID NO: 32137 - DNA, 201 bp, Homo sapiens
gcctcccgagtagctgggactacaggcgcgcgccaccacgcccggctaatttttgtatttttagtagagaagggggtttcaccatgttgcccaggctggtmtcgaactgctaacctcaagtgatctgccctcctcggcctcccaaaatgctgggataaagacatgcgccaccgcgcccggccgagaatcagcttttctctc

SEQ ID NO: 32138 - DNA, 201 bp, Homo sapiens
catcattttttttaattattattttgagacagaatctcgttctgtcacccaggctggagtgcgatggtgggatctcgactcactgcaacctccacctcccmggttcaggcgattcttctgcctcagcctcccgagtagctaggattacaggcgcttgccactgcacctggctaatttatatatatatatatatttttgttg

SEQ ID NO: 32139 - DNA, 201 bp, Homo sapiens
cttccttatcatcattttttttaattattattttgagacagaatctcgttctgtcacccaggctggagtgcgatggtgggatctcgactcactgcaacctycacctcccaggttcaggcgattcttctgcctcagcctcccgagtagctaggattacaggcgcttgccactgcacctggctaatttatatatatatatata

SEQ ID NO: 32140 - DNA, 201 bp, Homo sapiens
ctgtggcaagaatgaaatctccttttaaaattgcttttgtgcctaattgttcacttcctttttcttttttctaagggattttgcttgcccaaagaatttayggaagattcagctggagagggagcaactgagttccatgactatgagggaggtggaattggagaaggcgagggcatgaaggatgtgagtgaccagatcgga

SEQ ID NO: 32141 - DNA, 201 bp, Homo sapiens
aagtaagaaccttatgcctaatcagtggtccaacttgaaatttgggatatgcttgtcaaagtagaaacccagatagaagtgctggtattttgaagctactrtttttcttaattacgcaagcgtcctcagccatattctgtagacttctccctgtggtgaacagtggtaattcgtcatcagacagttataagatttcagctc

SEQ ID NO: 32142 - DNA, 201 bp, Homo sapiens
atgttcctggagagtttgtgtggcagcctggcaccctgacacaggcagccacaatgggccactggatccttctggaggatattgactatgcccccttagaygtggtatgtcatctcaggaaattcattgtcccttaatatattttcctgtcttggaaaagcattttgttaatagtgattctggtgatgatttaaacaaaaa

SEQ ID NO: 32143 - DNA, 201 bp, Homo sapiens
atttttaatgatttccagaggcactaaagcaaatgattggtgtcttttgtttgtatgtttgttttgcaccatgttacctgctaggaaatcaaatgttggaygaaggatttgtggaagatttttcagagcaaatggaaattgccatccgagccatcctctgtgccatccagaacttagaagaaagaaagaatgaaaaagcag

SEQ ID NO: 32144 - DNA, 201 bp, Homo sapiens
taggtattataaataacctggagatttaaataaagaaggtgtgcatagattatatgcagattctacacctgtaaaattttttttttctttggcttattttwgtacatactgacacaggccctatacctttttatttatttatttatttatttatttatttatttatttatttatttatttttgagacatagtctcgctcta

SEQ ID NO: 32145 - DNA, 201 bp, Homo sapiens
aactgaatcgtgaatctcctgcctcagccacctgagtagctgggattacagtcatgcaccacaatgtctaagttttgtatttttagtagagacaaggtttygctatgttggcccgcctggtcttgaactcctggcctcaagtgatccacctgcctcggccttccaaagtgttgggattacaggcatgagccaccactcctg

SEQ ID NO: 32146 - DNA, 201 bp, Homo sapiens
ggtgcctttctgcagaagacggtttgaaaatcttgctctttagttgtttggttgtttgtagtttatatcctcagttctctgaggtgtcaggttggttcccrttgaatatttgtgttgcagttgcagttgattttgttttgtttattcttttttgaaatgtatgttttttcatcttttcatgtattgaaatatgtattgact

SEQ ID NO: 32147 - DNA, 201 bp, Homo sapiens
gaaactgcccagaagagcatatggcaggagcatgcaatttgaactcagaaccctgtccatgacatgaagagaaatggcttatcattctaattactcagcaygtacattttatattctttttacactttttgttgtttcacatgttataattttgtgtagccattctcacatgaatgcttacatgtggttccagtgtatgta

SEQ ID NO: 32148 - DNA, 201 bp, Homo sapiens
gaggctggcggatcacttgaggcaaggagtttgagaccagcctggtccaacatggtggaaccctgtctctactaaaaatacaaaaattagccaggtgtggkggtagaagcctgtaatcccagctacttgggaggccgaagcaggagaatcgcttgaacccaggagttggaggtcacagtgagctgagattgcgccactgta

SEQ ID NO: 32149 - DNA, 201 bp, Homo sapiens
cccagcccagtaaagtataattttttatggagacaaggtcttgctttgtaacccagtctggtctcactctcttcctcaggttcctccactgaacttctcartccatttaggataaaatacaaaggtttagaataaaatgtttggtttgtatagcccttcataatctgacagtggtacttctctgatatcatctcccacctt

SEQ ID NO: 32150 - DNA, 201 bp, Homo sapiens
tcgtggaaagatgttagacaaacttgtgatctgataaacttgaattcaattttcagttctgccattttcagtcacagttgagtgtataagggccattcttwccttctcttccatttatgtcagaagaaaagaatggcatcttcctctcgggacagttgtgaggactaagtggcctatgcataagcatgtaccttccccaga

SEQ ID NO: 32151 - DNA, 201 bp, Homo sapiens; identical to SEQ ID NO: 32029

SEQ ID NO: 32152 - DNA, 201 bp, Homo sapiens
caccatggccggctaatttttgtatttttagtagagacggggtttcaccatgttggccaggctggtcacgaactcctgacctcgtgatctgcctgcctcarcctcccaaagtgctgggattacaggcgtgagccaccgcgcccggccttccttacctctttattctgttcttatcccattgtcttagcactggcttatttt

SEQ ID NO: 32153 - DNA, 201 bp, Homo sapiens
tgcttcttggagaaaacactgtatactaaagatagtggcaggaaaatgtgtggttcgggtgccttgagatttggctcagctggatttgtccatttgtaccrtagcttttgtctgacaggctgtagaatgactttggcctttcaaacctttgtctgttgcgggtaggaatggttctgatatgtgcagaatgttgggagccct

SEQ ID NO: 32154 - DNA, 201 bp, Homo sapiens
ctcgagaggctgagacaaggatcacttgagcccaggaagttgaggctgcagtgagccatgattgggccactgcactccaccctggttgacagaacaagacyctgtctcaaaaaataaagccctatgccatattcccacagccttaaggagcacactggatattatcggtctttaaatttttggagtaacacttttgcactt

SEQ ID NO: 32155 - DNA, 201 bp, Homo sapiens
tgtttatttcctaggtttgtcgtatcgcaaaggtcttgcttgggcccgttcaaaaaaccctcaagagatgcttcatcttcacccattagatctccagagcrcattgtccatcgtcagcagcactcaggaggctgattctaggtttgtctgtttttgttttgttttttccctacttataaatggagcaagtaatttaaaact

SEQ ID NO: 32156 - DNA, 201 bp, Homo sapiens
gtagctggaactgcaggcatccaccaccacgcctgggtaatttttgtatttttagtagagatggggtttcaccatattggccaggctggtcttgagctccwgaccttgtgatctgccagcttcggcctcccaaaatgctggggttacaggcttgtgccaccatgctctgccttgtgtgtgtatttctatgtcaccaaatct

SEQ ID NO: 32157 - DNA, 201 bp, Homo sapiens
ttttgtattttatttcatcttccgtatcaaagtgttgctgtctactttggatctgttttttgtttatttattagaggctgatgccttgatcagcttgatarggatatcctcattcactcccaggaattaattttttacctctgtcctttcctgaagagttggaagttttgtctactaactgcagaattcatttttttcttc

SEQ ID NO: 32158 - DNA, 201 bp, Homo sapiens
gtgatcctcccatctctgactactcactccttagtagctgggaccacagatgtgcaccgtcatgcccggctacatttttttttttgtagagacaaggtttygccatgttgccccggctggtctcgaactcctgggctcaagggatccacccaccttgatctcccaaagttttgggattataggtgtgaaccacagttcttg

SEQ ID NO: 32159 - DNA, 201 bp, Homo sapiens
ctgtcaaccttatttcatctatactatatatgctctattccttccttatcatcattttttttaattattattttgagacagaatctcgttctgtcacccargctggagtgcgatggtgggatctcgactcactgcaacctccacctcccaggttcaggcgattcttctgcctcagcctcccgagtagctaggattacaggc

SEQ ID NO: 32160 - DNA, 201 bp, Homo sapiens
gagcgcattgtccatcgtcagcagcactcaggaggctgattctaggtttgtctgtttttgttttgttttttccctacttataaatggagcaagtaatttaraactccttgtcctcatttgcacattgcaaaaatagggatagcaataccactgtggctaccacttacaaaagtgcctggctcaggatctgactcctgatgg

SEQ ID NO: 32161 - DNA, 201 bp, Homo sapiens
agtgagaccctgtctcaaaaaaaaaaaaaaatagggttgttcagcgtcagtttattattgaagatctttttatgtattatggatattaagcctttgcccartatgagttggaagtatatttctagttttctgtcatctctcaagtttgttttcttatatgtcacaagttttataatttttttccctccaaatatgccagtc

SEQ ID NO: 32162 - DNA, 201 bp, Homo sapiens
aatcctagctacttaggggactcagttgggaggattgcttgagcttgggagggtgcgcctgcagtgagctgtgattttaccactgtacttcagtctgggcracagaccaagaccttgtctcaaaagaaaaaaaaaaggtatctttagagggcttgtttatgcggacatgcagcagttgaaaatgtgagattttgctcctat

SEQ ID NO: 32163 - DNA, 201 bp, Homo sapiens
acacaaaagtaaaagaagagtacaataggctaggcgcggtggcttacctctgtaatcccagcactttgggaggtcgaggcgggtggattacctgaggtcargagttcgagacaagcctggccaacgtggtgaaaccctgtctctacttaaaatacaaaagaaaaaattagccgggtgtgtggtggagcgtgcctgtactcc

SEQ ID NO: 32164 - DNA, 201 bp, Homo sapiens
acgcctgtaatcccagcactttagggggccaaggtgggcgaatcacgaggtcaggagtttgagaccagcctggccaacatagtgaaaccccgtctctactraaaatacaaaaattagccgggtgtggtggcgcatgcctgtaatcccagctactcgggaggctgaggcaggagaattgcttgaacccggaaggcggaggtt

SEQ ID NO: 32165 - DNA, 201 bp, Homo sapiens
ctcccaaagtgctgggattacaggcgtgagccaccacactggcaattctttttcaaattaggtggactattctcaggaagagacacttgtcatcatcttcwatttagttacccagtggtacaattcacatatgagaggcaggatacatttttatatttctccctttatcagctttcaagattgacttcttactctccaaag

SEQ ID NO: 32166 - DNA, 201 bp, Homo sapiens
atgacttcccaggagtctgttttagagactgtattttcccctttgagagttgtcctgactatactcatgctctgggaggagcccttcctaaggttctgagrtctctgccaataggtgcaatgggcagagggcaggtagaaaacctgagccattgtcagaaatagtggtacctctcactgtctctggactctctctacctga

SEQ ID NO: 32167 - DNA, 201 bp, Homo sapiens
agtgaagttcttccctggtagattcaaacacttcccagaaagacctgggacatcgtggaaagatgttagacaaacttgtgatctgataaacttgaattcarttttcagttctgccattttcagtcacagttgagtgtataagggccattctttccttctcttccatttatgtcagaagaaaagaatggcatcttcctctcg

SEQ ID NO: 32168 - DNA, 201 bp, Homo sapiens
catgctactttgctagacaaatattggaccaaaattcacctggataacctggataagagagaactgaatgaggtacgtgggtcttggaaagtatcaatgcyggccaggtgcagtggctcccgcgtgaaataggaaatagtataataaaccaccagaaccctcatcaacctaaattttgcagtctgtgtgctagtattttac

SEQ ID NO: 32169 - DNA, 201 bp, Homo sapiens
tgccaccgctaacaagaaggggagaatcagcttttctttctttttttgagacagtaaaagtctgctgtgtcgcgcggctggagtgcagctgcacgatctcrgcttactgtaacctccgtctcccgggttcaagcgattctcctgcctcagcctcccgagtagctgggactacaggcgcgcgccaccacgcccggctaattt

SEQ ID NO: 32170 - DNA, 201 bp, Homo sapiens
tggacacaggagctgatgaccaagatggagatgctgctcagcatcctgaagaacactctgaggagcagcagcagtctgtggaggaaaaagacaaggaagcygatgaagaaggtggagagaatggccctgctgaccaaggtttccagccccaggtatcatgagatgtctggctttttatgttaaaaataatgaggaagagga

SEQ ID NO: 32171 - DNA, 201 bp, Homo sapiens
ttcaaagcagcagacgtggagcagctgaagccagaggaaatcaagtcgggcaccacagcacccttgggtgagtcctgctagtgaacaaacccttcccaggygctctgacttgaagtagtcagttctctctcactataatctagtctggtgttcagttccatgtcctaatccatggcttagatgaatgaattgcctataata

SEQ ID NO: 32172 - DNA, 201 bp, Homo sapiens
gagtagctgggattacaggcttgcataaccacgcctggctaattttgtatttttagtagagatggggtttctccatgttggtcaggctggtctcgaactcscgacctcaggtgatccacccgcctcagcctcccaaagtgctgggattacaggtgtgagccactgcgcccagcccagaaatttttataaaattaaaaacaa

SEQ ID NO: 32173 - DNA, 201 bp, Homo sapiens
cttggccttccaaagtgctgggattacaggcgagagtcactgcgcccggcctacaatccagttttacaacatttccatcattcaatagaatcctttgtgtrcattacactaaatttctgattaatctcttttttgtctctgcagatttcttttctgggtatttcagataaaagttctcttctcttactttgcattgatgtt

SEQ ID NO: 32174 - DNA, 201 bp, Homo sapiens
tgtgataggaaaccattaactaaagtaaaaattcagtagaaagaagataacttttttttttcttttaaagagcattgaagattgtaaaacagaaagattgyataagcccttttcactgttcttcaatttttcttttagtgtccttgaagtagaaaagtctctggtattagctgaaaaaggcagtccagaggacaaggatag

SEQ ID NO: 32175 - DNA, 201 bp, Homo sapiens
agggtagtcaagccaactctccatacctttaaaaggtatgacaggaactgtcttcatgtccttacccaagcaagccatccacggataaaaacgttaccagragcagaaccgttaagctggtccagacaagttggactccaccatttcaacttcagctttctgtctaatgcctgtgtgccaatggcttgagttaggcttgct

SEQ ID NO: 32176 - DNA, 201 bp, Homo sapiens
cttggtcctgtctgtattcttgtgtcttgcttggttgtgatccacaggaggcactcgtgaatgtcgagtgtgtaaattgtgctggagtgtaggtgattcaracgttcccacctgcatattgaccccagtttggactatgagagctgacgtttcctttaagggtgtgtctgtcattttgagagagggttgttttgttttgat

SEQ ID NO: 32177 - DNA, 201 bp, Homo sapiens
gggtttcagcatgtttctcaggctggtctcaaactcctgagcttaggtgatcctcctgcctcggcctcccaaagtgctgggattacaggcatgagccaccrtgcccagccaaatacatatacttttgttcatgatagaataactggtactggattagctctgttgccaaaacaactagaaaaagaggaaaaaatccatatg

SEQ ID NO: 32178 - DNA, 201 bp, Homo sapiens; identical to SEQ ID NO: 5381

SEQ ID NO: 32179 - DNA, 201 bp, Homo sapiens
aagattgttacattgcatggattttttaaatgcctgtctcatttgtgagtgatttatgtgtattgggtgtatcacttatattctaagttaaatcagatcakaaacttgtatttaaggtaattttatagttattaaaaataaaggagaaaaccaattcaaattccctcccttccttggcagagaaaactggaaagcaattaa

SEQ ID NO: 32180 - DNA, 201 bp, Homo sapiens
ggactgactcagaggaagaacgaagttcagcagtggtggtcctactgagctgagaagacagagctcagagttggggcggtagttggaatatgctgggaagrgtgttggaatggagggaacagctctagggatatggggtctggtgagtactggctgaatgtaaagctgtgttttcttagggaaatttcgtgagctatgcaa

SEQ ID NO: 32181 - DNA, 201 bp, Homo sapiens
tgcagtggcgcaacctcggctcacagcaggctctgcctcctgggttcacgccattctcctgcctcagcctccctattagctgggactacaggcacccgccracacacctggctaattcttgtatttttagtagagacggggtttcaccatgttagccaggatggtctccatctcctgacctcgtgatccaccggcctcggc

SEQ ID NO: 32182 - DNA, 201 bp, Homo sapiens; identical to SEQ ID NO: 32104

SEQ ID NO: 32183 - DNA, 201 bp, Homo sapiens
tggggcggtagttggaatatgctgggaagggtgttggaatggagggaacagctctagggatatggggtctggtgagtactggctgaatgtaaagctgtgtyttcttagggaaatttcgtgagctatgcaaagaataactactggagtttttctgtgtaggagatgttcaactcctactagttggagtggaacgaccaagtt

SEQ ID NO: 32184 - DNA, 201 bp, Homo sapiens
aaccacaaactcctgggctcaagtgatcctcctgcctcagcctcttgagtagctaggactacaggggtacaccaccatgcctggctaaaaacaaatttttwttattattattattattttagagatggaatcttgctgcattgcccaggttggtcttgaactcctggactcgagcagtcctcccactgtggcctcctaagt

SEQ ID NO: 32185 - DNA, 201 bp, Homo sapiens
ttatctgatttaggtttctgtgctgatccctctcttggagaatggagagctcttgattcctggccgaggtgactgtctgaaagtggcacctggatttcagktttttgcaaccaggaggtatgtactagtaacctttctgttttcactctggagccacttactcgtaagtctgcatgctgagccagaggtcctgtaatagag

SEQ ID NO: 32186 - DNA, 201 bp, Homo sapiens
tagtgcaaaatttcaaacatacacaaaagtaaaagaagagtacaataggctaggcgcggtggcttacctctgtaatcccagcactttgggaggtcgaggckggtggattacctgaggtcaggagttcgagacaagcctggccaacgtggtgaaaccctgtctctacttaaaatacaaaagaaaaaattagccgggtgtgtg

SEQ ID NO: 32187 - DNA, 201 bp, Homo sapiens
gcagtgagctgatatcaaagaactccagcctgggtgacagagggaaaccctgtctccaaaaaaataaaataaaaaacaaaacaatgtttgcttaagacagrattttgtatgtaaaaagtcttaagaaatcttcaaaataaagaatttcataagatcacaggataccaggtcaatgtataaaaatgagttatatttttatat

SEQ ID NO: 32188 - DNA, 201 bp, Homo sapiens
cttaaaggtaacatcttgtatttgtttttagacttttcttcctctccaagaactactttattctcactgtatccctgtgaggagaataatgtcctaatagyataatacctattttcctttttcttcttttagtcccagaagtgatatattcaaataacattcaacaatacagaatggtaggaagctaaaggtcctctccac

SEQ ID NO: 32189 - DNA, 201 bp, Homo sapiens
tacctattttcctttttcttcttttagtcccagaagtgatatattcaaataacattcaacaatacagaatggtaggaagctaaaggtcctctccaccctgmaatcataccctccaaagatagctggtattaatattttggtatgttttctcccaaatgtcttttctcttgcacacatcagagtatacacacaagtacattg

SEQ ID NO: 32190 - DNA, 201 bp, Homo sapiens
aatgagattttaccaaatgctagggactatgttaagtacccagggtataaagatgaatgatacttggcctttgttctccagaaggtccctggtgttgggtracaaacacattaccagacccctgggattttcttattgtctcccctccccgccttgttttcccttacaggtgaagtgatttcctctgtgagtgagctgcag

SEQ ID NO: 32191 - DNA, 201 bp, Homo sapiens
atcaccttgttacatgttgagctattcacttgctataggtgttactcacctagatcttttcaaagatgtccaaaatcattcctatttagtgcattttttcstaatttttaaaaatgtgtctggaaggacctaattattattgccacatacatgtccagtttttctggctagaggtcaagaagatccttagtcgtcaattga

SEQ ID NO: 32192 - DNA, 201 bp, Homo sapiens
ctttgcttaaagcctgcatcttgctagaagacttggttggctctgacattctgagggtaacttacattttgttgttgtcacaggagaaggttgcagctgaratgtggcagagttacctgatcttaacagcgcctctttcacaacggttatgtgaagagcttcgtctcatattagagcctacccaggcagccaagctgaagt

SEQ ID NO: 32193 - DNA, 201 bp, Homo sapiens
ctttctgtgccttgttttctactactttttattatttttaattgacctataataatgatatgtatttgtggggtacagtgtgaggttttgatacatgtatmcaatgtttaatgatcaagtcaagataattagcttatctaccacctcaaacatttatcatttctttgtgttgggaacattcaaatctgctcttctagtcat

SEQ ID NO: 32194 - DNA, 201 bp, Homo sapiens
atcctatgagctagagtctctctgttgtatagttaagtacactgaggccaggtggtttaagaactcactcacgcaagatcacaatgctgggattcctattsgtctttctgtgccttgttttctactactttttattatttttaattgacctataataatgatatgtatttgtggggtacagtgtgaggttttgatacatgt

SEQ ID NO: 32195 - DNA, 201 bp, Homo sapiens
tcccagctcctcaggagctgaggcgagagacttgcttgagctcaggaggttgaggctgcagtaggccatgatctcgccactgcactccagcttgggtgacmgaacgagactctgtctctaaaaaattaaaaaattagccaggcgcggtggttcatgtctataatcccagcactttgggaggctgaggcgggcggatcacct

SEQ ID NO: 32196 - DNA, 201 bp, Homo sapiens
aacagatgcagcaaaaatcaacaaccccagataaatgaggagataagtcacctcatctcattttgtctttatcacacacctgttacacctcaagagcttcragatctgtggtccttgctgcatcatcagaaggtaaaaatcacaataagacataagcctcctttacattatgagttggttagattttctttgacagactgg

SEQ ID NO: 32197 - DNA, 201 bp, Homo sapiens
catgtgtgccatcaggcccagctaatttttgcatttttagtagagatggggttttgccatgttggctaggctggtcttgaactcctgacctcaggtgatcygcccaccttggcctcccaaagtgctaggattatagatgtgagccactgcacccggcctggaggctagggtttttttgtttgttttttgagacagagtcta

SEQ ID NO: 32198 - DNA, 201 bp, Homo sapiens
tctactgtctagtccactgcgttggtctcttatctttgcttctactcctaatctttttatagtcttttttgtttaggagttacaatgatcctttaaagtayaatcagataaagtataattttttgtgtgtgtgtgtatggcatagtctcactctgtctcccaggctggagtgcagtggcacgatcttggctcactgcaacc

SEQ ID NO: 32199 - DNA, 201 bp, Homo sapiens
tgagatggagtcttgctctgtcgccaggctggagtgcagtggcgtgatcttggctcactgcaacctctgcctccttcccaggttcaagcgattctcctgcytcagccttctgggtagctgggactacaggcgtgtgccaccacgcccagctaatttttgtatttttagtagagacggggtttcaccatgttggccaggatg

SEQ ID NO: 32200 - DNA, 201 bp, Homo sapiens
ctagtccactgcgttggtctcttatctttgcttctactcctaatctttttatagtcttttttgtttaggagttacaatgatcctttaaagtataatcagakaaagtataattttttgtgtgtgtgtgtatggcatagtctcactctgtctcccaggctggagtgcagtggcacgatcttggctcactgcaacctctgttcc

SEQ ID NO: 32201 - DNA, 201 bp, Homo sapiens
ctgttgcccagtgtattcatttgttctcacactgctgataaagacatacctgagactggataatttacaaagaaaagaggtttaattgactcacagttccrcatggctggggagacctcacaatcatagcacaagacaaggaggagcaaagtcgtgtcttacatggatggtggcagtcgagagcttgtgtagggaactccc

SEQ ID NO: 32202 - DNA, 201 bp, Homo sapiens; identical to SEQ ID NO: 5417

SEQ ID NO: 32203 - DNA, 201 bp, Homo sapiens
agtagtattttcctcccttaattgaatatgagatcaacattttccaagaacaggtctggtttggaacatctcagccatgttacatgtacattgagaacttwgagatcctgcttcttagtggtggcagctacagaggagtgggctgaggacaggtgaaggaggagatgatgtaataagagtgtgcttgcctttgtttagtta

SEQ ID NO: 32204 - DNA, 201 bp, Homo sapiens; identical to SEQ ID NO: 32119

SEQ ID NO: 32205 - DNA, 201 bp, Homo sapiens
ttgaaaaactgggcaagagtctatgctgtgccatcctaagaagaggccagctagatcactgctggctgacttaacgtggtagtgtggattaaccagcagtyttatttttaatgactttgcatctgaaatttactgtattatatacacatttcacttttatatctattgtcataatcactcccaccacatatatgtattcag

SEQ ID NO: 32206 - DNA, 201 bp, Homo sapiens
cagtttcctcatttgtaaaatgagatctgcctatactaatatgcatttttgtgagaaccacctgcatttgagtatataagttttgtttttgttcttagcaytctaagattttctccaagcttaatacagatgagatgtacttgaggaagatatgaatttacaaactgaagatggggtctagatttcttataaacaattaag

SEQ ID NO: 32207 - DNA, 201 bp, Homo sapiens
attttatttttcttattttattttgggacacggtctcattctgttgtcgaggctggagagtgtggtggcatgaccatggctcactgtagccttgacctcckgggctcaggtgatcctcacacctcagcctcccagatagctggcagtataggcatgcaccaccatgcccagctaatttttaaagttttgtaaagatgggtt

SEQ ID NO: 32208 - DNA, 201 bp, Homo sapiens
gaacaggtagggcagctgttgaggaaggagtgctcacagtactgagtctgcaatgaggatgcagcctcaccattatccctgggggcacccacttgcacatrtatacatataaacaaaggcttaaagaactgcagttcaatgagatgttacttactaactgcaggatgaacacaccagttttgtatttctcttgtgtaaatg

SEQ ID NO: 32209 - DNA, 201 bp, Homo sapiens
gtcaggctggtcttgaactcctgacctcaggtgatccacctgcgtcaacctccgtaaatgctgggattacaggcatgagccactgttcctggccagttttycagaattctaagttttgcttaaaagctgaaattttatcatggcaacatatatcctcaatttttttttttttttttttgagacggagtttctctcttgttg

SEQ ID NO: 32210 - DNA, 201 bp, Homo sapiens
agcctccactgccaagataggaagatttcattgaagaaaccatgttgtcagcataatttatttcccctgatacttccagtgctgagttaagtaaaggactratgagtgcctcactgaatgattcctcatagaaataaacctattcagacagctgactcttggttatggccaaatataccaatatctgagttttcaggatct

SEQ ID NO: 32211 - DNA, 201 bp, Homo sapiens
ccgatgaagaaggtggagagaatggccctgctgaccaaggtttccagccccaggtatcatgagatgtctggctttttatgttaaaaataatgaggaagagragaagtcaccttattcccattagaatcccttttaggatactcctccatcaacatgtggcacttccgaggagttctaggtttctgttttaagacccttagt

SEQ ID NO: 32212 - DNA, 201 bp, Homo sapiens
taaatttagttcccttgcagggacactgcctgtcattcttggcagtgaggctaacctgtcttttgtctcacaggccacaattccagagtggtgtcagggckctgctccttccggcttggaaggggagcttctgcgtcgcttgccaaagctcaggaaacgcatgaggaagatgtgcctgacgttcatgaaggagagccccct

SEQ ID NO: 32213 - DNA, 201 bp, Homo sapiens
atacctgtttgtaaaactagaattcccactgtaaggaattgtaataacgtgtgcattttagtttgtggtatttaaaatcctgtctcgctgaatgctcacartagctataggcaggaggtgctgtcatggcatcttacaggtgaagatccaaggcttaaagttatggagtgtcacaggtagcagagccagctttccagttta

SEQ ID NO: 32214 - DNA, 201 bp, Homo sapiens
tgaaaataggctttgatgagatggaagtggagatccaaactgttaaaacagaggaagaccaagaccccagaacagacaaagcccataaggagacagaaaakgagaaaccagaaagaagccgagagtctaccattcatacagctcatcaattcctcatggacacgatcttccaggtagtaaaactcacaaattactgcatta

SEQ ID NO: 32215 - DNA, 201 bp, Homo sapiens; identical to SEQ ID NO: 5392

SEQ ID NO: 32216 - DNA, 201 bp, Homo sapiens
tttttggtctatggtgaaagaatgagaaccgaagaggacaaaaaaaaggtgagtttcacacttggtatttgtatttctttccatctgaaagttgatttccygtgggtgagaaaggacatacactaattgcaagccttattttttttttttttttttgagactgggtttcactcttgttgcccaggctggagtgcaatggca

SEQ ID NO: 32217 - DNA, 201 bp, Homo sapiens
ttgaccagtcccctgggtgttatgatcctggtcagcatgtgtttttggtctatggtgaaagaatgagaaccgaagaggacaaaaaaaaggtgagtttcacrcttggtatttgtatttctttccatctgaaagttgatttcctgtgggtgagaaaggacatacactaattgcaagccttattttttttttttttttttgaga

SEQ ID NO: 32218 - DNA, 201 bp, Homo sapiens
gctccagctgggctcccctgcctctaccaggaacgtgaatcatcccagcccaggggttgcagccaacaaccacatacctttatcagagagcaacacagccrccgaccacaagaacagaacccgctacagtccatttttgagcatttgtacacaattttttaagatagaatttttttttttttttttttttttgagatggag

SEQ ID NO: 32219 - DNA, 201 bp, Homo sapiens
gtttttctggcatggggtgagatcattgcaagtgaggctgttgcccctgtggtgagggctagctgccttgccttttatccagtgggatgcagtatctaccrgtaatgagggtgcactcctcccagccttccaggtgggccttcattccaactgagtgcccacatacacggttcccctcagtgccctcatggcctctaagtt

SEQ ID NO: 32220 - DNA, 201 bp, Homo sapiens
ttttaaaaaattatctcttacctcccccaaatattcaaatttaagttaatttcctagctccttagccagaggaatttaatgctaaggaataacaaagaatytaaatactaagaagtacaagttgagctttggagtaccacaaaccattgcaatagctaagattttttttgttttttttttttttttgcgtgccctacccta

SEQ ID NO: 32221 - DNA, 201 bp, Homo sapiens
ctcctgctttttaacgttttgtcagtactaattatagccatattcgtagcctttcaaaacaccatgcgttgtttgccatgtctttgttcatccccattttwgattgcataggaactttctttgtcccttaagcttgaacagactctggaacacagaagcttctcacctctctttatcagtacctttttgctagaggaattg

SEQ ID NO: 32222 - DNA, 201 bp, Homo sapiens
ccagtagttcattgatagtccataccccaccctctccctctttatttttggaacagatgcagcaaaaatcaacaaccccagataaatgaggagataagtcmcctcatctcattttgtctttatcacacacctgttacacctcaagagcttcgagatctgtggtccttgctgcatcatcagaaggtaaaaatcacaataaga

SEQ ID NO: 32223 - DNA, 201 bp, Homo sapiens
gtgcttcaaggtttctcagaggctgtcagtcacttgctacaggactggccagaacacccagcgcttgaacaggtagggcagctgttgaggaaggagtgctyacagtactgagtctgcaatgaggatgcagcctcaccattatccctgggggcacccacttgcacatgtatacatataaacaaaggcttaaagaactgcagt

SEQ ID NO: 32224 - DNA, 201 bp, Homo sapiens; identical to SEQ ID NO: 5426

SEQ ID NO: 32225 - DNA, 201 bp, Homo sapiens; identical to SEQ ID NO: 5427

SEQ ID NO: 32226 - DNA, 201 bp, Homo sapiens
aatgttttgtattaatttagtaattattaacaatcagaacttgtgggaaagtttgacctagaaagtaaaatgaagctgaggtaaagtattcagaatagttkatcctgaaaaatcaaataggaaaaaaattggttacgttgctttatggtttattttgtgtgtaatcacctataatgataaaacagcatgtaaaacttttat

SEQ ID NO: 32227 - DNA, 201 bp, Homo sapiens
gaggacggctttttcctcttggatgagatctcattggccgatgactctgtcttggaaagactcaacaggtacgtgcctgagaggtttgccttgtgtttgayatttttgttggtgtgatttttttttttctccctgagacagtgttctcactctgtcaccccaggctgcagtgccgtgtcatgatcatagttcactgtagcc

SEQ ID NO: 32228 - DNA, 201 bp, Homo sapiens
ccaggtacttttctggaaaatagcttgaatgtaaatattccttttttttttttttaaacttacatgtcatcaggaaaagtagaatttgacttgtgtttttsattgaagagtgtattaaaagttgttgtgaggtggtcgcatggactattattactttgctggtttttggggaatatcacttttatgttggtaccactgtat

SEQ ID NO: 32229 - DNA, 201 bp, Homo sapiens
taaagactgctgaaatgtctttgcttctgaagcactggcttttttttttttttttaaattaagttctgggatacatgtgttaggaataatgcttaaaattrtaaagaaattgaacacttaaacaaagggtttttagcaaagcaattttatttttgtgcagaggggtgtttttttggccagttgccatgagagtacacttga

SEQ ID NO: 32230 - DNA, 201 bp, Homo sapiens
ttgaagaacaaggtttcagattatctgtcacttcattcttgtttttgaaagcataaatattttatccaggaaattacatgttcctaataaggaacccaatrtaatcttttgaaacaagttggttactgtgcttaagtgcaaatgaaaacctcagcagctgcatgtgctatcaccacctccactgaggcagaagtccctggt

SEQ ID NO: 32231 - DNA, 201 bp, Homo sapiens
ggtagagcagtgatggcagggtgtgttttggaatgaattcccttgatgccatatacattccctctgatggctttctctcttcctctttatctctctctctrtatgtatgtattttagagactgggtcttgctctatcacccaggctggagtgcagtggcgcaatcatagctcactgcagcctcaaactcctgggctcaaac

SEQ ID NO: 32232 - DNA, 201 bp, Homo sapiens
gacagggtctcactatgtcacccaggctgtctcaaactcctgacctcaagtgatcctccctcctcggcctcccaaagcacagggattacaggtgtgagccmctgtgcccagcctgtagtcttttaaaatatattttaatacatatattagtcctatttcattttttcagtcattcttatgcttttttctttcttcctttta

SEQ ID NO: 32233 - DNA, 201 bp, Homo sapiens
agcagtaatatggttttctaaatatccacagtatgtctcttttaattttagtgatgctacatttgttctctatttgctgaactagggatgtgtttttgtgygcaacagttaaatttagttcccttgcagggacactgcctgtcattcttggcagtgaggctaacctgtcttttgtctcacaggccacaattccagagtggt

SEQ ID NO: 32234 - DNA, 201 bp, Homo sapiens
gaatttaatagaatgtttgggcccctggcagcctctgactacctccttcaccccatctaccccccaactgcagtgagtgtgctgtcagtgagggtggcctkcctttaatgaggttgcatctaatctcagggagctcttcctttttaaaacttgtcagccgttgctcaaggtgactcaggcctaggggtgggggtgagtgga

SEQ ID NO: 32235 - DNA, 201 bp, Homo sapiens
taaggcatagagtgttttaaaaaatctgtatccttttttggttggaatcaagcaaccttctgaactattcagatgctgtgaactaagattgttacattgcwtggattttttaaatgcctgtctcatttgtgagtgatttatgtgtattgggtgtatcacttatattctaagttaaatcagatcagaaacttgtatttaagg

SEQ ID NO: 32236 - DNA, 201 bp, Homo sapiens
gatgctgagctacacctttggttgcactgggatttaaaatcatttttttctttgaattgctatttttctagacttttcctctcgatggatcctgttcatggagatatatcccgagctatgaggaatcgtggacttgaaatctacatttcaggggaaggggatgcaagcaccccagacaacctggatttgaaagttctgctg

SEQ ID NO: 32237 - DNA, 201 bp, Homo sapiens
tggctataagccatcatcagacctcagaccaatatgaatcttgatgtagtaacacccattttttcttttgaggtatagtttacatatcataaaatgtatawttcagtgagttttagtaagtttataatcccatgatgggttcttcttgcaagctatatgcatagaactgagtcactgagttagtggtattgcagtagagaa

SEQ ID NO: 32238 - DNA, 201 bp, Homo sapiens
agatgggttggtttgctgatggacatgtgggttgagaaaaagaagaatcaaggatgacacctatgtttttggcttgagtaactgggtaaatggggttgccattcattgagaaagggaagactggtaaaggagcaggtttaatgtggggagggtctaccgggaatcagctgtttactttcagacatacatcagaggtgtaag

SEQ ID NO: 32239 - DNA, 201 bp, Homo sapiens
tacctgaggtcaggagttcgagacaagcctggccaacgtggtgaaaccctgtctctacttaaaatacaaaagaaaaaattagccgggtgtgtggtggagcrtgcctgtactcccagctactcgggaggttgaggcaggagaatcgcttgaacccaggaggtggaggttgcagtgagctgagattgtgtcactgcactctag

SEQ ID NO: 32240 - DNA, 201 bp, Homo sapiens
atgtttagttggttgtttgaggaacttggcaatctgttcttattaatatatatgatttttcatttaagcagacatgtctatactgctgtatatatttaccyttattcttttttttttttttttgagacagagtcttgctctgtcacggctggagtgcggtggcgcgatctctgctcactgcaacctccggctcccacgttc

SEQ ID NO: 32241 - DNA, 201 bp, Homo sapiens
ctaagagggaagcagaatgcttgtctggcatcttctcattgtgccactgtatttgctgaattaagttttgaatctcaggagcatttgactatgtactttgmgttcatactgtagggcggaagacacccagtgatactaagttggtgattccaacctgggccacctcttatctatggctttttctttttagccctttttaaa

SEQ ID NO: 32242 - DNA, 201 bp, Homo sapiens
atatgctgtctgcttttaaatagccagactcgttttgtaactaaggaacaattatttaaaattgtttgctaattaaataatagataatgggaaaaaaaaamccagtaggctggttgcagaggcttgtgtctgtaatcccaacactttggaaagccaaggtgggagaatcacttgagctcagagtttgagaccagcctgaac

SEQ ID NO: 32243 - DNA, 201 bp, Homo sapiens
ttagtagagacggggtttcaccatgttggccaggatggtctcgatctcttgaccttgtgatccacctcccttggcctcccaaagtgctgggattacaggcrtgagccacctcacccaaccagaaatttttgtgttgttgttgagatggagtttcactcttgttgcccatgctggagtgcaatggtgctgtcttggctcact

SEQ ID NO: 32244 - DNA, 201 bp, Homo sapiens
ggtgtactttgagttcatactgtagggcggaaggcagccagtgtcacatgtatagttacattatatcctcataatttctgtagggggtagggaacaggcakttcattatgtcaataggtcaataggaaatcttgtgcacagacaagtctccaagccacatagctggtcagtggcacaacttgcatcactagcattttggaa

SEQ ID NO: 32245 - DNA, 201 bp, Homo sapiens
acagccaaaaaataactcctgttgtatttggttttcctcccccaagttttggagaatctgtaaagctgttacacccatttcatgagcagttcagtgattaytctgggtcccagattctacgtctctgcaaattccaacaaaagaaaaccaagattgctcaggtaagaggatgaaataaaatgtcttctgcacagttatttt

SEQ ID NO: 32246 - DNA, 201 bp, Homo sapiens
ttagcatccattataaaacaaggtgtgacttctttttctcagttcctcaaggatcacttgactttgcatcattggttttctagctccctacttttttttcygagtagtttggaacattctgcaaaaacaaacccatctcccatacccttatcagctgggccaagacctatttttctccctcattaagcttagagaagaaat

SEQ ID NO: 32247 - DNA, 201 bp, Homo sapiens
cttatcattttctttaatttcatttattcaaaaatatcttgtgtatttactgtgtataaggccctgggctatgtgcctagggaagcgagaaggaaaatcartggggaatctacttttgaaagagatcactgttgtatctgggtgaatgattgtgccgaaaggaaatgtgagtcaaaagcatttggagccccgtgcatggaa

SEQ ID NO: 32248 - DNA, 201 bp, Homo sapiens
gattttatctatattatttttattttttaacttcattgtagtattcaattatgtaagtattgctgctttttagaaatactattttgtatactttatttatwttttttctggctttaattttccctacttctgtgggctaaattaatgttttttatatacctctatccgccccccaccattactcttagattttttagagat

SEQ ID NO: 32249 - DNA, 201 bp, Homo sapiens
tcacacttggtatttgtatttctttccatctgaaagttgatttcctgtgggtgagaaaggacatacactaattgcaagccttattttttttttttttttttgagactgggtttcactcttgttgcccaggctggagtgcaatggcataatcttggcttgctgcagcttcacctcccaggttcaagtgattctcctgcctta

SEQ ID NO: 32250 - DNA, 201 bp, Homo sapiens
atattgtccttagataattgctttgttattttggccttctgtatttctcaaatctaaatcagtgtatactacttttctagtagaaaaaaaaagtcaaaagmaaaagcaaatctaatagaaaagttcacacaaaaaacattacatggaataaaaagcttccagaacaatttggtagtgtctgctgaattttaaattatgtgt

SEQ ID NO: 32251 - DNA, 201 bp, Homo sapiens
cattgggaagctaaggttggagaattacttgagcccgggagtttgagaccatcctggacaacataacaagaccttggctctaccaaaaaaaaaaaaaaaaagaattagctggatgtggtggtgcacacctgtggtcacagctatgcagcaggctgagatgggaggatctcttgagccctggaggtagaggttgcagtgagc

SEQ ID NO: 32252 - DNA, 201 bp, Homo sapiens
gtttcatttatttatgtttaatacttctttatgtaggtggaagatacatttcagaagggtcaagaaaaagacaaagaggatcctgattcaaaatctgataytaagggcgaggataatgccattgagatgtcggaagattttgatgggaaaatgcatgatggggagcttgaagaacaaggtttcagattatctgtcacttca

SEQ ID NO: 32253 - DNA, 201 bp, Homo sapiens
taaggaaaggaatgtgagctggtattgataacgcctggtattgtggcatgcctgggcatttaacaaaggaaaaaaggagaaaaaggaaaaggtgggggggrggcggtactatgaattaaagaataaaagattgatcagattatttgaagagaaaccgaatatgcgggtttgttacataagtatacatgtgccatggtggtt

SEQ ID NO: 32254 - DNA, 201 bp, Homo sapiens; identical to SEQ ID NO: 32070

SEQ ID NO: 32255 - DNA, 201 bp, Homo sapiens
atcttcccgcctgggcctcccaaagtgctgggattataggcactgtagctggtcttggattttatttatttatttaattttaactctttttttgggggggracagggtctcactctgttgcccagcctggaggaccatggtgccctcatagtttgctgcagcctgtacctcctaggctcatgtgatcctcttgcctcagcc

SEQ ID NO: 32256 - DNA, 201 bp, Homo sapiens
atcttgtaaactgactttacttagaattatggctttaaaatatattttaattttaaaaggactagattcttcttgttaaaaaacaatagaaaagatgatgraagaaacttaactactaactctaccactgagacgaaagcaatttgcagtattgggggcctgttttctcttttttttttttttattagttgagacaatact

SEQ ID NO: 32257 - DNA, 201 bp, Homo sapiens
tatacgtgtgtagagaagagataaactagtgtctcttgaaagtctgtcaagtctataaggattagatttcttttccctctcttggtggtggtttttttttkttttttttttttttttttaagaaggcattccgctcttgttacccaggctggactgcaatggcgtgatctcggctcaccacaacctccgcctcccaggttc

SEQ ID NO: 32258 - DNA, 201 bp, Homo sapiens
cgttctgtcaccaaggctggagtgcagtggtgtgatcatggcttagcacagccttgaactcctgggtttaagcaatcctcctgcctcggcctacccagtarctgggactacaggcataagccaccaggcctggtctatttctctctattctgtatctatatgtctttagtaatttcataccattaagtagtcctaacataa

SEQ ID NO: 32259 - DNA, 201 bp, Homo sapiens
tgaagataatttataaaataagaggtcccccccccacttaaaaataagtaaccagtttaaaacacttcaccttatttcatgttttaaaaaataatcagagktgaggttattgttagatagcccagggtttgagtcctgacactgctacttagtacctatgtataccttggctggttatgatggggttaataataccttctt

SEQ ID NO: 32260 - DNA, 201 bp, Homo sapiens
gtcaagagtctgctgaagcaggtatgttcttttgttatttttgacttgttacacttgaaaggctgaattaccaaattttcagctgtttggttttttttttttcacataactttttaattataaaggtaatctgttgcaaaaagtttaaacattacagaaacatatgtttagatggtgaaagtttccaataagcgtgctctt

SEQ ID NO: 32261 - DNA, 201 bp, Homo sapiens
ctgagctctctatgagagcttgtgctatgtgacctataataatgatacgtatttgtggggtacagtgtgaggttttgatacatgtatacaatgtttaatgrtcaagtcaagtcagctgtgcctggcagctgattgtatacacttatatcaggggagagaggaaatggctttgtaaacataagaaatgtgcagaaatacagt

SEQ ID NO: 32262 - DNA, 201 bp, Homo sapiens
cacctacattttagcagaattcaggcccctcccataatcctaatcttgtggtctttcattaggtttcggtccctgagcaaagagggggttagttttaggawgggactattatcatccttgcttccaagttaaactataaactaaattcctactatggttagcttggcctatgcctaggaatgagtgaagatggccagccta

SEQ ID NO: 32263 - DNA, 201 bp, Homo sapiens
ggaataacaaagaatctaaatactaagaagtacaagttgagctttggagtaccacaaaccattgcaatagctaagattttttttgttttttttttttttttgcgtgccctaccctaatttttatcccattgaaagcaatatcattgttgctctctcctactcttcgttttcctaactgataatgtgtgggctgtgtttaat

SEQ ID NO: 32264 - DNA, 201 bp, Homo sapiens
aggaatttaatgctaaggaataacaaagaatctaaatactaagaagtacaagttgagctttggagtaccacaaaccattgcaatagctaagattttttttkttttttttttttttttgcgtgccctaccctaatttttatcccattgaaagcaatatcattgttgctctctcctactcttcgttttcctaactgataatgt

SEQ ID NO: 32265 - DNA, 201 bp, Homo sapiens
tcttttttttttttttgagatggagtctttttatgtcgcccagaacagtactctgtggcacgatcttggctcgctgcaacctccgcctcccatattcaagygattctcctgcctcagcctcccgagtagctggtgcatgccactattggggtaacccacccccaatattacaacataggttctttctattttccataagtg

SEQ ID NO: 32266 - DNA, 201 bp, Homo sapiens
acaagagattttttctctacttgtaaagaatatttacatagaggaatacttttttaaaaactttttttctttctttctttctttctttctttctttctttytttttttttttttttttttttgagatagagtctccctctgtagcccaggctggagtgcagtggcacgatctcagctcactgtaacctctgcctcccgggt

SEQ ID NO: 32267 - DNA, 201 bp, Homo sapiens
tttcccggggtattaatattaatattccttgctaggaaaagaatttggcaatatcttccctacttgcacatctgttgataggctctctctgcaagaagaawaatatggctctttttgcctgaccctgcaggcagtcagaccttatggttgtctgtccttgttccctaaaaatcgctgttattctgttctttttcaaggtgc

SEQ ID NO: 32268 - DNA, 201 bp, Homo sapiens
aacccggggaggcggaggttgcagtgagccaaaatcatgccattgcactccagcctgggcaacaagagcaaaactgcatctcaaaaaaaaaaaaaaaaaawatatatatatatatatatatatatatatatatgtttttttggagacagagtctccaaaattgtaattgtaattgtaatctccacgtgattacaggcacgt

SEQ ID NO: 32269 - DNA, 201 bp, Homo sapiens
ttgatggtagctttgtgggccatttttctgcagtgtcaccacaggtagtctggctagtgctttacagacatacagaaagctgatttgtcagaaaacatcascattctgagagaaaaaaattatataacctgagactcaggttttgttgttttcctttaatgcatgggaaaaatttgttactgtttgtgataggatacacag

SEQ ID NO: 32270 - DNA, 201 bp, Homo sapiens
tactacaagcagttaaaatgagctgacatagcttcttctgtttcatgtttttctattgtcaacatagttatattaacttcctaaaaagtgtttattatgtrttgttttacaggttcacagaactttatgtagaagaattagaaagcaaagaagacttacaggttcttattgtagattatctgaaaggattgagtgtgaaca

SEQ ID NO: 32271 - DNA, 201 bp, Homo sapiens
ctgcctcagtctcctgagtagctgcgactacaggcacacaccaccatgcccagctaatttttgtatttttagtagaaacagggttttaccatgtttgccargatggtctccatctcttgaccttgtgatccacctacctcggcctcccaaattgctgggattacaggtgtgagccactgcacccggcctcttaattctttt

SEQ ID NO: 32272 - DNA, 201 bp, Homo sapiens
ggcttcgctggtataaagaagttgcagaagttcctgggacgaccgtttccttttaaggtacacctggaagcatttagtaaataaaagaaatgtgactactrcttctgaagtccttttggaacttgggaactgacattgtataagattaatccttgtcttgaaagcataactcttgcagttttcctttggcatctgggggtg

SEQ ID NO: 32273 - DNA, 201 bp, Homo sapiens
tagtatcctagggctgccataacaaattaccataaacttggtggttttaaacaatgacattattctttcacagtcctggaggctggaagtgtaaaatcaakgtttcgacagggccatgctcctccctctgaaggctctaggggagaatgctttcttgcctcttcctgatttctttctttcttttcttttcttttttttttt

SEQ ID NO: 32274 - DNA, 201 bp, Homo sapiens
cacagtctgagtttttctgattataaattcatggtgcagcttaacatattctatcatcttcattttaaaaaatcgacagctggggccaggcacagtggctyacacctgtaatcccagcactttgggaggctgaggctggcggatcacttgaggcaaggagtttgagaccagcctggtccaacatggtggaaccctgtctct

SEQ ID NO: 32275 - DNA, 201 bp, Homo sapiens
cggctaatttttatatttttagtagagatggggttttgccattttggctagctaggttggtctcaaactcctgacctcaaggcattcgcctgcctcagcgycccaaagtgctgggattacatgcatgagccacagcgcctggcctgaatgaggttttctttaaggaactcagtctactttgaaatattaagctgccttttt

SEQ ID NO: 32276 - DNA, 201 bp, Homo sapiens; identical to SEQ ID NO: 32082

SEQ ID NO: 32277 - DNA, 201 bp, Homo sapiens; identical to SEQ ID NO: 5399

SEQ ID NO: 32278 - DNA, 201 bp, Homo sapiens; identical to SEQ ID NO: 32085

SEQ ID NO: 32279 - DNA, 201 bp, Homo sapiens
ggcactttatcagccatccatgggataggtccaataggcagaaattatgcatgtctaaaagtcaacccatgcagaagcagtttcttggattgagtgtgatrattgttttttcttcctctgacatttaggaagattctgaacttgttgctaaagatgacaacttggatagtggcaattcaaacaaagataaaagccagcaag

SEQ ID NO: 32280 - DNA, 201 bp, Homo sapiens
aacctgaacaaaattctatactctgattaaaacaagtggaaactaactccagaaattttacaaattccatgtggctgtctctgttgtttctcttttttttycctctcccagatatatttttacaccattaaccttggcatttatatctcacagctgaagcaaacattggtaaagtttcatttatttatgtttaatacttct

SEQ ID NO: 32281 - DNA, 201 bp, Homo sapiens
gggatttcaccatgttggccaggctggtcttgaactcctgaccttaggtgatccacccgcctcggcctcccagtgttgggattgcaggcgtgagccactgygcccggcccaactttactatttctaagtgtgcagtttatttggattgcattttagcttaatttcttggttacagttttgcatctgctgctagtttgtgct

SEQ ID NO: 32282 - DNA, 201 bp, Homo sapiens
aggagcacagacatggcatattttgtccctggctcttacatctgtctctcactcctttccttgcaccctgagttggctcttatcctcctgcagtgtgtttstttcccttctgcaagaatgtgctctctgattcccaggtttgcgggctttcctcatgcattactaaagcatccattgctcatttcctagagcatggagtcc

SEQ ID NO: 32283 - DNA, 201 bp, Homo sapiens
tgctgataaagacatacctgagactggataatttacaaagaaaagaggtttaattgactcacagttccacatggctggggagacctcacaatcatagcacmagacaaggaggagcaaagtcgtgtcttacatggatggtggcagtcgagagcttgtgtagggaactcccctttataaaaccatctaatctcatgagactta

SEQ ID NO: 32284 - DNA, 201 bp, Homo sapiens
acaatagaaaagatgatggaagaaacttaactactaactctaccactgagacgaaagcaatttgcagtattgggggcctgttttctcttttttttttttttattagttgagacaatactgtatattaagtgttgtattctgagtatttcaactgtcaggacaaaaatataaaatacttttaaaaaggatgaaaaaatagat

SEQ ID NO: 32285 - DNA, 201 bp, Homo sapiens
tcagcctgccaaagtgctgggatcacaggcgtgagccaccacgcccagcttaactgattttatatcttattattattattattattattattattattatwttttgaggaaaggtcttactctgtcacccaggctagagtgcagtggtgcactgcagtggtgctcagctcactgcagcctcaacctctcaggcttaggtga

SEQ ID NO: 32286 - DNA, 201 bp, Homo sapiens
atttttgtatttttagtagagacggggtttcaccatgttggccaggctggtcttgatctcctgacctcatgatcctccgccttggcctcctgatgtgctgrgattacaggcgtgagccaccgtgcccggcccaatcctgttacttttgttttaaacatttatttattttttagagacagtgttttgctttgtacccaggct

SEQ ID NO: 32287 - DNA, 201 bp, Homo sapiens
atgttcaaagtgtttggtttttttttttgttttttttttttttttttttttttttgagacagagttttgctcttgtcgcccaggctggagtgcaatggcgygatcttggctcactataacctccgtgtctcgggctcaagtgattctcctgcctcagcctcctgagtagctgggattacaggcatgcaccaccacacctgg

SEQ ID NO: 32288 - DNA, 201 bp, Homo sapiens
cttactagttacttattggtctgtacatattttccatttctttataatgttcaaagtgtttggtttttttttttgttttttttttttttttttttttttttgagacagagttttgctcttgtcgcccaggctggagtgcaatggcgcgatcttggctcactataacctccgtgtctcgggctcaagtgattctcctgcctc

SEQ ID NO: 32289 - DNA, 201 bp, Homo sapiens
aacacagccgccgaccacaagaacagaacccgctacagtccatttttgagcatttgtacacaattttttaagatagaatttttttttttttttttttttttgagatggagtcttgctctgtcgccaggctggagtgcagtggcgtgatcttggctcactgcaacctctgcctccttcccaggttcaagcgattctcctgct

SEQ ID NO: 32290 - DNA, 201 bp, Homo sapiens
cctgggatgttgcagtgagccaaaatcgtgccactgcactccagcctgggagatggagcaggactctgtctccaaaaaaaaaaaaaaaaaaaaaaagaaaagaaaagaaaaggccgggcgcggtggctcacgcctgtaatctcagcactttgggaggctgaggcgggcggatcacgaggtcaggagatcgagaccatcctg

SEQ ID NO: 32291 - DNA, 201 bp, Homo sapiens
ggtttgtctgtttttgttttgttttttccctacttataaatggagcaagtaatttaaaactccttgtcctcatttgcacattgcaaaaatagggatagcartaccactgtggctaccacttacaaaagtgcctggctcaggatctgactcctgatggacattcaaatgaaagtgtgaggctgggtgcagtggttcatgact

SEQ ID NO: 32292 - DNA, 201 bp, Homo sapiens
tgaacctgggatgttgcagtgagccaaaatcgtgccactgcactccagcctgggagatggagcaggactctgtctccaaaaaaaaaaaaaaaaaaaaaaaraaaagaaaagaaaaggccgggcgcggtggctcacgcctgtaatctcagcactttgggaggctgaggcgggcggatcacgaggtcaggagatcgagaccat

SEQ ID NO: 32293 - DNA, 201 bp, Homo sapiens
cttcttgctttattttggtttattcccttggcatattggtgaatgtacaattaaaagaaagaaagaaagaaaatattaatggcttctcttactgtctagcwtttccccctttccttatttcccctgtgcccttgttctcctttaaagatattacaaagaagttcagactgtctcagaacatattcagaattgtctggggag

SEQ ID NO: 32294 - DNA, 201 bp, Homo sapiens; identical to SEQ ID NO: 32105

SEQ ID NO: 32295 - DNA, 201 bp, Homo sapiens
agcaatataatgccttttatacagttttcagttttcctttgtatgcttacctgcattctgaacccgggcactagaatttttttttttttttttttttttttgagacggagtctcgctgtcgcccaggctagagtgcagtggcacgatctcggctcactacaggctccgcctcccggggttcacaccattctactgcctcag

SEQ ID NO: 32296 - DNA, 201 bp, Homo sapiens
ctcaagtgatcctccctccttggcctcccaaagtgctgggattacaggtgtgagctaccacgcctggccctcaaggtcactttttattcgatgtctacagyagaccattcctatcagtgtaatggattctaggtttcaacatttgtggtaccaggccaccaaagcctttgggtttgttgtgactatagtagccttactgat

SEQ ID NO: 32297 - DNA, 201 bp, Homo sapiens
gaaacctcaggtttttttgaattgcctcttaaagggaagaattttaaatattcttttatagtaattatgagggtatattacaactcttatcacaggagtaytcatttggtttccaattaaatgagatgaaaatatttgctgcttaaaatctcccaattgctcaaaaatatattgtgagagtgttttttatacttttttgta

SEQ ID NO: 32298 - DNA, 201 bp, Homo sapiens
attgcttattcattaggaagagagagcccttgggacttggagtttctttggactcagccttttaaaaaatcgtacaagtaacacatgcgtaaatactttcsgtaaattgtaaaaacattgagtaaagactcaggtttgcttttaccattattgtaatcaaataccagtctcttccagttggtctttttgtgtgtgtatgcc

SEQ ID NO: 32299 - DNA, 201 bp, Homo sapiens
tcactacaagatgagtatagattgtacatgaatgagcatttgaggtgaactgcttaatatgccatcttttaaaaaaagctcagtttctgctgattttacartaagtttcacagaaggaatttgacattgtgattttagaagaacctaggagtacatcatcttcaagaacaaaagtgcaaaaaaacatctgttacaagcaga

SEQ ID NO: 32300 - DNA, 201 bp, Homo sapiens
tttatcaaagatcacaaggcaaaaggcataaagcagaactactgataagggtccaacaaagatcacaaggcaaagggcaaaagcagaactactgataaggstctatgttcagcggtgcacgtattgtcttgataaacatcttaaacaacagaccggtctgaccacaaatttaccagggcggagttttttccccaccctagt

SEQ ID NO: 32301 - DNA, 201 bp, Homo sapiens
agcagccatcctgtgtaaccaccattcccactacaataagcgaacagagtaagcagttgtagtctttacagtaagtccagagaagcaacttactttgcagkacattgtatgttattctgtagcattgcctccggtgctaactttgaatcagcagaatttatttataaacattttatttttcttattttattttgggacacg

SEQ ID NO: 32302 - DNA, 201 bp, Homo sapiens
tagctgaggatccaatctagatttgctgctcttcttctgacataattggcatattgtgttaatttcccgttaggctgcttcgccaaaggatggatcggctsgataatttaacctgtcacctgttgaagaaacaggcctttagaccccagctgcctgcctacgagtccctggttcaggagatccaccactacgtcaccagca

SEQ ID NO: 32303 - DNA, 201 bp, Homo sapiens
ggtaagtcactgctcactgtttttttcataaaatatctcgactttttttttgtttgttcaacatatagcaaacttaataggttcttagcaattaccttaayaaaaaggaccaggcatatggagaatataattacaatcctaaagcctacagatctgtccatcagtttctggctgctttgctgttagatctatagcttaatt

SEQ ID NO: 32304 - DNA, 201 bp, Homo sapiens
tctatagcttaattaaaacagaaattggtgtgcttaattcctttaatttctgttgctggctctgtaatggatgtaatagttgtgacagtggttgaaaaacygggcaagagtctatgctgtgccatcctaagaagaggccagctagatcactgctggctgacttaacgtggtagtgtggattaaccagcagttttattttta

SEQ ID NO: 32305 - DNA, 201 bp, Homo sapiens
tgatgatgacaaccagaagctaggaagaggcaaggaaggattctcccctataggtttcaaaggaatatggccttgctgacaccctgatcttggacttccaractttagaattgtgagacaacacatttctgtttttttaatttgttttttgttttgttttgtgtttttgagacagagtctcactctgttgcccaggctaga

SEQ ID NO: 32306 - DNA, 201 bp, Homo sapiens
gttggaggctgagggaggaggattgtttggacccaggagtttgagaccagcttgggcaacatagcagagagactctgtctctaccaaaaaaaaaaaaaaaaggagggggattaaagaacacctgaaatacttctttcagggtttgctgtctgtcatatttgtatcttattgctactagtaatctgttttgtcagtcctaag

SEQ ID NO: 32307 - DNA, 201 bp, Homo sapiens
ggagggagaggttgcagtaagccaagatcataccacttcactccagcctgggtgacagagtgagactctaactcaaaaaaaaaaaaaaaaaaaaaaaaaaatttgggtgtggtagcaggttcctgtagtcctagctgctcaggaagattgcttgggcccaggggttcaaggttacattgagctatgattgcaccagtgcac

SEQ ID NO: 32308 - DNA, 201 bp, Homo sapiens
aggagggagaggttgcagtaagccaagatcataccacttcactccagcctgggtgacagagtgagactctaactcaaaaaaaaaaaaaaaaaaaaaaaaaaatttgggtgtggtagcaggttcctgtagtcctagctgctcaggaagattgcttgggcccaggggttcaaggttacattgagctatgattgcaccagtgca

SEQ ID NO: 32309 - DNA, 201 bp, Homo sapiens
gcaagatcacaatgctgggattcctattcgtctttctgtgccttgttttctactactttttattatttttaattgacctataataatgatatgtatttgtrgggtacagtgtgaggttttgatacatgtatacaatgtttaatgatcaagtcaagataattagcttatctaccacctcaaacatttatcatttctttgtgt

SEQ ID NO: 32310 - DNA, 201 bp, Homo sapiens
aaactagtacaagagattttttctctacttgtaaagaatatttacatagaggaatacttttttaaaaactttttttctttctttctttctttctttctttytttctttctttttttttttttttttttttgagatagagtctccctctgtagcccaggctggagtgcagtggcacgatctcagctcactgtaacctctgcc

SEQ ID NO: 32311 - DNA, 201 bp, Homo sapiens
aattgtaaaattgtaaaaaattgtaatatgcgtttaatgtaagtgggactgtcttataagaatattgtttttttgttttgttttgttttgtttttttttgsagatagagtcttgctctgttgcccaggctggaatgcagtagtgtaatctcagctcacggcattctccccttccgtggctgaagtgattctcctgtctcag

SEQ ID NO: 32312 - DNA, 201 bp, Homo sapiens
actattgtacatatacagttaacatagaagctactacaagttagatgatgactatttcttcacggagcatttatctgaatgttacaaattgaaatccagcygccttaaatggatttgataatgttgagggatggggggcaggaaaggaaaaagtgaaaaggttatagtgcaaggaacttatcattttctttaatttcattt

SEQ ID NO: 32313 - DNA, 201 bp, Homo sapiens
aatgctaaggaataacaaagaatctaaatactaagaagtacaagttgagctttggagtaccacaaaccattgcaatagctaagattttttttgtttttttkttttttttgcgtgccctaccctaatttttatcccattgaaagcaatatcattgttgctctctcctactcttcgttttcctaactgataatgtgtgggctg

SEQ ID NO: 32314 - DNA, 201 bp, Homo sapiens
tgtacgtgtcacaggtgagactttggacacaggctgcaacaggtcccccaggttcagactcctgggtctgatcatcagagagggtgctgtgggactcctgkctgctgagctgctttctgccttttattcttgggataacaaggagagggaatttttttccatttttcagatttttttttgaacaagatgtctgatagaata

SEQ ID NO: 32315 - DNA, 201 bp, Homo sapiens
caggcttaacgcagcactagcaactcctgccaaggtagaatgatagaacatgagtcttgcaggggctcagggaaagcccttgttctgttcatcccagggcygtattctcagaccttgttaagtgataacagcctgttagtggaactgagctttttgcagtacatccttaaacttaaaatataaatcaatgtaattttgtgc

SEQ ID NO: 32316 - DNA, 201 bp, Homo sapiens
ccatggtacaagggacatgactaacttggtggttcctaagctggagtatatgtcaggtgacttaatgactgtagcagcactcttttttttttttttttttwaaatcactttgagaccaaaacatttgttgtttttgtttttgttttttgagacccagtctcaactctgttgcctaggctggagtgcagtggcacgatctca

SEQ ID NO: 32317 - DNA, 201 bp, Homo sapiens
ctcctgaccttgtgatctgcctgcctcagcctcccaaagtgctgggattacaggtgtgagccagtgcgcccggcctcaagtttttgtatttttagcagacrtgggatttcgccatgttgcctaggctggtctctcactgggctcaagagatctgcctgcctcgacctcccacagtgctgggattaccaagacttcgttttt

SEQ ID NO: 32318 - DNA, 201 bp, Homo sapiens
ctggctaatttttgtatttttagtagagatgggatttcactatgttggccaggctgatcttgaactcctgacctcgtgatctgcctacctcgacctcccarattgctgggattataggtgtaagccactgcgcctggcctaacttttgtattttttggggttttcaccatgctgtccaggccagtcttgaactcctggcct

SEQ ID NO: 32319 - DNA, 201 bp, Homo sapiens
attataggcactgtagctggtcttggattttatttatttatttaattttaactctttttttggggggggacagggtctcactctgttgcccagcctggagkaccatggtgccctcatagtttgctgcagcctgtacctcctaggctcatgtgatcctcttgcctcagcctcccgagtaactgggactacagacgtgcacca

SEQ ID NO: 32320 - DNA, 201 bp, Homo sapiens
gagatgttggtgagcagtcttggttcactttgtttttatttttcttcttgctttagtctttcttcatgccatcttatctaagagactttgtttttagatcktaggttctctgcggtggcgggaccggttctggactgtggccgacacagtaaaagtagatgccccaggtctggcccttcttgccctccattggcactgggt

SEQ ID NO: 32321 - DNA, 201 bp, Homo sapiens
tcaccatgtcggccaggctggtctcgaactcctggtctcaagtgatccacccgcctcggcctcccaaagtgctgggattaccaggcattagccaccacccycagctggaaggagagacatttttaatcaagtaaattacatggtagcttgctgggagaagatttaaagtgcttctgttgagaaagttcatgcaggtcattt

SEQ ID NO: 32322 - DNA, 201 bp, Homo sapiens
ggagacagggtcttgccctctcacccagactggagtactggggcatgatcatagttcactgtagccttgacctcctgggctcaagtgatcctcctgcctcrgcctgctgagtagccgagaccataggtgtatgccgccttgcatggctaattttttattttttgtaaaagatggggtctcactatgatgcatgcccaggct

SEQ ID NO: 32323 - DNA, 201 bp, Homo sapiens
ctcagcactttgaggggctgaagtgggaggagcagttgagcccaggagtttgagactaacctgggccaccacatagtaagattcctgtctctacaaaaaarggaaaaaaaaaaaaagctgggtgtggtggcatgtgcttgtaataccagctactcacgaggctgaagcaggaggatcacttgagcctgcggggtcaagcct

SEQ ID NO: 32324 - DNA, 201 bp, Homo sapiens
cagcctcccaagtagctgggattacaggcgcgtgccaccacgctcagctaattttttgtatttttagtggagatagggtttcaccatgttggccaggctgktctggaactccttacctcagatgatctgcctgcctcagcctcccataatgctggattacaggtatgaaccaccgcacctggcctctcaattgtttttctt

SEQ ID NO: 32325 - DNA, 201 bp, Homo sapiens
agtgtcttggagaaggtggtaaagctatcacgatggagattgtcaacaaactagaagcagtgttattgcttatgcagcgactcaacaataaaatcaactcmtactgcaaggcaggtatgtatatttggatctctgtatcaggaacttaccattgcttatattgtgtccatttacacgtaatagatttacaaatgttttgta

SEQ ID NO: 32326 - DNA, 201 bp, Homo sapiens; identical to SEQ ID NO: 5423

SEQ ID NO: 32327 - DNA, 201 bp, Homo sapiens
tcccaaagtgctaggattatagatgtgagccactgcacccggcctggaggctagggtttttttgtttgttttttgagacagagtctacttctgtcacccargctggagtgcagcgatgcgatcttggcccactgcaacctctgcctcctgggttcaagccattcttttcattcagcctcctgtgtagctgggactacaggc

SEQ ID NO: 32328 - DNA, 201 bp, Homo sapiens
agctgtgtgtattggggtgggtggaggttacaaacacatacatgtaacttgccattagtactatttagtacattcacaatgttgtgcaattaccaccactmtctagttccagaatggaaacctggtacctgccaagcagtgtgagcaggccttttgttttgttttggtctcagttcttcagccaatcctgttccttgctgg

SEQ ID NO: 32329 - DNA, 201 bp, Homo sapiens; identical to SEQ ID NO: 32048

SEQ ID NO: 32330 - DNA, 201 bp, Homo sapiens
tgagcagccatgctaggctagtttttttcataacactgtttatctaataatagtttttaccttcattatgggcccttcaaatgcttgcgatgggggaaaayattacaatttaaaactgtaacgtagattttaaatatttcagtagtatttctgacgttaattaaatgaaatctgagacctactcctgttttctgagccatg

SEQ ID NO: 32331 - DNA, 201 bp, Homo sapiens; identical to SEQ ID NO: 32050

SEQ ID NO: 32332 - DNA, 201 bp, Homo sapiens
gttgagtgtgttgctggagggatttgcccttagcatttttactttttttcatttttttgagatggagtcttgctctcttgccccggctggagtgcagtggygcaatctcggctcactgcaagctctgcctcccgggttcaagtgattctcgtgcctcagcctcccaagtagctgggattacaggcacttgccaccacgccc

SEQ ID NO: 32333 - DNA, 201 bp, Homo sapiens
gaggcagaagtccctggtgtctcatagattcttctcacattgatgttttagctgcctcgtgtgctagatgcagtggctcagtagtgcccttcagggaagcytgaaaggagatgatccctaatggaaaagggctttcaacaaaaggcaaattgttctgtagtgtttaaaataccttttattcctaattagaaaaatagtagg

SEQ ID NO: 32334 - DNA, 201 bp, Homo sapiens
gagccctgtggctatcccagacgtagcaactgcaatgatatactctggtaagggcatctgaaactccctcctatgtggtcgtattctttgtctatttctgwatgtctctcatttaaataatgtagttcaatgggaaaattaagcaagtaagccaaactgtattttcctatcaacattctgagaatatatgtcctaaaagtg

SEQ ID NO: 32335 - DNA, 201 bp, Homo sapiens
tagaatgactttggcctttcaaacctttgtctgttgcgggtaggaatggttctgatatgtgcagaatgttgggagccctgtggctatcccagacgtagcarctgcaatgatatactctggtaagggcatctgaaactccctcctatgtggtcgtattctttgtctatttctgaatgtctctcatttaaataatgtagttca

SEQ ID NO: 32336 - DNA, 201 bp, Homo sapiens
cttacatgtggttccagtgtatgtaacagatataagcaaagttattttccatgaaggcaggtgttatggaccttcttggcatttaagtggctcccaaggtrcctttctgcagaagacggtttgaaaatcttgctctttagttgtttggttgtttgtagtttatatcctcagttctctgaggtgtcaggttggttcccattg

SEQ ID NO: 32337 - DNA, 201 bp, Homo sapiens
gggatcccttatccaaaatgcctgggaccagaagtgttttggatttggggttcgttttttttcttcagattttggaatatttataccagttgagcatcccrgatctgaaaatctggaatccagaatactttaatgagcattttctttaagtgtcatattgtctggcagtcaaaaagttgggagcattttggatatttggat

SEQ ID NO: 32338 - DNA, 201 bp, Homo sapiens
ggcagaaattagtttcatgcctgatttaatttttgtatttgatgatttatttctgtggctaaatagttaaggatggatgttagaaacagataactgcatgkatagagataaaaggatttgttttctgttattcatcatgttgttattttctctgaatgaatgaggcagcaggctttgagagactgcaatcaggacatctaa

SEQ ID NO: 32339 - DNA, 201 bp, Homo sapiens
gagtgcagtggtgtgatcatggcttagcacagccttgaactcctgggtttaagcaatcctcctgcctcggcctacccagtagctgggactacaggcataarccaccaggcctggtctatttctctctattctgtatctatatgtctttagtaatttcataccattaagtagtcctaacataaatggcattgatcttgtact

SEQ ID NO: 32340 - DNA, 201 bp, Homo sapiens
aagtgatcctcctggctcagcctcccaggtagctgggactgcaggcatgcaccaccacacttggctaatttttaaatttttttgtaaagtcagagtctcarctggttgtggtggttcatgcctgtaatcccagaactttgggaggctgaggcaggcggatcacttgagctcaggagttcgagaccagcctgggcaacatgg

SEQ ID NO: 32341 - DNA, 201 bp, Homo sapiens; identical to SEQ ID NO: 5372

SEQ ID NO: 32342 - DNA, 201 bp, Homo sapiens
cacttacacatggagacatcagacttcctgggtggcctgcggccagtgagacaaaagccaaacgacaaggtttgtccagcagcaagtgttcctgttatttyaaaaaactgcagttggctgtgcatgagttagtggtggggtttctggagctgggttctggtttggttaaatgtgcatatctgcagattttctctggtctac

SEQ ID NO: 32343 - DNA, 201 bp, Homo sapiens
acatcagacttcctgggtggcctgcggccagtgagacaaaagccaaacgacaaggtttgtccagcagcaagtgttcctgttattttaaaaaactgcagttrgctgtgcatgagttagtggtggggtttctggagctgggttctggtttggttaaatgtgcatatctgcagattttctctggtctacaagggccttcacaag

SEQ ID NO: 32344 - DNA, 201 bp, Homo sapiens
tagagtcaaccctgagtagctattaatacagagagccattaaaacgtattttctgtcttaaacttaactttcctatctgtgtttaaacagaagcaaaacaytcttctatttattcttttatgaaatcttaaaaaccttggctagaagtatcaagcttccttttcataaacttaattctttgtttgaagttaagtgctgtgg

SEQ ID NO: 32345 - DNA, 201 bp, Homo sapiens
gctgatgatggtggacaaggtgaagacaaaattaatgaacaaatagatgaggtaatgaagatttgaaactgatccgctctcttgactcaaggccagagctsttgagctgtatagttctcaaggtgtctcaagatattttttcccctgttcgttgactgctctcccattacctcataaaagaatatgcaacagaggctctta

SEQ ID NO: 32346 - DNA, 201 bp, Homo sapiens
attattattttttgaggaaaggtcttactctgtcacccaggctagagtgcagtggtgcactgcagtggtgctcagctcactgcagcctcaacctctcaggyttaggtgatcttcccagctcagcctgccaggtacctgggactgactacaggtgtgtgccaccctgcccagcaaatgttttgtagagacaggttttcaccg

SEQ ID NO: 32347 - DNA, 201 bp, Homo sapiens
aagaaggtgtgcatagattatatgcagattctacacctgtaaaattttttttttctttggcttatttttgtacatactgacacaggccctatacctttttwtttatttatttatttatttatttatttatttatttatttatttatttttgagacatagtctcgctctattacccaggctggagtgcagtggcgtgatctc

SEQ ID NO: 32348 - DNA, 201 bp, Homo sapiens
tcctcagctaaacttaggtgaaggcagcatgtagaaaaagatgttccaaacgtagtgctttaaaaaaaaaaaaaaaaagctatactcctggtttttttgtkgttgttgcatcagatatgatagcagccttggtgagcagaccacgaccatggggtttacccagtgggatcccgtcacggcttcttccctgcctgtgtctct

SEQ ID NO: 32349 - DNA, 201 bp, Homo sapiens
aggccaaggcaggaggattgcttgagctcaggagtttgagatcagcctgggcaacatagtgagacccccatgtctacaaaaataaaataatcagctgggcrtggtggcacacacctgtaatcctagctacttaggggactcagttgggaggattgcttgagcttgggagggtgcgcctgcagtgagctgtgattttaccac

SEQ ID NO: 32350 - DNA, 201 bp, Homo sapiens
gtctcaactctgttgcctaggctggagtgcagtggcacgatctcagctcactgcagcctttgcctcccgggttcaagcaattctcctgcctcagcctcccragtagctgggactacaggtgcaagccaccaagcccggctattttttctatttttagtagagacggggtttcaccatgttggccaggatggtctcaatctc

SEQ ID NO: 32351 - DNA, 201 bp, Homo sapiens
tgtcttttctcttgcacacatcagagtatacacacaagtacattgatatgcacgcattttaaatatggctttattgggatagtttatataaaagtgtacarttcagtggtttttagtattttcatcaatatatgcagtcatcactacagtcaattgtatttattttttgtttatttttagcttgcgctaaattattttcaa

SEQ ID NO: 32352 - DNA, 201 bp, Homo sapiens
agccaaacatgggttaactgtcagcctttcatttgtcatctgccctgtaagcccaacagtgtagtatctggaaacagaagggattatgaatatttttcctrtgtgagacagtgtacagcaagtaatatccagaggcacaattcaggattaaaatttggaattttgtgtgactgtgttttttattttgaaacgtagactctt

SEQ ID NO: 32353 - DNA, 201 bp, Homo sapiens
agtagcagaattcaggtattccctcgccctggaagcagactgtaaagttcctgtcttttctccacagcatggagcagagacccagtgagaacttccttctstagtggctagttctggtgtttgaagtgagggtattttctgcctgaatcagcatgttttcaggctaccgtgagctggctggttcccatgtcagttttaagc

SEQ ID NO: 32354 - DNA, 201 bp, Homo sapiens
tatagatttgaccaccatttaaccatttttttacttataaaaatgggaatttgtataatcgaaactaataacttaaaccatatctcagcaaagtgatgccrtcatccacaatattatccttaatgggctagttgctctgaaaagtcaggtttacttttaatgtcttctaggcaatccagagtataatagtgcaaaacctcc

SEQ ID NO: 32355 - DNA, 201 bp, Homo sapiens
tccattgcttcttggagaaaacactgtatactaaagatagtggcaggaaaatgtgtggttcgggtgccttgagatttggctcagctggatttgtccatttktaccatagcttttgtctgacaggctgtagaatgactttggcctttcaaacctttgtctgttgcgggtaggaatggttctgatatgtgcagaatgttggga

SEQ ID NO: 32356 - DNA, 201 bp, Homo sapiens
ttctgattctaagcattgcagataagagacactcaacctgtagtaggcaaagaatttgcttttgcttttgctctcaaaattgacctttgtactggggatamcatttaaattctagattacagtttattttgaaaatgtccagagattattttaaatctgatgaaatgttctcattttatttatgttgactctcagatccag

SEQ ID NO: 32357 - DNA, 201 bp, Homo sapiens
gaatgtacaactgtgggttattccttgaacttctgtgtctttcagcctattccagagccaaaaggaggtcggcttatccaggttgaaggctactggattgyggtgggagacaaggagcctacaatagatgagacgtacattctgacatcttctgtgaagctgaacctgagagatatagtccgagttgtctctgcagggtgt

SEQ ID NO: 32358 - DNA, 201 bp, Homo sapiens
tctgtcaaaaaaaaagaaaaaaaacatttattttctttctctttcttccttgcattcacctctccattcttcttcttcttcccttttttttttttttttttgccttttgattttcctgaggtctacttgcttcatttgatcatacatgtggaaacctattagaaaatggtatatttttagttgctctatatacatacactc

SEQ ID NO: 32359 - DNA, 201 bp, Homo sapiens
tcttcaagcatgaattctgagttctttgcttctttaaaacttgctccacacagggtagtcaagccaactctccatacctttaaaaggtatgacaggaactrtcttcatgtccttacccaagcaagccatccacggataaaaacgttaccaggagcagaaccgttaagctggtccagacaagttggactccaccatttcaac

SEQ ID NO: 32360 - DNA, 201 bp, Homo sapiens
tgagactccatcaggcggtctacaaagaccattgggaggctgaggatcacttgagcccagaagtttgaggctgtagtaagcttcaaaggccgctgcactcyagcttgggtgaggcaagaccctttcaagcagtaagctgcatgcttgcttgttgtggtcattaaaaaccctagtttaggataacaggtctgcctgcatttc

SEQ ID NO: 32361 - DNA, 201 bp, Homo sapiens
gaatcacttgaatctgggaggcggaggttgcagtgagccaacatcgggtcactgcacttcagcctgggtgacaaagccagaccctgtctcaaaaaaaaaaaggaaagaaatctgaattcctgaaatttaaactgttaattaggggtaactggtcacaggagtaggaccagtttcgcctggctgctgtgtctgagaaacaca

SEQ ID NO: 32362 - DNA, 201 bp, Homo sapiens
gctaatttttctattttttgtagcgatggggtttcaccatgttgtccaggctggtcttgaactcgtcggcttaagggatctgtctgcttcggccttccaamgtggtgggattacaagcatgagccaccacacctggcctggggtgaaacttcttaggataaactgatagcatgggacttgcaaggtcaaagggcatgtccc

SEQ ID NO: 32363 - DNA, 201 bp, Homo sapiens
gcctgcaatcccagctattcgggaggctgaggcacaagaatcacttgaatctgggaggcggaggttgcagtgagccaacatcgggtcactgcacttcagcctgggtgacaaagccagaccctgtctcaaaaaaaaaaaggaaagaaatctgaattcctgaaatttaaactgttaattaggggtaactggtcacaggagtag

SEQ ID NO: 32364 - DNA, 201 bp, Homo sapiens
tcaggctggtctcaaactcctgacctcaagtgatccaccaccctctgcctcccaaagtgctgggtttataggcgtgagccaccactcctggccacaccagytaatttttaatttatttttatttttttgaagagatggcatcttaccacattgcccaggttggtctcgaactcctggcctcaagtgatcatctcaccttgg

SEQ ID NO: 32365 - DNA, 201 bp, Homo sapiens
taattcattttcataatttgctgtgagtgcatttaacacatgctctatgtgcagctgctacttttatttatttatttatatttgttttttattttttttttgagacagagtcctgctctgttgcccaggctggagtacagtggtacgatctcagctccctgcaatctccgcctcccaggctcaagtgactctcctacttca

SEQ ID NO: 32366 - DNA, 201 bp, Homo sapiens
ccagctaattttttaatttttagtagagacagggtttcaccatgttggccaggttggtctcgatctcttgaccttgtgatccactcacctcagcctgccamagtgctgggatcacaggcgtgagccaccacgcccagcttaactgattttatatcttattattattattattattattattattattattttttgaggaaa

SEQ ID NO: 32367 - DNA, 201 bp, Homo sapiens
tttgcattgcaaccctgtattaaacaaaaccgtatggtattgtcttaagaatagacatttaaaccaataaaacagaggattcacagatagaccccccccccttccccatacatggtcagttatttttgttttgttttttgttaaatatgcaaaggtaatttaatggcaaaaaatggtctattcagtaaatggtgatggaag

SEQ ID NO: 32368 - DNA, 201 bp, Homo sapiens
ctgcaacctccgcctcctgggttcaagccgttttcctgccccagcctcccaagtagctgggattacagacacacaccagcacacctggctaattttttgtrtttctagtagagacaaagtttcaccatgttggtcaggctggtctcaaactcctgacctcaagtgatccaccaccctctgcctcccaaagtgctgggttta

SEQ ID NO: 32369 - DNA, 201 bp, Homo sapiens
gcttttttccaaacccacctactccacttcagttttaaaaccaatatataacaccattttgttctcattcctcataattttatgttcatatttcatccagytttaatgttgaaagtatgcagaacaagacagcttgttcaacaagtggctgttttcctactttatgcccttctctgaaagaatgtacaactgtgggttatt

SEQ ID NO: 32370 - DNA, 201 bp, Homo sapiens
tgcattctcagttcactgcaacctccgcctcctgggttcaagccgttttcctgccccagcctcccaagtagctgggattacagacacacaccagcacaccyggctaattttttgtatttctagtagagacaaagtttcaccatgttggtcaggctggtctcaaactcctgacctcaagtgatccaccaccctctgcctccc

SEQ ID NO: 32371 - DNA, 201 bp, Homo sapiens
aagtgatcatcccgccttggcctcccaaagtgcagggattgtaggagtgagccaccgtgtccggcctaaatttttttttttttttttttttttttttgagwcggaggcacgctctgtcgtccagactggagtgcaatggcccaccctctcagctcactgcaacctccgcctctcgagttcaagcgattcttctgtctcaac

SEQ ID NO: 32372 - DNA, 201 bp, Homo sapiens
tcaagagtctgctgaagcaggtatgttcttttgttatttttgacttgttacacttgaaaggctgaattaccaaattttcagctgtttggttttttttttttcacataactttttaattataaaggtaatctgttgcaaaaagtttaaacattacagaaacatatgtttagatggtgaaagtttccaataagcgtgctcttt

SEQ ID NO: 32373 - DNA, 201 bp, Homo sapiens
cggagtctcgctgtgtcgccaggctggagtgcagtggcgcgatctcggcttactgcaccctccgcctcccgggttcaggcgattctcctgcctcaccctcycagtagctgggattacaggcgagcgccaccatgcctagctactttttgtatttttagtagagacggggtttcaccatgttggccaggatggtctcgatct

SEQ ID NO: 32374 - DNA, 201 bp, Homo sapiens
aaaaaaagctatactcctggtttttttgttgttgttgcatcagatatgatagcagccttggtgagcagaccacgaccatggggtttacccagtgggatccygtcacggcttcttccctgcctgtgtctctccccgacccctgattccggccatgaagtcttaagagccaagtgctgtgtgcggctgcccagcacaaaccgt

SEQ ID NO: 32375 - DNA, 201 bp, Homo sapiens
acttttttctttttctttttttttttttttttgagacggaatctcgctctgtcacccaggctggagtgctgtggcgcgatcttgacccactgcaacctccrcctcctgggttcaagcgattctcctgcctcagcctcctgagtagctgggattacaggtgcctgcccccatgcccagctaattttctgtattttttttttt

SEQ ID NO: 32376 - DNA, 201 bp, Homo sapiens
gaatggatgaggtaattcaaagatttctcccctcccaaacaagctgagaggaggtaatctgcccacaacctaccattctctgtcatttacttctcttcttyttctgtatttgttttgttctcttttttctattcctctttttcttttttctatcctatcttattgattacattcagagctaagagtagcttgacctgagtc

SEQ ID NO: 32377 - DNA, 201 bp, Homo sapiens
tgaacccggggaggcggaggttgcagtgagccaaaatcatgccattgcactccagcctgggcaacaagagcaaaactgcatctcaaaaaaaaaaaaaaaawaaatatatatatatatatatatatatatatatatgtttttttggagacagagtctccaaaattgtaattgtaattgtaatctccacgtgattacaggcac

SEQ ID NO: 32378 - DNA, 201 bp, Homo sapiens
tagatcttttcaaagatgtccaaaatcattcctatttagtgcattttttcctaatttttaaaaatgtgtctggaaggacctaattattattgccacatacvtgtccagtttttctggctagaggtcaagaagatccttagtcgtcaattgacagaaacacttcattgtgccaggttcctagttacttgctattggttttaa

SEQ ID NO: 32379 - DNA, 201 bp, Homo sapiens; identical to SEQ ID NO: 32087

SEQ ID NO: 32380 - DNA, 201 bp, Homo sapiens
ctccttgtggctatcatagcaagcattgctggatgtaggggcatgggggtccttcagttataatgatctcatatggagcagtaatatggttttctaaatakccacagtatgtctcttttaattttagtgatgctacatttgttctctatttgctgaactagggatgtgtttttgtgtgcaacagttaaatttagttccctt

SEQ ID NO: 32381 - DNA, 201 bp, Homo sapiens
ctaggatttgttgatttgtacataatgcattttaaaactttgtactgatttatacactagttcttgctgtttgtttcttcctaggtgttcttattgatgcyatgagaaaaggctattggattattttagatgaattaaatttggcccctactgatgtgttagaggcgctgaataggctgttggatgataaccgtgaattgc

SEQ ID NO: 32382 - DNA, 201 bp, Homo sapiens
cttgaacagggctacccctcctggcacacccacagtgctctgccttgaacatataaataggtacctgtgagcccagggtttaagcctggaactatctcctrtgccttcctccaggtccctggtagggaaagcagggatgagagtggtgcccccaagggccttggcactggaaacacagtgggcgagtgactctgtggatga

SEQ ID NO: 32383 - DNA, 201 bp, Homo sapiens
tgtcgcccaggctggagtgcactggcacgatgtccgctcactgcaacctccgcctcccgggctcgagctattctcctgcctcagcctcctgagtaggtggrattacaggcgcccaccactatgcccagctttttgtatttttagtagagacaaggtttcaccatgttggccagactggtctcaaactcccgacctcgggtg

SEQ ID NO: 32384 - DNA, 201 bp, Homo sapiens
ttggatacaggagctttgctttgttgtgcaggctggtcttaaacccctggcctcaagtgatacgccagccttagcctcccaaagtgctggaattacagggwtgagctacagcacctggtcctgaagtcctgtattaaatagattagtcaacaaggcatgtgtttagaatgcttcagaatggtttaccacaacacaccctaa

SEQ ID NO: 32385 - DNA, 201 bp, Homo sapiens
taggaataatgcttaaaattgtaaagaaattgaacacttaaacaaagggtttttagcaaagcaattttatttttgtgcagaggggtgtttttttggccagytgccatgagagtacacttgaacaaagggcacgagagcctttatttttgatgcaagttttgtttttgtatttttcttttattggccggggttgggttgtat

SEQ ID NO: 32386 - DNA, 201 bp, Homo sapiens
tgttttactgtgtgtttgtgtattttttctcttccttaatacaaatacttattgagtgccctggtgctgtggttatagctatgagtaaggcagacaaaaawcctggttcttctcattgagctttaattctagaggagtcaggtactgtaattttaggttgtgataagtgaaaacatataaagctgagtagggtgtaagaaa

SEQ ID NO: 32387 - DNA, 201 bp, Homo sapiens
atggcttgcaaaacataatggcctacgaatcccatggcagcaaatcagtccaactgctactactgtactggccacagctccagctgggctcccctgcctcyaccaggaacgtgaatcatcccagcccaggggttgcagccaacaaccacatacctttatcagagagcaacacagccgccgaccacaagaacagaacccgct

SEQ ID NO: 32388 - DNA, 201 bp, Homo sapiens
cttttgtgtcagacaacctcaattctagtattggttctatgagaaactaattgtgtcattctgggccagtaacttaattgtgtgttctccagaaagaaatmcaacatgtaaaaggattgaaatagggtgatattaatgttttactgtgtgtttgtgtattttttctcttccttaatacaaatacttattgagtgccctggt

SEQ ID NO: 32389 - DNA, 201 bp, Homo sapiens
ctgagggtttgaattcttggagatgtacatggcttgcgttttgaatctgtcttgaagaaggttgcttttctatttgcaatatttatactagctatgtgggmtgtaaggagaaaagggttaatataattgattgtgtcaggtttggaattaatggaagcttagcctaataaataatagagtagttacgtggcttgtgcttta

SEQ ID NO: 32390 - DNA, 201 bp, Homo sapiens
tccctggtgttgctggatcgaggagacacaggtagcacttgaatcccttgggatttgacttggtgtcaagccctgtggccactttagagtgagattttttkttgttgttgttagaaggatgacatgggcctcccaatggaatttgttcattctttagatattaattttctgcaaagtgcattaaagtgttgggtggtatgg

SEQ ID NO: 32391 - DNA, 201 bp, Homo sapiens
actgtccttctagtatacttcatttaggtttttgtcttggcaaagtgacaaatgaccacatgccagaggcttctacaaagtcaagtcatatgttaaatctratgtcaagctgtgaaactgcataactattagcaccaaagaggagaagaatgtcagaagtctcctgtacttccagcggatttaagataatgagctagaaaa

SEQ ID NO: 32392 - DNA, 201 bp, Homo sapiens
atatgatttgagttgtactcattagaatctaaatatttatttttccttggataggtaaattgtctactcagatatccacattggagtgtaactttggccayatcgtgtggactgagggcatgcggagactcgcgatgctagtgggaagggcattggaatttggtgaacctgtgctgctggttggagacactgggtaaagat

SEQ ID NO: 32393 - DNA, 201 bp, Homo sapiens
cccttgacctttttggacatttaaaaaattaacttggccttaactctgcctatctgctgtcagccagttaaagtataggcccatcaagtaggaaagatttsccccgcctctatttctaaccctgcttgcataactgttcttggcaagtgtgcctttatttgacacattgttaacattttattttatctttttctagggtac

SEQ ID NO: 32394 - DNA, 201 bp, Homo sapiens
gaataaaaatgttcttctgcttcttgcattttccagaaatgtaaaaaggggaaaaaaaaggaaaaaaaaatgctcttttaatgatgctgttaaatgatgtygtcattcttttaaaaaaaaaaaaccaaaataatacttggccaggtgcagtggctcatgcctgtaatcccagcactgtgggaggccaaggcggtcggatca

SEQ ID NO: 32395 - DNA, 201 bp, Homo sapiens
aatacctggaagtgagattgctggatctattactatttttaaagatgcaattgatgacagctagtgaactctggattctttctctcaccatgtgtgtctcyggggaaagagtgtgtggatgtgagagagggatttggacccgttcacttcattgccccaattttaatcccagggcatggacatctctactgtttgctgtcc

SEQ ID NO: 32396 - DNA, 201 bp, Homo sapiens
cgatcgacagggttattttactttttctttctgtgctaaatctcttatttcctggatcccgtgtcgtcttctttcttggttttatcctcctttttcagggsgcatctctttcaacagattcctgagaatagttgccagggtgcattatcactacataactacatttttttttttgtctttttcttttttttgagacagagt

SEQ ID NO: 32397 - DNA, 201 bp, Homo sapiens
ccgccgatactcgccgctttaagtggggagtggtgcagcctcaggtcaagctggccccctcctgtgggctggcgcaggtcgtggaggtttccgagcgtgtytgaggcgattggaaggagtcttttgtttttatctgggggagccttccagtacccttcccatcgcctctcacccctatgcaagcgctttggctgcttgtgg

SEQ ID NO: 32398 - DNA, 201 bp, Homo sapiens
ggagacataggttgattctatatcttgactattgtgcatagtggtgcaatgaacaggggattgcagacatcccttcgacatattgttttcagatttttttkgggaatacctggaagtgagattgctggatctattactatttttaaagatgcaattgatgacagctagtgaactctggattctttctctcaccatgtgtgt

SEQ ID NO: 32399 - DNA, 201 bp, Homo sapiens
gtggcacagtctcggctcactgcaagctctgcctcctgggttcacgccattctcctgcctcagcctcctgagtagctgggactacaggtgcatgccaccaygcccggctaattttttgtttttgtatttttagtagagacggggtttcaccgtgttagccaggatgatcttgatctcctgacctcgtgatctgccagcctt

SEQ ID NO: 32400 - DNA, 201 bp, Homo sapiens
agcgattctcctgcctcagccttcctggtagctgggactacaggcacccgccaccatacccggctaatttttgtatttttagtagagacggggtttcaccrtattgctcaggctggtctcgaactcctgacctcaggtgatccacccacctcagcctcccaaaatgctgggattacaggcgtgagccactatacccggcct

SEQ ID NO: 32401 - DNA, 201 bp, Homo sapiens
tgatgtgaattttactattcaagtaggactttcaatttttttttacttttatttttttgagacagggtctggctctgttgcccacgctagagtggcagtgkcgtgttcttggcttactgcaacctctacttcctgggctcaagcctcccacctcagcctcccaagtagctgggactgcaggtgtgtgctactgcacctgac

SEQ ID NO: 32402 - DNA, 201 bp, Homo sapiens
aagctgtgttttcttagggaaatttcgtgagctatgcaaagaataactactggagtttttctgtgtaggagatgttcaactcctactagttggagtggaamgaccaagttgaatactggcataattagtgtggaacccagaagggccacactctagggctaaatcagccctcaaaggcctttctagaccaatactaacaaa

SEQ ID NO: 32403 - DNA, 201 bp, Homo sapiens
gaaacataaacataatgagagaaatttaagctatgaaaaaaaacaagtgaaaccaaaaaataccatcttagcaatgaatattttactggataggcctcatygaagattagacagttcacaagaaacgaacattgaattacaagatacggcaatagaaattatctaggcttaaacagacagggtgggaaaaagccagaataa

SEQ ID NO: 32404 - DNA, 201 bp, Homo sapiens
acactttacttgtagaggagcaaagataaaaatgactgctgacttcttaacagaaacaacacaatgaaacatctttcaaaatgctgagaaaaaccataaamccccttgcgtggtggcgcatgcctgtaatcccagcactttgggggcttaggtaggtggatctcttgagcccaggagttcgagaccagcctgggcaatgtg

SEQ ID NO: 32405 - DNA, 201 bp, Homo sapiens
gagcagtactgtgaccacaaatccagagtactggctaatgtggaaccctttgcctggtatgcagcagagggaggcacccaagtctgttttggactccacaytgaaggtttgttggtctaaaattataaaaaatgtttgatagtggcaaaagagtttctgaatggatctatcaataaacatttattcctagcatagagtggt

SEQ ID NO: 32406 - DNA, 201 bp, Homo sapiens
cagcctcgaactcctaggctgtgaggtgatcctctcctcactctccagagtagctgggactgtagatgcacaccgtcaccagctaattaaaaaaaaaaaawttttttaattaagctttttttaaaaatttttttattgaggtggagtctcactctatctgttgcccgggctggagtgcagtggtgcattctcagttcactg

SEQ ID NO: 32407 - DNA, 201 bp, Homo sapiens; identical to SEQ ID NO: 32111

SEQ ID NO: 32408 - DNA, 201 bp, Homo sapiens
tgggattacaggcgtgagccactgcgcccggcctagaattttgtattttatttcatcttccgtatcaaagtgttgctgtctactttggatctgttttttgkttatttattagaggctgatgccttgatcagcttgatagggatatcctcattcactcccaggaattaattttttacctctgtcctttcctgaagagttgga

SEQ ID NO: 32409 - DNA, 201 bp, Homo sapiens
aacctgagtttttgatctgtagaatctttcacagtctgagtttttctgattataaattcatggtgcagcttaacatattctatcatcttcattttaaaaartcgacagctggggccaggcacagtggctcacacctgtaatcccagcactttgggaggctgaggctggcggatcacttgaggcaaggagtttgagaccagc

SEQ ID NO: 32410 - DNA, 201 bp, Homo sapiens
gccatgttggctaggctggtcttgaactcctgacctcaggtgatctgcccaccttggcctcccaaagtgctaggattatagatgtgagccactgcacccgkcctggaggctagggtttttttgtttgttttttgagacagagtctacttctgtcacccaggctggagtgcagcgatgcgatcttggcccactgcaacctct

SEQ ID NO: 32411 - DNA, 201 bp, Homo sapiens
ttgaggcaaggagtttgagaccagcctggtccaacatggtggaaccctgtctctactaaaaatacaaaaattagccaggtgtggtggtagaagcctgtaakcccagctacttgggaggccgaagcaggagaatcgcttgaacccaggagttggaggtcacagtgagctgagattgcgccactgtacttccaggctaggtga

SEQ ID NO: 32412 - DNA, 201 bp, Homo sapiens
tttctttttttttttttttttttttgagacagagtctcgctctgtcgcccaggctggagtgcagtggcacgatctcggctcactgcaagctccgcctcccrggttcacgccattctcctgcctcagcctcctgagtagctgggactacaggtgcctgccaccacgcctggctaattttttttgtatttttagtagagatgg

SEQ ID NO: 32413 - DNA, 201 bp, Homo sapiens
tttttttttgagatggagtcttgctctgtcgcccaggctggagtacagtggcgtgatcttggctcactgcaacctgggttcaagtgattctcctggctcakcctcccgagtagcaatatttgtaattttaaccctctggtagaacatcaggggttggagattatatactttagtgtggaacatgaggtcatgtatcacctg

SEQ ID NO: 32414 - DNA, 201 bp, Homo sapiens
ctgtcgcccaggctggagtgcagtggcgtgatcttggctcactgcaatctcctcctcctgggagcaagcaattctcctgcctcagcctcctgagtagctgrgactacaggcgcatgccactatgcccagctaatttttgtatttttagtgaagacagggtttcgtcatgctggtcaggatggtcttgatctcttgacctca

SEQ ID NO: 32415 - DNA, 201 bp, Homo sapiens
acaaaaaaaaggtgagtttcacacttggtatttgtatttctttccatctgaaagttgatttcctgtgggtgagaaaggacatacactaattgcaagccttwttttttttttttttttttgagactgggtttcactcttgttgcccaggctggagtgcaatggcataatcttggcttgctgcagcttcacctcccaggttca

SEQ ID NO: 32416 - DNA, 201 bp, Homo sapiens
aatcttgctctgtcgcccaggctggagtgcagtggcgtgatcttggctcactgcaatctcctcctcctgggagcaagcaattctcctgcctcagcctcctsagtagctgagactacaggcgcatgccactatgcccagctaatttttgtatttttagtgaagacagggtttcgtcatgctggtcaggatggtcttgatctc

SEQ ID NO: 32417 - DNA, 201 bp, Homo sapiens
aacggtgtggcgctgtgagaaagtggatagataaattcgttacgatctctgccatgagggaaatttgcatctgtttttggagacagttcgtaaacacttayaacagctgaagtacagagcaagacagctcatactcactgtaactaactatacaaattataaggttaattagagttttctgggaaataggtcttcgggctt

SEQ ID NO: 32418 - DNA, 201 bp, Homo sapiens
cattgcttctgtccttcatcttttgccctggaagactagatgtgttatcagctggaagaaagtaaggtccccagccttttcaggattctgtgactgcactytgggatgaagtccaatcttggaccttttcaattgtccctctgatctgttgaaatatataagaaaaatttttattgaaaataatgcattttaactaaagaa

SEQ ID NO: 32419 - DNA, 201 bp, Homo sapiens
ggaagagtagtggtgccagccccaagtatttatcatttcagatttagggtgttagaatccagttgatttttaaagtaataatggcttctttccatttcttyccctttcaaaggacatcacagacctgtttggagcagatctacctgttgaaggtggcaagggaggagagtttgcctggcgtgatggccccttactggcagc

SEQ ID NO: 32420 - DNA, 201 bp, Homo sapiens
ggtccattaagcaatctgtagaaaagacacacaggtaatccatcttttaaaactggagacaaccaaaatagaatagaattttgtgtggtagggagcaaaaygacatagttaccataacctaacttaatattaagtgtgttaaacttctcaaaaaataacaccttgattgttttgatgttgctttcaacaccacccccttct

SEQ ID NO: 32421 - DNA, 201 bp, Homo sapiens
tcctggtaaagagagctgggattggttagttctatcttgggtgtaggaaggaagagtagtggtgccagccccaagtatttatcatttcagatttagggtgktagaatccagttgatttttaaagtaataatggcttctttccatttcttcccctttcaaaggacatcacagacctgtttggagcagatctacctgttgaag

SEQ ID NO: 32422 - DNA, 201 bp, Homo sapiens
gctcctggtaaagagagctgggattggttagttctatcttgggtgtaggaaggaagagtagtggtgccagccccaagtatttatcatttcagatttagggkgttagaatccagttgatttttaaagtaataatggcttctttccatttcttcccctttcaaaggacatcacagacctgtttggagcagatctacctgttga

SEQ ID NO: 32423 - DNA, 201 bp, Homo sapiens
ccatgggtttctctgtacaggaacctcctcagctgtgtgcaagagattcacagcaggctgatggggccccaggcctaccccgtggccttcccccctcaggrtggcgtgcagcagtggacagagcgcctgcagcacctggccatgcagtgccagatcctgcttgagcagctctcctggctcctccagtgctgccccagtgta

SEQ ID NO: 32424 - DNA, 201 bp, Homo sapiens
gtttgtgctttgtggtgcttgtgtaaacatgacacttgaaattctaatgtagtgtgctctgatttttgcctgtttgcattttaataacttgtattttcccratctcctttttctatgttaccaacaaaccacacatgcttcacatccctgagctctgaactactcatctgaagacctacattcagctcttttcatcctggc

SEQ ID NO: 32425 - DNA, 201 bp, Homo sapiens
ttttcatcctggcacaagagccccttgtaattgttcttatttacaaaattggtggaaatcagctgtattaactcactttatatcctgactttgaaacccgytggagattttgttcagtgtttgagatgggaaagtatttaaagagttaacaaaccttatctattctctacaattagtgttacatgtctttttctttttctt

SEQ ID NO: 32426 - DNA, 201 bp, Homo sapiens
taattggttagaggaataaatttggttttcatatctacataaatgtttggagggataacatgttttttggaggctgactggcttagatttaaaatcggtcrccaaccatgggcaaattctataactcttgtgagtgctgttgtctatataaaatggacatggtaactattttgcatgggtataaagatcagaaataatcta

SEQ ID NO: 32427 - DNA, 201 bp, Homo sapiens
acctcatacaatataaacgctgtgtaaatagtgattatactgtattgcttaggtaataatgacaagataaaaaagtccttatgcgttcagcacagacgcarccatccatttttccccctgaatattttcgacccacggttggttgaattgatgcggaacccgcacataacaagagggcaggctctatcccatgaatcctgt

SEQ ID NO: 32428 - DNA, 201 bp, Homo sapiens
atttatctcattcttcctgaattgtaatggtatgccatacaaaattgggtacttaagattttctaggaataactagtgcctcttagacatcgtatgtttargctagagcaatgtttttcaaccttttaaaaaattatctcttacctcccccaaatattcaaatttaagttaatttcctagctccttagccagaggaattta

SEQ ID NO: 32429 - DNA, 201 bp, Homo sapiens
gttgcgggtggggacagccaaagataatccttgaaaaagagtagagggcatggaagacttagatgtggcagataaaatcattccagaaagagaaagtctarcactaaagggcaaaatacagagtgcatgttcatagcacttactatagggaatgggcttcagaggggcagcctctgagggagaaacagtgatatattgaga

SEQ ID NO: 32430 - DNA, 201 bp, Homo sapiens
tagagacataaatttgaagagttgcgggtggggacagccaaagataatccttgaaaaagagtagagggcatggaagacttagatgtggcagataaaatcaytccagaaagagaaagtctagcactaaagggcaaaatacagagtgcatgttcatagcacttactatagggaatgggcttcagaggggcagcctctgaggga

SEQ ID NO: 32431 - DNA, 201 bp, Homo sapiens
ctttctgggtgataattttggcaaaactcgttaaattttgcgtatgacatttatgctgtgttcaaggtacacttatataggtgactagggtgagcctcctyctcatcctttttttgttgtggggggagacagggctttaactgtttgtcacccaggctggagtgcagtggcatgatctcagctcactgcaacctcgacctc

SEQ ID NO: 32432 - DNA, 201 bp, Homo sapiens
ttgttttttttatttggcaagtatttcaatagtcaattatttatatttattggtgtcctgtctttccattatggtcaggtcctcagtcctgggttggtacyttatttgcactcccttcatttttagagaaatgttcctgctggattttgtgtttctccctcttgtggccaggaaaatgatgttctgtgattaatatattat

SEQ ID NO: 32433 - DNA, 201 bp, Homo sapiens
cctcgtgatctgcctacctcgacctcccagattgctgggattataggtgtaagccactgcgcctggcctaacttttgtattttttggggttttcaccatgytgtccaggccagtcttgaactcctggcctcaagtgatctgcctgcctcggcctcccaaagtgctgggattacaggcgtgagcctggcctagtttttgtac

SEQ ID NO: 32434 - DNA, 201 bp, Homo sapiens
ttggctcactggtagttgctaagattgagtactaggttaagataatgaccatgaggtattgcacacctagtgtttcccttgcagttagaaagcagtctttkgatattacctcagcactatatgagtcagttctccttgaaccatgtacccagtggtcaacactaattgctcttctttgcccgaagctaggatttgcaaagt

SEQ ID NO: 32435 - DNA, 201 bp, Homo sapiens
gaaaatacaaaaaatgcttgatgaattcaagtttaacatatttggggtacagtccatttttggtggtattttatatttcatcacatcagaagacataactkgttggctcactggtagttgctaagattgagtactaggttaagataatgaccatgaggtattgcacacctagtgtttcccttgcagttagaaagcagtctt

SEQ ID NO: 32436 - DNA, 201 bp, Homo sapiens
gattaagaaaataaggacaaggacttaatttaaatgtgtacgtgtatgtgtttttttttccttagcattatttctgctgtcaaatagccttagtgcttttsaaatgaaataacacatacctgggagcaaccaatcttgtagaatatggtttaatagttggttcattgcagtttcctacatgatttcttggcattatttcat

SEQ ID NO: 32437 - DNA, 201 bp, Homo sapiens
gccacatgactcctgagcactaagggattatagaaactacacctacattttagcagaattcaggcccctcccataatcctaatcttgtggtctttcattargtttcggtccctgagcaaagagggggttagttttaggaagggactattatcatccttgcttccaagttaaactataaactaaattcctactatggttagc

SEQ ID NO: 32438 - DNA, 201 bp, Homo sapiens
aagtggggtgtgatagtatgcactatatttctctgctattcttggctgtaggtgtgttactaggaaatatggtacgggttggggatcccttatccaaaatkcctgggaccagaagtgttttggatttggggttcgttttttttcttcagattttggaatatttataccagttgagcatcccggatctgaaaatctggaatc

SEQ ID NO: 32439 - DNA, 201 bp, Homo sapiens
tatacacctctaaactacattagcaattagatgccaaagcattgtttatagtcaggaaaaataatatgccttgtgaaaggaggagaggggggctattcaargtgtgtgttcacatggggccaagatgtttgaagccaaaacttagtctcagcatagaagaagtggggtgtgatagtatgcactatatttctctgctattct

SEQ ID NO: 32440 - DNA, 201 bp, Homo sapiens
tccagattcagacatggcttccccaggcacgctttgaccctgcggtgaagagggagtacaagctcaattacgtcaaggaagaggtatgggaggcaagagtwtggagcatgggctccttccctgacgtgctgggtttgcttattgtattactccttttattcccttttgggtgctcagatcatcacaagcatgatattgcat

SEQ ID NO: 32441 - DNA, 201 bp, Homo sapiens
aaagccaaggtgggagaatcacttgagctcagagtttgagaccagcctgaacaacatagtgagaccctgtctctaccaaagaaaaaaaaattagttgggcrttatggcacacacctgtagtcccagctcctcaggagctgaggcgagagacttgcttgagctcaggaggttgaggctgcagtaggccatgatctcgccact

SEQ ID NO: 32442 - DNA, 201 bp, Homo sapiens
tgaagtcttagatgaccacagtgaggtttagtttcctttaacatggagatgaggacctgttcatctgcttgctacactagctgttataaacattttcaatwgtttctgtcatatagttaaaaagaactcatttgcacttctttgataagtgtgaagattgaacatattttcacgtttactgatcccctttagttcttctct

SEQ ID NO: 32443 - DNA, 201 bp, Homo sapiens
gggattacaggcccccaccaccacgcctggctaatttttgtatatgtagtagagacggtgtttcaccatcttggccaggctggtctcaaactcctgactgygtgatccacccgcctcagcctcccaaagtgctgggattacaggcatgagctaccgtgcctggccttaaaaaggactttcaaaaatcaaccataatgaaag

SEQ ID NO: 32444 - DNA, 201 bp, Homo sapiens
tttagatgggccttagaagaaagaagacctaataatttatggagtctttctcaggtattctcttacctaattattcctttatttctaggtgtctcctgaaraaattacatctttgtggtccgagttatttaattccatgtttatgtctttctggagcagtactgtgaccacaaatccagagtactggctaatgtggaaccc

SEQ ID NO: 32445 - DNA, 201 bp, Homo sapiens
caagatgttcttgaggaaggaggtgattatggcattgaataatatctgtagtaaattttatctttgtttctttaggattgggaggaaaatgcaagtcgagstttgtctttgcggaaacatcttgatttgatcagtcagatgatcattcggtggcgtaaactggagctgaagtaagtgactctccttccctctcctaaactt

SEQ ID NO: 32446 - DNA, 201 bp, Homo sapiens
cccggggaggcggaggttgcagtgagccaaaatcatgccattgcactccagcctgggcaacaagagcaaaactgcatctcaaaaaaaaaaaaaaaaaaaawatatatatatatatatatatatatatatatgtttttttggagacagagtctccaaaattgtaattgtaattgtaatctccacgtgattacaggcacgtgc

SEQ ID NO: 32447 - DNA, 201 bp, Homo sapiens
ggctgtgtcaggcagtgaaaattgttatgggtgaactatacctgtgtctggaatgaggatatacattgccaaaagtccatgtgggccaatagttaggcttstgttcatggtattagggtgagatggtcttgggcaccgatgagatttgagtctgcttctgttacttaggctttggggatcccccagatggcaatctgagcc

SEQ ID NO: 32448 - DNA, 201 bp, Homo sapiens
atatggaacatgttgggaaagttcttgggggcatgtttgggctcctggtaaagagagctgggattggttagttctatcttgggtgtaggaaggaagagtartggtgccagccccaagtatttatcatttcagatttagggtgttagaatccagttgatttttaaagtaataatggcttctttccatttcttcccctttcaa

SEQ ID NO: 32449 - DNA, 201 bp, Homo sapiens
cagcactttgaggggctgaagtgggaggagcagttgagcccaggagtttgagactaacctgggccaccacatagtaagattcctgtctctacaaaaaaagraaaaaaaaaaaaagctgggtgtggtggcatgtgcttgtaataccagctactcacgaggctgaagcaggaggatcacttgagcctgcggggtcaagcctgc

SEQ ID NO: 32450 - DNA, 201 bp, Homo sapiens
gtgtttgtgggaactgtaatgcattcctttcaacattgtggcatttctgttgcaggaaagattttgaagtttgctcttctgcgctgagttgcttgtcccargtgtcagttcatttgcagggcctagagtccttgttcattcttccagggatggaggttgagcaaagagactcacaaatggcactagttgaaagtctggaat

SEQ ID NO: 32451 - DNA, 201 bp, Homo sapiens
attaatggattttttcattttcatttttttaatttacctggaatttattcttctctgaagtgtagatctaagtactagtatttactatctagttgttgaartagcatttaatttgtttcctcattgttactggaatttcccctttgctttgtcattttaagctctttttaaagagtttttttttttttgtaatcagtattc

SEQ ID NO: 32452 - DNA, 201 bp, Homo sapiens
ccgtctctactaaaaatacaaaaattagctgggcgttgtggcaggcgcctgtagtcccagctacttgggaggctgaggcaggagaatcgcttgaacccgakaggtggaggttgccgtgagccaagatcacaccacttcactccagcctgggcaacagcatgagactgtctcaaaaaaaaaaacaaccaagaaacaactatc

SEQ ID NO: 32453 - DNA, 201 bp, Homo sapiens
ttcaggttattcctcaaggaaaaaaaaatgaaaatatgcccttgatggacgaaagctcttcccttcatataacatctgaactcctgtgtctgaggtgcggkggctcatgcctgtaatcccagcactttgggaggccaaggcaggcagatcatttgagaccaggagttcgaaaccagcctggccaacgtggtaaaaccccat

SEQ ID NO: 32454 - DNA, 201 bp, Homo sapiens
ctatactggccatcatgggaaatcccgtctctactaaaaatacaaaaattagctgggcgttgtggcaggcgcctgtagtcccagctacttgggaggctgargcaggagaatcgcttgaacccgagaggtggaggttgccgtgagccaagatcacaccacttcactccagcctgggcaacagcatgagactgtctcaaaaaa

SEQ ID NO: 32455 - DNA, 201 bp, Homo sapiens
gaataaggcaaaaaatcttggggtttttttttttgcttttttttgagacagattctcgtgctattgcccaggcatgattatggctcactgcagtctcaacmtcctggactcaaatgatccttccacgtcaacctcctgagtgctgggaccacaggcacatgccaccatgcctggctatttttttttttttttttttttttg

SEQ ID NO: 32456 - DNA, 201 bp, Homo sapiens
agagattgagactatactggccatcatgggaaatcccgtctctactaaaaatacaaaaattagctgggcgttgtggcaggcgcctgtagtcccagctactygggaggctgaggcaggagaatcgcttgaacccgagaggtggaggttgccgtgagccaagatcacaccacttcactccagcctgggcaacagcatgagact

SEQ ID NO: 32457 - DNA, 201 bp, Homo sapiens
cttttgtaaacaatacttctgtattacattggttaatgtaccaagtattggtacattagtcaatactttaatgaaccattctgtttcattaaaacaaactrttggccgggtgctttctttcacacctgtaatcccagcactttgggaggccgaggagggcagatcacgaggtcaagagattgagactatactggccatcat

SEQ ID NO: 32458 - DNA, 201 bp, Homo sapiens
gtagttagttgtcagactcatttggagggcttgttgaagtgcagcttacagggccccacacccagtgtttcttattcagcaggggcagagaatttgtctgyctaacaaagcctcaggtgatgccactaatactggtctaaggcccaggctcagagcctcagaactcagaacccatgactcttgtgtgctgtttgcagcagc

SEQ ID NO: 32459 - DNA, 201 bp, Homo sapiens
agtagaaagaagataacttttttttttcttttaaagagcattgaagattgtaaaacagaaagattgcataagcccttttcactgttcttcaatttttcttktagtgtccttgaagtagaaaagtctctggtattagctgaaaaaggcagtccagaggacaaggatagtgaaatagagctgttgactgctgggaaaaaattt

SEQ ID NO: 32460 - DNA, 201 bp, Homo sapiens
tacttgagttatcactgaagaactcatgaaagtattaatccccccttctttcctccttcctcttttttcttttttttttttttttttaagaagagactaaragtgggtcgggggctgggggagggatagcattaggagaaatacctaatgtaaatcacgagttgaggggtgcagcaaaccaacatggcacatgtataccta

SEQ ID NO: 32461 - DNA, 201 bp, Homo sapiens
taatgaagatttgaaactgatccgctctcttgactcaaggccagagctcttgagctgtatagttctcaaggtgtctcaagatattttttcccctgttcgtygactgctctcccattacctcataaaagaatatgcaacagaggctcttaacaggacataaaatatataactgttggttcctgacagggtagtccacatgtt

SEQ ID NO: 32462 - DNA, 201 bp, Homo sapiens
gcgtgagtcaccgtgcccggcccataagaatattctgtagctttcctttttaacctatctgaatcttggatatatttttgtttttgtaccagagttcattktgacatgccttctaagggccacatagcatttcactggatgggtacaccatagtttcactatttgcatagtttaactacacagttaggtataatctatacc

SEQ ID NO: 32463 - DNA, 201 bp, Homo sapiens
atgtttttttggagacagagtctccaaaattgtaattgtaattgtaatctccacgtgattacaggcacgtgccaccacgcctggctaatttttgtattttyagtagagacagggtttcaccacattggccaggacggtctcgatctcctgaccttgtgatctgtccacctcggcctcccaaagtgctgggattacatgtgt

SEQ ID NO: 32464 - DNA, 201 bp, Homo sapiens
gatttttcgtagtaagaatgaaatgtttttacttctcctttaatattttatggtgaatgtcagagcctccatattggaaattaaaaggcaccttttactgmattcttcctgtgctttgtctaggtcctttctagagccttcaggaatcggtttgtggaattgcactttgatgagttacctagctccgagttggaaacaatc

SEQ ID NO: 32465 - DNA, 201 bp, Homo sapiens
aacatgtggaaatgtgttggagagtgaatgaatgaagtttgattaattttcaggattaacaggcaatagcaaaggcttggtcagtcatcaggctaatattrtaagtaaaattatgtccttaaatgaaaataggctttgatgagatggaagtggagatccaaactgttaaaacagaggaagaccaagaccccagaacagaca

SEQ ID NO: 32466 - DNA, 201 bp, Homo sapiens
aataaatacactttggctttcttggaagtatgatatctagtctggtcctttaatgaggaaataggaaatgaagacttgggggaaaacactgttggtctgarcttttctaaaaggggttgagaaaaaaatggacctggtttaatggaactagaaaatatacagccaagtaaagatcgggactctgagaacgttcctggcttt

SEQ ID NO: 32467 - DNA, 201 bp, Homo sapiens
tttttctggcatggggtgagatcattgcaagtgaggctgttgcccctgtggtgagggctagctgccttgccttttatccagtgggatgcagtatctaccgktaatgagggtgcactcctcccagccttccaggtgggccttcattccaactgagtgcccacatacacggttcccctcagtgccctcatggcctctaagtta

SEQ ID NO: 32468 - DNA, 201 bp, Homo sapiens
gtgccttgcaagctaccagccccctactcctctgctccaccaactcctccatttctaccatggccactttgaagagttcacggtgcagtttgtcagatcgtgacagaccaaggcctgggagtctgcctagacccagctttctccatccatcgatctttcctttcaccttagtagttgtcactttcatctccatctctttag

SEQ ID NO: 32469 - DNA, 201 bp, Homo sapiens
aaggaaagttacacagggtcatttaatttaggaaaatataaacctttaatgatagatgcggtgacttgtacctgtggtccagctacctgggaggttgagakaggaggattgtgtaagtccaggagtttgaggctgcagtgagctgtgatagtgccactgactgcattctagcctgggcaacagagccagaccctgtctctg

SEQ ID NO: 32470 - DNA, 201 bp, Homo sapiens
taagggaattgtggccagtgtttttagaatagtgactcttatcactgtgcttgttttctagaaagtttgcctaagaattaggtggagtgatttgtgttttyattgcattatcttcttcctttaggtcattgctgtattcaaggatgtgtttggttcaaattccaacccatacatgggaaccagactatttcgtatcactcc

SEQ ID NO: 32471 - DNA, 201 bp, Homo sapiens
tttctttatgaaaagccaactcaactatctgggaagtagagaataattctttgtagagtgctaatttgagggccaaaataagcctctggatgaggaaatawtccaaaagcatgtggatttttactcaggtaaaatcttacctcctacaggctgaattcttttgtcaactttataaaccagaaattgtgatcaatgagctag

SEQ ID NO: 32472 - DNA, 201 bp, Homo sapiens
cggttatgtgaagagcttcgtctcatattagagcctacccaggcagccaagctgaagtaagtcttcccctctggaaggcctcacagtgccctgagaagacrgcagcttcattgattctgttgaacgcggcacctaaccatttatagtgccagcttctaggttgccgcttgtgccgtacaggcaccagtatgctgttcctta

SEQ ID NO: 32473 - DNA, 201 bp, Homo sapiens
tagcaaatcttgcctttgtgaatgcctcagcaaagaaagctcagcttctttctgtctgtgtgactttcaggaaatcatcagtgagtgggatgagcaggaasgcatagcccaagagaaggctgagcaggaaagcggcctgtatagatacaggagcaggaactctaggacagccctgagtgaagaggaggaggaagaacggga

SEQ ID NO: 32474 - DNA, 201 bp, Homo sapiens
aacctctactcagctgtatttagaagattttatgattctttattctcaaaacacaaaaaaagaaatttctataactgaaaattatatttctcatgtattgktacttggtattaaagattttgcataataagacatggtagtcatttctagtgtttggtaaagagaaacaaaggcatttcttcatattatttttggatttct

SEQ ID NO: 32475 - DNA, 201 bp, Homo sapiens
agtttggggtgtacaatattcaggaaaaggctagaaatatttgtggagctgaaatgattagagtgatgtacgtgtcacaggtgagactttggacacaggcygcaacaggtcccccaggttcagactcctgggtctgatcatcagagagggtgctgtgggactcctgtctgctgagctgctttctgccttttattcttggga

SEQ ID NO: 32476 - DNA, 201 bp, Homo sapiens
ttctgcatttattttagaggcattttataaatagcgtcaaccgcttcatgttttattagtgcaccggagagactaaggaaagacatacaaaatgacctacygaaatgaggaaacgatccgttatgtgtgcatatggggtaaattattcatcagaagaaagagcagagtatgagacatgataaatactgaatctctgacaac

SEQ ID NO: 32477 - DNA, 201 bp, Homo sapiens
ggtagaaataaaatgacttttaacaatctaaggaaaatatggtacagatgacaaattgaatgagaatcctttggaataggattttgttttctttttttttwaagcctgtcaattaaattccaagtacagccaatgttgagaactgttaatctagagcaccagctcaaattgattgatatatggaacatgttgggaaagttc

SEQ ID NO: 32478 - DNA, 201 bp, Homo sapiens
aatccttcagttaacctcctataaaggacagaactaagactgatagaaattgtttcaaggtaacatttttccctaatcagtgctttgatcagaatcaaatkttttcatgagagaatgctctgtaattggaagactttgtaagagctcaggtgtaaggtgactttctgggtgataattttggcaaaactcgttaaattttgc

SEQ ID NO: 32479 - DNA, 201 bp, Homo sapiens
cggtatggaataactaaagctagtgaatattcatcatctcaaataccgttttttgtagtgagaacatttgaaatgtactgccttagtaattttgaaatgtrcaagacattattatttatggcatggtcgccatgctatgcaatatatatctcaaagggaagaaagcttatttttttctgtctaattaaggctttgtacttt

SEQ ID NO: 32480 - DNA, 201 bp, Homo sapiens
ttacaggcgtgagtcaccgtgcccggcccataagaatattctgtagctttcctttttaacctatctgaatcttggatatatttttgtttttgtaccagagwtcattgtgacatgccttctaagggccacatagcatttcactggatgggtacaccatagtttcactatttgcatagtttaactacacagttaggtataatc

SEQ ID NO: 32481 - DNA, 201 bp, Homo sapiens
aggtactgtaattttaggttgtgataagtgaaaacatataaagctgagtagggtgtaagaaaatgaagacttggagttctatttttttttttttttttttwggatacaggagctttgctttgttgtgcaggctggtcttaaacccctggcctcaagtgatacgccagccttagcctcccaaagtgctggaattacagggtt

SEQ ID NO: 32482 - DNA, 201 bp, Homo sapiens
ccatacattatgggtgtggaaaatttggtcatcagaattattattattatttttttttgagacagagtctgactctgtcacccaggctggagtgcggtggygcaatcttggctcactgcaacctctgcctcctgggttgaagcaattctcctgcctcagcctctggagtagctgggattacaggtgtgtgccaccacgccc

SEQ ID NO: 32483 - DNA, 201 bp, Homo sapiens
ttgatgacagctagtgaactctggattctttctctcaccatgtgtgtctccggggaaagagtgtgtggatgtgagagagggatttggacccgttcacttcwttgccccaattttaatcccagggcatggacatctctactgtttgctgtcctgtgaccctgtaggaaggatcaacttggttaaatatttgtggcttggtca

SEQ ID NO: 32484 - DNA, 201 bp, Homo sapiens
tcctgtgctcaagtgatccttctttcttagcctcccaagtagctgagactacaaatgtgcatcaccacacctagctaattttttaattttttatggagacragatcttggctttgttacccaatctggtctcaacctcctggcttcaggggatcctcccgccttgacctcccgaagtggtgggattacaggcatgagccac

SEQ ID NO: 32485 - DNA, 201 bp, Homo sapiens
tttacttacagaggtttgtgtaaggttagtagaaggcttactgtggaaattaacttcggttccttgggggaagaactcttcttgacatggcttttgtcttrcctctttagggtggtaataggagttcttcacgtgaacaggagctggcccttaggtcttatgtgctggttgagtctgtctgcaaaagtcttcagaccctgg

SEQ ID NO: 32486 - DNA, 201 bp, Homo sapiens
tgagacagggtcgcactgttgctgaggctggagtgcagtggcgagcccacagctcacagctcactgcagccttgacctcccaggctcaagtgatcttcctrcctcagatctgaggtaggaagatagctgagactacaggtgtgtgccaccacgcctggctaatttttaaagttttttgtaaagacgaggtctagctatgtt

SEQ ID NO: 32487 - DNA, 201 bp, Homo sapiens
ggtgggagagaccgggactggcaaaacctctaccatccaatacttggctcacattacaggtaatccctagaggaaataaatctgcccccagatatttcacwctgactactttttttccttttttaaaaatactaaatccaaagaccacagagtttaaagagtgccagcaccccacatgtaatctctgcctggaaataacta

SEQ ID NO: 32488 - DNA, 201 bp, Homo sapiens
gaagcgagaaggaaaatcagtggggaatctacttttgaaagagatcactgttgtatctgggtgaatgattgtgccgaaaggaaatgtgagtcaaaagcatktggagccccgtgcatggaaggaaagaagagtcaatgcagcatgtcagcctatccaccatctgaattctgtctctgcagcccatcagtgttggatcgtttg

SEQ ID NO: 32489 - DNA, 201 bp, Homo sapiens
gcaaaactaggagaagcttgcagcgtggtttttaaactctttttttctccttcccagggagaagttcactttcgctgctacacggccgtcctctgttctcrtcgagcagcttgcagtgtgtgtcagcaaaggggagcctgtgttgctggtgggagagaccgggactggcaaaacctctaccatccaatacttggctcacat

SEQ ID NO: 32490 - DNA, 201 bp, Homo sapiens
ttctcagtccatttaggataaaatacaaaggtttagaataaaatgtttggtttgtatagcccttcataatctgacagtggtacttctctgatatcatctcycaccttcccctgtgttgctgagctccaaccactttcttctgctttgcacctaaatgcttgctatttcttctgtgtggcctccttgcacccacagataatg

SEQ ID NO: 32491 - DNA, 201 bp, Homo sapiens
gtcttgctctgtcatccaggctggaatgcagtggcaccttcatagttcattgtaacctggaacctggcaaatgatcttccagcttcaggctcctgaatagkcttcaggctccaccataccccactaattttttttttttctgtaggaacaaggtctcactatgttgcccaggcttgtcgtcttcattcattaaggtgtaac

SEQ ID NO: 32492 - DNA, 201 bp, Homo sapiens
ggctcaccgcaacctccgcctcccaggttcaagtgattctcctgcctcagcctcccgagtagctaggatcaccaccactcatggctaattttgtctttttrgtagagacggggtttctccatgttggtaggctggtctcgaactcccaacctcaggtgatccacctgtctcggcctcttaaagtgctgggattacaggcgt

SEQ ID NO: 32493 - DNA, 201 bp, Homo sapiens
ccttaggctgcaaacctgtacagtatgttactgtactgaatactgcaggcagttgtaacacaatgtaagtatttgtgaatctaaacatggaaaagatatartaaaaacgtgttattatcttacaggaccaccagtgcacatgcagtctttccttgactgaaacgttgttgtgtggtacatgactgctacttatttttatat

SEQ ID NO: 32494 - DNA, 201 bp, Homo sapiens
gttttgtgtttcttatagctgtctcctgccttaagaaaccggtttacagaaatatggtgccctcaaagcacaagccgtgaagatttaattcagatcatcartcataatcttcgtccaggattgtgtctgggcagaatagatcctaaaggtgagagtttgcaggtggtgatggtagtattgggtcatagaagggtttgtgtt

SEQ ID NO: 32495 - DNA, 201 bp, Homo sapiens
ctgtagtcctagctagtcaggaggttgaggcagaagaatcgcttgagcctgggaggcagagattgcactgagctgatatcgtgccattgcactccagcctrggcaacaggagtgaagccctgactaaaaaaaagatggagtctcactatgttgtccagactggtcttgaactcctgggcccaagtgatcctcctgccttgg

SEQ ID NO: 32496 - DNA, 201 bp, Homo sapiens
aagtcatattgctgaggcatagggcaggtatatggttaattgtaataggctgtcctagttcttcagatttctacctcaccagccgcgtatgagagtttctrttgtttcatattctccatatcccttggtgttcccggtagacacttgatgattcctctcctccttttcctcctcctcctcccaggttatatgcttctggca

SEQ ID NO: 32497 - DNA, 201 bp, Homo sapiens
tggtctcactctcttcctcaggttcctccactgaacttctcagtccatttaggataaaatacaaaggtttagaataaaatgtttggtttgtatagcccttyataatctgacagtggtacttctctgatatcatctcccaccttcccctgtgttgctgagctccaaccactttcttctgctttgcacctaaatgcttgctat

SEQ ID NO: 32498 - DNA, 201 bp, Homo sapiens
tatgacgacaccatagtttgtttatccattctcttggttatggacatctggatcattttaattttttagttatgaacaaagcttctctgaacattcctgcwtatgtctttcgacacacacatgttcattggtgtttggggatactagaagtcatattgctgaggcatagggcaggtatatggttaattgtaataggctgtc

SEQ ID NO: 32499 - DNA, 201 bp, Homo sapiens
cattttgttagcattatacaagtttttagacttagtgttttgtgtaagatgcttaatttttgtgtgttttgttaattgtatttgtttgtttagaagttgtrtatattacaattcaaaatgtgtgctgaattcttgtctttcttttttagggttactcataaaagagaaatgggaagcatttggtcttagactcaaccatgc

SEQ ID NO: 32500 - DNA, 201 bp, Homo sapiens
tgttttcctcaagtcaatgcttgctgacttttacccaagggaaagttactttttagtttcgcatgcctaacaagcagagcaaggtaggatgctggacaccrgaggtactggttgtctatgatactgatgaggtacacacacgtatgctttattcctgggcctctgtggtagaccagatagatgatcatcaagtaaaaggaa

SEQ ID NO: 32501 - DNA, 201 bp, Homo sapiens
cttgggagaactccagggctgagtgtaacactgcaacagcccagggtgaagcaatgaattatcaaactcaccccaccattcacacacttaataatattgcygctgtcatggagacctgcactgttttctctaggtcacggatggcactttatcagccatccatgggataggtccaataggcagaaattatgcatgtctaaa

SEQ ID NO: 32502 - DNA, 201 bp, Homo sapiens
cttgtgtcttgcttggttgtgatccacaggaggcactcgtgaatgtcgagtgtgtaaattgtgctggagtgtaggtgattcagacgttcccacctgcataytgaccccagtttggactatgagagctgacgtttcctttaagggtgtgtctgtcattttgagagagggttgttttgttttgattatttctgtcttaatagc

SEQ ID NO: 32503 - DNA, 201 bp, Homo sapiens
aaggaagtattcaagattaattttttttaaataaggagtgagagaataaacatttcctagaacagagtaatattaacttgattggcacaagcattaatgargaaaatgggcattttcacaacaccagatttaaaattttctacctccatcttcatttgatgttgatcaaaatataccactggccatttggtttagaagaaa

SEQ ID NO: 32504 - DNA, 201 bp, Homo sapiens
ttgggtgtaggaaggaagagtagtggtgccagccccaagtatttatcatttcagatttagggtgttagaatccagttgatttttaaagtaataatggcttytttccatttcttcccctttcaaaggacatcacagacctgtttggagcagatctacctgttgaaggtggcaagggaggagagtttgcctggcgtgatggcc

SEQ ID NO: 32505 - DNA, 201 bp, Homo sapiens
taaagcagccaatcctcatcttccttgccacccacccatagaacagtctttaaaagaaactgcccagaagagcatatggcaggagcatgcaatttgaactmagaaccctgtccatgacatgaagagaaatggcttatcattctaattactcagcacgtacattttatattctttttacactttttgttgtttcacatgtta

SEQ ID NO: 32506 - DNA, 201 bp, Homo sapiens
ttggttgactgaacctctttgtaagacaccataaatccaggatgggtttctgatgagggtggtggactcttctgactaattcatctggggtccattgttaytatctatgatgggagcatgtatgtgcacaggacttaaccattctagtggatattattacagaagaccaaatcatagcggtaaaggtggaataagaacaaa

SEQ ID NO: 32507 - DNA, 201 bp, Homo sapiens
tctatctgaattagtatactaagagctgtgttagagctggattttaatgtgacttttaaagagatagtaaaatatagttttgaggaataatcaaaagagayagcaaaactgagtgtcaggggtttttaaattgaaaagatttttaaaactttcactgtaaaaatgattaatattctgtgtaccaataggacatttctttct

SEQ ID NO: 32508 - DNA, 201 bp, Homo sapiens
ttcactctggagccacttactcgtaagtctgcatgctgagccagaggtcctgtaatagagttctctgggtctacttcaagcaaggttagttggaagtgatracaggtctaaccttctcattcctgattatttttaatgaagataatttataaaataagaggtcccccccccacttaaaaataagtaaccagtttaaaacac

SEQ ID NO: 32509 - DNA, 201 bp, Homo sapiens
gagatcgagaccatcctggctaacatggtgaaaccccgtctctactaaaaatataaaaaattagccgggtatggtggcgggcgcctgtagtcccagctacytgggcggctcgggcaggagaatggcatgaacccgggaggtggagcttgcagtgagctgagattgcaccactgcacttgctcctgggcgacagagcgagac

SEQ ID NO: 32510 - DNA, 201 bp, Homo sapiens
tatgctgtgttcaaggtacacttatataggtgactagggtgagcctcctcctcatcctttttttgttgtggggggagacagggctttaactgtttgtcacycaggctggagtgcagtggcatgatctcagctcactgcaacctcgacctcccaggctgaagctatcctcccacttcagccacctgaggagctgagactaca

SEQ ID NO: 32511 - DNA, 201 bp, Homo sapiens
tggcgccatcatagctcactatagcttcgaactcccgggctcaagcagtcctcctgcctcagcctccctagtagctaggactacaggcgcatgctaccatrtctggctaatttttattttttgtagggacagggtctcactttgttgcccaggctggtctaaaattcctgggttcaagtgatcctcccttcttggcctccc

SEQ ID NO: 32512 - DNA, 201 bp, Homo sapiens
ggagatcgagaccatcctggctaacatggtgaaaccccgtctctactaaaaatataaaaaattagccgggtatggtggcgggcgcctgtagtcccagctamttgggcggctcgggcaggagaatggcatgaacccgggaggtggagcttgcagtgagctgagattgcaccactgcacttgctcctgggcgacagagcgaga

SEQ ID NO: 32513 - DNA, 201 bp, Homo sapiens
tatttcatcttccgtatcaaagtgttgctgtctactttggatctgttttttgtttatttattagaggctgatgccttgatcagcttgatagggatatcctsattcactcccaggaattaattttttacctctgtcctttcctgaagagttggaagttttgtctactaactgcagaattcatttttttcttcaagagttaaa

SEQ ID NO: 32514 - DNA, 201 bp, Homo sapiens; identical to SEQ ID NO: 32101

SEQ ID NO: 32515 - DNA, 201 bp, Homo sapiens
ctgcctcggcctcccaaagtgctgggattacaggcgtgagccactgcgcccggcctagaattttgtattttatttcatcttccgtatcaaagtgttgctgkctactttggatctgttttttgtttatttattagaggctgatgccttgatcagcttgatagggatatcctcattcactcccaggaattaattttttacctc

SEQ ID NO: 32516 - DNA, 201 bp, Homo sapiens; identical to SEQ ID NO: 32103

SEQ ID NO: 32517 - DNA, 201 bp, Homo sapiens
catgttacaagccaggatggtctcgatctcctgacctcgtgatccgcctgcctcggcctcccaaagtgctgggattacaggcgtgagccactgcgcccggmctagaattttgtattttatttcatcttccgtatcaaagtgttgctgtctactttggatctgttttttgtttatttattagaggctgatgccttgatcagc

SEQ ID NO: 32518 - DNA, 201 bp, Homo sapiens
attgttttgtttcttgaccttgctgtttgttcttaactgtctagttgcagaataagtaaatctgatagtgcttgttttgcagaaaatgcaacagtgtactsttaaaaaaaaaatcaaagttttcagatattactgcatagtcttagatagtttaggtaggtatctaggatacatttcttttatatctgaaattatccagag

SEQ ID NO: 32519 - DNA, 201 bp, Homo sapiens
cagaatcgtggcttactgcaacctctgcttcctgggttcaagcgattctcctgcctcagcctcccgagtagctgggactacaggtatatgccataatgccyggctaatttttgtgcctttagtagagatggggtttcgctatgttggtcaggctgatcttgaattcctgacctcaagtaatccacccgccttggcctccca

SEQ ID NO: 32520 - DNA, 201 bp, Homo sapiens
ctataatcccagctactggggaggctgaggcaggagaatctcttgaacctgggaggcagaggttgtggtgagccgagatcgcgccattgcactccagcctkggcaacaacaatgaaactccgtctcaaaaaaaaaaaaaaatttttgtagagatggggagtctcactttgttgcccaggctggtcttgaactcttgggctc

SEQ ID NO: 32521 - DNA, 201 bp, Homo sapiens
gtttgtgtaaggttagtagaaggcttactgtggaaattaacttcggttccttgggggaagaactcttcttgacatggcttttgtcttgcctctttagggtrgtaataggagttcttcacgtgaacaggagctggcccttaggtcttatgtgctggttgagtctgtctgcaaaagtcttcagaccctggctatggcggttgc

SEQ ID NO: 32522 - DNA, 201 bp, Homo sapiens
aacatggagaaaccccttctctactaaagatacgaaattagccgggcgtggtggcgcatgcctataatcccagctactggggaggctgaggcaggagaatytcttgaacctgggaggcagaggttgtggtgagccgagatcgcgccattgcactccagcctgggcaacaacaatgaaactccgtctcaaaaaaaaaaaaaa

SEQ ID NO: 32523 - DNA, 201 bp, Homo sapiens
agaaatcagatagtgagggcggagacctggataaacacatgggcgatctcaatggtgaggaagctgacaaactagatgagaggctttggggtgatgatgakgaggaggaagatgaggaggaagaagacaataaaactgaagaaacaggaccaggaatggatgaggtaattcaaagatttctcccctcccaaacaagctgag

SEQ ID NO: 32524 - DNA, 201 bp, Homo sapiens
atataaaatggcgttgtgtgtgtatataacctatgtaccctttatatcatctctaaattacttacagtacctcatacaatataaacgctgtgtaaatagtsattatactgtattgcttaggtaataatgacaagataaaaaagtccttatgcgttcagcacagacgcaaccatccatttttccccctgaatattttcgacc

SEQ ID NO: 32525 - DNA, 201 bp, Homo sapiens
aactcttgcagttttcctttggcatctgggggtgattggttccaggattctccttggatacaaacctccaggaaagtccaagacttttatataaaatggcrttgtgtgtgtatataacctatgtaccctttatatcatctctaaattacttacagtacctcatacaatataaacgctgtgtaaatagtgattatactgtat

SEQ ID NO: 32526 - DNA, 201 bp, Homo sapiens
ttaatctttgtttcaactaactgattctcagtagttgattgagagtatgtccagagaaggggattgtgtagctgtagtgtccaatacagtgtctgatatgyagtaggcagtaaatgtttattgactgtattaacagattaaggtactcccaaattgtgatacttttgtcaatgaaaagtgtcaaactctaaaatattctaa

SEQ ID NO: 32527 - DNA, 201 bp, Homo sapiens
ctgtttttaaactagatgaatttgtgatccctctggatccccgatggaatatgcaggctctggacatgattagaaatttgatggactttgacccacaaacrgaccagcctgaccagctctttgcccttttagaatcagctgcaaacaagtaagtgaaacctgctgctctgggcactgtttgcctcactggcttctcggatt

SEQ ID NO: 32528 - DNA, 201 bp, Homo sapiens
attctgtggccatttattgtgtagctgtcatagttttattgttcattgtgatattgctccctattgattatttattaggtatgttttaactttcttcctcygtgggagactctccttttctctcttacctttgatccaatatttgtgaaagaggttttctcagttatttggaatgtgaaataaaaggttattctagtactg

SEQ ID NO: 32529 - DNA, 201 bp, Homo sapiens
aaaagaactcatttgcacttctttgataagtgtgaagattgaacatattttcacgtttactgatcccctttagttcttctctgaattttcgagtcatagtygtgcttttttttaaaaaaaattgtgttggtcaggcgctgtagctcacgcctgtaatcctagcactttgggaggctgaggtgggtggatcatttgaggtca

SEQ ID NO: 32530 - DNA, 201 bp, Homo sapiens
gtctttataagctctttctctgaacatgaaaatgtgctactcgtgcacacacacaaatatgtattcttttttacttctaacttgagaaaactgatggcagrattattatttagattctcttgtaaagttggaacctgatatgaactcctttaggtttttctaaggaaattacatagaaagctatgaatcattacctatgag

SEQ ID NO: 32531 - DNA, 201 bp, Homo sapiens
tctcaggctcagggttaagtaacttatccacagtcacacagctaataactgtgatcccaaaccaggtatgtctgaaaacaaagtactcttaactactttgytttattgtcacttttatttcccagatggttacaacgaaaagtgatttaaagaaagagagatagatacgatggggttgggagaagttttgtctgggaactt

SEQ ID NO: 32532 - DNA, 201 bp, Homo sapiens
cagcggggtggggatggtttgaggatgaaatggttccacctcagatcatcaggcattagattatcataaagggtgcgcagcctagacccctcacatgtgcrgttcacagtaaggttcatgctacgtgactctaatgccactgctgatctgacaggaggcagagctcactggtaatgcttgcccacccaccactcacatcct

SEQ ID NO: 32533 - DNA, 201 bp, Homo sapiens
tatggcagtcatggatcctaggggcttagattagggcaaaaggaagttgggtctgatcctggtgattaggaacccagggagaaaggaaatagggaggttayaggggactcattgtttctttgtctgttcacagatgaagtccagatcatccaccagattggtgcaaagagagaccagattgtcctggaaaacctaaatcgg

SEQ ID NO: 32534 - DNA, 201 bp, Homo sapiens
gtggcagcggagaatcactactgccttgtttccagcaatcaacaagaaactaatttagggctagaggcatcttagtgagcagcagccccttatcatacaamgtggttgccaaggacagctggtcctccacactgtcacagggcaggtcccccactctcacaaactctggataagaaccaagcaacagttccatggcatcag

SEQ ID NO: 32535 - DNA, 201 bp, Homo sapiens
aacataagttgatccagctgatgtggaatgactggaataaggaagtgaggagagcagctgcacaggcgcttgggcaaatgagcctcgggaaagaggtgcaygacataatcaggtaagacccagtcaacatgaggagacactcttctaaattcttagaagtgtttaggaggcaggctgggcaaggtggctcccaacactttg

SEQ ID NO: 32536 - DNA, 201 bp, Homo sapiens
aaattagccaggtgtggtggctggcacctgtaatcctagctacttggaaggctgaggcacaagaattgcttgaacctgggagggagaggttgcagtgagcygagatcgcaccactgcactccagcctgggcgacagtgcgagactctgtctcaaaaaacaaaacaaaaaaaaacaaaacaaaaaaaccattgtcccaactt

SEQ ID NO: 32537 - DNA, 201 bp, Homo sapiens
aatggaagaaccggattgtggcctgccaggctttctcccggatcagtggaaatgtctgcttggtaaacctctttctttgcctccaggacagaaagcctaasagaggctgagctacagaggccttctactttttgctgctatgtattattccattcttaccaaacagatctctgttcccacatcactacttcttacttctag

SEQ ID NO: 32538 - DNA, 201 bp, Homo sapiens
taggaaggaaatcaccatccttggctcccaggcctctaatgaggtgactagctatgacatttcctttttcttttttttttcccccacagacactatagtgrtttatcactgtgatatttctaagcaatggtcaccttcaagggatgccccagagtatggcagtcatggatcctaggggcttagattagggcaaaaggaagt

SEQ ID NO: 32539 - DNA, 201 bp, Homo sapiens
tgtcaatggaagaaccggattgtggcctgccaggctttctcccggatcagtggaaatgtctgcttggtaaacctctttctttgcctccaggacagaaagcstaagagaggctgagctacagaggccttctactttttgctgctatgtattattccattcttaccaaacagatctctgttcccacatcactacttcttactt

SEQ ID NO: 32540 - DNA, 201 bp, Homo sapiens
caccatgcttgctgtggagctgaacagctgtcaatggaagaaccggattgtggcctgccaggctttctcccggatcagtggaaatgtctgcttggtaaacmtctttctttgcctccaggacagaaagcctaagagaggctgagctacagaggccttctactttttgctgctatgtattattccattcttaccaaacagatc

SEQ ID NO: 32541 - DNA, 201 bp, Homo sapiens
cagaccctgatacacaccatgcttgctgtggagctgaacagctgtcaatggaagaaccggattgtggcctgccaggctttctcccggatcagtggaaatgyctgcttggtaaacctctttctttgcctccaggacagaaagcctaagagaggctgagctacagaggccttctactttttgctgctatgtattattccattc

SEQ ID NO: 32542 - DNA, 201 bp, Homo sapiens
gtgacagagggagactccatctcaaaaaaaaaaaaaaaaaagaaacgtttatagtaatttgatattgcctcaatatcaacagactttatcagtcaatgacrtatttcccccccgccaaaattggttcttcatcaaagatcattcgagaagcactgacttagactacccaaaaacccatctaaatgagtgtctgtgctgctt

SEQ ID NO: 32543 - DNA, 201 bp, Homo sapiens
tctagtatctctaaaagtgattgtgaatatccatacaagtcttccatttcctcagaccctgatacacaccatgcttgctgtggagctgaacagctgtcaakggaagaaccggattgtggcctgccaggctttctcccggatcagtggaaatgtctgcttggtaaacctctttctttgcctccaggacagaaagcctaagag

SEQ ID NO: 32544 - DNA, 201 bp, Homo sapiens
cacggtggctcacacctgtaatgccagcactttgggaggccaaggcaggtggatcagagctcaggagtttcagaccagcctggccaacatagtgaaatccyatctgtactaaaatacaaaaattagccaggtgtggtggctggcacctgtaatcctagctacttggaaggctgaggcacaagaattgcttgaacctgggag

SEQ ID NO: 32545 - DNA, 201 bp, Homo sapiens
gccatttcagaatgtaacttcaaggttctagtatctctaaaagtgattgtgaatatccatacaagtcttccatttcctcagaccctgatacacaccatgcwtgctgtggagctgaacagctgtcaatggaagaaccggattgtggcctgccaggctttctcccggatcagtggaaatgtctgcttggtaaacctctttctt

SEQ ID NO: 32546 - DNA, 201 bp, Homo sapiens
ggagggtgttcaaaagtatgacgcaattctgatgaccacatgcaaaatatacaaacacctaattaaaaataccaaatcattaaaaactagaacaaatggcrtataccataactgctggagcagaaaaatggaatactcagcgtggctagaggagtaaggccaagtttcacagagggtggataagactgcacaggaggccca

SEQ ID NO: 32547 - DNA, 201 bp, Homo sapiens
atgcagctggggccggggcagtggcttatgcctgtaatcccaacacttcgggaggccgaggcaggtggatcacttgaggtcaggagttcgagaccagactrgccaacatgggtgaaacctcatctctactaaaaataaaaaaattagacaggtgcagtggtaccacactgagtagtcccagctactcgggaggctgaggca

SEQ ID NO: 32548 - DNA, 201 bp, Homo sapiens
ataatcatggcacacgtgagggcaatggagaagagaacttgactgtgaaaagaggtgcaagttgacattttcctttattcagtcattcagtgtaactgaawgccctgcattacctaattactgaacagctatgtattagggattcaagtaaagaagacaatcgagctctgtacccagtaaaacttatctcatgagcataag

SEQ ID NO: 32549 - DNA, 201 bp, Homo sapiens
atgcttcttgctcaatgtctgtttaaggtgttcagtaaatgtttgccaccttccctgtccctactgctgtcccttagatgcctgggcttccaggatactcratctaggtcttcgtgttccaagctgtttcttcttcccaagccccatcttgttcctaaactgctgcagctgaaagtcttctcaaagtgtttaacaaaatta

SEQ ID NO: 32550 - DNA, 201 bp, Homo sapiens
aagtgctgggattacaggcgtgagccaccgcgcctggcataaatctcatgttttaagaaagtttacaaatttgtgttgggccgcattccaagttgtcctargccacatgttggacaagcttggtttagctcccagccagcccagacttcgattctagagcacacccctgaatcctgttctcacctcagttaactagcttct

SEQ ID NO: 32551 - DNA, 201 bp, Homo sapiens
gccgcccgcgcctcaacggccctgcactggcctggagcccatccatggccagaccacaccagtcttccccgcccggccggccggggccgaagctaaagcgsttcctgaatgcagcggctgcggtgcactctgggaagggggcgcggcctccagccacctcggggttggccacgcccatcattcttctattcggcccctccc

SEQ ID NO: 32552 - DNA, 201 bp, Homo sapiens
tgctttgttttgtttttttgcttttttgagatggagactcgctctgtcacccaggctggagtacagtggcacgatctcagctcactacaacctccgcctcycaggtccaagcaattctcctacctcagcctccgagtagctgggattacaggcgtgtgacaccatgcccggctaatttttgtatttttagtagagacaggg

SEQ ID NO: 32553 - DNA, 201 bp, Homo sapiens
catgcgggatacaacacttcgcagctgctttcgtatcttcctggacctcaagggcagggccaggaccgacccgctgtgtggctggggcttgcgccggcgcytcggccgcccgcgcctcaacggccctgcactggcctggagcccatccatggccagaccacaccagtcttccccgcccggccggccggggccgaagctaaa

SEQ ID NO: 32554 - DNA, 201 bp, Homo sapiens
aatgcaggtgatagtctacattatagggttgtggtgataattaatgagatgacatgtttagcgcctgtcataaaggtgttcagtaaatggtacctattggyaccttcaaatatattgtcttggccagatgaggtggctcacatctgtaatcccaacactttgggaggctgaggcagatggatcacctgaggtcaggagttc

SEQ ID NO: 32555 - DNA, 201 bp, Homo sapiens
acttgggattcttacctgattccaagtcctatattttctacccccatacttttttaaagggcagggtagaataatctaagaagcccttcttatctttcagrgaaatgtaccagacaatgaagatactcaacttaggaaatgaaggaaaccaagaaatgcttcaggagatcaagaacagggtaaataagtgcaagctctgtt

SEQ ID NO: 32556 - DNA, 201 bp, Homo sapiens
ggaggccaaggcgggtggatcacctgaggtcaggagttctagaccagcctggccaacatggtgaaaccccatctctactaaaaatacaaaaactagctgggcatgatggcacgcgcctgtagtcccagcaactcaggaggctgaggcaggagaatcgcttgaacctgggaggtggaggttgcagtgagccgagacgagatc

SEQ ID NO: 32557 - DNA, 201 bp, Homo sapiens
ccccctcacccaccagccgagctatcccatcctgaagcatatggacttctgtttctgttgtcaactgggcccccacgtttacaggttctccagcctcccascgaattggaagcccgtaaacacttagtgccctctccctatcagtcaaaacagggggcagagaatcgtgaatgaagtctttggctcgctggtcggccacag

SEQ ID NO: 32558 - DNA, 201 bp, Homo sapiens
tagctcccagccagcccagacttcgattctagagcacacccctgaatcctgttctcacctcagttaactagcttctcattacctgggtgctgatgggctttaggatcaactcccataaatggagttataattccattattagggaaaaatctgtttgaagtgttcaagagaagccatatggccccagatctgtagactgag

SEQ ID NO: 32559 - DNA, 201 bp, Homo sapiens
cagcaaatctccaggttccagcacggtctgcagcaccggctcaccgaggtcgtcctgactgaagttggggctggatgtcagagccagttcctcggttgggrctcggggtcggtatacacgccagagtttcctaccttccagctgcagcacgaaggcctcgatgtcgtcgtagtggggggcaaagccctgcgagttaggggg

SEQ ID NO: 32560 - DNA, 201 bp, Homo sapiens
tctttggtagagatggggtttcaccatgttggccagagtggtctcaaactcctgacctcaggtgatctgcccgccttggccaccgcgccagcccttttttytttttctgagatggaatttcactctgttgcccaggccggagtgccatggcacttgatttgggctcactgcaacctctacctcccaggttcaagcgattct

SEQ ID NO: 32561 - DNA, 201 bp, Homo sapiens
cgcgtcgtccgttgatgtagcgagcggcgtccaaatgctggccgaactgcacctcctcgttgcgcagcatcgaatccaggtcagcggtagagaaaagtccstggtagtaggtgtggtcctgccgccgcaccagcaccgcctcgcgctcccataggcgccggtagaagtgatctggcggcatgggcgcgatgagccactcaa

SEQ ID NO: 32562 - DNA, 201 bp, Homo sapiens
cgactggacggccgctaagtgttgcgcggtgcacagcagggccgaggtctccaccacccggaccggcgcggcgggcacctccaccaggcgcgcgggcggcrcggaagcgggcaccaggcgcgccgacggggtctgcagggagcgcgcggcgggcgaggcctccagcagctctgcgggccccaggtggccgtatggctctcg

SEQ ID NO: 32563 - DNA, 201 bp, Homo sapiens
atggatgggtattacttcagtaatttgtggaaactcattattacactgcagactcttcagaggcagagaccatttttttttttttttttttttttttttttggagacgtagtttcgctcttgttgccttggctggagtgcaacggtgggatctcagcttactgcaacctctgcttcctggtttcaagtaattctcctgcct

SEQ ID NO: 32564 - DNA, 201 bp, Homo sapiens
acactcagctaatttttaacttttttagagatagggtctcactatgttgcccagactggtctcgaactcctggccacaaggggtcctcccaccttagcctsccaaacaaagtgctgggattataggcatgagccactgtaccctgccaagagtcattactttgtgtgctccctttagatcggcagtcctcaacctttttgg

SEQ ID NO: 32565 - DNA, 201 bp, Homo sapiens
cccggccataggttctgccttaggaaggaaatcaccatccttggctcccaggcctctaatgaggtgactagctatgacatttcctttttcttttttttttyccccacagacactatagtgatttatcactgtgatatttctaagcaatggtcaccttcaagggatgccccagagtatggcagtcatggatcctaggggctt

SEQ ID NO: 32566 - DNA, 201 bp, Homo sapiens
acccggccataggttctgccttaggaaggaaatcaccatccttggctcccaggcctctaatgaggtgactagctatgacatttcctttttcttttttttttcccccacagacactatagtgatttatcactgtgatatttctaagcaatggtcaccttcaagggatgccccagagtatggcagtcatggatcctaggggct

SEQ ID NO: 32567 - DNA, 201 bp, Homo sapiens
gcagcatcgaatccaggtcagcggtagagaaaagtccctggtagtaggtgtggtcctgccgccgcaccagcaccgcctcgcgctcccataggcgccggtaraagtgatctggcggcatgggcgcgatgagccactcaaagaggcgggccgctcgccgccggctgctggggatgcggttcagctcggccaagacgcgccgca

SEQ ID NO: 32568 - DNA, 201 bp, Homo sapiens
ttaactccttgagcagagggatataggagaaatggggttaattcagctacttctcatctcttcaggagggatttcaaatcgcctgagagaagtcggggagygtcacatggcaaagtgtgagctggcctgtcagaggtggttccacagctcctagttgcacacaccctaccccagaaaggagggaggcctcagcagagtggc

SEQ ID NO: 32569 - DNA, 201 bp, Homo sapiens
gcgccggcgcttcggccgcccgcgcctcaacggccctgcactggcctggagcccatccatggccagaccacaccagtcttccccgcccggccggccggggscgaagctaaagcggttcctgaatgcagcggctgcggtgcactctgggaagggggcgcggcctccagccacctcggggttggccacgcccatcattcttct

SEQ ID NO: 32570 - DNA, 201 bp, Homo sapiens
tcggccgcccgcgcctcaacggccctgcactggcctggagcccatccatggccagaccacaccagtcttccccgcccggccggccggggccgaagctaaarcggttcctgaatgcagcggctgcggtgcactctgggaagggggcgcggcctccagccacctcggggttggccacgcccatcattcttctattcggcccct

SEQ ID NO: 32571 - DNA, 201 bp, Homo sapiens
ctaatttttttgtgtttttagtaaagatggggtttcaccgtgttagccaggatggtctcgatgtcctgacttcgtgatccgcccgcctcggcctcccaaartgctgggattacaggcgtgagccaccgcgcctggcataaatctcatgttttaagaaagtttacaaatttgtgttgggccgcattccaagttgtcctaggc

SEQ ID NO: 32572 - DNA, 201 bp, Homo sapiens
atagttgatgagctaaaaaaaaaaaaaaaaggtccgtgcataattctcatggtttttttgtttgtttgtttgtttgttttgagacggagtctcgctctgtracccaagctggagtgcagtggcgccatctcggctcactgcaagctccgcctcccaggttcacgccattctcctgcctcagcctcctgtgtagctgggact

SEQ ID NO: 32573 - DNA, 201 bp, Homo sapiens
acagccacaggatttccacacaacctggctttgtttttgagataaagtctcgctctgtcgcccaggctggagtgcggtggcgtgatctcggctcactgcarcctccgcctcctgggttcaagtgattctcctgcctctgcctcacgagtagctgggactacaggtgcgcgccaccacacccagctaatttttgtattttta

SEQ ID NO: 32574 - DNA, 201 bp, Homo sapiens
gaggctgaggcaagaggactgcctgggtccaggaagtccaaagctgtcatgagccatcatcatgccactgcattccagcctgggcaacagagaaagacccyatctcaaaaaaaaaaaaaaaaaaaaaagagagagagactgcataggagccgcagagtgggtaagtgcctataatcccagctactcaggctgaggcaggag

SEQ ID NO: 32575 - DNA, 201 bp, Homo sapiens
agcctgggcaacaagagcaaaactccgtctcaaaaaaaaaaaggatgggttttaagttattcatatattcaactaacatttatcaaatgcctattgggacracaagttttagagtcaaaaagaccagggtttgaattccagctctggcatgcaatagctatgtgagcccgtgtaaggtatttaaactctgtgagcccattt

SEQ ID NO: 32576 - DNA, 201 bp, Homo sapiens
ctagacccctcacatgtgcagttcacagtaaggttcatgctacgtgactctaatgccactgctgatctgacaggaggcagagctcactggtaatgcttgcycacccaccactcacatcctgttgtggtggcccggttcctaacaggccatgaactggtacaggcccatggcctgggggttagggaccccagctttagatga

SEQ ID NO: 32577 - DNA, 201 bp, Homo sapiens
cgaggtattatagaagtagtgccccaaactcttcaaccttaaatacctttgcctatgcaagtagaaatgatcccctgaaactctctaatggggtgaagtgyaggagaggtaatgatcttagcttttcagaagttccttgtctgaaaagagaaagataattttcttcaatttttagtgaaagatcctgagtctaggtatatg

SEQ ID NO: 32578 - DNA, 201 bp, Homo sapiens
ctgatttccaagagtgaactaaaaatcagtggaaatccatttatttattcatttattggacaaatataaattatgttcttgctactttccaggcactctgyaaagtgctgggaatacaatgtaaaagcaacagacacagatatgtacctttaaggagcttacagcctgtccaccaccaggtggatggacattaaataacca

SEQ ID NO: 32579 - DNA, 201 bp, Homo sapiens
ggttttaccatgttggccaggctggtcttgaactcctgaccttaggtgatccgcccaccttggcctcccaaaatgtgaggactacaggtgttagccaccgygcccagccaatatgattcttctcaatatggtttaaataagaaattgtatttctagactgagtggggcacaaggaagtgagatatcaggtggggtagcagc

SEQ ID NO: 32580 - DNA, 201 bp, Homo sapiens
agaggtaatgatcttagcttttcagaagttccttgtctgaaaagagaaagataattttcttcaatttttagtgaaagatcctgagtctaggtatatgtcaracttaagttaaagaaagggctgacaagacagtccctgccaacagaattaaggataagttccaagtaggtatccagtgctggatgcatcttgctttccttg

SEQ ID NO: 32581 - DNA, 201 bp, Homo sapiens
actaaaaataaaaaaattagacaggtgcagtggtaccacactgagtagtcccagctactcgggaggctgaggcatgaaaatcacttcagcctgggaggtgraggttgcagtgagctgagatcacgccactacactccagcctaggtgacagagcaagactctgtctcaaacaaataaaataaaatgcagctgggctgggca

SEQ ID NO: 32582 - DNA, 201 bp, Homo sapiens
ctgagtagtcccagctactcgggaggctgaggcatgaaaatcacttcagcctgggaggtgaaggttgcagtgagctgagatcacgccactacactccagcytaggtgacagagcaagactctgtctcaaacaaataaaataaaatgcagctgggctgggcatggtcgctcacgcctgtaatcccagcactttgggaggctg

SEQ ID NO: 32583 - DNA, 201 bp, Homo sapiens
gtaatcccagcactttgggaggctgaggtgggagtatcccttgagtccaggatttcaagaccagcctgggcaatatagtgagaccctgtctctacaaaaaragaaataaaattagtcaggcatggtggtatgtgcctgtaatcctagctactcaagaggctgaggtgggaggatcacttgagcctggcaggttggggctgc

SEQ ID NO: 32584 - DNA, 201 bp, Homo sapiens
gtggctggggcttgcgccggcgcttcggccgcccgcgcctcaacggccctgcactggcctggagcccatccatggccagaccacaccagtcttccccgccyggccggccggggccgaagctaaagcggttcctgaatgcagcggctgcggtgcactctgggaagggggcgcggcctccagccacctcggggttggccacgc

SEQ ID NO: 32585 - DNA, 201 bp, Homo sapiens
agcctgggcaatatagtgagaccctgtctctacaaaaaaagaaataaaattagtcaggcatggtggtatgtgcctgtaatcctagctactcaagaggctgrggtgggaggatcacttgagcctggcaggttggggctgcagcgagctgagatcacaccactgtactccagcctgagcgacagagcaagaccctgcctcaaa

SEQ ID NO: 32586 - DNA, 201 bp, Homo sapiens
ctgagatcacaccactgcactccagcccaggtgacagaacaagactccgtctcaaaaaatatataaaataaataaatatatatatatatatatatatatawatatatatatatatatatatatatatataggctcatggggcaaattggttgcttttaatcactaaaactaatggtgtagttcactgtagcctagctggaa

SEQ ID NO: 32587 - DNA, 201 bp, Homo sapiens
aagactccctagtgagctctacaatgatacctaccttgcctaattcaaccaaggttgaaagataacaagataatgtaaaaacactatattataaagcactmcctaaatataattgttcttacaaatataaaggctcagctgggggcggtggcacacgtctgtaatcccagcactttgggaggctgaggcaggtggatcaca

SEQ ID NO: 32588 - DNA, 201 bp, Homo sapiens
gtcttatgaaccttactgtttagttgaaccaaaaaagactccctagtgagctctacaatgatacctaccttgcctaattcaaccaaggttgaaagataacragataatgtaaaaacactatattataaagcactacctaaatataattgttcttacaaatataaaggctcagctgggggcggtggcacacgtctgtaatcc

SEQ ID NO: 32589 - DNA, 201 bp, Homo sapiens; identical to SEQ ID NO: 3152

SEQ ID NO: 32590 - DNA, 201 bp, Homo sapiens; identical to SEQ ID NO: 25214

SEQ ID NO: 32591 - DNA, 201 bp, Homo sapiens; identical to SEQ ID NO: 25215

SEQ ID NO: 32592 - DNA, 201 bp, Homo sapiens; identical to SEQ ID NO: 25615

SEQ ID NO: 32593 - DNA, 201 bp, Homo sapiens; identical to SEQ ID NO: 25216

SEQ ID NO: 32594 - DNA, 201 bp, Homo sapiens; identical to SEQ ID NO: 25220

SEQ ID NO: 32595 - DNA, 201 bp, Homo sapiens; identical to SEQ ID NO: 25222

SEQ ID NO: 32596 - DNA, 201 bp, Homo sapiens; identical to SEQ ID NO: 25227

SEQ ID NO: 32597 - DNA, 201 bp, Homo sapiens; identical to SEQ ID NO: 25547

SEQ ID NO: 32598 - DNA, 201 bp, Homo sapiens; identical to SEQ ID NO: 25549

SEQ ID NO: 32599 - DNA, 201 bp, Homo sapiens; identical to SEQ ID NO: 25494

SEQ ID NO: 32600 - DNA, 201 bp, Homo sapiens; identical to SEQ ID NO: 25551

SEQ ID NO: 32601 - DNA, 201 bp, Homo sapiens; identical to SEQ ID NO: 25497

SEQ ID NO: 32602 - DNA, 201 bp, Homo sapiens; identical to SEQ ID NO: 25555

SEQ ID NO: 32603 - DNA, 201 bp, Homo sapiens; identical to SEQ ID NO: 25558

SEQ ID NO: 32604 - DNA, 201 bp, Homo sapiens; identical to SEQ ID NO: 25500

SEQ ID NO: 32605 - DNA, 201 bp, Homo sapiens; identical to SEQ ID NO: 25561

SEQ ID NO: 32606 - DNA, 201 bp, Homo sapiens; identical to SEQ ID NO: 3154

SEQ ID NO: 32607 - DNA, 201 bp, Homo sapiens; identical to SEQ ID NO: 25502

SEQ ID NO: 32608 - DNA, 201 bp, Homo sapiens; identical to SEQ ID NO: 5437

SEQ ID NO: 32609 - DNA, 201 bp, Homo sapiens; identical to SEQ ID NO: 3155

SEQ ID NO: 32610 - DNA, 201 bp, Homo sapiens; identical to SEQ ID NO: 25299

SEQ ID NO: 32611 - DNA, 201 bp, Homo sapiens; identical to SEQ ID NO: 25301

SEQ ID NO: 32612 - DNA, 201 bp, Homo sapiens; identical to SEQ ID NO: 3153

SEQ ID NO: 32613 - DNA, 201 bp, Homo sapiens; identical to SEQ ID NO: 25429

SEQ ID NO: 32614 - DNA, 201 bp, Homo sapiens; identical to SEQ ID NO: 25430

SEQ ID NO: 32615 - DNA, 201 bp, Homo sapiens; identical to SEQ ID NO: 25432

SEQ ID NO: 32616 - DNA, 201 bp, Homo sapiens; identical to SEQ ID NO: 25435

SEQ ID NO: 32617 - DNA, 201 bp, Homo sapiens; identical to SEQ ID NO: 25436

SEQ ID NO: 32618 - DNA, 201 bp, Homo sapiens; identical to SEQ ID NO: 25353

SEQ ID NO: 32619 - DNA, 201 bp, Homo sapiens; identical to SEQ ID NO: 25311

SEQ ID NO: 32620 - DNA, 201 bp, Homo sapiens; identical to SEQ ID NO: 25312

SEQ ID NO: 32621 - DNA, 201 bp, Homo sapiens; identical to SEQ ID NO: 25314

SEQ ID NO: 32622 - DNA, 201 bp, Homo sapiens; identical to SEQ ID NO: 25317

SEQ ID NO: 32623 - DNA, 201 bp, Homo sapiens; identical to SEQ ID NO: 25668

SEQ ID NO: 32624 - DNA, 201 bp, Homo sapiens; identical to SEQ ID NO: 25517

SEQ ID NO: 32625 - DNA, 201 bp, Homo sapiens; identical to SEQ ID NO: 25673

SEQ ID NO: 32626 - DNA, 201 bp, Homo sapiens; identical to SEQ ID NO: 25521

SEQ ID NO: 32627 - DNA, 201 bp, Homo sapiens; identical to SEQ ID NO: 25677

SEQ ID NO: 32628 - DNA, 201 bp, Homo sapiens; identical to SEQ ID NO: 25524

SEQ ID NO: 32629 - DNA, 201 bp, Homo sapiens; identical to SEQ ID NO: 25679

SEQ ID NO: 32630 - DNA, 201 bp, Homo sapiens; identical to SEQ ID NO: 25526

SEQ ID NO: 32631 - DNA, 201 bp, Homo sapiens; identical to SEQ ID NO: 5434

SEQ ID NO: 32632 - DNA, 201 bp, Homo sapiens; identical to SEQ ID NO: 5435

SEQ ID NO: 32633 - DNA, 201 bp, Homo sapiens; identical to SEQ ID NO: 5436

SEQ ID NO: 32634 - DNA, 201 bp, Homo sapiens; identical to SEQ ID NO: 25533

SEQ ID NO: 32635 - DNA, 201 bp, Homo sapiens; identical to SEQ ID NO: 25536

SEQ ID NO: 32636 - DNA, 201 bp, Homo sapiens; identical to SEQ ID NO: 25357

SEQ ID NO: 32637 - DNA, 201 bp, Homo sapiens; identical to SEQ ID NO: 25538

SEQ ID NO: 32638 - DNA, 201 bp, Homo sapiens; identical to SEQ ID NO: 25402

SEQ ID NO: 32639 - DNA, 201 bp, Homo sapiens; identical to SEQ ID NO: 25700

SEQ ID NO: 32640 - DNA, 201 bp, Homo sapiens
ctaagaaaccctgctttagtcattgactctaagatctcctgccacctccacccaccttgagcatacaactctataaaacactggcctgttttgaatttctkcttctctatgtgcccctgccctgccccagaaactcaagaaatgttcatatatagtcaactacaaaagtgaaatggggagttgggcctggaaaactgacaa

SEQ ID NO: 32641 - DNA, 201 bp, Homo sapiens
gaactggtaccattccttctgaaactattccaatcaatagaaaaagagggaatcctccctaactcatttatgaggccagtatcatcctgataccaaagcckggcagagacacaaccaaaaaagagaattttagaccaatatccttgatgaatattgatgcaaaaatcctcaataaaatactggcaaattgaatccagcagc

SEQ ID NO: 32642 - DNA, 201 bp, Homo sapiens
ttttaaatttatcccatcattatgctgcttattcttcctgactccacaaagcaaataataatacaaaaataaataagatttgagttatggagagcacttawtggtgctgtgacttgagatgaaaccactaaataattgtgtctgtctgataaggaatacacagatgggcccgttatgcaactgcaaatggagatcatatat

SEQ ID NO: 32643 - DNA, 201 bp, Homo sapiens
aatatccagaataattacactgaaactaatgaaaaaaatgacatggagaaataaggaataacatttagcagagcagattcagaaaagaaagtttaagacamaccctttaaatttgacttctgcttcctggaaccggctgttcatgagcttcccagacctctcatcttgcttagctttactgcccacagtcccttcactgat

SEQ ID NO: 32644 - DNA, 201 bp, Homo sapiens
ttctagctcaccactcacttgactcacgtccttcactttcaatgtcatgcctggccttgctggcatttgagtttgtgatttctggtctatacagtttctgyagctttccaaggaaagatcttaagtgtttgtttttctttctgatctttttccctgagagcctttaaatacccaacattatcatttcacttaatttttgaa

SEQ ID NO: 32645 - DNA, 201 bp, Homo sapiens
gtcagaaaaaaacaagagatagagataatatctgtaggaagtggccaccatctctccgactggggaaacaaagggaagaggttggggttgtcagaacctaraaagttggagaatttgctccatggaggtaggacctagtcctctgagaagaagatgccagctagccccatctctactaaaaatacaaaaaattagctgggc

SEQ ID NO: 32646 - DNA, 201 bp, Homo sapiens
ttctctgtctccctctaccagtttccaggctttctaagagcaacgccatgtctgttttatagtctcctgtactctcattgcctaggacagtgctcacacgyagagggtgcagaataaatcttgaataagttaatgagtaaacagaaaaacatttttctcagtaagctttaagaaaaatagtggttggtggatttaaaaggg

SEQ ID NO: 32647 - DNA, 201 bp, Homo sapiens
cttttctttatgctagaaacattcaaattattctcttctagttattttgaaatatacaatggattattgtaacctacatcactctactgatttatcaaacmctagttcttatttcttctatcattgattaatgggtataaatatacctctcttcatcctcccttacccttcccagcctccggtaacgactaatctactctc

SEQ ID NO: 32648 - DNA, 201 bp, Homo sapiens
ttgatgggtacttagttgattccatattttggctgttgtgaatagtgctgcaataaacacgggagtgcagatatccctttgatatactgatttccgttatyttctatatatacccagtagtagtagtggaattgctagatcatatgatagttctatttttagttttttgagggaccttcattccattttttgtagtggcta

SEQ ID NO: 32649 - DNA, 201 bp, Homo sapiens
aaaccttacaggtgctgcaactggaagtgcacagcattgagcgccactgcaatcacagtgactttggccttgttactagcctatgtgattggtaagtcctytttgtcatgcctcagttttgttcttaatcaaagtcttgttttgcttgtggtgggaatggggggtttttctctcgattctggcatgtacacatttggacct

SEQ ID NO: 32650 - DNA, 201 bp, Homo sapiens
acatttactggtttagctgaggaaaaaattacttccccataagtggttggttttcagattaaaagcatgtgctatttgagactcaaagggactaagaacasactgtctttgggatagatgagcaaaattaaatctggcaatggagagttctcaggacattggtctgctagatacattgctttttaaaaagctaagactttc

SEQ ID NO: 32651 - DNA, 201 bp, Homo sapiens
atctatatgtctttaaaatgcctttccattgctatggcttttttcaaaatacagagcttagtgcaaatgtggttcactagactactaatgctcatttgctytttcccaacaggcatcacagttgataggcatggatttatttactttgtggatgggactatgattcgcaaaattgatgagaatgctgtgatcacaactgta

SEQ ID NO: 32652 - DNA, 201 bp, Homo sapiens
aactgatgtactatgttctctagtagttctcttccttatctataaaattgacttcaggtttatacttgagcatcctcttacatgacacatacaatttaacstgtttagagatccacagatgtgtagctctcagcccaaagtttgatgacattttgggaggacatatagtttgcccctaatggatgcccttctagatccttt

SEQ ID NO: 32653 - DNA, 201 bp, Homo sapiens
acatgttttacaaatagattttttcaaacagctttgtttttgagatttttttcaggtcgataaaggcagatctagataatttgttcctgtgtaatattccrttgtatgaataaaccgcagattatctatttcctctgctgagagacattcaaattatcttttttttaaccacacaaacagggcttcaatgaacttccttat

SEQ ID NO: 32654 - DNA, 201 bp, Homo sapiens
catgttgtctcaaatgacaggatttcctttttcatggcttaattgtattctattgtgtatatatgccacattttctttatcaattcatctgttagtgtacrcttaggttgatttcatatcttgactattgtgaatagtgctgcaatgaacatgggagtgtagatatctctttgccatactgattttatttcccttggatat

SEQ ID NO: 32655 - DNA, 201 bp, Homo sapiens
gaaacattaaaaagcaagaaaatatgatacctcaaaagaacacaataattatctatcaacagattctaatgaaaaaataatttatgaaatcctgggaaaawaatgatattaaattcagtgagacaaaaaattaaattaaattaaaaacccaggaatacagctaaacaaggaggtgaaagatctctacaatgagaattaaaa

SEQ ID NO: 32656 - DNA, 201 bp, Homo sapiens
gatgagtagattgcaaaaattttctcccgttctgtaggttgcctgttcactctgatggtagtttcttttgctgtgcagaagctcttgagtttaattagatyccatttgtcaattttggctttcgttgccattgcttttggtgttttagacatgaagtccttgctcatgcctatgtcctgaatggtaatgcctaggttttct

SEQ ID NO: 32657 - DNA, 201 bp, Homo sapiens
agtgcttggaagaaatgtctatttttaagcaacttttcattctctatcctgttaacatagtgatttatttgtgactcagaaatggaaggacaagccacctstctgtagtgatcacctgtcttatggaatcttaattgcaatgctaattcagtcttggagttagtgagatagtcaactaaatgataagtacaagatattgat

SEQ ID NO: 32658 - DNA, 201 bp, Homo sapiens
cagttactcaggaggctgagacaggaggatagcctaagctcaggagttcgaggctgcagtgagctatgactacaccactgcactccagcctgggcaacacmgtgagaccctggctctaaaaaaatgaaataaaatagaaacccttcgatgactccctgttgccaacatacttgaatccaaactccttagtgtggcttagaa

SEQ ID NO: 32659 - DNA, 201 bp, Homo sapiens
ataatgttgtaactccagctctggctcaacatgaccttgcatcttggcttccccagttgtgtgtctatgtctagatttctgagtgagaaagagagaatacrattgcctctaagtttggttatccaattctggactatggctgcaggcagtggggagtgggcatagggggatcatggatgtcctgtctaggtctctgtgctg

SEQ ID NO: 32660 - DNA, 201 bp, Homo sapiens
aactgagccaaaaataatttactcaatgataaccaatttactccaaggtgttcactggattatttgacaactaagtctactcagagtgacttctttttagtttttttttttttttcagttttacagcttcacttcttttaaagttcataccatctgactattgttttctccttccttctacctcattaaggtggtttgtca

SEQ ID NO: 32661 - DNA, 201 bp, Homo sapiens
aggaaaaacacagaaagcaggactgtggtaatatcaaaggcagaccctcaccgtacatacctcactactcagctaggatctaactttggaaaaaaatgaaytatacaggctgccttagatataagaagcataatcaaaatagtttatataaatgggagggaaggaactatattttagtggctgtggggaatcaggaaaaac

SEQ ID NO: 32662 - DNA, 201 bp, Homo sapiens
ggggaaaagcagcagcttttgagcactgggcgggtacaaggttacgatgggtattttgttttgtctgttgagcagtatttagaactttctgacagtgccartaatattcactttatgagacagagcgaaataggcaggaggtaacaaaaatatctctgcctttgcgtcaccaaagactgcctgtttttaaaacataaaatg

SEQ ID NO: 32663 - DNA, 201 bp, Homo sapiens
atggagagggccaggttaactttggctaaagcgaggcttagaaaagagataatttgaagtaagccttgaaaaactgttacaactttcaagaggtagatatggggaagtatggctttctatgcaaagaatcactggagctgcaaaatgggaacataggacaatgttcagacaatgtttagcatagatgtggctggagtgtag

SEQ ID NO: 32664 - DNA, 201 bp, Homo sapiens
aattcacattttttaacaagacagctctctagtatccctcgaattttaagactagattttggcatacctatgaagtgctacactatgtatttatttaatayagccaaccattagaactattatactgagtgacaaagatggccgaataggaacatctccagtctacagctcccagcgtgagcgacgcagaagacggctgat

SEQ ID NO: 32665 - DNA, 201 bp, Homo sapiens
tctagttgaattaccataaccctaaactatcctcataattatctattgttgtaatctaacatgtatttagagaaggaaaatccctacatgtgactcatagyttaagataattctttttattgtaataacatttacttgaagccaatttggtatttcccatagtagagagatggtcatcatgaatgccagttattgtattaa

SEQ ID NO: 32666 - DNA, 201 bp, Homo sapiens
tgcttcttcctaaatctagattaaaaactgtaccatagtatgagaattgattctagtgttttcttcttaaataactcttcaccaaatggaattgtgtattkcttttgaggatctacataatatcagaaggaaaagactgactccctggctaagtgtcacatagatgattgtcccctgggaaacaaagcaactggtttttgg

SEQ ID NO: 32667 - DNA, 201 bp, Homo sapiens
gatcgtgccactgcactccagcctgagtgacagagtgaaaccctgtctcaaacaaacaaaacaaaacacagaaatggcatttctagaaaaacactgatacrgatagctataactttccttctcaagttttgataaatggcttctttaggctgaacacctgatgatcaacccctagattcagaaagtagagtcatttatttt

SEQ ID NO: 32668 - DNA, 201 bp, Homo sapiens
actgtatccacacaattacttccttttctcttttcttgctttaactttctctttagcccttgtcaatatctaacatgctttgacttatttttcttattaaktatctgccttctccaatagaatataaactccatagggcaaggattttgcctgaattcttatcaactaaaacgaagtttgacacatagcaggaacaaaatg

SEQ ID NO: 32669 - DNA, 201 bp, Homo sapiens
gaacctggtgggagatgactgaattatgggggcaggtctttcctgtgctgttctcatgatagtgcatgggtctcatgagatctgatggttttaaaaagggragttgccctgcacaagctctctttttgcctactgccatccatgtaagatgtgacttgctcctccttgccttctgctatgattataaggccttctcagcca

SEQ ID NO: 32670 - DNA, 201 bp, Homo sapiens
gtccattttcaaggtgagtctgtttccaaaacccctgcctcccctcaaaatatgcctaaatactgctaggggatagtaatcttacaattttttactgggtrgggacagggagggttgttgttcttcacttgtttttgatgcactggagagaaactgactctctagccaccctgaccttctttaaatctctcaatagctacc

SEQ ID NO: 32671 - DNA, 201 bp, Homo sapiens
cccaggagtacctcatagtcagccgcttttttttttttttttttttttttttacgtcaagcatatgtttaaaagttatctaagctggacagatctaagcaraaaataggggatgtttaaaatgtctcctcttcatcccatctttcagtgactccctgcctaactctgagccccttgcggcagccctcagtctatctctcct

SEQ ID NO: 32672 - DNA, 201 bp, Homo sapiens
ggaaccagccttcttccatctagtgattcctcaatgccttaggccttggagtcctctactggatggtctgcatgcagccagcctacagtggaaggtagtamtccatacagaaactcagtagatagttccttaaggatcaggcctagaagtcgcatccattacttctgcccacacctaacttggaaaggaggctgagaaacg

SEQ ID NO: 32673 - DNA, 201 bp, Homo sapiens
attttctttaacagaaaaggcaccttcttttccccttcttaaactcttgcctaacatctgtcattgtctttccctctctcccttgccaaccctttcatgtstacagaatgtccttcatcatcctgagtgatactgatacagatgatattgaaactcaacttcttcatggattacttgcttttctttgtgcacttccatcag

SEQ ID NO: 32674 - DNA, 201 bp, Homo sapiens
aaacaaacaaacaaacaaacaaaactagggtttagaaatcaacttacaaatgtatgcctgactattccatttcagaaagtgatttgttttgttttgttttrttttaaataagactttcactcctatagaaatgatggtcaaaatatttaacatcctgtaacgcacaggtaccaacatatgagaacacacaccagttttggc

SEQ ID NO: 32675 - DNA, 201 bp, Homo sapiens
cctatcaagtggtgagaagacaaacaaaatgtgatatatccatgtcatgaaatagtgttcagccataaaaagaaatgaagttctgatacatactacaatgkggatgaacctcaaaaacattatgctcagtgaaagaatctagaaacaaaggacccttctgattccatttatatgagatgtctagaagaggcaaatccataa

SEQ ID NO: 32676 - DNA, 201 bp, Homo sapiens
agacataacatcaattcgatatctttgggtaatggggagaaatgtaccatcaaacatacacattgactataagatacatcttcacttcagaaaagttaaartatggaggcagtgggaaatgcatttcttaaaattgaggtatttatggcaatttacactaacctcagtgggtctctggaaacccagatttactgacacaaa

SEQ ID NO: 32677 - DNA, 201 bp, Homo sapiens
cttccacagggccttcttcagtgcactggccagcagggactgaacctcttaatgactaaaatcaagaacaccttttttttttctgaaacacacacacacamaaaaaaacagttgaggattgcattttctaagtgattgtgttgtaatcagctacccatagcagaagttactggtagatctagcaaacactgacactaccag

SEQ ID NO: 32678 - DNA, 201 bp, Homo sapiens
tttctgctacttgtatgtggaatgcctgtagcaacccactcagccattctgaggcatgtgcaagcctggaagtgtgagagggttaacacatcatgggacawcccttgatctagaagagaaagaatcattcatgactgcctccctcttttgtatttgagcagacaattctcccaagcattttacaagctcttcagagggtgc

SEQ ID NO: 32679 - DNA, 201 bp, Homo sapiens
aaattcaatggtcaattcttagttttcatcttgacctttcagcagcatttgacaccgctgatcattcactgtttcttctttacctggttttcaagatatcrtattctgagcctcctcttatcctactgaccattcttctaactctcttttattggatccttctcatcctcccaactattaaacatcagacagcctgagaat

SEQ ID NO: 32680 - DNA, 201 bp, Homo sapiens
tttggaatatttctagggaatcaattcgactttctagaggccaaccattcaattacaaacataacttgctattgaaaaaccacaaaaaaagccaacctacrgtgattatgcatgagagacaaagttactcaacatgttcttaatgtgtcctgtagtcttcgtttagagatcttccagaattcgtataatccccaggagggg

SEQ ID NO: 32681 - DNA, 201 bp, Homo sapiens
ttctagcttgaataaaccctggctcctctcctcctatctcccatcccatggacagccaccccattttagtctagtcttattttacatgcatgacccagaartaggagaatagaagattgttttcataagccagtgagcatagcatggagcttcctgggaggtagatgtattaacttcttaggtgcaatgatctataccatg

SEQ ID NO: 32682 - DNA, 201 bp, Homo sapiens
gttatttttgctgctcctttccctcctcccagcctccaccctcaaataggccccagtgtgtgttgttcccctctttgtgtccatgagttatcatcatttakctcccacttataagagagaacatgcggtatttggttttctgtttctgcgttagtttgctaaggataataacctccagctccatccatgttcccgcaaaag

SEQ ID NO: 32683 - DNA, 201 bp, Homo sapiens
acaactacaataattagccaggtgtggtggcaggtccctgtaatcccagctactcaggaggctgagtcaggagaatcgcttgaaccggcggggagtggggrtggttcagaggttgcagtgagccgagatcgcgccactgcactccagcctgggcaacagagggagattctgtctctaaataaataaatagaatatactctt

SEQ ID NO: 32684 - DNA, 201 bp, Homo sapiens
tacctctggagaaggaaggaaaaagaggatagggataaggagatgggattggctatatccatatcatttcctttttaagaaatagatatgtgccgggcgcrggcgcggtggctgacgcctgtaatcccagcactttgggaggccgaggcgggcagattacaaggtcaggagttcgagaccagcctggccaacatgatgaaa

SEQ ID NO: 32685 - DNA, 201 bp, Homo sapiens
tatcatagcaaggtacttgtaaagattggttagagatggtatttaatttaaccatatgcaataaaacagatatgatacctcatcaactaatatgttcttcwaattacttttagagaaatagacaccaaaaatatgtgtgtgcatgcatgtatatatgtgtgcatgtgcatgcatgtgtgcacgtgtgttctactgatataa

SEQ ID NO: 32686 - DNA, 201 bp, Homo sapiens
tggccatacctgttcactattaatcacccctcccccccacttttttgtgccttcagaggactgcctagacccaatgtgttccaaccatggcatctgtgtaraaggagaatgtcactgttctactggctggggaggagttaactgtgaaacaccacttcctgtatgtcaagagcagtgctcaggacacggaacttttcttct

SEQ ID NO: 32687 - DNA, 201 bp, Homo sapiens
cttatcagcttaaggagattttgggctgatactgagaagatctctcaaaactgcacagttatgtcaaagttaaacaacttgctcctgaatgacttttgtgyaaacaatgaaattaaagcagaaatttaaaaaaaatttttgaaataaatgaaagcagagacaggacatacccaaatctctaagatgcagcaaaagctatgt

SEQ ID NO: 32688 - DNA, 201 bp, Homo sapiens
ctctggaaacccagatttactgacacaaacatgttgatgagaaatagtttttcttagagcctatttgcatgttataatttttttaaatgctttcatggacyaaaaacattactgtcaatgaagcactaatattttcattcaacaaacgtttgccagcttaatgccagatactaggaaaacaaaaataaaagagttctcatc

SEQ ID NO: 32689 - DNA, 201 bp, Homo sapiens
gttgtgggactcttgttttccatgtagctcggctgtagggaattggtataatctctaagggctagaatatcacaagagaagaatagagtgttgagagacartgaaaatgagaaaagaagtgcttgagatcctaggatataccaccatttttttgtaaggaaacagactttgcaactgaagggataataccagagtgaataa

SEQ ID NO: 32690 - DNA, 201 bp, Homo sapiens
cttgccagccgctcagagtgaataaacctatttcttgtggtggttaatgcccttctcctcctcctggtttgattgagtttccctcattcttttgtaaaatrctccaagttatcatttggctctgcaagtcacatttaaattcagaacgatgggtctccttcatccaggggtctcagctcttacaaatatatccattctatc

SEQ ID NO: 32691 - DNA, 201 bp, Homo sapiens
gtcatagtaagtaacattagtagtggtgacagcaacagcagcagtgttccctatggctgctgccaaaagctgagcacttactatgccaggcactgttctamacactttgtgttccgtcttttaattccaacttcctacaatagccctatgagataggtctgctattatccaatttttatgggcaaagaaacaatgccagag

SEQ ID NO: 32692 - DNA, 201 bp, Homo sapiens
aaatacttggtgaaacaacacacagtacacaaacttttgtttgtaataatgtttactgttattagttgaatcattgcttgattttagtgaaatttttggtrtacaccaaaatttttttcagcccttaaacaaacagcttgagctggcactgcctacacttgccaatataaccttacttttttttcttactgttatttctaa

SEQ ID NO: 32693 - DNA, 201 bp, Homo sapiens
ccgtagacttacagttattatttcagagatgttttctgctcattttcactgtattcttaaagttcccagtctgctaatattttaatatcaggtttctcagrcacttggtttctttctattaaattccattcagtagcgaattctaaaacacttgctaggttcccagcaccatgatagatcttgaggaggtgggggttgagt

SEQ ID NO: 32694 - DNA, 201 bp, Homo sapiens
gacaacagaagttagtacaaagatgtgagaaagaaggaagaatatgatcatattaaagggtgaacatgttattgtgatcaaaagaaacaactactacatamggtgtaatgattttattaaagtatcctttgcatatactatagggcaaatagcttaaataaaaaaagtaaaatgaacatttttattaaaacaacatcccta

SEQ ID NO: 32695 - DNA, 201 bp, Homo sapiens
cagatttgtgtctattgtatagcaatgaaatgtctgagtttagattgaacttgaaaacaaaaatatctttattgttcagccaatcagacttatttagaacrtaagttattaccaactactgtggtgtatccaaataacttctgaaagcagtttagtgtagtggttaaaagtgtgggctccagcatcaggctgtgtgggttc

SEQ ID NO: 32696 - DNA, 201 bp, Homo sapiens
ttaatatttatgattaaatctaaataaacaaagaaggaaatgtctatttgtactcctggtgatattttgtaatcacttaactgatatgggaggaaatagaytgaattttgcaccagcaacagtgctgcatctgacacttttcagatttgcttcaaattcagaaatactagtatagctatttggtaggcagaataatagcca

SEQ ID NO: 32697 - DNA, 201 bp, Homo sapiens
ttggggctgacactttcagaggctgcctagagagacagaacgacgactttggcttcagcttccaggtggccccacactgccatctggtggtcattcaaatrctttaacttttcaaatttctgctctcatttctagtcttgttcaaataagcatacagccatgattgctgttgctgttgttgttgcttttacaattatctct

SEQ ID NO: 32698 - DNA, 201 bp, Homo sapiens
catttactcacagcaagttgacagaagagagtggaaaggaactgagaaatgtgactttcagactagagataatgcaaaagcttttccacaattcctgtacraagcttttccacccctgccccctgccacctgctttcccattcataggaaaatttcttgctggttctattgaattctgccttggtccagggaggcagttct

SEQ ID NO: 32699 - DNA, 201 bp, Homo sapiens
caaagtataccataaagccaagtcttaatattaacttcctgccaatgaattagttcatctaaaagcagtttattaagttgagtttataaaatgactctagrtgagttcacattttgccagaaaattcatgtgtgtgtgtgtttgtgtgttgtgttgtgctaaaaggacacgcttgttagcacagaaattctgactttaaca

SEQ ID NO: 32700 - DNA, 201 bp, Homo sapiens
ttgtgggactcttgttttccatgtagctcggctgtagggaattggtataatctctaagggctagaatatcacaagagaagaatagagtgttgagagacaaygaaaatgagaaaagaagtgcttgagatcctaggatataccaccatttttttgtaaggaaacagactttgcaactgaagggataataccagagtgaataaa

SEQ ID NO: 32701 - DNA, 201 bp, Homo sapiens
cttccacacatgccactctctctgcctagaatgccctcccctataaaggtaaaccctttcttggtaaagaggcttttccttgcctccacagtccaacataratttcctggttacactctctcataatgctcagcattctcccatcataacctttattacaatttgtgtttgtgtgtgtgtgtgtgtgtttgtgtgtgtgtg

SEQ ID NO: 32702 - DNA, 201 bp, Homo sapiens
tccctatatttaattatgtgaaaaaagtaggcatttagtgcattatagtctgcttccatgacaaagtctaggattagttgctactgtatttgctagttctygtgagcttggagagaagctcaactccatggggtgaaacatttgccttctcataagctgattgcaagttccaggattatgttaaagtgggctgctgtgaga

SEQ ID NO: 32703 - DNA, 201 bp, Homo sapiens
ttttactttagaatcgatataattaacccattttaaatggcctgaacagataggaccttctcaacctaaaattatgtaccgcacttcaaagttctgattartgatgccaaatgagcaaactactgaacattattgtaatttattgggaagagtaagattttcagcttgaaaagtatccaactttgaatttttctaacactt

SEQ ID NO: 32704 - DNA, 201 bp, Homo sapiens
gagtaagacttttagtcttcgtgaagtgttcttccagcatacagctttggctttgccactgaagtatgctatcagatttgcttggggacttagacgtgtayttgaagatctttggtttgtagagtttctttgctaagttgggaggcttattgccttagaataacaccatgtaggtaatttagatgtgcattaaggggacta

SEQ ID NO: 32705 - DNA, 201 bp, Homo sapiens
aaaactcatatatttggggtttacagaaatataggcaaacaatttttttttctcttaagtcagccatcagagcaatctgattggctggcttctaatcattwcattttgtgtcattcagaaatcgctttgtgattttgaaagcttttcttaattcagttgcttaaaaataaaattggattgtttcctggacacagcaggaag

SEQ ID NO: 32706 - DNA, 201 bp, Homo sapiens
attaacaaataaaattgtatacatttaagatgtacacagtgatgattttatacatatgcattgtgaagttattaccacaatcaagttaattaactcatccmtcacctcacatagttacttttgtgtgtgtgtgtatgtggcaaaaacacttaagatctattctcactgcaaatttcaagcatactcatattgctttaattt

SEQ ID NO: 32707 - DNA, 201 bp, Homo sapiens
tactaagttgtctctccctaaccttacagtgactaaataaatgaacataagtctccatggctgtcttctaaagtcacttagagtttgtcttgttagcaagyagagagtttaaagcacaagagcaagccacagatgttgacatttgaattcatactttgtggactatctgaaggcatcttctgcagtaaaaactataattga

SEQ ID NO: 32708 - DNA, 201 bp, Homo sapiens
acaaaattatgtgtcctgtaatacataattatgtacaaaattgcatttgaaatctattattaacagttaacagtgaacattcttaaaatagttattactgytggccttaacacaaaaagcaataatggaggtattttagggagttaaaagctgcaaggcattggccactgaataaagccactgcaggtgtgtttcttaatg

SEQ ID NO: 32709 - DNA, 201 bp, Homo sapiens
tcctggaactgatacaggacttcagtaaagtttcaggatacacagatcaatgtacaaaaataaatagcatttctttttttatttttattttattattattrtactttaagttttagggtacatgtgtacaatgtgcaggttagttacatatgtatacatgtgccatgctggtgtgctgcacccattaactcgtcatttagc

SEQ ID NO: 32710 - DNA, 201 bp, Homo sapiens
atattttctcaactactacaccatgctacctcccatacccatggcatttatcatatcaaattaaattaacataccactattcaagttgtttgatgttagcrtagtttgcactagacatgctaaaatatttttctttgttgttagttatttggaactccctcttgtgtgtctaccttttagtagcactttatacctttcaga

SEQ ID NO: 32711 - DNA, 201 bp, Homo sapiens
tgttggtcagactgttctcgaactcctgacctcgtgatccgcccacctcggccacactttacttcaccataccacactgtctgcctttctgctaaaatctrtgatctctgggaaggttggaaatattgggggaaaaaaatgcttttcaatctgaggacatgtattcaatgggaacaaaatatttttatttacaagataaat

SEQ ID NO: 32712 - DNA, 201 bp, Homo sapiens
aggggatgtttaaaatgtctcctcttcatcccatctttcagtgactccctgcctaactctgagccccttgcggcagccctcagtctatctctcctagataraaatccaactttttgtctcctctcttccctaatcagaactgggtgggtataagtggcatactaaagggggatgggacagtggaagaagtattttatcact

SEQ ID NO: 32713 - DNA, 201 bp, Homo sapiens
accaacatggccctcagtgtgctctctaaccacctgatttttccagcataagattcagtgttctatttggcttttgggtttgatcctcaaccagaagttaycaaatgtaatctagaaagaatgcaatttagagtgttagtgctaaagaaggattaaaaggattgtctactacagttgtctttgatctgagatctttatttg

SEQ ID NO: 32714 - DNA, 201 bp, Homo sapiens
tatgaaaatgttgctgagctccatccagttctcttgagcttggctatagcatgattgtttgaaattaatggagtttgtgtttttgtagcaactggctttgstttttatagcccaaacttgtgtttccttttcacaggcatttcctgttcaaacatggatctggttcctctgcgatcttcagtgcagccagtcagaactacc

SEQ ID NO: 32715 - DNA, 201 bp, Homo sapiens
atggttatctctatgttttcaaaatgacatagggccagatttaaaaggattttaaaaattaaaatgatcgtatttcacagatgattatagccttttaattstgggcagacttgacccaaagtcaggcctatacacagactgcactccctgtgtgagaaacctcatatcaggtcccatcatgaaatgccctaggcaataccc

SEQ ID NO: 32716 - DNA, 201 bp, Homo sapiens
cacagatgattatagccttttaattctgggcagacttgacccaaagtcaggcctatacacagactgcactccctgtgtgagaaacctcatatcaggtcccrtcatgaaatgccctaggcaataccctgtgccaagaggcttacagatcaggagccaccaaagtattgtccttcttctggcccaacagtcctctagtgccta

SEQ ID NO: 32717 - DNA, 201 bp, Homo sapiens
tcagccacccactctatggcatttggctattgcaacccaaggtgactaagacatttctctcccagcctggggtccactctcctctgacatgagaagatttkttttaagttaaaaaagcattattctgggaattgtgaaggacactccagatcccagggaggtgaatgctggcaaacagcccctatgatgtcatccagctga

SEQ ID NO: 32718 - DNA, 201 bp, Homo sapiens
gcaaatctccaggcattcaaagcaactgtttgcctggttcagcaccatgagctgctgcaccctttctgggcacagatcatggtgtagtgaggctctctctrctccaagcccaggcagatctccaggcatttggagcaccaactcacctggattggcatcctgacctgccccatccttcctgtgcagagatcttggtgcagg

SEQ ID NO: 32719 - DNA, 201 bp, Homo sapiens
gaaagggaaattaaacaaaccaaaaaaaaaaaaaaaaacagtaaggcctgggcatggtggctcacgcctataatcccagcactttgggaggccaaggggakcggtggggtggggagcagatcgcctgaggtcaagagttcaagaccagcctggccaacataggaaaccgcatctctactaaaaatataaaaattagctgga

SEQ ID NO: 32720 - DNA, 201 bp, Homo sapiens
gcagtggaaatccagcacgtgaaaagccagagctgggttgttcagccaaccagtcctatctccacacctacccactataccttttggatcagggaaaaaartcattcctttgaataagttttgagttcaaaaaagttggtgaagagaggcatggaaaaatactgattatatgaagatagcatggaatggctattgtcatca

SEQ ID NO: 32721 - DNA, 201 bp, Homo sapiens
aacgttccagacagaggaaacagcatgtatatatgccctgaggtggaaatgtactaggctctaaagtaaaaggcatgtctttgtggctggaacatgagtcrggaagagattagtatagaaaagtagtcaggggccagatcatacagaacattgtgagttttacaagatcttcagttaccatacaaagattccatttcattc

SEQ ID NO: 32722 - DNA, 201 bp, Homo sapiens
tatttcctctaaaaaatcaacacatgcatttttatttgggatatctttgggcaaaataagtccaactctgatcatatatataaatcataatagctacagtmtcttacatctatatagtactttttagtttacaaagcaaacaaacatacattatgtccttttatcctcacattatccctgtaaagtagatacttgtattag

SEQ ID NO: 32723 - DNA, 201 bp, Homo sapiens
tgagtgatgggtgcaccaaaatctcacaaatcaacactaaagaacttatgtaaccaaataccacccgttccccaaaagcttatggaaataatttttttttwaaaaaactatttctatctattaaaacatacgttattaagaacactacaattcttgggttaccagcaaaatctgtgttgatgaccatgtaattatccatta

SEQ ID NO: 32724 - DNA, 201 bp, Homo sapiens
atgcaccattttaagcactgaagatacagtaataaataagataggcatttgtactttcatgtagcttacattctagcaatcaacaaaactgaagttgattmccaactctgccttttaccaattgtgtaacctgatgaaatgtatctaatcctattatctgacccacagcctcctcacctatgaaatgcagataatatcatc

SEQ ID NO: 32725 - DNA, 201 bp, Homo sapiens
tccttaatgcttgacaatgtatgcatgtaacacagagtgttattattgcctccggctagcttcatgtcatctagtttgtcttttacttctctcctttgatrgtattatcaggaccaattgtgaatctgccagatgcatttcctcacaaaaagataaatctaagaaggcttgtgtttttccctttctcttccaggactgctt

SEQ ID NO: 32726 - DNA, 201 bp, Homo sapiens
cctaagactcccaacagccaccctacctaagtcttgcttactctgagcaatgcctcaagttctagacttatttttctcccttcaacttaccaataatcttrttattatatattttaacaaagcttcattagctcattgttccaaaactctggtgaggaagataatacaggcattataattgaaatttttggaaaattggtc

SEQ ID NO: 32727 - DNA, 201 bp, Homo sapiens
caaactcctgggctcaagcaatctgtctgcctcagcctctgaaagtgctgggatttcaggtgtgagccactgcacctggccaggaactaccattaacactrctttacaaattaggaaactgagacacagagaagtcaagtaagttgttaaaaatcacatagtaagcaaatgataggtcctggatataaacctaggtagtct

SEQ ID NO: 32728 - DNA, 201 bp, Homo sapiens
ggttctgaaattaaagctccttaagaaatttagtttttgagctgggcgtggcggctcatgcctgtaatcccagcactttgggaggccaaggtgggcagatmacctaaggttgagagttcaagaccagcctgaccaacatggagaaaccctgtctctactaaaaatacaaaattagtcaggcatggtggcacatgcctgtaa

SEQ ID NO: 32729 - DNA, 201 bp, Homo sapiens
tatttcaagaacttgggctgatgggaaaatttggagctatacctacttagaaaaagtaagtacataggggaaaaagacaagtttcaagtttctgaatgagrctatcgaaaatggccctaattgtccatcttggtgaggacctgcaggagaaaagtctgtgttccagctgttctgttctgtagaagtaacaaaaagatgttg

SEQ ID NO: 32730 - DNA, 201 bp, Homo sapiens
ttctggcccaacagtcctctagtgcctaccccagttgccctttagagcatggatggctagaagacacaaagccctaatagttgatgtacaatgtgttttaytgaagttgttttgatcagcagttttgctgtcagggatattctgtcatggtctaaaagaaaactcttacactttcaacttgttaaggagctctttaatatt

SEQ ID NO: 32731 - DNA, 201 bp, Homo sapiens
accccagttgccctttagagcatggatggctagaagacacaaagccctaatagttgatgtacaatgtgttttattgaagttgttttgatcagcagttttgmtgtcagggatattctgtcatggtctaaaagaaaactcttacactttcaacttgttaaggagctctttaatattgctaaggaatttgcacaacagatgttc

SEQ ID NO: 32732 - DNA, 201 bp, Homo sapiens
aaaattcttgagggtattataaagatttctgcataaaaaatagagaggaatcaagcttgtattgtgccttaaattgacatcctcctgagttgctgctagtytgaaaaccattcacctcaactactgcattcaacctgccacacagagaatgaatattttagcttttccaaataaagcaaataattggttcactgcagcttt

SEQ ID NO: 32733 - DNA, 201 bp, Homo sapiens
tataagaacttgagaatgacttgggtctattatgtgtctatttgcctggcaatagattctggaattgattaattaaatacattggaaatgataaactggamtacaaggtaacaatagtttgtgtgctataaataggaaaacacttatttttatgcccttgaaaattgctttctacttggctaaaaaagatctagtgccatc

SEQ ID NO: 32734 - DNA, 201 bp, Homo sapiens
agctgctttgcctaatatgttgaattgacagttcaaccctagaaagacacaatcagtgatgacagtgtcctgggggttatttaagcttattgctcactttragttgaagtcattattgaggaaaggttactatgataaaagtttatattgttgttatcattgatgttgtttaaatgctgattaagattttttttaatgcta

SEQ ID NO: 32735 - DNA, 201 bp, Homo sapiens
catgtccagtcttgggaatgacgaatcagatggcataggggctaaaagcacatatctgagagtggagatgttaatagtttttctcaggtaatttttatatyaagtggtaaaccatatgaagtacctgacacccagcaggcattcagtaaacagtagtcacttctattaatggctcagatgactgggcctgtaatttcatgt

SEQ ID NO: 32736 - DNA, 201 bp, Homo sapiens
gttctgtagaagtaacaaaaagatgttgaacttataaggataaactgtttttcagctgaaaattttccccagtcccagactctgccaagtactctttcagwctaaagtcagaataacggcttagctttctcctcatttgaacatctttgttcatgcttttgaaaaggttatctttattattatgaaagctcataccgaggg

SEQ ID NO: 32737 - DNA, 201 bp, Homo sapiens
aggcagagcatggtgtcaagacagggttttcagtgccagctgcagtgtaaccttttttccctatatttaattatgtgaaaaaagtaggcatttagtgcatwatagtctgcttccatgacaaagtctaggattagttgctactgtatttgctagttcttgtgagcttggagagaagctcaactccatggggtgaaacatttg

SEQ ID NO: 32738 - DNA, 201 bp, Homo sapiens
aaagcctcacatataatagaaactgtgcatttattaatgatgcgcaacattggtattccagtggaacagtagatcacattccatattatccagtgcattgyattactgtaaatatcccaaggatgagtaatgtctcattatgagaacattgagtttaacatcattgttaggttactggacaagtgacattagtcctcagag

SEQ ID NO: 32739 - DNA, 201 bp, Homo sapiens
tttactgaatttgtttatcagttctgatagttttcttgtggagtctttatgtttttccaaataagattacatcatctgcaaacaatgataatttcacttcrtcctttccaatttaggtgtcctttatatcattctcttatatgattactctagctaggacttccaatactatgttgaataacagtggtaacagtggacata

SEQ ID NO: 32740 - DNA, 201 bp, Homo sapiens
tcatcttgttagcatgtggaaatgttgctgagttctaattctaccatacaaactatttgcttttgctctcagaattatgtcatctgtaggcttgttaggtrtgcttccctcttttttatgtaagttatcgatacaaatgttacataagaccagattagggttagatctctgtgcatgccactggtgacatttatctattag

SEQ ID NO: 32741 - DNA, 201 bp, Homo sapiens
tatcaatttgtgtgcctgttttccactggcatcacattgatgcaggcactgtgtggtaggcaagattctcacggtgaatggggtccaggcctgttaccagratttggccaacagtgagtgaaaaggtatcaactaacatcattggtgagtaaccaatctcgagccactaagctatgagaaacacagacatccacatggggg

SEQ ID NO: 32742 - DNA, 201 bp, Homo sapiens
tttgtatccaacctaagtccataaataccttgttagtgtacccagtttccaaaaacttgctgattggggttcaaaaatactctatctccccgcctcccttyttaagttgtgatcttttccattattaaacattggcttttttcccagggatggcactgaagaagaaaatcaatgacatatctagccagccagcttggactg

SEQ ID NO: 32743 - DNA, 201 bp, Homo sapiens
aaagctagaacctaacgttgtaacaaattcattcatagagcagaaatgtattttaacattttgtaatacatatataaaacatttataaatatcaactaatrtatatttaatgaatacagcaaggattctactgcctaatatctaaatattatatttcataattatgatctgctcactgggcagcatttcacagatgagagg

SEQ ID NO: 32744 - DNA, 201 bp, Homo sapiens
tccaaagcttatattctgaaagatgtttcattttttatatagaaataataaaaatgtaggtggcctcaacagctgtaattttaaaaaattaagtacagagwtgccttctgccaacatttgaaattggcattctacacagccaaaaactcaaatcttcactgttatctaatttgggatttagctactatttccaggctatta

SEQ ID NO: 32745 - DNA, 201 bp, Homo sapiens
tcaatatgtcaattaccttaaatgtgaaagtatttaaatcagaaagtgatgactactgaataaaaatgagcaaactttctaccagacatgtttataagccwggaacaattattcatatttcttcaggagtacagaggcatgttttaccaaacttctctggacagttgcctaattcacctattttcctttgactaagagtgt

SEQ ID NO: 32746 - DNA, 201 bp, Homo sapiens
ggagaagtatcagtggtaactgataagattgattaatccaagtacaatattgatcaagtggaagaagagtaaaatcatccccagggttccagtacaaaagycacagtcactagttcatccggcttaaagattttgttgtctgatacacagacaagcctcccctgctaaaaactccatgtgagcgttttaaataatttggac

SEQ ID NO: 32747 - DNA, 201 bp, Homo sapiens
atcacatatgcaaaaacccagaggcatgagagagcgtggaattattgaagaaactaaggctagtttagtttaaccagagtgaaaggtgcctgttggggagktgagggcagagaagtaggcagagaccactttatgaagggccctcttatattatctgtagaattcagactttcttctgaaggcagtggggagcatataagt

SEQ ID NO: 32748 - DNA, 201 bp, Homo sapiens
tggaaccaagttggaaaatgctctgcaggatattatccaggagaacttcccaaatctagcaaggcaggccaacattcagattcaggaaatacagagaatgscacaaagatactcctcgagaagagcaactccaagacacataatcgtcagattcaccaaagttgaaatgaaggaaaaaatgttaagggcagccagagagaa

SEQ ID NO: 32749 - DNA, 201 bp, Homo sapiens
tcccaagcaagggaaacctaccattgatcctaaatggaatcctctatttgctctgaatctagagatgttcttcagaaatagggcatgtaagggagaggagrgagaaaaaaaataatatatgccagtcagtgtactactttcataaacgtcgtctatttaaacaacgcttctaagaagtatctcctttgacaggttaggaaa

SEQ ID NO: 32750 - DNA, 201 bp, Homo sapiens
atggcagatgataagcaaataaataaaaaatatatagtgtgtaatttggtaataagttctttgaaagacaagaagaaagacgagacgtaccattttttggkttttttttttttttgagacggagtctcgctctgtcgcccaggctggagtgcagtggcgcgatctcggctcactgcaagctccgcctcccaggttcacgcc

SEQ ID NO: 32751 - DNA, 201 bp, Homo sapiens
aggcttttccaaatatgtatatatccataaaatgtatttttctacatgtgtttaaatttcatatgaataacttgctttcctccttcatcattatgtttctraagtttatccatattcaggcatggatctctaccttattcaagttaactgctatattttttgcactgcataaatatactaaaatttatatatcctttccca

SEQ ID NO: 32752 - DNA, 201 bp, Homo sapiens
ttatcacacaaatatgtgtgcttcataaaacatgaggaatattaagaagcagaagagtcaaaagacaagtctactcagaacgagatacagaatgaaggaagagaggaatacaagggaaatgcacagaataatgataacttttatgagactttcactcaccagcttggaccttcataaatataagccatatagaaaataaaa

SEQ ID NO: 32753 - DNA, 201 bp, Homo sapiens
ggggtttcaccatcttggccaggctggtcttgaactcctgacctcatgatccacctgcctcggcctcccaaagtgctgggattacaggcttgagccaccgygcctggccaacctcaaacatttttaacacattttgagaatagtgtacatactaaatagcaataaatgtttccctacatactcttccccatatcaaatcca

SEQ ID NO: 32754 - DNA, 201 bp, Homo sapiens
gtaaaggagtatggaaccttttttttgctatatgtgctattatttttaatggaaccttttatttagaaaaaaaaagtacgtgttctaatttgctgtccccratatctaggcatgctattgattttttccttttgattttacatccagaaaccttgtagctttcatagtttacctgtatgttcaattttacctcttcctttt

SEQ ID NO: 32755 - DNA, 201 bp, Homo sapiens
gtcattgtttcccaggattccttggacctgactgtgctagaggtaatgttgctctgttattctgattggtttaggaaaatagatgtgatttcataacccaraattagtagtaatagtcatagtaagtaacattagtagtggtgacagcaacagcagcagtgttccctatggctgctgccaaaagctgagcacttactatgc

SEQ ID NO: 32756 - DNA, 201 bp, Homo sapiens
tttcttctctctagagatatgctccattctcaagcttcactctagatgggatttctttgtctgttcccctataatgttgtaactccagctctggctcaacrtgaccttgcatcttggcttccccagttgtgtgtctatgtctagatttctgagtgagaaagagagaatacgattgcctctaagtttggttatccaattctg

SEQ ID NO: 32757 - DNA, 201 bp, Homo sapiens
ccaccccagaattacctcctggaaactccccacagtccagcaactaaagggttaacctgacccagcagagagcctgcagacccctgctttggctcttcagsctgcattgcttgcgataaggtctgtgcctaccttctaccactgctaagtatgttgaatatctcacagaccctaaacattcctgacttttgcttaacaaaa

SEQ ID NO: 32758 - DNA, 201 bp, Homo sapiens
taaaattaattagtattttagaagttagtctttggagttgatcttgatatattatttactctcttacttctttagtatattactgtgaaagaagccaaaakgagttaaagtgctcttatcaacagagttttaaaaaagagcttagaaaatgaaggaaaaaaatatggctgagcctatattcaccagaaataaaatgacaac

SEQ ID NO: 32759 - DNA, 201 bp, Homo sapiens
cccagcactttgggaggccgaggcgggcagattacaaggtcaggagttcgagaccagcctggccaacatgatgaaaccccatctctactaaaaataaaaakgaattagccaggcgtggtggtgggtgcctgtaatcccagctactcaagaggctgaggcaggagaatctcttgaacccgggaggtggaggttgcagtgagc

SEQ ID NO: 32760 - DNA, 201 bp, Homo sapiens
tctcacaataaccctatgaggtataggtattactattttccccacttgtagatgggaaaattaatgctctgggtggggatagtaagtgacttatccagaaycacatagctagagagtagcagagccaagtctccaatttagggctatgtgacttcagagcatattttctcaactactacaccatgctacctcccataccca

SEQ ID NO: 32761 - DNA, 201 bp, Homo sapiens
ataacataagagcctattgaaaacttcaatttcatccctgggtgcagttatttagcctcttctctgacaccaatgaggagattttattgtttctcttttcygaattcactgattattccatcaaatttacttaagcaaagaatcacgtgaagcaaacttcacaagttctctttgctacaaaaacgtagttggcaataattg

SEQ ID NO: 32762 - DNA, 201 bp, Homo sapiens
ttgtccttgcgatagtttgctgagaatgacggtttccagcttcatccgtgtccctacaaaggacatgaactcatccttttttatggctgcatagtattccrtggtgtatgtgtgccacattttcttaatccagtctatcattgttggacatttgggttggttccaagtctttgctattgtgaatagtgccgcgataaacat

SEQ ID NO: 32763 - DNA, 201 bp, Homo sapiens
gtgggtataagtggcatactaaagggggatgggacagtggaagaagtattttatcactgacattatttggaatttccagcgaatgttgatagttaaagcaracctactattcaccagatttattattgttttttaagatttcaacagaaaatgcacttccccttactctctatacccagaaccaaccactcccacctgctc

SEQ ID NO: 32764 - DNA, 201 bp, Homo sapiens
tgcatagtattccatggtgtatatgtgccacattttcttaatccagtctatcattgttggacatttgggttggttccaggtctttgctattgtgaatagtsccacaataaacatacgtgtgcatgtgtctttatagcagcatgatttataatctttgggtatatacccagtaatgggatggctgggtcaaatcgtatttct

SEQ ID NO: 32765 - DNA, 201 bp, Homo sapiens
tttcatcatgagtgtcctcagggacttcagtaaggcaatgcaccgtgcagaaaagttggtattctgatagtgttatatgaaaataatagtaactgctactrtttattcaattgaatttttactttgtgtcaatgtaaaaagaatggaagaactagggagcaagacaatatagactgtaaagaaatacattcttaaagtgtc

SEQ ID NO: 32766 - DNA, 201 bp, Homo sapiens
ccattcccacaataatggcattaatccagtcatgagggtgaagccctcatcatgacccaatcgtgttttaaaggtcctactttttaatactgttataatgrcaattaaatttcaacatgagaactgcctataatcacagcactttgggaggcccaggcaggaagattactttaatccaggagtttgagaccagcctggaaa

SEQ ID NO: 32767 - DNA, 201 bp, Homo sapiens
aagtaaatcctttccaaccgaaaacatttcaactaactatagagaggcagactcatttttactaaaataatttatacagttagttattttcgttctccgtmcttacccatttatctttatttaatcgtctctactgcctaggaaaataactattttccaggacgggttatttgttctgcgatcatttaaaatttggagaaa

SEQ ID NO: 32768 - DNA, 201 bp, Homo sapiens
atttcttgcctaggccaatgtcctgaagagttttttcctaggctgtcttctagtatttttatagtttctggtgttatatttaagtatttaatccatcttgwgttaatttttgtatacagtgagggataggagtccagtttccttctacctatagctatccaatttacagaaactttttctaaagacatttgtatgtaaaaa

SEQ ID NO: 32769 - DNA, 201 bp, Homo sapiens
cacttcaaaatgccctgctgcttttttatgtgtgtgtgtgtgtgtgtgtgtgtctgtgtgtgtgtgtgtgtgtatatatatatatatatatatatatatakagagagagagagagagagagagagagagagagagtgaaaagactcatggagcagaagacaaccttgatcatctcaacacaacccatcagtaaaaaacaat

SEQ ID NO: 32770 - DNA, 201 bp, Homo sapiens
catgtaacattctccaggatagaccacatgttaggacacaaaacacgactcaacaagtttttaaaaatcaacatcatatcaagtatcttcttatactacartggaattaaactagaaatcagtaacaaaaggaactttggaaattgtacaaatatatggaaattaaatatcctccttaatgaccattgagtcaaacaagaa

SEQ ID NO: 32771 - DNA, 201 bp, Homo sapiens
ttatatatatatatacacacacacacacatatatatatacatactaatttctatcaatattcacctttttatctatttatatatcatctatctatctagaraaaaccatgagtttccattattacctccaactccagttcaacaccacagggttcattcttgttttctcctttttcatatttgtaactctcttctctgaca

SEQ ID NO: 32772 - DNA, 201 bp, Homo sapiens
gttactgtctaagctgcatcccacaagtttttgtaaatagtatttcattgttactcaatttctaattccaatgtaatttttgaaacataattcatgaattmtttttaagtgtgtttttaaagaacacctttctgggatttttcttttgttatctttttgtttattgatttctaattttactgcattttgtgaagcagaata

SEQ ID NO: 32773 - DNA, 201 bp, Homo sapiens
accagaagttaccaaatgtaatctagaaagaatgcaatttagagtgttagtgctaaagaaggattaaaaggattgtctactacagttgtctttgatctgakatctttatttggacttcagaaagtcagtgaactccctagagttatatagaaaattttgtacgcatatgcatttttccaggaagaatgtccataactttaa

SEQ ID NO: 32774 - DNA, 201 bp, Homo sapiens
gtgatgatgactttatttattccttttcagtgtttatacaagtttcctttttcttgcataatttcattggctaggacctccagaattatattgtgtagaartgatgatcataggcatcttttctcagtcttaataacacaaaaaaagattttaacatctcactattatggtgtttgctatggggtgttgtagctactcttt

SEQ ID NO: 32775 - DNA, 201 bp, Homo sapiens
ggtcatgatattatttcttgttatgtaatgctagatttgctatgttaatttttgtttaggatttttgtatccatgaatgagatcttcatgagaaagactgkcatatattttttaaataatatccttcagaattttatatcaggattatgttgacctcataaggcatattgttaagagtttcctcttttctattttttggaa

SEQ ID NO: 32776 - DNA, 201 bp, Homo sapiens
ttgttacacatctctattttatttattcaaatgctattcttttttaagtctatgtttccagcctggttaatcataaaagctcaatcaagcacttcattttrgtcttttttgtgtgggattattaatgccgtgggtggagaatttcacacaaagtagtacacttaagtcatgcccaataatggctcagaaaattggttttgt

SEQ ID NO: 32777 - DNA, 201 bp, Homo sapiens
tagcgttctaaagcatggtgagcccttagcaatagtgttgaatgggatggggaagacaagtctgtgagctctttctcatttagagtaagacttttagtctkcgtgaagtgttcttccagcatacagctttggctttgccactgaagtatgctatcagatttgcttggggacttagacgtgtatttgaagatctttggtttg

SEQ ID NO: 32778 - DNA, 201 bp, Homo sapiens
atagatattcatgagattgctggtcagagttaattttttgggtaggtatttaaagtggaatgcagaatagctcacaatttgaatgtgtgcagttgaatttkttttcatatatcctagttgatcattttttgaaataattgaaataatatctttagagaaaaggggaatcatcttggctacttcagaggcaagttgactatc

SEQ ID NO: 32779 - DNA, 201 bp, Homo sapiens
agcacaacacatttcaaaattattcctcccattactcatgttattcttctcaccttatctgtttttgccatccttcaaggctagcatgtagctgagagagmaatacacatattgtcatatctgagttcctgtcccagctcttactaggtcttagtaattgtgcgactttgagtaagataaatgagataaagcagctagcat

SEQ ID NO: 32780 - DNA, 201 bp, Homo sapiens
tggtccttcctgaaaagcctcaaacaatgaattatgtcaactctcagccttgcccctacctatacaagcagtagccaagccctattggaaaaaaatcatayggtttgggtagactgataccaataaaaattcagccaccaacctcacttgggatgtcaaaagtgcctggaaatattactgtattcctcaggttacctcatt

SEQ ID NO: 32781 - DNA, 201 bp, Homo sapiens
catttgattaggaaaagaagaccttgacttgtgaaactgttcataccacaaaagaagaaccatttaaaacatatatcagtcaaatgtgtaagccttttttwaaaaatcagcctacataggccgggcgtggtgcctcacgcctgtaatcccagcactttgggaggccgaggcgggtggatcacgaggtgaggagatcgagac

SEQ ID NO: 32782 - DNA, 201 bp, Homo sapiens
tgatatgctctataatttaccatgaaatattcctgagtctgcttatttccactttttagggaagttaatgttttatccaattgaagacttgttttgagaartattaataagagaaaatactctataccagctgaagatatgttcatattatctttattttccaaaacagcagtgccctactccatgtatatgtggaatgct

SEQ ID NO: 32783 - DNA, 201 bp, Homo sapiens
aaattcatgaaacattttagttcttttaaaatatacaaggatagctgaccatctaaaggaatcctttttataaaatgaatgatcaccactcccttctctakctatcttttgtacaattcagattttcatatagtgagtttatttaaagggagagccacctgtgctagaaaatacagccaagaatttgtcatgctcttggga

SEQ ID NO: 32784 - DNA, 201 bp, Homo sapiens
tactacattctcttgatttttcttttacatctatagaaaatccttctctcttttgctggatctcctcctccacttgacctttaattgttaaagtcccacartcttaggccccattcatttctcatcacactcatcacaaattcccttggtttcaatgaccatttttactggtgacttaaaaatttaatctctgcccgtgaa

SEQ ID NO: 32785 - DNA, 201 bp, Homo sapiens
aaggagttaattaaacaattgatataaagcatatagcacagtgtctgacacattgcttaatttagcagcagttattatcggaccaaaagattggaaaatcrccttgaggtttttgaacttcattgacattccgttaggtgctatagaacctgctttcaaaccactatgaactttgcagtgaatgatgaccttcttgagatc

SEQ ID NO: 32786 - DNA, 201 bp, Homo sapiens
tggcagagctcctagaaaggtgtggcaaaggaaaaaagttgcagactgtgctttgcatgaccatggaaatatgtataacaacttgaacaaacttcttttakcctaccttttacaagtagcactctagttggggggctgacaaagagattagtttcacacagccaagcgacacactcgtgagctgtttttctaaaatatgga

SEQ ID NO: 32787 - DNA, 201 bp, Homo sapiens
ttgctgtccccaatatctaggcatgctattgattttttccttttgattttacatccagaaaccttgtagctttcatagtttacctgtatgttcaattttayctcttccttttcaggcattccaattttttatgtctttggttgcctttttgtgctgactaagatttccaatacaacattgagttagaagctgtagttaatt

SEQ ID NO: 32788 - DNA, 201 bp, Homo sapiens
ttcatcactgttgacacagtttcaagcattccatcatgttattttgactctttttcttttttttttctttaaaaatatatttttaactagaccaggccccrctataatatcacttaagagagtcagggcaaagtttttgcatttatgaagatgtgttcatgtaagggtgattgtaatggagttcattggtaatagaagcaa

SEQ ID NO: 32789 - DNA, 201 bp, Homo sapiens
gacagagtgagactcagtctcaaaaaaaaaaaaaagaagatgccagctggttgcttctggtgcctctgaggcagcataatgagactgattctcagggtagrgagaggagctggaagtgcagtcaggtactgcttccaggatgaagggctactgttgagatgacactgacaggaacagaaagcaagcaggaaggatcaagtc

SEQ ID NO: 32790 - DNA, 201 bp, Homo sapiens
taggcttcatatttttcagggagggaatacagagaatgttggttcactgattgtttcctttaaaatgattcttgatgcacagagctttatgtctgtggtaygttcatgtaaatgcttatgatgccaattgttaaaatcaagtctttctcccacaggtgatggtggctatgccaaagatgcaaagatgaaagccccttcctc

SEQ ID NO: 32791 - DNA, 201 bp, Homo sapiens
atccagtattctgattatacttcttcttaacaccccaaaattatttattataatattttccacattcaatgcttatttagatttacccacatgtttaccamttacattaccattttttcttgcagctcatgcctttcttctgggttcagttttatgcttcctgaagtacatcctctcataattctttcagcaagggtctgt

SEQ ID NO: 32792 - DNA, 201 bp, Homo sapiens
gaaagataatagatgacaaagaaaaagataaatcactcaactcataaaaagtcttgaccttcacagccaaagagagaaacctttaggttgattcaaaaggkgataaggggaggccagatttggtgagacaagaatgaagaaacatgtccagtcttgggaatgacgaatcagatggcataggggctaaaagcacatatctga

SEQ ID NO: 32793 - DNA, 201 bp, Homo sapiens
ttttccattatggattaagtttctttaaagaaactattcagtttccactttttcttgtagtttattaagttgtattattctagaaatttgttcataaaaartttcagatgtattggcaaaaagctgttagtaatattgtcttaggatgttttatgtttgtactatgtatagcaatgtcatactttttattcccgatactgt

SEQ ID NO: 32794 - DNA, 201 bp, Homo sapiens
agtgttctggctctctccttctttatgccagttcaatttttgttttgctccagaaaagcactctccaataatatggttacaggtcttgtaactttaatgcygtagcactactctcttccattgtacatttgagaacttgccagctggtataagaatgtgggttaagtgctcagttgagattcagctgtctctcattacata

SEQ ID NO: 32795 - DNA, 201 bp, Homo sapiens
ggatgttttatgtttgtactatgtatagcaatgtcatactttttattcccgatactgtttatctgggtcttctgtattttcatcttgatcagtctccaccrggagtttatcaattttattggtctgagccaatcatcaagtattgactttgttgattctttctgtagtatatttattcctattgtattagtttcagctctt

SEQ ID NO: 32796 - DNA, 201 bp, Homo sapiens
tgaaggtcaatgatttccacatactaagttgtctctccctaaccttacagtgactaaataaatgaacataagtctccatggctgtcttctaaagtcacttrgagtttgtcttgttagcaagtagagagtttaaagcacaagagcaagccacagatgttgacatttgaattcatactttgtggactatctgaaggcatcttc

SEQ ID NO: 32797 - DNA, 201 bp, Homo sapiens
gtcttttatccttcacccacctcctaccctttcccctgagtccccaaagtccattatatcattcttatgcctttcaatcctcatagcttagctcccacctrtaagtgagaacatactatatttggttttccattcctgagttacttcacttagaataatggtctccaactccatccaagttgttgcaaataccattatttc

SEQ ID NO: 32798 - DNA, 201 bp, Homo sapiens
tgagctaggattcgagaccaggaaatcaggctttagagtccgtactcttaatcactatgctatcctggccttccagagagagagaaattgaagaagtgttraaaacagaagaactgaaagatgtagttggatatgagcataaggcaaaaggaaaatgaaagcgtaatgccaaatatcctaaccttggaaactaggactatt

SEQ ID NO: 32799 - DNA, 201 bp, Homo sapiens
gttttgtgaactccactaactcccaaaagatttaaaaatatattttgtttagattttctagttctcatcagaagggaatagtaaaaattacttaggtccckattactagaaacagaattccacctttatgttttcatatgcatacttgacaaagtaccagttacctaactcccgaataatataaggctttccaaatatttc

SEQ ID NO: 32800 - DNA, 201 bp, Homo sapiens
aaagactgactccctggctaagtgtcacatagatgattgtcccctgggaaacaaagcaactggtttttggggtacataattttgttcctccttttaaattrcttcagctactgggcaggatcaaaggggatacatattcatgggactgtgaagactgggaaaaagagctttgtctttttttcttttaatactttaggaccc

SEQ ID NO: 32801 - DNA, 201 bp, Homo sapiens
aaaaataaaatcgagtcattcctcctctggccttcttcagcacatatcctgtcagtatgatgtttatctcaacctgcctattgatgattacattgatagtrccatatcctagtgtgcggctctgtgctcctggctttttagttttgtagagtttacttccttaatagaaagcctgtatgaacttaaaaagtcaccaatctt

SEQ ID NO: 32802 - DNA, 201 bp, Homo sapiens
cccaagaatgttaaactttatatacgaaaagtagctttctaacttaccaagaaatagttcttaagtagccactcttagacaagatgcagtataattgttcyagtagtagttttataaatgatatacactatatagtgtatatagttttataagtgagagcactgttttactgatgtctaagacatacatttcatgcctctg

SEQ ID NO: 32803 - DNA, 201 bp, Homo sapiens
aaatttaaaggtttgagttaagatttatttctcaagcttcaactgagatatttataaggcttcactactaaagtccaattatgtcttctcattaatggttsaagtccaaagtttcaagaacacttaaaaaattatcacattgacatacaaccaggctgaatgctaatgtgtctcaaattattcaataaatatggtcaaaaa

SEQ ID NO: 32804 - DNA, 201 bp, Homo sapiens
tcttaaaactctcactgacatttccacacataaagaaatgtaaatttaagagatatcattcctagcattagcattacttagctgtaaaatacttatttcartgtttaccgtgctaatgttatatcgttccttttaattaatttgatgaaaattttaattcctcttaaaaatacacatgtatctcaaaaatattgaaagaat

SEQ ID NO: 32805 - DNA, 201 bp, Homo sapiens
cttagacgtgtatttgaagatctttggtttgtagagtttctttgctaagttgggaggcttattgccttagaataacaccatgtaggtaatttagatgtgcrttaaggggactaacaaaaattcattttgaggagagctaatgtcagaattttctgaaaaagggaaagcaggtcaaatatcattcataaaagggagaaaaaa

SEQ ID NO: 32806 - DNA, 201 bp, Homo sapiens
ttcaaactggctaaagaaccactaaggaggattcctgaggtgaggaacagatctcttaaatgagtgatctggtgaaaggagtagggagggggggaggcaaygggaatcagctgtagttaatatacttctaggctctgaatagagtggcaagcagcacattctgtaaactctcaagtactgaagctattgcaaatagcagta

SEQ ID NO: 32807 - DNA, 201 bp, Homo sapiens
gtaatttagatgtgcattaaggggactaacaaaaattcattttgaggagagctaatgtcagaattttctgaaaaagggaaagcaggtcaaatatcattcakaaaagggagaaaaaattctgcctggtgcaattttaacatttttaccaaattatgcccaagaatgttaaactttatatacgaaaagtagctttctaactta

SEQ ID NO: 32808 - DNA, 201 bp, Homo sapiens
gtgtgtgtgtgttaagaacacttaacatgaggtctaccctcttaaaaaattgttaactgcacaatacctcattattaactataagtactatgttgtacgasaacttgctcatcttataactgtgactttatacccattaaacaactcctcatatccccataaccaatccccaagtaaccaccatgcggttgtctacttcta

SEQ ID NO: 32809 - DNA, 201 bp, Homo sapiens
cagtacatgatcgctttttacagcttgcattcaagctcggacaaggcaaaaatgatactctgaatgacagcagaaagtacatttaaggcgttcatcactgygggtttgttcatgcttgatgaaaggacctgagatttgagagaagaggtaggatgatgtaggaaatcgcatcatttgatctaagggaccatgaatggaatg

SEQ ID NO: 32810 - DNA, 201 bp, Homo sapiens
aaactgcacctagacggcaattatgataagaaagtctaagtgaaaagctgtagataaaccaaaacaaactctgccatggctgagcaatcccatggcctacyactcatgacagatcatgagccgtaaaagttaatatttgcggggctgggcacagtggctcatgcctataatcccagcattttgggaggccgaagcaggtgg

SEQ ID NO: 32811 - DNA, 201 bp, Homo sapiens
atttatctgagcagtggttttgtaattctctttgagagatttttcacctccctggttaactgtattcctaggtattttattcttcttgtgaatattgtgartggaagtgtgttcctgatttggctttcagcttggctgttggtggtgtataggaatgctagtgatttttgtacattgattttgtatcctgaaactttgctg

SEQ ID NO: 32812 - DNA, 201 bp, Homo sapiens
tgttggtaccctgatgtcagacttccagcctcaaaaacggtgagaaagtaaatgtctgttatttaagccacccagtctgtggtgttttcttgtggcatccyaagctaaggcccagtggaattgtcattcaacttccagcttggtttccttttcataaatagagcatcagcaaaggaacctgctgcttgtgagtaaaggtgg

SEQ ID NO: 32813 - DNA, 201 bp, Homo sapiens
gcagtataattgttctagtagtagttttataaatgatatacactatatagtgtatatagttttataagtgagagcactgttttactgatgtctaagacatrcatttcatgcctctgtgaggcagttaagcttgcccttttaggtggtcacaaactgcacctagacggcaattatgataagaaagtctaagtgaaaagctgt

SEQ ID NO: 32814 - DNA, 201 bp, Homo sapiens
actgctcttctcacaagtctgagagctggtatgcctgggggacatgtctgaaacctctctgctcatgttttatcctgtttgatttcattttctttaagtgygagcaatgtattttctgtttgtgaataagattagggaggatgcttttccaatacatgttcataaaatgaaaaatgtttggcaatgcagttttggtttttt

SEQ ID NO: 32815 - DNA, 201 bp, Homo sapiens
ggctgagggacaagtattatgttataggttttctgtgttaaaatgaggagatactattatacttcaagcatagaaaacgtgatacttatcccacagtaaarccaaatctttatcatagcaaggtacttgtaaagattggttagagatggtatttaatttaaccatatgcaataaaacagatatgatacctcatcaactaat

SEQ ID NO: 32816 - DNA, 201 bp, Homo sapiens
aagtcattttttaaactctgttttctagaagtctgtgtcactgaactaactgattagggaatgatagagaaaaaaaggctgggcgtcgtagctcacacctrtaatcccaacactttgggaggccgagtcgggtggatcacctgaagttaggagtttgagaccagcctgaccaacttggtgaaaccctgtctctactaaaaa

SEQ ID NO: 32817 - DNA, 201 bp, Homo sapiens
agggaatgatagagaaaaaaaggctgggcgtcgtagctcacacctgtaatcccaacactttgggaggccgagtcgggtggatcacctgaagttaggagttygagaccagcctgaccaacttggtgaaaccctgtctctactaaaaatacagaaattagccgggcatggtggtgcatgcctgtaatcccagctacttgggag

SEQ ID NO: 32818 - DNA, 201 bp, Homo sapiens
gagagcacagaaatcccaaggggtgatgaggaagaaataccagaagagacatagaaaactaagggaaaatgaagggaaagacttgtcatgattttgcctakacccagtcctggtaacactataagtatgagattaaatgctgcaaactttggaatatttctagggaatcaattcgactttctagaggccaaccattcaatt

SEQ ID NO: 32819 - DNA, 201 bp, Homo sapiens
acctattgagagtctagagtatttcaagtacttaagacatagccctgctctctgagagtgtacaatgtggtagaggaataaagacaggtggcatctgtggratgtgaagccgtgaggcttcagaggcaagacagactctatcgttggataatcaggaaaggattcatgattgtcagtgctctaatgaggggaacaaggctg

SEQ ID NO: 32820 - DNA, 201 bp, Homo sapiens; identical to SEQ ID NO: 5448

SEQ ID NO: 32821 - DNA, 201 bp, Homo sapiens
cttggccaggctggtcttgaactcctgacctcatgatccacctgcctcggcctcccaaagtgctgggattacaggcttgagccaccgcgcctggccaaccwcaaacatttttaacacattttgagaatagtgtacatactaaatagcaataaatgtttccctacatactcttccccatatcaaatccaagccttaaaatgt

SEQ ID NO: 32822 - DNA, 201 bp, Homo sapiens
acccaccagcaatgtatgaacgtgtttacgtctccacggacattgccatcaaactgtgctgcaagcttttgaatcgtcagtttgacaggttagaaatgacrtcttagtgtagttttcttttgtttttctcttaagaaaaagtaaggttgactatcttttcatatttttaaggatcttttttgttacctgtgtgctcatatc

SEQ ID NO: 32823 - DNA, 201 bp, Homo sapiens
atccgtgtccctacaaaggacatgaactcatccttttttatggctgcatagtattccatggtgtatgtgtgccacattttcttaatccagtctatcattgwtggacatttgggttggttccaagtctttgctattgtgaatagtgccgcgataaacatacgtgtgcatgtgtctttatagcagcatgatttataatcctaa

SEQ ID NO: 32824 - DNA, 201 bp, Homo sapiens
aatttcttcttcctcacagaaacagttttgcccacccacattatcaaggatcatctcctttacttaaattcaactgattatagataatagccacatctccraaagacctccacagcaatacctagattggtgtttcattaaataacttagaactataacctaggcaatagagatataaaatgaacgatcataagaagccta

SEQ ID NO: 32825 - DNA, 201 bp, Homo sapiens
agccacagatgcattattaaatgactttttcttctgcatttgtcttaattttcatgtatgcatcagattctagcaagcacagaggtaatattttagaggcyagataacatggtagataatttttcaggtttttgagtcaaacagaaatggaggcaaatcccagatccactgctaattaaatgtttaaccttaggcaagtca

SEQ ID NO: 32826 - DNA, 201 bp, Homo sapiens
cctccccaagcagacaagatgaggaaggcattcaagataaagacaatagcatggacaaaaacatagaggaatggaagtaggtgaaagtaaccataagtagyttgttctggctagatctcaggatatagatgaaagcatgatgagaggggagactgaagaagtagtcaagggccaaatcatgaaggactttttgtgccttaa

SEQ ID NO: 32827 - DNA, 201 bp, Homo sapiens
aggtactaagcagaggaatcaaggatgcagttatctttatttcaaatttactactcttcccatcataccctgaccttcaaagaatacttgtgagtaaaccyatgaacaaattgatccagattataataaaactcataatcatggctttatcagaagaatattgtcatctactgaaaaataactctgctatctgtggagaat

SEQ ID NO: 32828 - DNA, 201 bp, Homo sapiens
taaggactactttttcttgtctttatattgagttctgtgtatgtgtgtgtgtctggatctgtgtgtattacacaggtaattattaaataatttttaataayttaataattattaaataatttttaataatttaataattattaaataatttggttcagaagatgaactttctctttaacataacaatatggctccaagtcc

SEQ ID NO: 32829 - DNA, 201 bp, Homo sapiens
aattagccgggcatggtggtgcatgcctgtaatcccagctacttgggaggctgaggcaggagaatcacttgaacccgggaggcacaggttgcagtgagccragaccatgccattgcactgttgcctgggcaacaagagtgaaactctgtctcaaaagaaaaaagagacagagaaaataagatctgtatgtaatagttggat

SEQ ID NO: 32830 - DNA, 201 bp, Homo sapiens
ttttaatcttttttttgttttgctctttatgcttttggaattttctttcaaagaaagaaaccgaaatgaatattgactgggctattcccagtaaaattcasgtctggtcctgtgttgctactaggaaaatacccagtagcattatagttgctttctccattcatctgcccactgcgcatgtggcgcatgtgaagttaccct

SEQ ID NO: 32831 - DNA, 201 bp, Homo sapiens
ccgggcatggtggtgcatgcctgtaatcccagctacttgggaggctgaggcaggagaatcacttgaacccgggaggcacaggttgcagtgagccaagaccrtgccattgcactgttgcctgggcaacaagagtgaaactctgtctcaaaagaaaaaagagacagagaaaataagatctgtatgtaatagttggatgacaaa

SEQ ID NO: 32832 - DNA, 201 bp, Homo sapiens
cgggcatggtggtgcatgcctgtaatcccagctacttgggaggctgaggcaggagaatcacttgaacccgggaggcacaggttgcagtgagccaagaccaygccattgcactgttgcctgggcaacaagagtgaaactctgtctcaaaagaaaaaagagacagagaaaataagatctgtatgtaatagttggatgacaaaa

SEQ ID NO: 32833 - DNA, 201 bp, Homo sapiens
caagagtgaaactctgtctcaaaagaaaaaagagacagagaaaataagatctgtatgtaatagttggatgacaaaacccagggctcagacaagaatctagrttataccagcttgaagcagatgagaagcccaggaacataacctgaatgacatcataagtcatggggttaacaaactgacattggtagtgtaagagtccaa

SEQ ID NO: 32834 - DNA, 201 bp, Homo sapiens
caaactcaaaaaaacaaagccgtgggaggaaagcaaagatcaagtagtagcaaaccaagaaatgatgtggaggctgtttgttttcttaagcaggtaatttygtttctctgaatctcaatttcatcatctaagaatgtagagattcagttatttgcaagggctcttccagctttaacatgttttgattctgattctagaaag

SEQ ID NO: 32835 - DNA, 201 bp, Homo sapiens
aagcaaagatcaagtagtagcaaaccaagaaatgatgtggaggctgtttgttttcttaagcaggtaatttcgtttctctgaatctcaatttcatcatctawgaatgtagagattcagttatttgcaagggctcttccagctttaacatgttttgattctgattctagaaagtgaaaacacagaggactaatgttaaatccc

SEQ ID NO: 32836 - DNA, 201 bp, Homo sapiens
atgataagaaagtctaagtgaaaagctgtagataaaccaaaacaaactctgccatggctgagcaatcccatggcctactactcatgacagatcatgagccktaaaagttaatatttgcggggctgggcacagtggctcatgcctataatcccagcattttgggaggccgaagcaggtggatcacctgagatcaggagttcg

SEQ ID NO: 32837 - DNA, 201 bp, Homo sapiens
gtataaatctctcagtttaacttatactgcatacctaacttttagctgttggcttttgttaatttccacctgtcattacaggacataatttccattgaacyttcctttggctctttttagttattttttattaaaaaaagatgtgccttaatggtcaaaatgcacgcaaccatttgttttcctcttacatcgactaatgac

SEQ ID NO: 32838 - DNA, 201 bp, Homo sapiens
aagaaaacagattttggtggatagctaatagtctctgccccagctattattattatcattcttgaacaatttgttactatcatcaggccataattgtaccstagtaatctgtgatggctagttcatctccccaaacagtgaattttctactgtacaagtggcttaagcccaagatattcttgtcactattcccatggaata

SEQ ID NO: 32839 - DNA, 201 bp, Homo sapiens
agctatcactgagtaaaactctcttagcttcttaaagttcatatatttgtccttaagtgacctaggctgtgaagaaatgggtgataaaagtgtgaattacrgaaccagtgcttccacctgcactgaattctctgctcttctgaagaatatttctcacaatagagtgtcaagggaagattggttgaacggttttattctata

SEQ ID NO: 32840 - DNA, 201 bp, Homo sapiens
aagtgtgaattacagaaccagtgcttccacctgcactgaattctctgctcttctgaagaatatttctcacaatagagtgtcaagggaagattggttgaackgttttattctatactaaattcttctcttttgcttttaaagagtcatttgccagaagaaaacctcttcagcaagttcatttcaacatttcaaataatagtt

SEQ ID NO: 32841 - DNA, 201 bp, Homo sapiens
attttaaaggaagaagatctcaaaaaataattgagttttagatcaggaaggatgaatgcaaacaaaatgttgattgggcacctgctatggtaccaggtacrgtactagatgccttttaagtttactagttatgtaaacttaagcaagatacttcagctctgaatctgctttttcttctgcaaaattgacttcatcatcatc

SEQ ID NO: 32842 - DNA, 201 bp, Homo sapiens
tgttgattgggcacctgctatggtaccaggtacggtactagatgccttttaagtttactagttatgtaaacttaagcaagatacttcagctctgaatctgytttttcttctgcaaaattgacttcatcatcatcaccatcatcacaataataatgataaatttggaattgtacctattctattctagcactctgcaaggtg

SEQ ID NO: 32843 - DNA, 201 bp, Homo sapiens
tataggagtatctcagaacccaaggacagaaatcactataaggcctaattgagggactggactaggaattggaaagaaatcagtaactcccacaccctcawttttttcatgtattcctcttgtgtgtttgttttattctctctgcagatgaactctccttccctctgtatgtgaccagaaagggccatacttctgatcatg

SEQ ID NO: 32844 - DNA, 201 bp, Homo sapiens
gcatggtggcaagcgcctgtagtcccagctactcaggagtctgaagcaggagaatcacctgaacgtgggaggcagaggttgcagtgaaccgagattgtgcyactgcactccagcctgggtgacagaacaaaactctgtctccaaaaaaacaaaaaagaaaaagaaaagaaaagaaaagatgttcaaaatccctattcatca

SEQ ID NO: 32845 - DNA, 201 bp, Homo sapiens
taaaatcttagagcttgtttcatttcagtacatacagatcatccagtgatgtgttgataaatgtttaacaagctctctggcccaaaaagcctgatctgccrcatttcctaattcccaggatgtaaatacacctgccatggtcaatttcaactgccaatataaagtcattggaggtggaattgggaagagatgtgcacagtt

SEQ ID NO: 32846 - DNA, 201 bp, Homo sapiens
cccaccaacagtgtaaaagtgtttctatttctctacatcctctccagcacctgttgtttcctgactttttaatgatcgccattctaaagggctaatatccrgaatctacaaagaactgaaacaaatttacaagaaaaaaacaaacaaccccatcaaaaagtaggtgaaggatatgaacagacacttctcaaaagaagacat

SEQ ID NO: 32847 - DNA, 201 bp, Homo sapiens
ctactggatggtctgcatgcagccagcctacagtggaaggtagtaatccatacagaaactcagtagatagttccttaaggatcaggcctagaagtcgcatmcattacttctgcccacacctaacttggaaaggaggctgagaaacgtaatctaactctgttctcagaaagaaagagaaacgggatgacatgaacacatagc

SEQ ID NO: 32848 - DNA, 201 bp, Homo sapiens
aaaaaatagacctggtacttaagtgaaagtactaaagggaagaccagaccaaacatcacagcagttgctgccacattgtttcagcccacttagatttatcyttcaaatgtacaattctgtattgaacatctcccagccatcttcaggaaatcgaatcaagtaaatcctttccaaccgaaaacatttcaactaactatagag

SEQ ID NO: 32849 - DNA, 201 bp, Homo sapiens
aatcatcctttcattcctgtgatgaatccccttgatcatggtaaataacattttcaatgtgcttttgaagtaggtttgctagtatttcattgaggattttkgcatctgtgttcacctggagtattggtctgtagttttcttttttgctgtgtccttgtttgatttttgtagtgaacccatcaggtcctgggttcttctgtg

SEQ ID NO: 32850 - DNA, 201 bp, Homo sapiens
tcaggagctcttttagggcaggcctggtggtgacaaaatctctcagcatttgcttgtctgtaaagtattttatttctccttcacttatgaagcttagtttkgctggatatgaaattctgggttaaaaattcttttctctaagaatgttgaatattggcccccactctcttctggcttgtagagtttctgccgagagatccg

SEQ ID NO: 32851 - DNA, 201 bp, Homo sapiens
ttcttgtagtatattttaaactaagaattctcaaactttaaaatggatttctctttttacaccccaaaatactctggtattaccttgtgaattcgcttgcyatacctgtgtcacgatgtattaaaaagcagcagcagatttttcaccttaacacgcagaaattttgtgaaaatagtttgacttcttctagagtaagtgaaa

SEQ ID NO: 32852 - DNA, 201 bp, Homo sapiens
atttgaggagattgctaattctaactttcctcacaggcacactgggggtattcaataatgaatgaatgtactgcattccaaagtgcttttgtgcaaatagmaaaatagcatttctcttggaaaaatggcctatggactcttcctaaacaaagcatgactaatctgactgaattgaaactccacaaactggctatcaaaata

SEQ ID NO: 32853 - DNA, 201 bp, Homo sapiens
ttaattccataaacacttatttaacatttaatattattgttataagcataatatcatgcaagcttttgagagagataccatggaagtaaagatttcaatcsttagcccgcagatgaataataatcttgaagagaaaagctgaataaatataaagcaactacagcacatttctaaggcaccatatgaacaaatacttaatgg

SEQ ID NO: 32854 - DNA, 201 bp, Homo sapiens
ttaatactcgggccaagctaacaaccatattaaacacacacaccctcccccccacccccaccccccccacacacacacacagtatctcaatagcttaacaraaatagtaacttatttcattcttacatcacaatttaatgtgggttgcctggggagtggaagaatctctgctccaagcagtgattcaaggaaccagccttc

SEQ ID NO: 32855 - DNA, 201 bp, Homo sapiens
taacgaactagattacctttgagatccctttcccctctgagagtctatttccactgttaatagagaacagcattgacagagacgattagtttcctcccccrcccccagtccgttggcctctgttgctaataacgcttggttgaggattatattaaaatgagtctgcatttcatgagtctttaccagctgatggctgataga

SEQ ID NO: 32856 - DNA, 201 bp, Homo sapiens
caggggcatttattatattcccatttaccaccactgggtctcatcattcttgaagattttttttttaatttctttatatgcccatttccttttggtaataycttgcctttcctttttaaatttgaacttgaatattaaaacagatgcaaagaagagtactacttacacataaactcttgaactgcatttttatcatttgct

SEQ ID NO: 32857 - DNA, 201 bp, Homo sapiens
agaatagacagattaatgcaactgaataaaagctctagaacacacccaagtacaaaatttagtatattataaaactggcatcaaaaatcaatggggtaaartaagcattattaaataaacggaactgtgacaactcttaagaaaaatgccttagattttttaattcataccatatacctaaagaataagataaataaaaac

SEQ ID NO: 32858 - DNA, 201 bp, Homo sapiens
tgtgctaaaaggacacgcttgttagcacagaaattctgactttaacatccattcaatgagtttcaccagacctaaataaagggaagtggggaaaagactarattgtagactagtttgaaaaatgccatgtggttattttcaagagcactgtcaaaagcaccaagggaaataggagtagagccatatgttcttaaagtgtat

SEQ ID NO: 32859 - DNA, 201 bp, Homo sapiens
attacctttgagatccctttcccctctgagagtctatttccactgttaatagagaacagcattgacagagacgattagtttcctcccccgcccccagtccrttggcctctgttgctaataacgcttggttgaggattatattaaaatgagtctgcatttcatgagtctttaccagctgatggctgatagaagggcatcccc

SEQ ID NO: 32860 - DNA, 201 bp, Homo sapiens
atttgatttttctgtaagttgacagtttcatcatcatgtctaaataacatttacttgacagtggacccccaggatgccatgatgggcactgactgaaaaastcaattaagcacatgggaacctatcctttaccatagagtatttggaacaacattctttcagaattattatgctttcaaccattggtggatttaaaatatt

SEQ ID NO: 32861 - DNA, 201 bp, Homo sapiens
tgcattccaaagtgcttttgtgcaaatagcaaaatagcatttctcttggaaaaatggcctatggactcttcctaaacaaagcatgactaatctgactgaaytgaaactccacaaactggctatcaaaatattgtagttgtttcaaagaagggttttgaccccttcttttttctagaaagatctgagcacattggaaaaatt

SEQ ID NO: 32862 - DNA, 201 bp, Homo sapiens
ttttacatattaaaaaagaggaagaagaaagtaaatccaaacattaatttagcatcttcttttttaaaaaaatttactttaagttctgagaacatgcacaygtatgtttattgcaacactatgtacaataggaaagacttggaaccaacccaaatgcccatcagtgatgggcactggataacgaaaatgtggtacatatat

SEQ ID NO: 32863 - DNA, 201 bp, Homo sapiens
ctctttccatccttgtagcgccactgtctttaacacatggcttgaaaagttgccatgtttgtctacatcaagctagaggaaaggaggagagcaaagatcaygagtggaagattttattgaccagacctggaaatggtactcaacacttctattttctaaactcagtcatatgtatacagttatctgcaagaaagcctggga

SEQ ID NO: 32864 - DNA, 201 bp, Homo sapiens
ttgggggaaagtggcatttcttttaaattcatcctgcacaatctatctccacaaagttgaaaaaaaatgacgtttttctagtcagtgtctgctgaatataygaccatgtaaacaaaatacagctgattgatatgacacaatttatagcctgtcatgaagatgctttagccaagaccaaatagtgactactgcctcacctct

SEQ ID NO: 32865 - DNA, 201 bp, Homo sapiens
ttttcccatttgcacaaagatcctatatgtgacctcaaagtatataatgggtaaaagtaaaggtgagatactcaaagcttcaggccccatcctagtccctragacgtgctcatgaaatacaatttgaaaaccattccctcagtggcatacgtttacaagtgctaggggaacttaaaacatgacattaaaagaaaagcaaga

SEQ ID NO: 32866 - DNA, 201 bp, Homo sapiens
tagagtaaatgtaaacctttcagtttcctaaaataattcttatgaacttcatttttaaaatgcatttaaatatattttataatcatttaataagatacttyagccttatacatttacagcaattgcctctttggggctgacactttcagaggctgcctagagagacagaacgacgactttggcttcagcttccaggtggcc

SEQ ID NO: 32867 - DNA, 201 bp, Homo sapiens
ggtagtgaactctgtttcctgaaacgaatccactggataatgaaaaccaagacagtacaagaggggtcagcaaactatggcctgtgggccaaatctggccyatcgactgtttttgaaaatcaagttttattggaaaatagctgtgttcattcatttacacattgtctgtggctgctttggtgctaaactggtagagttgaa

SEQ ID NO: 32868 - DNA, 201 bp, Homo sapiens
tgaactctgtttcctgaaacgaatccactggataatgaaaaccaagacagtacaagaggggtcagcaaactatggcctgtgggccaaatctggcctatcgmctgtttttgaaaatcaagttttattggaaaatagctgtgttcattcatttacacattgtctgtggctgctttggtgctaaactggtagagttgaatacta

SEQ ID NO: 32869 - DNA, 201 bp, Homo sapiens
ttcctgaaacgaatccactggataatgaaaaccaagacagtacaagaggggtcagcaaactatggcctgtgggccaaatctggcctatcgactgtttttgwaaatcaagttttattggaaaatagctgtgttcattcatttacacattgtctgtggctgctttggtgctaaactggtagagttgaatactagccacagaga

SEQ ID NO: 32870 - DNA, 201 bp, Homo sapiens
ttgtgtgagcaaatttatcaatacaaggaaggatattccacactttaaatgttaattatcatcaggaaaggtattggcaattaaatagaatacttctttcytccttgttgcacaattctactgcacctaaactcttccagtcactgcacatcaaaatacataaaatggaattgaataaaattcagagaatgaaaaatgaat

SEQ ID NO: 32871 - DNA, 201 bp, Homo sapiens
tttgaaaaagggaataagaaaaatgtacaatatgacctgctaatatctcaaaatacaaaatcataatgaatcctcagttacactgaactttaaataaaacrcaggaaagccaattgtgatttctacaagtaatccaaaagcaatggacaacatttagattcttgcaactctctgagtgttcaatactgaatatgtgaatgg

SEQ ID NO: 32872 - DNA, 201 bp, Homo sapiens
agctaggaaaagctaggtcagtttcaaaattctttggtcttgctgcttctgaggctacatgactttttgatctcagtctgaaaatagctcttgcctctgcrcattcattctatttctgtggtctatctctgagcccactttgctcaattctatgttcaaccctttgctgcttcttcctaaatctagattaaaaactgtacc

SEQ ID NO: 32873 - DNA, 201 bp, Homo sapiens
tgtcttgttgatgatttatttgttcagtagcagaaactatgacaaatggtgtgaggcggcctcatttactttttagctgctatagccctaaagaatttacrtgtaaatgcaactgtgaatgttttacatttcataagcatgctgcacgtgcttttgtaagttaagtggcatttttacagatagactgaacttaaaacaacc

SEQ ID NO: 32874 - DNA, 201 bp, Homo sapiens
gacctgttctattatattggaatttagatatcctagttccaagtgagcataacaattttaaaggcatgttagctaatcaatttatgctatatagtgtaagwtgcaaagtatagtaagaaataagttttaaaaccatctgtcttagaaagcatgacacataatatggaatgtaagatatggtagaaaataaacaagttttta

SEQ ID NO: 32875 - DNA, 201 bp, Homo sapiens
tccaagacacataatcgtcagattcaccaaagttgaaatgaaggaaaaaatgttaagggcagccagagagaaaggtcgggttacccacaaagggaagcccmtcagactaacagcagatctctcggcagaaactctacaagccagaagagagcgggagccaatattcaacattcttaaagaaaagaattttcaacccagaat

SEQ ID NO: 32876 - DNA, 201 bp, Homo sapiens
catcagctcaatatttattttgtctaccacatagtttctactatctcataacgatgtcttttctccactgtaccacatgactccaagagtacctcctcacwcctctcacctcatcccttcagctgcatgtcccattgctaactgcattattatcttggtcactgtaggctcaaaaccctaagagggaatttgattagccca

SEQ ID NO: 32877 - DNA, 201 bp, Homo sapiens
caaatgataagcaaatgtctagatttcaacattctttggcatttgaggatactatttggataggcaaaagtgtcaggtttataatcaaaggattgaaacaygctcttgcagtctgtagctacaaatgagtagaagttcacctcatcttcaatagtttgagcttctgatcactaagctaaccaaaatgtgacatctagagtt

SEQ ID NO: 32878 - DNA, 201 bp, Homo sapiens
tttaaagaagagtatagttcagtagtagacagcacttgaccttttattctgtacacataacaataaaatttaaatatatatatatataatctctctctctmtatatatatctgtataccttgacatgcaacccattttgtatgtttatcactagaaagccctatgatacacaatgttcaaaactacccagaatgggaaaca

SEQ ID NO: 32879 - DNA, 201 bp, Homo sapiens
aatgggacgtatctcaaaataataagagctatctatgacaaacccacagccaatatcatactgaatgggcaaaaactggaagcattccctttgaaaactgrcacaagacagggatgccctctctcaccactcctattcaacatagtgttggaagttctggccagggcaattaggcaggagaaggaaataaagggtattcaa

SEQ ID NO: 32880 - DNA, 201 bp, Homo sapiens
tcttcacatgctagattccttgggatttttgttcttatccatcaagaatttgagaatcctctcaaggttttatataggctggagtgtgtcgctgttgttaygctgcttgtatgttgctatttgttcagttaaagctagctgacattttgtatcattttgaatctcttcagtttaattgttcagatttaagatagtattaaa

SEQ ID NO: 32881 - DNA, 201 bp, Homo sapiens
aaaaagctttttataaactccaaaataccttcatgataaaaaaaaaaaaaaccctcaagaaactaggcatcaaaggaacatacatcagaataataaaagcratctgtgacaaactcacagccaacatcatactgaacaggcaaaaactggaagcattccccttgaggactgtaacaagacaaggatgcccactctcaccac

SEQ ID NO: 32882 - DNA, 201 bp, Homo sapiens
gcccctcccccagcgtcgctgcagtcttgcaatttgatctcagactgctgtgctagcaatcagcgagactccgtgggcgtaggaccctcgaagccaggtgygggatataatctcctggtgtgccgttttttaagcctgtcagaaaagcacagtattagggtgggagtgacccgattttccaggtgccgattcacccctttc

SEQ ID NO: 32883 - DNA, 201 bp, Homo sapiens
attagccacctctcttgttctaattatgtattttcgttaatgctgtctactccagtatcagcttttttggtggccacatgacactatccatacacattgaraacaccggaaactaaaccccaaagcctgtttaacatgttctgaagctaaaccacgttttatttattctgtaagtacatagttgattctttttcagttttg

SEQ ID NO: 32884 - DNA, 201 bp, Homo sapiens
tctttcctgcctcttttttgatccacattagcacctagcatgcagctttcccacacacaactgtaagctccaataatagaatcttagcttagtaaatgccyatccatatgccagcttagcaaatacctatcattctgcatcttttgccagcaccttgaattaaacacaaccaaaaccaaacataactcatcctgacttcct

SEQ ID NO: 32885 - DNA, 201 bp, Homo sapiens
tagtcctactttctagtagaatatttactactgagaaatggaaggagttgaaatcagtaaaatgaaaatgatccaaatacttggtgaaacaacacacagtmcacaaacttttgtttgtaataatgtttactgttattagttgaatcattgcttgattttagtgaaatttttggtgtacaccaaaatttttttcagccctta

SEQ ID NO: 32886 - DNA, 201 bp, Homo sapiens
ttttggatcttagtatgagttttgttatggaaaagctcagggtctatgttggtacagatacagggagaagcacttagatgagcatcatctatttatttgcygagcattgcaataagcactattggagcaggaaacatacaatttatggaccctatcctctatgtatagagtctagacaggagaaataaacatatgcctttg

SEQ ID NO: 32887 - DNA, 201 bp, Homo sapiens
ttacagggtcagaaaaaaacaagagatagagataatatctgtaggaagtggccaccatctctccgactggggaaacaaagggaagaggttggggttgtcaraacctagaaagttggagaatttgctccatggaggtaggacctagtcctctgagaagaagatgccagctagccccatctctactaaaaatacaaaaaatta

SEQ ID NO: 32888 - DNA, 201 bp, Homo sapiens
agagaaagaggtaatacagcaatctccctagatccagaagtacagtttttaagtgtattaagagacagtgaccatgatgaccttctttaatacactttttyctttttttcttttatgtgacctcactgtttctatttctttccaccaaaaagaaataataggaaaaccttaaactgaccgtttgcagacaatggtacatag

SEQ ID NO: 32889 - DNA, 201 bp, Homo sapiens
gtgaaagagaaaaaaaggattaagacctagttcctgccttcatcaacttacaatatagtgggaagaataatgcatatgtataaaaactacaataaaagatkgtatgcaataacaatcataatatatgtgtaaacaaaactctataatagtatagaagaggagaaggtcatccctgccttggagcatcttagaccatggact

SEQ ID NO: 32890 - DNA, 201 bp, Homo sapiens
aagggaggactaacaagatccagaagatctcatggggttaggaagagaagtgagaaggattataaaagtgacattgtagggttaacaatgacaacaaaagraagcaacttggatgtccagcaatagggcattagttaaataattaatggtacatttataacatataacatttaatatttccagattttgaaacaatgagtt

SEQ ID NO: 32891 - DNA, 201 bp, Homo sapiens
tacatttgcataatcaccactccccccttctcccttcctctctctggggcacagaagtgtatggttgccagatacatttggaagtgagtgtatgtgactckcaaacccctagaattggtgttctagagcttctgacactgaacactaatgtatttttcattagtgtttaatgttgggaaatcccatttcatggatcccaag

SEQ ID NO: 32892 - DNA, 201 bp, Homo sapiens
ttgccaaactgtgtactagagattgggaatatatgaaagatgaataacacacattccccaatgtcaaggaatttaccgtctactgggagagattgatgccytattagttaagatcgcctattatgggtaacaggaatcaacttgagctagcttaaactgaaaacaattgtattaaaagtacataagaatacaaggtgactg

SEQ ID NO: 32893 - DNA, 201 bp, Homo sapiens
ttttaactggagacagggttttacaatattggccaggctgatctcgaactcctgacttcaggttatccacccgccttggcctcccgaagtgctaggattayaggcatgagccaccgcacctggcctcaaaaaatactattttgtattgtttttctacatttaatttccttctctttagtttgccacaccttttggctacat

SEQ ID NO: 32894 - DNA, 201 bp, Homo sapiens
tgtgtatatgataagatttacatttttaagtggtaaaagtcaactatttgtactttatagctggtggatctctctctctctctctctctctctctctctctatatatatatatatatatatatatatatgtatatgtttttgctagcagtactataatttccacaatttgaaaaataaattgcttaaaaatttaatttaaa

SEQ ID NO: 32895 - DNA, 201 bp, Homo sapiens
cctaaaagtaaaaatcagttaatatttgacatgcccatatctgacgacgctgagcttggctgtcagtagggtgccacagcttccaattctgaacaattagraaaaaaaaaaaaaactgttaatagccaaaaaacaaggcacatattcagtgtgattgtcatttgcacttctttgcaacagtctagacgtactatatggggt

SEQ ID NO: 32896 - DNA, 201 bp, Homo sapiens
gtgtatatgataagatttacatttttaagtggtaaaagtcaactatttgtactttatagctggtggatctctctctctctctctctctctctctctctctmtatatatatatatatatatatatatatgtatatgtttttgctagcagtactataatttccacaatttgaaaaataaattgcttaaaaatttaatttaaaa

SEQ ID NO: 32897 - DNA, 201 bp, Homo sapiens
caattcactggcctaagtcttaagagaaataatgggtagtatcccttgataatagtttaacatgcctaattcaacatgcaaatacctcatgtttctttttsctgaatctatgactcttgaaactaatattttggagattattgaaggataattttactttaaaaatattaattacgtaagtaacacatgattatattcttt

SEQ ID NO: 32898 - DNA, 201 bp, Homo sapiens
ttgagctgccttctcacaacttcattagccatattctagttaatgaagtctcaagtgcaatctacacatagtttgaggctacatgtgaaaagacatcattwcaaaagaatttatcagataacttttttgtattctgggtgatgttcatccagaatgttgcattttgtttggggaaccataaagacctagttaaattggagt

SEQ ID NO: 32899 - DNA, 201 bp, Homo sapiens
aatcactcttgataaatctttggatttatttatactctttgaactcatggacatattctatttgactggtgaatcaaatgctcacaaagttgggttgttgraacagggctttcccaattgtattttgtgtgcctttcttcctttggctgctggccttttggccttttcactgctcattaacaccttcttggcagtgtggag

SEQ ID NO: 32900 - DNA, 201 bp, Homo sapiens
tgaggtaggcggattgcctgagctcaggagttcaagaccagcctgggcaacatggtgaaaccccgtctctactaaaatacaaaaaattagccaggcagggyggcagcctgtggtctcagctacttgcgaggctgaggcaggagaattgcttgaacccaggaggtggaagttacagtgagctggagttacaggctggagtgc

SEQ ID NO: 32901 - DNA, 201 bp, Homo sapiens
tatgcccaatttttccacaaatttgtaatccatagtaattctgaggcatagcttatgggaaattaggatgctaaagccatgtcagaaaactaagcaagtakaaatttacagtaaattattggagagactcacatcactacattagcacatggtttagctgtattttgacagtggaaaacctggcataagagtctctgggag

SEQ ID NO: 32902 - DNA, 201 bp, Homo sapiens
ggaaccaggggagtctttggagaaatggctgattctaggattggggcagggggtatagcagatgagcccagagcatctggtagtgccagaaagaaaggaarggctaaaaaaaaaatccctcattgatggggatatggcaaagggacacatgagtcaacgaaaagagctcccaatggctaaagctggaagaacttgagcaac

SEQ ID NO: 32903 - DNA, 201 bp, Homo sapiens
ttagggagaataacaggcaatgcaaggagatagacagcagggggaaagggagaaaaaaataaggcttaactgtataactgcattcattcatttgctattaktgacttcagtctgacacatgggcatgccttcccacaacatggatgtttcacctgccctggctcactctgggctgacttgagctatttagcacagcagtac

SEQ ID NO: 32904 - DNA, 201 bp, Homo sapiens
ccttgtttgcaagtaagcccatctagaaagctggtcttttggcactcgggaagcattttccccacaaaaggaattgctgagttttttaccagtatactgastgagctaatccatggaatctgaattcagagtctggaatggcatcaaagttgaagaatgtgagaagtggagatgttaaagtataaggggttccaagtgtga

SEQ ID NO: 32905 - DNA, 201 bp, Homo sapiens
gattctttttcagttttgtgtttggtatggaagataacagtggaaatatatttggagccttgatttggcctaatttgatctcatcttgttagcatgtggaratgttgctgagttctaattctaccatacaaactatttgcttttgctctcagaattatgtcatctgtaggcttgttaggtatgcttccctcttttttatgt

SEQ ID NO: 32906 - DNA, 201 bp, Homo sapiens
gctgatattcagatatagtatgcttacattcttaccgatcttccaatctaataaccatgtcaagaatagaaatgaaatgagattgtctaacataacttgtkcttagagaatttatactgcttgctttcttatggttactacttttttcctaagcgctcacaaactgttcttttattaacctgttgtagaattttgtattta

SEQ ID NO: 32907 - DNA, 201 bp, Homo sapiens
accatgttccaaatcatcagaaccatcccccttctcccacattttgacgatacatacctgtgaggctttttaagactgccctgtgatcaatcttcaaaacwgcttgtgcattgctgcctgccttctgtgttattcagaaaaacaatgccctgtctacccagtacattggggattgggccctgccctgagccctcccttact

SEQ ID NO: 32908 - DNA, 201 bp, Homo sapiens
tacccagtacattggggattgggccctgccctgagccctcccttactcagacgtcagccttgctatctccttctccaagccttcttctcaaaattcccaaygtctagattatattttgggggcagggtgttttttgcaacccggaaagatgggcacattgccaaagatggagaggctgggtgatgtgtgcaagcatatgta

SEQ ID NO: 32909 - DNA, 201 bp, Homo sapiens
taaacttccatattatccttccttatccagaggcccatccttagatatactagagtttgcagatcctttctttcttttattctttgattttttttttcttyagaaagtctctttttcttccctgtggcatgagcctcaatcccaaaggtatcatatggctttggtggcacagtcctgtgactgcttgataaaattctgtaa

SEQ ID NO: 32910 - DNA, 201 bp, Homo sapiens
cctcctcagaagaaagaatttaactgaggggcataaagcagaaaaagagactgaggcaagtttcagagcaggagtggaagtttattttaaaagtcttcagracggaaagaaaggaaaatttgcttggaggagactcaagggggcacctgaaggtccaagggagaaaagagagcaaaaaaaaaggtgcctttaactttgatc

SEQ ID NO: 32911 - DNA, 201 bp, Homo sapiens
aatagaataaacaatggcatatcaatttggcatggaagtaagacagtatagttcaatagttattaacatagatttttcagacctctgccacttattaggtrtgtttccttgggtgagttacttaaccttttcaggtctccatttcctcatctgtaaaacaggcttaaaatcgtacctatagcataggattgttagaagaat

SEQ ID NO: 32912 - DNA, 201 bp, Homo sapiens
accgcatgttctcactcataggtgggaattgaacaatgagaacacatggacacaggaaggggaacatcacactctgggaactgttgtggggtggggggagkggggagggatagcattaggagataaacctaatgctaaatgacgagttagtgggtgcagcgcaccagcatggcacatatatacatatgtaactaacctgca

SEQ ID NO: 32913 - DNA, 201 bp, Homo sapiens
tgagattagtagcaatccataccaccttcaggggatacaggtagtattccaactgtgcagatgaaataatttcagtccataaatcttgtcatgacatactrtatagcctacatgtagaaagctgaccacaatggatattaacaatatagaactagaagagatagagttttgtacccagttctctgatccaaaggttagaga

SEQ ID NO: 32914 - DNA, 201 bp, Homo sapiens
cataaatatcctcaaagcatttcaggtcagcttttgccacccagtgagttaggggaaaacaaactcatttttcagagattctttgattccatagttgtagwtaaagaattgtggagctacccttccccttggccaaggagataatgaaacacatactaagaccaggaagtacagacatgatttctgactctccgtgacctt

SEQ ID NO: 32915 - DNA, 201 bp, Homo sapiens
aaattcaagaatttagattttttttaacagagaggatagaaatggagttttttccccattaaatctaaatataaaaatgctccctcacacagtatttgctraatgtagataaatatgcttaccaaagcccaactctttcacttatagtgctagcaacttcattaatctttctgtgcctacgtttcctcatctataaaatgg

SEQ ID NO: 32916 - DNA, 201 bp, Homo sapiens
tgactaaaatatctcacaagaagacatgaaatgtgaatcaactatttctttgatttatttattttagattatgtgaaaatgaaatgagcgcatatagttgyttttacattcaacaagccaagaaatatttgcccgcaaatagaacacttaccttagactacccaacctttgttccttctgcatagtgattcaagacccatt

SEQ ID NO: 32917 - DNA, 201 bp, Homo sapiens
gctaaattcacaatgtgagaattgtgtgcacatgtgtatatatgtatagacctatatacctattaatcatttttatcaagaaggcccattgctcacagtgygtaccatatattggtcattatgttgctggcaagcaaaaagaaatcacccacttaacaggagagaaacacattaactcttcaaactagtagggggtgcttt

SEQ ID NO: 32918 - DNA, 201 bp, Homo sapiens
aaatattacacaggaaatagaactattcatgagacaaatgtattagagcaaatatcatttctatcttgtttataaattatacaattgccagcatctgtttyctgttagttcttcacccacaccaaccccactgctgattataggaagattgggattgaaaaacatcttagaatcagtccagaaactctatttggaactgga

SEQ ID NO: 32919 - DNA, 201 bp, Homo sapiens
acttgagccttgtaaaattccaggaagtcaatttaaacggtagaaattgagaataatatatatagccagcaatatcctgagtaatttttggagaccaaacrtaaataaatgaatgaatgaccaaaaccttacctccaagaagcttacaattttatacaggtggtaacacagtcttattttggttcattagttgcaactaag

SEQ ID NO: 32920 - DNA, 201 bp, Homo sapiens
aacttgggttagccatcatataaatctttttgctgataggcaacaatctagtcttttgaatcaatgaactattaaatgtataacccattaactggaaggamaaaaaaaatccctcaattttaaaaataagaggttcaatgggcaatcacagttaaatagactttcaaaaaatgaagactgtggagtccagtggtagggaca

SEQ ID NO: 32921 - DNA, 201 bp, Homo sapiens
aaattaaccaggttggactgaagtggtttaaaaaaccagaaggtgaatgaacatcatccatttgcttgacaataaggactagcagcagtatcattatgtcrtaatcatatatgattttcttgcaacttttataaaaggaaaattttgtctttttgatttgttggaaaggggttaatttattttatttctgttcttttgctc

SEQ ID NO: 32922 - DNA, 201 bp, Homo sapiens
aagaataatgcatatgtataaaaactacaataaaagatggtatgcaataacaatcataatatatgtgtaaacaaaactctataatagtatagaagaggagraggtcatccctgccttggagcatcttagaccatggactgttgcctgaagaaggtgtcattcaagcttcaagtggaaaaatcatttgtgcaggtagagata

SEQ ID NO: 32923 - DNA, 201 bp, Homo sapiens
ttagatttcaattcttcttcttttctactacatgcatttcaggctgtaaatttcctctaagttactgtctaagctgcatcccacaagtttttgtaaatagyatttcattgttactcaatttctaattccaatgtaatttttgaaacataattcatgaattctttttaagtgtgtttttaaagaacacctttctgggatttt

SEQ ID NO: 32924 - DNA, 201 bp, Homo sapiens
gggtcttgattttttttagattattttcatatatgtatgtgttcatgtatgcattgttgactttggccaagagtataggaagtaacgtacggaaatgagargggaacatatttgacatatgtagcatattcatgtaagtgaaaggcattaggatagaagttaggagacctttgactggtcactacagttttctgggtttcg

SEQ ID NO: 32925 - DNA, 201 bp, Homo sapiens
taatgcatatgtataaaaactacaataaaagatggtatgcaataacaatcataatatatgtgtaaacaaaactctataatagtatagaagaggagaaggtyatccctgccttggagcatcttagaccatggactgttgcctgaagaaggtgtcattcaagcttcaagtggaaaaatcatttgtgcaggtagagataggctg

SEQ ID NO: 32926 - DNA, 201 bp, Homo sapiens
agtattttatcaaatacctattatgtatctattgagatgataatttgatttttctcttttattccatatatgtgatgaattacatttgttaattttcaaaygtgaaagcaatcttataatatattcctagaataagcacaaattggtcatgatattatttcttgttatgtaatgctagatttgctatgttaatttttgttt

SEQ ID NO: 32927 - DNA, 201 bp, Homo sapiens
aaaggaaggagaataattgtaaaatgtacagggctcagcatcagggaacatttgctaaaagagcattagggactgccatttttaatctgctgaaaatacaycattcctggaatatttgagtagacataaacattctgtccaaccattgaatttcagtgaaatgcaaataacaggatgggtactccctcagagatctgggta

SEQ ID NO: 32928 - DNA, 201 bp, Homo sapiens
tgtgtgtgcgcttttgagagaagtgactttcaccttcaccattatacttgggcacatagcatacctaacacttaataagcagtacaaaaatgtttgtttaraaaattaaatagctggcttgggctaggaaaattattaaatcagcattagcatgtctataatttttcccctctcttaattgttatatttacttctgctgct

SEQ ID NO: 32929 - DNA, 201 bp, Homo sapiens
tcataatttctaacagttatgtaatacttatgtacccagcactatatgtaatatatgtaagcactttacatatattgactcatttgttccttgtaccaacscgattttatagatgggaaaccaaagcatagaaagatttagtgagatgctcagggtcccatagttaatcgatctctgagctaggattcgagaccaggaaat

SEQ ID NO: 32930 - DNA, 201 bp, Homo sapiens
acataaacattctgtccaaccattgaatttcagtgaaatgcaaataacaggatgggtactccctcagagatctgggtagcatccatctccattcattgagtatatatatatatatatatatatatatatatatatatatatatatatatatatatattttatatatgtcttagggaacagtaactttgaccttgcttacag

SEQ ID NO: 32931 - DNA, 201 bp, Homo sapiens
taatttacgtgtaagaagttccccaaatccataaaatataaaataacattcaattcacattttttaacaagacagctctctagtatccctcgaattttaaractagattttggcatacctatgaagtgctacactatgtatttatttaatatagccaaccattagaactattatactgagtgacaaagatggccgaatagg

SEQ ID NO: 32932 - DNA, 201 bp, Homo sapiens
cataaacattctgtccaaccattgaatttcagtgaaatgcaaataacaggatgggtactccctcagagatctgggtagcatccatctccattcattgagtatatatatatatatatatatatatatatatatatatatatatatatatatatatattttatatatgtcttagggaacagtaactttgaccttgcttacagt

SEQ ID NO: 32933 - DNA, 201 bp, Homo sapiens
ataaacattctgtccaaccattgaatttcagtgaaatgcaaataacaggatgggtactccctcagagatctgggtagcatccatctccattcattgagtawatatatatatatatatatatatatatatatatatatatatatatatatatatattttatatatgtcttagggaacagtaactttgaccttgcttacagtc

SEQ ID NO: 32934 - DNA, 201 bp, Homo sapiens
aacagataacagtttctttcaaggctatagtgaaaaggctttggccaaccactaattttaattgctaactaataccgtatactaacgtttaaatattgacrtttaaaattccaaattgtgccataaagtagagctctttaccactctacttagaaaaatgacaattttctaagatgacaaatatattggcttcatttttct

SEQ ID NO: 32935 - DNA, 201 bp, Homo sapiens
ctctacttagaaaaatgacaattttctaagatgacaaatatattggcttcatttttcttttttttaacattacgaaactactctacaaatattagcagagwtatatccatcttgtattttcacaaccaagaaaattaggtagtttgagcaattactacaataatttaaacaaaatggcatttaccacagccttatcttttt

SEQ ID NO: 32936 - DNA, 201 bp, Homo sapiens
atttttttaaattttaaacaattcttgtgtataaggggaaataaaacataaaattttaaaatatctaagaaaaattataacgaacacaccacatgttaaawtactattaaaccttgtataagatgaaaattcacatcaataaaagaaaacaaatctgaaaaatcaataaaaagaaaacacaagaaaggaaataagaaagat

SEQ ID NO: 32937 - DNA, 201 bp, Homo sapiens
agtttggattgcatattgagctttgatgatacaaaatacctacaggactgttccagagatttgatttacatatatatttccctgaatcattagagagaagsagaagagggatgggaaggacataaattagttcttcagtaaagagtgaggacaataaattttcacttagaaacttgttaaggtcaggctcatagagactct

SEQ ID NO: 32938 - DNA, 201 bp, Homo sapiens
cccgattttccaggtgccgattcacccctttctttgactaggaaagggaactccctgaccccttgcacttcccgagtgaggcaatgcctcgccctgcttcrgctcgcacacggtgtgctgcacccactgtcctgcgcccactgtctggcactccctagtgagatgaacccagtatctcagatggaaatgcagaaatcaccc

SEQ ID NO: 32939 - DNA, 201 bp, Homo sapiens
cgatggatcttgactctttatccaatttgccagtctgtgtcttttaattggagcatttagcccatttacatttaaggttaatattgttatgtgtgaatttratcctgtcattatgatgttagctggttattttgctctttagttgatgcggtttcttcctagccttgatggtctttacgttttggcttgattttgcagtgg

SEQ ID NO: 32940 - DNA, 201 bp, Homo sapiens
gaatgaggctgctggatgtatgggagagactcagacatgggcaaagagccccacatggtgcagtagaggaggtcaaagacaacctttgtcctcttcacaayatcaccagttgccctccctaatgagacacaattagaagaaaggccttatctcaaattgacctttatccacttcattactgattgcttgtaagcctctttg

SEQ ID NO: 32941 - DNA, 201 bp, Homo sapiens
ggttgaataattagacacacactgtctaatagggttgtaataagtattaaatgagatagttcaagtgagccacttgaaagatagtaaactacaccacacayacacacacacacacacacacacacacacacacacacacacacaaatagaagagactattttctgaagagactgtttactacccatataacttgaaaacct

SEQ ID NO: 32942 - DNA, 201 bp, Homo sapiens
tctccgtttcatcatactaaggtatgttggccatacctgttcactattaatcacccctcccccccacttttttgtgccttcagaggactgcctagacccartgtgttccaaccatggcatctgtgtaaaaggagaatgtcactgttctactggctggggaggagttaactgtgaaacaccacttcctgtatgtcaagagca

SEQ ID NO: 32943 - DNA, 201 bp, Homo sapiens
agggtgatcccttagccttgcctatataatggaatggtgggtctgcccagagagaggagggcagtgcccaggtacacaaaggcactcacaaatgttatacmtgagccagtatatcactctgcctttgatggcaatataggttatccatgttggcttttatgcagctaggcttggacaaagcagccagaaaaaaatctcata

SEQ ID NO: 32944 - DNA, 201 bp, Homo sapiens
attcagtagggctagggagaaccctaggaaagtgcacaagtgcaagaatccaagtgattctgatgcagatggtccagagagaaccttttgaaaaatctgcsttagaactttgcgcatccaccaaacaaaatatgcaatcgccttgacaccatcttaggaggcaaagcctggagggattggatcaactttggcttgcacgcc

SEQ ID NO: 32945 - DNA, 201 bp, Homo sapiens
cctggcaaaggcttctgctctactaaactgaaaaggtcccagactaaggccaaagcatcagtcgtgtcactgctgctggtccattctgagttgacggttcstcaggccccttgccctttgtgggaagccctcccacttgaaggagactctccgtttacatgatctcttgatccttcgtcttctgcattctctgttttcaga

SEQ ID NO: 32946 - DNA, 201 bp, Homo sapiens
cctgttacaacattaactgaatccaaaaatttgctggtatgtgtgcataggcaaagtatttcttaaggtgtatattgatgaccttcatatgaaaaaaacartgctactgatcactaacagaatattagctgagttagtttttcagaaaggaagacaggtttgcaccaatctttccacaggtcccccatgtgactagttaag

SEQ ID NO: 32947 - DNA, 201 bp, Homo sapiens
aagcttgaggtctaactacagattagagttgtgattgctattagtttacacatggcaatggtaaataggggagtggatgagctctctcacggagggtacayagcataaaaaagaggagaaggctcaagaccaaactctatggaacaccagtattcaagaaaaaacggaggaatgagaacccacaaaggaggctgagagaag

SEQ ID NO: 32948 - DNA, 201 bp, Homo sapiens
acctccttcctaaaccattcaacctctactcctttgaaaataactacccagttggcaaaattcaagatgttgcaaagtataccacaggtatttaaactatktaaaactttaagctaaacttgagtaactcagtactgttgattttatcacagaatctcaatgcctttgtaaatatgcttcctcttcctgacagttagcccg

SEQ ID NO: 32949 - DNA, 201 bp, Homo sapiens
aagttatactgaacaatgaagagataataacagcgttaagaagggaaatgcatttttaaaatggtattaagcatggaaatcagttttcagagatcattctrgctgttgcatggagaaccaagtgaagcaaaataacactagaggcagggagaccacttaagagacagttgaagaaatccaggtatgacaaggaaaaaacat

SEQ ID NO: 32950 - DNA, 201 bp, Homo sapiens
ttgaaaaggagctacattgaatggtaactgggccaggttcctcctagctctaaaggtctatgactataaaaactgttattactattaataccacttgctaycccttactatgtgccaggcactgggctaagcaacttacaccattatctcatttaatccacacaataactttacaagtagatatactatcactagcctcct

SEQ ID NO: 32951 - DNA, 201 bp, Homo sapiens
atacagtagttatttgggttactactcttcccttgtgtttttaattcctttcgtggtggcgggggggttgtttgtgggttttgtttcctcttgtttttgtktgcttttgaaaaggtaactgtaatccatgcttcagtaaaaattaatgcttagggttcaggaaaatattatggtttgctctagttttcaattcatgatgca

SEQ ID NO: 32952 - DNA, 201 bp, Homo sapiens
tctcttaacttctacactgtactaaaatcctcatatggaatatctgtgaagaccacaaaaaactttttacacaatgaaagcaaagtcccagagtctattcrtgatagattttagagaaattctactcacctctatttttaatgtgttgtgacaagtctcataaatgaaaaatgatttaagtttctgctcaattataacaac

SEQ ID NO: 32953 - DNA, 201 bp, Homo sapiens
ctctatttttaatgtgttgtgacaagtctcataaatgaaaaatgatttaagtttctgctcaattataacaacaaacagagcaaaccgacttcaattaaatmctttattaagaaaaatcattatgggttgatgcctcatataccaagttgctagcttatcctgactttttctggaagcctgaacaaaaccttaactataact

SEQ ID NO: 32954 - DNA, 201 bp, Homo sapiens
gcaatggcgcaatctcggctcaccgcaacttccgcctcccgggttcaagcgattctcctgcctcagcctcccgagtagctaggattagaggcatgtgccaycatgccaggctaattttgtaatttttttaatggagacagggtttcttcatgttggtcaggctggtctcgaactcccaacctccggtgatctgcccgcctc

SEQ ID NO: 32955 - DNA, 201 bp, Homo sapiens
ctacaaatgtaatttgtattacaccgtgtgagattgtatagcaagtcacaagagccttaagtttggaaactcatttttctgaatgctacctaatggtcaayagaccacaccagaagaactgtgaaactaaagtttttgggaatgtggaagtttttacaacaaaatttaaagaaatccttctaaatagagaattgtgtcttt

SEQ ID NO: 32956 - DNA, 201 bp, Homo sapiens
caagctttattaaacattttttccagaagagctacattcccacaaggctgcttccataaagtttccaataggatctggtatgaaattaaattcaactatayttatttttgaaagcttcctctatggccttctactaaccatccagcatgggggaaattcaaatgtagacttaagaagtggcactactgcttggtacaagga

SEQ ID NO: 32957 - DNA, 201 bp, Homo sapiens
atattatatatctgcttctcatgagaaaacagaattttctcaccacttagttatccaaatgaaagaaaaagagtatttgattatagacatttagtatgctaaaaaatttacgaacactctagaatttcaataagcagatataagtcacaaccacatactgtaatctaccagaaaaatctcagttgtcagtattaaatattt

SEQ ID NO: 32958 - DNA, 201 bp, Homo sapiens
aaatgtagacttaagaagtggcactactgcttggtacaaggaagctagataagtagaaaacagataaataattgttccatctctgaatgataaaaagtctytttatgccttttcataactacttgtcaagtaaattagtgattttctgatgataactagtgttttaatgagttaaaaatagttggctctttgctgaatgct

SEQ ID NO: 32959 - DNA, 201 bp, Homo sapiens
tttaataggccagaacactaaactcagagtccaagaatgctgagtatgagaaatttatagaaaggtgtaatgaggagacgataacacacacacacacaaamacacacacacacacacacacaccacaaaaaaaaatccctgcgagaataaagcataggtaccataatagttcagacttagaatttgatcattattgtgctc

SEQ ID NO: 32960 - DNA, 201 bp, Homo sapiens
aagtttgggaagaaagaacaaatgacatgctatagctcatctccactacacacactccacataggaagtgctcagcagttggtaaatttctccaggtagcsataattctgtagatagcaccatctttgtaggcgatcactttcttttcatttgtagccatattgtttatatcttgactcagaaagatctgcaatacagctc

SEQ ID NO: 32961 - DNA, 201 bp, Homo sapiens
ttagctttatcatgaatgtctcttaagaatacagttgaactagaacatttatgtgctttagagataatgatgttttttggttccactcttgattggccaaktcagcaaacccagggccctttttataattttgtactgcatgtgacatcttacagatgtctttgtatgtgattttgagcagtaagtgctccacaaacagca

SEQ ID NO: 32962 - DNA, 201 bp, Homo sapiens
tcattcagcacagtgcttagtatctaaaattcccgataaatgtttgcagtggctgctactattgtaattattgcttaatgccaacaggcctgcatgtttaratgcatcatgaggtcttgataactacagtgcaactgctatatgtttaaatgacatgcttagtatatcagtttcctagagctatcataacaaattacccca

SEQ ID NO: 32963 - DNA, 201 bp, Homo sapiens
aatacagttgaactagaacatttatgtgctttagagataatgatgttttttggttccactcttgattggccaagtcagcaaacccagggccctttttatamttttgtactgcatgtgacatcttacagatgtctttgtatgtgattttgagcagtaagtgctccacaaacagcaaagggcaaaattgtcataggtccagag

SEQ ID NO: 32964 - DNA, 201 bp, Homo sapiens
cattcagcacagtgcttagtatctaaaattcccgataaatgtttgcagtggctgctactattgtaattattgcttaatgccaacaggcctgcatgtttaawtgcatcatgaggtcttgataactacagtgcaactgctatatgtttaaatgacatgcttagtatatcagtttcctagagctatcataacaaattaccccaa

SEQ ID NO: 32965 - DNA, 201 bp, Homo sapiens
ctgctattatccaatttttatgggcaaagaaacaatgccagagagtttaagtgacttaaccagggttacctaacagctgggatttgtagataggttgtctraccagtcactatgtgatgcttgtatttccttcagaaactaattcataatgagctgactttaaaagtgaactaagttgataactgcttgtacacaccaatg

SEQ ID NO: 32966 - DNA, 201 bp, Homo sapiens
tgtagtatatttattcctattgtattagtttcagctcttataattagcattttcttccttctactttcttgtatacattggttttctttttctgatttctwagaatcgatacttaggtcatggtttttcagctcgtttttctttctaccttataaatttttctgtacacatggatttagttatattacacattttcattca

SEQ ID NO: 32967 - DNA, 201 bp, Homo sapiens
caatattgggaggattttttaaaaaaatacaaattcaggtagcaagtacttgttaattgtgtgctcatagatgtactaggtgtacttacaagaaatcatcrcattcggaaagaatggtctcactgaggaagaagaaatttctaaacagtgatatgtaatagaattgtttacccaaactctaaacaataactatataaacta

SEQ ID NO: 32968 - DNA, 201 bp, Homo sapiens
ctccagattttttattattattattttatactcaatagtcagtacttctttgtcatctctctgggctagtgggtacagtttattactcaccatcttactgwgattgcagcctttcaagtggctccaactttatgctggagatttagtccaactccatctgaaatggtgccaagacctcatctcttttttccttgtggactt

SEQ ID NO: 32969 - DNA, 201 bp, Homo sapiens
tacaaccattctgttgtgattctgaaaaatataggcaatcactattccctctgcctgaaatgttctttcccttgatatctacctggatagggacctggctyggtctcttgcctgatgcaggttcttacccagatgtgaccttctcagagaggcattccctgactacgctattgaaaattacaaccctcctccaacacattt

SEQ ID NO: 32970 - DNA, 201 bp, Homo sapiens
gattcccagtggatgtctgaaaccttggatagcactgaaccctatatatactatgttgtttgctacacatacatcctaagtaggtgtatatatttatgggrtgcaaaagatatcttgatacaggcatgcagtgtataataatcacatcagagtaaatgaggtatccattatctcaagcatttatcttttgtgttacaaaca

SEQ ID NO: 32971 - DNA, 201 bp, Homo sapiens
gaggctgaggcgggaggattgcttgagcctgagaggttaacgccaccgtgagccatgatctagccactgcactccagcctgggcaacggagtgagaccctrcctcaaaaaaaaaaaaaatagtgaaatcaggataaagaactgattcatgagtcgagattaaaatgtaggttataaacatgttgagtttaaaggtgccggt

SEQ ID NO: 32972 - DNA, 201 bp, Homo sapiens
tagtttgaaaatagcctactctgctatttggccaatactgttcatctagtcctattacttttcaaacagaaatcagaatgttatactcctctatgcctaasatttatagttgtacaaagcaatatatgaaaaatgtttgcttctaactattctaggcagagctgacttgattagctttaaccaattagcacctaatcttat

SEQ ID NO: 32973 - DNA, 201 bp, Homo sapiens
caatcatttactggtatgttaatttcttaatgcattcaatttatcagcagcaggtttttcctaattctaaagaagcaatgcttaattctctttttactgawtaattgtagagaattatacttctggcagttgacaaagggacttacatggcttgcttcaataccattcaagacataggtaaataataaaagtaaacaattc

SEQ ID NO: 32974 - DNA, 201 bp, Homo sapiens
gtcgatagcataagacaaggatagacataaagtcaaatactttactccattattaatccttagaagaatgggtgtggcgactcataggaaacatatgtctkaagacaaaatatatgtcttaaagttcagatgacactaataaccatagagccttgatgattgccatagagtaaaactataaatttttttaaaactaaatgt

SEQ ID NO: 32975 - DNA, 201 bp, Homo sapiens
acagagtcacaagttggataaaaaaacaagacccatccatctgctatctttaagagactcatctcacacataatgacacccagaagctcaaagttaagggytggagaaagatctaccatgcaaatagaaaacaaaaaagagcaggggtcactattcttatatcagataaaacagactttaagccaacgacagtaaataaag

SEQ ID NO: 32976 - DNA, 201 bp, Homo sapiens
cccaggtctttgacagaaagctgctttccatgcctttgtaatgccttgaacacaccttctgcattcaggatgcagaagcctaccaccgttgcaaaggttgyctgatgattgctagtatcgtctctcttgtggactccagttagagttagcgttctaaagcatggtgagcccttagcaatagtgttgaatgggatggggaag

SEQ ID NO: 32977 - DNA, 201 bp, Homo sapiens
agttacatctcaaattaatgatctaacttcacacctagaggaaatagaaaacaagaacaaactagccccaaagcaaccagaagaaaataaatgactaaaaycagagcagaactgaataaattaaactcaaaaatccaagcaaagaattaacaaaaccaaaagttagttatttgaaaggataaaaaagatggatacaccact

SEQ ID NO: 32978 - DNA, 201 bp, Homo sapiens
tgctaggggatagtaatcttacaattttttactgggtagggacagggagggttgttgttcttcacttgtttttgatgcactggagagaaactgactctctrgccaccctgaccttctttaaatctctcaatagctaccaagtctcaaggccttccacacatgccactctctctgcctagaatgccctcccctataaaggta

SEQ ID NO: 32979 - DNA, 201 bp, Homo sapiens
aataaaagtataaatccaatccaaattaaacatactaaaatgacatgatgaatccatgtcaaataaaactaatttctagaatcagagttaggtcctgttgytcagactaagggcatcttggtgaaaggcaaatactgcacttatttttttttcttagaactccagaatgtatttaagacacagagtaagagaaataattta

SEQ ID NO: 32980 - DNA, 201 bp, Homo sapiens
ttgcctatataatggaatggtgggtctgcccagagagaggagggcagtgcccaggtacacaaaggcactcacaaatgttatacatgagccagtatatcacyctgcctttgatggcaatataggttatccatgttggcttttatgcagctaggcttggacaaagcagccagaaaaaaatctcataatatcaggttttactgt

SEQ ID NO: 32981 - DNA, 201 bp, Homo sapiens
gttccaggattatgttaaagtgggctgctgtgagaaagaaactttgccttgttaccctgagcaaggagccacatacgaaaataccccgacacacagctatyctcattaaagtcagctggaaattttggacaagtcttaaatataaattataacttcattagctcatagagctttcttgggagaaagtaaatctaataaaaa

SEQ ID NO: 32982 - DNA, 201 bp, Homo sapiens
gactcaggaatggacatcactcaggtaggcatcactggttttcaagtattattgtcatttggcatcatggaaatggataacaattttctcatgtagaaatkaggtagaatggaagcctggcatatctgttataacaccagatagcagaagtttctctttatgtaagttacttttttcctcgttagaaaagcttagttggga

SEQ ID NO: 32983 - DNA, 201 bp, Homo sapiens
tagactgcatttgggggaaacagtgtaatgggtttgggggaaaaggaaggtgggtaggtgccccattttacctgtatttactcaggaaaggaagctgactrcagtggtaatttctcttagtgggcaggaattatttctcattttggaaagcatctctaacccgaggaaattgaagccatagtaatagattgataggtctgc

SEQ ID NO: 32984 - DNA, 201 bp, Homo sapiens
actagctattccatttgatttttcaaaaagcttattagactgtgtttaggggcaacacaattttcaaaaagcttattagactgcatttgggggaaacagtstaatgggtttgggggaaaaggaaggtgggtaggtgccccattttacctgtatttactcaggaaaggaagctgactgcagtggtaatttctcttagtgggc

SEQ ID NO: 32985 - DNA, 201 bp, Homo sapiens
tagctgagttagtttttcagaaaggaagacaggtttgcaccaatctttccacaggtcccccatgtgactagttaagtagccagcactccttagaagcataygtaggattgcactcataattccaacctcattggcaccagagtccgaccaactgagctaattgcctatagacagtcacatctaggtctcataagactttcc

SEQ ID NO: 32986 - DNA, 201 bp, Homo sapiens
gtctgtcatgcatcaatttttgatagacatacatacaaacgtatatatatatatataatttcttagaataagatcatgtaaaatcacaaaatccagttttwtttgaagtgaggaagcactagaaggattttttttttttttttttttgagacagtctcactcagtttctcaggttggagtacagtcatgagatcatggctc

SEQ ID NO: 32987 - DNA, 201 bp, Homo sapiens
agatcatgtaaaatcacaaaatccagttttatttgaagtgaggaagcactagaaggattttttttttttttttttttgagacagtctcactcagtttctcrggttggagtacagtcatgagatcatggctcactgcagctttgacctcctaagctcaagtgatcctcccactttagcctccggagtagctgaggctaaagg

SEQ ID NO: 32988 - DNA, 201 bp, Homo sapiens
tatcatccgtatctatgttttttaaacactgccagtggcttcccagtctagatttctagtccctacttttttccagaacgtttctaactgcatattggatrtctactagatggcttgtatgtttttcaaactcaacacaaccagcattaattcagtaccctctcttcttcctgaatgccttgttttagttaatggcatcaa

SEQ ID NO: 32989 - DNA, 201 bp, Homo sapiens
ctccttttatgctcttacacccctacaatttactcaaaatacaatagtcagagtgatactcttaaagcccaaagcctatcacttccctgctcaaaacctgmaatggctcgccatctcactgaggacacagacctacataatgtggcttccctttccatgtgtgactccatctcctgctactctctttctcaaccattctgt

SEQ ID NO: 32990 - DNA, 201 bp, Homo sapiens
caaaacaaaataaaaaaggaaattactgtcaaatggaagtgtagttttggaagctgaacccttataaattgtattgatggggaacctgcacctgagccacrgtgaatcacttcacttggattatatttaatggcaattggaaatatccttgttccttatccttttattatatggcagtttttttgcggttcagctcagaaa

SEQ ID NO: 32991 - DNA, 201 bp, Homo sapiens
agaaaattgaatcatgggggcagtttctcccgtactattctcatggcagtgaataagtctcaagagatctgttggttttataagaggaaaaccctttcacytggctctcattctcttttgcctgctgccatgtaagacatgccttttgccttccaccatgattgtgaggcctccccagccacgtggaactgtgagtccact

SEQ ID NO: 32992 - DNA, 201 bp, Homo sapiens
ttaatgtctaagtaaaattataatgtatattataaaatgatatatttatatatgtgggtatttttaagcttttctttggcaaactttcattagtaatgagsacctagagcttcacctaaggtggccaactaggcagttgagtactgattagcacatattttaagcaggatctgattaacctaacgaaaacagatcagcagc

SEQ ID NO: 32993 - DNA, 201 bp, Homo sapiens
ctttcttttcaaaggtagaaaatttaaaagacctaggtaaaacttcacttccttctttccttcccagagttaactgctctcctaaagtcgatatagtttgkatcattccttgcatgtatagtataatgttactatatatgtaagtacccataactataaattactaaaactctttttactcctaaaatttgcataaatatt

SEQ ID NO: 32994 - DNA, 201 bp, Homo sapiens
atacaaaagaaaacaaattgttctaccaaaaagacacatccacttgcatgttcatcacagcactactcacagtaacagagacttgagatcaacttagatgyctatcaatggaggcttggataaagaaaatgtggtacatatgtaccatggaatactatgtagccataaaaaaagaactaaataggccgggtgcagtggctc

SEQ ID NO: 32995 - DNA, 201 bp, Homo sapiens
agacctaggtaaaacttcacttccttctttccttcccagagttaactgctctcctaaagtcgatatagtttgtatcattccttgcatgtatagtataatgktactatatatgtaagtacccataactataaattactaaaactctttttactcctaaaatttgcataaatattttacatgttttacaaatagattttttca

SEQ ID NO: 32996 - DNA, 201 bp, Homo sapiens
tgccaggatacaaaggagaaatatgcgaggaaggtcagaatcccattttaatctattgcttcaggcttttctctcactcagttgtccaaggtgtcattctrttctcctagtagagatgcaagtggcctttgcaaacaataaatgctcagcgtcttagtacatgcagcagagggtttgggtcagcggagctcttgtctcttc

SEQ ID NO: 32997 - DNA, 201 bp, Homo sapiens
gccgtggttacttgttattctgtttgtctgtccccgttgcttttcctgagcaatctcccttgcttatcacctctgaagttgttgtcctaattgggaagtamggttgttgctgcttcctaataaagcactttgatcttcatgtgaaaggtgttactgaagatgggatctcttgattttcagactatactgtctaatgctaaa

SEQ ID NO: 32998 - DNA, 201 bp, Homo sapiens
ctgaactaactgattagggaatgatagagaaaaaaaggctgggcgtcgtagctcacacctgtaatcccaacactttgggaggccgagtcgggtggatcacytgaagttaggagtttgagaccagcctgaccaacttggtgaaaccctgtctctactaaaaatacagaaattagccgggcatggtggtgcatgcctgtaatc

SEQ ID NO: 32999 - DNA, 201 bp, Homo sapiens
gtctcttctgacagattctaatgttatacatgaggctgtatctgtgacactttcagagcaataatgaaaaatagtattgtacatccctaatttctctcackattttctaggttgagaatgtccatattgatgattttaggtgttaactcatatgatttcattattacagaatgcattatgctacatctcactttaaagcac

SEQ ID NO: 33000 - DNA, 201 bp, Homo sapiens
ggtcaggaactggaattattcctggccaatcatatcctgcccctcccttttcctttatcacacccctttgtgtttaccctactctatcagtaaaggtctamccaggaaagtggaaatataaattaaaacagggagactaatggaacttggttacgcaggccatggaagaactgagaagctgaatatgggacattgcagcca

SEQ ID NO: 33001 - DNA, 201 bp, Homo sapiens
gattctaatgttatacatgaggctgtatctgtgacactttcagagcaataatgaaaaatagtattgtacatccctaatttctctcactattttctaggttragaatgtccatattgatgattttaggtgttaactcatatgatttcattattacagaatgcattatgctacatctcactttaaagcacataataaaaataa

SEQ ID NO: 33002 - DNA, 201 bp, Homo sapiens
cagataactcattaagttggagaaacactactgatttgtgtatgttgattttttatcctgcaactttactgaattcctttatttgttctaacagcttttargtggtggctttaggattttctatatataagatcatgtctacaaacaggaacaacataacttctttgttttcaatttggatgccttttatttatttctact

SEQ ID NO: 33003 - DNA, 201 bp, Homo sapiens
cggggcgggggggaaagcataatcttcaaggtgaactttagtgtgctttaagcacattcctctccagtggggaggatttcaaaacttttgtcgtttctgtrggcaatgaggtggatatattagaagcgtgaaagacaggttgaaagtgatcagttaggaaaatgttgcaataatctagagaaagagatgattaggagctta

SEQ ID NO: 33004 - DNA, 201 bp, Homo sapiens
ttgatgattttaggtgttaactcatatgatttcattattacagaatgcattatgctacatctcactttaaagcacataataaaaataataatatatgcacrtttgcagccattttgcaaatgttttctttgggagtgttttgtaattaccattactattattgctttatattatttatttttacatacctcatgctgaaac

SEQ ID NO: 33005 - DNA, 201 bp, Homo sapiens
ttaaaaaattaaaacaggattataacaaagagtaactggcagtagggtctactttatttagccttgatggtcagggaagtctgaatagctgacacctggaycacaagaataagccaactatttgaagatttggatgaatattattcagacagagggaagaacaagggcaaaagccctgactgatacataagcttgggatat

SEQ ID NO: 33006 - DNA, 201 bp, Homo sapiens
actcaccacatataaaaatgtatcattgttggaccatgtccagggccctgtgtcacagagcacaaaggagggagcagtagactatttttgtgagaagaagycttacagtcaggtaaggttttgtagaagtcttaacatttgaattaacaccagaatgatgattgcatgtttatcacatggacaagagaggaacgaacattt

SEQ ID NO: 33007 - DNA, 201 bp, Homo sapiens
gggagaagttagcaggagctagatcacataggactttgaagccactgtaaggaatggctattaggatttatccagtcaaatcaagtgccttttcttatagyaatcattcgaattgagggccacgttcctgggaaagggatattaaatacagtaattttaattttcttatcagtccaggtgcagaaacagtggaaaccaagg

SEQ ID NO: 33008 - DNA, 201 bp, Homo sapiens
aaagaatctttgttcaaaatgtaatgcaaacaccatgaggataactacgcagctattcatcatgccactgaagggaaaagcccactcacatataagatatytagaatttagcatcttcagtagacaaagagacagttaatgtcaccatattaggaacctacgattgcaggtacattcttctctgcagctttggacacacac

SEQ ID NO: 33009 - DNA, 201 bp, Homo sapiens
aaaaatcgaggaaagtgactcctccctaactaattctatgaaggcaacatcaccctggtaccaaaacctggcaaagatacaacaacaacaacaacaacaayaacaacaacaacaacaaactacaggccagtatccctgttgaacatagatgcaaaaattcccaacaaaatactagcaaactgaatccatcagtacatcaaa

SEQ ID NO: 33010 - DNA, 201 bp, Homo sapiens; identical to SEQ ID NO: 5454

SEQ ID NO: 33011 - DNA, 201 bp, Homo sapiens
cgttcctgggaaagggatattaaatacagtaattttaattttcttatcagtccaggtgcagaaacagtggaaaccaaggtaaaacttcttggaggttcgaytgataagataggtcaagtagaaacatgagggagaaggcagaggtaatgctgttgaaagactagttaaaacagctgatcctggattccagaccaccataga

SEQ ID NO: 33012 - DNA, 201 bp, Homo sapiens
catgaagcgttgttgaattttgtcaaaggccttttctgcatctattgagataatcatgtggtttttgtctttggttctgtttatatgctggattacatttmttgatttgcgtatattgaaccagccttgcatcccagggatgaagcccacttgatcatggtggataagctttttgatgtgctgctggattcggtttgccag

SEQ ID NO: 33013 - DNA, 201 bp, Homo sapiens
taaaagagacttttttacactcttccatattgacacatcagtgaagggtatctagaaacaagtatactcttactctgattgtggttatataaattggtacmatattttatcagtacctatcaaaacttaaaatacatatagcctcaactcagtcattccatttctaagaagtattctagagaaatgctggtacatatgcac

SEQ ID NO: 33014 - DNA, 201 bp, Homo sapiens
tgtaaagtctctgactatgattgtgaatttgtccttttccctttcttcttctttcaattttgcttcatttatttggcttactgctttcttcagtgttgggttttgtttgtttgtttgtttgtttgagacagggcctcactctgttgcccaggctagagtgcagtggcatgaacatggctcactgcagcctcgacctcctgg

SEQ ID NO: 33015 - DNA, 201 bp, Homo sapiens
tgaatcaaatgctcacaaagttgggttgttggaacagggctttcccaattgtattttgtgtgcctttcttcctttggctgctggccttttggccttttcastgctcattaacaccttcttggcagtgtggagagctgaaaaaggtgaaatacaaactggttaatactgctaccccagcataaaaatctggaagtagggctt

SEQ ID NO: 33016 - DNA, 201 bp, Homo sapiens
gagatgttcttcagaaatagggcatgtaagggagaggagagagaaaaaaaataatatatgccagtcagtgtactactttcataaacgtcgtctatttaaamaacgcttctaagaagtatctcctttgacaggttaggaaatcaagggaagagtattttctaagcccacacagctactggatctaggattcaaatccaactc

SEQ ID NO: 33017 - DNA, 201 bp, Homo sapiens
ttgtgaatttgtccttttccctttcttcttctttcaattttgcttcatttatttggcttactgctttcttcagtgttgggttttgtttgtttgtttgtttktttgagacagggcctcactctgttgcccaggctagagtgcagtggcatgaacatggctcactgcagcctcgacctcctgggctcaagcaatcctcccacc

SEQ ID NO: 33018 - DNA, 201 bp, Homo sapiens
tcttaaagtgtcaattgtatgaccatgggttgaaatttggctagggaggtgggtgggccgtatgcttgtcgcgtgtgtctgtgcatgtctgtgcggggtakggggtggcagcggggaagaagaagcaagataaagagacttggagagtagggcagagtctgggaaatagaggttacggtatgaggtgacagcaattaaagt

SEQ ID NO: 33019 - DNA, 201 bp, Homo sapiens
agtttagattgaacttgaaaacaaaaatatctttattgttcagccaatcagacttatttagaacataagttattaccaactactgtggtgtatccaaatarcttctgaaagcagtttagtgtagtggttaaaagtgtgggctccagcatcaggctgtgtgggttcaaatccctgttctactgcctggtggttgtaaaaccc

SEQ ID NO: 33020 - DNA, 201 bp, Homo sapiens
aaacggaaatacagagcctcttgtttaaaaagtattacaaacttcaagacagtgactgcagagcattaaatcaagtgtggggccctcctaagcatgggtcrtatccatgaagatggccctgatccctgttataagctttggtagagtggaggacaaagagaagccagcctgcaatttaaaattggccacaaatgatccaca

SEQ ID NO: 33021 - DNA, 201 bp, Homo sapiens
tatgaccatgggttgaaatttggctagggaggtgggtgggccgtatgcttgtcgcgtgtgtctgtgcatgtctgtgcggggtatggggtggcagcggggargaagaagcaagataaagagacttggagagtagggcagagtctgggaaatagaggttacggtatgaggtgacagcaattaaagtggggaaaggagtaaaag

SEQ ID NO: 33022 - DNA, 201 bp, Homo sapiens
ttatccatctcttctagattttctagtttatttgtgtagaggtatctgtagtattccctgatggtagtttgtatttctgtgggatcggtggtgatatcccstttgtcattttttattgcgtatatttgattattctgtcttttcttctttattagtctggctagcggtctatcagttttgttgatcctttcaaaaaaccag

SEQ ID NO: 33023 - DNA, 201 bp, Homo sapiens
ctgcaacctctgcctctggagctcaggtaatccttctgccttagcctcctgagtagctgggactacaggcacacaccaccactcctggctaatttctatawttttaatagaaacaggatttcaccatgttgcccaggcccgtctcaaactcctgggctcaagcaatctgtctgcctcagcctctgaaagtgctgggatttc

SEQ ID NO: 33024 - DNA, 201 bp, Homo sapiens
tgggtgggccgtatgcttgtcgcgtgtgtctgtgcatgtctgtgcggggtatggggtggcagcggggaagaagaagcaagataaagagacttggagagtasggcagagtctgggaaatagaggttacggtatgaggtgacagcaattaaagtggggaaaggagtaaaagaaaagagaggctgtgttcaaagaaaggattca

SEQ ID NO: 33025 - DNA, 201 bp, Homo sapiens
gcagagagaaatactaccacagcttaatcctgcagaaagcatctctcttcagttttacagcacagcctccaacccaaaagcccaaaataaagcctaatgtscataaacatatggtaccaacctaataagagcatttatttactcactccttcatatatttatccgatatgccctgatcacttttgagtgaccaatgctatg

SEQ ID NO: 33026 - DNA, 201 bp, Homo sapiens
ctgggcacatttacaaatgtcatagaaataggacttttatggcatccatttattcattattcaaatatataatgaatgttcattttttgggggggaggatrgagtctcgctctgtcacccagacttgagtgcagtggtgcaatctcggctcactgcaacctccacctcctggtttcaagctattctcctgcctgagcctcc

SEQ ID NO: 33027 - DNA, 201 bp, Homo sapiens
ttgtagggttaacaatgacaacaaaaggaagcaacttggatgtccagcaatagggcattagttaaataattaatggtacatttataacatataacatttartatttccagattttgaaacaatgagttagaagcatattctatcttaaggaaacatgcatgttatattgttatataaaacaaacaagtatagtataataca

SEQ ID NO: 33028 - DNA, 201 bp, Homo sapiens
acccaaaagcccaaaataaagcctaatgtccataaacatatggtaccaacctaataagagcatttatttactcactccttcatatatttatccgatatgcmctgatcacttttgagtgaccaatgctatgctagatgcaatgttgtactgtgctaggtgaaagaaatttgcagtcaaatttcaactctaatcagaattcag

SEQ ID NO: 33029 - DNA, 201 bp, Homo sapiens
aatcagaatgttatactcctctatgcctaagatttatagttgtacaaagcaatatatgaaaaatgtttgcttctaactattctaggcagagctgacttgaytagctttaaccaattagcacctaatcttataaaggccctttcagttcagtttttaatgtcttgggaggaggccgtgaaggggaacagaatgataatatca

SEQ ID NO: 33030 - DNA, 201 bp, Homo sapiens
tctacatcccactccctcagttgcagcctggtgggagttatcattccccaagaataacttggtcaagagtttatattgatatcagtgacaatctaagaaamttacaactccatcttgacctatacatagtagaaaaggggaaaaataagatgtgcatggaaatttcaaactctcaactcccttcccttcagttgtatacta

SEQ ID NO: 33031 - DNA, 201 bp, Homo sapiens
aatcagagtaccactataaggcattcaatgagtatcaaataaaagtttgaatagggcactgtgagactatggagagggccaggttaactttggctaaagcraggcttagaaaagagataatttgaagtaagccttgaaaaactgttacaactttcaagaggtagatatggggaagtatggctttctatgcaaagaatcact

SEQ ID NO: 33032 - DNA, 201 bp, Homo sapiens
tacagcaatctccctagatccagaagtacagtttttaagtgtattaagagacagtgaccatgatgaccttctttaatacacttttttctttttttcttttrtgtgacctcactgtttctatttctttccaccaaaaagaaataataggaaaaccttaaactgaccgtttgcagacaatggtacatagctctgaaattaatc

SEQ ID NO: 33033 - DNA, 201 bp, Homo sapiens
tacacacttccatccagccatccttgtatccatcctaactttgtggaacaggtggttaaggcgaggcgatcttataaggccatgaactgaccaaactaagrgatccattttataatcacacctatgatatcacttcatctgtactatagccaaatcagctatgtcaaccagccccacaggctgagaaactttgaatggcaa

SEQ ID NO: 33034 - DNA, 201 bp, Homo sapiens
taatgccttgaacacaccttctgcattcaggatgcagaagcctaccaccgttgcaaaggttgcctgatgattgctagtatcgtctctcttgtggactccarttagagttagcgttctaaagcatggtgagcccttagcaatagtgttgaatgggatggggaagacaagtctgtgagctctttctcatttagagtaagactt

SEQ ID NO: 33035 - DNA, 201 bp, Homo sapiens
gtgtaagggtaatatatatattatatattatatattactctatattgtatattatataagtatatattatatattactctatattgtatattatataattrtatattacatattactctatattatatattatataagtatatattatatattactctatattgtatattatataattatatattatatattaatctatat

SEQ ID NO: 33036 - DNA, 201 bp, Homo sapiens
tctccttttatgctcttacacccctacaatttactcaaaatacaatagtcagagtgatactcttaaagcccaaagcctatcacttccctgctcaaaacctscaatggctcgccatctcactgaggacacagacctacataatgtggcttccctttccatgtgtgactccatctcctgctactctctttctcaaccattctg

SEQ ID NO: 33037 - DNA, 201 bp, Homo sapiens
acacaccttctgcattcaggatgcagaagcctaccaccgttgcaaaggttgcctgatgattgctagtatcgtctctcttgtggactccagttagagttagygttctaaagcatggtgagcccttagcaatagtgttgaatgggatggggaagacaagtctgtgagctctttctcatttagagtaagacttttagtcttcgt

SEQ ID NO: 33038 - DNA, 201 bp, Homo sapiens
atatattatatattatatattactctatattgtatattatataagtatatattatatattactctatattgtatattatataattatatattacatattaytctatattatatattatataagtatatattatatattactctatattgtatattatataattatatattatatattaatctatattatatattatatatt

SEQ ID NO: 33039 - DNA, 201 bp, Homo sapiens
aaaccaggtctgcctgactccgaaaaacccatgatgccattttttttttttttttttttttttgagacgaagtctcgctgtcaccctggctggagtgcagyggcacgatcatggctcactgcaacctccacctcccgagttccagcgattctcctgcctcagcctcctgagtagctgggattacaggaaggggccaccacg

SEQ ID NO: 33040 - DNA, 201 bp, Homo sapiens
caactgttatatcctcttgctaaattgacccctttatctttatataatgatcttctttgtctatttttatagtttttccttaacgtctattttatcttatrtaattatagctcctcttgctctgttttggctttcatttgcatggagcatctttttctaccacttcactttcagtctatatgtgtccttatagattatata

SEQ ID NO: 33041 - DNA, 201 bp, Homo sapiens
aatttaatccatttacattcaaggtgaggacttactgctgccattttgttaattgttttctagtagttttgtagattctttggtaccttccttcctctgtktgtgtgtgtgtgtgtgtgtgtgtgtgtgtgtgtgtgtaagtgattttctctagtgatatattttgattccttactttgtatttttttgcatctactgtgt

SEQ ID NO: 33042 - DNA, 201 bp, Homo sapiens
tcatttatttgcacaatgccacatatgaggttcaaatgaaatgtaaaagtacattggctgagtttatgattgtagccaaatattgagaatttattatggaktatattgattgtcagattattttgatttgtcctttaaaaaatttttctatttcttactccgtgtaaggaactgggttaagtgcaatgtattcaatggtga

SEQ ID NO: 33043 - DNA, 201 bp, Homo sapiens
aaagagcagggattgcaatcctagtctctgacaagacagactttaaaccaacaaagatcaaaaaacacaaagaagggcattacgtaatggaaaagggatcrattcaacaacaagagctaactatcttaaatgtatatacacccaatacaccaagattcataaaacaagttcttagagacctacaaagagacttagactccc

SEQ ID NO: 33044 - DNA, 201 bp, Homo sapiens
atttgtaagataggtttcaaactttctaaataggtttatttagtggatttagaaaataaaaacccaaaattcttgcaacaaataaatataacacccctagmtgaatatctttgcatttcaaggtgcaagatgaattccttgaaagcaaagttacatttgtcttaaaagtcttataatttcaaggttaacttgtatatttat

SEQ ID NO: 33045 - DNA, 201 bp, Homo sapiens
agagtaagaatattggagagtaataggaaaggggggcagaagcaagaaaaggaagtttggattttatcctatagggaaaggatttgaagcaggagagatgmccaccttgtgcatgcgtttttgataatgttggcgacagggtaataaatgcgctggagcaaaactggggcaaataaatgacagggagtactcatctgtata

SEQ ID NO: 33046 - DNA, 201 bp, Homo sapiens
tatcattgattaatgggtataaatatacctctcttcatcctcccttacccttcccagcctccggtaacgactaatctactctcttttttagctcccacgtrtcagtgagaacatgtgatatttgtgtttctgtgcttgacttatttcactcaacataataacctctagttccatccatgttgctgcaaatgataaaatttc

SEQ ID NO: 33047 - DNA, 201 bp, Homo sapiens
aaaaatcaagaagttctgtgaaacctattagaacaaagagacaatgtactagaatccctgggacacagctaaagcagtgttaagagggaaatttatagcastaaatgcccacataagaaagaaagaaaaatctcaagttgacaccctgacatcacaattaaaagagccacagaagcaagaggaaacaaatccaaaaactac

SEQ ID NO: 33048 - DNA, 201 bp, Homo sapiens
ccagaggtgtaaaactagaaatctgttagaccagtttgaatgtaatgttgtagtgagtaactccagtcaagaccaaagcctaacagagcactgtcttcccygtgattagattcaaccaagaataacagaaaaccctaacatgacagtgatgtaagcaagagagcagccaggctagatgtgtggtttagggctgagatggca

SEQ ID NO: 33049 - DNA, 201 bp, Homo sapiens
atgagatccattatcagtgacagcatgagcgtgagtatgtgtttgatttaaaaaactacttaagatgaggtaatggaaaagaagcgttttttgtccatgcmtattaaaagaatgggagacaattaaatctcattatacagtggctggcttgaattgtttatcttttatgtatggcattgtttgggcacctcatggggtaac

SEQ ID NO: 33050 - DNA, 201 bp, Homo sapiens
gagatccattatcagtgacagcatgagcgtgagtatgtgtttgatttaaaaaactacttaagatgaggtaatggaaaagaagcgttttttgtccatgcatmttaaaagaatgggagacaattaaatctcattatacagtggctggcttgaattgtttatcttttatgtatggcattgtttgggcacctcatggggtaactt

SEQ ID NO: 33051 - DNA, 201 bp, Homo sapiens
tcccatttatagtagccacaaaaaaataaaatacttaagaatacatctaaccaaggaggtgaaagatctctacaaggagaacttcaaaacactgctccgakaaatcatagataacacaaacaaatggaaaaacattccatgctcatagattggaagaatccattgattcaattgaacaaggaaaaaacaaataatcccatt

SEQ ID NO: 33052 - DNA, 201 bp, Homo sapiens
aaaattattataacacatgcttatcataaaaataacgagtatgtgtataacacaatatatgctagattgttctaagcaatttttatataataactagatcmtgaaataaatagtacagaattatgtaatgtacacttaaaagttctatttctcccactattctactctgagagatgagtattcttcctgatatttcttaca

SEQ ID NO: 33053 - DNA, 201 bp, Homo sapiens
aatgcagttcttatacttctaatgaaatatgacactttttatgaagcctaatagagtttcttgcagaaatgccattaatattgttctcacagaaaatattrttcacaaactacacaggcccatgtacccaacttttgagctgcaggcatttcagcagtgcgcagtttgctgttctcctcccaggcaacagatggtaaacca

SEQ ID NO: 33054 - DNA, 201 bp, Homo sapiens
aaattattataacacatgcttatcataaaaataacgagtatgtgtataacacaatatatgctagattgttctaagcaatttttatataataactagatcawgaaataaatagtacagaattatgtaatgtacacttaaaagttctatttctcccactattctactctgagagatgagtattcttcctgatatttcttacac

SEQ ID NO: 33055 - DNA, 201 bp, Homo sapiens
aatgctttgtggagataacttggacaatgatggaggtgagtcatttataaaatgttcacgtaagaaaggaatagcccagcctctagcacagtggtaatcarcctggccaagggtgaaaattaggaatctctagtataaatgatactgagttatatagggtaatgctaccttttagtctcaatcacattaagaagacattac

SEQ ID NO: 33056 - DNA, 201 bp, Homo sapiens
tgtattgtcaagtaaaaaaaaaaaaaaatggtctgggtgcagtggttcacgcctgtaatcccagcactttgggaggcccaggtgggaggattgcttgagcytaggagtttgagaccagcctgagcaacacagccaaaccctgtctctacaaaaaaaactaagaaatttagctgggtgtgatggtgcacacctgtggtacca

SEQ ID NO: 33057 - DNA, 201 bp, Homo sapiens
agagaattctaagcctatagattacctggctatcatggaagagtgatgagcaaataatagtcaagtggctttatttcatttgataaagttgagaaaagcamataacccagtgaatatactagtaaggagcagaaatttgcacagaaaatgaatgaattagacaggggtgttcagagtcaaattatatcaggaggcagcaaa

SEQ ID NO: 33058 - DNA, 201 bp, Homo sapiens
acattaagaagacattacttattgaatattactatgaccaggcagtactccaattttttttgcatgtgttatgtatcatttaattctcacaataaccctakgaggtataggtattactattttccccacttgtagatgggaaaattaatgctctgggtggggatagtaagtgacttatccagaatcacatagctagagagt

SEQ ID NO: 33059 - DNA, 201 bp, Homo sapiens
ctaatcttataaaggccctttcagttcagtttttaatgtcttgggaggaggccgtgaaggggaacagaatgataatatcagccttactacaaggactgaarttataaatacaaattatcagagattcagaccaagattcgggaccaggggttcttttgggataattctacctgagctaccactttttaagccaaggcccac

SEQ ID NO: 33060 - DNA, 201 bp, Homo sapiens
tacctggctatcatggaagagtgatgagcaaataatagtcaagtggctttatttcatttgataaagttgagaaaagcacataacccagtgaatatactagkaaggagcagaaatttgcacagaaaatgaatgaattagacaggggtgttcagagtcaaattatatcaggaggcagcaaaaaagggaatgaccagctagcag

SEQ ID NO: 33061 - DNA, 201 bp, Homo sapiens
ttttcaaatccttttgtataacctaccatgaattaaccacccattattatcaaggtgataatacaagtgctgtctctaaaggatatatatttgtaaattcrttttcaggattagaaagtatgggtttcctctgtatcactcatattccttcatccatttcccctttcagccaagggcatacaattagtaggcataagttta

SEQ ID NO: 33062 - DNA, 201 bp, Homo sapiens
caaaaaatgagaagcaggaagtctatgtggggttaaggaatgagctacaaacattcattagcagagacctgatcctgaagatactttgctaattcatctcyaggccaccacttctgatatttgtattagtcagaactccgacagtgaatggtggtagcccaactccaactagcttaagagaaaaaaaaagtttttttggct

SEQ ID NO: 33063 - DNA, 201 bp, Homo sapiens
ctgtggtaaagcaattgataacctcatttaagctacatggcatagtggttaagagaatgggcattaaactcagacaaacttgtgttaaactagcattttcttttttttttttttcaacttctactttaagttcaggggtacatgtacaggtttattacgtaggtaaacatatgtcataggggtttgttgtgcagattattt

SEQ ID NO: 33064 - DNA, 201 bp, Homo sapiens
actgttgtcaacaaagcaactgttatataagtcctctctgccagggctcaccagatcctcttgacctcattcagcaaagccaaactctcttctctcagcayacttcaagacttttttatgatcgaatcaaattcctcattggcaaggacagtactcatgtcattcctcctgaggtgtcatttgacagcaggtacatatgta

SEQ ID NO: 33065 - DNA, 201 bp, Homo sapiens
gataatccagaatagtctccctatcttaatgtcaacggattattaactttaatttcatctgcaaccttcatttccctttgccatgtaacctaacatatttrtatgttgtgggtattagaatatggatgtctttaggcattattctgcctaccacaaagataataaacatacattgttatactatgattaagacattgtgtt

SEQ ID NO: 33066 - DNA, 201 bp, Homo sapiens
acaatgtgcaggttagttacatatgtatacatgtgccatgttggtgtgctgcacccattaacttgtcatttacattaggtatatctcctaaagttatcccycccccctccccccaccccacaacagggtgagtgatgtcccccttcctgtgtccaagtgttctcattgttcagttcccacctatgagtgagaacatgcgat

SEQ ID NO: 33067 - DNA, 201 bp, Homo sapiens
gagggtgtggaagttcgtttttttctttatatttgtaaaatatttatttatggaatcactatgggaacgtatataaatgtatagtagatataaattgctasttctatttataaaaatccagtatctcttttaagtcaatggtattagtaagaaaaaaattatgatcaatgtttttccaacttttacattccagtgcatcca

SEQ ID NO: 33068 - DNA, 201 bp, Homo sapiens
aaaaaagaaatgaagtgaaagaaataacaacctccatgacatggagaagtgttaaatgactcactaaactcaagtaaggggagaaagtcaagacctaagaragacaagagacaagtcattgtgacccagagcagagcatgtgagcaataaacttagaaaagtgaggacaaacttaaatccctgcggtttagcttcatgcat

SEQ ID NO: 33069 - DNA, 201 bp, Homo sapiens
gaaataaattgaaccaaggcactgaaagaccactaccaagaaaactaccaaatcactgatgaaagaaattgaagaggacacaaacaggtggaaagacatcygatgctcatgaataggaagaattaatatagtgcccaacacaatctacagattcaatgcaatccttatgaaaatgccactgtcatttttcacagaaataga

SEQ ID NO: 33070 - DNA, 201 bp, Homo sapiens
caatgtgcaggttagttacatatgtatacatgtgccatgttggtgtgctgcacccattaacttgtcatttacattaggtatatctcctaaagttatccctmccccctccccccaccccacaacagggtgagtgatgtcccccttcctgtgtccaagtgttctcattgttcagttcccacctatgagtgagaacatgcgatg

SEQ ID NO: 33071 - DNA, 201 bp, Homo sapiens
gttttgtcaatatactatcaaatcactatttggctctttgtgctttttccccccaaggtgatgatttggggaccaaatggagtcaactgttccaggcatcrtgtagactcatattacatctatcctgtatatcattaatgtccttgggcaatcctcatagattgttttacctgcacatccttccaaaatgtgtaaaaggaa

SEQ ID NO: 33072 - DNA, 201 bp, Homo sapiens
ttgccagccgctcagagtgaataaacctatttcttgtggtggttaatgcccttctcctcctcctggtttgattgagtttccctcattcttttgtaaaatgytccaagttatcatttggctctgcaagtcacatttaaattcagaacgatgggtctccttcatccaggggtctcagctcttacaaatatatccattctatca

SEQ ID NO: 33073 - DNA, 201 bp, Homo sapiens
attcatttttctccaactacaccacacactttctcaactccagaccgacagcttcttttacccagaatgtcaatttctttcctttgtatctggcaaacttstaagcactattcaatagccagttcagatagcagctcctctgtagatctctaaatctcacaaggtaagtcaccttggttttttaccttagagcattctgta

SEQ ID NO: 33074 - DNA, 201 bp, Homo sapiens
gctatgccactaaagagtctttgtagaaattaatggtaaacaaagggtacattatcaacctcttattgttgagaagtagattctgagggttttttaaatartagggcttcatttgcgctgagttaaccatatcctctcatctagttcttggaaataaatgacatgcattcaaccagaatgaatagccaggattatgagaga

SEQ ID NO: 33075 - DNA, 201 bp, Homo sapiens
gaaagcttgcattgtagcaactcttgtaacctttccattacgccacagctgccccatttcaatgggtccttaaataagcctggtgacgtgaaccaaatttmtactaggtaaatggtatttgggtcaacacaagaaacttagaaaccaaatgacattttaaaaatccagttcaatttaatacatttcagtgacatcatttac

SEQ ID NO: 33076 - DNA, 201 bp, Homo sapiens
ctttttacattttctagtccaccattattgccagaagccgaattcttaattcctactctatattgcctcagggtagtttggttaacaaacagcaaaattcrcttgccatccacacaccttctctttatagcataagaaatcatgatattagaaaaaaaaatcttgatacatctggtttcagagaaaactgcagtgcttcca

SEQ ID NO: 33077 - DNA, 201 bp, Homo sapiens
tgactccgaaaaacccatgatgccattttttttttttttttttttttttgagacgaagtctcgctgtcaccctggctggagtgcagcggcacgatcatggstcactgcaacctccacctcccgagttccagcgattctcctgcctcagcctcctgagtagctgggattacaggaaggggccaccacgcctggctcattttt

SEQ ID NO: 33078 - DNA, 201 bp, Homo sapiens
aaatagctatttctagggtgtttggaagttttcttaagtaaaagcaacatcccctctgagatctattttactgttatttaggaaatctgtgtttttttggktttttttttaggccagtgaggataaaagaaaattcagtgtagctctcatctgggtccaaaattctgattttaccacaattctacaaaatcagtattagac

SEQ ID NO: 33079 - DNA, 201 bp, Homo sapiens
aaggcataattagtaggtcctgagtgccgagataatgggtgcatttggaactgtcaaggggagattaggctccaggaagcttagttattttatttaagtcmtcttataaccacaggctccagtcttgcacatgggagcattccatctctcactcctgtgccccagaaaaagctgatgagccctcagcagaaaaataaaagt

SEQ ID NO: 33080 - DNA, 201 bp, Homo sapiens
cttttttccctatatttaattatgtgaaaaaagtaggcatttagtgcattatagtctgcttccatgacaaagtctaggattagttgctactgtatttgctrgttcttgtgagcttggagagaagctcaactccatggggtgaaacatttgccttctcataagctgattgcaagttccaggattatgttaaagtgggctgct

SEQ ID NO: 33081 - DNA, 201 bp, Homo sapiens
acaaacatgtcaaaggatcataggtgctttattgttgaccttcatttccagtgattgtaacaaagatcaacctaactgacagaaattaacacagcatactrtatcttacctgctggcttagtgagagggccattcaaagtcctcaaagggatgtacttgacaatccgaaaaacagtaaatagtatccagggctgtggaagc

SEQ ID NO: 33082 - DNA, 201 bp, Homo sapiens
agagtggtgtctttcactgtttctttcctctaggataaccattctcaagcattttggtctcaggacccatttgcatttctaaaaattgttgggggccccarcgagctattcttttgttggttttatcctatgaatatttaccttattagaaaataaaagtgtgattttttttaaaactgaagatacactagcctgaggtag

SEQ ID NO: 33083 - DNA, 201 bp, Homo sapiens
atgaaggaaatagattagacagtcctcaaaccttccagctctaacattccataaatttgtgaccctaataaagtagattattaaataatcttttcaaaaamactaaagtggatgttgagagttttcaaattgattagtgtatcacagaggatggtcttgtctgcaagtaataaaatacttgtctaaaagttgtttaaacaa

SEQ ID NO: 33084 - DNA, 201 bp, Homo sapiens
acttcccaaaggacatgacaaggtcctgttaactcactctgctcactgcctagtatagcactgtacatttgataaaacattttcatgaagaaaggaggaarttaaattgaactaattttctaagactaagagaaatcagaggagactattttgttttgatttctttactttaaattgagtgggtgttcagtgaagctgtgt

SEQ ID NO: 33085 - DNA, 201 bp, Homo sapiens
tggcacagacctgctggcaagtagatgaattcagagttactacaattcagagagacacaatagctttaatctgctgtaaaaacatccagtattcacatatrcttcccagtctatggattattgtgcgtgtcctgcacagcgaggcattcagcaagcatttactagttattcctggtgcactgccgcttctatgaggaatga

SEQ ID NO: 33086 - DNA, 201 bp, Homo sapiens
tgatgtcatgtaaacttttctagaaatctatcactatgtaaacaaatgattgaaaatcctgcatgggggacaaaacagttggtggggatgttaaattgacrtaaagggaaatgagaagttttgggggtgatggaaatgctatcacgattgtggtagtggttacctgattcaatgactgtcaaaactcattaaattgtacgc

SEQ ID NO: 33087 - DNA, 201 bp, Homo sapiens
gcagttaggaaagagtttaataaaatctaatcatctcaagaaatgaaatttgctttgacaataaaatcatccatttgttcaaaatcaatatctttttttgmtttactgaaatctgaaactgaactctcagtataaactctgaagcataactgccctttgtaagcactgctataagcaaccaggcctttcacttcaggagat

SEQ ID NO: 33088 - DNA, 201 bp, Homo sapiens
gctccacattctttctcaacacttcttgtgggcagaattttttttagccatagtagtgggtatgtagtggtatctcattgtggctttagtttgcattttcmtggtaacagtgatgttgagcatcttttcatttgcttattggccacctctattgtttgttgtgaagtgtctctttaaactttttgcccacttaaaaaattg

SEQ ID NO: 33089 - DNA, 201 bp, Homo sapiens
tttaaaaaactgccttcttgtacgcattaaagtttgagaatctctactgcagtatcttccttagcattgtctctcatatcttctccttctttccattcacrtgaaattatttttcactgagatgtagtttttctatatgagctgtttgggcataccctaaatttagatcttcatgtcatttcacttgaatcacccataatt

SEQ ID NO: 33090 - DNA, 201 bp, Homo sapiens
tactttccccatagggaggttgtgagaatttaatgtggtaatatgcataaatcacttagcaaagtgtttggctcataagcgttcaatagattattattttwtcattattattattactattactagtaatagtagtagtagtagtatttgaccttctgctcacaaaagagaattgaactgatagcttacaaaactaaaagg

SEQ ID NO: 33091 - DNA, 201 bp, Homo sapiens
gctttgctttctcctttggatcatgtgtgtatgcaatatgtaaacttgaacaacttttccctgctctgttctgtatgtcttactttgactcctactaataktttcaataaggagtatataatttgggtccttatttatcacctatggtaagattttaccaatgtggattccacagattttaattgatgacaaccatgcctg

SEQ ID NO: 33092 - DNA, 201 bp, Homo sapiens
aaaagacatttcaggaaccatagcagttaaagtcagtgaggttaatagtggagtcaagaataagtagtttcaacaatcaaaacaagcttcccacacttctmtgctaggttcattcagtttttttcttttttaccaagaaagatattgaaggttcattcattttttaaattgaattctgcatatcaagcaatgaaagttaag

SEQ ID NO: 33093 - DNA, 201 bp, Homo sapiens
ggaaaagtgtgtctaggattcagaacagatctgggctgttgttataagtagatttgagctcatcagtgtctcagaatagagatgccaggggatggatgagrttacccagggagagtgtatagaaggttgagactagaaaaaggccaaggacaaaaacctgaatctatcatccatgaactgacataaacacattttgaacca

SEQ ID NO: 33094 - DNA, 201 bp, Homo sapiens
gtggcaaccaccacaaatgaggccaaatagtttgcctgtaggttgggtcactaggcagagtttacagagctttgctgctgctcttcaatctctgttcccacccccccaaaaaagaagtgtttatttaccccaagaaatcatttggacaaatggtagcagcaattgggggccaaccttagccccaccttagtatcatataat

SEQ ID NO: 33095 - DNA, 201 bp, Homo sapiens
caccaacaattctcttgcccccttgactccatatacaacaaaaggtcctgtagatcacacctggaattatttggaggaatagaccaaagaagaaaaaagtkgttttatctgtgatttttaaggtgaaactttctgttggacctagaaaaggatgaaaccgttcttatacacataaagtcacctagtcaaaagtagtaaaac

SEQ ID NO: 33096 - DNA, 201 bp, Homo sapiens
aagttggagaacacagcatttgacctactcttctagtcagggtcagagcagtgctaaggtcggtagaaggctgctataccactgataccaggccctcctawaagaactcgagtaattccccgaggtaaaagggaggcttctttatgtggacaaggggacaaattgtttgcacaggtggaagtataagttctgctctgagag

SEQ ID NO: 33097 - DNA, 201 bp, Homo sapiens
aaaaaattagccgagcatggtgggtgcctgtaattccagctacttgggaggctgaggcacaagaattgcttgaacccaggaggcgtaggttgcagtgagcmgaaatcatgccactgcactccagcctgggggatagagcaagactcagtctcaaaaaaaaaaaaaaaaaaaaaagatgcagtcagaaaaacagaaagtaca

SEQ ID NO: 33098 - DNA, 201 bp, Homo sapiens
tctcctaaagtcgatatagtttgtatcattccttgcatgtatagtataatgttactatatatgtaagtacccataactataaattactaaaactctttttrctcctaaaatttgcataaatattttacatgttttacaaatagattttttcaaacagctttgtttttgagatttttttcaggtcgataaaggcagatctag

SEQ ID NO: 33099 - DNA, 201 bp, Homo sapiens
ttgcacaggtggaagtataagttctgctctgagaggagcatgagagaaacagaaacagaagtgaaatttggcaggatggaagactgcagtgtaaaggtagsccagtcactaatccattcaactttctattatctgcagctatcaggaggaaaaatgacatagatgaccctgaacagtggataatccaaatgggattttaaa

SEQ ID NO: 33100 - DNA, 201 bp, Homo sapiens
ttactctctaaatctgttctaaaaataggatgaaataaaatttgcttttgagatcattcattctaaattcagagtaaattatccaatggagttaaaaaccrgtcagcgaaaggtaacaggtcaggagccatgggaattttttgttttggttttgtttctgtttttgtttttagcaatggcagcaagttttggtaaatacca

SEQ ID NO: 33101 - DNA, 201 bp, Homo sapiens
attgatcatagccagacatttggaaaacattgttataaatagaatagttgaaaataactggatttgaagtcaaaagatactggattggaagttgaaagacktgggttctttttctgggttctttttactgcttacaatctctatggccttagtaaagtcagttaactcctctggtttttgatatataaaatgggaatgatg

SEQ ID NO: 33102 - DNA, 201 bp, Homo sapiens
acattgttataaatagaatagttgaaaataactggatttgaagtcaaaagatactggattggaagttgaaagacttgggttctttttctgggttctttttwctgcttacaatctctatggccttagtaaagtcagttaactcctctggtttttgatatataaaatgggaatgatgccttccatgtctatctcacagactcc

SEQ ID NO: 33103 - DNA, 201 bp, Homo sapiens
gctagcaagcacatatcttttacttttatcattacttgacacagcccaaattttccaaatacaactgattatttacattaaggaataggctgtatgatatrtatgtacacaattcagtgcattaaaatggaactggagactattattctaagtgaagtatctcaggaatggaaaaccaaacatcgtatattctcactcata

SEQ ID NO: 33104 - DNA, 201 bp, Homo sapiens
ggcctgccctaaaagagctcctgaaggaagcactaaacgtggaaaggaacaaccagtaccagccactgcaaaatcatgccaaattgtaaagaccatcgagrctaggaagaaactgcatcaactaacgagcaaaatcaccagctaacatcataatgacaggatcaaattcacacataacaatattaactttaaatgtaaatg

SEQ ID NO: 33105 - DNA, 201 bp, Homo sapiens
tatgcttgcacaacaaattggagaacaggaaaagagattaattaaactagaaagtagaaaatttggactttctggatgtagaccagcactccctctaaagrtgagtatcagcttatagagagactaaaatataaatatgaatttcagcacaaacatgtcaaaggatcataggtgctttattgttgaccttcatttccagtg

SEQ ID NO: 33106 - DNA, 201 bp, Homo sapiens
aaggatgttggtatattaatattaaagcagtattatttgagccagaaaagtgataaactgtattgtttattttcttctgaaaaccagttttcttacctttwtattcttttgagcctctaataataattacgaggttgagaacagaacagccagatacatttaagtctaatttgatgatcattgagcactatgaagttaatg

SEQ ID NO: 33107 - DNA, 201 bp, Homo sapiens
tttttagcttaattaagccaaatttgtctatttttgttgttgttgcatttgcttttgaggtcttggtcataaaatttcttgcctaggccaatgtcctgaaragttttttcctaggctgtcttctagtatttttatagtttctggtgttatatttaagtatttaatccatcttgagttaatttttgtatacagtgagggata

SEQ ID NO: 33108 - DNA, 201 bp, Homo sapiens
aactctcctaagactggttgttattgtttttgttgtttagcagcatattaaattaaataccaaccatggcatcagagaatatttcaccatcaacaaactgsaagtactatggcccatgtccaggaaacagtatcatccatcacttaccagattaaatggtttcataaagggtgatttctgctacattccaagagaaaaata

SEQ ID NO: 33109 - DNA, 201 bp, Homo sapiens
gcaatatcactatcattagaaatctgccaagagaaacaatattatttcttattatttaagtatatagtacccctttgcctgtttcctgcagatttcattcrtatgtatgcatcttaaagcttccttccagtgggagattgaggtaagataataaagaaggaaagcttataagatcatacaattaaacctctgcgactttaa

SEQ ID NO: 33110 - DNA, 201 bp, Homo sapiens
cgtgagccaccgtgcccagccctgtatcttttcttttcttttcttttctttcttttttaattgaaagggggaggtgagtaaagggtaaaatgcaaagaacratgtatatcttcttcaaggagttttcaaacagtggttatttcctcattttacttttagttcatttgcagagcttagtgatagagagctgaggaaacaaca

SEQ ID NO: 33111 - DNA, 201 bp, Homo sapiens
tggtatagaggtcttttgaattccttgcaatacctaacatagagttcctagtaggtactcaaaaatactgtactttttagtccatttatggactatgcatraattacatttaaaattccttctatctcactattgccactgcctcaattagttgcatcccttgctagatcattttttttacaaggcaggacaaaatattgc

SEQ ID NO: 33112 - DNA, 201 bp, Homo sapiens
ctccccagtttgatctcatgtattagcagtggtactcaaggattccctccacctcacccaaagacatcttcactggccttccatggtgcccaaaattttcrctctaagaaatatgttcctttgaattgaaatattgcatctctaagatttccgaaaacatgaacctcttttagaatggctcatcaagctaaaagcattcac

SEQ ID NO: 33113 - DNA, 201 bp, Homo sapiens
tagatggagttttatgcaagactaaaagaaagccaaaaaccaaaccatggcaacacttatgtattaggagttcatagaggagaaaggccagcgtaggtgaytgaaaagtaatcacggaagagaacaaacagaaggaaatttccaggaggtggtgatcatgattttcaaatatcacagaggaatcaaataaactatggatga

SEQ ID NO: 33114 - DNA, 201 bp, Homo sapiens
ttccatggtgcccaaaattttcactctaagaaatatgttcctttgaattgaaatattgcatctctaagatttccgaaaacatgaacctcttttagaatggmtcatcaagctaaaagcattcacgagtcccttgatatggattcatttatcagattgcttttcaaagggactgctagctgaaaacagggccctaaaacagga

SEQ ID NO: 33115 - DNA, 201 bp, Homo sapiens
gtaagccttttttaaaaaatcagcctacataggccgggcgtggtgcctcacgcctgtaatcccagcactttgggaggccgaggcgggtggatcacgaggtsaggagatcgagaccatcctggctaacttggtgaaatcccgtctctactaaaaatacaaaaaaaattagccgggcatggtggcgggtgcctgtagtcctag

SEQ ID NO: 33116 - DNA, 201 bp, Homo sapiens
ggcctatacacagactgcactccctgtgtgagaaacctcatatcaggtcccatcatgaaatgccctaggcaataccctgtgccaagaggcttacagatcakgagccaccaaagtattgtccttcttctggcccaacagtcctctagtgcctaccccagttgccctttagagcatggatggctagaagacacaaagccctaa

SEQ ID NO: 33117 - DNA, 201 bp, Homo sapiens
gctagaaccatgccgtgtattctgcctagggcatggtgacattgattatgagagaaatatctagcatttatgcaacaacagaccggaagtaaggcactttwaatggattctgttatttaatcttcccagcaatgctataaggttgggatcattattatacccattttacaatgaataaaataagcacagagatgctaagta

SEQ ID NO: 33118 - DNA, 201 bp, Homo sapiens
gaggcaggagaattgcttgaacccgtgagacggaggttgcagtgagctgagactgcaccattgccctccagcctgggcaacaagagtgaaactctgtctcmaaaaaaaaaaaaaaagaaatctacttttcttctgttgtctagtttgtatcattgtcattgttcttagaagacatgacaagttctctcatctagctgtgta

SEQ ID NO: 33119 - DNA, 201 bp, Homo sapiens
agatggcagatgataagcaaataaataaaaaatatatagtgtgtaatttggtaataagttctttgaaagacaagaagaaagacgagacgtaccattttttkgtttttttttttttttgagacggagtctcgctctgtcgcccaggctggagtgcagtggcgcgatctcggctcactgcaagctccgcctcccaggttcacg

SEQ ID NO: 33120 - DNA, 201 bp, Homo sapiens
ccagcattcattattccctatcttttttaataaaagctattttgacctaggtgagttgatatcccactgcgtggggtctcctttttaggtggtaattctaygataatagtaaagttactgaactccccaccacatggaaggtcttgagtactttcttgaaactcatcagctctgtgaagatgaagccacagaatacctttg

SEQ ID NO: 33121 - DNA, 201 bp, Homo sapiens
agtgtagttggagagaaagatatgttaggaaaaaaaatagtgcttacacccagcacccagatcttggtttctaataccattctccaataaagggaaccagrggagtctttggagaaatggctgattctaggattggggcagggggtatagcagatgagcccagagcatctggtagtgccagaaagaaaggaaaggctaaaa

SEQ ID NO: 33122 - DNA, 201 bp, Homo sapiens
catacctgattgactggtgccagtgcaaattcataatatccaacttcagccaagcccttaaaactgcccagctgtctcgatttttgttcttaagtcagttyccattctagttccccattcttactgcactaatgatattgtctctgaaatatttactccacgcacaccttcgcagacagcagaaaatgttgctttctacct

SEQ ID NO: 33123 - DNA, 201 bp, Homo sapiens
tagaccaataacaggctctgaaattgtggcaataatcaatagcttaccaacgaaaagagtccaggaccagatggattcacagccgaattctaccagaggtwcaaggaggaactggtaccattccttctgaaactattccaatcaatagaaaaagagggaatcctccctaactcatttatgaggccagtatcatcctgatac

SEQ ID NO: 33124 - DNA, 201 bp, Homo sapiens
ataactttccagctacccaacaactggacagacccatgggaaatatcttattcccaacaccattgcctccttcaccagaaaacacacacacacgtgcgtgmacacacacacacacacatacacacacacaaacacacacatatacaccaagcagtctcccagctaaatctatctgggtaattacagtcttatctaggaatc

SEQ ID NO: 33125 - DNA, 201 bp, Homo sapiens
acaactgggtgctaggcagaggtatgggcaatgaacatatcagagatgaacaagacaagattgctctccaccaagctttattgcaactggcagggcaggasagggagatgcaaacaacgcataaacaaataatttaatatgatatgtaatccccagaatagaggtaagataatgcaaataacccagactggagaagggaag

SEQ ID NO: 33126 - DNA, 201 bp, Homo sapiens
attaggccatctgctcttattagtgtccctatcatttggaaacattacagagttaagatgagagagacaatctgtggaattctagtataacttgaaatgarcttttgagtagaacaatcatgagttgtgatgtttaccttcccattcagagcccagcccacttatagcttaacatctccatggtgaaaatttttaatagtt

SEQ ID NO: 33127 - DNA, 201 bp, Homo sapiens
tacacgctgcttatccgattgacacttctttcaaaagcagaagatatttttattgactttggtggcaatcccatattcagggcttcctccatataaaaaawaataataatgtgaaccttgaccacagggaaggtcacagaccttggatagaagccaaatatctgtgttttgtttagggccctcaagcaaaattttcacaca

SEQ ID NO: 33128 - DNA, 201 bp, Homo sapiens
ttgttttgagttagctgcacccacatgtgaaagcccatggaatatgtatgttctgtgccgtgtgatggtgtaacaacaatgtgaacgtgcaccctgcccayggtgaagatcttgggcaaactcaactgagttgccatttttttcctaaatgcaatttatatcctgtagctcgagtttgttttcttcaactactccaaacat

SEQ ID NO: 33129 - DNA, 201 bp, Homo sapiens
attgtgtagccgagtctgaaaggaaagtaagaattttttagaacccttcctacaatagccatattttggagcatattctttgggcagtcttagtttctcarttatggattgacaagacagtttctaacaaaaaactagtagaaatacgatttcctgttccaattgatagataaactgtgttagacactattttaatgacgt

SEQ ID NO: 33130 - DNA, 201 bp, Homo sapiens
ctaaggcaccatatgaacaaatacttaatggtgtggtctgaactgtataccaacatacttaagtcctgaagcaatacatcataagggaaaatcagcacagrctagaagtagtagggaaagtttctcttcatagggactgctatcttttcccaacatattggccataactagatacagtgtcatccgtatagttttgattga

SEQ ID NO: 33131 - DNA, 201 bp, Homo sapiens
gtagattctggatattagccctttgtcagatgagtagattgcaaaaattttctcccgttctgtaggttgcctgttcactctgatggtagtttcttttgctstgcagaagctcttgagtttaattagattccatttgtcaattttggctttcgttgccattgcttttggtgttttagacatgaagtccttgctcatgcctat

SEQ ID NO: 33132 - DNA, 201 bp, Homo sapiens
ccaaattttccttaagggacacaggcaggaaatcttcattttattaaatttcttgactacagtagtaactacaaattttgtttgaaggaaaaatggaagcrtccccaaatagaatttcatgtgatagcctctgggtacttctcctgggaggaagtctttatctgatccagttttatgcacttagatctgaatctcaacaaa

SEQ ID NO: 33133 - DNA, 201 bp, Homo sapiens
tagccgagcatggtgggtgcctgtaattccagctacttgggaggctgaggcacaagaattgcttgaacccaggaggcgtaggttgcagtgagccgaaatcrtgccactgcactccagcctgggggatagagcaagactcagtctcaaaaaaaaaaaaaaaaaaaaaagatgcagtcagaaaaacagaaagtacattcgtta

SEQ ID NO: 33134 - DNA, 201 bp, Homo sapiens
aagatgagatgcacatgtcagtcaattagagtcctccctaaaacagtgctccttttatgtctgcatttagaattaaaacaagacaatcaatatttatgaarcacctgttacctgcattatacctcaacaaacaactgtttctaaaatacagatcagtttgggggagaggggctgcataaccagagaatcattcagttttaa

SEQ ID NO: 33135 - DNA, 201 bp, Homo sapiens
acaaaaggaaggcacttacatctagccttggctcattgcctgtttggtctaggtagcatccatggttggaagacctatattaagttttttcaatttttatraagccacagatgcattattaaatgactttttcttctgcatttgtcttaattttcatgtatgcatcagattctagcaagcacagaggtaatattttagagg

SEQ ID NO: 33136 - DNA, 201 bp, Homo sapiens
gtttgtagttctccttgaagagttccttcacgtcccttgtaagttggattcctaggtattttattctctttgaagcaattgtgaatgggagttcactcatkatttggctctctgtttgtctgttattggtgtataagaatgcttgtgatttttgcacattgattttgtatcctgagactttgctgaagttgcttatcagct

SEQ ID NO: 33137 - DNA, 201 bp, Homo sapiens
gcatggagaagtgtggtgctaggtatatggcagaatagctgcaaagtgggaagaggtggaggaatagcactgatatacttcatctccacagtattgtctakaatgaaacttggacgcctacatgcaaagactgacagcttggaattctggttcctctttttatttaagatcgctagccaaaataactttgcttccctatca

SEQ ID NO: 33138 - DNA, 201 bp, Homo sapiens
tattggtgtataagaatgcttgtgatttttgcacattgattttgtatcctgagactttgctgaagttgcttatcagcttaaggagattttgggctgagacratggggttttctagatatacaatcatctgcaaacagggacaatttgacttcctctttttctaattgaataccctttatttccttctcctgcctgattgcc

SEQ ID NO: 33139 - DNA, 201 bp, Homo sapiens
ggtgctaggtatatggcagaatagctgcaaagtgggaagaggtggaggaatagcactgatatacttcatctccacagtattgtctagaatgaaacttggaygcctacatgcaaagactgacagcttggaattctggttcctctttttatttaagatcgctagccaaaataactttgcttccctatcacagctcctcaatgt

SEQ ID NO: 33140 - DNA, 201 bp, Homo sapiens
ggggggaggggggagggatagcattaggagatacacctaatgttaaatgacgagttaacgggtgcagcacaccaacatggcacatgtatacatatgtaacwaacctgcacattgtgcacatgtaccctaaaatttaaagtataataataaaaaaaaagttttactattgtaaaaaagaaagaaagaaagaaagaaatcagg

SEQ ID NO: 33141 - DNA, 201 bp, Homo sapiens
gggagggatagcattaggagatacacctaatgttaaatgacgagttaacgggtgcagcacaccaacatggcacatgtatacatatgtaactaacctgcacrttgtgcacatgtaccctaaaatttaaagtataataataaaaaaaaagttttactattgtaaaaaagaaagaaagaaagaaagaaatcaggaaagggaaac

SEQ ID NO: 33142 - DNA, 201 bp, Homo sapiens
ggaggctgaggcaggagaatcgcttgaacccaagaggtggaggttgcagtgagccaagattgcaccactgtactccagcctgggcaacagagtgagactaygtcaaataaataaataaataaataaataaataaataaataaataggagttttattcctaacttctattgcctaaacagtttgaaggcaggagaggtatct

SEQ ID NO: 33143 - DNA, 201 bp, Homo sapiens
ttattgtattggttttctagatcagaactctgtatatgtaaatatggaggaaaaacatatccaactgcctttcaatgtgacggaagatggtattttaatattgtttgtttaaactctttaagaaatgacagagatttttagttcttgtgtggcagtattcaaaataacacaagtagaactcaaacagctaaaaacagtttt

SEQ ID NO: 33144 - DNA, 201 bp, Homo sapiens
tattgtattggttttctagatcagaactctgtatatgtaaatatggaggaaaaacatatccaactgcctttcaatgtgacggaagatggtattttaatattgtttgtttaaactctttaagaaatgacagagatttttagttcttgtgtggcagtattcaaaataacacaagtagaactcaaacagctaaaaacagttttc

SEQ ID NO: 33145 - DNA, 201 bp, Homo sapiens
attgtattggttttctagatcagaactctgtatatgtaaatatggaggaaaaacatatccaactgcctttcaatgtgacggaagatggtattttaatattgtttgtttaaactctttaagaaatgacagagatttttagttcttgtgtggcagtattcaaaataacacaagtagaactcaaacagctaaaaacagttttca

SEQ ID NO: 33146 - DNA, 201 bp, Homo sapiens
aggctgcaatgttgtcatggaaatgctttgtggagataacttggacaatgatggaggtgagtcatttataaaatgttcacgtaagaaaggaatagcccagyctctagcacagtggtaatcaacctggccaagggtgaaaattaggaatctctagtataaatgatactgagttatatagggtaatgctaccttttagtctca

SEQ ID NO: 33147 - DNA, 201 bp, Homo sapiens
ggcctcccaaagtgctgggattgcaggcataagccaccatgcccggcctctttttaacctcttcttatggttatatatattctcctagactgtatactcartaaagatggggatcatgacagatctctattttccataaaattttgcatataatatatgctttataattgtttcatttaaggaattagttgctatcaactg

SEQ ID NO: 33148 - DNA, 201 bp, Homo sapiens
tactaattagcccctttcagttcacctaggaacacaaagagaaatacgaaatggcttatgagcagattcacttttttttttttttttttttttttttgccytttgataggatttggttgatgttgaaaaatgcaatgagaaaacaaacaagaggtttctccagctttttgccctaggaactgttttctcctaacattctct

SEQ ID NO: 33149 - DNA, 201 bp, Homo sapiens
actggtggaaaagggtaaaaagagtggatgtttcataggtgccaagatctaccataggcacttcccacacgttacttttatttataaatcttcacaagcaycctatgcaacaggtattgttatcttcattttaaggagagggaaattgaggctcagagagtttttaaaacttgcctaacattacctagtggttatgtgaca

SEQ ID NO: 33150 - DNA, 201 bp, Homo sapiens
attctattttaataaatacatacattcaatggaattatgtggtaggttgtctgctgaagcttctacctccgttggagtagctcgccctaatctggcaaagraaatcctctggctatagagtttgtagacccctactcctaggggtgtattagacatgccttttctcactcagatcaccgacactctggtaggctttttaaa

SEQ ID NO: 33151 - DNA, 201 bp, Homo sapiens
ttcatgtctaaaacaccaaaagcaatggcaacgaaagccaaaattgacaaatgggatctcattaaactaaagagcttctgcacagcaaaagaaactaccakcagagtgaacaggcaacctacaaaatgggagaaaattttcacaacctactcatctgacaaagggctaatacacagaatctacaatgtactcaaacaaatt

SEQ ID NO: 33152 - DNA, 201 bp, Homo sapiens
aagatttcaatcgttagcccgcagatgaataataatcttgaagagaaaagctgaataaatataaagcaactacagcacatttctaaggcaccatatgaacraatacttaatggtgtggtctgaactgtataccaacatacttaagtcctgaagcaatacatcataagggaaaatcagcacagactagaagtagtagggaaa

SEQ ID NO: 33153 - DNA, 201 bp, Homo sapiens
gtttattgcggcattattcacgatagcaaagacttggaaccaacccaaatgtccaacaatgatagactggattaagaaaatgtggcacatatacaccatgraatactatgcagccataaaaaatgatgagttcatgtcctttgtagggacatggatgaaattggaaatcatcattctcagtaaactatcgcaagagcagaa

SEQ ID NO: 33154 - DNA, 201 bp, Homo sapiens
gataaccactgaaaggtttaaaaaggatctcccggctgggcatggtggctcacgcctgtaatcccagcactttgggaggccgaagcaggcagatcacctgmgggtgggagttcgagaacagcctgaccaacatggagaaaccccatctccaccaaaaatacaaaattagccgggcatggtgccacatgcctgtaatcccag

SEQ ID NO: 33155 - DNA, 201 bp, Homo sapiens
tgttttgttttcattcctttatcagagtcactgcctgttattaattactcattttttaaattgctcaaattgttatgtttctaaaatagaccttaatcatytattttatgaacatataaagtgtgtttatatatataaagtagtcttgtatggcaggaactgtgctaaatgctatagtcaaacaccacaaccatctcttgt

SEQ ID NO: 33156 - DNA, 201 bp, Homo sapiens
aaccccgtctctactaaaaatacaaaaattagctgggcatggtggcaagcgcctgtagtcccagctactcaggagtctgaagcaggagaatcacctgaacstgggaggcagaggttgcagtgaaccgagattgtgccactgcactccagcctgggtgacagaacaaaactctgtctccaaaaaaacaaaaaagaaaaagaa

SEQ ID NO: 33157 - DNA, 201 bp, Homo sapiens
tattttggagcatattctttgggcagtcttagtttctcaattatggattgacaagacagtttctaacaaaaaactagtagaaatacgatttcctgttccarttgatagataaactgtgttagacactattttaatgacgtagaagatactgacattggcacaaggttttttgtttttttgttttgttttgttttgttttgt

SEQ ID NO: 33158 - DNA, 201 bp, Homo sapiens
agtttgactttccaacaatggactgcaaagcctatgacaaaacacgtcatttgcattgctctttttcatggttcacaacaaagtacagatcactttcagcrtagaatcttaatctgagtttgttaataagaaaacaagaaccttagtacatgaactcattttattatctaccctcattgagaaccgtgatttggattccac

SEQ ID NO: 33159 - DNA, 201 bp, Homo sapiens
cccaggaggtggaagttacagtgagctggagttacaggctggagtgcagtgagatctggaagttacaggctggagtgcagtgaatgagatcgtgccactgyactacagcctgggtgacagcgagactccgtctcaaaaaaaaaaaaaaaaaaaaagattaaggactttggaaccccaaatgacctagattctgattctggc

SEQ ID NO: 33160 - DNA, 201 bp, Homo sapiens
ataagagtaaagagcaaaagagatactaatgagtgttcagcacaacacttggcacttagcaagtataaaagtacttttatttatttgttgtataaaagaartatatgcaattttatttatttatttatttgtttttggcaactccttccatgtgaatacattactactgtttacaaaatgcccatattacaatagtcatga

SEQ ID NO: 33161 - DNA, 201 bp, Homo sapiens
gtctcggaggttataaggatgaataggatgcaatatcggtcttcaaggtgatgacaatctagcttttaaaatgtagttaatgctatgacatagattttttwaaatgtgttatgggagtggcaatgggaggacaattgattctgacaaagagaatcagagatgtatgagagatgatgaggtgaattggtccatgaatgataa

SEQ ID NO: 33162 - DNA, 201 bp, Homo sapiens
aagatgctggtatgacatccaggtagcttttcccatcagcgattggaaaagtgtgtctaggattcagaacagatctgggctgttgttataagtagatttgwgctcatcagtgtctcagaatagagatgccaggggatggatgagattacccagggagagtgtatagaaggttgagactagaaaaaggccaaggacaaaaac

SEQ ID NO: 33163 - DNA, 201 bp, Homo sapiens
ttaccatcataattattattcacgattaaaattcactagttcccagaattaacaattttgttcatggctgtatctcagcaccaagaacagtgcctggcacrtgtaagccctttcagtaaaagtttgttggaaaaaaatgaattatgctaagctctttccttgtatgagcacatttaattctcacaacaatccttaaggata

SEQ ID NO: 33164 - DNA, 201 bp, Homo sapiens
atagttttcattgtggagatctttcacctccttggttaaatttatttctaagtatttttttgtaactattgtagacaggattgtttttctttctctttcasataactcattaagttggagaaacactactgatttgtgtatgttgattttttatcctgcaactttactgaattcctttatttgttctaacagcttttaggt

SEQ ID NO: 33165 - DNA, 201 bp, Homo sapiens
ttttaaatagaatacacttggcctggcccggtggctcacacctgtaatcccaacactttgggaggctgaggcgggtggatcacctgaggtcaggagttccrgaccagcctggccaacatggtgacaccccatctctactacaactacaataattagccaggtgtggtggcaggtccctgtaatcccagctactcaggaggc

SEQ ID NO: 33166 - DNA, 201 bp, Homo sapiens
ttctgcatttccatcagaggtaccgggttcatctcactggggaatgccagacagtgggtgcaggacagtgggtgcagtgcaccgtgtgcgagccgaagcayggcgaggcattgcctcactcgggaagcgcaaggggtcagggagttccctttcctagtcaaagaaaggggtgatagacggcacctggaaaatcgggtcact

SEQ ID NO: 33167 - DNA, 201 bp, Homo sapiens
agaacagtgcctggcacgtgtaagccctttcagtaaaagtttgttggaaaaaaatgaattatgctaagctctttccttgtatgagcacatttaattctcamaacaatccttaaggataggtatcaatacatatgtattttataaatggggaaactgaggctcaacaaagttaagaggtcacatagaggccacttttgagat

SEQ ID NO: 33168 - DNA, 201 bp, Homo sapiens
ttcttagcacctttaaaacagtgtttgtcaaacctagaacattttgaattgttttatatttataatattgtttgcataaccaaatgatgcattttaagatygataaaagcccctaatgaggatagcagttgaataaactgaacattaacttgcgaacagaagtgccacataaacatggtctgttaattgtctgctcattga

SEQ ID NO: 33169 - DNA, 201 bp, Homo sapiens
gctgagtctgtaagtcatcatttttttcaatccccatttgcagttgctgtataacccaagtaaaatctttcactgaaactacttgctgcttctgtttcccrtgcaaattcctttctgctatttcattttcctctattatccattatacataacctttagatactaatggctgtatgctgtgctgccctcaatccactaggg

SEQ ID NO: 33170 - DNA, 201 bp, Homo sapiens
aaataggggatgtttaaaatgtctcctcttcatcccatctttcagtgactccctgcctaactctgagccccttgcggcagccctcagtctatctctcctaratagaaatccaactttttgtctcctctcttccctaatcagaactgggtgggtataagtggcatactaaagggggatgggacagtggaagaagtattttat

SEQ ID NO: 33171 - DNA, 201 bp, Homo sapiens
aattctggttcctctttttatttaagatcgctagccaaaataactttgcttccctatcacagctcctcaatgtcacacttttcttatctgcctcagctgaygaaaaagaagagtcctcaccacccctgccaaaaaagtgacagagatcacacactaataggctgcaaatcacttaaatcatattttgagtggtgtattatg

SEQ ID NO: 33172 - DNA, 201 bp, Homo sapiens
tgataatactgacagtttttatattagcattgacttttcctcctattcatgaatctaccaaccttctagcaatgtctctaagcagggatctggaaaatggkggtatgacttcagtctaattacaaatctgctatccatgcatttaccagaacctttctttaaaaaagatttatagactcttcttacatcaccttttggtat

SEQ ID NO: 33173 - DNA, 201 bp, Homo sapiens
tctctactaaaaatacaaaaattagctgggcatggtggcgtgtgcctgtaatcctagctactcgggaggctgaggcggaagaatcactcgaacctgggagrcagaggttgtggtgagctgagattgcgccactgcactgcagcctgggtgacagagtgagactctgtcaaaaaacaaacaaacaaacaaacaaaactaggg

SEQ ID NO: 33174 - DNA, 201 bp, Homo sapiens
cttcctagggaatccagaatattcactctacactagcagagtcataaaagatcattttagcttcatggatcctccagaaatactggataaattagtagttktatagtgtaaaattcaaacaacatgcagcaaactaagatttctttggaaatctatgaatttaacactgtcacaggctaaaacacagctggaaatagagta

SEQ ID NO: 33175 - DNA, 201 bp, Homo sapiens
tttgctctatttttcttccagtttcatttactagctattccatttgatttttcaaaaagcttattagactgtgtttaggggcaacacaattttcaaaaagsttattagactgcatttgggggaaacagtgtaatgggtttgggggaaaaggaaggtgggtaggtgccccattttacctgtatttactcaggaaaggaagct

SEQ ID NO: 33176 - DNA, 201 bp, Homo sapiens
tgacagatttccctattggtaccaaataatgcccaacttttctgatacgccctccccaaagttaaacaaaaatagtgtgccagtggttatatgtcattatmaaaccatgttactagttcccagagtttgttgctggagaatttaccaagttggaaatgcctggagatgaagcagagttcacttgggagccagggcaaaagg

SEQ ID NO: 33177 - DNA, 201 bp, Homo sapiens
aagagagcagataaaagattttggattttactcataacaagcagctaagccaatactagttgtacaatgcttaagagagagaggagagagagagagagatmccagctgtcaagaaactaggaacaagtatattgcactatgaaagaaagtggaaatttttgaaatggagtggttttgttaaagatcatgtgctacctccag

SEQ ID NO: 33178 - DNA, 201 bp, Homo sapiens
ctagcatggtgacattcactacgatttagtaatcatagtgtttagtaaatgattcatgatttcgtacatgtcgagcacatctcctttcagtctttccatcyccagacttgagtcttgagtcttgatctttcagtctatccctttatgacagccaaatttgaaattttatactcagcgatatttaatatagtggtcatagaa

SEQ ID NO: 33179 - DNA, 201 bp, Homo sapiens
tgagacagaaggataggttgaataattagacacacactgtctaatagggttgtaataagtattaaatgagatagttcaagtgagccacttgaaagatagtraactacaccacacatacacacacacacacacacacacacacacacacacacacacacaaatagaagagactattttctgaagagactgtttactacccat

SEQ ID NO: 33180 - DNA, 201 bp, Homo sapiens
tttgctttatctgagacataaatgccttggaacattttatacaatgccaattgtggacctgaaataacaggttaaattttaatttacttaaggtttggcaratatttatttcacagacccaatcagtagataaagattcattatgtggtaccaaactaaaaaactgcaccaaccccacccaggtaatcattgtgcattcag

SEQ ID NO: 33181 - DNA, 201 bp, Homo sapiens
gatttcgtacatgtcgagcacatctcctttcagtctttccatccccagacttgagtcttgagtcttgatctttcagtctatccctttatgacagccaaatktgaaattttatactcagcgatatttaatatagtggtcatagaaggtggttctaaataataggtctgccacaaaccacaccaaattttaagcaatcaagaa

SEQ ID NO: 33182 - DNA, 201 bp, Homo sapiens
aaatgataaacaatacaagtttctgccttcatggagcttatggtctagcaaggcaggtagatattaaataatccacacaaatatgagggacttcaaaaagytcatggaaagggagacttgaaatataaatattttaaaatataaactttatttctcaacaaaaatataaactttacttctacatcaagttcaagacaattt

SEQ ID NO: 33183 - DNA, 201 bp, Homo sapiens
cattttccagcttctagaggctgctcatattctttggctcatgatctcttcctccatcttcaaagccagcgatttcatgtctatttgatccatcttccccrtcatacattctttgatacttctgcctcactcgtctacttttaaggacccttgtgagtacgttgggtatacttagataatccagaatagtctccctatctt

SEQ ID NO: 33184 - DNA, 201 bp, Homo sapiens
ttgtattggttttctagatcagaactctgtatatgtaaatatggaggaaaaacatatccaactgcctttcaatgtgacggaagatggtattttaatattgtttgtttaaactctttaagaaatgacagagatttttagttcttgtgtggcagtattcaaaataacacaagtagaactcaaacagctaaaaacagttttcag

SEQ ID NO: 33185 - DNA, 201 bp, Homo sapiens
aatgctgcttagggatcataaaaaatgaggtgctttttaaagaagccattagatttcacagcattaacgcctctgataagagtacctttgatagagtgctrattaatgagagtcagataccagcggcagagtaggaagtgaggaaatggagaaacggaaaatagatcacttctttgagatgtttggctgggaagaagaggc

SEQ ID NO: 33186 - DNA, 201 bp, Homo sapiens
tcaccccagttggaatggctgttatcagaatgacaaaaaaaaatgctggtgagttgcagagaaaggaaaatgtaaattagtacagccattatggaaaacartatggagtttcctcaaaaaattaaaaatagaactgttatgattcagaaaagtaaaggaaatcagtatgtcaaagagatagctgcactatttgcaacagct

SEQ ID NO: 33187 - DNA, 201 bp, Homo sapiens
caccatgttggacaggctgatctcgaactcctgacatcaagtgatctgcctgcctcagcctcccaaagtgctgggataaccactgctgttgaccagtccaytcttgctttgactggacctcgtccacctctttgtagccattgttttgattgtattttgtcttcggagtcatactggtaaagccacatttcatctcctatt

SEQ ID NO: 33188 - DNA, 201 bp, Homo sapiens
tccaagtattgcatgttttcactcttacacctccatcaagcttttgcttaaatgtctgcttctcagtgaggtctactttgacccattctacacactactgmagtttgcaccataatccctgaactcttaatacctttaccctgctctaccttgtctttatttccatagcatgtatgaacctctatataatttacttatata

SEQ ID NO: 33189 - DNA, 201 bp, Homo sapiens
ttccatttgtgggaaaaacaggaattaagaatgctgttgagaagatggcttctaggcataatattgggtagtttatagttactggcctgatactaaatctygggcatgttcctagctcttgaagcatgatcaattcctcctggtctctatccttggctctgccttctagttaccacttaatgctgctttttttgtgtgtgt

SEQ ID NO: 33190 - DNA, 201 bp, Homo sapiens
tttaccaggagaaagcctgtgtgtggcacagcttcctagatgctcagccattatgaccagagcttcccatctgtttagacaactgtgacagattggcaacygatgtttcccatgactgtacttaagaacatgggccatcttcagctagagagaagaaagctgagcagggagcttcataacacccaccaagagcaaagcccc

SEQ ID NO: 33191 - DNA, 201 bp, Homo sapiens
attgcatcactttgtccttttcttgattttctttggagcagtttttatttttctaatcgactcataggaattctttatatattacagatattgatccttasttatatacattgaaaatatcttgtctcagtctgtgtcttgccttttcactttatcttttctaatctatttcaatatttttattttatttcagttttcaaa

SEQ ID NO: 33192 - DNA, 201 bp, Homo sapiens
tagatgaagaaaaatttaattgagattaaatagctatcttcaatgatctgagaggctgaccagtagaaaagagagtatgataatttttggcagaattaaasgacacaaataaatctaattggtgaaagaagatggacagcagatttcagttcaaatcaacaaattactttctaatatggctgcgtaaatatagaattgact

SEQ ID NO: 33193 - DNA, 201 bp, Homo sapiens
attcaggaaatgcactttttattacttacagctgtggttttaatactgccttgaactattattattctttttacaactcctaaagcttgagggaggaaagaaaaaaaaaacaaaactactaatcagtagtaaatcgaagagaaacattttggcatttcttaagaagaagatggagatattgagtatatcacttcctattca

SEQ ID NO: 33194 - DNA, 201 bp, Homo sapiens
cacagtgctgagtttcatatttcagtaaatcaaaatatattgacgggtgagggcacagacaaatgtctaaatgagagtgcattgtttctgctgacaggaayggacaggagagaaaatagaggcctatgctgcaacatgaagatttgaatcagaccttaagaaaagcttactgtttctaacactacatggcagcatcatata

SEQ ID NO: 33195 - DNA, 201 bp, Homo sapiens
ttatcataagttttaattctctactttccttatgtcatctgaaaattgtagcactggggcccttcatattttaaaggttgtcttctgttgaaatatatacwtataaaggattgacctgcagtgtaaataataatttacctctttttatttattctttaagcctgtgttaaatatattgagttttcttaaagagggaaaacc

SEQ ID NO: 33196 - DNA, 201 bp, Homo sapiens
aattattggaaaaaattacattatattgtaaatggcataaatgataagtacgtttaccagaacatgtgattaaccatcctccccctgccctccactttccragacatcaccaatgttgctaaaattcataagacgggggaaacaatacaccaatttttttttctttttttcaagttaaaactgtccatggaaagacatggt

SEQ ID NO: 33197 - DNA, 201 bp, Homo sapiens
agtccaaacaacccattactgaaacttggaatcctgcaatttacaccacttcaaaatgccctgctgcttttttatgtgtgtgtgtgtgtgtgtgtgtgtckgtgtgtgtgtgtgtgtgtatatatatatatatatatatatatatatagagagagagagagagagagagagagagagagagtgaaaagactcatggagcag

SEQ ID NO: 33198 - DNA, 201 bp, Homo sapiens
tgcaatgagactatccgcagagttcatttaaatattgtatcctttctccaaatttatttaaacctttttttaactgtttttcaggcctgcatctcttaggyaaaatcacaatataataacctgttatcagagatatttccattgctccctccaaagtgacagctcaggttgtttatataagtagagaacagcaggccaaca

SEQ ID NO: 33199 - DNA, 201 bp, Homo sapiens
tgagtaacaggcagaggttggaacagtttggagggatccaaagaagaaaggaaaatgtgggaaagtttggaactccctagagacttgttgactggctttcmccaaaatgctaataatgatatggacaatgaaatccaggctgaggtggtctcagatggagatgaggaatttggtgggaactggatctaagatgactctcgt

SEQ ID NO: 33200 - DNA, 201 bp, Homo sapiens
ctgaaacttggaatcctgcaatttacaccacttcaaaatgccctgctgcttttttatgtgtgtgtgtgtgtgtgtgtgtgtctgtgtgtgtgtgtgtgtgtatatatatatatatatatatatatatatagagagagagagagagagagagagagagagagagtgaaaagactcatggagcagaagacaaccttgatcatc

SEQ ID NO: 33201 - DNA, 201 bp, Homo sapiens
tcattttccaaagaaatgccatctgtacaaaagagccagacagctattttggtttcacttagaaaaatgtattcagttgtttcagttgcaagtcttcctckgttttttgaaagtaattctcttccatcttaataagagtaataaaagctacggttagctaaagatttactaagtgccaggtactgggctaggtaatttaca

SEQ ID NO: 33202 - DNA, 201 bp, Homo sapiens
atgggaaaaggggaagcagaaagaaacttcttattgaaacaaattcacactaaaaagtcatcaatgaaaaaaatatgtatacagagaaatagaaatcaggkgcaaaaacacattgaacaaacagggaaggcaagaaaaaaagcaaactgcattttaaatcaaagtagtgtctatagtacagggaatttgaaaggaccacat

SEQ ID NO: 33203 - DNA, 201 bp, Homo sapiens
agcaacattatttataatagctgagaaatataaacaactcaaatgcctatcaagtggtgagaagacaaacaaaatgtgatatatccatgtcatgaaatagkgttcagccataaaaagaaatgaagttctgatacatactacaatgtggatgaacctcaaaaacattatgctcagtgaaagaatctagaaacaaaggaccct

SEQ ID NO: 33204 - DNA, 201 bp, Homo sapiens
acagatggcaggtgtaatattaatgtggcaaaacctatgaaatgaaaatttcagcagaatttgatcacatttaatgaattgtctgctgtgagcatactatrcttctagatgtcacaagtttctagcacaaaatccataatgactgctctgaaagaacttagactgtaagagaaattagccaagttatttaacaataactct

SEQ ID NO: 33205 - DNA, 201 bp, Homo sapiens
tgaaacttggaatcctgcaatttacaccacttcaaaatgccctgctgcttttttatgtgtgtgtgtgtgtgtgtgtgtgtctgtgtgtgtgtgtgtgtgtatatatatatatatatatatatatatatagagagagagagagagagagagagagagagagagtgaaaagactcatggagcagaagacaaccttgatcatct

SEQ ID NO: 33206 - DNA, 201 bp, Homo sapiens
taacatgaatttgctcactgttattctttaattcatcttcagcgatgatatattttactaattagcattagaggtaagtcactaaagtcaacatttccagrcacaaaaatgttctcctgtatgcattccacaagtcaatatttcactggctttgtagactgttgcaaacaggaatttttaagaaacatggaaagtatttgt

SEQ ID NO: 33207 - DNA, 201 bp, Homo sapiens
ctataacaaattttgagagatgataaaatggagcagtctatttagtggtctagattgctaacagggaaatatcttcctttctgatgcatgaaactctaaarggtaagaggctgagaaattttccacctacaagctgtgagaatgtctcttctctaataccaaatcaccacaactagcttgctttgcctatttttatttaaa

SEQ ID NO: 33208 - DNA, 201 bp, Homo sapiens
gaaacttggaatcctgcaatttacaccacttcaaaatgccctgctgcttttttatgtgtgtgtgtgtgtgtgtgtgtgtctgtgtgtgtgtgtgtgtgtatatatatatatatatatatatatatatagagagagagagagagagagagagagagagagagtgaaaagactcatggagcagaagacaaccttgatcatctc

SEQ ID NO: 33209 - DNA, 201 bp, Homo sapiens
ttgctggatatgaaattctgggttaaaaattcttttctctaagaatgttgaatattggcccccactctcttctggcttgtagagtttctgccgagagatcygctgttagtctgatgggcttccctttgtgggtaacccgacctttctctctggctgcccttaacattttttccttcatttcaactttggtgaatctgacaa

SEQ ID NO: 33210 - DNA, 201 bp, Homo sapiens
aaacttggaatcctgcaatttacaccacttcaaaatgccctgctgcttttttatgtgtgtgtgtgtgtgtgtgtgtgtctgtgtgtgtgtgtgtgtgtatatatatatatatatatatatatatatagagagagagagagagagagagagagagagagagtgaaaagactcatggagcagaagacaaccttgatcatctca

SEQ ID NO: 33211 - DNA, 201 bp, Homo sapiens
atgggttttcaccatgttggccaggcttgtctcaaactcctgacatcaagtgatctgcctgcctcggcctcccaaagtgctgggattacaggcgtaagccmccgtgctgggccttgaatgcttactttaagccaggtactgttctagtcattgaggaaatagcaatgcataaaaaagataaaattcatgcttccataaagc

SEQ ID NO: 33212 - DNA, 201 bp, Homo sapiens
cttggaatcctgcaatttacaccacttcaaaatgccctgctgcttttttatgtgtgtgtgtgtgtgtgtgtgtgtctgtgtgtgtgtgtgtgtgtatatakatatatatatatatatatatatagagagagagagagagagagagagagagagagagtgaaaagactcatggagcagaagacaaccttgatcatctcaaca

SEQ ID NO: 33213 - DNA, 201 bp, Homo sapiens
gctccttcctgcttgggatgatgaagaataaattaaaatattgctgagattattttgtggtaattgcttttcttaaattctctttttgttttccttgaatytaggaatcatacataaagggaatggagaaaatatgttcatttcccagcagcccccagtcatatcaaccataatgggtaatggacaccaaaggagtgtagc

SEQ ID NO: 33214 - DNA, 201 bp, Homo sapiens
gaatcctgcaatttacaccacttcaaaatgccctgctgcttttttatgtgtgtgtgtgtgtgtgtgtgtgtctgtgtgtgtgtgtgtgtgtatatatatayatatatatatatatatatagagagagagagagagagagagagagagagagagtgaaaagactcatggagcagaagacaaccttgatcatctcaacacaac

SEQ ID NO: 33215 - DNA, 201 bp, Homo sapiens
actctgtaaatgtaattattcaaataaatctccaggaaaccttgtcacttctctttggaagattctgtaattagaaacttcaccaaattttccttaagggrcacaggcaggaaatcttcattttattaaatttcttgactacagtagtaactacaaattttgtttgaaggaaaaatggaagcgtccccaaatagaatttca

SEQ ID NO: 33216 - DNA, 201 bp, Homo sapiens
acttcaaaatgccctgctgcttttttatgtgtgtgtgtgtgtgtgtgtgtgtctgtgtgtgtgtgtgtgtgtatatatatatatatatatatatatatatagagagagagagagagagagagagagagagagagtgaaaagactcatggagcagaagacaaccttgatcatctcaacacaacccatcagtaaaaaacaatg

SEQ ID NO: 33217 - DNA, 201 bp, Homo sapiens
aattggggcaagatctcacctttcccagagtagtaaaactggggacatttccagggagagtggacagaagaagggttactttgaaatcttctgattttcayttgttatacttgaaattttgagaaaccacagatcaacagttagcaccctaaaatgtttctttccgttgtacttttcttacgaatgctgggcactttttcc

SEQ ID NO: 33218 - DNA, 201 bp, Homo sapiens
acttccacctccacctgccttgcatcacggcctaaccttgtggtaatatcagagatctctgtatttttacttgctttgaaaacaaaaatgaattccggttsaaaatttttaaacctggaagtggttttcttagtacagtttaaatctttaaatcttttctcatccagagactgtacctttgattgtttaagtgctaatgaa

SEQ ID NO: 33219 - DNA, 201 bp, Homo sapiens
tcccaggttcacgccattctcctgcctcagcctcccgagtagctgggactacaggcgcccgctaccacgcccggctaattttttgtatttttagtagagayggggtttcaccgtgttagccaggatggtctcgatctcctgacctcgtgatccgcccgcctcggcctcccaaagtgctgggattacaggcgtgagtttttg

SEQ ID NO: 33220 - DNA, 201 bp, Homo sapiens
gtgctactatcaacatgcatgtgcaagtgtctttttccatataatgacatcttttcttctgggtagatatccaggagtgggattgctggatcaaatggtasatctacttttagttctttaaggaatctacacactgttttccatagggttgtactactttacattcccaccagcagtgtaaaagggttccttttcactaca

SEQ ID NO: 33221 - DNA, 201 bp, Homo sapiens
gcagataaaagattttggattttactcataacaagcagctaagccaatactagttgtacaatgcttaagagagagaggagagagagagagagataccagcygtcaagaaactaggaacaagtatattgcactatgaaagaaagtggaaatttttgaaatggagtggttttgttaaagatcatgtgctacctccagacatag

SEQ ID NO: 33222 - DNA, 201 bp, Homo sapiens
ggattttactcataacaagcagctaagccaatactagttgtacaatgcttaagagagagaggagagagagagagagataccagctgtcaagaaactaggamcaagtatattgcactatgaaagaaagtggaaatttttgaaatggagtggttttgttaaagatcatgtgctacctccagacatagaaacctattgaaccct

SEQ ID NO: 33223 - DNA, 201 bp, Homo sapiens
aggtttccatgcataaaattaagggtgattttaacatgataaatcatatttgccaaaacacaacattcagcattcaaagtgagacatttttcttttttaawtttaaatcgttaggtttgagtggcattaagattagtagagattcataatcaactgaagtttaagttgaaatgaagttaagttaataaagcttaagttgaa

SEQ ID NO: 33224 - DNA, 201 bp, Homo sapiens
tgtgtggtgtgttctttccaaaatatccttttaattgcagaacacttttagacttacagaaaagttgcaaagatagtacagagaattaccatatactcctmatttagtttctcatatatttttttagatagtacaaaggctgtcatagtttcttctattgtcaacgtcctatatcaccatggtacatttgtcacaactagg

SEQ ID NO: 33225 - DNA, 201 bp, Homo sapiens
tctaagaagtagaaaaagtgatcaaacactggggcttgttttttccccaacagatatgactatagttaaaaccttaccttcagttagtcaagagatcatgytaaacaaagaaacaaactaaaaaacaaccttaccttctgggccagaatagaaacggaattagaatgcattcaaatgtgattcaaaaaataaatgttcaag

SEQ ID NO: 33226 - DNA, 201 bp, Homo sapiens
attttatttaacctgatatatccaaaatattatcatttcaatgtgtaaataatataaaaatattaatgtgatcttttatattttttcttttatatcaagtyttcaactctgactagccacacttcaagtgtgcaacagacacatgtgatgagtggctaccatattggatagcataggcctaagttattcagcatgtatttc

SEQ ID NO: 33227 - DNA, 201 bp, Homo sapiens
ctctgtctaaaaaaaaaaaacaaaacaaaacaacaacaacaacaacaacaacaaaaactatgggatacagcaaaagcagtgttaagaaggaagtttatggraaaaaaatgcgcacatcaaaaaagtagaaagatgtcaaacaacctaatcaggcaccccaaagaattagaaaagcaagaacatactaaaccccaaattagt

SEQ ID NO: 33228 - DNA, 201 bp, Homo sapiens
tggctggaagcagtccatttcattcgatggtgaaaaattaatccttaccttatatattttgaagtgaatctcaccacatgcattttctcgcattttcaagkgccgccaggaaagtggctcaacttaaagtatataaaatagcccccttagtcttctaaatgagatctactattccttttgttatatatggtccatctaatt

SEQ ID NO: 33229 - DNA, 201 bp, Homo sapiens
tcattatctttctgggcagaaactttttgaaagtatggtggtgattttccacgaaatgcttctacagagctagagggatcatttgataaccaattgtagakccatcattaaagaatgttagtaaacacctcttgaactgatttagcttatgtttagaagttcaactttctcctgtataaatctctcagtttaacttatact

SEQ ID NO: 33230 - DNA, 201 bp, Homo sapiens
ggctggaagcagtccatttcattcgatggtgaaaaattaatccttaccttatatattttgaagtgaatctcaccacatgcattttctcgcattttcaagtsccgccaggaaagtggctcaacttaaagtatataaaatagcccccttagtcttctaaatgagatctactattccttttgttatatatggtccatctaattt

SEQ ID NO: 33231 - DNA, 201 bp, Homo sapiens
gttaagggcagccagagagaaaggtcgggttacccacaaagggaagcccatcagactaacagcagatctctcggcagaaactctacaagccagaagagagygggagccaatattcaacattcttaaagaaaagaattttcaacccagaatttcatatccagccaaactaagcttcataagtgaaggagaaataaaatactt

SEQ ID NO: 33232 - DNA, 201 bp, Homo sapiens
tttcattcgatggtgaaaaattaatccttaccttatatattttgaagtgaatctcaccacatgcattttctcgcattttcaagtgccgccaggaaagtggytcaacttaaagtatataaaatagcccccttagtcttctaaatgagatctactattccttttgttatatatggtccatctaatttcacagaagtaattgaa

SEQ ID NO: 33233 - DNA, 201 bp, Homo sapiens
tttacaactcctaaagcttgagggaggaaagaaaaaaaaaacaaaactactaatcagtagtaaatcgaagagaaacattttggcatttcttaagaagaagrtggagatattgagtatatcacttcctattcagctgaatagaaagaatgccttcattgacttgcagttctgcagtttaaattattgaaagaacaattcgtt

SEQ ID NO: 33234 - DNA, 201 bp, Homo sapiens
taacgtgcccattcacatgctagttggcttatccagagtcaggataacagaaaacagaggatcatgtgggcttacgagagtgaccatacaaaatctagagrgctagaaagtttcccctcaagtagcagtaaaagaggaataggtagcaccaggagatgaaaagggaggctgaataaccatttgttctttctcccaccttct

SEQ ID NO: 33235 - DNA, 201 bp, Homo sapiens
tttgggaatttgttgttgggtaaaaaaatggcttgcttgttatcaacatagtttgggatgggtgacactgctggaaggagaattctaggtttaattcttakaaaaaaatgttgccacagatgtttatagtacagaacactgttccaacctagtagatttcaacatttttattctacccaactcacctcagggctatgacag

SEQ ID NO: 33236 - DNA, 201 bp, Homo sapiens
ttcattcgatggtgaaaaattaatccttaccttatatattttgaagtgaatctcaccacatgcattttctcgcattttcaagtgccgccaggaaagtggcycaacttaaagtatataaaatagcccccttagtcttctaaatgagatctactattccttttgttatatatggtccatctaatttcacagaagtaattgaac

SEQ ID NO: 33237 - DNA, 201 bp, Homo sapiens
acaagaggaaaaatcagtgaattatagcattgccatgaatacatatccagggccagagggataaaggactggtactgagattgggctgaggtactcagagstgcctggaggaagttatagattagggagttttaaagtccttaccaagcacagttcaccagagttaaccaggagacctcggtcagcttttctgcagcacac

SEQ ID NO: 33238 - DNA, 201 bp, Homo sapiens
gatgggtttcctgaataaagcacaccgatggatcttgactctttatccaatttgccagtctgtgtcttttaattggagcatttagcccatttacatttaargttaatattgttatgtgtgaatttgatcctgtcattatgatgttagctggttattttgctctttagttgatgcggtttcttcctagccttgatggtcttt

SEQ ID NO: 33239 - DNA, 201 bp, Homo sapiens
atatagctttattaatgtgccataccataccttactcagaaccactatcctttgagttaaaattatttccaataattgcaagagaaattcatcaggcagcrctggccttaatccaaagaaaagggtagaaaccagttaaatgcttaaaagttttaaggataaattaggaagtaggtgttagaaatctctttagctccaact

SEQ ID NO: 33240 - DNA, 201 bp, Homo sapiens
ttttatacaggtggtaacacagtcttattttggttcattagttgcaactaagacatcattttttaatacagtagttatttgggttactactcttcccttgkgtttttaattcctttcgtggtggcgggggggttgtttgtgggttttgtttcctcttgtttttgtgtgcttttgaaaaggtaactgtaatccatgcttcag

SEQ ID NO: 33241 - DNA, 201 bp, Homo sapiens
gtccttaccaagcacagttcaccagagttaaccaggagacctcggtcagcttttctgcagcacacaaagcctacaatcgccatagcactctgtctacctgyctcctcttgaacgttaaccagtgttaggatgatgtggccagctttctacatgtagtaacattcaatatcagccctagagcaactgccagcctgcgggaaa

SEQ ID NO: 33242 - DNA, 201 bp, Homo sapiens
aaactctgtctcaaaaaaaaaaaaaaaagaaatctacttttcttctgttgtctagtttgtatcattgtcattgttcttagaagacatgacaagttctctcrtctagctgtgtaaagtaaatgtagttttcaagcctgtgcagtttttttttttaaaaaagctttgcttctgagtgttcaagctttatagtcaggagaagac

SEQ ID NO: 33243 - DNA, 201 bp, Homo sapiens
atagcactctgtctacctgcctcctcttgaacgttaaccagtgttaggatgatgtggccagctttctacatgtagtaacattcaatatcagccctagagcractgccagcctgcgggaaataatcactcactattgaggccagatctgctttgagcacctgtgtcacgcctgatataccgggaaggtttctgttatatata

SEQ ID NO: 33244 - DNA, 201 bp, Homo sapiens
acaccgcatattctcactcataggtgggaattgaacaatgagatcacatggacacaggaaggggaatatcacactctggggactgttgtggggtgggggarggggggagggatagcattgggagatatacctaatgctagatgacgagttagtgggtgcagcgcaccagcatggcacatgtatacatatgtaactaacctg

SEQ ID NO: 33245 - DNA, 201 bp, Homo sapiens
caagtgtgggaggcacaggacaactggctggcttccaggcaggaaaagcatgaagcaggcaaaaagaggaaggaggctgcttaactggttaatttttaccygatctccctattcctagtgattttttttatgctgatgcctcaatttccccagatttggcatttccaatttaatgaaatgagtatgctcccaaaagggaca

SEQ ID NO: 33246 - DNA, 201 bp, Homo sapiens
atattttataatcatttaataagatactttagccttatacatttacagcaattgcctctttggggctgacactttcagaggctgcctagagagacagaacsacgactttggcttcagcttccaggtggccccacactgccatctggtggtcattcaaatgctttaacttttcaaatttctgctctcatttctagtcttgtt

SEQ ID NO: 33247 - DNA, 201 bp, Homo sapiens
ttggttgaagaatatgctgtttattcacagaatgtgtgtttagtggcagttaggaaagagtttaataaaatctaatcatctcaagaaatgaaatttgcttkgacaataaaatcatccatttgttcaaaatcaatatctttttttgatttactgaaatctgaaactgaactctcagtataaactctgaagcataactgccct

SEQ ID NO: 33248 - DNA, 201 bp, Homo sapiens
tctcattgtggttttgatttgcatttctctgatagccagtgatggtgagcattttttcatgtgtcttttggctgcataaatgtcttcttttgagaagtgtmtgttcatgtccttcgcccactttttgatggggctgtttgtttttttcttgtaaatttgtttgagttctttgtagattctggatattagccctttgtcaga

SEQ ID NO: 33249 - DNA, 201 bp, Homo sapiens
agatttgaaaatcattgctcgaaatatcttttttcaccatgagaatcccaacctctattttgagcattaccagtagacaacaatattgggaggattttttwaaaaaatacaaattcaggtagcaagtacttgttaattgtgtgctcatagatgtactaggtgtacttacaagaaatcatcgcattcggaaagaatggtctc

SEQ ID NO: 33250 - DNA, 201 bp, Homo sapiens
agatcagatagttgtagatatgcagcattatttctgagggctctgttctgttccattggtcaatatctctgttttggtaccagtaccatgctgttttggtkactgtagccttgtagtatagtttgaagtcaggtagcatgatgcctccagctttgttcttttggcttaggattgacttggcgatgtgggctcttttttggt

SEQ ID NO: 33251 - DNA, 201 bp, Homo sapiens
aaaaaattataagggacaggaagttctagataggtcctataaattcatccctttttgtaaagatgtaaatgctttctgtaattaaaagtccttctaaaaarcatttagcaaaatgttgaaaattgctgaagcttcataatggatacttggaggttcattagtcttttctctttatttcttagtatgtttgaaaattgccca

SEQ ID NO: 33252 - DNA, 201 bp, Homo sapiens
tcagcagtcaacacctaaaggtaccaaaaagaaacaatgtgagactttcacttctttgcaaatgctcttgggcaaagaagaatgaaaaatcagaacacagrtcttcaaaaggctgtttcaactgatgatttatgatactttgaaactcagttgttctgagatgcttaacagttataattaatgataccagtagctacctac

SEQ ID NO: 33253 - DNA, 201 bp, Homo sapiens
caaaccctaccagcctctaccaaaagtcaagcatgaaatggatctagcttacaccagttcttctgatgagagtgaagatggaagaaaaccaagacagtcayacaactccagggagaccctgcacgagtataaccaggagctgaggatgaattacaatagccagagtagaaagaggaaagaagtagaaaaatctactcaagg

SEQ ID NO: 33254 - DNA, 201 bp, Homo sapiens
tatcacatcggcagttcagtctcaatatttgaatttagggggacaaattcagaccatagcaccaaataaaacaggtgattccaggaggaaagagtgagccrctgtgccaaatactcctgataagtaagatgaggacttagaattgaccacttgatttagcactgtgaagagcaggcgctgtgacacatgagggaccaaagc

SEQ ID NO: 33255 - DNA, 201 bp, Homo sapiens
agattgcaaaaattttctcccgttctgtaggttgcctgttcactctgatggtagtttcttttgctgtgcagaagctcttgagtttaattagattccatttstcaattttggctttcgttgccattgcttttggtgttttagacatgaagtccttgctcatgcctatgtcctgaatggtaatgcctaggttttcttctaggg

SEQ ID NO: 33256 - DNA, 201 bp, Homo sapiens
actccgttagtattttggaattaaggtaagtcttctctaatctctatatatttgcttagcagataaagcaaaaagcaagataatatgaaaagacaaagcaytgccagtagaagcagaaaatgtagttgcccctattgtagcactgagttaagatgcaggaatagggacaaaggtcaacatgctcactcttcctacttgaag

SEQ ID NO: 33257 - DNA, 201 bp, Homo sapiens
aatacagtagttatttgggttactactcttcccttgtgtttttaattcctttcgtggtggcgggggggttgtttgtgggttttgtttcctcttgtttttgkgtgcttttgaaaaggtaactgtaatccatgcttcagtaaaaattaatgcttagggttcaggaaaatattatggtttgctctagttttcaattcatgatgc

SEQ ID NO: 33258 - DNA, 201 bp, Homo sapiens
tacagtagttatttgggttactactcttcccttgtgtttttaattcctttcgtggtggcgggggggttgtttgtgggttttgtttcctcttgtttttgtgkgcttttgaaaaggtaactgtaatccatgcttcagtaaaaattaatgcttagggttcaggaaaatattatggtttgctctagttttcaattcatgatgcag

SEQ ID NO: 33259 - DNA, 201 bp, Homo sapiens
acgactgtttctggagaagtagtttgcgccagaccttggaaaacaagaaaaatcactcctagtgatcttgaggagtacatttttaggagaatggaataatygaatggtaagggggaaatgcagatggtaatagcctaggtggtaagtggataatgaaacaatagtgcagctgatagaaacagttcagcaaggaaaggaagg

SEQ ID NO: 33260 - DNA, 201 bp, Homo sapiens
accctaattagtttcagacgtctcactcttttgtcattttaggataaatagtcctcgtgaccctttgtgtgaataaagctgagctccttagcaattttagrgtcctgaaaataaacaactcatagacacagtatcgtattgtgtgaattttcctaaaacacatgtcttttaaaagacaagaaaatattttacagctgtcaa

SEQ ID NO: 33261 - DNA, 201 bp, Homo sapiens
taaagaaaactcaagtaaattttcccaaaatcaaaaggcttgtaagtcattcaccctaaattctcctctttcttttttttttttttttttttttttttttrgagacagtttctctccatcgcccaggctggagtgcaatggcacgatctcggctcactgcaaccttcgcctcctgggttcaagtgattttcctgcctcagc

SEQ ID NO: 33262 - DNA, 201 bp, Homo sapiens
ctcctctttcttttttttttttttttttttttttttttggagacagtttctctccatcgcccaggctggagtgcaatggcacgatctcggctcactgcaascttcgcctcctgggttcaagtgattttcctgcctcagccttcagagtagctgggattacaggcacctgccaccactcccagctaatttttgtatttttag

SEQ ID NO: 33263 - DNA, 201 bp, Homo sapiens
cattttttggtttttttttttttttgagacggagtctcgctctgtcgcccaggctggagtgcagtggcgcgatctcggctcactgcaagctccgcctcccrggttcacgccattctcctgcctcagcctcccgagtagctgggactacaggcgcccgctaccacgcccggctaattttttgtatttttagtagagatgggg

SEQ ID NO: 33264 - DNA, 201 bp, Homo sapiens
ctctttcttttttttttttttttttttttttttttggagacagtttctctccatcgcccaggctggagtgcaatggcacgatctcggctcactgcaacctycgcctcctgggttcaagtgattttcctgcctcagccttcagagtagctgggattacaggcacctgccaccactcccagctaatttttgtatttttagtag

SEQ ID NO: 33265 - DNA, 201 bp, Homo sapiens
gtgcagtggcgcgatctcggctcactgcaagctccgcctcccaggttcacgccattctcctgcctcagcctcccgagtagctgggactacaggcgcccgcyaccacgcccggctaattttttgtatttttagtagagatggggtttcaccgtgttagccaggatggtctcgatctcctgacctcgtgatccgcccgcctcg

SEQ ID NO: 33266 - DNA, 201 bp, Homo sapiens
ttggagacagtttctctccatcgcccaggctggagtgcaatggcacgatctcggctcactgcaaccttcgcctcctgggttcaagtgattttcctgcctcwgccttcagagtagctgggattacaggcacctgccaccactcccagctaatttttgtatttttagtagagacggggtttcaccatgttggccaggctgctc

SEQ ID NO: 33267 - DNA, 201 bp, Homo sapiens
ataaaccctgtcatatagtaagtgctcaacagtttttttcttataatgagataacttttacaacgttttgtttccacttatgtaaagtgaggatgtttcckcgctgtggtgcagaggatcaatggaaattgtatacataaatcattctgaaaagtgccaggacacaagaattattcctgattgtcaaatcctttcacagat

SEQ ID NO: 33268 - DNA, 201 bp, Homo sapiens
ctcctgggttcaagtgattttcctgcctcagccttcagagtagctgggattacaggcacctgccaccactcccagctaatttttgtatttttagtagagayggggtttcaccatgttggccaggctgctctcaaactcctgacctcagatgatccacccgcctcagcctcccaaattgctgggattacaggcatgagccac

SEQ ID NO: 33269 - DNA, 201 bp, Homo sapiens
tgtaaataacagaatgaattggaactttatacataggaataagggagaatcctatctccacaccagccagtcggactttgttgaggatcttaagttcccaygcccttgctctgtaacttcatggtatagaaatagagcaatagtggaaacaggtttaacaaaattcttagtcctatcatggtaactacagttgtaatacct

SEQ ID NO: 33270 - DNA, 201 bp, Homo sapiens
aagtgattttcctgcctcagccttcagagtagctgggattacaggcacctgccaccactcccagctaatttttgtatttttagtagagacggggtttcacyatgttggccaggctgctctcaaactcctgacctcagatgatccacccgcctcagcctcccaaattgctgggattacaggcatgagccaccatgcctgacc

SEQ ID NO: 33271 - DNA, 201 bp, Homo sapiens
atacagatggaatttttggtctctgaaacatgagaggagcagggataattgagggaatgtgtcatgtctcgtagcatctgctgtctatgttaagtaggagmcaatgtcgtctgccaagattcagggagagagggctgtgagtagagtaagaaacattagcagaatgaacaatgagacagaaaaaaatctggaaagtggtag

SEQ ID NO: 33272 - DNA, 201 bp, Homo sapiens
cttttgtcatattttgtagcctgtaatgttaatgtattttcaacaagatagaaaatattacacaggaaatagaactattcatgagacaaatgtattagagmaaatatcatttctatcttgtttataaattatacaattgccagcatctgttttctgttagttcttcacccacaccaaccccactgctgattataggaagat

SEQ ID NO: 33273 - DNA, 201 bp, Homo sapiens
aaaatgtgaaaatgtctaggtggaaaataaattgtgcaaaatagtacaagtaatattatatagctctataaaaattatagagtagaatatgcaaaaatggkcctaaaatgcaatggaatttaaactgggtaaataaagtgtggccaaatagagatcctttgactcctgctttaatgaacagataagaatgattaccagtta

SEQ ID NO: 33274 - DNA, 201 bp, Homo sapiens
atcttccctcgtgtctattcatagcatgcacttctcataactctaaaagactgtttgatgccccctcattgtttaatatctacatgattaaagcagctgakagaattagcacgtgtcttaagcctaaggaaaaatccagtctaaaagaaattgtattgcaagcccagatcgtttttaataagctctgctgtgctctgtctc

SEQ ID NO: 33275 - DNA, 201 bp, Homo sapiens
aatagaaatgcctctgcgttgcctaataagttgaatccaaatgtataagtgtggcaccagtgtgctccacaatatggctctaatcttcctttctggcgttracttccactggcaccagcacatagctaagctccagtgaaccccagcaacttcttttgcctcagatacatcatgtactttacaaagtcatattttgttcag

SEQ ID NO: 33276 - DNA, 201 bp, Homo sapiens
cattggctgtcactccatatccccacctccttccaacccctggcaaccactaatctactgtctctatagatttgcctatttctacatttcatatagaatcrtataatatacagcaatgtatcaatacttcatttttatggctgaataatattccataatataggtataccaaattttgtttatccattcattagttgatag

SEQ ID NO: 33277 - DNA, 201 bp, Homo sapiens
attttaatagggattgcatcaaatctgtagattgctttggatagtatggtcattttaacaatattgtttcctccagtccatgaacatggaatatttttccrttttttggtgtcctcttcaatttctttcatcagtgttttatagtttttcattatagagatctttcacttctttgattaattcctgggtattttattttct

SEQ ID NO: 33278 - DNA, 201 bp, Homo sapiens
agtacagccaccccttttgtcatgacagtttcaacatgactccccaaactacagttgttgcaaacccttttccagaagtttatatggaagagttaaaattyatgcctgacagatttcataagggtaagattgtgaaccagtggtcgatttgcctgcctttttatggtttataccttctgcctccctctccaggagttcata

SEQ ID NO: 33279 - DNA, 201 bp, Homo sapiens
ttaatgtatccaagcagtgtttaccaagttcccaccaggcgcaaggtttattcttttctttttctcttgactacttttgggtaatataatggatacaaaarcatgtgtaatccataacccagaaaatctacccctgaaaaattgagagttgaatacatatttctcttcgatagttcacgtaaggaaaattacattaagcta

SEQ ID NO: 33280 - DNA, 201 bp, Homo sapiens
ttcatgttatttttttcatggcaccaataaaatttactaaaactttgtaggtcacttatttcatttgggttataaaaagtctctaatttgattctgtcttycccccagaaatgattagccactcgttttaatggaatacccacagccatagtcttcatgacaacaagactctgtgtaaatggtttcagttggaaggtggga

SEQ ID NO: 33281 - DNA, 201 bp, Homo sapiens
agtatggccattttcacgatattgattcttcctacccatgagcatggaatgttcttccatttgtttgtatcctcttttatttccttgagcagtggtttgtmgttctccttgaagaggtccttcacatcccttgtaagttggattcctaggtattttattctctttgaagcaattgtgaatgggagttcactcatgatttgg

SEQ ID NO: 33282 - DNA, 201 bp, Homo sapiens
ttcagtgactccctgcctaactctgagccccttgcggcagccctcagtctatctctcctagatagaaatccaactttttgtctcctctcttccctaatcaraactgggtgggtataagtggcatactaaagggggatgggacagtggaagaagtattttatcactgacattatttggaatttccagcgaatgttgatagtt

SEQ ID NO: 33283 - DNA, 201 bp, Homo sapiens
gtacaattttttgcctgaaatacgaaaatcaatagagaattgctctttggagactttgaaagcattatgagaacattacaagttcatttgccaaccttcarattcctgccctgtgctgtgtggtgggaatggagaatacgagaaaggacactgtgtctgccggcatggctggaaggggccagagtgtgacgttccggaaga

SEQ ID NO: 33284 - DNA, 201 bp, Homo sapiens
aggctggggaaactcaggctttcggtttctcaagaaggaagccagcatatgctttagataaaatgtctaataaagtaataggtttgtaacttggagagagyagaattttaatgtcataaaatgagttagacacactctgggtccagccagccagaagacctatggagataataactataaacaaactggtaaggattagag

SEQ ID NO: 33285 - DNA, 201 bp, Homo sapiens
tcaaagaaatacagccaaattgctataggattttggacaaattagcctgggcctctgttttccaattatcaaaatgaaaatagttacctatctcctctccrtctaatggagtgattttgtgcctatgtcaacctaggctagtgaattagaaagcactatgagctattgtgagaaaggcccccttataaattgattatagga

SEQ ID NO: 33286 - DNA, 201 bp, Homo sapiens
tcttgtccaatgtcacatggaaaataaatggcaaaatgaggactagaatcttcttatttccagtcctgtgtcctaaatggaacacttaggtatctttaaayagtcaatgggacagcatgttacttagaaaggattaagattatgaggatgataaaggttcttatagaggcaaagaaatgagaaatggaagagtgtcaactc

SEQ ID NO: 33287 - DNA, 201 bp, Homo sapiens
aagggtgaaaatggacctacaggtagagatacctagaacattattaaatatttggtgctgaaactttggaggtaactaccgttgaggacaccaaaatcgtrggagtaggaaggaaaaaggagtatgaagacttgaactctgggaaatactggtgttcaagaagcccagggaaaaggaatctgctaagcagactatgaagaa

SEQ ID NO: 33288 - DNA, 201 bp, Homo sapiens
gctagaagtctaaaatcaaaatgtcagcaggtccacactccctctggagactctggggagaaacatttcttgccttctccagcttcaggtggctggcagcrttccttagtgtgtgactacataactccagtctctgcctctgtcttcatatggccttctcctcttcccttttccttttctgtctcttatgaagacatttgt

SEQ ID NO: 33289 - DNA, 201 bp, Homo sapiens
gtgattttcctgcctcagccttcagagtagctgggattacaggcacctgccaccactcccagctaatttttgtatttttagtagagacggggtttcaccaygttggccaggctgctctcaaactcctgacctcagatgatccacccgcctcagcctcccaaattgctgggattacaggcatgagccaccatgcctgacctc

SEQ ID NO: 33290 - DNA, 201 bp, Homo sapiens
ctaatttttgtatttttagtagagacggggtttcaccatgttggccaggctgctctcaaactcctgacctcagatgatccacccgcctcagcctcccaaaktgctgggattacaggcatgagccaccatgcctgacctcctcattttatttttgtttttgaactttatcttaatcagagtaaaaagaagccaatatacttg

SEQ ID NO: 33291 - DNA, 201 bp, Homo sapiens
cctgacctcagatgatccacccgcctcagcctcccaaattgctgggattacaggcatgagccaccatgcctgacctcctcattttatttttgtttttgaastttatcttaatcagagtaaaaagaagccaatatacttgattaaacaaagtcagatttgtatgaatttgctctaaacgctgctcatttatctatttcatga

SEQ ID NO: 33292 - DNA, 201 bp, Homo sapiens
aggaaagaaacgttagaaaagagaaggtgaaagtgaaataaggttaaatttgacatagttcctgccaccctcttcctaggtccaatcctcatgttatctgktgcttataaatttaaaagacagttagacttcagatagtatgaatgcttgagaaatggggcattataactgaaagatttgttagtttagattgaaatgtat

SEQ ID NO: 33293 - DNA, 201 bp, Homo sapiens
caatccatcaccacctctcagcctccttacatagtaaatcaaaatgtaaatgcaaacatagctctggaacagctataccaaggatcaaaatagtgaagaartgattaatgtctacctttttcagaatatccatcttaacgatgggtagttagagaggagaatctaatcctagtcaatagtcctatgcagcaagtaaaatct

SEQ ID NO: 33294 - DNA, 201 bp, Homo sapiens
tccaatcctcatgttatctgttgcttataaatttaaaagacagttagacttcagatagtatgaatgcttgagaaatggggcattataactgaaagatttgktagtttagattgaaatgtattataaaataaaagtaccagtaaatttgcagatttctaagaaggggtttgataagggacaaaaagtcaattcgaaaattaa

SEQ ID NO: 33295 - DNA, 201 bp, Homo sapiens
tgtccatatctgtaaaatgggtgtaatatgtgtaaaacctctggcacataatagttattgagcaaatagtgtctattacacagacagtagtgagtttttamccaagccagtatactctaaaataagtacatagtgaatcttaacatcggaagtatgattcataaattggatatattgcctctaaagtagatttgaacttga

SEQ ID NO: 33296 - DNA, 201 bp, Homo sapiens
cagcagatatacatgtagtaagagatcattttacctgtaacgaagtgaatgcatagcctttctgccactaaagcaatattagaagcaaaaggtgttaaatmcaaacaaaattggatttgaattttgacttcacctcttactaggaatggtgaccatggtcaagtattttaacccttcagagtcagtttccttgcttatcaa

SEQ ID NO: 33297 - DNA, 201 bp, Homo sapiens
actttggcagctgatttacatctattaaactgatattaccagatgcagattttgaatatagctattttttccctgcaaatttcaagcaaggtataaattgwgtgtgtgtgtgtttaatgcaaatatcttatagatgtattatagatacagttgggaggtgcttcatttccctcattttattctgaggttagtaaagtaatt

SEQ ID NO: 33298 - DNA, 201 bp, Homo sapiens
tggagcataatgccttaaagctcactttttagaggaagcatggggaggtagaattttagaaaaaatagtcttgagcttatcagaaacacagaaattggccrggtatggtggctaatacttgtaatgcttgagtccaggagttcaagaccagcctgggcaacactggggggagctcttctctacaaataattttaaaattat

SEQ ID NO: 33299 - DNA, 201 bp, Homo sapiens
attgtgtgtgtgtgtgtttaatgcaaatatcttatagatgtattatagatacagttgggaggtgcttcatttccctcattttattctgaggttagtaaagkaattcttagagcacactctaatgactgcctaaataaaagtacaaataacatttgatctccaagcatgtatttgaaacagaaagattcacacttgcatatt

SEQ ID NO: 33300 - DNA, 201 bp, Homo sapiens
tacaggtgcttgttgttgttgttgttgttgttgttgttgttgttgtttgttttttgctttccctttggtgatgtcatgtttccctgattattcatgattcytgtggcattggcaccttctccagtcattaaagactggcttcaccaggagaagctcttcacctgtcagcttgtccagggattctgtgtggaccagcaggga

SEQ ID NO: 33301 - DNA, 201 bp, Homo sapiens
aaaattatctgtgtgtggtggtgcatgcctgtagtcccagctactcaagaggctgaggtgggaggaggatcacctgaacctgggaggtcgaggctgcagtragccaagatcgtgccactgcactccagcctgagtgacagagtgaaaccctgtctcaaacaaacaaaacaaaacacagaaatggcatttctagaaaaacac

SEQ ID NO: 33302 - DNA, 201 bp, Homo sapiens
ttcctttctgggaaaaaaacaaaaaagaaacagcattatcataacaggaagaaaaacttaattcaagtctccgaggaatttaaagtaaaaatcatagggcmgcaggatggaaacccctaggtttctggaactagtccaagctgaactagaagggcctaatgcagtcattcattgatttgagagacaggatatgtcaaaggt

SEQ ID NO: 33303 - DNA, 201 bp, Homo sapiens
aaatttcatgtgaaaatgttggtggtgaagaggaggtgaagggggagctagggagaaggataaaacaggattccaggtaggatgagaaaacatttatttamcctgggaggagagactgaaatcaggttgggttggatttggcttcatgactttctacaaatctaccatgttttacatggctctcataattaactcagtata

SEQ ID NO: 33304 - DNA, 201 bp, Homo sapiens
tcctttctgggaaaaaaacaaaaaagaaacagcattatcataacaggaagaaaaacttaattcaagtctccgaggaatttaaagtaaaaatcatagggcascaggatggaaacccctaggtttctggaactagtccaagctgaactagaagggcctaatgcagtcattcattgatttgagagacaggatatgtcaaaggta

SEQ ID NO: 33305 - DNA, 201 bp, Homo sapiens
gattttaccaatgtggattccacagattttaattgatgacaaccatgcctggcctgccttcagcatttccatagatccttgaggagttggtttgagttaasataagagtgtaaatggcttttccaaaagcatgttaatttgaggaaacaagttatttccaatgaatgaacttggtgtttgtgtggaaatgttgctatttat

SEQ ID NO: 33306 - DNA, 201 bp, Homo sapiens
atcttaataacagtggaatttcatatcctggggaatctcagtggattcttcatctttctaaagatcacttacccttgttagatgcttttctttccttagcmccaagaggcaaaaggggagaggactcttaatatatgtttgtagtctcccttcttcagataggcacatcttgggcaggtagtttccttcattttttttctt

SEQ ID NO: 33307 - DNA, 201 bp, Homo sapiens
atacaaaggataaatgcttgagaggatggatacctcattttatatgatgtgattaatatgcattgcaggcctatatcaaaacatctcatgtaccccataartatatatacctactaggtacccacaagaaatacaatttaaaaaaataaagtacgtgagaatgctccattggactcagggcaagagtgtggctataccaca

SEQ ID NO: 33308 - DNA, 201 bp, Homo sapiens
caataaggatacataaaatgatttggctggtaagtggtaaagtcagtatttacaccaggcagttcaatccttgcatttacccatgatattatactgtctgwcatgcatcaatttttgatagacatacatacaaacgtatatatatatatataatttcttagaataagatcatgtaaaatcacaaaatccagttttatttga

SEQ ID NO: 33309 - DNA, 201 bp, Homo sapiens
actgtctgtcatgcatcaatttttgatagacatacatacaaacgtatatatatatatataatttcttagaataagatcatgtaaaatcacaaaatccagtkttatttgaagtgaggaagcactagaaggattttttttttttttttttttgagacagtctcactcagtttctcaggttggagtacagtcatgagatcatgg

SEQ ID NO: 33310 - DNA, 201 bp, Homo sapiens
gaaagggtttccagatggctataggaaagtctctctctctttctctctctctcgttacaaataaacctatggagggaaaagagaatgcctaggtttccatrcataaaattaagggtgattttaacatgataaatcatatttgccaaaacacaacattcagcattcaaagtgagacatttttcttttttaaatttaaatcgt

SEQ ID NO: 33311 - DNA, 201 bp, Homo sapiens
tttgaataagttttgagttcaaaaaagttggtgaagagaggcatggaaaaatactgattatatgaagatagcatggaatggctattgtcatcacttcctcrtaaatctgtaatattttccatctgaatcaaaaagtatgtccttatgcttcatcttttctgatattttggcatcagtgatgtatcagtgccagtcagaagc

SEQ ID NO: 33312 - DNA, 201 bp, Homo sapiens
gtgatgacagtgtcctgggggttatttaagcttattgctcactttgagttgaagtcattattgaggaaaggttactatgataaaagtttatattgttgttrtcattgatgttgtttaaatgctgattaagattttttttaatgctactttatttgttgctcttctaggacacttgccatacatctttttatgtgctctcaa

SEQ ID NO: 33313 - DNA, 201 bp, Homo sapiens
acctacttcatggtacatgccattcagctatacccctaccaatcttaaaggcatggcacctcatttcttttatgtttttggatctgataaaattattcctrttgatccaaatttggctatactcctgggtacatttgcaccagctctcatctctgactgaaacactgttccaaacccattcttcccctctaggggaaggaa

SEQ ID NO: 33314 - DNA, 201 bp, Homo sapiens
agcagtagatcttgtgctccctctaatacatcctgatggcattgaccccataaatggagttttagtgaatcttcaacagcagatgagtctttccccatagygttcttcatcacgttctctgttgccttcatgccacaaactcatttgaaaggttttatgatccaattactaccaacaactattacttcagttactatcatt

SEQ ID NO: 33315 - DNA, 201 bp, Homo sapiens
ttagtgaatcttcaacagcagatgagtctttccccatagtgttcttcatcacgttctctgttgccttcatgccacaaactcatttgaaaggttttatgatscaattactaccaacaactattacttcagttactatcattacatagccatatttattaaaaattctgtacatactagtggatcattttattgtgaagttca

SEQ ID NO: 33316 - DNA, 201 bp, Homo sapiens
tgtaatcccagctacttgggaagccaaggcaggaagattgcttgagcccaggagttcaagaccagcctgggcaacatagtgagacccaatctctacagaamattttttttaattagctgggcatggtggcatgtgtctgtagttccagctgctcaggaggctgaggcgggaggattgcttgagcctgagaggttaacgcca

SEQ ID NO: 33317 - DNA, 201 bp, Homo sapiens
tacagaaaattttttttaattagctgggcatggtggcatgtgtctgtagttccagctgctcaggaggctgaggcgggaggattgcttgagcctgagaggtyaacgccaccgtgagccatgatctagccactgcactccagcctgggcaacggagtgagaccctgcctcaaaaaaaaaaaaaatagtgaaatcaggataaag

SEQ ID NO: 33318 - DNA, 201 bp, Homo sapiens
ctgtagttccagctgctcaggaggctgaggcgggaggattgcttgagcctgagaggttaacgccaccgtgagccatgatctagccactgcactccagcctrggcaacggagtgagaccctgcctcaaaaaaaaaaaaaatagtgaaatcaggataaagaactgattcatgagtcgagattaaaatgtaggttataaacatg

SEQ ID NO: 33319 - DNA, 201 bp, Homo sapiens
catgatctagccactgcactccagcctgggcaacggagtgagaccctgcctcaaaaaaaaaaaaaatagtgaaatcaggataaagaactgattcatgagtmgagattaaaatgtaggttataaacatgttgagtttaaaggtgccggtggcttagccaggtagaaatgcgtagcatgcatgttatttgtgaaattgagagt

SEQ ID NO: 33320 - DNA, 201 bp, Homo sapiens
gaatttcttctggaaaacattttctaaaatagcaaaattcatcataaatatatgattgggactattaaatataaatgttgcagtcttaatcatctatagamcaagccattatgacaagatttccctgtataaatgtgcagcatgtttcatatgccagtgtgttaaaaaaaaaaagaatcatttgatgacttaaaaataact

SEQ ID NO: 33321 - DNA, 201 bp, Homo sapiens
atgtagtaagccttgtaataggtgtatgtaaaatgcatgcattagaagcacaaagaaaataagctggagaaatctaggaggatttcacagagaatgtaatrtttgaattttatcttgaagtatggatatgaatattttgtctttttctttattttcttctatatttgtgcatgtgtatacacacatgcacatgcattagta

SEQ ID NO: 33322 - DNA, 201 bp, Homo sapiens
gatttatttgccaaacctttaggtctccaattcattcttctccatactactactggatttatctttctgcaaaggatgtttttattatatcagttatttgsctaaaaaccttcagtgctccccactctcaaattaatcatccgaaaaattctgatcatatcactcaacctgtcaaaaaatagaaatgcctctgcgttgcct

SEQ ID NO: 33323 - DNA, 201 bp, Homo sapiens
tggattcttcatctttctaaagatcacttacccttgttagatgcttttctttccttagcaccaagaggcaaaaggggagaggactcttaatatatgtttgkagtctcccttcttcagataggcacatcttgggcaggtagtttccttcattttttttcttctttgaattgctgtagttctctactgtacattcacatgaag

SEQ ID NO: 33324 - DNA, 201 bp, Homo sapiens
agttgtgttcagagcaccaccttctgaactgcattgcacatgtagcatgaatgaaaaataagcatctgttgtttccacccactattatcttgtggggaggkgggtcatctgcaacctaatctaacctatactgactagtccaagtgtcccatcaagccactgctgtagtggaaagagtctgaagctaagagtcaagagtcc

SEQ ID NO: 33325 - DNA, 201 bp, Homo sapiens
aaagcatcctaaaatgaaaaaaaaaaaaaaagcttactcttcctggtgcttcagttctttcccctgactattaatctgagctcagttcttgctgtctgaakggagatttctcttctgctcaaagcagatcaatgtttgcacaaattagaacttcagataacatcatcagtgtgcaaatgccttctttagatttaaatgaca

SEQ ID NO: 33326 - DNA, 201 bp, Homo sapiens
ggcaaaacctatgaaatgaaaatttcagcagaatttgatcacatttaatgaattgtctgctgtgagcatactatgcttctagatgtcacaagtttctagcrcaaaatccataatgactgctctgaaagaacttagactgtaagagaaattagccaagttatttaacaataactctaattggctcatgtctttcaactagta

SEQ ID NO: 33327 - DNA, 201 bp, Homo sapiens
catcctaaaatgaaaaaaaaaaaaaaagcttactcttcctggtgcttcagttctttcccctgactattaatctgagctcagttcttgctgtctgaatggakatttctcttctgctcaaagcagatcaatgtttgcacaaattagaacttcagataacatcatcagtgtgcaaatgccttctttagatttaaatgacaaaat

SEQ ID NO: 33328 - DNA, 201 bp, Homo sapiens
tcagttctttcccctgactattaatctgagctcagttcttgctgtctgaatggagatttctcttctgctcaaagcagatcaatgtttgcacaaattagaamttcagataacatcatcagtgtgcaaatgccttctttagatttaaatgacaaaatagagttccattcagctcttgggaagcagcacaaactgaagtacaaa

SEQ ID NO: 33329 - DNA, 201 bp, Homo sapiens
atagaactatagaagcaaagccaaaagacagcccatacccagcattctctgcagtcacaccccctagggagggggagaaaaggaaagggaaattaaacaamccaaaaaaaaaaaaaaaaacagtaaggcctgggcatggtggctcacgcctataatcccagcactttgggaggccaaggggagcggtggggtggggagcag

SEQ ID NO: 33330 - DNA, 201 bp, Homo sapiens
cctgaggtcaagagttcaagaccagcctggccaacataggaaaccgcatctctactaaaaatataaaaattagctggacgtagtggcacacacctgtagtytcagctattcaggaggctgaggcaggagaatagcttgaacctgggaggcagagattgcagtgaactgagattgtactactacactctagcctgggtgaca

SEQ ID NO: 33331 - DNA, 201 bp, Homo sapiens
tagattctggatattagccctttgtcagatgagtaggttgtgaaaattttctcccattttgtaggttgcctgttcactctgatggtagtttcttttgctgygcagaagctccttagtttaattagatcccatttgtcaattttggcttttgttgctattgcttttggtgttttagacatgaagtccttgcccatgcctatg

SEQ ID NO: 33332 - DNA, 201 bp, Homo sapiens
ccatttattaaatagggaatcctttccccattgcttgtttttctcaggtttgtcaaagatcagatagttgtagatatgtggcattatttctgagggctctrttctgttccattggtcaatatctctgttttggtaccagtaccatgctgttttggttactgtagccttgtagtatagtttgaagtcaggtagcatgatgcc

SEQ ID NO: 33333 - DNA, 201 bp, Homo sapiens
ctccatcagctcctttaagcacttctctgtattggttattctagttacacattcttctaaatttttttcaaagttttcaacttctttgcctttggttttawtttcctcctgtagctcggagtagtttgatcgtctgaagccttcttctctcaactcgtcaaagtcattctccatccagctttgttccgttgctggtgagga

SEQ ID NO: 33334 - DNA, 201 bp, Homo sapiens
atgctttacatatttatttatatttctatatacatatttactgtactatacgttcaaatatgtataactatacatttatacttattagtatatttttattktattcatttgttttctgtctttcatactagattaagttctgtgagagcaaggaattttgtattttgttctttgctgagtcccagtgtttgaacactgcct

SEQ ID NO: 33335 - DNA, 201 bp, Homo sapiens
ctaacacaggaaagatatccatgacatactattgagaggaaaattgcaaaacattacatataacattatctcagtcttgtaaaaacacaaaaaagtgtttrtgcttatgtgtttatgtatttatgtgttttctgcatttttcaaacaataaataaaaacaatgaaagtatagtaacctttcagtcagcatgatgtttaggg

SEQ ID NO: 33336 - DNA, 201 bp, Homo sapiens
tcttaagacaaaatatatgtcttaaagttcagatgacactaataaccatagagccttgatgattgccatagagtaaaactataaatttttttaaaactaartgtcttaaatgacactaaactatgcattgaaatactatataaggacatttatatgccttttttcttcatcatgctgaggattttgttgactctgggttct

SEQ ID NO: 33337 - DNA, 201 bp, Homo sapiens
atgctgggcaagtgaatatgtaataatttcttaatttttatgaatttttacatcagaggtgtcttttccttgtttagaatgccatattttaatcttgaaawttttacataaatgtatactttagaaactgataaccagatttaatcttttggggtgccaaatatgatcaccatctaatattggagaaggcagaggggtcaa

SEQ ID NO: 33338 - DNA, 201 bp, Homo sapiens
atttttctttcttaaaagtttggtatatttacaaatgaagtcatctgagactggaattttctttgtggtaatgttttccattatggattaagtttctttawagaaactattcagtttccactttttcttgtagtttattaagttgtattattctagaaatttgttcataaaaaatttcagatgtattggcaaaaagctgtt

SEQ ID NO: 33339 - DNA, 201 bp, Homo sapiens
ttcagtttccactttttcttgtagtttattaagttgtattattctagaaatttgttcataaaaaatttcagatgtattggcaaaaagctgttagtaatatygtcttaggatgttttatgtttgtactatgtatagcaatgtcatactttttattcccgatactgtttatctgggtcttctgtattttcatcttgatcagtc

SEQ ID NO: 33340 - DNA, 201 bp, Homo sapiens
tttcaacaatcaaaacaagcttcccacacttctctgctaggttcattcagtttttttcttttttaccaagaaagatattgaaggttcattcattttttaarttgaattctgcatatcaagcaatgaaagttaaggcactctaaatatgattgcctactttcttttccaacagtcttctttttgttcatttctttttttgac

SEQ ID NO: 33341 - DNA, 201 bp, Homo sapiens
ttcataatacattgggaaatcaatataatggcctatgaccagctttttaaaaaggtgaaacacaattttaaaaatcaaggtgtatcatgtgtaatgagggwgagtagtgtttcataatatttttatttcaactggataatggtgtaaaatacagtttttagtgagtgtcacagtcaaaacaagtttgaaagccactctctt

SEQ ID NO: 33342 - DNA, 201 bp, Homo sapiens
cactataagtatgagattaaatgctgcaaactttggaatatttctagggaatcaattcgactttctagaggccaaccattcaattacaaacataacttgcwattgaaaaaccacaaaaaaagccaacctacggtgattatgcatgagagacaaagttactcaacatgttcttaatgtgtcctgtagtcttcgtttagagat

SEQ ID NO: 33343 - DNA, 201 bp, Homo sapiens
aaagtcattctccatccagctttgttccgttgctggtgaggagctgcattcctttggaggaggagaggtgctctgctttttagagtttccagtttttctgytctgttttttccccatctttgtggttttatctacttttggtctttgatgatggtgatgtacagatgggtttttggtgtggatgtcctttctggttgttag

SEQ ID NO: 33344 - DNA, 201 bp, Homo sapiens
ttgataggtgcagtaaaccaccatggcactgtttacctatgtaacaaatctgcgcatcccacacatgcatcccggaacttaaaataaaataatgctttttwaaaaaaagggcaaaagatatgaatagacacttctctaaagaagacatacaagtagccaacaaacatatgaaaaaatgctccacatcattaatcatcagcg

SEQ ID NO: 33345 - DNA, 201 bp, Homo sapiens
tggcctactactcatgacagatcatgagccgtaaaagttaatatttgcggggctgggcacagtggctcatgcctataatcccagcattttgggaggccgargcaggtggatcacctgagatcaggagttcgagaccggcctggccaacatggcaaaaccccgtctctactaaaaatacaaaaattttctgggtatggtggt

SEQ ID NO: 33346 - DNA, 201 bp, Homo sapiens
gtaaaagttaatatttgcggggctgggcacagtggctcatgcctataatcccagcattttgggaggccgaagcaggtggatcacctgagatcaggagttcragaccggcctggccaacatggcaaaaccccgtctctactaaaaatacaaaaattttctgggtatggtggtgtgtacctgtagtcttagctactcaggaga

SEQ ID NO: 33347 - DNA, 201 bp, Homo sapiens
gctgtaaagtctctgactatgattgtgaatttgtccttttccctttcttcttctttcaattttgcttcatttatttggcttactgctttcttcagtgttgrgttttgtttgtttgtttgtttgtttgagacagggcctcactctgttgcccaggctagagtgcagtggcatgaacatggctcactgcagcctcgacctcct

SEQ ID NO: 33348 - DNA, 201 bp, Homo sapiens
tgagaaacacctagggataaatagttactgtcaaggagatgtcagggtaggcattgaatcaactcctgtgtctagaaaggaactaaggtgaagccatgttkggctagcctgcatgtctccagtgcctagcacatctcttggcacaaggcacaccaaacacacacacacacacacacacacacacacacacacacacaccag

SEQ ID NO: 33349 - DNA, 201 bp, Homo sapiens
gattgtgaatttgtccttttccctttcttcttctttcaattttgcttcatttatttggcttactgctttcttcagtgttgggttttgtttgtttgtttgtktgtttgagacagggcctcactctgttgcccaggctagagtgcagtggcatgaacatggctcactgcagcctcgacctcctgggctcaagcaatcctccca

SEQ ID NO: 33350 - DNA, 201 bp, Homo sapiens
aattaaagcatctttgaaattgtgattctagagggaaaaagggaaagaacattgaatttaccaaaatcccatgtaacatgtaactttttcactgacttgargttttgtatctccttgtgttctttccagtcctctcattaatatggcctttgtggcacattctcccactatgacaggggcagagcagggataaagaggctc

SEQ ID NO: 33351 - DNA, 201 bp, Homo sapiens
aaataagtccatcatggagaatggggtatccatcccctcaagcatttatcctttgagttacaaacactccaattacactcttaagctattttaacatgtakaattaagttattattgactatagtcaccctgttgtgctgtcgtatagtaggtctcatttgttctttctattttttgtatacattaaccacccccacctcc

SEQ ID NO: 33352 - DNA, 201 bp, Homo sapiens
agtccatatacaaggactcctaagtccttacaggggcaggagaattatcctcctagaagtatcccatcatccatccctccaaggagcttcctttaacagaracagcaagggtttttctgccagatatcctagtgcctttcattacctcagcttcagaagtttaatatgtcccaaattattctttatttcaccttaattatc

SEQ ID NO: 33353 - DNA, 201 bp, Homo sapiens
ggtgtgaggcggcctcatttactttttagctgctatagccctaaagaatttacatgtaaatgcaactgtgaatgttttacatttcataagcatgctgcacrtgcttttgtaagttaagtggcatttttacagatagactgaacttaaaacaacctccctcaccccacaggttttattatctgaaatcctggtaagtctgtc

SEQ ID NO: 33354 - DNA, 201 bp, Homo sapiens
gttcactgcatcctctaagacaggaagtaaattacaaaatatagtggtgagaagttaaagtagtttatgacttgatggtctcacccaagaaaaatgagagrcagggttatgtgctgaaagtgtgaatcaagtcaaaggcttcagatgagtagtgaggtaagtttttgacgaggccaaaacagaattgcacatgcctatcta

SEQ ID NO: 33355 - DNA, 201 bp, Homo sapiens
tgttcattcatttacacattgtctgtggctgctttggtgctaaactggtagagttgaatactagccacagagactatatgacctgcaaagcctaaagtatktactgtccagtccttcacagaaaaggtttgctgacctttgcaatattaaattatttgaaatggcaaataaaatattatatatgtttgtgtgagcaaattt

SEQ ID NO: 33356 - DNA, 201 bp, Homo sapiens
ggatttcaccatgttgcccaggcccgtctcaaactcctgggctcaagcaatctgtctgcctcagcctctgaaagtgctgggatttcaggtgtgagccactrcacctggccaggaactaccattaacactactttacaaattaggaaactgagacacagagaagtcaagtaagttgttaaaaatcacatagtaagcaaatga

SEQ ID NO: 33357 - DNA, 201 bp, Homo sapiens
ggcaagggtaatggggatttaaaggggaattggagatggttaatggtgcaaaaagatagttagaaagaatgaataagacctactttttttttttttttgaratggagtttcactcttgttgcccaggctggagtgcaatggtgctatctcagctcactgcaacctctgcctcctgggttcaagtgattctcctgcctcagt

SEQ ID NO: 33358 - DNA, 201 bp, Homo sapiens
acaataatgatttgggcaggccaaatcctgagtgcacttgagtctctctcactttcttttttctaatacagtaaaatccaggggtgaaaatcagcctgaakaaatgaagaatatgaattatagactatttccagaggaaatacagtcctattaccttcaatacatgtaagggcaacaactaagctaacaggagtgcctagt

SEQ ID NO: 33359 - DNA, 201 bp, Homo sapiens
ctatgaaaaaataatatctatcctctggagtttattttcctcaactataaaaagaaggaattcgttgcatcatctttaaggttctgaaaattttataactstaagatctagggggaaaggagaggaaatccaatccatgaaccactgccaaggtacaatatatgactaaatttttgtgtgtatttattggaaaaaaatgaa

SEQ ID NO: 33360 - DNA, 201 bp, Homo sapiens
acaaaggacatgaactcatccttttttatggctgcatagtattccatggtgtatgtgtgccacattttcttaatccagtctatcattgttggacatttggrttggttccaagtctttgctattgtgaatagtgccgcgataaacatacgtgtgcatgtgtctttatagcagcatgatttataatcctaatttatttatttt

SEQ ID NO: 33361 - DNA, 201 bp, Homo sapiens
taaatcttttctcatccagagactgtacctttgattgtttaagtgctaatgaaaatgctgtcagtgaacacatcaatgaacatgaccgttggaacaaattwtgcccacaacattggttaccaagttttggagatctgggcacagcaatatcaaaattggaaagtaaattgaatctgcagatcttgctagccccagatggct

SEQ ID NO: 33362 - DNA, 201 bp, Homo sapiens
tgttgcttcatttgtcataccacctaaaacctagaaaaacaaggtaaatatattagtccatttttacgctgctgataaagacatacccaagactgtgcaayttacaaaagaaagaggtttattggacttacagttctccatggtgggggaggcctcacaatcatggtagaaggcaaggaggggcaagtcatgtcttacatg

SEQ ID NO: 33363 - DNA, 201 bp, Homo sapiens
ttgcttcatttatttggcttactgctttcttcagtgttgggttttgtttgtttgtttgtttgtttgagacagggcctcactctgttgcccaggctagagtrcagtggcatgaacatggctcactgcagcctcgacctcctgggctcaagcaatcctcccacctcaacttcttgagtagctgtaggcacatgccaccacacc

SEQ ID NO: 33364 - DNA, 201 bp, Homo sapiens
ttcagggctcttctattccctgtttagaggtatcaaccagttatttccatgcctttaaataccacctatatgctaatgatggccaattttatatctccagycctggcctgtcagaatcatatattctgctggttgcactgacattttcacttggctttttacatatatcttagggttaatctttttgatcttccaccctta

SEQ ID NO: 33365 - DNA, 201 bp, Homo sapiens
tgggcagggcatggtggctcacatctgtaatcccagcactttgggaagccaagatgggaggatcacttgaggccagaagttcaagaccagcctggttaacmcagcaagaccccatctctattaaaataataaataaataaaatataaatatagacagggatttttggtaattataatgttttttggaagaatggatgctgg

SEQ ID NO: 33366 - DNA, 201 bp, Homo sapiens
catattcattggtaaaatcaataagttaattgcctaaaagagaatgatcttccaggaatcattcttcataacaagtcaccattcattaagagcaatagctrtttgcaagcctcttttatgatgtagtgtttctagatccagaaaacagcaccatgggtgagttatgaacacatacaagctcatggatcaatgagcctcatg

SEQ ID NO: 33367 - DNA, 201 bp, Homo sapiens
gtgcctccagatgcaactgcaaagtagaaaatctcaactctgtaactgttcaccactgtatgactgggcccatcacattatctaccaactaaggctactgrtacttgatatctgtctactttgcagtgatgaaaatgaatgagaaaagagttgaaatacagtcatttaaagtgggcaataaaagtgtgttatcaatgaaga

SEQ ID NO: 33368 - DNA, 201 bp, Homo sapiens
gaaataagttttaaaaccatctgtcttagaaagcatgacacataatatggaatgtaagatatggtagaaaataaacaagtttttaaaacatgagttgaagraaacatttatttagtgttaatacattatctagatgagttggtgctatgtatggaattgtgtcccccaaatttatatgttgtagccctaaccaccaatgtg

SEQ ID NO: 33369 - DNA, 201 bp, Homo sapiens
catcttgacctatacatagtagaaaaggggaaaaataagatgtgcatggaaatttcaaactctcaactcccttcccttcagttgtatactagaactgttaytgaaacttaaaagtttaaaattttttttttattgtgtagttctgactctctaggtctctggcagaacccaaaatccaactgccagtgaatcacaagaaag

SEQ ID NO: 33370 - DNA, 201 bp, Homo sapiens
agaaaaggggaaaaataagatgtgcatggaaatttcaaactctcaactcccttcccttcagttgtatactagaactgttattgaaacttaaaagtttaaarttttttttttattgtgtagttctgactctctaggtctctggcagaacccaaaatccaactgccagtgaatcacaagaaagggcttttctgccaggggatc

SEQ ID NO: 33371 - DNA, 201 bp, Homo sapiens
actttcagatgtggtatagtcaaagtgattatttagatagtcgagacttatttattatacaccagaggaacaaaaagaacaaaaagcaaccattatccctrttttcctatttaaggtagaggtaagacatcaactctgtagctttcttcactcatagagaaaagttgatccaaaaaaaagaaatgaagtgaaagaaataac

SEQ ID NO: 33372 - DNA, 201 bp, Homo sapiens
acaaattaatttattaaatgtataacagcactttcttttggtaaattaagttggaaagagactcaaattagaattttccctatttgtcacattgattgttwtatatatatatatatatatatatatatatatattttaacttttcatagaaaagtatgtggtagttttagtaaatgatgttttgtcataacataaaaatca

SEQ ID NO: 33373 - DNA, 201 bp, Homo sapiens
cccttactatgtgccaggcactgggctaagcaacttacaccattatctcatttaatccacacaataactttacaagtagatatactatcactagcctcctygttttgttacagatgaggaaaccagagactcgtagaatatacctcatttgccaagggttacatactaataagggtgggaaccaggactcaaactgttgga

SEQ ID NO: 33374 - DNA, 201 bp, Homo sapiens
ttttatataccactctatctccagcacatagcattttgcctggaacatagtaggcatttagtaaacttttgttacatgaaccagtgaacaacagttacggmaaacagtttgacaaactgatgagtcaggcagtgctctaagctctttacatgcattatcacattcagtacaaatctgtgaaagagccaagctaaataaagc

SEQ ID NO: 33375 - DNA, 201 bp, Homo sapiens
tttttaagtaggtgcattgtgtgtgtgttgtgtgtgtgtgtatatgataagatttacatttttaagtggtaaaagtcaactatttgtactttatagctggkggatctctctctctctctctctctctctctctctctatatatatatatatatatatatatatatgtatatgtttttgctagcagtactataatttccaca

SEQ ID NO: 33376 - DNA, 201 bp, Homo sapiens
gctaaatggaaaagaagacatgagagctagggcccagctatggcagacttgatcaaattactcccattaaaaagaagaattactcccattaaaaaactgtytgaacaatctcagacctggcatatgagagcaatggctactgaaaatggaaaggaatgtactttaaagttcacagaagtaaagttggtagccttgggaagg

SEQ ID NO: 33377 - DNA, 201 bp, Homo sapiens
taagaaggaaaccaattaggaaacaattgcaataatccaggagggatatgatggcttgaactgatgtggtagtgggaaattgaagagatctggttggattstggatacctttcaaaggcaagaccaacaggatttactgatggattgcatgtgggatgtgaaaaacaggagtcaaaaatgacttcaagttctttggcctga

SEQ ID NO: 33378 - DNA, 201 bp, Homo sapiens
tacagatcatccagtgatgtgttgataaatgtttaacaagctctctggcccaaaaagcctgatctgccacatttcctaattcccaggatgtaaatacaccygccatggtcaatttcaactgccaatataaagtcattggaggtggaattgggaagagatgtgcacagttggcttttgtaaaccagtataagccagctccag

SEQ ID NO: 33379 - DNA, 201 bp, Homo sapiens
ctgcaaaataaaatcataaagttaattggtttctaactacatttttaaacattgtatgaaaagaccaagttgcaaagttgcaacagtggactgaaatggtratgacaaaataatgtaaagaatgaaaataagaacatttttacagggcttttaaatttacagaggactttgacatctcagatgacacttgatcgtctcgaa

SEQ ID NO: 33380 - DNA, 201 bp, Homo sapiens
ctgaacaacaacaaaaagaatttaatatttgtaatatggaaaaattaatcatttaatttctagaaataggcatgtgttctactttaactcatgtaggtccytttatgcataatcatagtctcatccaaattaggtattacaatagtactgccttatccacagttttgcttcctacaatttcagttacccatggtcaactat

SEQ ID NO: 33381 - DNA, 201 bp, Homo sapiens
tgaattaaacctacccctgacacaaacggcacttgcccccagataatttaagcatctaaccactagtcttccagatacaattcatggcatggaacatttgrtaggtcttctttttttttttttcagaagttcaaaattaagggcaaataacattagccccagctgaccaatgaagaaactgaaaccaaaagaggtttaaaa

SEQ ID NO: 33382 - DNA, 201 bp, Homo sapiens
ttcacaaaacagtgtttatgcttactatatgcagtgcactgtgatagcctatcctattctagtctatcctaaccttttctgttctattctaccctatccartctaccctgtcatattatagtctattgttttaaatgtacattacatgacccatacattgatttcacaacccactaccacgtcactatctgaaattttgta

SEQ ID NO: 33383 - DNA, 201 bp, Homo sapiens
cctttactataccctactcaataatacattcttgattcttgttcccgattagtcatgatacctggtgacagccataattactcatcataacttgtttaatrtaacatgcgttctgccctcagttgagctgggaatgtataccatttgagattctgtgaatggcaaaacaaattattgacccaagactgagatcgagggaag

SEQ ID NO: 33384 - DNA, 201 bp, Homo sapiens
tctatgaggaatgagaatccctgtattccagaaatgcatggtttagtactagtaacaataacgatatctaactatgctaaacagcattactatatgccaascactattctaagcccttatgaatcaacttctttaatccatatgctagtgcccatgtggtacgtactatttagtgttgccatcctcaattgagagatgaag

SEQ ID NO: 33385 - DNA, 201 bp, Homo sapiens
taccctactcaataatacattcttgattcttgttcccgattagtcatgatacctggtgacagccataattactcatcataacttgtttaatgtaacatgckttctgccctcagttgagctgggaatgtataccatttgagattctgtgaatggcaaaacaaattattgacccaagactgagatcgagggaaggttgcagga

SEQ ID NO: 33386 - DNA, 201 bp, Homo sapiens
cagccaggctagatgtgtggtttagggctgagatggcagctccgcagtgtcatctgggttccaggtttctgtatttttgccttgccactctaacacataamttccattttcaaggccacctcatggtccatgacatctgctagaactctcactggtatatccacattgcagaatggaagaaagggcaagaagagcttcctt

SEQ ID NO: 33387 - DNA, 201 bp, Homo sapiens
tacttctaaacgttttctctgaactttgtttcttctcagagatggaattctgtgaaacctctcacactctgtgctctggctaccaaacagacatgcacagygtttctcggcatggctaccagctagagatgggatctgatgtggacacagagacagaaggtgctgcctcacctgaccatgcactaagaatgtggataaggg

SEQ ID NO: 33388 - DNA, 201 bp, Homo sapiens
agaaaaagacaaatttttaaggaccaaaactcaggttgaaggtagttttgatgtggcaaaaattcaagaactcaagatgcttcctcgaggcagaccaagtrcaggccaagtagggctgactaatttcaatggtgatttgaggaagccagggactctctggaagaggaaacagggaggcaccataatgggaataggaaaaac

SEQ ID NO: 33389 - DNA, 201 bp, Homo sapiens
ttctcagaagggtagggaggatatgcagtttcagaaagcacattcaatattagaatgtaatgtcatatttagaagatataaatgtacattacatatacttrtgtaattcacattcataaatatttatataatttgtgcttagaaaatgaaaatatacctattgttttcataacacaaacttgaataaataaccctcaacta

SEQ ID NO: 33390 - DNA, 201 bp, Homo sapiens
aatgattaggattaatctgaaaagccatgtttgtctgaataacatggtcccctttaatccaagattgagctgccctggatacccagaatcccacttggttwaaaaaaaaaaaaaaaaaaaaaaaaggtggtattgatgccctaggaaaaatcactgaccttgctcaaccttcctcaaccctgccagctccagctataaaat

SEQ ID NO: 33391 - DNA, 201 bp, Homo sapiens
gcatttctttctttcagctctcaagtaatttgaaatccaagtgcctagtgtaactgtatacccattcctgctcagcaccaaatcttctcaaagatgaaackgcaagatataagtctcactgaaactagctcaagccctgtgtaacctttataagcctcagttgatgacaaaatatcttcacaagtcagaactttctaatgt

SEQ ID NO: 33392 - DNA, 201 bp, Homo sapiens
aaatagaatatgtcttctgagacatttgactttgacttctcgtggaggcctggtaagacctcatttttttagcttacatacaaaggtttcggtgaattatytgatattcacacaagaacctaaaagaatcttgatacctaaaaagtctaaaaatgtttgtgtacagtttacagggaacattaaagagggtaatctttgttg

SEQ ID NO: 33393 - DNA, 201 bp, Homo sapiens
acagaggttgcagtgagccgagatcgcgccacgttactccagcctgggcaacaaagcgagactctgtctcaaaaaaaaaaaaaaaagaaaaaagaaaaatwtacctgaggtcaaaagagtatagaaaggctgagattagcatctagatacctagtagagagtgtgatatgagagttgctgataggatcctccatgtccaaa

SEQ ID NO: 33394 - DNA, 201 bp, Homo sapiens
ctcctcaaggcaaaagtttattcatttatggataccatgaggcagagagagataagcaatttgcataggtgtcaatagccttccatctgtagataggactrgttggacttatgtgttgacaacaatctccaaacaaataaatcctctcccttgggtcttttatatccactctcatatgacttaataacctgttattaatgg

SEQ ID NO: 33395 - DNA, 201 bp, Homo sapiens
ttgaatgtgtgatttgcatgcataacactaggtgttcatatgactcccaggttacttcccactgcaactacatttagcctccccttctttgtttgtaatayagggatgagaatatcaacctaacaggcttgttgaagggatttgttgagataatatacgtggatgtacctagtgcctggcaaatattaactaatctgtacg

SEQ ID NO: 33396 - DNA, 201 bp, Homo sapiens
ggtgaggcagataaacttccccaagaacacatacttaaatccacatagaaggtgaactagaggaaaggtttcttgacaagtagtgtcagattctccccacwacacttgccttaaactgttcctgtagtattatgaattcagaccctctgtcttaaaccataaaccgtttgtgttttcttttttcttttggttcaaacctaa

SEQ ID NO: 33397 - DNA, 201 bp, Homo sapiens
gggcatccttgtcttgtgccagttttcaaggggaatgcttccaggttttgcccattcagtatgatgttggctgtggggttgtcatagatggctcttattaytttgagctatgttccttcaatacctagtttattatagagagtttttaacatgaatgggtgttgaattttatcaaagccatttatgcatctgttgagatca

SEQ ID NO: 33398 - DNA, 201 bp, Homo sapiens
tttgccgagccatgcatatgttccaatatccagaaagaacccaaggttctctatctctattgtgagaagcagtttcatccttaactgttggcagaacttaygggctatttgaataggtggtgcaatagtatctgaaacttgcctttcgaaagactgccagccctttgacgttttccagatctgttataggaaacttaaaaa

SEQ ID NO: 33399 - DNA, 201 bp, Homo sapiens
aacacctgaattttttgatcttttaaatagtttttcatattttctaattctttatgatcttccttagaccccagttgggtttcgatgggggttgtttttgkttttgttttttgctttttttcttaaattgtgacacttagaaattttctcagtcctctcatgaagagctgaccagtacagcatctagtagtcatttcttgc

SEQ ID NO: 33400 - DNA, 201 bp, Homo sapiens
tatattgcaataaagctgggttttttttaagcaccactagatgaagggtaagggttgaagtttgaggaattgcagatgacttggacaaggcttaactagtraaatgtttactgttacaggtttcaaattctctcctgtttgttgtgacatggaggctcaagctgggtctactcaaggcaagtgttttcaaatatttgatca

SEQ ID NO: 33401 - DNA, 201 bp, Homo sapiens
tctttatagcagcatgatttatagtcctttgggtatatacccagtaatgggatggctgggtcaaatggtatttctagttctagatccccgaggaaatcgcyacactaacttccacaatggttgaactagtttacagtcccaccaacagtgtaaaagtgttcctatttctccacatcctctccaacaccggttgtttcctga

SEQ ID NO: 33402 - DNA, 201 bp, Homo sapiens
aaacccagatttactgacacaaacatgttgatgagaaatagtttttcttagagcctatttgcatgttataatttttttaaatgctttcatggaccaaaaamattactgtcaatgaagcactaatattttcattcaacaaacgtttgccagcttaatgccagatactaggaaaacaaaaataaaagagttctcatctttgcc

SEQ ID NO: 33403 - DNA, 201 bp, Homo sapiens
cacatgggaacctatcctttaccatagagtatttggaacaacattctttcagaattattatgctttcaaccattggtggatttaaaatattaatctttttyttaatgttttctgcttttttattttgaaaaaaatgagctatttattagtgaattcaaactctgtttctcaagcctttgacaaatatcacagttatgattt

SEQ ID NO: 33404 - DNA, 201 bp, Homo sapiens
gtacctactttacttcagcaagctcttttcctaaagtctgggatttgggccttataaggtacttatggactctaagataaaatacttcacttcctctaaakgttcctatcaccttcaactcaccagtttctctttttctaagtcagtcagagaggcaagtttcttattttctctaccttttgggaggtgtagtcattaaca

SEQ ID NO: 33405 - DNA, 201 bp, Homo sapiens
gttttgaactttaattttaattaagcgtagatattaaatatggcaaataacaataatgcagtcttttatatatatcatatccacaaatactttgcagaatyaactaataaaattatggagttaaatgaaaataatattaaataaagagagcagataaaagattttggattttactcataacaagcagctaagccaatacta

SEQ ID NO: 33406 - DNA, 201 bp, Homo sapiens
ttgccaccatcagaaacctttggagctaaagatggtggcacacaggtgactaagtgttgcaaggacacacaaaagctaaaaaattgtttatccttgtgcawccaagagagaccagaccttcttgttttgagttagctgcacccacatgtgaaagcccatggaatatgtatgttctgtgccgtgtgatggtgtaacaacaat

SEQ ID NO: 33407 - DNA, 201 bp, Homo sapiens
acaaactgaagtacttcaaatgccttgaacatggaattttggcaaactttttatttacctaagccttcatcctcctttactataccctactcaataatacrttcttgattcttgttcccgattagtcatgatacctggtgacagccataattactcatcataacttgtttaatgtaacatgcgttctgccctcagttgagc

SEQ ID NO: 33408 - DNA, 201 bp, Homo sapiens
taagcagcaatggagtcctgaaaagagtgtcagcccaaggctataatctggccttaatgacctatccaggaaacacagggcttctggctaccaaaagtaaygaaaatggatggacaaccgtttatgagtaagtttctaattcttgacatgggctttgttaggtttttatttgaaattgtattatactgggaaaatgcctta

SEQ ID NO: 33409 - DNA, 201 bp, Homo sapiens
cctgaattttttgatcttttaaatagtttttcatattttctaattctttatgatcttccttagaccccagttgggtttcgatgggggttgtttttgttttkgttttttgctttttttcttaaattgtgacacttagaaattttctcagtcctctcatgaagagctgaccagtacagcatctagtagtcatttcttgctagg

SEQ ID NO: 33410 - DNA, 201 bp, Homo sapiens
aattgctgagaagtggactaatggaaattcaagacaagtggtattatagaagacaagaaagaacaaataatccagaaagagggaacagtatcgtatatgaraaaaaggtctcgttaagtaaagactacaatatttaccagttttggcatttaggagtttattgctgactttgaaaaaagagatttttagtgtagtagtaga

SEQ ID NO: 33411 - DNA, 201 bp, Homo sapiens
tttttgatcttttaaatagtttttcatattttctaattctttatgatcttccttagaccccagttgggtttcgatgggggttgtttttgtttttgtttttkgctttttttcttaaattgtgacacttagaaattttctcagtcctctcatgaagagctgaccagtacagcatctagtagtcatttcttgctagggttcaca

SEQ ID NO: 33412 - DNA, 201 bp, Homo sapiens
aactggagactattattctaagtgaagtatctcaggaatggaaaaccaaacatcgtatattctcactcataactgggagctaatctatgaggatgcaaagrcataagaatgatacagtggactttggggactcaggaaaaagagcaggagggggtgagggatgaaagactacaaattgggttcagtgtatactacttgagt

SEQ ID NO: 33413 - DNA, 201 bp, Homo sapiens
ttttgatcttttaaatagtttttcatattttctaattctttatgatcttccttagaccccagttgggtttcgatgggggttgtttttgtttttgttttttsctttttttcttaaattgtgacacttagaaattttctcagtcctctcatgaagagctgaccagtacagcatctagtagtcatttcttgctagggttcacat

SEQ ID NO: 33414 - DNA, 201 bp, Homo sapiens
atctgaaaatcaacgttaataaatgtttaaataagtgtctgaaaaatggagcaccatgtcagcttgtgaactacaactcaattttcatccttacatatgaratatgtttaatgtaggatatgagttgtatacattttaatatgggttataagatataggatatccaaaagtaagagttcctaccaaggttttcaaatggcc

SEQ ID NO: 33415 - DNA, 201 bp, Homo sapiens
ttgtctcagaggagtacccggccgtgtgagatgtcagtctgcccctactggggggtgcctcccagttaggctgctcgggggtcaggggtcagggacccacytgaggaggcagtctgcccgttctcagatctccagctgcgtgctgggagaaccactggtctcttcaaagctgtcagacagggacatttaagtctgcagagg

SEQ ID NO: 33416 - DNA, 201 bp, Homo sapiens
ggtggatgacctaaggccaggagttcaagaccagccttgccaacatagtgaaacaccgtctctactaaaaataaaaaaaaaattagccaggcgtggtggcrcatgcctgtaatcccaactactcgggaggctgaggcaggagaatcacttgaacctgggaggtggaggctacaatgagccgtgatcacaccactgcactcc

SEQ ID NO: 33417 - DNA, 201 bp, Homo sapiens
agtgacagtgtgatgagagtttccatttatatgtctctgcttgttgctacctcagtttgagtaagtacatttcaaaagtagaaaatcataagaaaaatatmcctgaggtcggccgggcacggtggctcaagcctgtaatcccagcactttgggaggctgaggcgggcggatcatgaggtcaggagatcgagactgtcctgg

SEQ ID NO: 33418 - DNA, 201 bp, Homo sapiens
ggccttagcctgaagctgttgaaagtcatctgcttaatcttgtcatatttcacacgtcagcttcattgcatggcacctttaccttggctacttaatgtcartctcctatcctagcccttatagatgaatgtcacagtaactaaactaagttatcagggacgccgtgaccctcagccttcttgccatccccatgtcatacaa

SEQ ID NO: 33419 - DNA, 201 bp, Homo sapiens
cattttgttttgaccctgatattgtctgagcttcttcaaatttataaataggagagaaaatccatctagataaagcttggttttctacagttagaaaacakgatgacacctaaaagagcgatggcccttattgatcttgcttgcaaaaagtggaaattattagaagatgaaatatactaggactactttggaagttttgct

SEQ ID NO: 33420 - DNA, 201 bp, Homo sapiens
ccaaaatcattatgcaatgggtagtttctagcaggcagtgttttcagaccatttgtcatttccattgctgcaattatatttacctgacagttaaccattgsttgtggagaattgtttcccaatattaggcctgatatataaagatggttctgattttcactgagataaaaacatcagaaacttgtggttttcaacattatt

SEQ ID NO: 33421 - DNA, 201 bp, Homo sapiens
tgggccatgctgtctttaacctctggactttcacccatgcttttcctagtacccagattttcctcaactctgatgcccctcccccctcaacttccacccarttcttctcctactgttcatttcagaccttacttaggtaccacctgctctgggaatatcttgcctcctgactcctagtccaggtgaagtgctatcttatcc

SEQ ID NO: 33422 - DNA, 201 bp, Homo sapiens
tcgtatgtatgcatcttaaagcttccttccagtgggagattgaggtaagataataaagaaggaaagcttataagatcatacaattaaacctctgcgacttyaaaaatacatccttgaaaaaaattttaagatagattcacttctatgtgagatagtttaggagttggtttcactagggatttgctccatgtatgcagaccc

SEQ ID NO: 33423 - DNA, 201 bp, Homo sapiens
gaattacacattttagaagggtgaattttatggtatataaatcatatcaataattttcttttaaattaaaaaagaagagtacatgaccctttcatcacctrgatcttgagaaaatcaaaggtcaacttaaagactttatcattggaagcatgtcttgctctaaaaagatttgaaattccatttctttctcctcctaactca

SEQ ID NO: 33424 - DNA, 201 bp, Homo sapiens
cacattttagaagggtgaattttatggtatataaatcatatcaataattttcttttaaattaaaaaagaagagtacatgaccctttcatcacctggatctwgagaaaatcaaaggtcaacttaaagactttatcattggaagcatgtcttgctctaaaaagatttgaaattccatttctttctcctcctaactcatggcaa

SEQ ID NO: 33425 - DNA, 201 bp, Homo sapiens
taagctgatattataatccagggttatccacaaatcaacactctaccctgtagagagaggatcaggtgttttagtgtgggccatataaaggggagttttargctgggtgcggtggctcacacctgtaatcccagcattgggaggctgaggcaggcagatcacttgaggccaggagtttgagaccagcctggccaacatggt

SEQ ID NO: 33426 - DNA, 201 bp, Homo sapiens
agacatctagtatgtgaagtcaatcaatactttatgataactataaattaatttgtgaaatgccctgccatccatttaccttcctctgaaacatatgcacrttgaagtaacctttctaaaataccaacttgacagtttctcccagcttgcaagtgccctcttgcaaccgtcccttaacttgcttaaaacccttcaagagtg

SEQ ID NO: 33427 - DNA, 201 bp, Homo sapiens
cttaaatgacactaaactatgcattgaaatactatataaggacatttatatgccttttttcttcatcatgctgaggattttgttgactctgggttctttaygtttcttttctcccctgtcatgcttatttataagggtaaaaataaactgttggtgcatggtctgttgggctatgatggcagctttgtaaatatgtatgca

SEQ ID NO: 33428 - DNA, 201 bp, Homo sapiens
acccttttatgttatggccacttcactggtgaaaagggtgaaggaatacccactccttagtaggcaactgacttacataaaataagatcacataattactraaaactgtggcactgcacttaaggcttgagctggggaaaaagcaatcaacaaccacctattgagagtctagagtatttcaagtacttaagacatagccct

SEQ ID NO: 33429 - DNA, 201 bp, Homo sapiens
gtgtttagttagtactaattataatgtgacccatttccgatcctgtggcagagttgagcagatttgcggactggactataagggcaacaaattcaaggccytcttctctatatcacttctaggctactccctgaggtcctgtgactgaaaaatgaggccccttattggccaggtggtgttaccatggcatgccccagaagt

SEQ ID NO: 33430 - DNA, 201 bp, Homo sapiens
cttccctttgaccagagtcattgtggagatggtgggagagcatcggaagcttcactgaatagccctcgaggtaaaaaataaataaataaatatatatatawatatatatatatatatacccttgggtcatctaaagattttatttgactttacaaaatcccgagactgttgccacactttagcccatccactaatctcaat

SEQ ID NO: 33431 - DNA, 201 bp, Homo sapiens
caagtgatttttattttgcaaagtcctgttatcactgccgagacgcttcaaagctgggattggttacattcctcaggtatgaccccgagggacacctgacmaatgcaacgtttcccactggagaggtcagcagcttccacagtgacctggagaagctgacaaaagtggagctagatacttccaaccgtgaaaatgtcctca

SEQ ID NO: 33432 - DNA, 201 bp, Homo sapiens
gcagtctattctggtgctgaacagcagtctttaacaaaacacagctcctgtcccttcttgcctgtaaacagaaatgagcaactttccaaccttcataatgkgactaattcctcctacagtctttatacaatatctgacttttttcacttttgtcctctagtcctttggctagttctgagcactccttcaagttttctcttg

SEQ ID NO: 33433 - DNA, 201 bp, Homo sapiens
gtaaactttataacttgtttacttctcagtctactgaataaatccaccagatattttttcttattaaattacaaattcaattagatataccaagtcatctmttcccatggtgagtgccactaagattggttgattggtaagcaatatttgttgaaatcatttactgggagattttttagatgcagaaatatcaggctaaat

SEQ ID NO: 33434 - DNA, 201 bp, Homo sapiens
tttcattgtggacctatccagaagaggggtgtgtttgtgtgtgtatgtgtgtgttttgcttttttttttttttttttttttttcttttgctttatctgagrcataaatgccttggaacattttatacaatgccaattgtggacctgaaataacaggttaaattttaatttacttaaggtttggcagatatttatttcacag

SEQ ID NO: 33435 - DNA, 201 bp, Homo sapiens
cttagaactttgcgcatccaccaaacaaaatatgcaatcgccttgacaccatcttaggaggcaaagcctggagggattggatcaactttggcttgcacgcstgactaaatgatccccatagagtctctctaaatgccgcaatctgagttaggaattggtgtgtctggttaggtttggcatgttcaatgatactgatgactc

SEQ ID NO: 33436 - DNA, 201 bp, Homo sapiens
ctgaaatttatgtatcaaagctaatattaaactaagtttttcttcttgtcatagccactactacattttcctttgtcttgatttactcatccttctatccragagcttcctttgccataatctggtacacttcattcattccaaagcaataagagagccctgataacatctggcccagacttcagacagctaaatgtctaa

SEQ ID NO: 33437 - DNA, 201 bp, Homo sapiens
caccaactgcaatggcccagcccacaacaacaaactctttgctcctgtcgccttagcttctggccctgatggcagtgtgtatgttggcgacttcaattttrtaaggagaatatttccctcgggaaactccgttagtattttggaattaaggtaagtcttctctaatctctatatatttgcttagcagataaagcaaaaagc

SEQ ID NO: 33438 - DNA, 201 bp, Homo sapiens
tcactcaactcattatctttctgggcagaaactttttgaaagtatggtggtgattttccacgaaatgcttctacagagctagagggatcatttgataaccwattgtagatccatcattaaagaatgttagtaaacacctcttgaactgatttagcttatgtttagaagttcaactttctcctgtataaatctctcagttta

SEQ ID NO: 33439 - DNA, 201 bp, Homo sapiens
aatttcttgcctaggccaatgtcctgaagagttttttcctaggctgtcttctagtatttttatagtttctggtgttatatttaagtatttaatccatcttkagttaatttttgtatacagtgagggataggagtccagtttccttctacctatagctatccaatttacagaaactttttctaaagacatttgtatgtaaaa

SEQ ID NO: 33440 - DNA, 201 bp, Homo sapiens
attttagaagggtgaattttatggtatataaatcatatcaataattttcttttaaattaaaaaagaagagtacatgaccctttcatcacctggatcttgaraaaatcaaaggtcaacttaaagactttatcattggaagcatgtcttgctctaaaaagatttgaaattccatttctttctcctcctaactcatggcaagct

SEQ ID NO: 33441 - DNA, 201 bp, Homo sapiens
ccaacttggttccattctccccgtcactttcaggtacaccaatcagacgtagatttggtcttttcacatagtcccatatttcttggaggctttgttcgttyctttttattcttttttctctaaacttcccttctcgcttcatttcattcatttcatcttccatcactgataccctttcttccagttgatcgcatcagctcc

SEQ ID NO: 33442 - DNA, 201 bp, Homo sapiens
tgcattgagacacaagggattaaagcaaattggaatatagtccagtggtttttttctttctcaggtgtggcttgttttcagaaagtagaaagaaatcagcytcaaaagagctaaagtacacttgagaaatgacatgaaatggcaagttacatattgataggagggaccttcctgactgctggctatcaagaaaataacatt

SEQ ID NO: 33443 - DNA, 201 bp, Homo sapiens
ctaaaattaccatcttttcccttcacctaatgccaaaaaccaaaaccagttggctttattttttcactttcggacctattgttctggcattgtttaagcaygcattttcacttccagttttcataaccaaatgacaaaggaaggactgagctcttcaggggcatctaaagagtcaggcagaggcaggtactcgaaagctat

SEQ ID NO: 33444 - DNA, 201 bp, Homo sapiens
ctcagtcttgctgttttgttgctatagtcataataattataataatgacccatatatgtaataagttactttggaaggaaggaaacattatgtccttgtargtcaatctgagacttgataatttctaggtaggatgggtgccacagaagaagcaagagtcaaggtaggatggaattcacatgttgtatgtgatttgactag

SEQ ID NO: 33445 - DNA, 201 bp, Homo sapiens
tggtttggacagagtgtttgcatgagtcattttattgcctaattaaagcagcattgatgatataaactaggaaatcaatgtaatctccgtttcatcatacyaaggtatgttggccatacctgttcactattaatcacccctcccccccacttttttgtgccttcagaggactgcctagacccaatgtgttccaaccatggc

SEQ ID NO: 33446 - DNA, 201 bp, Homo sapiens
cctcctcaccttgagatgcagcaattctagtgttggttccttgtacatgttatattttggggagccccacaaggcccatctaactaaagtaattcccttakcagcgtactatttcacaattaaattcattcccataaggattttcttcagatgcaaacttagtatgtggtgcagggaattgtctaggagagcagcatatta

SEQ ID NO: 33447 - DNA, 201 bp, Homo sapiens
actatatattataatatatagtactatatattatatatagtactatatattataatatatattattatatattatatatagtactatattataatatataktactatatattatataatatatattatatagtactatatattatatatgacataatatatattatatattactatatattatatatttctctctatgtat

SEQ ID NO: 33448 - DNA, 201 bp, Homo sapiens
gtgattttacactttgatagagtgcttatggctatcaaaccaaagcctaaaatggttagtccctctgccgtggctgcttcttcaacccctagttcaatggytcctaaattttattttgcatcagaattgccagccaactttgttaaaagtaaaatttccaggccccacctccacccaagattctgattcagtagggctagg

SEQ ID NO: 33449 - DNA, 201 bp, Homo sapiens
atatattataatatatagtactatatattatatatagtactatatattataatatatattattatatattatatatagtactatattataatatatagtaytatatattatataatatatattatatagtactatatattatatatgacataatatatattatatattactatatattatatatttctctctatgtatata

SEQ ID NO: 33450 - DNA, 201 bp, Homo sapiens
ggggcaataccgtaagtcaaggaagaaacctaaatggaagaccttgaaggaatcctggcaggccagtagtaaaagatatttaaattacatttatttttttwaaaaaagagtaggagaaagaagaaaaatttaaaaggcatctagataagcactcttgacattgaaacataaaaatgtaaaagtaataaaatgtctatggtt

SEQ ID NO: 33451 - DNA, 201 bp, Homo sapiens
ggaactggaggagttaaaatatttttattggaaatttgtaaagataatattaagagcttatattttagtctaatcttagaaaataatagaaaagcttacaycattgtcagaatacctttctccccaaacaggcaaatttcaatgctgttatctgaatatgctctctagggacaagagataacctgttgagaatttgtgact

SEQ ID NO: 33452 - DNA, 201 bp, Homo sapiens
tgggctcaaatttattttgaatccatctttgagccactgttttgtcatctgtaaaatggaaatagtacctaccttcattatgggtttatagaggatgaaaygacgcaagatgggttaaacagtgcctggcacagaataagtactgaatgaagtatgatgatgagaaagaggataagtattaaaatacttttttaagctaat

SEQ ID NO: 33453 - DNA, 201 bp, Homo sapiens
atcttagcccatatatactgagaacccttaaatctcagcctgcaggcatcttttgagtgggaactctaacacaaaaataaaacaagacatgtgcatttcamcttgaactagcaccatctacttaccccaatctctctctctctctctccacacacacacacacacacacacacacacacacacacacaccccaacctctat

SEQ ID NO: 33454 - DNA, 201 bp, Homo sapiens
aagttctacagctattctgtaagaaaaatcagcctgaaaaaaaatcctgaggcacttctgtttcttcagaactcctaacatggtaaggtcggaagagatcrcaagatcgcaaacaaagttatattgacagaacaactggatttgtgtgtgtggtggggggagcggtgtcatgagctattcattgtagctatccacatggat

SEQ ID NO: 33455 - DNA, 201 bp, Homo sapiens
catctaagttcagctttcctggaggaatgatagagtgagcttgtcaagggttgaggaatccctttagaaatcaggaaaggccagtgatgatgaacattttytcatgtgtcttttggctgcataaatgtcttcttttgagaagtgtctgttcatatcctttgcccacttgttgatagggttgtttttttcttgtaaatttgt

SEQ ID NO: 33456 - DNA, 201 bp, Homo sapiens
caaacacacacatatacaccaagcagtctcccagctaaatctatctgggtaattacagtcttatctaggaatctttagcttgcctctctgaatataccacygtcaatatggggaggagggatgggtacaaaatatgtaggaatatgcctgtgctcttggaaataagctttgaaatgtttatcagacaaagaccaccaataa

SEQ ID NO: 33457 - DNA, 201 bp, Homo sapiens
tctactggggtgcacatgtgtgcacatgcacacacacactcactcaagtgcacatgcacacagcctatgacagtgctgaggaaaagggtgagtgtactcawtacttaactgtctggtaccctctgagaccatcacagtggaactctgtaaaatcaggacagcaagggacaatttgataacaaatctcctcttaccaaatcc

SEQ ID NO: 33458 - DNA, 201 bp, Homo sapiens
taattgctgagtgttgcatgctgttttctcctaacaaccaccattttaaaaaatgaaaagtcaaggagaaaattttacctaattcctagagttcagacccrtttttccagagcagtttgcagagcataataataaaaacagactgcatcaaggaagactcaagtgtggcactgcaggagacaggaatgaggtagaagtaca

SEQ ID NO: 33459 - DNA, 201 bp, Homo sapiens
agagctttatgtctgtggtatgttcatgtaaatgcttatgatgccaattgttaaaatcaagtctttctcccacaggtgatggtggctatgccaaagatgcraagatgaaagccccttcctccttagcagtgtcgcctgatggaaccctctatgtggcagacctcggaaatgttcgaattcgtaccatcagcaggaaccaag

SEQ ID NO: 33460 - DNA, 201 bp, Homo sapiens
gagaaagaggtaatacagcaatctccctagatccagaagtacagtttttaagtgtattaagagacagtgaccatgatgaccttctttaatacacttttttytttttttcttttatgtgacctcactgtttctatttctttccaccaaaaagaaataataggaaaaccttaaactgaccgtttgcagacaatggtacatagc

SEQ ID NO: 33461 - DNA, 201 bp, Homo sapiens
gctaatgaggctgaggtcatgggctcagttactatttcaatctgtcagttcagttctgttctgtttcattaccaaagcccatagtctcaatctccctttgygtttccctccccaaatcaggaacttagtcctgtcttctacttcctaacaaaacctgaattcagaattgaatcttaggtcaagaggttttacataaaatgt

SEQ ID NO: 33462 - DNA, 201 bp, Homo sapiens
tctttgcatgtaactctcttaaagcacttcttacatttttgctagtataagagttagctgtttacatatctctttctcctactaagcccagagctcttgamaacaggaaaagggtatttttatctcttcacctctgcaagcacctaacagtattttgcacctgttagattctcagtggtctccctgcctcacaatccctgt

SEQ ID NO: 33463 - DNA, 201 bp, Homo sapiens
gtaaagtaaggataatagtaaaacctagctcataaggccattgtgagcattaaatgagttcctaattgcaatgtgcttagagcagccatgaacataatgarcactccgtaaatattagtaataataatagcaataataacacaagagattattttactttttgtccctattgctatctttatctaactaaaggtatttcta

SEQ ID NO: 33464 - DNA, 201 bp, Homo sapiens
tggctatatccatatcatttcctttttaagaaatagatatgtgccgggcgcgggcgcggtggctgacgcctgtaatcccagcactttgggaggccgaggcrggcagattacaaggtcaggagttcgagaccagcctggccaacatgatgaaaccccatctctactaaaaataaaaaggaattagccaggcgtggtggtggg

SEQ ID NO: 33465 - DNA, 201 bp, Homo sapiens
actgaactccccaccacatggaaggtcttgagtactttcttgaaactcatcagctctgtgaagatgaagccacagaatacctttgaagaataattctgaaraagtctaagagatctataggaatacaagaattcttaacaatttttgggacgggtcagagatccttttgacaatctaacaaagccaatgggctctctcccc

SEQ ID NO: 33466 - DNA, 201 bp, Homo sapiens
tctctttcagacttaatttatttcaatttagtttaatttaattttccaatcataggtgattcatccagaggtgtaaaactagaaatctgttagaccagttkgaatgtaatgttgtagtgagtaactccagtcaagaccaaagcctaacagagcactgtcttccccgtgattagattcaaccaagaataacagaaaacccta

SEQ ID NO: 33467 - DNA, 201 bp, Homo sapiens
ggataatcacttgaacccaggaggcggaggttgcagtgagccaagattgcaccattgtacccagcctggacaacaagagcaaaactccctcaaaaacaaaraaaaaaaacacctagatatagagtaaccagctcatcctggtttgtcaaggatggtcctagttttaaaactgagctctgcctcagttacagccaaaccaga

SEQ ID NO: 33468 - DNA, 201 bp, Homo sapiens
gtggacatttttaaaaatgtaaggcgtcttttaaatatctatatgacaaatgaatagttggatatacaacctggacaacagtactggagtctaaactctaycctctttcattcaagccttacccattcatcaaatcctagcttaatctaccaactccacaagagtcactgacccatttttctcattctattcttcctctcc

SEQ ID NO: 33469 - DNA, 201 bp, Homo sapiens
agggggtggaaatgtaaaactggacaaaattattagacctggctttatctccgcgtgtgactttttgtcatttcttctcaatacacaaagaagtgaatgtrtgccccaacaaacctctcccattactgtcctgtctgtgctgagcaaaattgaatctatatgtctttaaaatgcctttccattgctatggcttttttcaaa

SEQ ID NO: 33470 - DNA, 201 bp, Homo sapiens
tctggatcaggacccagatatctgtcagatggttggataaaaggatatattaagggatgaatgtaccaatgaatggctgtcctccaaattggttatcctgyatctagtctggtctccttccggcctgtcccccaaaatgcagcctaagtaatctttctaaaatactaatctgatcatgtcagctctccactttaaagtgga

SEQ ID NO: 33471 - DNA, 201 bp, Homo sapiens
acacacacacacacacacacacacacacacacacacacacacacacacacacatagtcatccaggcatgaaaagttacagcaatctgggtggaaaaaaaaraaaaaaaaaaacagtagttttaaagcagaagagggctaggcatggtggcttatgcctgtaatcccaacactttcagaggctgaggtgggcagatcacttg

SEQ ID NO: 33472 - DNA, 201 bp, Homo sapiens
cacacacacacacacacacacacacacacacacacacacacacacacacacatagtcatccaggcatgaaaagttacagcaatctgggtggaaaaaaaagraaaaaaaaaacagtagttttaaagcagaagagggctaggcatggtggcttatgcctgtaatcccaacactttcagaggctgaggtgggcagatcacttga

SEQ ID NO: 33473 - DNA, 201 bp, Homo sapiens
gacagggacgatgaaagctatatatctgaaatatttgaaaacacatttctcaagggtcagtaataccagtgtgcagtaggcacaaataggtgggaaaaaargagaggtgaagaaaggataagagaagattagagagtggacagaagatcaaacagcaaattaatgaggcccagggagtagtagaatggaacgaaaaatgtc

SEQ ID NO: 33474 - DNA, 201 bp, Homo sapiens
tggacagaagatcaaacagcaaattaatgaggcccagggagtagtagaatggaacgaaaaatgtcatttggtggcccttatgccaaacatttactctatcytaattggtcatggttagtttaaccaattgaattaactattttcatagtaactatcaactaatagattagatggcattaaaagccataccaaccaaacctc

SEQ ID NO: 33475 - DNA, 201 bp, Homo sapiens
ccagggagtagtagaatggaacgaaaaatgtcatttggtggcccttatgccaaacatttactctatcctaattggtcatggttagtttaaccaattgaatyaactattttcatagtaactatcaactaatagattagatggcattaaaagccataccaaccaaacctccagtgtattttcccattttctttcaccgttctc

SEQ ID NO: 33476 - DNA, 201 bp, Homo sapiens
tctttattttctgtatcgtcaggacctatcagaaatctagctggcaaaagaaaaatgtagattgccgagtcccaaccccagcatcacaaagcagcatcttwaaaggggtgagttgggagctgtgagacagtagcttaataactagcacactgtgcaatgaggtgttagattttcatgtcattgttgctgctggagtcactc

SEQ ID NO: 33477 - DNA, 201 bp, Homo sapiens
ggcctgtaatttcatgtgttattgattacataacagttcaaaggaaggggcagcacctattcacattttagaagtcaatttaaagcaaaatattaagtcawtaatagtgcaggtgatgtaggggtgaggcaaaactcataaaggtggcacagggacaattgaagtctgggaaacacagttgaaaaggagctacattgaatg

SEQ ID NO: 33478 - DNA, 201 bp, Homo sapiens
agtaggactggaaagtcctgaaacagatcctgaaagcattgacaggcataactctcatatttccagccaaattttgtgtggctatcattatttgcagttcytgtttcttataatacaatagattctgaacagcaggattgaggatttcacaaaattggtataactgagataattagatcttactgttcatctgcagtggta

SEQ ID NO: 33479 - DNA, 201 bp, Homo sapiens
agtgtgacaatgggaattaacagaagaaagggcatctaggcacagtaggactggaaagtcctgaaacagatcctgaaagcattgacaggcataactctcakatttccagccaaattttgtgtggctatcattatttgcagttcttgtttcttataatacaatagattctgaacagcaggattgaggatttcacaaaattgg

SEQ ID NO: 33480 - DNA, 201 bp, Homo sapiens
tactacttagcaacaaaaaagaacaaaattctgtcatttgtggcaacataaatgagcttggaggacaccgtattaatccattcttacactgctataaagaratacctgagactgggtaatttataaagaaaagaggtttcattggctcacggtttcacaggctgtacaagaagcatgattctggcatctgcttggctttta

SEQ ID NO: 33481 - DNA, 201 bp, Homo sapiens
tcagtatgtcaaagagatagctgcactatttgcaacagctaagacatgaactcaacctaagtgtctatcgacagatgaatggataaagaaaatgtggtacrtatacactgtggagtactacttagcaacaaaaaagaacaaaattctgtcatttgtggcaacataaatgagcttggaggacaccgtattaatccattctta

SEQ ID NO: 33482 - DNA, 201 bp, Homo sapiens
actgtcaatgaagcactaatattttcattcaacaaacgtttgccagcttaatgccagatactaggaaaacaaaaataaaagagttctcatctttgccgtcraaaactcatagtcttggtagagaacataggaagacaaacaagtattttagaataagagagaagtactggatctaaatgaaggagtcatggagctggaaga

SEQ ID NO: 33483 - DNA, 201 bp, Homo sapiens
aatggcacgttagctcttattaaaactattaagcaccagaggaaaagcatcttcaaagttcagggcaagtcacaagatgcaaggcttgcaaacctgctttygaaccactcagtcttccacacattttgctcagcaggtgccatgacctgaggtgaacctgaagctctctaagatacagaaatatctaagatacttctgtat

SEQ ID NO: 33484 - DNA, 201 bp, Homo sapiens
tgctaggtgtgtgcccctgggaaaaaattctgtatctgtaaatgggggtgataatgttactttccccatagggaggttgtgagaatttaatgtggtaataygcataaatcacttagcaaagtgtttggctcataagcgttcaatagattattattttatcattattattattactattactagtaatagtagtagtagtag

SEQ ID NO: 33485 - DNA, 201 bp, Homo sapiens
tgaattcctactagtatcacagtttaaagatttcactttcttcaaggcctttgtcttttataaagcccctctggctaaccccataccattaaatctgaatktatttaacagtgtctacactacacaattagcacttgattttattttgccttcttttgcttccagtgctttcatgaatgggagattttttctactgaaata

SEQ ID NO: 33486 - DNA, 201 bp, Homo sapiens
tgttttatgctgctccaaaagaataccatagactggataatttataatgaacagaaatttattggctcacggttctgaaggctggggagtccagtggctaragatgtctttttgtgtcatcacatggcagaagggcaaagatgaggagtggaaaggtagaaagagagagagagagagagagagagagaaagggggtgaact

SEQ ID NO: 33487 - DNA, 201 bp, Homo sapiens
cacagacagcttctggacaagcatgatagtgtatagaggtccaaggcaggggcacacagtggaggagtcagcgccctccaaagcagcaggcgttcactctycctctcagtggcagggcactgacatgcaaaggcctcagacagacgtgctgaggaacacatcaccgcaaactgctctgggagctgttaaggctggtgttta

SEQ ID NO: 33488 - DNA, 201 bp, Homo sapiens
ccatcatggggaccccacccttatgaccttatctaatcctaattatctttcaaacagagaaatgcaaatcaaaaccacaatgagatatcatctcaccccarttggaatggctgttatcagaatgacaaaaaaaaatgctggtgagttgcagagaaaggaaaatgtaaattagtacagccattatggaaaacaatatggagt

SEQ ID NO: 33489 - DNA, 201 bp, Homo sapiens
atgggggcctggagggaatggagcagaagatggatatgtttggattgacaagatcacctgagaaagacaagcctaggtgggaaccactgaaggtagcatgsagaagtgtggtgctaggtatatggcagaatagctgcaaagtgggaagaggtggaggaatagcactgatatacttcatctccacagtattgtctagaatga

SEQ ID NO: 33490 - DNA, 201 bp, Homo sapiens
gagatctctccatgaaagtgagtgtagacaatgaagaaaagagatctgaagactgaccatgaagcactccatgtttaaaattgaagatatgggccaggcayagtggctcacaccagtaatccctgcactttgggaggccaaggcgggtggatcacctgaggtcaggagttcaagactaacctggccaacatgatgaaaccc

SEQ ID NO: 33491 - DNA, 201 bp, Homo sapiens
agatctctccatgaaagtgagtgtagacaatgaagaaaagagatctgaagactgaccatgaagcactccatgtttaaaattgaagatatgggccaggcacrgtggctcacaccagtaatccctgcactttgggaggccaaggcgggtggatcacctgaggtcaggagttcaagactaacctggccaacatgatgaaacccc

SEQ ID NO: 33492 - DNA, 201 bp, Homo sapiens
ggattgtacaatttagaatggtgatttttatggtgtgagaattatatctcaataataataatatagaatgactaggaggagagagactgagacagtgagtmaagaactcttttgaggagttttgctgtaaagagcagagaaattagagctggaggagaaacagagtaaacagaagagttttttaagtgagagaaataacag

SEQ ID NO: 33493 - DNA, 201 bp, Homo sapiens
aacactgcatgttctcactcataggtgggaattgaacaatgagaacacatggacacaggaaggggaacatcacactctggggcctgttgtggggtgggggraggggggagggatagcattaggagatacacctaatgttaaatgacgagttaacgggtgcagcacaccaacatggcacatgtatacatatgtaactaacct

SEQ ID NO: 33494 - DNA, 201 bp, Homo sapiens
acactgcatgttctcactcataggtgggaattgaacaatgagaacacatggacacaggaaggggaacatcacactctggggcctgttgtggggtggggggrggggggagggatagcattaggagatacacctaatgttaaatgacgagttaacgggtgcagcacaccaacatggcacatgtatacatatgtaactaacctg

SEQ ID NO: 33495 - DNA, 201 bp, Homo sapiens
catgttctcactcataggtgggaattgaacaatgagaacacatggacacaggaaggggaacatcacactctggggcctgttgtggggtggggggagggggragggatagcattaggagatacacctaatgttaaatgacgagttaacgggtgcagcacaccaacatggcacatgtatacatatgtaactaacctgcacatt

SEQ ID NO: 33496 - DNA, 201 bp, Homo sapiens
atgttctcactcataggtgggaattgaacaatgagaacacatggacacaggaaggggaacatcacactctggggcctgttgtggggtggggggaggggggrgggatagcattaggagatacacctaatgttaaatgacgagttaacgggtgcagcacaccaacatggcacatgtatacatatgtaactaacctgcacattg

SEQ ID NO: 33497 - DNA, 201 bp, Homo sapiens
ctcataggtgggaattgaacaatgagaacacatggacacaggaaggggaacatcacactctggggcctgttgtggggtggggggaggggggagggatagcmttaggagatacacctaatgttaaatgacgagttaacgggtgcagcacaccaacatggcacatgtatacatatgtaactaacctgcacattgtgcacatgt

SEQ ID NO: 33498 - DNA, 201 bp, Homo sapiens
tttcagaattttcattatgaagcagatcagtcttgagcctctcccaagagactttagttgatgggtgtatcaaaagaacttatataagtggtttttgcccrtaagagaatctcatgttataagttccaatgacatcattattataagcttattgtgtagcaccttgaatttatctaatggtgggcatctaagaaaagaagt

SEQ ID NO: 33499 - DNA, 201 bp, Homo sapiens
caatgcaatatatagtgaaacttttgacaatttgacaagtttgaagtaaaaggtaagtttgcggctgcctctctataagtctgagctaactctactaactsttccaaaccattaaagctttaaaactatttttcaaaccagagacatatatttaaataagatggcaattgtgaagcaagaaaatgtaagtaaacctgagtg

SEQ ID NO: 33500 - DNA, 201 bp, Homo sapiens
ggttacatggataagttctttagcggtgatttctgatattttggtgcactcgtcacccaagcagtgtacactgtacccaatgtgtagtcttttatcacccrtcttccatcctctatccctctcccacccttcccctcaagtccccatactccgttatatcattcttgtgcgtttgcatcctcatatcttagctcccactta

SEQ ID NO: 33501 - DNA, 201 bp, Homo sapiens
actcctctaccctatgttaaaaaccaacaagcctcaataaaatactaaacctacttcatggtacatgccattcagctatacccctaccaatcttaaaggcrtggcacctcatttcttttatgtttttggatctgataaaattattcctattgatccaaatttggctatactcctgggtacatttgcaccagctctcatctc

SEQ ID NO: 33502 - DNA, 201 bp, Homo sapiens
aatctatcatccatgaactgacataaacacattttgaaccaatttatatttttagccagcaccatccttcagtgcactgacttatataaaataaagtatayagacccgggaactaaaagtctggaaacagtatctcatctgccactgactgccaatcagtagagacacctaggagggaaaatatgtacccctttgaaggag

SEQ ID NO: 33503 - DNA, 201 bp, Homo sapiens
tggatctcagttggaaggaaaggctttgaaaggggaatgttcactgcatcctctaagacaggaagtaaattacaaaatatagtggtgagaagttaaagtastttatgacttgatggtctcacccaagaaaaatgagagacagggttatgtgctgaaagtgtgaatcaagtcaaaggcttcagatgagtagtgaggtaagtt

SEQ ID NO: 33504 - DNA, 201 bp, Homo sapiens
tacctatgtagacaggtatgaaattaagttataattttcatgagacattttcatcactgttgacacagtttcaagcattccatcatgttattttgactctwtttcttttttttttctttaaaaatatatttttaactagaccaggccccactataatatcacttaagagagtcagggcaaagtttttgcatttatgaagat

SEQ ID NO: 33505 - DNA, 201 bp, Homo sapiens
taacttgcaacaaaacacttttaccatataaataagtatatgatttatttttaacccaaaaaatgtataaaataagtgtgtcctttactgtcaatttatckagaagatctataatatatagactacatatatataatatatacaacatagccaaatgtatgaaaacttgacaatgtataatttggaattcacatgctacct

SEQ ID NO: 33506 - DNA, 201 bp, Homo sapiens
ccctttatgccccacatgtgattatttctttagtacagactcctagaagtagaattccttggtcaaggaatattctcaatttaaatagtgatagatatcawcattgtcttccaaagccactttaccactgtacactcctatcagcaatgaagagtacttcctgactaccaatcacagagttaggtaccagaaacagaaaaa

SEQ ID NO: 33507 - DNA, 201 bp, Homo sapiens
gcagcagtgcatttgttcggcctgacttggcagttgcaaccagttgaaggagagctgtatgcaaatggagttagcaaagggaacagggggaccgagtccayggacactacttactctccaattggaggaaaagtttctgataaatcagagaaaaaaggtacagtgatcaaaatgattgattgttgattacttttcttctaa

SEQ ID NO: 33508 - DNA, 201 bp, Homo sapiens
gaattgaacaatgagaacacatggacacaggaaggggaacatcacactctggggcctgttgtggggtggggggaggggggagggatagcattaggagatayacctaatgttaaatgacgagttaacgggtgcagcacaccaacatggcacatgtatacatatgtaactaacctgcacattgtgcacatgtaccctaaaatt

SEQ ID NO: 33509 - DNA, 201 bp, Homo sapiens
cgggaaataatcactcactattgaggccagatctgctttgagcacctgtgtcacgcctgatataccgggaaggtttctgttatatataaagtttcggtgcygcaaaaggaatagcactcgaatataaaattttctttttaattatcagtaaggcaagttacttctatagaagggtgcgcccttacagatggagcaatggtg

SEQ ID NO: 33510 - DNA, 201 bp, Homo sapiens
tgtcacgcctgatataccgggaaggtttctgttatatataaagtttcggtgccgcaaaaggaatagcactcgaatataaaattttctttttaattatcagyaaggcaagttacttctatagaagggtgcgcccttacagatggagcaatggtgagtgcacacttggacaagggaggggaaggggctcttatccctgacgca

SEQ ID NO: 33511 - DNA, 201 bp, Homo sapiens
accggtcatatggcttgatatgaacaaaataatctacagcagtgctcacttttcttttttttttctttttttttttttgagacaagagtcttgctctgtcrcccaggctggagtgcagtggtgcgatctcggctcactgcaagctctgcctcccgggttcacgccattctcctgcctcagcctcccaagtagctgggacta

SEQ ID NO: 33512 - DNA, 201 bp, Homo sapiens
ccaagagataccaataaaaaaaaaaatctgtggaattaatgtagtgattgatttctaaaaatcaaatactaattaccttaaaactagtgagagtaaagtascatgtggtactttttaagatcaactgtgacttttttttttttttaagagtcttgctctgtcgcccaggctggagggcagtggcgcgatcttggcccactg

SEQ ID NO: 33513 - DNA, 201 bp, Homo sapiens
gacatgcaaccattaaaaagtatattttaagaacattgaataacacaaggaatgctaaagataaaacattagctgaaaaagtaggacacaaaactttaaayacaatcctagttgtatgttttaaatgtatgcacagagattatgccaaaaaagtaagataaatgaaatgaaatacagtgaagtgttaacagtgattttcat

SEQ ID NO: 33514 - DNA, 201 bp, Homo sapiens
tgagaatctctactgcagtatcttccttagcattgtctctcatatcttctccttctttccattcacatgaaattatttttcactgagatgtagtttttctrtatgagctgtttgggcataccctaaatttagatcttcatgtcatttcacttgaatcacccataattcctatgtcattcttgtgtccgtctgctctaattc

SEQ ID NO: 33515 - DNA, 201 bp, Homo sapiens
tggtgcacagacaagtaactagtttgaatgtctcctgactgcagttcactgctacttagactcctcaaagtctctcctttttcattcttgtttttgttccwgccggatacactaggactctctccacccaaatcagaagtctgtcccctaaaagctgggtgaagggtacacagcaactctaccatttttgcaacttcttgt

SEQ ID NO: 33516 - DNA, 201 bp, Homo sapiens
gactatgtcagtctaattttctaccctatcagattaaactttttttcatttatagtaaacgatttcccacaatatccttatttgatctgccaacttgtacratctatggcccttaggggaaatggggaaggcaagttctactattcaaaaaccccctgtgtgttggccacagcataattgtatttctgctttacacctata

SEQ ID NO: 33517 - DNA, 201 bp, Homo sapiens
ttttcattcttgtttttgttcctgccggatacactaggactctctccacccaaatcagaagtctgtcccctaaaagctgggtgaagggtacacagcaactytaccatttttgcaacttcttgtgagtcagactatgtaaaaataaaaagttttaacacaacaaaacataaaacccactaaaactaaaacttaactaaactg

SEQ ID NO: 33518 - DNA, 201 bp, Homo sapiens
ttacatttaaggttaatattgttatgtgtgaatttgatcctgtcattatgatgttagctggttattttgctctttagttgatgcggtttcttcctagcctygatggtctttacgttttggcttgattttgcagtggctggtgccagttgttcctttccatgtttagtgcttccttcaggagctcttttagggcaggcctgg

SEQ ID NO: 33519 - DNA, 201 bp, Homo sapiens
aactggacttgaataaatgattttgttttctttagaggatgttggctaccattcagtctccaagtataaaatatttattacatgtccatttgcgaaaaagrtaatttttaatccaattcaattttacatttttctattatcctaccaggcagagtttaatgcagtacagttgaactcatgtttattgaataagtttttcct

SEQ ID NO: 33520 - DNA, 201 bp, Homo sapiens
caggtcccccatgtgactagttaagtagccagcactccttagaagcatacgtaggattgcactcataattccaacctcattggcaccagagtccgaccaaytgagctaattgcctatagacagtcacatctaggtctcataagactttcccctctagatgacgagttagtgggtgcagcgcaccagcatggcacatgtata

SEQ ID NO: 33521 - DNA, 201 bp, Homo sapiens
agatcatacagaacattgtgagttttacaagatcttcagttaccatacaaagattccatttcattcactcgacttatggaggaaggaaagtggtctctgayattgtggaaatattttcaaggaggctcaaaaaatgtagagtaagagtgtttaatccaaacagcctttttttctctgatcttttaagtatttatcacgttt

SEQ ID NO: 33522 - DNA, 201 bp, Homo sapiens
ctgcaaaataaaggcattttcactccctgccaggtttagcatgagaagcccctttgttgtggggctgcttgagcagtatttacacttccttattgagtacytgcaaatgtctcagctagaaaagtgaaagtaatccaggtaggcttgataaaaaattttaaaaaccaactgggcgcagtgactcatgcctgtaatcccagc

SEQ ID NO: 33523 - DNA, 201 bp, Homo sapiens
tttttggaggcatgagaataaatacctatgaatagccatttaagcaaaagtgatatacaaatgccaaaaagcatatgaaaagatgttcaagggcgggtgcrgtgtctcacgcctgtcatcccaacactttgggaggccgaggtgggcagatcacttgaggtcaggagttcaagaccaccctggccaacatggtgaaacccc

SEQ ID NO: 33524 - DNA, 201 bp, Homo sapiens
aaagtgctgggataaccactgctgttgaccagtccattcttgctttgactggacctcgtccacctctttgtagccattgttttgattgtattttgtcttcrgagtcatactggtaaagccacatttcatctcctattacaattcttcaacaaaatgcttcgggatcttcatcccatttatttaaaatttccattgaaagct

SEQ ID NO: 33525 - DNA, 201 bp, Homo sapiens
agcatggcacatgtatacatacgtaactaacctgcacattgtgcacatgtaccctaaaacttaaagtataataataaaaaaaagactttccctttagactmtctgcacaataacataagagcctattgaaaacttcaatttcatccctgggtgcagttatttagcctcttctctgacaccaatgaggagattttattgttt

SEQ ID NO: 33526 - DNA, 201 bp, Homo sapiens
atgcagctaggcttggacaaagcagccagaaaaaaatctcataatatcaggttttactgtacggaacctcttggcaaaagtgttgcatagctgtctcactmctggattcttttaatttcctacctgtactttctcttcattcaactgcctcactctaacactatcatatttaacccttatttttgtaaatagatagggtaa

SEQ ID NO: 33527 - DNA, 201 bp, Homo sapiens
gctttcaggccagaagcatgcatttttctacaagagcatcacaacaacatgctgtaaatatttaaagttaaacattatgtgttgatatttgaaagaaaagyactttgaatatttcatttttaaaaaataaaattgccaatgaaaaatgtgtcccattttatttatgcgccaaactgcattctcaaatcagtctggtcacct

SEQ ID NO: 33528 - DNA, 201 bp, Homo sapiens
gtagagtagggtacatgcttctgagcaaaggagagacgtgatatgacttagttttattctggctgcggtgtggagggcagtaatgtaagaaggaaaccaaytaggaaacaattgcaataatccaggagggatatgatggcttgaactgatgtggtagtgggaaattgaagagatctggttggattctggatacctttcaaa

SEQ ID NO: 33529 - DNA, 201 bp, Homo sapiens
tatgagttcctattttaaaatatattggattaatttatttaatgtccagttgtgaacatgtttaaaagactcttgaacttatcattataataataagcagsatatctcttttatacttcatccagttgggaaacatagctaaaaatatcttaaaagaatgattttgagttctttcagtgaaattctagaaatgcaaattca

SEQ ID NO: 33530 - DNA, 201 bp, Homo sapiens
aagatgaagatgaagacctttatgatgattcacttccacttaattaatagtaaatatattttatcttccttatgattttcttgataacattttcttttttstagcttactttattgtaagaattaagtatataatacatataacatacaaaatatgtgttaatcaattgtttgttattggcaagtcttccactcaacagca

SEQ ID NO: 33531 - DNA, 201 bp, Homo sapiens
gttagaggtttagacaattctccagtttatagtttgggatagaaaccattaaactacatccatttaaatctgagcctctctgcattgctttacttttaatrcaatggcaactcgtcatataatttttatccccaattaacttgtcatatcctgcatttctatgtgagagtcttaagcaagagaaatacatttttgacacat

SEQ ID NO: 33532 - DNA, 201 bp, Homo sapiens
agtatgtttggaatttggaccatgataaaagaagttgctacacaaatatatgaaaggaaaatattctacaaactgtcagcagaacaagccctgaaggcaamtagtgagtatttaataagcccagacttatttcaaagggcactcgtctgtggaactcagctgacatgaacagagacaaagaagttcacagtgtttagatct

SEQ ID NO: 33533 - DNA, 201 bp, Homo sapiens
gagttgccatttttttcctaaatgcaatttatatcctgtagctcgagtttgttttcttcaactactccaaacatgactgcaaagtaaaccacatattctaygagccctgtacgacttattactttttaaaaatgtaaataggtgaacagaagcattattgatctttagtgtctaagcatttaatcactattaataatgtaa

SEQ ID NO: 33534 - DNA, 201 bp, Homo sapiens
tttgcaaaaattttctcccattctgtaggttgcctgtgtactctgttgataatttcttttgctgtacagaagttcatttgtcaatttttgcttttgttgtmattgctttcggtgtcttcattatgaaatctttgcccatgcctatgtctggaatggtattgcctaggttttcttccagggtttttatagttttgggtttta

SEQ ID NO: 33535 - DNA, 201 bp, Homo sapiens
ttccctttccttcatcccttatatccaattttgagcaagtcctgttggttacatctctaaactatatttcaaatctgtccaacagctttgtgatgtataastattattacttctattgcattcttacgcaaacagagattaagacaatatgttagtaagttgcctaagggtccataggtactaagcagaggaatcaaggat

SEQ ID NO: 33536 - DNA, 201 bp, Homo sapiens
tatctctcctagatagaaatccaactttttgtctcctctcttccctaatcagaactgggtgggtataagtggcatactaaagggggatgggacagtggaaraagtattttatcactgacattatttggaatttccagcgaatgttgatagttaaagcagacctactattcaccagatttattattgttttttaagatttca

SEQ ID NO: 33537 - DNA, 201 bp, Homo sapiens
ctatttaataaagggtaagacagaaatagtacaattttttgcctgaaatacgaaaatcaatagagaattgctctttggagactttgaaagcattatgagamcattacaagttcatttgccaaccttcagattcctgccctgtgctgtgtggtgggaatggagaatacgagaaaggacactgtgtctgccggcatggctgga

SEQ ID NO: 33538 - DNA, 201 bp, Homo sapiens
aggagaatatttccctcgggaaactccgttagtattttggaattaaggtaagtcttctctaatctctatatatttgcttagcagataaagcaaaaagcaakataatatgaaaagacaaagcactgccagtagaagcagaaaatgtagttgcccctattgtagcactgagttaagatgcaggaatagggacaaaggtcaaca

SEQ ID NO: 33539 - DNA, 201 bp, Homo sapiens
ttaggccacaaagttgaaggatagtcaacttttaagtctgtcatcatatatcattgaccctgtcatcttaattatttaactgctcttctcagttccttctytaagatgtttgtgtatgtgtgtgtatgtgtgtgtgtgtgtatctgcatgcatgcatacatgtatgcatttatgttagtgattttagaaattattcatttt

SEQ ID NO: 33540 - DNA, 201 bp, Homo sapiens
acctcagaatgttacacctcatggggacttgtcatttccagcagcatatctctttgggcacctacttactggaaagtcaacaggaaggccaagatggttgsttgtatgcctggatgtggaaatgatttatacaacagtccacattgttttcaaaaccctagggatgctctatctatataatgccaaatatagatgggagcg

SEQ ID NO: 33541 - DNA, 201 bp, Homo sapiens
agaaacattagcagaatgaacaatgagacagaaaaaaatctggaaagtggtagtagggttgcagggaaagttagtatataagttagaatctcggttgtaaktgacagaaagtcaactcaaactagcttaagcaaaaagtggtatgaatttattggctcagggaacaaaagaaagtttagaatagcaaactgtagaaagggc

SEQ ID NO: 33542 - DNA, 201 bp, Homo sapiens
ctctctgcacaataacataagagcctattgaaaacttcaatttcatccctgggtgcagttatttagcctcttctctgacaccaatgaggagattttattgkttctcttttccgaattcactgattattccatcaaatttacttaagcaaagaatcacgtgaagcaaacttcacaagttctctttgctacaaaaacgtagtt

SEQ ID NO: 33543 - DNA, 201 bp, Homo sapiens
taacataagagcctattgaaaacttcaatttcatccctgggtgcagttatttagcctcttctctgacaccaatgaggagattttattgtttctcttttccsaattcactgattattccatcaaatttacttaagcaaagaatcacgtgaagcaaacttcacaagttctctttgctacaaaaacgtagttggcaataattgc

SEQ ID NO: 33544 - DNA, 201 bp, Homo sapiens
cctgggtgcagttatttagcctcttctctgacaccaatgaggagattttattgtttctcttttccgaattcactgattattccatcaaatttacttaagcmaagaatcacgtgaagcaaacttcacaagttctctttgctacaaaaacgtagttggcaataattgctaagcaaacaaacaaaaacctcggtgagactgcca

SEQ ID NO: 33545 - DNA, 201 bp, Homo sapiens
aactctcagtcatttgggaggtgggacaaggccatgctgtccacaaagtttatccagaacgtgctggtgttacaagaaatcacttgacatctattatgttkctcctgtggaagagaggtggctatcagctacaatagtgatttctttttaaaggggtttaattgaggtatttctcatgggccaaattctaactcactgtct

SEQ ID NO: 33546 - DNA, 201 bp, Homo sapiens
ttcactgattattccatcaaatttacttaagcaaagaatcacgtgaagcaaacttcacaagttctctttgctacaaaaacgtagttggcaataattgctargcaaacaaacaaaaacctcggtgagactgccagtgtctgcagtggacaaaaataagaccttcctcacccagaataaggtatcaagacaagtcctggtaac

SEQ ID NO: 33547 - DNA, 201 bp, Homo sapiens
tgaaaccccatctctactaaaaatacaaaaattagcacatgcctataatcccagctactcaggaaggaggctgaggcaggagaatcgcttgaacccaagargtggaggttgcagtgagccaagattgcaccactgtactccagcctgggcaacagagtgagactatgtcaaataaataaataaataaataaataaataaat

SEQ ID NO: 33548 - DNA, 201 bp, Homo sapiens
atgtgtgataatttcatacatttgtataatttgtaaagatcaaatcagtataattaggatattcatcaccttaaatagttgtcttttctttatgctagaarcattcaaattattctcttctagttattttgaaatatacaatggattattgtaacctacatcactctactgatttatcaaaccctagttcttatttcttct

SEQ ID NO: 33549 - DNA, 201 bp, Homo sapiens
atgtgatgtacagatgttacagggtcagaaaaaaacaagagatagagataatatctgtaggaagtggccaccatctctccgactggggaaacaaagggaaraggttggggttgtcagaacctagaaagttggagaatttgctccatggaggtaggacctagtcctctgagaagaagatgccagctagccccatctctacta

SEQ ID NO: 33550 - DNA, 201 bp, Homo sapiens
atgtgaatccaattttgacaaagcaaattctcttcccccactgacgttattatttccgagatggcgtcccttcatttctggtagctttcaagggacaagcygatgccaattttctctcttcctggaccaaaatatgcaatgacccatttgtaagcatccaaagaataagcttctctgatgctctcaagttcctcaatacct

SEQ ID NO: 33551 - DNA, 201 bp, Homo sapiens
gccattattaccactgaaaatatcccatattcatttattattctctgccataccatcaccccctacacatacacatacacatcagaaaataagctccacamaagtagaaaatatctattttgaccaccactgtatagccattgcctggaatagtacttggctcatcatagattcccaacagatatttgttttcaaataaat

SEQ ID NO: 33552 - DNA, 201 bp, Homo sapiens
tacttctctgtcaattgaatagatagccagtggctacatcagaatgagagccaaagggaacacagaaggtgattatctgggtcccatgatccagtcaaacyctcttctattagcaaaagattttagagatcttgctctgtacccagtactttgctcaatgtcatacagcatacaggagaagtagaaggaaaccttattcta

SEQ ID NO: 33553 - DNA, 201 bp, Homo sapiens
cagtcatctaggccagagattattgaatgtgaaaatggaaaaaactgtattggctcaagatataattagaagataaaaatgatggtatgggggatgcctakgtttctggcctgtgcaaatgaatggatgatacttatattcacaaaaaggcaatggtaaaggaggatcaatttgaaggcagtgataataaagttagctgtg

SEQ ID NO: 33554 - DNA, 201 bp, Homo sapiens
tttgaaacttttttttatataagatgtccttatcgaggtacattataactcaataaaaataaatgatacagaaaagtataccatgtcaactggctcataarataaaccaggaaaagacatgtctgtggaaaatgaagttgaacgggagtctgaggcaggagaaacgcttgaacccgggaggtggaggttgcagtgagccga

SEQ ID NO: 33555 - DNA, 201 bp, Homo sapiens
ttttagaacctcaagtccaaaattaatctaagtgttttgaaaattagagaatatgtaatttttaaattttagaataattaaatgtgtttcttttgtttttrccccatctcctccaaggatgcagtgattctccagtaataatggccctactagtcacctggggtgcttcttatacatacaaatctctaggccacagcccca

SEQ ID NO: 33556 - DNA, 201 bp, Homo sapiens
atagcaataataacacaagagattattttactttttgtccctattgctatctttatctaactaaaggtatttctacccttccattcataatttcctcaaaktaaacatatacaacatcattccacttcctctcttagcatgcttttaaatagaatacacttggcctggcccggtggctcacacctgtaatcccaacacttt

SEQ ID NO: 33557 - DNA, 201 bp, Homo sapiens
aaacctcggtgagactgccagtgtctgcagtggacaaaaataagaccttcctcacccagaataaggtatcaagacaagtcctggtaactttctgaccagtragacaaaccagcttatttgtacctttgagttcacttttgttcctttcttgattttatatttaatttgttctctaattaaaagggtagctactgatttaag

SEQ ID NO: 33558 - DNA, 201 bp, Homo sapiens
tgtgaaactaaagtttttgggaatgtggaagtttttacaacaaaatttaaagaaatccttctaaatagagaattgtgtcttttaaatgatatagcttcaamaacagatatacagagtcaaaatgcaactcaaaataagtcctttaattaaggataagattttagcaatgccattttacttctacctgagaagatgtaagca

SEQ ID NO: 33559 - DNA, 201 bp, Homo sapiens
acactattttaatgacgtagaagatactgacattggcacaaggttttttgtttttttgttttgttttgttttgttttgttttgtcttgttttgagacagartctcactctgttgcccagtctggagtgcagtggcgcaatctcggcttactgcaacctccacctcccaggttcaagcgattgtcctgcctcagccacctga

SEQ ID NO: 33560 - DNA, 201 bp, Homo sapiens
ccttttcccgacctgcctttacctttaacaaaccttacaggtgctgcaactggaagtgcacagcattgagcgccactgcaatcacagtgactttggccttrttactagcctatgtgattggtaagtcctttttgtcatgcctcagttttgttcttaatcaaagtcttgttttgcttgtggtgggaatggggggtttttctc

SEQ ID NO: 33561 - DNA, 201 bp, Homo sapiens
tcatttatttttttttcagtgcttcatagcatttaaaaaaaaattattaatttgttagcattagtagatgtctaaggtggtcctatgtgccagaccagctmtactcaatctcatgatcctcaaccataaatgtttccctagctgctgaaagcttagcagtgatgagtttcatccttagtttccctcctaaatttgatgttc

SEQ ID NO: 33562 - DNA, 201 bp, Homo sapiens
attttaagactagattttggcatacctatgaagtgctacactatgtatttatttaatatagccaaccattagaactattatactgagtgacaaagatggcygaataggaacatctccagtctacagctcccagcgtgagcgacgcagaagacggctgatttctgcatttccatcagaggtaccgggttcatctcactgggg

SEQ ID NO: 33563 - DNA, 201 bp, Homo sapiens
aagacctacgatagtgtattgctgttcctctatccttgtatgtgggttgatgttgtgaatactagtcaagattcagtcagaggccaggcacagtggctcargcctgtaatcccaccactttgggaggccgaggcaagcagatcacctgatgccaggagttctagaagtaaattcagtggttagtgtcttcaggttctaggg

SEQ ID NO: 33564 - DNA, 201 bp, Homo sapiens
tgtgctgcacccactgtcctgcgcccactgtctggcactccctagtgagatgaacccagtatctcagatggaaatgcagaaatcacccatcttctgtgtcrctcacgctgggagctgtagaccggagctgttccacctcaataagtagcatttctatataccaataatgttcaagctgagagccaaatcaagaatacaatc

SEQ ID NO: 33565 - DNA, 201 bp, Homo sapiens
gggttagataatcaaaatttagtgctaagagaaaagtggaatataaggagcaatatcaggaggtcagcaggaagactgctgctaactggctcactttggtrtgcatcattattctgtctcgcaagaaaaccaaagagaagtgccctaaaacaaactgaagtacttcaaatgccttgaacatggaattttggcaaacttttt

SEQ ID NO: 33566 - DNA, 201 bp, Homo sapiens
ttccttaaggatcaggcctagaagtcgcatccattacttctgcccacacctaacttggaaaggaggctgagaaacgtaatctaactctgttctcagaaagraagagaaacgggatgacatgaacacatagcattgtctctgtcatactgaaaatgaaacgaccttattaattttaattgatacatatagatatatatattt

SEQ ID NO: 33567 - DNA, 201 bp, Homo sapiens
tgtatccccagatcctaacacagtatttggcatgaagtaggtgaaaaacaagtgagtgagtagcttagttatgattttgaagtgtgagtgctctgtattargtcattctcacattgctataaagaaatactggagactgggtaatttataaagaaaagaggtttaattggctcacagtcctgcaggctttacaggaagcat

SEQ ID NO: 33568 - DNA, 201 bp, Homo sapiens
tcagtgccgctttcagcaatatgaagttaaaaccaggtactatgagtgctcacctgatttttggttcttatggtgttttttctacatagatagctgttaasttggtgccttttgcggggcaatgggtggaactttctattctgcttcctccacatcctccccctatttcttgcacaattgatttttaaaggctttgtttat

SEQ ID NO: 33569 - DNA, 201 bp, Homo sapiens
ggcaaatccataaagacagaaaatagatttgtagttgccaagagctggggagaagaatgaatggggagtgacggttaattcatatggggtttatcttgggrgtgatagaaatgttctagaagtggtggtgatggttgcacaacattgcaaatgtactgtaagtcactggattgtacaatttagaatggtgatttttatggt

SEQ ID NO: 33570 - DNA, 201 bp, Homo sapiens
gacctgtgggaattgtaggagttacaattcaagatgagatttgggtggggacacagcaaaaccatattagtaagtaaaaggaacacacccctaagaaaccytgctttagtcattgactctaagatctcctgccacctccacccaccttgagcatacaactctataaaacactggcctgttttgaatttctgcttctctatg

SEQ ID NO: 33571 - DNA, 201 bp, Homo sapiens; identical to SEQ ID NO: 19560

SEQ ID NO: 33572 - DNA, 201 bp, Homo sapiens; identical to SEQ ID NO: 2511

SEQ ID NO: 33573 - DNA, 201 bp, Homo sapiens; identical to SEQ ID NO: 2509

SEQ ID NO: 33574 - DNA, 201 bp, Homo sapiens; identical to SEQ ID NO: 2510

SEQ ID NO: 33575 - DNA, 201 bp, Homo sapiens; identical to SEQ ID NO: 19565

SEQ ID NO: 33576 - DNA, 201 bp, Homo sapiens; identical to SEQ ID NO: 19566

SEQ ID NO: 33577 - DNA, 201 bp, Homo sapiens; identical to SEQ ID NO: 19567

SEQ ID NO: 33578 - DNA, 201 bp, Homo sapiens; identical to SEQ ID NO: 19568

SEQ ID NO: 33579 - DNA, 201 bp, Homo sapiens
tacacactcattgtgtcagatattccctcatctggttttccccccttcttccagaacctcattctcaccacactctggagcaacccggacatggacactcscacagtggtgaggaagagacagatggggatgggagttggggtgctggggaaggtccgtctctccctattcctcacctcccgcacttgaggaggaggagtc

SEQ ID NO: 33580 - DNA, 201 bp, Homo sapiens
tggccatagccatggctactcccatgagagcctctaccacagaggacatggacatgaccatgagcatagccatggaggctatggggagtctggggctccasgcatcaagcaggacctggatgctgtcactctctgggcttatgtgagtctccaggggatgggagagagaagggctggttctggattgttgggaaactccac

SEQ ID NO: 33581 - DNA, 201 bp, Homo sapiens
cctcacctcccgcacttgaggaggaggagtctggaatgcacatctcccttaatgtctcaatgcctccattcccaggccagggccccattctgtctgtgggmctgtgggttctcagtggaattgttgcctttcttgtcgtggagaaatttgtgagacatgtgaaaggaggacatggtcacagtcatggacatggacacgctc

SEQ ID NO: 33582 - DNA, 201 bp, Homo sapiens; identical to SEQ ID NO: 5515

SEQ ID NO: 33583 - DNA, 201 bp, Homo sapiens; identical to SEQ ID NO: 19571

SEQ ID NO: 33584 - DNA, 201 bp, Homo sapiens; identical to SEQ ID NO: 19572

SEQ ID NO: 33585 - DNA, 201 bp, Homo sapiens; identical to SEQ ID NO: 19573

SEQ ID NO: 33586 - DNA, 201 bp, Homo sapiens
cccaaaaacagcgtaactcctcattgtggtgagaggagggagttgacaaggagaggaggatagttcaggtgaggaaaattttccaaccaatccatttgaaygaataccaggtcatcccaaagccacacctgtctcgtgggtggggcagcacgtggggtagaccatcgagcccctctattcccagcgtaaagccaggtagcc

SEQ ID NO: 33587 - DNA, 201 bp, Homo sapiens; identical to SEQ ID NO: 19574

SEQ ID NO: 33588 - DNA, 201 bp, Homo sapiens; identical to SEQ ID NO: 19575

SEQ ID NO: 33589 - DNA, 201 bp, Homo sapiens; identical to SEQ ID NO: 19576

SEQ ID NO: 33590 - DNA, 201 bp, Homo sapiens; identical to SEQ ID NO: 19577

SEQ ID NO: 33591 - DNA, 201 bp, Homo sapiens; identical to SEQ ID NO: 19578

SEQ ID NO: 33592 - DNA, 201 bp, Homo sapiens; identical to SEQ ID NO: 19579

SEQ ID NO: 33593 - DNA, 201 bp, Homo sapiens; identical to SEQ ID NO: 2514

SEQ ID NO: 33594 - DNA, 201 bp, Homo sapiens; identical to SEQ ID NO: 19582

SEQ ID NO: 33595 - DNA, 201 bp, Homo sapiens; identical to SEQ ID NO: 19583

SEQ ID NO: 33596 - DNA, 201 bp, Homo sapiens; identical to SEQ ID NO: 19584

SEQ ID NO: 33597 - DNA, 201 bp, Homo sapiens
cgtgccggacccagcccactccacccatccccaagttcagagacaccctgctgtcaaacaacagtgtaactccggctggtccgatggtagtgggttatcaraacttattaacatttgtgtcactaaaattggtatacaacctcccactgctatatttgactggctaaaaaaacccaaaaacagcgtaactcctcattgtgg

SEQ ID NO: 33598 - DNA, 201 bp, Homo sapiens; identical to SEQ ID NO: 19585

SEQ ID NO: 33599 - DNA, 201 bp, Homo sapiens
cacagtgaccctgaagggcaggtgtcttgggaaagcagatgggatcaaaagggcagaaaatcagatagatgaaaaggacatcaagaatatcagaattagcygggcgtggtggtaggcacctgtaatcccagctactcaggaggctgaggcaggagaattgcttgaacccaggaggcagaggttgcagtgagctgagattgt

SEQ ID NO: 33600 - DNA, 201 bp, Homo sapiens; identical to SEQ ID NO: 19587

SEQ ID NO: 33601 - DNA, 201 bp, Homo sapiens; identical to SEQ ID NO: 19588

SEQ ID NO: 33602 - DNA, 201 bp, Homo sapiens
ttcttgtcgtggagaaatttgtgagacatgtgaaaggaggacatggtcacagtcatggacatggacacgctcacagtcatacacgtggaagtcatggacayggaagacaaggtgagcccaggaacaactttcctgaaagctgacttgcctgcctcagaatctcctcatcttatggccctcaggagggagaggacatgttgg

SEQ ID NO: 33603 - DNA, 201 bp, Homo sapiens
ggaggaaaagggttctttctcctttatgatccctgacctttcgatattcccccaaatacacactcattgtgtcagatattccctcatctggttttcccccmttcttccagaacctcattctcaccacactctggagcaacccggacatggacactcccacagtggtgaggaagagacagatggggatgggagttggggtgc

SEQ ID NO: 33604 - DNA, 201 bp, Homo sapiens; identical to SEQ ID NO: 19589

SEQ ID NO: 33605 - DNA, 201 bp, Homo sapiens; identical to SEQ ID NO: 5514

SEQ ID NO: 33606 - DNA, 201 bp, Homo sapiens; identical to SEQ ID NO: 19592

SEQ ID NO: 33607 - DNA, 201 bp, Homo sapiens; identical to SEQ ID NO: 19595

SEQ ID NO: 33608 - DNA, 201 bp, Homo sapiens; identical to SEQ ID NO: 5520

SEQ ID NO: 33609 - DNA, 201 bp, Homo sapiens
ccgaggaggcggtctcctccggcctgttagcccgcctcgcccaccctcccctcaaatcacctccacactcgcgcatgcgtgtcagtgcaggatggattcgycgctaccggagtgccgccatattggtaaaggcattagggcgaaggtggaacggaacttcctgttctcgcgggatctaaaggcgggactgccacgtccaag

SEQ ID NO: 33610 - DNA, 201 bp, Homo sapiens
agtgcaggatggattcgtcgctaccggagtgccgccatattggtaaaggcattagggcgaaggtggaacggaacttcctgttctcgcgggatctaaaggcsggactgccacgtccaagcaaaccgggaaaggagaggatcccggagccggtgagaattctctgttttttctctaccatcctttccaggccttttcctcacc

SEQ ID NO: 33611 - DNA, 201 bp, Homo sapiens
cgggagggaggggacgcgtgtttacaaacaagggggcgggagcgcaaggaaaagagcaccgggggagggtgtgggggaggggtcgcagataaagcggtcamtggctcgcctgcccttctgctggggcactcaccccgcccgctgtcgcccatcccgtcccgtccagcctcccctggctccggctccggggtttgttgttct

SEQ ID NO: 33612 - DNA, 201 bp, Homo sapiens; identical to SEQ ID NO: 19600

SEQ ID NO: 33613 - DNA, 201 bp, Homo sapiens; identical to SEQ ID NO: 5522

SEQ ID NO: 33614 - DNA, 201 bp, Homo sapiens
tcgggagggaggggacgcgtgtttacaaacaagggggcgggagcgcaaggaaaagagcaccgggggagggtgtgggggaggggtcgcagataaagcggtcmctggctcgcctgcccttctgctggggcactcaccccgcccgctgtcgcccatcccgtcccgtccagcctcccctggctccggctccggggtttgttgttc

SEQ ID NO: 33615 - DNA, 201 bp, Homo sapiens
gatggggatgggagttggggtgctggggaaggtccgtctctccctattcctcacctcccgcacttgaggaggaggagtctggaatgcacatctcccttaawgtctcaatgcctccattcccaggccagggccccattctgtctgtgggactgtgggttctcagtggaattgttgcctttcttgtcgtggagaaatttgtga

SEQ ID NO: 33616 - DNA, 201 bp, Homo sapiens
gagggagaggacatgttggaagatctgttctccactctgaccaactcttttcttccctcagagcgttctaccaaggagaagcagagctcagaggaagaagraaaggaaacaagaggggttcagaagaggcgaggagggagcacagtacccaaagatgggccagtgagacctcagaacgctgaagaagaaaaaagaggctta

SEQ ID NO: 33617 - DNA, 201 bp, Homo sapiens
aacgcccaaagtcctgaggtttaagaggaatcgtgcccttcccaggcccgcgacctccggtgcccaaggcctcaagcggtcacagctaggagggcggaagytccccttccccgccccgccccgggggggagggtgctaaggccctcgggagggaggggacgcgtgtttacaaacaagggggcgggagcgcaaggaaaagag

SEQ ID NO: 33618 - DNA, 201 bp, Homo sapiens; identical to SEQ ID NO: 19601

SEQ ID NO: 33619 - DNA, 201 bp, Homo sapiens; identical to SEQ ID NO: 19602

SEQ ID NO: 33620 - DNA, 201 bp, Homo sapiens; identical to SEQ ID NO: 19603

SEQ ID NO: 33621 - DNA, 201 bp, Homo sapiens; identical to SEQ ID NO: 5518

SEQ ID NO: 33622 - DNA, 201 bp, Homo sapiens; identical to SEQ ID NO: 19605

SEQ ID NO: 33623 - DNA, 201 bp, Homo sapiens; identical to SEQ ID NO: 19606

SEQ ID NO: 33624 - DNA, 201 bp, Homo sapiens
aaaaagaaaatgagtcttcaaacatccaactagagactttaattctctaataccccaccgtgccggacccagcccactccacccatccccaagttcagagrcaccctgctgtcaaacaacagtgtaactccggctggtccgatggtagtgggttatcagaacttattaacatttgtgtcactaaaattggtatacaacctc

SEQ ID NO: 33625 - DNA, 201 bp, Homo sapiens
gacatggaagacaaggtgagcccaggaacaactttcctgaaagctgacttgcctgcctcagaatctcctcatcttatggccctcaggagggagaggacatrttggaagatctgttctccactctgaccaactcttttcttccctcagagcgttctaccaaggagaagcagagctcagaggaagaagaaaaggaaacaagag

SEQ ID NO: 33626 - DNA, 201 bp, Homo sapiens
ggaaaggcaaggggtctcataaagaccacaggcctgacaaggttagaggattggaaggtcaatgggccatggggaagttcacacaaggatctggggttacmaggaaaacaagaaaatgaaagtggccaggcagtaagttggtcacaacctctcacctgggggctgctgacaggcccggagaatcctgggggagctggaggg

SEQ ID NO: 33627 - DNA, 201 bp, Homo sapiens; identical to SEQ ID NO: 19607

SEQ ID NO: 33628 - DNA, 201 bp, Homo sapiens; identical to SEQ ID NO: 19608

SEQ ID NO: 33629 - DNA, 201 bp, Homo sapiens; identical to SEQ ID NO: 19609

SEQ ID NO: 33630 - DNA, 201 bp, Homo sapiens
gtgtaaagtatgtttcaatatctgatgagtctagttccccctctgctctttttcagagttctcttggggaatccagtttttccatatgaactttagaattwcttttttcaattgtaggaaaaaaagtctgtggttatttttattgaggttggtttaaattttaataagttagtgtaatgacattttagaattgttttatct

SEQ ID NO: 33631 - DNA, 201 bp, Homo sapiens
ggcaggtgtggtggctcgtacctgtaaccccagcactttgggattctgaggtgagagcgtagtttgagctcagactagcctgggcaacataatgagaaccygtctcaaaaaaaaaaaaaaaaattctgccctgggaccttctccccctcaattctaccaaactggttagaaatacaatctcagtgattaataatagagatc

SEQ ID NO: 33632 - DNA, 201 bp, Homo sapiens
tttctgtctgtgtgtaaacacaaatcagtttttaaaatttaggtttgtattgtacatactgtctgacaacttactgttgttttctgtttttacatggcagstttatgaaatttattacaagtggagatagtttcaatatagttttaatatacgtctgtgtgtgtacgtgtgtgtgtatgtatatgtgtgtgtgtgatttta

SEQ ID NO: 33633 - DNA, 201 bp, Homo sapiens
caccctcatgggtgccctcctcctcctccacactcggccttcaacatcctgtgcaagctggctctgcctgcgaatggcctcctcacgtagcttatattccracaaccatgcaggtaccctgtgatgtggatacccacttggtggctataagagtgaatttttcaggaagggaagagaattctgatttcctaagttttactt

SEQ ID NO: 33634 - DNA, 201 bp, Homo sapiens
tgtagagacaagatctcactgtattgcccaggcaggtctcaaactcctagcctcaagtgatcctcctgcttctgcctcccaaagtgctgggattacaggcrtgagccactgcatctgcccttaatagatcttatttgatccttccctctttatatagcaaatctcccattgctgctttgaacccttctatgtggaggtgct

SEQ ID NO: 33635 - DNA, 201 bp, Homo sapiens
gaccatatgagtggggactggctctgtcacccaagcctgagtgcagtggcgcttccaactcaccttcccgagtaggtgagactacaggcacacaccatcaygcctggctgattttttcatttttttgtagaaaaatggagtttctgctgggcgcagtggctcacgcctgtaatcccagcactttgggaggccaaggcaggt

SEQ ID NO: 33636 - DNA, 201 bp, Homo sapiens
gaagcatctgcaaagaacactaagaacgacctgtcagagaagtagggaggagaataggaaaagagcatgtcctggaccctagttatagaattatttctgcyccaaaaagtgtaacttttttaaaaaagaaagcctgaatgcaagcatttttcatctgtctggtttgtaccatcacaagacataatttccaaatagaataag

SEQ ID NO: 33637 - DNA, 201 bp, Homo sapiens
tgtttcggttttggtcagctgtgtttttctatgaagacaaatgatctgttcaaggtcatacatcttataatgaataaactttccaatcttaaactttttcmaatggtgtcataccaacataatacgtatgtttaaatttgtaaactcttttatcctctctactagaatatcaactagtgggtagattctgtatttactaaa

SEQ ID NO: 33638 - DNA, 201 bp, Homo sapiens
agttgtcagtatataagtgagtgtgaataagatcaccgagggagagggaagagaggaccagaaacctcatgggagaagcatctgcaaagaacactaagaaygacctgtcagagaagtagggaggagaataggaaaagagcatgtcctggaccctagttatagaattatttctgctccaaaaagtgtaacttttttaaaaaa

SEQ ID NO: 33639 - DNA, 201 bp, Homo sapiens
aaatgagataagtataaaatacatgctagatttcaagttagtacaaaaattgaataaataaaatttctcagtaactttttatattgatgacatagtgagayaatattttaggtatattggagtaaatacttttttttttttttgagacagggtctggctctgtcatccaggctgtagtgcagtggtgcaatctcagcatac

SEQ ID NO: 33640 - DNA, 201 bp, Homo sapiens
gaacactaaaaaatatttgattaaccgaagagaaagcacaacaggaacaacagaggaacatagcaagagaaggagcaagtaggaaacaaatagcaaggtgrtagatataaacctagccaaagcaataatgacattaaatgtaattggtctaaaaacatcaagtaaaaggcacagagatcatattttcctgcctgtagtctt

SEQ ID NO: 33641 - DNA, 201 bp, Homo sapiens
aatatggtgaaaccccgtctctattaaaaatgcaaaaaaaaaaaaaattaattggacatggtggtgtgcacctgtaatcccatctactcaggaggctgagkcaggagaacgcttgaacccaggaggcagaggttgcggtgagccaagatcgtgccactgcactccaacctgggtgacagagtgagactctgtctctaaata

SEQ ID NO: 33642 - DNA, 201 bp, Homo sapiens
aaaaaaaaaaaattaattggacatggtggtgtgcacctgtaatcccatctactcaggaggctgagtcaggagaacgcttgaacccaggaggcagaggttgyggtgagccaagatcgtgccactgcactccaacctgggtgacagagtgagactctgtctctaaataaataaataaataaacaaaacagggaaaaagtagaa

SEQ ID NO: 33643 - DNA, 201 bp, Homo sapiens
gggatgtgaaggttaaggcatgaatggagggcttggccttagatagtaacatagttcaatcaagataatagaaggaagacagaataatatgtgtggctacratagcaagtagatggtacattgtggctgggcatgtgtggaggatctttactgattttctctggtggttttttgttgttgttgttgtttgacagagtcttg

SEQ ID NO: 33644 - DNA, 201 bp, Homo sapiens
atcaagataatagaaggaagacagaataatatgtgtggctacaatagcaagtagatggtacattgtggctgggcatgtgtggaggatctttactgattttstctggtggttttttgttgttgttgttgtttgacagagtcttgctctgttgcccaggctagagtgtagtggcgtgatcttggctcactgtagcctccgact

SEQ ID NO: 33645 - DNA, 201 bp, Homo sapiens
aagatgaatatgctacaggcaccaaatgtggcctgcaaagcttaaaatatttaccatctggccctttgtagaaggtttgctggttgtataatccatgatayagattcatagaacctattttttaatcaaaaaagtaacagaattaagtcattcatatttcaagtttgaattgacatcatccttctactaattttctttgtt

SEQ ID NO: 33646 - DNA, 201 bp, Homo sapiens
ctcttatgtatgagtggacagcactgacgcatttaatctgtgctttgctgcagttcatcacagtggcttccaaaatagaaagcacccacccacttctgtakgcttattgaatataaggatcagctaactatggcctgtttgcatgccagattgggcccatggcctgtttttgtactgtgtggcagtttagaatttttcttt

SEQ ID NO: 33647 - DNA, 201 bp, Homo sapiens
ctcaggcaaatgcagtgttaccattgcattatataggtcatcattgtttccagccttcagtaacagttacttgctactcagtcgcaattgcaggtgtcacrtatgttacatgtttgttatggcaataacgtactcctattaccagtttctggactagcttttccgaagtaaggctgctgtaacaaccctcaaattgtagtg

SEQ ID NO: 33648 - DNA, 201 bp, Homo sapiens
acttaaaaaaatacaaaaattaaccgggcgtggtgacgggcgcctgtaatcccagctactttggaggctgaggtaggagaatcacttgaacccaggaggcrgaggttgaagtgagctgaggtcgcgccactgcactccagcctgggcaacagagtgagactccatctcaaaaaaaaaaaaaaagcataatattagtaatca

SEQ ID NO: 33649 - DNA, 201 bp, Homo sapiens
ctctttttaaaaacaacatctttattgggatattcagatatcttacaagttaccttttggaagtatacaactcagtggtttttagtatcctcacaggttaygtgcacccatcactacagtcaattttagaacattcattatccccaaaagaaccctgtacccattagcagttattatctttactttttaaatgcgggaaat

SEQ ID NO: 33650 - DNA, 201 bp, Homo sapiens
atattgatggtatccctttgattccattttgtaaggtaaattttcattcccactagttccatcatcttttctatgttttctttgtttctttgtttctttcwttttttctttttttaagatagagtctcactctgttgcccaggctggagcgcagtggtatgatcacagctcactgcagtcccgacctcctggactctaacg

SEQ ID NO: 33651 - DNA, 201 bp, Homo sapiens
agtagagacagggtttcaccatgttggccaggatggtctcgaactcctgacctcaggtgatcagcctgcctcggcctcccaaagtgctgggattacaggcrtgagccactgcacctggcctgcctggataatttttttaaaaatgttttgaagaggtaaggtctctccatgtttcccagtgtggtcttgaacttctgggtt

SEQ ID NO: 33652 - DNA, 201 bp, Homo sapiens
gaggaggaggttgcagtgagccgagagcgcgccattgcactccagcctgggtgacgagaatgaaactccatctcaaaaaaaaaaaaaaaaaaaaaaaaaawaaatatatatatatatatatatatatatatatatatatatatatggatcacagttgtatttcagcatagctaattcatcaaaagttagctcttttttctc

SEQ ID NO: 33653 - DNA, 201 bp, Homo sapiens
tcaaacaacaacaataacaaaaattgttgtttactcgaaattttctgaaagagtaaagcttatgtgtcctctctgcccactgcccccagcaccaccccccmacccccgccccaccgcccacacacacgaagggtaacggtgtgggaatggaggtgttgattaatttgatcgtggtaatcactatacatgtatgcattaaca

SEQ ID NO: 33654 - DNA, 201 bp, Homo sapiens
ttaaaaatactatattggctgggtgcagtggctcaggcctgtaatgtcagcactttgggaggccgaagtgggcggatcacttgaggtcaggagttcgaaamcagcctggcaacatggtgaaatcccatctctactaaaaatacaaaaaattagccgggtgtggtggcatgtgcctgtaatcccagctacttgggaggctga

SEQ ID NO: 33655 - DNA, 201 bp, Homo sapiens; identical to SEQ ID NO: 1637

SEQ ID NO: 33656 - DNA, 201 bp, Homo sapiens
atctagctgtaattttttaatctttaacaatctcttccctatacctccgttccccgttcccctacccttcccaacctctagtattgagtttgttttttttwtgagatggaatcttgctctcatgcccaggctagagtgcagtggcacgatcttggctcactgcaacctccatctcccaggctcaagtgattctcctacctc

SEQ ID NO: 33657 - DNA, 201 bp, Homo sapiens
agagcaagactctgtgtcaaaaaaacaaaaaagagaaaataaaaactatataacatattattaactatagtcatgctacagtggtatagaacactagaacrtattccttctatctagctgtaattttttaatctttaacaatctcttccctatacctccgttccccgttcccctacccttcccaacctctagtattgagtt

SEQ ID NO: 33658 - DNA, 201 bp, Homo sapiens
gattaggaggtagaaggtttgaatttgaatcatagctctacagcttactggccataattcctaagtaacttcctgtatgtatgtttctttttgtatatgtrtgtgtgtgtgtgtgtgtgtgtgtgtgtgtacacacacacacacacacatactctggtggaagccatgcatttagggactggactaaggaaagagaagtta

SEQ ID NO: 33659 - DNA, 201 bp, Homo sapiens
gagattttaagtttgcttgaaatgtaaaggtcattttgaacatcccagatctccattccttttattacttagaataatgatgccatagagtcttgttttgwttctcattatattctgtttgaagaactgctgaataattaaatgttttttaaaatgttgaaaatgacaacatactgaagtcatttaaatactccattaaat

SEQ ID NO: 33660 - DNA, 201 bp, Homo sapiens
actgcagcctgggaatacaggcacctaccaccatgctcggctaatttttaaaatttttttgtagagacaggtctcactatattgcccaggctggtctggarctcctggcctcatgcagtcctcctgcttcagcctcccaaagtgctgggattacaggcatgagcaaccatgtctgaccaacttccttttaaaataatattg

SEQ ID NO: 33661 - DNA, 201 bp, Homo sapiens
aagatttcattctttaaaaaaaaaaaagcttattttattctgcaacttctttttttttttctgagacagggtctcactctgtcatgcagactggagtgcartggtgtgatcatagttcactgcagcctgggaatacaggcacctaccaccatgctcggctaatttttaaaatttttttgtagagacaggtctcactatatt

SEQ ID NO: 33662 - DNA, 201 bp, Homo sapiens
tagtgggaaaaggctaacttcagaaccagaactaaagtgcttgatacaatagtgataataatggatatttgcacgctgaaatctggcaatacattcttaarggtgaagtttttgtgaatgagaattttcaaattctattcaaatatttttctaagttttacagttagtggctcatttaaaattgtatttacttatgagact

SEQ ID NO: 33663 - DNA, 201 bp, Homo sapiens
cctttataaaatgcatgtccttgccatcttccttgcatgacctccagattctcttaaaatgttgaaatgaaaacaaatctctttagccttttcattgcagkgatttttttaagaagtgaaatataatacaacattaaaagtaatgtaaaatcttaaactactttagttttttgtaataatgttagtacttttatttataat

SEQ ID NO: 33664 - DNA, 201 bp, Homo sapiens
gagctagccacactgataggccttgttttgtggctttctcaatgatgctttaaaaggaaacagtttcatttgaattatttcttttctttttttgaggtagrgtcttgttggactgcagtggcgcaatcttggctcactgcagctttgacctcctgggctcaattgatcctcccacctcagctccccgagtagctagcacta

SEQ ID NO: 33665 - DNA, 201 bp, Homo sapiens
taaagcaagaaagatgttcaggaaagcaaaaacgcagtagcaggattaaaattcacatcaaagacaatagagtagaactgatacttagacaagatgctgcrcctcagggtgatgtgactgcagactgatcctaccagtacttcaaaacatttagctagtgatattcaggaagaactgcagatgatctctcagtatcctgag

SEQ ID NO: 33666 - DNA, 201 bp, Homo sapiens
gtaacttcagaagaggtagagggggaaagtgagtaacaaaatgatgatcattacaatgaaaggcaggaagggaaaataaactccaaaaagtataattagcrcaaaataataaaatagaaacaaatccgaatcatggtaagtaaaaatgatctaaacttccctgttaaagacaaagattatcagtatgcctcttagaaaaac

SEQ ID NO: 33667 - DNA, 201 bp, Homo sapiens
tagatgctaatagcttgcaggtcttttggctgttggtaatttgtctccaaccacctgggatttgatggttaccatattactgtatcagtttgctatggctrccataacaaggtgccatagactgagtagcttaaacaacagaaatgcattttctcacagttctggaggccggaagtccaagatcaaggtgtcagcaggttc

SEQ ID NO: 33668 - DNA, 201 bp, Homo sapiens
ctttgggaggctgaggtgtgtggatcacttgaggttaggaatttgagcccagcctgaccaacatggtgaaaccccatctctactaaaaatacaaaattagytgggcatggtggcacatgcctgtagtcccagctacttgagagtctgaggcaggagaattgcttgaacctgagcagcagaggttgcagtgagccgagatca

SEQ ID NO: 33669 - DNA, 201 bp, Homo sapiens
aaatgaatgatgtttcgcatataatggctcttgcatgtagttgcaataataatgaagtgagaataatgttagaaaaagctttgaatactgtcagaaaatgrtcaaaagcccaagtgcttgcagggttctggttgccatggtgactaagactgtcgaagcagaatggaatacttagtgagattatataaggcagcatctcga

SEQ ID NO: 33670 - DNA, 201 bp, Homo sapiens
gggattatagatttaaaggtaggaaggcatttaaaagcttgcatttaaatcccttgtgtaacttctggcacatgggctctcaaacttaaaacactgacatrgttataatagctcggaccccatttttttgagacagttttatggagctatatttatatacaataaaatttgcccattcaaagtttacagttgaaaagtttg

SEQ ID NO: 33671 - DNA, 201 bp, Homo sapiens
tttttttttgttttgcatttgactctgagctaagtgttccaactctttaaaggcaatgtttattgttacaacctcgatccagtgcccagaactatgcttcrtgagatcatcacaactctttaaattgtatatttacagtgtgtagtgatgctgacgaaatacacggtagtaaaccaaaaagaaacatttggaaagtcccct

SEQ ID NO: 33672 - DNA, 201 bp, Homo sapiens
agaagaattctatatctgtcttggataaaaaatactatcagatgatataactaaggtttttttctatttttatttttacctcctgcatgaatgaacatatrttttcttacaggactgaatttgctcttaaagaaatcatgtcctctggaggtgctgaagatgatatcccacagggagagaggaaaacagttacagattttt

SEQ ID NO: 33673 - DNA, 201 bp, Homo sapiens
agcctcctgagtagctgggactacaggtgcccaccaccacgcccggctaatttttgtatttttagtagagacaagctttctccatgttggccaggctggtsttgaactcctgacctcaggtgatccgtccacctcggcctcccaaagtgctgggattacaggtgtaagccactgcgcccgactgagatgatctgttttctt

SEQ ID NO: 33674 - DNA, 201 bp, Homo sapiens
tcatattcattactcactcaaagtctggaatgttcaaggccagccagagcctaagccaaagtaccagtgataattcttatgttttgcttaaacataaggtktgtatttgtttttctttgaaggatgaaaagctgccgtctgtaatcctagcactttgggaggctgaggcgggtgcatcacttgaggccaggaggtcgagac

SEQ ID NO: 33675 - DNA, 201 bp, Homo sapiens
ttctcaaaaaaaatgtgtttgatatttatttaaacgttaagttataggcaaccatgtatcctggaaaatagtcaggagtatatatattttactgtcatagratgtggtccatgcaatactttaagtgaataaggccagttgcatagtttatatcatataatttcattttcgtttaagagaaccacatgtttgattatgcaa

SEQ ID NO: 33676 - DNA, 201 bp, Homo sapiens
caccatgttggccaggctggtgtcaaacttctgacctcaagtgatctgcccacctcggtctcccaaagtgctgggattacaggcgtgagccaccgcgcccrgctaattttttaacttttaacaaattttgcattgtttctttttggtattcctagaagtaattgtatacgtaatataatctttcttttctcattgatgagt

SEQ ID NO: 33677 - DNA, 201 bp, Homo sapiens
caagttttcggagaatattctccaaatgatggggtttttgaagcagagaatgtctttgcaacttttgacaatatagattaataatgaatctctgccgtgtrtatagttttaaagtcaggaccaagaagagcgtttcttctcttggaaaagacaacagtgcattcttatttatttcacaactttaagatgtcatgaacttta

SEQ ID NO: 33678 - DNA, 201 bp, Homo sapiens
agtagagatggggtttcaccatgttggccaggctggtctcgaactcctgacctcaggtgatccacctgccttggcctcccaaagtgctgggattataggcrtgagtcaccatgcatggccccctgtgtttctgtaactacttaaaaaaacaaaacctgaggaagtttattgattagtaaacatgtatatggctggagaggt

SEQ ID NO: 33679 - DNA, 201 bp, Homo sapiens
ttacaggcatccaccaccacacccggctaatttttgtatttttagtagagatggggtttcaccatgttggccaggctggtctcgaactcctgacctcaggkgatccacctgccttggcctcccaaagtgctgggattataggcgtgagtcaccatgcatggccccctgtgtttctgtaactacttaaaaaaacaaaacctg

SEQ ID NO: 33680 - DNA, 201 bp, Homo sapiens
ccgcctcctgggttcaagcgattcttctgcctcagcctcctatgtagctgggattacaggcatccaccaccacacccggctaatttttgtatttttagtakagatggggtttcaccatgttggccaggctggtctcgaactcctgacctcaggtgatccacctgccttggcctcccaaagtgctgggattataggcgtgag

SEQ ID NO: 33681 - DNA, 201 bp, Homo sapiens
aatttgtaaactcttttatcctctctactagaatatcaactagtgggtagattctgtatttactaaaacttcctatcatctgagtcttaaggcctataaayagatatttgaattaaattaaagcatgcttggggccagacatggtggctcatgcctgtaatcccagcactttgggaggccgaggcgggtgggtcacttgag

SEQ ID NO: 33682 - DNA, 201 bp, Homo sapiens
ctgttaaaaatacaaaaattagccaggtgttttggcacacgcctgtaatcccagctactccagagactgaggcaggagaatcgtttgaacacgggaggcaratgttgcagtgagctgagattgtgccactgcactccagcctgggcaacagagcaagactctgtctcaaaaaaaaaaaaaaaaagaatttgggctggagat

SEQ ID NO: 33683 - DNA, 201 bp, Homo sapiens
gaagaaattactataaaatatggatcataggctgggcgcggtagctcatgcctgtgatcccagccctttgggaggctgaggcaggaggatcatctgaggtygggagttcaagaccagcctgaccaacatggagaaaccccatctctactaaaaatacaaaattagcctggtgtggtggcgcatgcccataatcccagctac

SEQ ID NO: 33684 - DNA, 201 bp, Homo sapiens
gcaggagaatcacttgaacccgggaggcagaggttgcagtgagccgagatcgcgccactgcactccagcctgggtgacagagcgagactccgtctcaaatraatgaatgaatgaatgaatgaatgtattaggttattttctacatattcctttgattggcttaatcatgattttaattacttcttctatttaagcatatga

SEQ ID NO: 33685 - DNA, 201 bp, Homo sapiens
gggaggccgaggcgggcagattacgaggtcaggagttcaataccagcctgaccaatatggtgaaaccccatctctactaaaaatacaaaaattagccgggygtggtggcgtgcgcctgtagtcctagctactcaggaggctgaggcaggagaatcacttgaacccgggaggcagaggttgcagtgagccgagatcgcgcca

SEQ ID NO: 33686 - DNA, 201 bp, Homo sapiens
caattttccaggtgccatctgtcactcctttctttgactaggaaagggaactccctgaccccttgcgcttcccgagtgaggcaatgccttgccctgcttcrgctcgcgcacggtgcgctgcacccactgtcctgcgcccactgcgtgctccctagtgagatgaacccggtacctcagatggaaatgcagaaatcacccgtc

SEQ ID NO: 33687 - DNA, 201 bp, Homo sapiens
ggttactgctgtctttttctttgtctgtgccctgcccccagaggtggagcctacagaggcaggcaggtctccttgagccgtggtaggctcgacccagttcragctttctggctgctttgtttacctaagcaagcctgggcaatggcgggtacccctcccccagcctcgctgctgccttgcagtttgatctcagactgctgt

SEQ ID NO: 33688 - DNA, 201 bp, Homo sapiens
gcttgatcctatgtctttttgacattctttagcattccttgagcactttcttgcttactaccacaagatattccagattgatcctgtactttttctacccstgtgctgtaattagtgaattacaattctccagagatgtctggttccttttattggagaatggtattaggggccaagtgttaggtgctagaaacgttcata

SEQ ID NO: 33689 - DNA, 201 bp, Homo sapiens
tttacagcagaaggatccaggggagaatcaggcattatacctcagttttcccttgtctttgaaggaaagtacttgacatttttgaagattacaggttggtyattttgtagaatgtcccccaacttggttttgtctgtttcctcatgattagactcaggctacagaactttgacaggaacagtacttctcatcgcatgggac

SEQ ID NO: 33690 - DNA, 201 bp, Homo sapiens
cgcccatggtcccagctacttgggagactgaggcaggagtatcacttgagcctgggagatcgaggctgcagttagctatgatcttgccactgtactccagycttggtgacaaagtgagaccccatctcaaacaacaacaataacaaaaattgttgtttactcgaaattttctgaaagagtaaagcttatgtgtcctctctg

SEQ ID NO: 33691 - DNA, 201 bp, Homo sapiens
actatgctggtttcagtgcatgttcaactgctataattagtgtagttttaatgtgctcattttgctgcattaggtttgtattttgttactgtattttactrtgtttgtattttgttcaccaattcatcattggtggttgaacatttttcttattaacattgaaatttactcctgtctagtccttagaccccattcaggcct

SEQ ID NO: 33692 - DNA, 201 bp, Homo sapiens
ctcacgcctgtaatcccagcactttgggaggccgaggcaggcggatcacgaggtcaggagatcgagaccatcctggctaacagtgaaaccccgtatctacyaaaaatacaaaaaattagccgggcgcggtggcaggcacctgtagtcccagctactcatgaggctgaggcaggagaatggtgtgaacccgggagtcagagt

SEQ ID NO: 33693 - DNA, 201 bp, Homo sapiens
tattgtgcaaatatcatagagtgtacttacacaaactagatggtataggcttcctacatacctaggcttcacggtatagcctgttgctcctgggctgcaawcctgtacagcatggtactgtactgaatactgttagcaattatacaatgttaagtacttgtatatccaaacatatctaaacatagaaatggtgcagtaaaa

SEQ ID NO: 33694 - DNA, 201 bp, Homo sapiens
gggcagatcacctgaggttgggagttcgagaccaacctgaccaacatggagaaaccctgtctctactaaaaatacaaaaattagccaggcgtggtggcgcwtgcctgtaatcccagctactagggtggctgaggcaggaaaatctcttgaacccagcaggcggaagttgtggtgagccaagattgtgccattgcactccag

SEQ ID NO: 33695 - DNA, 201 bp, Homo sapiens
gagcctgggaggtcaaggctaccctgagtcatgatcatgccactgctctccatcctgggtgaaagaatgagaaaccctttcttaaaaaaaaaaaaaaaaaatacagttgaccttgtgtcctgcagtcttgctaaattttgttagttcttttagcttttttacatgttccttaaaattttctatatacaagatcatgtcatc

SEQ ID NO: 33696 - DNA, 201 bp, Homo sapiens
tgggaggcagaggcgggcggatcacaaggtcaggagttggagaccagcctggccaaggtggtgaaacctcatctttactaaaaatacaaaaaaaaaaaaaattagccgggtgtggtggcgtatgcctgtagtcccagctacttgggaggctgaggcaagagaatcacttgaacctgggaggcggaggttgcaatgagccga

SEQ ID NO: 33697 - DNA, 201 bp, Homo sapiens
tcatatgattttttttctttctctttttttccttctaatgtgttgaattaatttgattgattttttttttaaatgttaaaccaaccttaaatttctggaayaaacccaacttagtcacgatccttttttaacatattgctgaattcaatttactcatatgtgttttaagatttttacatctatattttgtacatacactgc

SEQ ID NO: 33698 - DNA, 201 bp, Homo sapiens
ggagtgcaatggtgcaatctcggctcactgcaacctccgcctcccaggttcaagcgattctcctgcctcagcctcctgagtagacaggcatgtgccaccaygctcggctaattgttttttctgatagagatgggatttcacgatgttggccaggctggtctcgaactcctgacctcaggttatccgcccaccttggtctcc

SEQ ID NO: 33699 - DNA, 201 bp, Homo sapiens
tatccctttttctgttctacttcttattttttaaataaaaaagtttgtgtgtatatattcttttcccctcgtttattcattctagattttgctttctgtcwtccttcctctgctcaaatacaagccctgtgagggcagggatatttctttgttgataaagcacagaaaatagtggaacatagtagatgttcaacaaattct

SEQ ID NO: 33700 - DNA, 201 bp, Homo sapiens
ataaactggtaaaaacctagagtttttatttgtaataaaattttacttgtaataaaaaatttaaacatcttaaaataaattcagtgactgtttcatgttayagtctatcctatattcctggtatccctttttctgttctacttcttattttttaaataaaaaagtttgtgtgtatatattcttttcccctcgtttattcat

SEQ ID NO: 33701 - DNA, 201 bp, Homo sapiens
cttctaaaactgaggtagtgtaattttatcaggcattcctctataatgattgaggtaatcaggtaaaaggagttgttttcagtaacctaggtacgtttttrcttttcagtatgaaagaatataagactaataagaatgaaaattttgtttctaggtagtttatgctattgcatgtgtcttatatgcaagatttaaaggctg

SEQ ID NO: 33702 - DNA, 201 bp, Homo sapiens
tcctggataatatccgcagagtgttttccaacttggttccattctccctgtcactttcaggtacaccaatcagacgtagatttggtcttttcacatagtcycatatttcttggaggctttgtttgtttctttttattcttttttctctaaacttcccttctcgcttcatttcattcatttcatctttcatcactgataccc

SEQ ID NO: 33703 - DNA, 201 bp, Homo sapiens
caccatgttggccaggctggtctcgaactcctgacctcaggtgatctacccacctcagcctcccaaagtgctggaattacaggcgtgagccaaagttcctyaggcttctaaaactgaggtagtgtaattttatcaggcattcctctataatgattgaggtaatcaggtaaaaggagttgttttcagtaacctaggtacgtt

SEQ ID NO: 33704 - DNA, 201 bp, Homo sapiens
agtgtaatagatgctgccaagttaaattgtcttctaaagtgtttatatcaatttatactcctattacctacatatgagtatttccccacattcttgccaamagtgtatattctcaaacttttagaaattttgcttaactgatagggtaaaaatggaattttgagatggagtctcgctctgtcatccaggctggagtgcagt

SEQ ID NO: 33705 - DNA, 201 bp, Homo sapiens
gctcttgtattgggtgcatatatatttaggctagttagctcttgttgaatcgatccctttaccattatgtaatggccttctttatctcttttgatctttgktggtttaaagtctgttttatcagagactaggattgcaacccctgcctttttttgttttccatttgcttggtagatcttcctccatccttttattttgagc

SEQ ID NO: 33706 - DNA, 201 bp, Homo sapiens
caggtagcaggcactaaaccaaatggaaggaggagtccaagagaggataacttttttcgcagagtgctagtgcttattaggggataaggtttatatattamctcattagaagatgggggcattattcacatttagaaagagaaactgagacttaggaaattaaagtgattgacccaaagtaacacagctaggaagtggcac

SEQ ID NO: 33707 - DNA, 201 bp, Homo sapiens
gggaggattccctctttttctattgattggaatagtttcagaaggaatggtaccagttcctcttgtacctctggtagcattcggctgtgaatccgtctggycctggactctttttggttggtaagctattgattattgccacaatttcagagcctgttactggtctattcagagattcaacttcttcctggtttagtcttg

SEQ ID NO: 33708 - DNA, 201 bp, Homo sapiens
gccactaagttatgtagcaggggataactggattagcattccattttgccggagtttagagatcatactatacgttgaactgtaagaacaagaacaagatrtatttctaccttcaggagcactgttagttttataagagaagaaatatggattatgtgtccccttcctttatagattgttatttcactgtctttcatttta

SEQ ID NO: 33709 - DNA, 201 bp, Homo sapiens
cgatgcgggctcttttttggttccatatgaactttaaaatagttttttccaattctgtgaagaaagtcattggtagcttgatggggatggcattgaatctrtaaattaccttgggcagtatggccattttcatgttattgattcttcctacccatgagcatggaatgttctttcatttgtttgtatcctcttttatttcat

SEQ ID NO: 33710 - DNA, 201 bp, Homo sapiens
gtgtttggttttttgttcttgcgatagtttactgagaatgatgatttccaatttcatccatgtccctacaaaggacatgaactcatccttttttatggcckcatagtattccatggtgtatatgtgccacattttcttaatccagtctatcattgttggatatttgggttgattccaagtctttgctattgtgaatagtgc

SEQ ID NO: 33711 - DNA, 201 bp, Homo sapiens
tttaagttttagggtacatgtgcacaatgttcaggttagttacatatgtatacatgtgccatgctggtgtgctgcacccattaactcgtcttttagcattmggtatatctcctaaagctatccctcccccctccccccgccccacaacagtccccaaagtgtgatgttccccttcctgtgtccatgtgttctcattgttca

SEQ ID NO: 33712 - DNA, 201 bp, Homo sapiens
tttgggatttattttagtgtgaagtatgggtcagattttctttctggatttccagtagacctagcaccatttactaaaaagaccatcttttccctgccacmctgcagtgtcacttttatcataaatctgatgttcaaatatatttgagtctcattctgttcctttggtctgtttgtctattatgctgatacttctgacttc

SEQ ID NO: 33713 - DNA, 201 bp, Homo sapiens
ggtcttgaactcctgacctcaagtgatcctcctgcctcagcctcccaaagtgttgggattacaggtgtgagccaccgcacttggccaggagttgtttttgsgtaaatttgtcaaaagtgaatttcaaatgttttttcatgacagagtagcaccatgatgatgagatttaatgtactagaaatgaaatttactggaaattac

SEQ ID NO: 33714 - DNA, 201 bp, Homo sapiens
gtttcaatggcatacttaattttgtatcaagtataacatgccagttggttttttgggttttgtggggttttttttttttctttttttttttttgagacaasgtctcgctctgtcatccagctggagtacagtggcatgatcttgtctcactgcaacctctgcctcctgggctcaagcagtcctcccaccttagcctcctga

SEQ ID NO: 33715 - DNA, 201 bp, Homo sapiens
tgatcccgggaggcggaggttgtggtgagccgaggtcgtgccattgcactccggcctgggcaacagagtgagactccgtctttttaaaaaaaaaaaaaaaattgtattatttggccaggcgcggtacctcacacctctaatctcagcactttgggaggcagaggcgggcggatcacaaggtcaggagttggagaccagcct

SEQ ID NO: 33716 - DNA, 201 bp, Homo sapiens
aggttcaataaagtgtgtgttgtctaaccatggtacgatttcattaaaaacaaaaataaaacataatttaaaaaaatcagtagctgcatttgcaggccagytactcagaaggctgaggcaagaggattccttgaacccaggagttcaagtccagttgggcaacataacaagactccatctcttaaacaaaaaaaaagtcaa

SEQ ID NO: 33717 - DNA, 201 bp, Homo sapiens
atttgaaatactgggataactcgggatcagacaaccctatttcacaatatttgtgtttttatcttaggatgcatactatgagggtcctttgggaagaagarcatgactttggggttttttttctaactgtgtaattctggagaaataacttacttaagcctgttttttcatctctaaattctggtgacagtgcctacctta

SEQ ID NO: 33718 - DNA, 201 bp, Homo sapiens
ttgttttgaatttttttggtcatagtattggtatgtgtttagttttataagaaattgcagtgattcctcagggatctagaactagaaataccgtttgaccyagcaatcccattactgggtatatacccaaaggattataaatcatgctgctataaagacacatgcacatatatgtttattgcggcactattcacagtagca

SEQ ID NO: 33719 - DNA, 201 bp, Homo sapiens; identical to SEQ ID NO: 13011

SEQ ID NO: 33720 - DNA, 201 bp, Homo sapiens
agagacatggtctcactttgttgagcaggctggcctcaaactcctgggctcaagtgatcctcctgcctcaacctcccaaagtgctaggattacaggtgtgmgccactgtacctggcctgtttactttttaaaaatttttttgtttgttctttcaaacagtatttcagaaagcttgggaaaagttaccctggaaagatttcc

SEQ ID NO: 33721 - DNA, 201 bp, Homo sapiens; identical to SEQ ID NO: 13012

SEQ ID NO: 33722 - DNA, 201 bp, Homo sapiens; identical to SEQ ID NO: 13014

SEQ ID NO: 33723 - DNA, 201 bp, Homo sapiens; identical to SEQ ID NO: 13016

SEQ ID NO: 33724 - DNA, 201 bp, Homo sapiens
tttttggctatcaagaataatagtcctgtgaacatttgtatacaagtttttatgtgagcgtaggttttccttttttttgagacagagtgttgctcttgtcrtccgggctggagtgcaatgacacgattttggcttactgcaacctccgcctcctgggttcaagcaattttcctgcctcagcctcccgagtagctgaaatta

SEQ ID NO: 33725 - DNA, 201 bp, Homo sapiens; identical to SEQ ID NO: 13018

SEQ ID NO: 33726 - DNA, 201 bp, Homo sapiens; identical to SEQ ID NO: 13020

SEQ ID NO: 33727 - DNA, 201 bp, Homo sapiens
ttttgagatgaagttttgctcttgtcccccaggctggagtgtgatggtgcgatcttgctcactgcaacctccgcctcctgggttcaagtgattctcctgcytccaagcgattctcctgcctccaagcgattctcctgcctcggcacccaccgcccccctaccccgagtagctgggattacaggtgcctgtcaccatgcccg

SEQ ID NO: 33728 - DNA, 201 bp, Homo sapiens; identical to SEQ ID NO: 13022

SEQ ID NO: 33729 - DNA, 201 bp, Homo sapiens
gtctcactattttgcccaggctggtctcaaactcctgggctcaggtgattctcccacctcccaaagagctgggattacagtcgtgagccactgtgccgggsctcactgaggtgtaaagtatgtttcaatatctgatgagtctagttccccctctgctctttttcagagttctcttggggaatccagtttttccatatgaac

SEQ ID NO: 33730 - DNA, 201 bp, Homo sapiens
actgtctctactaaaaatacaaaaattagccaggcgtggtggcaggtgcctataatcccagctacttgggaggccgaggcacgagaatagcttgaacttargaggcagaggttgtagtgagccaagattgcaccactaaactccggcctgggcgacagagcaagactccatctcaaaaataaataaataaataaataaatg

SEQ ID NO: 33731 - DNA, 201 bp, Homo sapiens; identical to SEQ ID NO: 13024

SEQ ID NO: 33732 - DNA, 201 bp, Homo sapiens
caaacacagacgaatgtttgactctaagaatagaggcaggccaggcacagcgactcatgcctgtaattccagcactttgggaggccaaggccagaggattscctgagctcaggaatttaagaccagcctgggcaacaaagtgagaccccgtctacaaaataaaaaatatagctgggtgtggtagtgcatgcctgtagtcca

SEQ ID NO: 33733 - DNA, 201 bp, Homo sapiens
attgtatactgtcagtagatgaagtttcttatttatcccccttttaaaagaatataaccacatgcatgatttttcttttgaggacttcaaattactacctstacagtcgattttttttttcttggtatctaagataatgtgggaaatcttgagaaatcctacttttttactttttgatgttgtgtaaggatctcagctatt

SEQ ID NO: 33734 - DNA, 201 bp, Homo sapiens; identical to SEQ ID NO: 7670

SEQ ID NO: 33735 - DNA, 201 bp, Homo sapiens
aagcaagctgtttttctattgaggtaacacctggctggtgataataaaattgtcatcaagtaaaaggattcttacttttgtataaaataggaatatgcatstatatgtccaaaacaggtttttaaaattttactaatttatttatttttgagacagggtctcactccagtcacctgggctgcaatgcggtggtgcgatctt

SEQ ID NO: 33736 - DNA, 201 bp, Homo sapiens
gcccaggctggagtgcagtggcgtgatctcggctcactgcaacctctgcctctcgggttcaagcgattctcctgcctcagcctcccaagtagctgagattmcaggtgcccgccaccatgcccggctaattttttgtatttttagtagagacggggtttcacgtgttagctaggatgttctcgatctcctgacctcgtgatc

SEQ ID NO: 33737 - DNA, 201 bp, Homo sapiens
atctgtttgtctgtcacaacttcgtgtgtgaaagtaattaatacattttatgtatctattttataacttaaaaatttataatttaaagtttcttttattcytttatcagtagtttcttgtgtaactattagtactgggctttattatagacattggagatagggaaatgtccctcccctcatgaagtttgcattatatttg

SEQ ID NO: 33738 - DNA, 201 bp, Homo sapiens
ggcatgtgtgcctgtttgacagtgtcctggaaattcttttctagacggggagtgcatgttgaaggtgctcacacgtggtttcctaaaatcctgcaaagtgrcagttaggacttttgtttgtttgtttgtttctttgtttctttgagacggagtctcactctcgcccaggctggagtgcagtggcgtgatctcggctcactg

SEQ ID NO: 33739 - DNA, 201 bp, Homo sapiens
aagcctcccagggcctttatggtggctccacagagatccaggctccttctattcttttgttttgttttgtttttccaggcttcttctctcttgttgctctstcatcactagcttattgcccacatccacgtggtccaagatgctcaatattatgtccatattcccattagaaaaaagggggaaagtcaggaggaagagagc

SEQ ID NO: 33740 - DNA, 201 bp, Homo sapiens
tgggccactgagtgcccagacatttggtcaaacattatcttaggtgtgtctgtgaggatgtttctggatgaaattaatatttgaagtgattgagtaaaacrgatacccttccgagtctgggtgagcctcatccaatcatttgaagacctggctagaacaaaaagactgagcaagagggagcttctcctgcctgactccttg

SEQ ID NO: 33741 - DNA, 201 bp, Homo sapiens
accaaagaaataaagtagagcctttatactttcatacccatcagtaattgctaaggaccatccctggtggggaggtgatatggtttgcctgtgtccccacycaaatctcatcttgaattcctttgtgttgtgggagggacccggtgggaggtaattgaatcatgggggcaggtttttcctgtgttctccttgtgatagtga

SEQ ID NO: 33742 - DNA, 201 bp, Homo sapiens
gcctcaagtgctctgtctgactaggcctcccaaagtgctgggattacaggtgtgagccaccgggcctggccttcacttacttctttttcctttttattttycttctgagacagggcttggctctgttgtcaaggctgaagtgaagtggtgcaatcacagctcactgcagcctcgacctggtaatccttccacctcagcctc

SEQ ID NO: 33743 - DNA, 201 bp, Homo sapiens
atatttatttaaacgttaagttataggcaaccatgtatcctggaaaatagtcaggagtatatatattttactgtcataggatgtggtccatgcaatacttyaagtgaataaggccagttgcatagtttatatcatataatttcattttcgtttaagagaaccacatgtttgattatgcaaagacaaaggtttggaaaggtg

SEQ ID NO: 33744 - DNA, 201 bp, Homo sapiens
cggccaggagttcaagaccagcctgggaaacgtagcaagacccgatttctacaaaaaataaaaataaaaaaattacccaggcatggtggcacacacctgcratcctagttactcaggaagctgaggtgagaggattgcttgagcccaggagtttgaggctgcagtgatttatgatggtgccactgcacttcagcctgggaa

SEQ ID NO: 33745 - DNA, 201 bp, Homo sapiens
aatattcttttgaaataccagacttgtaatgggagttagagaaatcttcctacttctttctcttcttcctgcctttttaaatcacaaaactgtaagactawcctggtatttgatataaattttatttgtatataaaatatttaaatattttaagtattaatatattgaagattacatatatctgtgtctatatctatttca

SEQ ID NO: 33746 - DNA, 201 bp, Homo sapiens
agcgaggaggtttttaaaaaaatttcattattattttttatacattttaagggtgatatgattattgtcttgccgattcaaatttaggacagtcattcccmcccccgcaccccgtgccacagaggaatacagcggtatatagaacaagtatttaccatggtgaagagtctctgacactgtcatatttaaaaatatattttt

SEQ ID NO: 33747 - DNA, 201 bp, Homo sapiens
caggctgtagtgcagtggtgcaatctcagcatactgcaacctccacctcctgggctcaagccacccagccaattcagcctctggagtagctgggactacargcgcctgacacctcacccagctcttttttttttttttttttttgtagagacaaggtttggccatgttgcccaggctggtctcaaactcctgggctcaaat

SEQ ID NO: 33748 - DNA, 201 bp, Homo sapiens
ggccaaaaggccaagaagcgataggtaacataaaaatacagatagtttgcccagtatcatgaagggaataggagcagacttagctcttggagaaatagaakctttccttatttactgttgcagtaatgagttatttgaatttttatttatttattttagagacagggtctcactctgtcacccaggctggaatgcagtggt

SEQ ID NO: 33749 - DNA, 201 bp, Homo sapiens
gaaatgggccaaaggactgtatggatttgaggaagtggcctagtcctgggagaggatttcactggatggaatgctgtttggagagtcccttcaaagaatgrggataatgtgtaatatgggttggcatcaaaaaaggcttggatgcagcgaggaggtttttaaaaaaatttcattattattttttatacattttaagggtga

SEQ ID NO: 33750 - DNA, 201 bp, Homo sapiens
ctcctgaccttgtgatctgcctgcctcagcctcccaaagtgctgggattacaggcgtgagccaccgcacctggctattatttttaacttggttttcatttmtggcatagagactaatttgggtctaagttattcccattcctgctttgatttgctgatttttcaaacctgaagtccaaagttactgtttttggggtttggg

SEQ ID NO: 33751 - DNA, 201 bp, Homo sapiens
ttgtaacttgaatcctccttttagtggggagaatttaatgaatattttacatttcagtgtaataaaatgtgtccaacttgttacacaagacttagtttaarattcacatgtttgggaagaatgtgggtttgagtggtgagggttcagttgaaggtctctttctataaagtatataatttgttgccaaaggaaatattacct

SEQ ID NO: 33752 - DNA, 201 bp, Homo sapiens
ccgggaggtggaggttgcagtgagccgagatcgcgccactgcactccagcctggtgacagatagagactccatctcaaaaaaaaaaaaaaaaaaaaaaaawatatatatatatatatatatatatattcattttactattaaacatttgagtgttttctctgttctaaatatttctataggcattttagttatagggatca

SEQ ID NO: 33753 - DNA, 201 bp, Homo sapiens
cagggtgagcactcaaaatgcatctagcatgactgaggaactaaatttttaattttatttaattgtaattaaattaacttgagaaactgctacttgatcasctattggaaaacgttcaagtatgttttgaacaacttgggtatgtgagtctgtatttttcatccgtcattttatgaaatctaagtatatatcaaatatttc

SEQ ID NO: 33754 - DNA, 201 bp, Homo sapiens
ctcacatctgttatcccagaactttgggaggctgaggcaggaggatcatttgagcccaggagttcaagaccagcgtgggcaacataatgagactctgatgytacaaaaaacttaaaaaaaaaaaaaaaaaattaaccaggcatggtggcacatgtctagctacttgggaggctgaggtgggagtattgcttgagcccagga

SEQ ID NO: 33755 - DNA, 201 bp, Homo sapiens
attaacttataattgtcgttgcttctcttatatattttatttatctctgtctctgataatctcttaatctcttctttctcttttgcctatccaaatctttstctttgtgaagcatttcctggctactcaagccttccaatatgtaccttaaacatttttcattttaattaattgatttttttttttggagatggagtcttg

SEQ ID NO: 33756 - DNA, 201 bp, Homo sapiens
aatttatttttgtaatgtgtgagtgagtcctataggtagagagaagttaacatttgtatgtatgaactgttgcatgaaatgtacagaaaagtagcaacttsttcaggaaattttaaatgtatggcaggattatagtttatagaacttaccaaatgaagaagaatttctaggccgggcacggtggctcacgcctgtaatccc

SEQ ID NO: 33757 - DNA, 201 bp, Homo sapiens
aggtgacaaaacaaatatgaccaggaaacagtctggcaagaaatacactaaaatattaaatggaattggttaggtcatgggattgttctttttcaacttgkacttttttttcttctttcttttcttttctttttttttttgtagggatagagtcttactacattgcccaggctggtcttgacctccttggctcaaatgata

SEQ ID NO: 33758 - DNA, 201 bp, Homo sapiens
tatttttgttgattttctgtctgctttttcaatttctgaaacagtagtatttaaacctctaattagggctgggtgcagtggctcacgcctgtaatcccagyacttggggaggcccgaggcgtgtagattggttgagctcaggagttcaagaccaacatggcaagaccctgtctctacaaaaaataccaaaattagctgcgc

SEQ ID NO: 33759 - DNA, 201 bp, Homo sapiens
tggtggctcacatctgttatcccagaactttgggaggctgaggcaggaggatcatttgagcccaggagttcaagaccagcgtgggcaacataatgagactytgatgctacaaaaaacttaaaaaaaaaaaaaaaaaattaaccaggcatggtggcacatgtctagctacttgggaggctgaggtgggagtattgcttgagc

SEQ ID NO: 33760 - DNA, 201 bp, Homo sapiens
ttctttttctgtcttggtaaacttccattaactttcgtttttttcactaccgtttgtttctttttttttcacttatgtatgtatttatttatttaaaaaawttttttttgagacagagtctcactctgttgcccagtcaggagggcagtggcgtgctctcagctcactgcaacctctgcctcccgggttcaagcaattctc

SEQ ID NO: 33761 - DNA, 201 bp, Homo sapiens
ataaataaataaatggtgatttaaatgaaagtacattgtattttctgcctctgtgagttctctactggagacagtttgaatgaattgttaggagtaggcgrctttgagtcatgcttccttacatccgtctccagattcatattttggatgctttctttcattttgtgtatttttgtatttcctgccccattagcttcataa

SEQ ID NO: 33762 - DNA, 201 bp, Homo sapiens
agccctatataaataaacccaagctggtcctggacatttgagagaggccacagaccactagctgtctgagttgcctgagtgagatctgactgagactggcrgaactgtccaactgaactcacatctaattgcctacccataaaatgattagcgactacatggtttttgttttaagcttctaagttttgaagtggcttgtta

SEQ ID NO: 33763 - DNA, 201 bp, Homo sapiens
catggtggctcacatctgttatcccagaactttgggaggctgaggcaggaggatcatttgagcccaggagttcaagaccagcgtgggcaacataatgagaytctgatgctacaaaaaacttaaaaaaaaaaaaaaaaaattaaccaggcatggtggcacatgtctagctacttgggaggctgaggtgggagtattgcttga

SEQ ID NO: 33764 - DNA, 201 bp, Homo sapiens
ccgaggtaacaggatcacttgagcctgggaggtcaaggctaccctgagtcatgatcatgccactgctctccatcctgggtgaaagaatgagaaaccctttsttaaaaaaaaaaaaaaaaaatacagttgaccttgtgtcctgcagtcttgctaaattttgttagttcttttagcttttttacatgttccttaaaattttct

SEQ ID NO: 33765 - DNA, 201 bp, Homo sapiens
tgcctaaagactttagatagtatccttaatgaaacacaataattgtcagttgtcacaaagttggtgttgctgacaaatgcttgtacataataatacaatcytcctaacagcagcagcttcataagagaaagtttctagcagcaacttacatttaaaaacatctgattaggtcttcctgatgtaacctctcattagagatcc

SEQ ID NO: 33766 - DNA, 201 bp, Homo sapiens
accccatctctactaaaaatacaaaaattagctaggcatggtggcacatgcctgtaatcccagctattcaggaggccgaggcaggagaatctcttgaaccygggaggcagtgagccgagatcgcaccactgcactccagcctgggcgacagagcgagactccatctcaaaaaaaaggccctcagtcattttgggcaatact

SEQ ID NO: 33767 - DNA, 201 bp, Homo sapiens
gtcacattttgcttggaattgtattaaaaatctatatataattcacctgtggggaattactattttaataatattgaaccttccagtcaataataatggtrtatatcctcatttacttatatgtttagtttctttcaccaggattttatagtttttatcatacaggtcttgcatgtgtttcataatttattccaaaatatt

SEQ ID NO: 33768 - DNA, 201 bp, Homo sapiens
aatttcccatctttgctgacagtaataatgaccaaatgatatattcagagtttaaaatcagagtcaagctctgagtagtagaggagttttttttgaaactsttcatagagtaccttagttaattttagatgctgatcatatagtggttcgtatattaacttctgtgatatgtctcattagaaaaaggatgatcataggagt

SEQ ID NO: 33769 - DNA, 201 bp, Homo sapiens
cctaaatgttttggagtctaattctggacttttcattctgttccattggtttcctgcctactcttgtaccagcaccactttaattactgacgtttttcttytgttatgttttgttttgttttgttttttgttttgagacagggtctcgctctgttgcgcagggtggagtgcagtggcacaatcagagctcattgtagcctt

SEQ ID NO: 33770 - DNA, 201 bp, Homo sapiens
caaacctgcatggcacatgtaccctagaacttaaagtattttatatatatatatatgtgtgtatatatatgtgtgtatatatatatatgtgtatatatatrtgtgtgtgtatatatatatatatatatatgaaattgctaggccttatctcaaagtggttgtaccatagttacattcccaccagtagcttttgaaggttgc

SEQ ID NO: 33771 - DNA, 201 bp, Homo sapiens
agcaggtactttcaagcatgtgggggcagggagcttcttaagaccctgagaacacagggaagcatgggtccaaagctgcagctgggtagctgcagctgcayccaggagcgctgggctcccacccctccaactcagtaggtggcccggcttccacctgttcctggcctccacccattctgtggagcatgcagccctggccac

SEQ ID NO: 33772 - DNA, 201 bp, Homo sapiens
atttctgtgttaatatgcatttgagtgtaatagatgctgccaagttaaattgtcttctaaagtgtttatatcaatttatactcctattacctacatatgartatttccccacattcttgccaacagtgtatattctcaaacttttagaaattttgcttaactgatagggtaaaaatggaattttgagatggagtctcgctc

SEQ ID NO: 33773 - DNA, 201 bp, Homo sapiens
atatgtaacaaacctgcatggcacatgtaccctagaacttaaagtattttatatatatatatatgtgtgtatatatatgtgtgtatatatatatatgtgtrtatatatgtgtgtgtgtatatatatatatatatatatgaaattgctaggccttatctcaaagtggttgtaccatagttacattcccaccagtagcttttg

SEQ ID NO: 33774 - DNA, 201 bp, Homo sapiens
gtacatatgtaacaaacctgcatggcacatgtaccctagaacttaaagtattttatatatatatatatgtgtgtatatatatgtgtgtatatatatatatrtgtatatatatgtgtgtgtgtatatatatatatatatatatgaaattgctaggccttatctcaaagtggttgtaccatagttacattcccaccagtagct

SEQ ID NO: 33775 - DNA, 201 bp, Homo sapiens
catggcacatgtgtacatatgtaacaaacctgcatggcacatgtaccctagaacttaaagtattttatatatatatatatgtgtgtatatatatgtgtgtrtatatatatatgtgtatatatatgtgtgtgtgtatatatatatatatatatatgaaattgctaggccttatctcaaagtggttgtaccatagttacattc

SEQ ID NO: 33776 - DNA, 201 bp, Homo sapiens
aaccaccgctcccagcctagcttccagtatttctttttttttcttttttgagacagagtttcactcttgttgcccaggctggagtgcaatggcgtgatctyggctcactgtaacctctgctccccaagttcaggccattctcctgccttagcctcctgagtagctcggattacaggtgcacgccaccacacctggctaatt

SEQ ID NO: 33777 - DNA, 201 bp, Homo sapiens
ggttgcagtgagccgagagcgcgccattgcactccagcctgggtgacgagaatgaaactccatctcaaaaaaaaaaaaaaaaaaaaaaaaaaaaaatatatatatatatatatatatatatatatatatatatatatggatcacagttgtatttcagcatagctaattcatcaaaagttagctcttttttctcatgtagca

SEQ ID NO: 33778 - DNA, 201 bp, Homo sapiens
gaggttgcagtgagccgagagcgcgccattgcactccagcctgggtgacgagaatgaaactccatctcaaaaaaaaaaaaaaaaaaaaaaaaaaaaaatatatatatatatatatatatatatatatatatatatatatggatcacagttgtatttcagcatagctaattcatcaaaagttagctcttttttctcatgtag

SEQ ID NO: 33779 - DNA, 201 bp, Homo sapiens
aggaggttgcagtgagccgagagcgcgccattgcactccagcctgggtgacgagaatgaaactccatctcaaaaaaaaaaaaaaaaaaaaaaaaaaaaaatatatatatatatatatatatatatatatatatatatatatggatcacagttgtatttcagcatagctaattcatcaaaagttagctcttttttctcatgt

SEQ ID NO: 33780 - DNA, 201 bp, Homo sapiens
gaggaggttgcagtgagccgagagcgcgccattgcactccagcctgggtgacgagaatgaaactccatctcaaaaaaaaaaaaaaaaaaaaaaaaaaaaaatatatatatatatatatatatatatatatatatatatatatggatcacagttgtatttcagcatagctaattcatcaaaagttagctcttttttctcatg

SEQ ID NO: 33781 - DNA, 201 bp, Homo sapiens
aaatacaaaattagcctggtgtggtggcgcatgcccataatcccagctactctggaggctgaggcaggagaatcgtttgaacccgggaggaggaggttgcrgtgagccgagagcgcgccattgcactccagcctgggtgacgagaatgaaactccatctcaaaaaaaaaaaaaaaaaaaaaaaaaaaaaatatatatatat

SEQ ID NO: 33782 - DNA, 201 bp, Homo sapiens
tactgtagttatgtgaccagtaggactactttcatagttaatatctggcaagttaatgatgttaatacacagaaaacctcaatagtaaatagacacgaaaygctgatggtggaagtgccaacagagtttccttgtcacactttaggcctgtactgtccaatccagtaaccatatgcagggtgagcactcaaaatgcatcta

SEQ ID NO: 33783 - DNA, 201 bp, Homo sapiens
ctgagcgggtgttgtggacctgtagtcccagcttctcaagaggctgaggtgggaggattgcttgagcccaggaagtcaaggctgcagtgatgcagtgagcygtgatcatgccactgcactccagtgtggggaacacagcaagaccctgcctcaaaaaataaactaattttattgagcatctactatgtgccaagtactgtg

SEQ ID NO: 33784 - DNA, 201 bp, Homo sapiens
gtgagacaatttcagcaagatgtagggacaaggatcgcattcgaggtggcttaaaaggaaacacgtttgtgagagttgcctcactgtctcacctgctagargaaattgggagatttcagggcttgttttcggtcctggcgtggtgcagaggtggaggggcgccagcaggtgtgtggtatgcaggacgcagagccaggagaa

SEQ ID NO: 33785 - DNA, 201 bp, Homo sapiens
agtgctgatttttctttcatggtaattaaaaaaaaatcttactttcttaaaagcctgcacccaagctagtgagcttttctgcagaggattgagcatccaarccatgctttattttggtggattcttagagttttctggctgggtcctttttgaggggtagctgtgagctgtgagacaatttcagcaagatgtagggacaag

SEQ ID NO: 33786 - DNA, 201 bp, Homo sapiens
aaaaaattaataaatcttgttcatccttctctagaacttttctccccctagatgaggaaataggcttagagaggataggtgacttgtctaacgttgcacargagagctggaacttgaatccctagagggcacaccagagtatttctttagcgctctattttaagcaatattggttattgtagttgtgtgaccctgaacaga

SEQ ID NO: 33787 - DNA, 201 bp, Homo sapiens
ggaggggctcctcacttctcagacggggcggctgccgggcggaggggctcctcacttctcagacggggcggctgggcagagacgctcctcacctcccagayggggtcgcagccgggcagagacgctcctcacatcccagacggggcggcggggcagaggcgctccccacatctcagacgatgggcggccaggcagagacgc

SEQ ID NO: 33788 - DNA, 201 bp, Homo sapiens; identical to SEQ ID NO: 7666

SEQ ID NO: 33789 - DNA, 201 bp, Homo sapiens
atatatgtgtatatatatgtatatatatgtgtgtgtgcatatatatatatatatatatatatatatctcacaatttctttattcacttgttgattgatggrcacttgggctggttccatatttttgcaattgcaaattgtgccattataaccatgtgtgtgcaggtatcttttttatataaatgacttcttttcctctggg

SEQ ID NO: 33790 - DNA, 201 bp, Homo sapiens
tgccgggcggaggggctcctcacttctcagacggggcggctgccgggcggaggggctcctcacttctcagacggggcggctgggcagagacgctcctcacmtcccagacggggtcgcagccgggcagagacgctcctcacatcccagacggggcggcggggcagaggcgctccccacatctcagacgatgggcggccaggc

SEQ ID NO: 33791 - DNA, 201 bp, Homo sapiens; identical to SEQ ID NO: 7656

SEQ ID NO: 33792 - DNA, 201 bp, Homo sapiens
atatatatgtgtgtgtgtatatatgtgtatatatatgtatatatatgtgtgtgtgcatatatatatatatatatatatatatatctcacaatttctttatycacttgttgattgatgggcacttgggctggttccatatttttgcaattgcaaattgtgccattataaccatgtgtgtgcaggtatcttttttatataaat

SEQ ID NO: 33793 - DNA, 201 bp, Homo sapiens
tcctcacttctctgacggggcggctgccgggcggaggggctcctcacttctcagacggggcggctgccgggcggaggggctcctcacttctcagacggggyggctgggcagagacgctcctcacctcccagacggggtcgcagccgggcagagacgctcctcacatcccagacggggcggcggggcagaggcgctccccac

SEQ ID NO: 33794 - DNA, 201 bp, Homo sapiens
acacatatatatatgtgtgtgtgtgtgtgtatatatatatgagataggccataaaaggaatgaaatatatatatgtgtgtgtgtatatatgtgtatatatrtgtatatatatgtgtgtgtgcatatatatatatatatatatatatatatctcacaatttctttattcacttgttgattgatgggcacttgggctggttcc

SEQ ID NO: 33795 - DNA, 201 bp, Homo sapiens
tattattattattattttttaaaattgataattcttgggtgtttctcgcagagggggatttggcagggtcataggacaatagtggagggaaggtcagcagmtaaacaagtgaacaaaggtctctggttttcctaggcagaggaccctgcggccttccgcagtgtttgtgtccctgggtacttgagattagggagtggtgat

SEQ ID NO: 33796 - DNA, 201 bp, Homo sapiens
caccaacatggcacatgtgtacatatgtaacaaacctgcatggcacatgtaccctagaacttaaagtattttatatatatatatatgtgtgtatatatatrtgtgtatatatatatatgtgtatatatatgtgtgtgtgtatatatatatatatatatatgaaattgctaggccttatctcaaagtggttgtaccatagtt

SEQ ID NO: 33797 - DNA, 201 bp, Homo sapiens
acacacacacacatatatatatgtgtgtgtgtgtgtgtatatatatatgagataggccataaaaggaatgaaatatatatatgtgtgtgtgtatatatgtrtatatatatgtatatatatgtgtgtgtgcatatatatatatatatatatatatatatctcacaatttctttattcacttgttgattgatgggcacttggg

SEQ ID NO: 33798 - DNA, 201 bp, Homo sapiens
ggaactacccccatgatccaattccctcccaccagactccacctccaacattggggattgctgttcaacatgagatttggtcagggatacagatgcaaacmatatcagtcgtccaggctggtcttgaactcctggcctcaagtgatcctcccacctcagtctcttgaatagctgggattataggtgtgtgccaccatcccc

SEQ ID NO: 33799 - DNA, 201 bp, Homo sapiens
atatatatatacacacacacacatatatatatgtgtgtgtgtgtgtgtatatatatatgagataggccataaaaggaatgaaatatatatatgtgtgtgtrtatatatgtgtatatatatgtatatatatgtgtgtgtgcatatatatatatatatatatatatatatctcacaatttctttattcacttgttgattgatg

SEQ ID NO: 33800 - DNA, 201 bp, Homo sapiens
gtgcagcacaccaacatggcacatgtgtacatatgtaacaaacctgcatggcacatgtaccctagaacttaaagtattttatatatatatatatgtgtgtrtatatatgtgtgtatatatatatatgtgtatatatatgtgtgtgtgtatatatatatatatatatatgaaattgctaggccttatctcaaagtggttgta

SEQ ID NO: 33801 - DNA, 201 bp, Homo sapiens
ttatagtgggtgggaaatgttctctctttttctctagaaaagtttgcataatactggtgttcttttttaaagagaagcggtttaattggttcacggttccrcaggctgttcaggaagcatggcagcatctgcttctggggaggcctcagggcgcttttactcatggtggaggcaaagcgggagcaggcctcttaaatggca

SEQ ID NO: 33802 - DNA, 201 bp, Homo sapiens
tatctcatatatatatacacacacacacatatatatatgtgtgtgtgtgtgtgtatatatatatgagataggccataaaaggaatgaaatatatatatgtrtgtgtgtatatatgtgtatatatatgtatatatatgtgtgtgtgcatatatatatatatatatatatatatatctcacaatttctttattcacttgttga

SEQ ID NO: 33803 - DNA, 201 bp, Homo sapiens
gtatctattgagaagatcatatgattttttttctttctctttttttccttctaatgtgttgaattaatttgattgattttttttttaaatgttaaaccaaycttaaatttctggaacaaacccaacttagtcacgatccttttttaacatattgctgaattcaatttactcatatgtgttttaagatttttacatctatat

SEQ ID NO: 33804 - DNA, 201 bp, Homo sapiens
taatgggtgcagcacaccaacatggcacatgtgtacatatgtaacaaacctgcatggcacatgtaccctagaacttaaagtattttatatatatatatatrtgtgtatatatatgtgtgtatatatatatatgtgtatatatatgtgtgtgtgtatatatatatatatatatatgaaattgctaggccttatctcaaagtg

SEQ ID NO: 33805 - DNA, 201 bp, Homo sapiens
ctttttctgtatctattgagaagatcatatgattttttttctttctctttttttccttctaatgtgttgaattaatttgattgattttttttttaaatgtkaaaccaaccttaaatttctggaacaaacccaacttagtcacgatccttttttaacatattgctgaattcaatttactcatatgtgttttaagatttttac

SEQ ID NO: 33806 - DNA, 201 bp, Homo sapiens
cctgatgaatacatggcagttgtacagtgttggctattacgggccagggcatggtggctcctgtctgtaatctgaatacttcaggaggccaaagctggggygtcgcttgagccccagcagttccatgttacagtgaattatgatcacgccactgcattccagcctgggtgagagagggagttcctgtctttaaataaataa

SEQ ID NO: 33807 - DNA, 201 bp, Homo sapiens
tatacttacatacatttcagttcagattaactacattcaagtgcttagtagccatgtgtggctgtttgctcaggcaaaattcctcccagttttagtttctkttctcataatggctgactgtgctttctcgtgaatccatattggctattttggggttgtcttcttcactggtccatgaggtgttcccagttttgctttctt

SEQ ID NO: 33808 - DNA, 201 bp, Homo sapiens; identical to SEQ ID NO: 13013

SEQ ID NO: 33809 - DNA, 201 bp, Homo sapiens
gaggtgtgtggatcacttgaggttaggaatttgagcccagcctgaccaacatggtgaaaccccatctctactaaaaatacaaaattagctgggcatggtgrcacatgcctgtagtcccagctacttgagagtctgaggcaggagaattgcttgaacctgagcagcagaggttgcagtgagccgagatcacgccattgcatt

SEQ ID NO: 33810 - DNA, 201 bp, Homo sapiens
gagcgagactccgtctcaaaaaaaaaaagaaaaagaaaaagaactaaaaaacaaaccttagctggatgttggtcatgtgcctctagtcccagctgcttgggagactggggtggaagaatcacttgagcccgggaagtcaaggctgcagtgagccatgattgtgccacacacttcagcctgggtgacagaagcagaccctgt

SEQ ID NO: 33811 - DNA, 201 bp, Homo sapiens; identical to SEQ ID NO: 13015

SEQ ID NO: 33812 - DNA, 201 bp, Homo sapiens
gagaccttgtcccttttataaaaagaaaagagaaaaaagtgttctttgttcaatattagaccttgattataaagggctgtctttatcagttttgtaggccktccttaaagttccctgtggtggtgggttggaggtgtgtattggcattcttgtctacactactctccctgtttcctgcgtaaagaagatctttgagttttg

SEQ ID NO: 33813 - DNA, 201 bp, Homo sapiens
attcctttggcggaggagaggcgctctgctttttagagtttccagtttttctgctctgttttttccccatctttgtggttttatctacttttggtctttgrtgatggggatgtacagatgggtttttggtgtggatgctgtttctgtttgttagttttccttctaacagacaggaccctcagctgcaggtctgttggagtt

SEQ ID NO: 33814 - DNA, 201 bp, Homo sapiens
agccaccatgcccggctaatttttgtatttttagtagagatggggttttaccatgtttgtcaggctggtcttgaactcctgaccttgtgatccacctgccycggcctcccaaagtgttgggattacaggtgtgagccaccgtgcccggccacattttattttattttatttttttaattgaaaaataatcattgtaaatat

SEQ ID NO: 33815 - DNA, 201 bp, Homo sapiens; identical to SEQ ID NO: 13017

SEQ ID NO: 33816 - DNA, 201 bp, Homo sapiens
tcctgtagcttggagtagtttgatcgtctgaagccttcttctctcaactcgtcaaagtcattctccgtccagctttgttccgttgctggtgaggagctgcrttcctttggcggaggagaggcgctctgctttttagagtttccagtttttctgctctgttttttccccatctttgtggttttatctacttttggtctttga

SEQ ID NO: 33817 - DNA, 201 bp, Homo sapiens
tactatcttaaggctcggtatttttctcacttttttttaattcaaagaaaatttttctaatcagaaaaatataaattaaaaccaaatgagatatcaccgamctagatgactaaaaacaaaagagaccaagaaactgataatagcatatcctggcaactagtacaagaactgaatatttcatactatgtagaaatagaaatt

SEQ ID NO: 33818 - DNA, 201 bp, Homo sapiens; identical to SEQ ID NO: 13019

SEQ ID NO: 33819 - DNA, 201 bp, Homo sapiens
tcctcctgtagcttggagtagtttgatcgtctgaagccttcttctctcaactcgtcaaagtcattctccgtccagctttgttccgttgctggtgaggagcygcattcctttggcggaggagaggcgctctgctttttagagtttccagtttttctgctctgttttttccccatctttgtggttttatctacttttggtctt

SEQ ID NO: 33820 - DNA, 201 bp, Homo sapiens; identical to SEQ ID NO: 13021

SEQ ID NO: 33821 - DNA, 201 bp, Homo sapiens
attatgatgttagctggttattttgctcgttagttgatgcagtttcttcctagcctcgatggtctttgcaatttggcatgattttgcagtggctagtaccrgttgttcctttccatgtttagtgcttccttcaggagctcttgtagggcaggcctggtgatgacaaaatctctcagcatttgcttgtctgtgaagtatttt

SEQ ID NO: 33822 - DNA, 201 bp, Homo sapiens
tctggtcctggactctttttggttggtaagctattgattattgccacaatttcagagcctgttactggtctattcagagattcaacttcttcctggtttaktcttgggagggtgtatgtgttgaggaatttatccatttcttctagattttctagtttatttgcgtagaggtgtatatagtattctctgatggtagtttgt

SEQ ID NO: 33823 - DNA, 201 bp, Homo sapiens
cagaagctctttagtttaattagatcccatttgtcaattttgtcttttgttcccattgcttttggtgttttagacatgaagtccttgcccatgcctacgtmctgaatggtaatgcctaggttttcttctagggtttttatggttttagatctaacatttaagtctttaatccatcttgaattaatttttgtataaggtgta

SEQ ID NO: 33824 - DNA, 201 bp, Homo sapiens
aatcacttttgttattgttaaatttttctggtatttctccatttttggcttttatgaccattattttgcaaatgtctacaacgtttttgaaattatagtawgaatatactaaatggaaatattttgaaacatttatggtttgtatagttatactatcttaaggctcggtatttttctcacttttttttaattcaaagaaaa

SEQ ID NO: 33825 - DNA, 201 bp, Homo sapiens
gcttattgaatataaggatcagctaactatggcctgtttgcatgccagattgggcccatggcctgtttttgtactgtgtggcagtttagaatttttctttytttttttttacattttcaaagggttgtaaaaagggaaaagatgaatatgctacaggcaccaaatgtggcctgcaaagcttaaaatatttaccatctggcc

SEQ ID NO: 33826 - DNA, 201 bp, Homo sapiens
tagcctgtgtaatcttaattcatatctcttcaaaagcctggtgacaactgtcatgtaggaccagggaatagtctgttaatgctgtttgaattttctctctytttttttttttttttggaggtggagtcttgctctgtcgcccaggctggagtgcagtggtgcgatctcaactcactgcaacctccacctccacttcctggg

SEQ ID NO: 33827 - DNA, 201 bp, Homo sapiens; identical to SEQ ID NO: 1639

SEQ ID NO: 33828 - DNA, 201 bp, Homo sapiens
ccaagacacatttggcaatatctggagatatttttagccgtcaaaacaagtaggggggtgatgcaactggcatctagtgcgtagaggcgagggatgccgcyaaacactctacagtgtaccagacaacccccacaacaaagacttatttggcccaaaatggcaggagtgagaaggttaagaaactctatgttagggagtttt

SEQ ID NO: 33829 - DNA, 201 bp, Homo sapiens
taagtctgccagagagacaggttagtgttttggccatttcttcaatggctgagaatcaaaagactttttgtccttaataatttgtctttaattagtgacamataaaatctaattctaactcccagtcatttagtaggtaaaatactaaacaaccttaacactgttttagcagtacttgtcactgtttcactatctccctaa

SEQ ID NO: 33830 - DNA, 201 bp, Homo sapiens; identical to SEQ ID NO: 12995

SEQ ID NO: 33831 - DNA, 201 bp, Homo sapiens
ttttgcagcatccttgtgaatttgatgtgataccccaaggcacctgagcacacagtttgggaaccattgccttggaatattaatcatagttacctccagaragtgaaattttggataattaaaaaaatttcttttttcttgagatggagttttggtcttgttgcccaggctagagtgcaatggcgtgatctcggctcaccg

SEQ ID NO: 33832 - DNA, 201 bp, Homo sapiens
gagtgcaatggcgcgatctgggctcactgcaagctccgcctcccgagttcatgtcattctcctgcctcagcctcccgagtagctgggactacaggtgcccrccaccacgcccggctaattttttgtatttttagtagagacggggtttcatcgtgttagccaggatggtctcaatctcctgacctcgtgatccgcccacct

SEQ ID NO: 33833 - DNA, 201 bp, Homo sapiens
agatgttcaacaaattctttgttgaataaataatacttttaatattttaaagttaattctaatatatacacaaaagcatatataacatgtatacttttttyttaaattaattttttttgagatggagtctctctctgtcacccaagctggagtgcaatggtgcaatctcggctcactgcaacctccgcctcccaggttcaa

SEQ ID NO: 33834 - DNA, 201 bp, Homo sapiens
cacgcccaagtaatttttgtatttttggtagagacaggtttcactatgttggccaggctggtcttgaactcctgacctcaggtgatccacctgcttcggcstcccaaagtgctgggattacgattctcttggccatataccaaggagtagaattcctgggtcatatagtaattctgtgtttaaccttttgaggacctgcca

SEQ ID NO: 33835 - DNA, 201 bp, Homo sapiens
aaatgtaagtgatgttacttcattggataacagacaagccacatacttcagaggagatgatggataagtagttaatgaaatgttactgagtgaaaaaaaayctcttcaggtgtgtaggaatgtattatttaattcagtcagcatagaattcctgcaggcctcagatttttctttattctcttatgtttcatattcctttat

SEQ ID NO: 33836 - DNA, 201 bp, Homo sapiens
ttttcctgcctcagcctcccgagtagctgaaattacaggtgcctaacaccacgcccaagtaatttttgtatttttggtagagacaggtttcactatgttgrccaggctggtcttgaactcctgacctcaggtgatccacctgcttcggcctcccaaagtgctgggattacgattctcttggccatataccaaggagtagaa

SEQ ID NO: 33837 - DNA, 201 bp, Homo sapiens
tttttgtagttttagtagagatagggtttcaccatgttggccaggctggtctcgaactcctgacctcaggtgatctacccacctcagcctcccaaagtgcwggaattacaggcgtgagccaaagttcctcaggcttctaaaactgaggtagtgtaattttatcaggcattcctctataatgattgaggtaatcaggtaaaa

SEQ ID NO: 33838 - DNA, 201 bp, Homo sapiens
gtccagtcatcagttgatagacatttgagttttttggctatcaagaataatagtcctgtgaacatttgtatacaagtttttatgtgagcgtaggttttccytttttttgagacagagtgttgctcttgtcatccgggctggagtgcaatgacacgattttggcttactgcaacctccgcctcctgggttcaagcaattttc

SEQ ID NO: 33839 - DNA, 201 bp, Homo sapiens
aaaccatgctatttatgatttaacctgtatttcagttcttgagagtcttaggatattcactgacttcagacctaaagcttcattagcttagtaccagttasaagaaaattcatacaataggtaaaattctagggataaacaggttttatttttgaaaatttacataggaaggagtgattgtaaagatactaagttatttta

SEQ ID NO: 33840 - DNA, 201 bp, Homo sapiens; identical to SEQ ID NO: 12996

SEQ ID NO: 33841 - DNA, 201 bp, Homo sapiens
agagataatttcctgtgagggtttattgaagtcccataaaataaatgaaagcagcccatgataaggaggtcttctggtttcaaatgcttcaaagttcctcragcttttttttttttttttttttttttgagatggagtctcactctgtcgcccagactggagtgcagtggtgtgatctcggctcactgcagcctctgcctc

SEQ ID NO: 33842 - DNA, 201 bp, Homo sapiens
catgccatgacacctgggtaatatttaaaattttcttagagacagagtctcactatgttgcccaggctgctcttgaattcctgggctcaagttatcctccyacctcagcctcctgaatagctaggattacaagcatgagctatcttgcctggctctggttcttaaaccttggaggttccatttatatggttgtatttcttt

SEQ ID NO: 33843 - DNA, 201 bp, Homo sapiens; identical to SEQ ID NO: 12997

SEQ ID NO: 33844 - DNA, 201 bp, Homo sapiens
tcaggacacaaatagctaatgtatacggggcttaaaacctaaatgacgggttgataggtgcagcaaaccaccaaggaacatgtatacctgtgtaacaaacytgcacattctacacatgtgaactgtattacctgttgtcattatgctttatttatttatttatttatttattgagacagggtctctgtctcccaggctgga

SEQ ID NO: 33845 - DNA, 201 bp, Homo sapiens
gtgcccaccaccacgcccggctaatttttgtatttttagtagagacaagctttctccatgttggccaggctggtcttgaactcctgacctcaggtgatccrtccacctcggcctcccaaagtgctgggattacaggtgtaagccactgcgcccgactgagatgatctgttttcttacagtatcttacacttaaattatatt

SEQ ID NO: 33846 - DNA, 201 bp, Homo sapiens
tctgccaagtgagaactctgggtcccattgcctttaataaatcttttttaaaaaagaatttttttttttttaaagaaatggggtctcattctgtcactcakgctgaagtgcagtggagggatcatagctctctgcacccttgaactgctggcctcagtcgactctcctgcctcagcctcctgagtatctgaggtagctgag

SEQ ID NO: 33847 - DNA, 201 bp, Homo sapiens; identical to SEQ ID NO: 12998

SEQ ID NO: 33848 - DNA, 201 bp, Homo sapiens
actaacacaggaacagaaaaccgaacactgcatgttctcactcataagtgggagctgaacaaggagaacacatggacacagggaagggaacaacactcatygaggccatgtggggtgggggtggtgaggggacgaagagcatcaggacacaaatagctaatgtatacggggcttaaaacctaaatgacgggttgataggtg

SEQ ID NO: 33849 - DNA, 201 bp, Homo sapiens
atttgttcagaggctttcaagtatttccttgtggtcggagaataggtacgtgtgtgctagtggaaggtgagactggaaagatagattttgaagaatgtcaratgctagtgattcttcaccagttcttgtgttatgagtaatttaccagtaatgacagttaacctcaggataaattttctgcagtgtaattgatagatctca

SEQ ID NO: 33850 - DNA, 201 bp, Homo sapiens; identical to SEQ ID NO: 12999

SEQ ID NO: 33851 - DNA, 201 bp, Homo sapiens
atgactacacttttggacagtgtgtgtctagatggtgagatagacttttcaaaaaacaaataattgttatatttgttcaactctttgtgaagtaactgaaraagcccctactgacttgatcagaagtaggtgccagggaaagatttagattttcaaggaaagttttacagaaaagttgtcgtttgaatgctgtcttcaact

SEQ ID NO: 33852 - DNA, 201 bp, Homo sapiens; identical to SEQ ID NO: 13001

SEQ ID NO: 33853 - DNA, 201 bp, Homo sapiens; identical to SEQ ID NO: 1638

SEQ ID NO: 33854 - DNA, 201 bp, Homo sapiens
acctcacatttatagcacatctcaattcagagtagccatgtttcaagtgccaaatagtgacaaaaggctaatgactacacttttggacagtgtgtgtctaratggtgagatagacttttcaaaaaacaaataattgttatatttgttcaactctttgtgaagtaactgaagaagcccctactgacttgatcagaagtaggt

SEQ ID NO: 33855 - DNA, 201 bp, Homo sapiens; identical to SEQ ID NO: 13002

SEQ ID NO: 33856 - DNA, 201 bp, Homo sapiens
cactatctgccatggcttttttttttttttttcatactaagccttctaaatctggcatattttacacttatacctcacatttatagcacatctcaattcaragtagccatgtttcaagtgccaaatagtgacaaaaggctaatgactacacttttggacagtgtgtgtctagatggtgagatagacttttcaaaaaacaaa

SEQ ID NO: 33857 - DNA, 201 bp, Homo sapiens
gccaggtgtggtggtgctcagctgtaatcccagctacttaggaggctgtggcacgagaatcgcttgaaccctgaagtgggggaggttgcagtgagcagagrttgcatcactgcattccagcttgggcaacagagagagaccctgtctcaaaaaagtaaataaataaataaaaataaataataaaataaggctgggtgcagt

SEQ ID NO: 33858 - DNA, 201 bp, Homo sapiens; identical to SEQ ID NO: 1640

SEQ ID NO: 33859 - DNA, 201 bp, Homo sapiens; identical to SEQ ID NO: 13003

SEQ ID NO: 33860 - DNA, 201 bp, Homo sapiens
ctattaattgaagagatcagttttcacattactttatatggccttcataattattagcacttgatagaataatattagtaggctgggcgcagtggctcacrcctgtaatcccagtactttaggaggccaaggtgggtggatcacctgaggtcaggagttcaagaccagcctggccaacatggggaaaccccttctctactt

SEQ ID NO: 33861 - DNA, 201 bp, Homo sapiens; identical to SEQ ID NO: 13005

SEQ ID NO: 33862 - DNA, 201 bp, Homo sapiens
tcctgagatggagtttcactctcgtcgcccaggctggagtgcagtggcacaatctcggctcactgcaacctccgcttcccaggttcaagcaattctcctgyctcagcctcccaagtagctgggattataggcgttcgccaccagacccagctaatattttgtatgtttagtagagacgggttttcaccatgttggtcaggc

SEQ ID NO: 33863 - DNA, 201 bp, Homo sapiens; identical to SEQ ID NO: 13006

SEQ ID NO: 33864 - DNA, 201 bp, Homo sapiens
accagcctggccaacatggcgaaacctcatctctactaaaaatacaaagcaattagccaggcatggtggcaaatgcccataatcccagctactcaggaagytgaggcatgagaatcgcttgaacctgggaggtggaggttgcagtgagccaagatcatgccactgcactccagcctgggtgaagtgagactctgtcaaaaa

SEQ ID NO: 33865 - DNA, 201 bp, Homo sapiens; identical to SEQ ID NO: 13007

SEQ ID NO: 33866 - DNA, 201 bp, Homo sapiens
tgataaccattagcatgtcctcaatatttgttggatggctgctactaatcttgagggcatcatgccaatattgactgatgtatcaatcaatgctactggcrtgtggtatttacagcaaaaaactaagtgtgctcatttagctataacatgtctttagcagaagagataagtcagatgttaacatttgatacctgcatctat

SEQ ID NO: 33867 - DNA, 201 bp, Homo sapiens
agttggcttattcctttgcctttgaccacagctttgttggaggtcagcagcatcctaagagccagggagcaggccaggcacagtggctcacgcctgtaatyccagcactttgggaagccagggcaggtggatcacttgacgtcaggagttcaagaccagcctggccaacatggcgaaacctcatctctactaaaaatacaa

SEQ ID NO: 33868 - DNA, 201 bp, Homo sapiens
gcacttggtattttaaaaatttagccattatactagatgtataatttttttttaaggaaaaaactttatttcattcttcaataactgtaattactagtggwgtgtatgttgggtattgtacaacttctcaaaccttagaatcattatacaccatcagctcttttcctgtaccatacaattttcacatagcatttatttttt

SEQ ID NO: 33869 - DNA, 201 bp, Homo sapiens
tgaagtagagaatgctgttttctctagttacattcctttgtttcttcttacacttatttatagggtgaccatatgtcctagtttgcctgatacagtctggktttccaaagtctaatagtgccccttttcattcacagaattgtcctagtctaggtggtaaattaaatggcagtattacttacataacatttaatgtatgcc

SEQ ID NO: 33870 - DNA, 201 bp, Homo sapiens
actagaaacatagagcatcttcccctttaaagttgctggtagaagctggatcgggaattggttaggggagaggtagttgtagttagtttttttttttttttaaatttcagtagttttttggggaacaggtgtgtttggttacatgaataagttctttagtagtgatttatgagattttgatgcacccatcacccaagcaat

SEQ ID NO: 33871 - DNA, 201 bp, Homo sapiens
gtttctattattctacccatcttacatatgggaaagttgaagcacaaagaggtcaagtgacttggctaaaatcatgcagctgtatttgaatagtaagtggyagcaccaggattgagtgcaggctgtttgacaccagtgctcttacccacgccactcttgcccctatgctggtcccaaatatatctgtctgcctctgtagac

SEQ ID NO: 33872 - DNA, 201 bp, Homo sapiens
caaatacacaaagccaaagaaggcttgggaggccactgatagtatatataatattattattatagtacatataatagtatatattgtgtgagtgtgtgtgtatatgtatatttttaattgggaggtgccccaaagtgaagtgtactagtcttaaatgaaaataattacagaaattatttttattaaatatgctcctagcca

SEQ ID NO: 33873 - DNA, 201 bp, Homo sapiens
ggctttggaatttgaagggtttcctttgttttcacaaaatccttatagattctacatgtaccactaggccaatccgattatagtcttctttctcagaagaytgaatggtgaccttttttcatctttgtaatgccagctattcagcattccctctgagaccctccagtgatgaggtttcccagcatttggagagtatcaagt

SEQ ID NO: 33874 - DNA, 201 bp, Homo sapiens
gcaaatacacaaagccaaagaaggcttgggaggccactgatagtatatataatattattattatagtacatataatagtatatattgtgtgagtgtgtgtgtatatgtatatttttaattgggaggtgccccaaagtgaagtgtactagtcttaaatgaaaataattacagaaattatttttattaaatatgctcctagcc

SEQ ID NO: 33875 - DNA, 201 bp, Homo sapiens
tcaagtgattctcctgcctcagcttcctgagtagctgtgactacaggtgcacgccaccacgcaaggctaatttttgtatttttagttgagatggggtttcmccatgttggcaaggccggtctcgaacccctgacctcaggtgatccgcccacctcaacctcccgaagcgctgggattacaggcataagccaccgcacccgt

SEQ ID NO: 33876 - DNA, 201 bp, Homo sapiens
gggcatggtagctcacgcctgtaatcccagcactttgggaggctgaggcaggcagatcacctgaggtcaggagttcgagaccagcctggccaacatggtgraaccccatctctactaaaaatacaaaaattagccaggcgtggtggcacacacctgtaatctcagctactcgggaggctgagacaggagaatcgcttgaag

SEQ ID NO: 33877 - DNA, 201 bp, Homo sapiens
atggggtttcaccatgttggccaggctggtctcgaactcctgacctcaggtgatccacctgccttggcctcccaaagtgctgggattataggcgtgagtcmccatgcatggccccctgtgtttctgtaactacttaaaaaaacaaaacctgaggaagtttattgattagtaaacatgtatatggctggagaggtatgtgaa

SEQ ID NO: 33878 - DNA, 201 bp, Homo sapiens
acagattttccaggcgcatggtgcaagctgtcagtgtatctaccattctggggtctggaagacggtggccctcttctcatagctccactaggcagtgcccmagtagggactctgtgtggggattccaaccccacatttcctttctgaactgccttagcagaggttctccatgagggccccgcccctgcagcaaacttctgc

SEQ ID NO: 33879 - DNA, 201 bp, Homo sapiens
tcaccagtaatgtgttctagtttctcctcattctcatcaacacttactattttctgtctttttgattatagacatgctactggatgtaaatggtgtctcttggtggttttgatttgaatttccctaatgttgggcatctttttatgtgcttgttagcgatttctgtttcttctttgggaaagtatctgttctaattctttg

SEQ ID NO: 33880 - DNA, 201 bp, Homo sapiens
aattcttgaactaatgagttgttaattaaggtaggttaaaaaaaaaccaggcatttttatatgaagatactttctgtatgaaatttgattaggcagtatarcatttaactagtaagtgtgaaaaattatttactaagaagcaaagaacaggatttaaaagaagtacaaccaacttccagttatagatgtctgaggagcctt

SEQ ID NO: 33881 - DNA, 201 bp, Homo sapiens
gggcggattgcctgagcctttaagatcagcctgggcaacatggtgaacctccctctctaataaaaaatataaaaaattagctgggcctggcagcatgcgcytgtggtcccagctactcaggaggttgaggcaggaaaattgcttgaacttgggaggcagaggttgcagtgagctgagatggtgccattgcactccagcctg

SEQ ID NO: 33882 - DNA, 201 bp, Homo sapiens
aggggaaaatgggggagttattaagtagtgggtatagaatttcagttttacaaggtaaaaatggagatggatggtggtgatggctatacaatgctatggaygtattcaataccactgaactgtacacttagaaatggttaagatggtaaatatgtatattttaccacaataaaaaagtaaaaaaataagtcataggaataa

SEQ ID NO: 33883 - DNA, 201 bp, Homo sapiens
tttcactgcagtactttctgctaggttgtgctatgtctcagttgaattactactggaatttgtgtaattgtgtgtgttagataaacatctctctttttctrtatttgataggcaaaatgatgtctttatagtcttgtgggcaatattttacaaatggccttctggctgtgtatcactgctgctccatgccaaaactccttt

SEQ ID NO: 33884 - DNA, 201 bp, Homo sapiens
tcacctgaggtcaggagttcgagaccagcctggccaacatggcgaaaccacatctctactaaagtacaaaaatcagccaggtgtggtggcgggcgcctgtratcccagctactcaggaggctaaggcagagaattgcttgaacccgggaggtggaggttgcagtgagccaagatcatgcaactgcactccagccttggtga

SEQ ID NO: 33885 - DNA, 201 bp, Homo sapiens
caaatgcccatcaatgatagactggataaagaaaatgtggtgcatatacaccatggaatactatgcatccataaaaaggagtgagatcatgtcctttgcasggacatggataaagctggaagccatcatcctcagcagactaacacaggaacagaaaaccgaacactgcatgttctcactcataagtgggagctgaacaag

SEQ ID NO: 33886 - DNA, 201 bp, Homo sapiens
tgctttgagacttcaatgatattacctgccacaaaatattggctgttcattactactgctcccccatcccccgccaacaatagagatgggatcttggtctygtcatgttgcccaggctggtcttcaatttgtgggcttaggtaatcctcctgccttggcctctcaaagtgctgggattacaggtgtgtgccaccacaccca

SEQ ID NO: 33887 - DNA, 201 bp, Homo sapiens
aagaggaaaatgttttaaataatttataagagaattatagaatctgtattgagagactactcagtccaaccgaaagcatagtaggagaaatcctagtgtamtcacattcctgaaaatgaagtccttaaaaatttcttagtcttagtcttttcacatatagttcacttacatatttaccaatgacatacatgtatttagtgt

SEQ ID NO: 33888 - DNA, 201 bp, Homo sapiens
aatccacccgcctcggcctcccaaagtgttgggattactggcgtgagccactgcacagtgcacaaccagcttttttttttttttttttttttttttgagawggagtctcactctgttgcccaggctggagtgcagtagcgcaatcttggttcactgcaacctctgcctcctgggttcaagtgattctcctgcctcagcctc

SEQ ID NO: 33889 - DNA, 201 bp, Homo sapiens
ggctgctcttattggctgttcatttcctaacctctttttaaatgtatgtgtttaaaggccagccatttctctctaagcatagaattatctgtatctataarctttaattttcattgtgaatcagttcagaatgttttctacttttcattatgatgttttttgacccgtgaattatttacatggatatttcttaatttccaa

SEQ ID NO: 33890 - DNA, 201 bp, Homo sapiens
ctctgaagtagctgggaccactgtcacataccactacgcccagaaaattttttgtatttttggtagagacagggctttgccatgttgtccaggctggtctygaactcctgggctcaagcaatccacccgcctcggcctcccaaagtgttgggattactggcgtgagccactgcacagtgcacaaccagctttttttttttt

SEQ ID NO: 33891 - DNA, 201 bp, Homo sapiens
cctggcttcaagcagtctgtctgccttggactcccaaagtgctgggattagaggcataagccaccatgcccagcctctttgttttttgttgtatttttttkttgttgttgttgtttttcagacaggatctcactctgtcagtcaggttggagtgtggtggctcagtcagctcactgtaacctcaaactcctgggctcaggg

SEQ ID NO: 33892 - DNA, 201 bp, Homo sapiens
agacgacgtctcaaaaaaaaaaaaaaaaaaaaaaagaccgggtgcaatggctgacgcctgtaatcccagcactttgggaggctgaggcgggcggatcacarggtcaggagatcgagaccatcctggccaacatggtgaaaccccgtctctactaaaaatacaaaaatattagccgggcgtggtggtgggcgcctgtagtcc

SEQ ID NO: 33893 - DNA, 201 bp, Homo sapiens
ggccagcctagtctggatcctgacctcatgatcctcccacctcggccactcaaagtgctgggattacaggcgtgagacaccgcgcctggccttcatttttwaatttaattttattttttttaagacagagtttcgctctgtctctcaggctggagtgcagtggcgccatctcagctcactgcaacttccacctcccggatt

SEQ ID NO: 33894 - DNA, 201 bp, Homo sapiens
aaagatccaaggcatcttttaagactttaagattgctggtctaggaaacttctcagtctatgccacagagttaggataacctaactggcacaacttaaagygtttcttttattcacatttttaccttgttgtgatttaaaaataaaagaacctcttctaagtctgccagagagacaggttagtgttttggccatttcttca

SEQ ID NO: 33895 - DNA, 201 bp, Homo sapiens
cacatcttacatggtggcagacaagagagaaaatgagaaccaagcgaaaggggtttcctcttataaaaccatcagatcttgtgagacttattcactaccawgagaacagtatgggggaaaccgcccccatgatccaattatctctcgccgggtccctcccacaacacatgggaattatggaagctacaattcaagatgcga

SEQ ID NO: 33896 - DNA, 201 bp, Homo sapiens
ctgccttgcatgtgtgttctgtctctctctctctgacttctgccttgcatgtgtgttctctctctctctcacacacacacacacacacacacacacacacmcccaactcactttgggggaggctaactccatggtatgaggcagcactgcatagagggaaggcacttgccatgttgtgaagacagccacccaggcagccca

SEQ ID NO: 33897 - DNA, 201 bp, Homo sapiens
ggtctcaaattcctgactcaaatgatctgcctgcccttggcctctcaaagtgctgggattacaggcatgagacacaccatgcccagccaagaaatagtctktagttttcttagttatataaatagtagtaacatcttgtaccacattgcaccatatcttttttcatttaataagaagtattgaggctgggcatggtggctc

SEQ ID NO: 33898 - DNA, 201 bp, Homo sapiens
cataatgccaagtgaagtaagctggacacaaaaagacaaatactatatgattccacttacatgatattcttagagtagtcaaacctatcgacagaaagtarattggtggctgccaggggctaggaggaggggaaaatgggggagttattaagtagtgggtatagaatttcagttttacaaggtaaaaatggagatggatgg

SEQ ID NO: 33899 - DNA, 201 bp, Homo sapiens
gctcagattgggttttaaaaaaactggcttctgccttgcatgtgtgttctgtctctctctctctgacttctgccttgcatgtgtgttctctctctctctcwcacacacacacacacacacacacacacacccccaactcactttgggggaggctaactccatggtatgaggcagcactgcatagagggaaggcacttgcca

SEQ ID NO: 33900 - DNA, 201 bp, Homo sapiens
gggtttcaccatgttggccaggctggtgtcgaactcctgacctcagatgaaccacccccctcggcctcccaaaatgctgcgattacagacgtgagccaccrtgcccggcccaataatactttgaaacctttagagtcagatatacaatttagggcaatgaaaaaggtcagaactatccaattcattctgtagcagttaggc

SEQ ID NO: 33901 - DNA, 201 bp, Homo sapiens
aaaaaaaaaaaaaaaaaaattaaaaatagaatcctcatatgatccagcaattctacttctaggtttatatccaaaagaattgagagcaggttcttgatgaratatttgtatacccatgttcatagcagcattattcacagtagttataacatggcagcaacccatgtgtccatcagtggatgaatggagaagcaaaatatg

SEQ ID NO: 33902 - DNA, 201 bp, Homo sapiens
cacaggagaagtgatgagatgtctcttcccagattgggtttttaaaagactggtttctgccttgcatgtgtgttctctctctctctctcacacacacacasacacacacacccacacccacccacccacctcactttgcgggaggctagctggctagctcagattgggttttaaaaaaactggcttctgccttgcatgtgt

SEQ ID NO: 33903 - DNA, 201 bp, Homo sapiens
cacctcactgcaacctccgcctccccggttcaagcaattctcctcagcctcccaagtagctaggattacaggcatgtgccaccacgcctggctaattttgwatttttagtagagacggggtttctccatgttggtcagggtggcctcaaactcccaacctcaggtgatctgcccgcctctgcctcccaaagttctgggatt

SEQ ID NO: 33904 - DNA, 201 bp, Homo sapiens
cccagctactcgggaggctgaggcaggagaatggcgtgaacccgggaggcggagcttgcagtgagccgagatcgcgccactgcactccagcctgggcgacmgagcgagactccgtctcaaaaaaaaaaaaaaaaaaaaaaaaaaaaaattaaaaatagaatcctcatatgatccagcaattctacttctaggtttatatcc

SEQ ID NO: 33905 - DNA, 201 bp, Homo sapiens
aacacaggagaagtgatgagatgtctcttcccagattgggtttttaaaagactggtttctgccttgcatgtgtgttctctctctctctctcacacacacamacacacacacacccacacccacccacccacctcactttgcgggaggctagctggctagctcagattgggttttaaaaaaactggcttctgccttgcatgt

SEQ ID NO: 33906 - DNA, 201 bp, Homo sapiens
tttgtacttgaggaaactttgcctctgaggttcaggatcttgtctaatatttccaacaccagtctttctcattgcagtgcccatgctctttcccacgtagrgaaagagtagcttttcaggcttgtctgagcctcatattagaggaatactgtgattgaaataccaatatttgtgtaacaagtatggcccatattttggctc

SEQ ID NO: 33907 - DNA, 201 bp, Homo sapiens
gaggtcaggagtttgagaccagcctggccatcatggcgaaaccccatctctactaaaaaatacaaaaattagctgggcgtggtggtgcgtgcctgtaatcycacctacttgggaggctgaggcaagagaattgcttgaacctggaaggtggcggttgcagtgagccgagatcacatcactgccctccagcctgggagacag

SEQ ID NO: 33908 - DNA, 201 bp, Homo sapiens
gtggtagcgggcgcctgtagtcccagctactcgggaggctgaggcaggagaatggcgtgaacccgggaggcggagcttgcagtgagccgagatcgcgccaytgcactccagcctgggcgaccgagcgagactccgtctcaaaaaaaaaaaaaaaaaaaaaaaaaaaaaattaaaaatagaatcctcatatgatccagcaat

SEQ ID NO: 33909 - DNA, 201 bp, Homo sapiens
agctgggattacaggcgcacaccaccacgcctggctaattttttgtatttttagtagaggtggggtttcaccatgttggccaggttggtcttgaatgcctktctgggcctcccaaagtgctagggttacagacgtgagccaccatgctcagcctgagccacggcgccgagcccaatatttcttaagaagcatgaagcattc

SEQ ID NO: 33910 - DNA, 201 bp, Homo sapiens
aaattagccgggcgtggtagcgggcgcctgtagtcccagctactcgggaggctgaggcaggagaatggcgtgaacccgggaggcggagcttgcagtgagcsgagatcgcgccactgcactccagcctgggcgaccgagcgagactccgtctcaaaaaaaaaaaaaaaaaaaaaaaaaaaaaattaaaaatagaatcctcat

SEQ ID NO: 33911 - DNA, 201 bp, Homo sapiens
atataggtctggatgttttatgagtatataagtgttttgtaaatgtttcttcatttaaacagtttcatgtacatttcttcatttaaatattactcgttaawttttttttttttttttttttttttttgagacggagttttgctctgtcacccaggctggagtgcagtggcatgatctcggctcactgcaacctccgcctcc

SEQ ID NO: 33912 - DNA, 201 bp, Homo sapiens
atcaccagtaatgtgttctagtttctcctcattctcatcaacacttactattttctgtctttttgattatagacatgctactggatgtaaatggtgtctcttggtggttttgatttgaatttccctaatgttgggcatctttttatgtgcttgttagcgatttctgtttcttctttgggaaagtatctgttctaattcttt

SEQ ID NO: 33913 - DNA, 201 bp, Homo sapiens
aaaaattagccgggcgtggtagcgggcgcctgtagtcccagctactcgggaggctgaggcaggagaatggcgtgaacccgggaggcggagcttgcagtgasccgagatcgcgccactgcactccagcctgggcgaccgagcgagactccgtctcaaaaaaaaaaaaaaaaaaaaaaaaaaaaaattaaaaatagaatcctc

SEQ ID NO: 33914 - DNA, 201 bp, Homo sapiens
ggtcttgaactcctgacctcgtgatccgcccacctcagcctcccgaagtgctgggattacaggcatgagccaccatgcccgacctgcaagtttttaatgaraaaagagaactgggtaactgatgtattatttctggagtattttctttgctatatatgttttatataggtctggatgttttatgagtatataagtgttttg

SEQ ID NO: 33915 - DNA, 201 bp, Homo sapiens
gttgctcttgtcatccgggctggagtgcaatgacacgattttggcttactgcaacctccgcctcctgggttcaagcaattttcctgcctcagcctcccgartagctgaaattacaggtgcctaacaccacgcccaagtaatttttgtatttttggtagagacaggtttcactatgttggccaggctggtcttgaactcctg

SEQ ID NO: 33916 - DNA, 201 bp, Homo sapiens
tgggaggggtggtgtgcacctgtagtcccagctacttgggaggctgaggcaggagaatcgcttgaacccgggagatggaggtttcagtgagccaagatcgygccattgcactccagcctgggtgacagagtgagattctgtctcaacaaaaaaaaaaaagaaatgaaaagagaaccccatatggagtaggcaaatcagatc

SEQ ID NO: 33917 - DNA, 201 bp, Homo sapiens
ccacccatctcagcctcccaaagtgctgagattacaggcgtgagccacctcacccggcctttttttgtttgtttgtttgtttgttttgcaattttggctcrctgcaacccccgcctcccagattcaagcgattctcctgcctcagcctcctgagtagctgggattacaggcgtgtgccaccacacccagctaatttttgta

SEQ ID NO: 33918 - DNA, 201 bp, Homo sapiens
cctaaccaacatggagaaacccccatctctactaaaaatataaaattagccaggcgtggtggtgcgtgcctgtaatcccagctacttgggaggctgaggcrggagactcacttgaacctgggaggtagaggttgtggtgagctgaaattgtaccattgctctccagcctgggcaacaagagcaaaactccgtctcaaaaaa

SEQ ID NO: 33919 - DNA, 201 bp, Homo sapiens
tgttggccaggctgttcttgatctcctgacctcatgatccacccatctcagcctcccaaagtgctgagattacaggcgtgagccacctcacccggcctttktttgtttgtttgtttgtttgttttgcaattttggctcgctgcaacccccgcctcccagattcaagcgattctcctgcctcagcctcctgagtagctggga

SEQ ID NO: 33920 - DNA, 201 bp, Homo sapiens
cttgaacctgggagatggaggttgcagtaagccgagatcccgccattgcacttcagcctgggtgataagagtgaaactctgtctcaaaaaaaaaaaaaaaagataaaagggatatattgacctgaacactttgtcactagggaatattcttctcatctatgttgattttttttttgagggggacttaaagtcagtgtcgcc

SEQ ID NO: 33921 - DNA, 201 bp, Homo sapiens
gtagagacaggagtttcaccatgttgaccaggttggtcttgaactcctgaccacaagttttccaaccgccttggcctctcaaagtgctgggattataggcrtgaggcaccgcgcctggtcaaattttttgttatatttttattttctttcctatgtacttcctttcttttctctgcctgtttaccttttcagtctgatcac

SEQ ID NO: 33922 - DNA, 201 bp, Homo sapiens
cagtagacctagcaccatttactaaaaagaccatcttttccctgccacactgcagtgtcacttttatcataaatctgatgttcaaatatatttgagtctcrttctgttcctttggtctgtttgtctattatgctgatacttctgacttcattattatggcattttaataggcctcgatatattgtagtaaatgaaatactg

SEQ ID NO: 33923 - DNA, 201 bp, Homo sapiens
gaatcctggaggtggagcttgctatgagctgagattgcactgctgcactcaagcctgggcaacagggcgagactatgtctcaaaaaaaaaaaaaaaaaaaagattgtttttagaaaataatttgtgtataattcatgataattttatgctatccttgatacatgaagatgcttcacactgtggtaaggaccagcttttaga

SEQ ID NO: 33924 - DNA, 201 bp, Homo sapiens
taaaatgaaataataaaaagaaaacccattaaaaaaatacaccaaaggctgggtacggtggcttacgcctgtaatcccagcactttgggaggcggggggggtgtggatcacttgaggtcaggagttcgagtccaacctggccaacatggtgaaacactgtctctactaaaaatacaaaaattagccaggcgtggtggcagg

SEQ ID NO: 33925 - DNA, 201 bp, Homo sapiens
tatgttggccaggctggtctccactcctgacctcaggtgatctgcccacctctgcctcccaaagtgctgggattacaggtgtgagccaacgcgcctggctragaggctctttcaatattatgagattaatcctttgtaatgtgagttccagatattttcttcagttcattatttgacttttgattttgtttatgctatatt

SEQ ID NO: 33926 - DNA, 201 bp, Homo sapiens
gcctgtggtcccagctactcaggaggttgaggcaggaaaattgcttgaacttgggaggcagaggttgcagtgagctgagatggtgccattgcactccagcmtgggcaacagagcaaaactacatctccaaacaaaacaaaacaaaactgagtgcctttaacagcacccaggtcacctcttgaatgctttgctgcttagaaa

SEQ ID NO: 33927 - DNA, 201 bp, Homo sapiens
gtcttgaactcctaatcttgtgatccacctgcctcaccctcccaaagtgctgggattacaggcctgagccactgcactggcctttttttttttttttttttaaagtaaaacacaggatcagaaatctctttgttttgcatcatttgtgcaatatttgttttgtttgttttttccttaatgtcttgagagccagcaaagatt

SEQ ID NO: 33928 - DNA, 201 bp, Homo sapiens; identical to SEQ ID NO: 13025

SEQ ID NO: 33929 - DNA, 201 bp, Homo sapiens
tccagcctgggcaacagagtgagactccatctcaaaaaaaaaaaaaaagcataatattagtaatcaggttttctccttccattgagtgtcttcacaatatrccttgcccaacagcgaggtgggtgacaccaatagcaagatatcccaatggtgcaaaaggaaagctaaccagaggccgggcatggtggctcacacctgtaa

SEQ ID NO: 33930 - DNA, 201 bp, Homo sapiens
agtgaatagaacacaggagaagtgatgagatgtctcttcccagattgggtttttaaaagactggtttctgccttgcatgtgtgttctctctctctctctcwcacacacacacacacacacacccacacccacccacccacctcactttgcgggaggctagctggctagctcagattgggttttaaaaaaactggcttctgc

SEQ ID NO: 33931 - DNA, 201 bp, Homo sapiens
gtcgcccaggctggagtgcagtggcacaatctcggctcactgcaagctctgcctcctgggttcatgctattctcctgcctcagcctcccaagcagctgggrccacaggcacacaccaccacacccggctaattttttgtatttttagtagagacggcatttcactgtgttagccaggatggtctcgatctcctgacctcgt

SEQ ID NO: 33932 - DNA, 201 bp, Homo sapiens
tttttttttttttttgagacggagttttgctctgtcacccaggctggagtgcagtggcatgatctcggctcactgcaacctccgcctcctgggttcaagcrattctcctgcctcagcctcccgagtagctgggattacaggcatgtgccaccacacctggctaattttgtatttttagtagagatgggatttccccatgtt

SEQ ID NO: 33933 - DNA, 201 bp, Homo sapiens
ttttgagacggagtttcgctctgtcgcccaggctggagtgcagtggcacaatctcggctcactgcaagctctgcctcctgggttcatgctattctcctgcstcagcctcccaagcagctgggaccacaggcacacaccaccacacccggctaattttttgtatttttagtagagacggcatttcactgtgttagccaggat

SEQ ID NO: 33934 - DNA, 201 bp, Homo sapiens
ccctcccggctgctttcatgggctggcattgagtttctacagattttccaggcgcatggtgcaagctgtcagtgtatctaccattctggggtctggaagayggtggccctcttctcatagctccactaggcagtgcccaagtagggactctgtgtggggattccaaccccacatttcctttctgaactgccttagcagagg

SEQ ID NO: 33935 - DNA, 201 bp, Homo sapiens
acagatgtgcatcactatgcccagctaatttttgcattttttgtagaggtggggttttaccatgttgctcaggctggtcgtgaactcctgggcttaagctrtctgccttcctcagactctcaaagtgtttgaattataggcgtcagccacagtacctggtctgctttgggtttttgtatgtgatttctttttctttctgga

SEQ ID NO: 33936 - DNA, 201 bp, Homo sapiens
agactctatcttttttttttttttttttgatatggagtctcgctctgtcacccaggctggagtgcagtggtgcaatcttggctcgcggcaacctctgcctytcgggttcaagcaattttcctgcctcagcctcctgagtagctgggactacaggcgcgtgccaccacacctggctaattttttgtatttttagtagagacg

SEQ ID NO: 33937 - DNA, 201 bp, Homo sapiens
agacctgcctcagactcccaaaatgctgggattacaggcgtgagccactgtgcccggcctgaattcaattatttattttttttttttgagacggagtttckctctgtcgcccaggctggagtgcagtggcacaatctcggctcactgcaagctctgcctcctgggttcatgctattctcctgcctcagcctcccaagcagc

SEQ ID NO: 33938 - DNA, 201 bp, Homo sapiens
cactccaacctgagtgacagagcgagactctatcttttttttttttttttttgatatggagtctcgctctgtcacccaggctggagtgcagtggtgcaatyttggctcgcggcaacctctgcctctcgggttcaagcaattttcctgcctcagcctcctgagtagctgggactacaggcgcgtgccaccacacctggctaa

SEQ ID NO: 33939 - DNA, 201 bp, Homo sapiens
gtttatttttcttttttttttttttttgagacggatcttgctctgttgcccaggctggagtgcagtggcacaatctcggctcactgcaacctccgcctccsgggttccagcgattctccctcctcagcctcccaagtagctgggattactggtatctcccatcatgcctggctaattttttttgtatttttgtagagatgg

SEQ ID NO: 33940 - DNA, 201 bp, Homo sapiens
tgaggcaggagaatcgcttgaacctgggaggtgggggttgtagtgagccaagattgtgctgctgcactccaacctgagtgacagagcgagactctatcttwtttttttttttttttgatatggagtctcgctctgtcacccaggctggagtgcagtggtgcaatcttggctcgcggcaacctctgcctctcgggttcaagc

SEQ ID NO: 33941 - DNA, 201 bp, Homo sapiens
caaaaagagctcataggtcctgtgggactcattcaagggcttcctggagggtagagtgccaggagttgccagagggaggttaacaagcctagcctcaggckctactcctatattttatatatgtatatatgtttatttttcttttttttttttttttgagacggatcttgctctgttgcccaggctggagtgcagtggcac

SEQ ID NO: 33942 - DNA, 201 bp, Homo sapiens
ccaacatggtgagacccccatctctactaaaaatacaataattagccaggcatggtggtgcacgcctgtaatcccagctactcaggaggctgaggcaggaraatcgcttgaacctgggaggtgggggttgtagtgagccaagattgtgctgctgcactccaacctgagtgacagagcgagactctatcttttttttttttt

SEQ ID NO: 33943 - DNA, 201 bp, Homo sapiens
ttctgtgaaagcagactctgcagggccaagatagcatggtcagtgtatgcagcattttcacggtaatattttactcaagaatgaaacctagaagagttaarcagtgattttcaagggcattcaaaaagagctcataggtcctgtgggactcattcaagggcttcctggagggtagagtgccaggagttgccagagggaggt

SEQ ID NO: 33944 - DNA, 201 bp, Homo sapiens
cttgaggtcaggagttcgagaccagcttggccaacatggtgagacccccatctctactaaaaatacaataattagccaggcatggtggtgcacgcctgtartcccagctactcaggaggctgaggcaggagaatcgcttgaacctgggaggtgggggttgtagtgagccaagattgtgctgctgcactccaacctgagtga

SEQ ID NO: 33945 - DNA, 201 bp, Homo sapiens
gggattacagacatgcgccaccacacccagctaattttgtatttttagtagagatggggtttctccatgttcgttaggctggtcttgaattcctgacctcmggtgatccgtccgccttggcctcccaaagtgctgggattacaggcatgagccaccatgcccagcccagaattaggattttaaaaatttttatttagtttt

SEQ ID NO: 33946 - DNA, 201 bp, Homo sapiens
ggccgaggtgggcggatcacttgaggtcaggagttcgagaccagcttggccaacatggtgagacccccatctctactaaaaatacaataattagccaggcrtggtggtgcacgcctgtaatcccagctactcaggaggctgaggcaggagaatcgcttgaacctgggaggtgggggttgtagtgagccaagattgtgctgc

SEQ ID NO: 33947 - DNA, 201 bp, Homo sapiens
cgaggctgaggcaggagaatcacttgaacctgggagaaggttgcagtgagccgagatcgctgcactctagcctgggtgacagagcaagacttcgtctcaaraaaaaaaaaaaaaagtggtattagttgccgggcatgctggctcacacctgtaatcccagcactttgggaggcccaggctggcagatcacgaggtcaggag

SEQ ID NO: 33948 - DNA, 201 bp, Homo sapiens
aggccgaggtgggcggatcacttgaggtcaggagttcgagaccagcttggccaacatggtgagacccccatctctactaaaaatacaataattagccaggyatggtggtgcacgcctgtaatcccagctactcaggaggctgaggcaggagaatcgcttgaacctgggaggtgggggttgtagtgagccaagattgtgctg

SEQ ID NO: 33949 - DNA, 201 bp, Homo sapiens
cggtgagctgagattgcaccactgcactccagcctgggcaacagagtgagactccgtcttaaataaataaataaagattgcttcttatacttctcaatccragtgagttattgccagtgaacagtctccacggggccaaagcaatgtggttttggtatatggctctctgatggtttggcttgattcagaggtaaagaggga

SEQ ID NO: 33950 - DNA, 201 bp, Homo sapiens
ttctttgccactgagagaagtactgactattctgaaaataaggcagaatgaggccaggctcatgcgtgtaatccaaacactttgggaggccgaggtgggcrgatcacttgaggtcaggagttcgagaccagcttggccaacatggtgagacccccatctctactaaaaatacaataattagccaggcatggtggtgcacgc

SEQ ID NO: 33951 - DNA, 201 bp, Homo sapiens
tgagatggagtttcactcttgttgcccagactgaagtgtagtggtgtgatcctgcaacctccgcctcctggattcaagcgattctcctgcctcagcctccygagtggctgggattacaggcatgcaccaccatgcctggctaattttgtatttttagtaggaacggggtttcgccatgttgctcaggctggtctcgaactc

SEQ ID NO: 33952 - DNA, 201 bp, Homo sapiens
ttaaggtatttagaccaaaatttaagaaactttataagatcttattggctaaatattgacttaactatatatatatatatatatatatatatatatatttwtttttttttttttttttttttttgagatggagtctcactctgtcacgcaggttggagtgcagtggtgtgatcttggctcactgcaacctccgcttgctgg

SEQ ID NO: 33953 - DNA, 201 bp, Homo sapiens
agcactttgggaggccgaggcggttggaaaacttgaggtcaggagttcaataccagcctggtcaacatggtgaaaccctgtctctactaaaaatacaaaaytagccgggcatggtggcacatgcctgtaatcccagctacttgggaggctgaggcaggagaatcacttgaacctggaggcggaggttgttgtgagcggaga

SEQ ID NO: 33954 - DNA, 201 bp, Homo sapiens
gtttaaggtatttagaccaaaatttaagaaactttataagatcttattggctaaatattgacttaactatatatatatatatatatatatatatatatatwtttttttttttttttttttttttttgagatggagtctcactctgtcacgcaggttggagtgcagtggtgtgatcttggctcactgcaacctccgcttgct

SEQ ID NO: 33955 - DNA, 201 bp, Homo sapiens; identical to SEQ ID NO: 13008

SEQ ID NO: 33956 - DNA, 201 bp, Homo sapiens
gctgaggcaggaggatcatttgagcccaggagttcaagaccagcgtgggcaacataatgagactctgatgctacaaaaaacttaaaaaaaaaaaaaaaaaattaaccaggcatggtggcacatgtctagctacttgggaggctgaggtgggagtattgcttgagcccaggaggtcaaggctgcagtgagtggtgattgtac

SEQ ID NO: 33957 - DNA, 201 bp, Homo sapiens
cacatcactgccctccagcctgggagacagagtgagactgtgcctcaaaaataaatacatagatagatagatagatagatagatagatagatagatagataaatggaaaccttgatttaagtagttgcttcagtagttcatttgggctttgtcagtcaataacacattttacttctgtagtaatgggttactgataaggga

SEQ ID NO: 33958 - DNA, 201 bp, Homo sapiens
tcacatcactgccctccagcctgggagacagagtgagactgtgcctcaaaaataaatacatagatagatagatagatagatagatagatagatagatagataaatggaaaccttgatttaagtagttgcttcagtagttcatttgggctttgtcagtcaataacacattttacttctgtagtaatgggttactgataaggg

SEQ ID NO: 33959 - DNA, 201 bp, Homo sapiens
atcacatcactgccctccagcctgggagacagagtgagactgtgcctcaaaaataaatacatagatagatagatagatagatagatagatagatagatagataaatggaaaccttgatttaagtagttgcttcagtagttcatttgggctttgtcagtcaataacacattttacttctgtagtaatgggttactgataagg

SEQ ID NO: 33960 - DNA, 201 bp, Homo sapiens
ttcctaggcaaaagattgaatggctatatgaaagaaatcagaacagccccatcactggctagaaatgtaggaaagttatcaaaattatttccttttccccmcaagaaaggcttctagcccttctgggtttaccaataatttttttttttttttttttttttgagacagagtcgcactctgttgcccaggctgggatgcagt

SEQ ID NO: 33961 - DNA, 201 bp, Homo sapiens
gatcacatcactgccctccagcctgggagacagagtgagactgtgcctcaaaaataaatacatagatagatagatagatagatagatagatagatagatagataaatggaaaccttgatttaagtagttgcttcagtagttcatttgggctttgtcagtcaataacacattttacttctgtagtaatgggttactgataag

SEQ ID NO: 33962 - DNA, 201 bp, Homo sapiens
cattcacctgaattactgcagtagccttctaatgagtcttcctccttcctcgctctcctgtaagtgtgcctataagacagatatgccacctttctactcaraatcaccaatggcctgtcatctcactcagaagaaaggctttattttttctgcttacatatacccctccctccccagtcttccaaaaacatctctgatctt

SEQ ID NO: 33963 - DNA, 201 bp, Homo sapiens
ttggcttccctgggccacactggaagaagaacagttgtcttgggccacatataaaatacactaacactaatgatagctgatggactaaaaaaaaaaaaaawttttcacaaaaaaagtctcataatgttttaaggaagtttgcgaatttgtgttgggccacattcaaagccatcctgggttgcgtgtggttcatgggccatg

SEQ ID NO: 33964 - DNA, 201 bp, Homo sapiens
gcggaggttgaagtgagctgaggtcgcgccactgcactccagcctgggcaacagagtgagactccatctcaaaaaaaaaaaaaaagcataatattagtaawcaggttttctccttccattgagtgtcttcacaatataccttgcccaacagcgaggtgggtgacaccaatagcaagatatcccaatggtgcaaaaggaaag

SEQ ID NO: 33965 - DNA, 201 bp, Homo sapiens
catcctaaagtatttgactgatgtctacagcaatcagtttcttaaggcattcacaacaggattcagttatgtaagagctcttctgccagtcagcctcaccytcattccatttctctcttgctgctttgaaagacctttttgtttttgctgtcctgcagttatatggtgatatatctaggtttggcttaaatctattgggat

SEQ ID NO: 33966 - DNA, 201 bp, Homo sapiens
caagcaatccacccgcctcggcctcccaaagtgttgggattactggcgtgagccactgcacagtgcacaaccagcttttttttttttttttttttttttttgagatggagtctcactctgttgcccaggctggagtgcagtagcgcaatcttggttcactgcaacctctgcctcctgggttcaagtgattctcctgcctca

SEQ ID NO: 33967 - DNA, 201 bp, Homo sapiens
accttatagttgggtaatccctaatgccagtatctttaggtcttccttcatggcctggtcatgtatatcagagaagatgcaactattccacctggaatatmaaggtctagtgaccagcatgatgccatgttttccctgaagcgtgtgtgtatgtgtgtgcatgtgtgtaggtgttgtgtgtgtgtgtgtgtgtgtttatag

SEQ ID NO: 33968 - DNA, 201 bp, Homo sapiens
attgaggtaacacctggctggtgataataaaattgtcatcaagtaaaaggattcttacttttgtataaaataggaatatgcatctatatgtccaaaacagktttttaaaattttactaatttatttatttttgagacagggtctcactccagtcacctgggctgcaatgcggtggtgcgatcttggctcactgcagccttg

SEQ ID NO: 33969 - DNA, 201 bp, Homo sapiens
ccaacctcaggtgatccacccacctcggccttccaaagttctgggattgtaggcatgagccactgcgcctggccacttgttaatgtttatgaagtaactcrtgcatatagtttaaagttgtatttctcaactatttctgtgcatcagaaactttcagagcccttttcgaaccacttgtagctgggtcccatccacctcctg

SEQ ID NO: 33970 - DNA, 201 bp, Homo sapiens
tttttagtagagatgggatttccccatgttggtcaggctggtctcgaactcccaacctcaggtgatccacccacctcggccttccaaagttctgggattgyaggcatgagccactgcgcctggccacttgttaatgtttatgaagtaactcgtgcatatagtttaaagttgtatttctcaactatttctgtgcatcagaaa

SEQ ID NO: 33971 - DNA, 201 bp, Homo sapiens
taaaaatgatctaaacttccctgttaaagacaaagattatcagtatgcctcttagaaaaacccaataatatactgtttttaagagactcttcgaggccaaragcggtgactcacacctgttatcccaacactttgggtggctaagatgggaagattgcttgcggccaggagttcaagaccagcctgggaaacgtagcaaga

SEQ ID NO: 33972 - DNA, 201 bp, Homo sapiens
ctactcgggaggctgaggcaggagaatcgcttggacccaggaagtggaggttgcagtgagccgagattgcaccattgcactccatcctgggcaacaagagygaaactctgtctccaaaaaaaaaaaaaaaaaaaaaagaaataatagttcgacttccccaaggttgtaaggtgcctaggatagtgcctggcacatagaagg

SEQ ID NO: 33973 - DNA, 201 bp, Homo sapiens
gcctcccaagtagctgggactacagatgtgcatcactatgcccagctaatttttgcattttttgtagaggtggggttttaccatgttgctcaggctggtcrtgaactcctgggcttaagctatctgccttcctcagactctcaaagtgtttgaattataggcgtcagccacagtacctggtctgctttgggtttttgtatg

SEQ ID NO: 33974 - DNA, 201 bp, Homo sapiens; identical to SEQ ID NO: 7678

SEQ ID NO: 33975 - DNA, 201 bp, Homo sapiens
ccttgtattctaaaacatcgatttgatggggcagtaatcatcataacaatggctgattgacattattaaaataaaatggagccaaatctagataacaatartatgaaagaagaaaggggataaagaattaaaccattctgatatccatttattcttcagaagaaacatagagtaaagtttacttgttaatattttcagaaa

SEQ ID NO: 33976 - DNA, 201 bp, Homo sapiens
atcgattttcaatgatggaactattaaatgtctacttttaaatgatttaactttctggtgaaccttcaagatgaattaattgctgaatgtaactccgtgcwccatttgccattcccagaacttatgttccctctttgctttggttttttgtttttagggtttttgttgtttttgttgttgttgttgttgttttttaaagac

SEQ ID NO: 33977 - DNA, 201 bp, Homo sapiens
actgcttaaagaaaaagtaatttttctttctcctttgaggaaaagtttattcttttcttacctatcatgcatccactttattgtagacaaaacatgaaatstaggaaagcagaattgtgacggaatacatcatatgaccatatgagtggggactggctctgtcacccaagcctgagtgcagtggcgcttccaactcacctt

SEQ ID NO: 33978 - DNA, 201 bp, Homo sapiens
tgagctagccacactgataggccttgttttgtggctttctcaatgatgctttaaaaggaaacagtttcatttgaattatttcttttctttttttgaggtasggtcttgttggactgcagtggcgcaatcttggctcactgcagctttgacctcctgggctcaattgatcctcccacctcagctccccgagtagctagcact

SEQ ID NO: 33979 - DNA, 201 bp, Homo sapiens
ctcacgcctataatcccagcactttgggaggccgaggcggttggaaaacttgaggtcaggagttcaataccagcctggtcaacatggtgaaaccctgtctytactaaaaatacaaaattagccgggcatggtggcacatgcctgtaatcccagctacttgggaggctgaggcaggagaatcacttgaacctggaggcggag

SEQ ID NO: 33980 - DNA, 201 bp, Homo sapiens
agcagcgaggggtgtgttagcgaatgggcatggggtctggccactgtgcacagccaagcaagctagctgccgtggtggggcaggcatctccaggcactggygccatgcaaggttgcagctggattagatgtgcctcaagcagcttccactgcaggcacccacatctggacgaggggaacatggtggtggtgcccagaagct

SEQ ID NO: 33981 - DNA, 201 bp, Homo sapiens
agcaagaccctgcctcaaaaaataaactaattttattgagcatctactatgtgccaagtactgtgtacgaatgctctatgtgtatcttctcctgtaatccycaaagaaccctaagagaatatgtagtgtcactattttacagaagagggaactgcgacacagagaggccaaatatttacccaaaatcatgcatctagtaaa

SEQ ID NO: 33982 - DNA, 201 bp, Homo sapiens
accccgtctctactaaaaatttgcattagccaggtgtgatggcacttgcctgtagtcccagctactagggaggctgaggcaggagaattgctagaaactgrgaggcagagggttgcagtgagctgagatcacgccactgcactccagcctgggtgacagtgagactctgtctcaaaaaaaaaagaaaggaaaaatggtgtt

SEQ ID NO: 33983 - DNA, 201 bp, Homo sapiens
cagccccagcagccgcggagtcgcctggcccccaggtgcgggggctgggtggaggccggggttggggatggggtgggggccagggagcgggcccaggggcrgcggctcggggcggtggagcattcggggcgcagagaccggaggggcggggggtgcaggctggggggaccttgggggcgcctgcaggcggcggcgcgggct

SEQ ID NO: 33984 - DNA, 201 bp, Homo sapiens
ggccaacatggtgaatgaaaccccgtctctactaaaaatttgcattagccaggtgtgatggcacttgcctgtagtcccagctactagggaggctgaggcargagaattgctagaaactgggaggcagagggttgcagtgagctgagatcacgccactgcactccagcctgggtgacagtgagactctgtctcaaaaaaaaa

SEQ ID NO: 33985 - DNA, 201 bp, Homo sapiens
ggcagccccagcagccgcggagtcgcctggcccccaggtgcgggggctgggtggaggccggggttggggatggggtgggggccagggagcgggcccagggscagcggctcggggcggtggagcattcggggcgcagagaccggaggggcggggggtgcaggctggggggaccttgggggcgcctgcaggcggcggcgcggg

SEQ ID NO: 33986 - DNA, 201 bp, Homo sapiens
tttgggaaggcgtaagaaatgaataggtcctgttttattgacaatatctgccatatatcagtgaggattggtcaattatggaagatgctaaaaagcaggcmatggatttttaataaggaatataataaatgtatttcaagattacttccctagtgagttgatgatcccccttcgtctgacacaaattattctcgagttctt

SEQ ID NO: 33987 - DNA, 201 bp, Homo sapiens
tgttggctttttttgagatagagtttcactcttatcgcccaagctggagtgcagtggcgtgatctcagctcactgcaacctccacctcctgggttcaagcrattctcctgcctcagcctcccgagtagctgggattacaggcatgtgccaccatgcctggctaattttttgtatttttggtagagatgtggtttcatcaca

SEQ ID NO: 33988 - DNA, 201 bp, Homo sapiens
tgttctctattttgtgatgcccttgctgtatgggtctatgactatattaccttttattttttttttttcttggtagagatggggtctccctatgttgcccrggctagtcttgaactcccggctgaagagatcctcctatctcggccttccaaagcactgggattacaagcataagctactgtgcccagcccaaacttcaaa

SEQ ID NO: 33989 - DNA, 201 bp, Homo sapiens
cccgcctctactgaaaatacaaagattagctgggcatggttgcggggtcctgtaatcccagctacttgggaagctgaggcaggagaattgcgtgaacctgrgaggtggaggttgcagtgagcttagatcgtgccactgcactccagcctgggcgacagagtgacactccatctcaaaaaaaaaaaagtgggtttgtttgtt

SEQ ID NO: 33990 - DNA, 201 bp, Homo sapiens
atccaggcgtttccatacatcttctgaaatctaggcagaggttcccaaacttcaggtcttgacttctgtgcacctgcagtctcaacaccatgtggaagcayccaaggcttggggcttgtaccctctgaagcaacagcccaagctgtacctcggccccttttagtcatggctggggtgtctgggatgcagggcaccaagtct

SEQ ID NO: 33991 - DNA, 201 bp, Homo sapiens
ctcatgagagtaggcttatgctggcttagatcattcaaatgttttcttaattcaaaaatgcatgacatttatagatttgtgttgtcaacaaaaatactacrtaagtatattccactcaatccctaggcacccactatgctcagcagcactgtgcttttgtatataaatggtgggttataaaagactgcatggaggcattat

SEQ ID NO: 33992 - DNA, 201 bp, Homo sapiens
ggtcaagcattcaagaccagcctggccaacatggcgaaaccccgcctctactgaaaatacaaagattagctgggcatggttgcggggtcctgtaatcccarctacttgggaagctgaggcaggagaattgcgtgaacctgggaggtggaggttgcagtgagcttagatcgtgccactgcactccagcctgggcgacagagt

SEQ ID NO: 33993 - DNA, 201 bp, Homo sapiens
ggccccaggcaggatgatgagcttggagcatgggcatctggattgttgtctctgcttggcctcttttacgtagtgcttaaaaagcagcagccggccgggcscggtggctggcgcctgtaatcccagcactttgggaggcccaggcgggcagatcatgaggtcaagagatcgagaccatcctggctaacacggtgaaacccc

SEQ ID NO: 33994 - DNA, 201 bp, Homo sapiens; identical to SEQ ID NO: 7664

SEQ ID NO: 33995 - DNA, 201 bp, Homo sapiens
tattgttctctccacccataaaccctcaactgaaacaggatgcaggtggcttagctttttctttaccttgttcacgctgaaactatttgacactatttcayttttaaggatttttactgctgttaacaacagagaatgaaatgaatgaatacaaatttgcacaatttagaattttattaaaaatgagaatttcttatcctt

SEQ ID NO: 33996 - DNA, 201 bp, Homo sapiens
gaggtggaaggattggttgagcccaggagtttgaggctgtcatgaactgtgattgtgccactgcactccagcctgggtgacagtgagaccctgtctcaaamaaaacaaaacaaaacaaaacagttgagaccattctattgacgtatcaacaaaaactttttaaatgaaacattttaaatttacagaaaattaaatagaata

SEQ ID NO: 33997 - DNA, 201 bp, Homo sapiens
ccaggagaagggtggaaggttgattttcagcctgtgctggatgtgactgagcacattgtctaagaggatatgaggcgttgaagcctggggattctgatgtmcaggcttcagctttgcttggtacaacacatgcccatttctctctgaggacttgggcactgctaggacgtggggttgcaggttccctttttgtggattctg

SEQ ID NO: 33998 - DNA, 201 bp, Homo sapiens
agggcactacatgcttgctgtctaggctaaccttttttctaggtgtgggtaattgagaatacatgatctaggtttcacctcaactttatttcccagcactyattagttccttattgtagtcatttacatatctgttattggaaatgggccaaatgtttatccattattttaaaaataataagaaaacaggtatcttttttt

SEQ ID NO: 33999 - DNA, 201 bp, Homo sapiens
catgaggctccaaaatagatgatattgacttagattaggatagtgacagtggagatgaaaagaagtggatagattcatgaactagcccattaggctgttgwtaaaattcttgtttagggaaaaattccttccttctcccctgccccttccttctccttcttcatcatcctccttcctcttcctcatctctccatcgctcct

SEQ ID NO: 34000 - DNA, 201 bp, Homo sapiens
tgtaaccccagcactttgggattctgaggtgagagcgtagtttgagctcagactagcctgggcaacataatgagaacccgtctcaaaaaaaaaaaaaaaaattctgccctgggaccttctccccctcaattctaccaaactggttagaaatacaatctcagtgattaataatagagatccacccctccttagagttatgtg

SEQ ID NO: 34001 - DNA, 201 bp, Homo sapiens
tctacaaaaaaatacaaaaaattagccgagcatggtggtgtgcctggagacccagctactcaagaggttgagataggaggatggcttgagcctgggaagcrgaggttgcagtgagccatgatcacgccactgcacaccagcctgggcaacatagcgagaccctgtctccaaaaaaaaaaaatctagagattaaggcatgct

SEQ ID NO: 34002 - DNA, 201 bp, Homo sapiens
aatttttttatttttatttttatttttttatttttggtagagacggggtttcatcgtgttagccaggatggtctcgatctcctgacctcgtgatctgctcscctcggcctcccgcagtgctgggattacaggcgtgagccactgtgcccggcccaagcctctgttttttagtgaaatataaaacaattgccatcagctgaa

SEQ ID NO: 34003 - DNA, 201 bp, Homo sapiens
tgaactcctgacctcaggtgatagacctgcctcagactcccaaaatgctgggattacaggcgtgagccactgtgcccggcctgaattcaattatttatttwttttttttgagacggagtttcgctctgtcgcccaggctggagtgcagtggcacaatctcggctcactgcaagctctgcctcctgggttcatgctattctc

SEQ ID NO: 34004 - DNA, 201 bp, Homo sapiens
ggataaaaaatactatcagatgatataactaaggtttttttctatttttatttttacctcctgcatgaatgaacatatgttttcttacaggactgaatttrctcttaaagaaatcatgtcctctggaggtgctgaagatgatatcccacagggagagaggaaaacagttacagatttttgttatcttctggataaatctaa

SEQ ID NO: 34005 - DNA, 201 bp, Homo sapiens
gtttttaatgagaaaagagaactgggtaactgatgtattatttctggagtattttctttgctatatatgttttatataggtctggatgttttatgagtatrtaagtgttttgtaaatgtttcttcatttaaacagtttcatgtacatttcttcatttaaatattactcgttaatttttttttttttttttttttttttttg

SEQ ID NO: 34006 - DNA, 201 bp, Homo sapiens
aggcaggagaatcgcttgaacccaggaggtggaggttgcagtgagccgagatagcattacggcactccaccctgggcaacagagcaagactccatctcaamaaaaaaaaagaaaagaaaagaaaaactgcagcatagaagtgatgtgaactttcattaaagcttctcttttttatgttaggaacccatagtaatcggtatc

SEQ ID NO: 34007 - DNA, 201 bp, Homo sapiens
agtggctcatgcctgtaatcccagcactttgggaggctgaggcgggcggatcacttggggtcaggagttcaaaaccagcctggccaacgtggtgaaatccygtctctactggaaattaaaaaattagctgggaggggtggtgtgcacctgtagtcccagctacttgggaggctgaggcaggagaatcgcttgaacccggga

SEQ ID NO: 34008 - DNA, 201 bp, Homo sapiens
cacctcctgggctcaagccacccagccaattcagcctctggagtagctgggactacaagcgcctgacacctcacccagctcttttttttttttttttttttgtagagacaaggtttggccatgttgcccaggctggtctcaaactcctgggctcaaatgatccaaccaccttggcctactaaagtgctgtgattacaagtg

SEQ ID NO: 34009 - DNA, 201 bp, Homo sapiens
cgtccagaacataccaatcttcagaaatgaaaagggaggccaggcgtgcagtggctcatgcctgtaatcccagcactttgggaggctgaggcgggcggatyacttggggtcaggagttcaaaaccagcctggccaacgtggtgaaatcccgtctctactggaaattaaaaaattagctgggaggggtggtgtgcacctgta

SEQ ID NO: 34010 - DNA, 201 bp, Homo sapiens
agaaattaaaaaatgcttattcctccacttggttgcttgactggtgaacaaaagtgaaacctttttttttttgttttgcatttgactctgagctaagtgttccaactctttaaaggcaatgtttattgttacaacctcgatccagtgcccagaactatgcttcatgagatcatcacaactctttaaattgtatatttacag

SEQ ID NO: 34011 - DNA, 201 bp, Homo sapiens
atgttgggattacaggcgtgttccaccgtacccagccagcagtgtactttcttaaattgtatatttgttttgtttttgtgggaaatggaagaatgtgagargctgctgaatgaaaaggtttattggctaccccaattaaacttataaagccagaggggtccaggcattttgtgtcttcacagaattcaaaagaagtactct

SEQ ID NO: 34012 - DNA, 201 bp, Homo sapiens
taagaaattaaaaaatgcttattcctccacttggttgcttgactggtgaacaaaagtgaaacctttttttttttgttttgcatttgactctgagctaagtgttccaactctttaaaggcaatgtttattgttacaacctcgatccagtgcccagaactatgcttcatgagatcatcacaactctttaaattgtatatttac

SEQ ID NO: 34013 - DNA, 201 bp, Homo sapiens
tttgtttttctctcagtgctatgatgcaaaggagatatgagcagaccaaactgaagaataagatttctgagatgtggctgacacagtttaacagttcttcrttgttgttttcccagccttcatcccggggatctctatcctttcaccaggaagccactgttcatcattgtggattcgtctaatagtgttgcgtataaggtg

SEQ ID NO: 34014 - DNA, 201 bp, Homo sapiens; identical to SEQ ID NO: 7668

SEQ ID NO: 34015 - DNA, 201 bp, Homo sapiens
ggttgggttattgttttacaagagattggcttcacacagatttaatagaaaagaaatgactccaaaacaaggcttagctaataacatttattctttagccygtgtaatcttaattcatatctcttcaaaagcctggtgacaactgtcatgtaggaccagggaatagtctgttaatgctgtttgaattttctctctcttttt

SEQ ID NO: 34016 - DNA, 201 bp, Homo sapiens
agttctttttcttttttcttttcttttcttttttttttttttttgagacagagttttactctgccgcccaggctggagtgcagtggcactatcttggctcmctgcaacctctgccttccgggttcaagcgattctcctgcctcagcctcccaagtagctgggattatagtcatgcatcaccacacccagctaatttttgta

SEQ ID NO: 34017 - DNA, 201 bp, Homo sapiens; identical to SEQ ID NO: 7658

SEQ ID NO: 34018 - DNA, 201 bp, Homo sapiens; identical to SEQ ID NO: 7660

SEQ ID NO: 34019 - DNA, 201 bp, Homo sapiens
gatgtgcatcactatgcccagctaatttttgcattttttgtagaggtggggttttaccatgttgctcaggctggtcgtgaactcctgggcttaagctatcygccttcctcagactctcaaagtgtttgaattataggcgtcagccacagtacctggtctgctttgggtttttgtatgtgatttctttttctttctggagta

SEQ ID NO: 34020 - DNA, 201 bp, Homo sapiens
tttaagatgtcatgaactttaaataaaaccatgttgtttatccttgtttgttgttttgtgtatgtgattttctttcatttcaggagctgcctgccaatagygtgcttctgatttacctgtcggccactggcgttttccccacaggtcgttctgatagtgaaggtacaataaaggaatgctccctgttgtgagcagggcttg

SEQ ID NO: 34021 - DNA, 201 bp, Homo sapiens
aatataaaaaatgcttattataggatctagatgatgaacatatggatgtcactgtagaattcttccagtctttccatcgcttgaaaatttctgtaacgaartattagagaaaaaggtacccaaagccctgaagtacatgtgaaagtcacaactagtaacgtgataaaagtctttaaagtctgcgtgttgcattaaggctag

SEQ ID NO: 34022 - DNA, 201 bp, Homo sapiens
aattacttcttctatttaagcatatgaaactaactttttttcttttaagagaccggggatgggggtgtgcatctcactatgttgccccttctttaatcccygcctcttggctggtctccagctcctggcctcaaatgatcctcccaccttggccctccaaagtgctgggattacaggtgtgagctgccacacctagacttt

SEQ ID NO: 34023 - DNA, 201 bp, Homo sapiens; identical to SEQ ID NO: 7663

SEQ ID NO: 34024 - DNA, 201 bp, Homo sapiens
aggtggccgttgttggggaaaatctcatgtattaatgggaagacagacactgaaatatgagacagtgtaatgactttgtatatatacaaaggtttacacartacatacaaagggtttataggaattctgcatagtggtagtgagggcagtttctgcagtcatttatctaagccctgaaggtttagaaggttaatttgttgg

SEQ ID NO: 34025 - DNA, 201 bp, Homo sapiens; identical to SEQ ID NO: 7659

SEQ ID NO: 34026 - DNA, 201 bp, Homo sapiens
aaaaaaaatttttttaaatgcaaaaaatacaaaagcaaatagaatttcatctacaaaagttctttttcttttttcttttcttttcttttttttttttttttgagacagagttttactctgccgcccaggctggagtgcagtggcactatcttggctcactgcaacctctgccttccgggttcaagcgattctcctgcctca

SEQ ID NO: 34027 - DNA, 201 bp, Homo sapiens
gggttcacgccattctcctgcctcagcctcccaagtagctgggactacaggcgcccaccaccacgcctggctaatttttttatttttatttttattttttwatttttggtagagacggggtttcatcgtgttagccaggatggtctcgatctcctgacctcgtgatctgctcgcctcggcctcccgcagtgctgggattac

SEQ ID NO: 34028 - DNA, 201 bp, Homo sapiens
gcctcctgggttcacgccattctcctgcctcagcctcccaagtagctgggactacaggcgcccaccaccacgcctggctaatttttttatttttatttttwtttttttatttttggtagagacggggtttcatcgtgttagccaggatggtctcgatctcctgacctcgtgatctgctcgcctcggcctcccgcagtgctg

SEQ ID NO: 34029 - DNA, 201 bp, Homo sapiens
cactgcaagctccgcctcctgggttcacgccattctcctgcctcagcctcccaagtagctgggactacaggcgcccaccaccacgcctggctaattttttwatttttatttttatttttttatttttggtagagacggggtttcatcgtgttagccaggatggtctcgatctcctgacctcgtgatctgctcgcctcggcc

SEQ ID NO: 34030 - DNA, 201 bp, Homo sapiens
gggattacaggcatgagccaccatgtgcagccaagcctgatttttttttttttttttttttttttttttttttttttaagagacggagtcttgctctgtcscccaggctggagtgcagtggcgtgatctcagctcactgcaagctccgcctcctgggttcacgccattctcctgcctcagcctcccaagtagctgggacta

SEQ ID NO: 34031 - DNA, 201 bp, Homo sapiens
ccctcggcttcccaaagttctgggattacaggcatgagccaccatgtgcagccaagcctgatttttttttttttttttttttttttttttttttttttaaragacggagtcttgctctgtcgcccaggctggagtgcagtggcgtgatctcagctcactgcaagctccgcctcctgggttcacgccattctcctgcctcag

SEQ ID NO: 34032 - DNA, 201 bp, Homo sapiens
atttatttattttttagtagagacggtgtttcaccatgttggccaggtggtcttgaactcctgacctcaagtgatccacctccctcggcttcccaaagttytgggattacaggcatgagccaccatgtgcagccaagcctgatttttttttttttttttttttttttttttttttttttaagagacggagtcttgctctgt

SEQ ID NO: 34033 - DNA, 201 bp, Homo sapiens
attattgataaataaatgaccgtgtagtttatgtttttattgtgtgtatatgtcaagaagaaggaatagcttactctattgatatttagtcttggccattygttaagttcttattgcttttttctttaggcggatcctgtaatggtattaaatgatgataataccattgttatcacatcgaatcgccttgctgaaacagga

SEQ ID NO: 34034 - DNA, 201 bp, Homo sapiens
tgatgtccttgaataacagtgagggatgtgaaggttaaggcatgaatggagggcttggccttagatagtaacatagttcaatcaagataatagaaggaagmcagaataatatgtgtggctacaatagcaagtagatggtacattgtggctgggcatgtgtggaggatctttactgattttctctggtggttttttgttgtt

SEQ ID NO: 34035 - DNA, 201 bp, Homo sapiens
gtgaattggtgtgtgttcgacagagaatgggggatgaatgggagacagctctatagacaagtcttctaaagagttaatgctgtgaaggagagtagagaaayagcatgaaggctagaggagcatgtgagctagaaagaagagttttaaattggaagctaatgcaccctgtttgaatgctgatgatagttatccagcacagag

SEQ ID NO: 34036 - DNA, 201 bp, Homo sapiens
gataaataagtataaggaagggtgttgctgttttatatggggtggtcagggaagaccagaaatgcaataagatgatttgagtgaaatgatggaactagctstgcagatattttgggaagagcggtccaagctgagattacagtgaattccaagacaaccctgtggcaggaatgtgtagagtattggtgtgtacatgaaaca

SEQ ID NO: 34037 - DNA, 201 bp, Homo sapiens
aaattttggctgggcgtggcggcttacacctgtaatcttagtacttagggaggctgagacaggcggatcaactgacctcagaagttcgagaccagcctggrcaacatggggagaccctgtctctatagaaaacacaaaaagtagctgggcgtggtggtgtgagcctgtagtcccagctacttggggagctgaggcggaagg

SEQ ID NO: 34038 - DNA, 201 bp, Homo sapiens
cacactctatgaccaagcatttccagtattttcttattgatctgtaagagttctgaatatattctacatgaaagtcctttgtcagatttatgtgttgaacyatcttctcctactcttgtcttgccttttactctcttctgatatcttctgtctctttttctccttttctttaaacatctgttaaaatatttattagtatct

SEQ ID NO: 34039 - DNA, 201 bp, Homo sapiens
aaatgtaattggtctaaaaacatcaagtaaaaggcacagagatcatattttcctgcctgtagtcttccacgcttcgttgtattcttaacttaaacatttaytactttctttaggaagccttttctcacccaagatctagtcctgtgggcacaaatagcattctttatttctcctatcattatattattccgttgtgttgta

SEQ ID NO: 34040 - DNA, 201 bp, Homo sapiens
tttttaaatgtaattgttttttaaatgctaatgtttgtaaagcaccttcagttcttcggatgaaaggtgctatattccctcagtgtaaattaataaaaagrttacaggaagtttgtcaaaaaattcaatgcatagtctgtagtatgtcctgacaagaagttagcattttatataagaaattaaaaaatgcttattcctcca

SEQ ID NO: 34041 - DNA, 201 bp, Homo sapiens; identical to SEQ ID NO: 13009

SEQ ID NO: 34042 - DNA, 201 bp, Homo sapiens
aatgatctaaacttccctgttaaagacaaagattatcagtatgcctcttagaaaaacccaataatatactgtttttaagagactcttcgaggccaagagcrgtgactcacacctgttatcccaacactttgggtggctaagatgggaagattgcttgcggccaggagttcaagaccagcctgggaaacgtagcaagacccg

SEQ ID NO: 34043 - DNA, 201 bp, Homo sapiens
ctttacccttgctctatatttttttcctatatctctaagtttctttttttgattattttccttttgcttaaaggacactcttccttttgttctgctggtgrtgaattccatatatatttttttcttttcttttcttttcttcgtttcatttctttcattttgagctgggtcttgctctgttgcctccagtggtgtgcagtg

SEQ ID NO: 34044 - DNA, 201 bp, Homo sapiens
tggctcactgcaaccttcacttcctgagtggctgggattacaggtgtgtgccaccatgcctatctaatttttgtatttttaatagagatgctgttttgccrtgttggccaggctggtctcgaacacccaatccaagtgatccgcccacctcagcctcccaaagtgctgggattacaggcgtgagctactgcgctgggccta

SEQ ID NO: 34045 - DNA, 201 bp, Homo sapiens
tgtcactagggaatattcttctcatctatgttgattttttttttgagggggacttaaagtcagtgtcgcctgataatagcgtagctacacttcttcccttytggttgatgtttcaagatatgtattttccatactttgacttacaaccttttcaatcttttactcatgtatcagttttttttcttaaatccaatctgatgg

SEQ ID NO: 34046 - DNA, 201 bp, Homo sapiens
tattcactttgaaagctgtttttaggaggtcggtgatgtgaatggtatttagaattttagctttttaattatacccattttggaaggctaaacttagtgartgacaggtcattaaaaaagcaaaaaagaaacggcattgttccaggaaaggttcttggttgaaaattacagaccttaattccagccaacttaagcagaaaa

SEQ ID NO: 34047 - DNA, 201 bp, Homo sapiens
aaggttgcagtgagctgtgattgtgccactacattccagcctgggtgacagagtgagaccctgtctttctcttaaaacaaaacaaacaaacactgcccccsccaaccccaaaccaaaaaaaaacccagctagattactgcctcaaacttaatgtgcacacaagccatcttgaaagcttgttgaaatgcaaattctgatttt

SEQ ID NO: 34048 - DNA, 201 bp, Homo sapiens
agcctgggtgacagtgagaccctgtctcaaaaaaaacaaaacaaaacaaaacagttgagaccattctattgacgtatcaacaaaaactttttaaatgaaamattttaaatttacagaaaattaaatagaataattaatccccacattctcatcacctaacttcaacaatcatgaattgatggccagttatatactttacgt

SEQ ID NO: 34049 - DNA, 201 bp, Homo sapiens
tgttatgaatattgtctaatggaatcttcataatacctttatgaggggtaaataatataaactctgttttggagttgaagaaatcccaaagctgagaaaakttaaaaacatgcccaaagtaaaatagctagtaattcaagtcattccttgagaggtagatctgataaccaaaatcaatttctaaaaattgttttagtgatt

SEQ ID NO: 34050 - DNA, 201 bp, Homo sapiens
attcttttgggtctcataatatttttttcaaagagtgatttttaatcactgggtaggggaaagcctgaaaatacgtttacttatgttttaaggaaaaggaraggtaggatctatgggatttgaaatactgggataactcgggatcagacaaccctatttcacaatatttgtgtttttatcttaggatgcatactatgaggg

SEQ ID NO: 34051 - DNA, 201 bp, Homo sapiens
tgagccgagattgcaccactgcactccagcctggtgacagagcaagactgtctcagaaaaaaaaaaaaaagactatctactatcccctgtctcttgccctytttagttttcccttctggcactggcattgaaacaaattcatgcagatctgtatgccttaagcagtgaaagtaatttgttcttttgccctgaacacgtcat

SEQ ID NO: 34052 - DNA, 201 bp, Homo sapiens
tcctttggcttccttttcttaaactctctgtcctcatggtattattcagtttctttatacattgatcaacaagaagtttggtacctatgcatttctctttkcattattattataacatgtaactttttttctttgagttagagtctcattttgtcacccaggctgtagtgcagtggcacagtcatgttcattgcagcctag

SEQ ID NO: 34053 - DNA, 201 bp, Homo sapiens
gcggaggttgttgtgagcggagatcgtgccactgtactccagcctggtcaacaggagcgaaactccatctcgaaaaaaaaaaaaaaaaaattagctggacrtggtggtgcatgcctataatcccagctacttgggagcctgaggcaggagaattgcttaaacctgggagcagaggttgcagtgagccgggagatcatgcca

SEQ ID NO: 34054 - DNA, 201 bp, Homo sapiens
ccactcaatccctaggcacccactatgctcagcagcactgtgcttttgtatataaatggtgggttataaaagactgcatggaggcattatggaatagcacmggctttgggatcagatctgggtgaaaaccccagctctgtcatgcagtaatagcaactaacctgtatacagcatatgtgctaaattgttatgttctctatt

SEQ ID NO: 34055 - DNA, 201 bp, Homo sapiens; identical to SEQ ID NO: 12993

SEQ ID NO: 34056 - DNA, 201 bp, Homo sapiens
acagttttgacatgtttttctcaagaacactttgtggttgactgttgtaagctttccaactaaacagtgacattttggggaaagccccactcttgtaaatmtccttaatttccttgcatgtcttgttcagacttgtctaggggcgtttgcatggcacatgtaaggggtgcagatgctggagtgtacatttttcatatcttt

SEQ ID NO: 34057 - DNA, 201 bp, Homo sapiens; identical to SEQ ID NO: 12994

SEQ ID NO: 34058 - DNA, 201 bp, Homo sapiens
acattcagtcttaatcttcgtagaaattgtgtggaaaagcatacatttttataacgtgtactcgtttaccaggctttattgagtgcctgctatgtaatagmccttcgaaagcatagagaagtttatgttacctaagcaataaatatcaaagatgtttaacagatgtcacaatgccaaaggagggttgggttattgttttac

SEQ ID NO: 34059 - DNA, 201 bp, Homo sapiens
ttgtggtaacccgacctttctatctggctgcccttaacatttcttccttcatttcaactttggtgaatctgacaattatgtgtcctggagttgctcttctygaggaatatctttgtggcattctctgtatttcctgaatctgaatgttggcctgccttgctagattggggaagttctcctggataatatccgcagagtgtt

SEQ ID NO: 34060 - DNA, 201 bp, Homo sapiens
gccttgtggctgggtatgctggctcactcctttaatgccagcactttgggaagctgaggcaggcagatcacttgatcccaggagttggagaccagctgggyaacatggtgaaaccctgtctctacaaaaaatacaaaaaattacttgggctgtggtggcacatgcccatagccccagttacctgggaggccgaggtaacag

SEQ ID NO: 34061 - DNA, 201 bp, Homo sapiens
caataaggaagtattccacaatttcacagttcatttaaaaggcaaaaatcttcactcctcaaaaggaacaagttctctctgcactgtcttgacagctaagrattatgtcgagaccaggaggaataagtagtttgttccagcaacctcaaggttagtgtctgtcactaagcatagaccactcccagaacatctcattccatg

SEQ ID NO: 34062 - DNA, 201 bp, Homo sapiens
ataacccctttttaataaatgtcattatagaatctaccttaacatgatgagtctgttttcatttctcagttgacaggcccattagcactgctttgatgatygtagacacaatgcattctacggaaagggaaatcctgaaggggttgcaggtggcctatatggttcctttgtgcaaattagaaaaaggccgcccctctaggg

SEQ ID NO: 34063 - DNA, 201 bp, Homo sapiens
atagtcaaagtactatttgttttaaaggcttgcctcccaaacacttcatttggtcagactcatttataacttaaaaatttgatcttggttttagataaacrattaatactaaaggatttattgttcttgcagcttcacttgtcttaataatgtgtagcattgtattataacttgtatatgtgaatgaatggttttcagaag

SEQ ID NO: 34064 - DNA, 201 bp, Homo sapiens
tgggcatggtggcacatgcctgtaatcccagctactcaggatgctgaggcaagagaatcacttgaacgtgggaggcggaggttgcagtgagccgagattgygccgttgcactccagcctgagtgacagagcgaaactcacatacatacacacacacgtatattaaatgagttaaatgtttgaaagtgtagttagtaatctt

SEQ ID NO: 34065 - DNA, 201 bp, Homo sapiens
ctagaaacatagagcatcttcccctttaaagttgctggtagaagctggatcgggaattggttaggggagaggtagttgtagttagtttttttttttttttwaatttcagtagttttttggggaacaggtgtgtttggttacatgaataagttctttagtagtgatttatgagattttgatgcacccatcacccaagcaata

SEQ ID NO: 34066 - DNA, 201 bp, Homo sapiens
ccatcactacagtcaattttagaacattcattatccccaaaagaaccctgtacccattagcagttattatctttactttttaaatgcgggaaataaacctrcatagaaagaccagaaagactttatgctcttgaactgtataaactgactccagcctacctgttgtaccttttgttgttgttgttgttgttgttgttgtta

SEQ ID NO: 34067 - DNA, 201 bp, Homo sapiens
gatatctctttcccatggccctaggtaaattatactctaaatttatttattttttttgaaacagagtcttgcttttgttgcccaggttggagtgcagtggsgctatctcggctcactgcaacctccgcctcccaggttcaagcaattttcctgcctcagcctcccgagtagctgggattacaggtgcccgccaccatgcct

SEQ ID NO: 34068 - DNA, 201 bp, Homo sapiens
acaagttaccttttggaagtatacaactcagtggtttttagtatcctcacaggttacgtgcacccatcactacagtcaattttagaacattcattatcccyaaaagaaccctgtacccattagcagttattatctttactttttaaatgcgggaaataaacctacatagaaagaccagaaagactttatgctcttgaactg

SEQ ID NO: 34069 - DNA, 201 bp, Homo sapiens
ctcaaatgatccacccaccttggcctcccagagtgctgggattacaggcatgagccactgtacctggcccagtttcaatccacagagttcattctaacttyttccatttccatatttgcatctcccttctctgccaagtgagaactctgggtcccattgcctttaataaatcttttttaaaaaagaattttttttttttta

SEQ ID NO: 34070 - DNA, 201 bp, Homo sapiens
aggtgatccgttggcctcggcctcccaaagtgctgggattacaggcatgagccaccacgcccagcctaaacatacagtttaataaatcctccttgtacctyacccagcttctgtatttctttaatcaagggagaagaattatctaaaaggacagttgcccaatgggcttgagctgatgatagtggcaaagaatttcatttt

SEQ ID NO: 34071 - DNA, 201 bp, Homo sapiens
ttttattaatcatattgtcaactactggcagcacacgttttaaatgctgatcatagatgatagtattatctaacttttttgtgttttcactaggtgctgtrtattcttaggtcgttacctgtattaactcagtaactcttgtcatcaaacctatggtctaggctctattattattatctccattttataaatgaggaacta

SEQ ID NO: 34072 - DNA, 201 bp, Homo sapiens
tagtcaggataatgggaaaagcgacaaatcggatttatgtattaggtattatggagctttctttagcactctcctccaagtttaatctctgacatgtgtgrtatagtaactttctgtctctgagaagcagtttggacccagctgaaaaattttatttatggagacttgtaatcagcctgatatacagagaacactctggac

SEQ ID NO: 34073 - DNA, 201 bp, Homo sapiens
tttattagagaagtaaagaaagaaaagaatggctactctgtaggcagagcagccccgagggctgctggttggctaatttttaaatttttttgtagagacarggtctcacttcgttgcccatgctggtctcgaactcctggcctcaaatgatcctcctgccttggcctcccaaagtgctaggattgcaggcttgagtcactg

SEQ ID NO: 34074 - DNA, 201 bp, Homo sapiens
cagtgattcaaaaccacctccccaccctgagtaaaagatttgatatgaatatgaatgctatgagtctcctggtgatgttttgggtgtatatgttcctgtgwgtgtttggaaatcatagagggtatttaccttgagggctcttttgttgaccttatttatttgaaattcttattttatttgtaatggcatatgtatattttt

SEQ ID NO: 34075 - DNA, 201 bp, Homo sapiens
ataaaagggcttacactatgaagtagtattggctaaaacatccctctcacctggagtcctcatttttcagaggcaatcacttttgactctttctgattttrgttttcctggcatttactttcatttctcaaatatacttttatcactctttcttcgtttattaatttatacattctcctttgatatcctgccacaataaat

SEQ ID NO: 34076 - DNA, 201 bp, Homo sapiens
cttgaccttgtgacctgcccaccttggcctcccaaagtgctgggattacaggcgtgagccactgcacccggccccagattgctacttctaaaaattaagcmgaatgtaagagggggaagaaatattgtcactgtcacagtatacatactgagagctatgaaaccaatgagtaaagatcagttggccgggtataaaaaactt

SEQ ID NO: 34077 - DNA, 201 bp, Homo sapiens
taaatcagaaaatatttatatattacagcttactgttaggagccctagtatagcattttagatcactttttatgtacttttagcctgcgtacgaagtcctsttcctttataaccctttttacttgacacctgaaataaaacactggcttctagttctgttttctcccttaacaggatgtattactgagatttattaatttt

SEQ ID NO: 34078 - DNA, 201 bp, Homo sapiens
cattagaaaaaggatgatcataggagttttcctatggacaaattttaaaaaatttaaaccctattttgaaaaagaaactggtgtctttataactgatttaractggaatagtagatgttctaaattcttttgaggaaaatagtatagaagttagccaatgttgttcatagctataaatcagaaaatatttatatattacag

SEQ ID NO: 34079 - DNA, 201 bp, Homo sapiens
tgcagcagctgctccagatgggctgccaccaccatcataatcccagctacttgagaggctaaggcgtgagaatcgcttgaacctgggagggagaggttgcrgtgagtggagatcgcaccactgtactccagcttggacaacagagtgagaccctgtctcaaacaaaaatattagctgagtgtggtgccatgcacctgtagt

SEQ ID NO: 34080 - DNA, 201 bp, Homo sapiens
gggggcagggagcttcttaagaccctgagaacacagggaagcatgggtccaaagctgcagctgggtagctgcagctgcacccaggagcgctgggctcccasccctccaactcagtaggtggcccggcttccacctgttcctggcctccacccattctgtggagcatgcagccctggccacaacttccccactgcagtcggc

SEQ ID NO: 34081 - DNA, 201 bp, Homo sapiens
gggaggccacggatgggcctggaaaaagcacctcgagttctcactctgggccatggacttcaaccagaactggcagccttatccccccaggcccgcctccyatgctcgtcattacccaaagtctggagagggctgaggcagcagggggcttgtgaatcagtgccgtcatgagcacacccagtcagttgtgacaggtcccag

SEQ ID NO: 34082 - DNA, 201 bp, Homo sapiens
atttgatggttaccatattactgtatcagtttgctatggctgccataacaaggtgccatagactgagtagcttaaacaacagaaatgcattttctcacagytctggaggccggaagtccaagatcaaggtgtcagcaggttcagtttgttctgagccctctctccttggattgcagatggatgcctccttcctgtgccctc

SEQ ID NO: 34083 - DNA, 201 bp, Homo sapiens
aatattttaattcctttaaatgaaatcaaattctgcccttgggggcaggtgtggtggctcgtacctgtaaccccagcactttgggattctgaggtgagagsgtagtttgagctcagactagcctgggcaacataatgagaacccgtctcaaaaaaaaaaaaaaaaattctgccctgggaccttctccccctcaattctacc

SEQ ID NO: 34084 - DNA, 201 bp, Homo sapiens
ggtctcgaacacccaatccaagtgatccgcccacctcagcctcccaaagtgctgggattacaggcgtgagctactgcgctgggcctaatcttgcccttttytggggggggtggggggttataattaaaaccattctattatttgacttcattagtacttacacagtgttttacattttttttttttttttttttgagacgg

SEQ ID NO: 34085 - DNA, 201 bp, Homo sapiens; identical to SEQ ID NO: 5465

SEQ ID NO: 34086 - DNA, 201 bp, Homo sapiens
gatggagacagatcgtgcccagaatagaagcagtgtcccagtaagtgtctgttgtgttctgatcccaagatacatgcactcccacgacacactcatgactctgtgctttggggtccccagttccaagagcttcagctggcagctggcaggcatggggacgacctcaaaaacaccaagaatgaaatctcggagctcactcgg

SEQ ID NO: 34087 - DNA, 201 bp, Homo sapiens
cccccctcaacgtggagctggaccccgagatccagaaagtgcgtgcccaggagcgagagcagatcaaggctctgaacaacaagttcgcctccttcatcgayaaggtgggtcttctagggcctggggaacttgtgaacagccctcctcttctcttcttggaacatacgattttgttacaccaggagagattgaggttagatg

SEQ ID NO: 34088 - DNA, 201 bp, Homo sapiens
acaggagccggtcctcaggacacccaactggagggtgcctgcagcagtccaagccagatacagcagcccagagagggaaccaccaggggctgctgggggtyaagccggctgtagacatggaggttggcaccctcaggacacctctggggctgaggagagcagcaggttcccatggcacctgggcgtcttgccgaggtggcg

SEQ ID NO: 34089 - DNA, 201 bp, Homo sapiens
agaaatgaggaagtggaccacccaggaatctccataaccctccaggccatgggccagcctctgtctttgtcttctctgtacctccttccagtcaagtcccygaatttctcagccacctgccccaactccatcctccttttctcgtcctcattttctccagtgtttgaagcctccagcctgctttattatgggtgtttgagg

SEQ ID NO: 34090 - DNA, 201 bp, Homo sapiens
cataaccctccaggccatgggccagcctctgtctttgtcttctctgtacctccttccagtcaagtccccgaatttctcagccacctgccccaactccatcytccttttctcgtcctcattttctccagtgtttgaagcctccagcctgctttattatgggtgtttgaggggggtgaagtgaggatagtgcccgtggttggc

SEQ ID NO: 34091 - DNA, 201 bp, Homo sapiens
actgcccatccacaagccccagtgccaagcacatataaaggcacctgccagtcctcactacaaccagcagaaccttttgggattttgccttcctccctccygcatctgagctttgtctccaccagcaacatgagccgccaattcacctgcaagtcgggagctgccgccaaggggggcttcagtggctgctcagctgtgctc

SEQ ID NO: 34092 - DNA, 201 bp, Homo sapiens; identical to SEQ ID NO: 5471

SEQ ID NO: 34093 - DNA, 201 bp, Homo sapiens
cctggggcctgtgtgcccaactgtatgcccacctggaggcatccaccaggttaccgtcaatgagagcctcctggcccccctcaacgtggagctggaccccragatccagaaagtgcgtgcccaggagcgagagcagatcaaggctctgaacaacaagttcgcctccttcatcgacaaggtgggtcttctagggcctgggga

SEQ ID NO: 34094 - DNA, 201 bp, Homo sapiens
ctgcccagagggaggggaaggaggctgaaaggcttggacagttcccaaataatttcagtctccagagatcagtcccttaacctcaggcagccagagaagaygggtaaatcctttcggcatccagatgtgttcagtagtgcaggtgtgtattgtggtgtctcagatgcaggatttactctgtggttaatgctcagcctcgta

SEQ ID NO: 34095 - DNA, 201 bp, Homo sapiens
cgagtttgtgctgctcaagaaggtgaggggaaggcaggccctgagtcccgggggctggcctgggacctggaggaacagagcctgccaaggtgctctgttarcccccctcaaggtgaactgattcaggaagagcaaggtgaaggcagagaaaacttgatgaaagactatccagaaaaaagaatgaaaaggcagggagggtgc

SEQ ID NO: 34096 - DNA, 201 bp, Homo sapiens
ttcatctaggggaggctggtgggttaaactctattctaggggctgcaggagacatggaggccccagccctcagtgagacccctcagttagccaaccatctyccgcatcagacttgcgaggctcctaggtctgcacactctgagtgggaagggaatcggccaggcccttgctccacggcagtgggaatctctctgggcccag

SEQ ID NO: 34097 - DNA, 201 bp, Homo sapiens
tcgctgatgctgagcagcggggagacaacgccctgaaggatgcccgggccaagctggacgagctggagggcgccctgcaccaggccaaggaggagctggcrcggatgctgcgcgagtaccaggagctcatgagcctgaagctggccctggacatggagatcgccacctatcgcaagctactggagagcgaggagtgcaggt

SEQ ID NO: 34098 - DNA, 201 bp, Homo sapiens
gtgccagcatacagcaggcactcagtagaagtccaccaaaggaagaaaggaagggtgggagggaggcaagggttctagaaccaaactggagtccacttgcycggcccaggaagaccagatatctacaccgaggtttgcagcagtggaaaggaaggcgtttatttgcagggcaccaagcaagagggaccaggcagctaatgc

SEQ ID NO: 34099 - DNA, 201 bp, Homo sapiens
actctgtcgtccaggctggagtgcagcggtgcgatctcggctcactgcaagctccacctcctgggttaacgccactctcctgcctcagtctcccgagtagytgggactacagacacgagccaccatacccggctatttctttttttgtatttttagtagagatggggtttcaccatgttggccaggctggtcttgaactcc

SEQ ID NO: 34100 - DNA, 201 bp, Homo sapiens
ggcaaattaccctataacagcaggttaattagataagacccaaattacatgagcaaagcttgcaagcccagcaatttgaaggtttcatgttgtttcagagrtggagagggcttgatctctagctcagcatagagaaaatgacttcttgctcccaggcaagccaaacccacgaattaagctcttgactgcccatccacaagc

SEQ ID NO: 34101 - DNA, 201 bp, Homo sapiens
caggcatcccttttggtggggtttgggtttctgacaaacaactctgggacatatgttaaggtgctatctttagtttctatggcggaaccaaacatcccacrattccagctttcgtggctgttgttttgggctactgttatcttcttgcttgtcaggttgcttatttatttctccaggctagcaaggtgcccagaatttccc

SEQ ID NO: 34102 - DNA, 201 bp, Homo sapiens
agtactctacccagtgtcctgaactatccaggaaagtccatcctgtcttcacctgctgcatccccaggaggaagccaacaacccagagaagattaatcagratagggatggtgcagtgccagtgacatccccctggagaggccagggcctggggcaaattaccctataacagcaggttaattagataagacccaaattaca

SEQ ID NO: 34103 - DNA, 201 bp, Homo sapiens
atctggagaagactctgctagccttacaaagaaaaactaagatgacatgtgacatggcttcagaggatccccatgggagctgtcacagagttgcagccccwccagcacatgctaaggatgtgttcagagcggagggaggtaaggagagctcagacctggcctgtgtgggtgcaggaagacctcctggaggagagcaggatg

SEQ ID NO: 34104 - DNA, 201 bp, Homo sapiens
ctttgagggcaggaaactttttatggcccccctcagcacttggtaggtacccaataaatatttgataaaagatcaataccaaaaaatctgagataatgttygtaaagtgcctcctactgagttttgtacttggctagcacttattagatggtggctgttatttttatttatttatttatttatttttgagatggggtctca

SEQ ID NO: 34105 - DNA, 201 bp, Homo sapiens
ttctcagccacctgccccaactccatcctccttttctcgtcctcattttctccagtgtttgaagcctccagcctgctttattatgggtgtttgaggggggwgaagtgaggatagtgcccgtggttggctctggcctgggctgcttctgtcccatgctagcgagagggtcactccacctcctaataccccatgagtgagagc

SEQ ID NO: 34106 - DNA, 201 bp, Homo sapiens
acctgctgcatccccaggaggaagccaacaacccagagaagattaatcaggatagggatggtgcagtgccagtgacatccccctggagaggccagggcctrgggcaaattaccctataacagcaggttaattagataagacccaaattacatgagcaaagcttgcaagcccagcaatttgaaggtttcatgttgtttcaga

SEQ ID NO: 34107 - DNA, 201 bp, Homo sapiens
acaagttcgcctccttcatcgacaaggtgggtcttctagggcctggggaacttgtgaacagccctcctcttctcttcttggaacatacgattttgttacascaggagagattgaggttagatgtgaggaagactttactgtggacaaggtaggtacatcccatcaacagggtgacctgtgtaaggttctctgtgttgtctt

SEQ ID NO: 34108 - DNA, 201 bp, Homo sapiens
ttctcagggctcccagcaagagatgtggtccttcctcttgagggctagcttggtgccattgctaggcctgcaggccgtgtgcagaaaaggcctgtgagagmcagtctcgcccagagtaagcagggaagctgtcctcctcccctggcatgctgccctgcccactggtcacttgcccagcggatcaggagcagcaggaagggg

SEQ ID NO: 34109 - DNA, 201 bp, Homo sapiens
tggaggtaaatggcattcccagggtcatttggggaaagggaagggtgaggctggaccctcagccttttgcctccagacccagaggaggagactggagggtkctgttggctctgtggcagtcaggcaccaaggacgggtcaacccaggacaaagtctatgggtgagacggtcatgtggccatcagagcttagccagctcctg

SEQ ID NO: 34110 - DNA, 201 bp, Homo sapiens
gctcggctggtcaaaacctacagaaggataaagtctggagacatgggaagaaagatgaacatgaggagggtcacatcctgtttataaagatggtctgcccmgagggaggggaaggaggctgaaaggcttggacagttcccaaataatttcagtctccagagatcagtcccttaacctcaggcagccagagaagatgggtaa

SEQ ID NO: 34111 - DNA, 201 bp, Homo sapiens
acccctaaatcttcccagatctcagttaaagcgggactggggggattgggggtttagtccccctagtgagctgtggccctgtcctggtttccttcagtctstccttttttccctcccgaaaaacacaggcacctcaggagccccacctaggccctcccttcctgtgggaggtccccaactctccttcctcctctatcactg

SEQ ID NO: 34112 - DNA, 201 bp, Homo sapiens
gcacacagaaaaataccaggatctcctgcctgtcaggaacaaggatggcgatgatgagggtgacgacgatcctgcaggagcgatgccttgcaggggtgagrggcctggctctgggcccagcctccagcagggctgccacacttagcaagttctttaatcttcttgagtctcttttcgcttctgtagaagtgaggataataa

SEQ ID NO: 34113 - DNA, 201 bp, Homo sapiens
taataataataactacttctttgcatctttttgtttgagacataaaatcccaggcccatagtaagagctcaataaatgttagctatagcaataaatgattrctattattagatacaataatacctaccctagaaactgtgggtaatttttaggggttcactggggactctagtcctaaatcgatttcccagcagcgggagt

SEQ ID NO: 34114 - DNA, 201 bp, Homo sapiens
ggagatcactcagatccagtcccacatcagtgacatgtctgtcatcctgtccatggacaacaaccggaacctagacctggacagcatcattgacgaagtcygcacccagtatgaggagattgccttgaagagtaaggccgaggctgaggccctgtaccagaccaaggtgagctgggctgaggtggggccagggagggtgat

SEQ ID NO: 34115 - DNA, 201 bp, Homo sapiens
cagttttctctccatagcagagggtaatgatttgcccacctctttcagctctattgaggagaaaatgcagatagaagctttacacaatgccctgtgagagrcacgtgtgactattactgcaagggttcagcagtttctgggatctgggttccaggtgcggttcctggagcagcagaaccaggtactggagaccaagtggga

SEQ ID NO: 34116 - DNA, 201 bp, Homo sapiens
acaggttccagcatgagaaggcagggcttgatggacaattttgggagcaagtgagggctctgaggaaaggaaataatgacaatgactagcaggcaaggtgkccaccatgtgaatctacatggtaatttggttatggctgccaagagtagtagttctttaaacaggctgaaaaataacccaggaacttagaaaaatattgct

SEQ ID NO: 34117 - DNA, 201 bp, Homo sapiens
acagtgaaggcccaatgcttgacaattgccacttgggagagagcccttctctcttccagttactcccacagaaaggacttactggtcctttctggcaactmtcctagtgccagtgaccagagactggattgccttcaccttcatattcccagcacatgcctggcacccatttgcactcagcatgagctgatggcctatctc

SEQ ID NO: 34118 - DNA, 201 bp, Homo sapiens
ctgggggtcaagccggctgtagacatggaggttggcaccctcaggacacctctggggctgaggagagcagcaggttcccatggcacctgggcgtcttgcckaggtggcggaggcctcccagccttggccactgctcagctccttctctccatctgcagagcctcgcccccatggcttgtcctgcacttcaaacccagagta

SEQ ID NO: 34119 - DNA, 201 bp, Homo sapiens
ggtggatcctctcagtgttgggggtgtctggacagtgcctaggactcagctccacttttgccttccttgaagccctggtccagaggtggctagagcaatgsaggaggtgtgggacccacaggaagcaatggggacagggaggagttgggagagggaggaggtggtggactgaggtggaactggggtgtggagggtgggcgt

SEQ ID NO: 34120 - DNA, 201 bp, Homo sapiens
ctgggcctttgctcctttgtctcctttcccaaggcaaagtgaagagaagagagtgactccttcttcactcagggaacccaggcagggatggctgctgcctytttggctgtaccagcagtgacaggggatggtgggggcatctttcaggatgtggatgctgcttacgccaataaggtggaactgcaggccaaggtggaatcc

SEQ ID NO: 34121 - DNA, 201 bp, Homo sapiens
gggtaatgatttgcccacctctttcagctctattgaggagaaaatgcagatagaagctttacacaatgccctgtgagagacacgtgtgactattactgcargggttcagcagtttctgggatctgggttccaggtgcggttcctggagcagcagaaccaggtactggagaccaagtgggagctgctgcagcagctggacct

SEQ ID NO: 34122 - DNA, 201 bp, Homo sapiens
gacaactgcccttgtccctccaagggacccctggcagtcaccccagcttaaatgctttggaggtcagtggagggcattgttcttggtcatatcaagcagartcaccccaacaaaactctggaacttgctctctgctcctccagcctctggcctgactcttaggacaaatgcccagtgagctgggcagtgggcagagggtta

SEQ ID NO: 34123 - DNA, 201 bp, Homo sapiens
tggcagtgtggccctggggcctgtgtgcccaactgtatgcccacctggaggcatccaccaggttaccgtcaatgagagcctcctggcccccctcaacgtgragctggaccccgagatccagaaagtgcgtgcccaggagcgagagcagatcaaggctctgaacaacaagttcgcctccttcatcgacaaggtgggtcttct

SEQ ID NO: 34124 - DNA, 201 bp, Homo sapiens
agcacctgtatcttctgatggacacgctgctccttgctcaacgctgccctgtgaaagcaagggctttcagtgagatattaaccaatgagccctcgccattyccacaggtatgaggaggaaatcaacaagcggacagcagcagagaacgagtttgtgctgctcaagaaggtgaggggaaggcaggccctgagtcccgggggc

SEQ ID NO: 34125 - DNA, 201 bp, Homo sapiens
agctcagacaccacaggcgcttcattcctgccgagggaacagattcccagggtggggtggggtagggctgggcctttgctcctttgtctcctttcccaagrcaaagtgaagagaagagagtgactccttcttcactcagggaacccaggcagggatggctgctgcctttttggctgtaccagcagtgacaggggatggtgg

SEQ ID NO: 34126 - DNA, 201 bp, Homo sapiens
cccagccctcagtgagacccctcagttagccaaccatctcccgcatcagacttgcgaggctcctaggtctgcacactctgagtgggaagggaatcggccargcccttgctccacggcagtgggaatctctctgggcccagcagggaacttgctttgccgcaaagcacacagccctggatggcagcagccttgggttccagc

SEQ ID NO: 34127 - DNA, 201 bp, Homo sapiens
ctccttcatcgacaaggtgggtcttctagggcctggggaacttgtgaacagccctcctcttctcttcttggaacatacgattttgttacaccaggagagaytgaggttagatgtgaggaagactttactgtggacaaggtaggtacatcccatcaacagggtgacctgtgtaaggttctctgtgttgtctttccagagaga

SEQ ID NO: 34128 - DNA, 201 bp, Homo sapiens
gtctgcacactctgagtgggaagggaatcggccaggcccttgctccacggcagtgggaatctctctgggcccagcagggaacttgctttgccgcaaagcamacagccctggatggcagcagccttgggttccagcctccaagatggcatcaccagaatttgctcatcttgtttgggggtggtggttggcttccgacagcag

SEQ ID NO: 34129 - DNA, 201 bp, Homo sapiens
ttggccttggcctgtggtcaagtgcaggggagcatgagtagaggggagatgagctgctgagaacatgggcctcccagatcgctgcctgggagaagagagarggccagtgaggtcgctgcctcaaacacctggagcaggacgtccctgggggctactcatctctgactcactccaaggacctcagcctcgaagcccctcctt

SEQ ID NO: 34130 - DNA, 201 bp, Homo sapiens
tcttggacaggttacttctgctcacttcacagggtgttgcaaggactaaatgcgttaagttatgtcaatggtatgtacagtattgagcctggtgctggcawacactaagtgcttggcaaataacggttgctcccggggtgtgtccttccctgtccccctcgactgtggtgccctgttcctgggcagctgctgcctttgcgt

SEQ ID NO: 34131 - DNA, 201 bp, Homo sapiens
acttcacagggtgttgcaaggactaaatgcgttaagttatgtcaatggtatgtacagtattgagcctggtgctggcatacactaagtgcttggcaaataayggttgctcccggggtgtgtccttccctgtccccctcgactgtggtgccctgttcctgggcagctgctgcctttgcgtctgccacagcatattcgaccatc

SEQ ID NO: 34132 - DNA, 201 bp, Homo sapiens
tgcgtgcccaggagcgagagcagatcaaggctctgaacaacaagttcgcctccttcatcgacaaggtgggtcttctagggcctggggaacttgtgaacagmcctcctcttctcttcttggaacatacgattttgttacaccaggagagattgaggttagatgtgaggaagactttactgtggacaaggtaggtacatccca

SEQ ID NO: 34133 - DNA, 201 bp, Homo sapiens
ccaactcctgtgtccccagcactgagcatggtgccagcatacagcaggcactcagtagaagtccaccaaaggaagaaaggaagggtgggagggaggcaagrgttctagaaccaaactggagtccacttgcccggcccaggaagaccagatatctacaccgaggtttgcagcagtggaaaggaaggcgtttatttgcagggc

SEQ ID NO: 34134 - DNA, 201 bp, Homo sapiens
tctatcgcacttcatcctcaccaagaccctgagaggcaacagttgccctcgctgttgttacagatgaggaaactgaggctcagagaggataagggggttayacagctggtaagtggcagagctgtgatctgaaccaaggtctcctgactcctagtccagtgctccttctattcttttgtgggctttaacacttagttgctt

SEQ ID NO: 34135 - DNA, 201 bp, Homo sapiens
ggctagagacaaattttcggggaataattctatcttgacactgaatcttagatagttttcccatgtcttgtgtttctgatgttggggaagacaaccttatwcaagcagtagctgtgctcatgtagattaagggaagtcacattttaaaaactgtgctccccatccccaaaaaccaaacaagaggtgtgtatggacatctcc

SEQ ID NO: 34136 - DNA, 201 bp, Homo sapiens
tgtggccatcagagcttagccagctcctgcagctcagacttcctgcctggaggagtccctgctgccctcggctcagcctcaggggctaggactggctctgyggcttcttattcttctaagccttttcatatctgcaagatcaaagtgttctgagatggggtctgggtgatgggagtggactgattgattcttggctcggct

SEQ ID NO: 34137 - DNA, 201 bp, Homo sapiens
ttctgccataactatttcttattccctccatacttgactagagtacaattgcagtccacagctggtgctagtgaaagcggtagagaaatccactgatgatscagaaatgaaggctacaccataacacagaaacttcaggatcacagctgagccaaatgggaaccagctgccctcactcgatccagatttttttgtttgttt

SEQ ID NO: 34138 - DNA, 201 bp, Homo sapiens
atacactaagtgcttggcaaataacggttgctcccggggtgtgtccttccctgtccccctcgactgtggtgccctgttcctgggcagctgctgcctttgcrtctgccacagcatattcgaccatctctcctcccagacctaaacaactcaagagtattgctgtcattcatttcgtgcccttggcacaatatggctgaataa

SEQ ID NO: 34139 - DNA, 201 bp, Homo sapiens
ccctcgactgtggtgccctgttcctgggcagctgctgcctttgcgtctgccacagcatattcgaccatctctcctcccagacctaaacaactcaagagtaytgctgtcattcatttcgtgcccttggcacaatatggctgaataaatgtctctatgctgaactaaagtggcgctcaggagggcatggctgcatgatttcca

SEQ ID NO: 34140 - DNA, 201 bp, Homo sapiens
agctactggagagcgaggagtgcaggtgggcggggcgtgcccagacaggagggccccaggggtttgggaagacccaaaggagaaagcctaacacatctcartccagaagagatgagttcttaggaagtgatggggtgatgaggatagaaataatcacagtaattaacaatactaccatgagtggacatgagtatccactca

SEQ ID NO: 34141 - DNA, 201 bp, Homo sapiens
tctctggaatgtgggggagggaagctcaggggaggaatcaaaggtgtctagagacctgaagagatgacacagtccagataggcccctgacttctggcagaraagaaatgattatccctatcgtatgagtcactgaaggcatggaggtaaatggcattcccagggtcatttggggaaagggaagggtgaggctggaccctca

SEQ ID NO: 34142 - DNA, 201 bp, Homo sapiens
caatactaccatgagtggacatgagtatccactcagtagactgtgagagcttgcttcatggcaggcactatgctatgtagtaagctatgcagatttgctcrttcttcctgggcatactagaaacaaccaccgccctgctccctgcaaaaccccattactctattaggcattcttgttccctcttcctgatctgtccatgtg

SEQ ID NO: 34143 - DNA, 201 bp, Homo sapiens
ggcactatgctatgtagtaagctatgcagatttgctcgttcttcctgggcatactagaaacaaccaccgccctgctccctgcaaaaccccattactctatyaggcattcttgttccctcttcctgatctgtccatgtgcagcttgttgggggtgtgccggggcagccaccccagcttccccagggctctacagggatggca

SEQ ID NO: 34144 - DNA, 201 bp, Homo sapiens
tgggtgtccaggaggacaggtaggggtattggtacctggaccaaggagtagggcctctgagcattaatggggcaagactcagccagattggatataagccraacaagccaaggacagagcattagggaagctgtctttggtacattctccccagggagagggagcgggtgtgcacctccccactcagcttctccaagaaaa

SEQ ID NO: 34145 - DNA, 201 bp, Homo sapiens
tactgcatgctgcccgcagaggctgtggcctgttgtcacttccaggccgtggaggtggatcctctcagtgttgggggtgtctggacagtgcctaggactcrgctccacttttgccttccttgaagccctggtccagaggtggctagagcaatgcaggaggtgtgggacccacaggaagcaatggggacagggaggagttgg

SEQ ID NO: 34146 - DNA, 201 bp, Homo sapiens
tgcacctccccactcagcttctccaagaaaagccctgtctgccctggggaaaaggaggcctccccagctctctgcctgagtgggtgttggcttcggctccycctgcagccatcatcagcagcaccagtggcggcagtggctatggcttccggcccagcatggtcagcggtggctatgtggccaacagcagcaactgcatct

SEQ ID NO: 34147 - DNA, 201 bp, Homo sapiens
cttcatattcccagcacatgcctggcacccatttgcactcagcatgagctgatggcctatctctcctccccatggggctttgactccaggctttccctgcrgacactgacaggagccggtcctcaggacacccaactggagggtgcctgcagcagtccaagccagatacagcagcccagagagggaaccaccaggggctgc

SEQ ID NO: 34148 - DNA, 201 bp, Homo sapiens
ctgccctggggaaaaggaggcctccccagctctctgcctgagtgggtgttggcttcggctccccctgcagccatcatcagcagcaccagtggcggcagtgkctatggcttccggcccagcatggtcagcggtggctatgtggccaacagcagcaactgcatctctggagtgtgcagcgtgagaggcggggagggcaggagc

SEQ ID NO: 34149 - DNA, 201 bp, Homo sapiens; identical to SEQ ID NO: 5474

SEQ ID NO: 34150 - DNA, 201 bp, Homo sapiens
tgcgtccttgattgataagatgaggcatgtgtgtgtgtgcatgcatgtgtgtgtgtgtgtgtgtgttcagtactgggcacagacattgccatttcctcagygaaggcaccatgcacacctgctgcctttgctagcctcctgcctttgcaacagtagggaccgaggttggatagcagaaagaactttccagttgagaggcta

SEQ ID NO: 34151 - DNA, 201 bp, Homo sapiens; identical to SEQ ID NO: 5475

SEQ ID NO: 34152 - DNA, 201 bp, Homo sapiens
tcttgtgtttctgatgttggggaagacaaccttattcaagcagtagctgtgctcatgtagattaagggaagtcacattttaaaaactgtgctccccatccscaaaaaccaaacaagaggtgtgtatggacatctccttctggccagtttcctgcctcagtgaggggctacaatgggatcaggagctccatctgtccatcat

SEQ ID NO: 34153 - DNA, 201 bp, Homo sapiens
agcagaaccttttgggattttgccttcctccctcctgcatctgagctttgtctccaccagcaacatgagccgccaattcacctgcaagtcgggagctgccrccaaggggggcttcagtggctgctcagctgtgctctcagggggcagctcatcctccttccgggcagggagcaaagggctcagtgggggctttggcagccg

SEQ ID NO: 34154 - DNA, 201 bp, Homo sapiens
gtggagagggcttgatctctagctcagcatagagaaaatgacttcttgctcccaggcaagccaaacccacgaattaagctcttgactgcccatccacaagmcccagtgccaagcacatataaaggcacctgccagtcctcactacaaccagcagaaccttttgggattttgccttcctccctcctgcatctgagctttgtc

SEQ ID NO: 34155 - DNA, 201 bp, Homo sapiens
aagcgggactggggggattgggggtttagtccccctagtgagctgtggccctgtcctggtttccttcagtctctccttttttccctcccgaaaaacacagrcacctcaggagccccacctaggccctcccttcctgtgggaggtccccaactctccttcctcctctatcactggcctcatcaacaacactgggtgtctcat

SEQ ID NO: 34156 - DNA, 201 bp, Homo sapiens
aaccacctgcccctctctcggtgcctccagcctctctccacccccaccaaccctgtccacatagcacctggattctgctgcctcaaacatggattgctcakgccctccctggctcagtagccctcaatggctccccatcatgtgcacagcctggcatccagagtcccccccccgcaaagtcgtcctttattcatgattgct

SEQ ID NO: 34157 - DNA, 201 bp, Homo sapiens
taaaattgtaaaatctgcagcctggaaaggaccttagtgacaccctctgtgtgcagatgagggatctaagaaccagagagggaaaagctttgcctgagatyacaaagccagatggcagagccatggccaaaatcggctttcctgactcccaggccaggcctcctttattcttatccctctgactttctgttcctaggggat

SEQ ID NO: 34158 - DNA, 201 bp, Homo sapiens
aggacaggccaattccccaattctactgagctctctgcttttagttgttgataacatttattatgtattttataaagcaggcactttctatggattaacakgttatcatcacaactatctcaccaggagtttatttcccatttacagctggggaagttgaggcttagagagaccgagcaaactgtgcggctgagtggtggc

SEQ ID NO: 34159 - DNA, 201 bp, Homo sapiens
cagaaggaggaattgactgggacatgggaccctccccaggacccaggacccaggacccaggccctaggaaacagcaacctgcacatgggtgtcaagggacrgaggagtcgggacgctggggaggggagactgcaaaatccagggttttaagcaggagttcagaagagcagtgggattggggtcagaggagatcgggagata

SEQ ID NO: 34160 - DNA, 201 bp, Homo sapiens
gagtgttagctctggcttgtaggtgtgacattcttcaggcccctcaggaagaaatttagaacaaagagtggtggtcagagctcagtgcccagtgtcccttyatctgaggtctatgtgcccaggcatcccttttggtggggtttgggtttctgacaaacaactctgggacatatgttaaggtgctatctttagtttctatgg

SEQ ID NO: 34161 - DNA, 201 bp, Homo sapiens
agtatgaggagattgccttgaagagtaaggccgaggctgaggccctgtaccagaccaaggtgagctgggctgaggtggggccagggagggtgatgccagcrggcagcagatggagacagatcgtgcccagaatagaagcagtgtcccagtaagtgtctgttgtgttctgatcccaagatacatgcactcccacgacacact

SEQ ID NO: 34162 - DNA, 201 bp, Homo sapiens
gagaaggtgagaaagagagaaggcagggataggaaaattcgggtagtttcagtaagagcaaagaagacaaaatggcaggggcaagagtagaggaaggaatkcagaggattgggagggactggagtccaggctcttcccctaaacaatatgagagagagccccaaaccagcctgtctccagattttcttccctcctgtgccc

SEQ ID NO: 34163 - DNA, 201 bp, Homo sapiens
gttttgtacttggctagcacttattagatggtggctgttatttttatttatttatttatttatttttgagatggggtctcactctgtcgtccaggctggastgcagcggtgcgatctcggctcactgcaagctccacctcctgggttaacgccactctcctgcctcagtctcccgagtagctgggactacagacacgagcc

SEQ ID NO: 34164 - DNA, 201 bp, Homo sapiens
ggtggcagggccaccacctttgagcatccttcatgtttgtgagcagcgtaggtgtccctgggtaaatgctttggctggaagagatgtgcagtgagggagcmctgagccaggcccagagcctccagaccactacagtcagacgttaggagtcaaccatcatcaaacagcatttcacatcagctgctggggctgatttggagc

SEQ ID NO: 34165 - DNA, 201 bp, Homo sapiens
tttcctcaagtgcagacagtgaaggcccaatgcttgacaattgccacttgggagagagcccttctctcttccagttactcccacagaaaggacttactggycctttctggcaactctcctagtgccagtgaccagagactggattgccttcaccttcatattcccagcacatgcctggcacccatttgcactcagcatgag

SEQ ID NO: 34166 - DNA, 201 bp, Homo sapiens; identical to SEQ ID NO: 5466

SEQ ID NO: 34167 - DNA, 201 bp, Homo sapiens
gttcctgacctgaccttgcctctttctgagactgcacctttcctcgttggaaggtgggcttagtgcacaggtatttgcatttgtccagcccttttctcacygctcagaggcctggcctcctgcgggggtcagcaggtgggagtcccacactcttggcttctcagatggaaagataagtaacaagtcttggaagttggggct

SEQ ID NO: 34168 - DNA, 201 bp, Homo sapiens
cacccccaccaaccctgtccacatagcacctggattctgctgcctcaaacatggattgctcaggccctccctggctcagtagccctcaatggctccccatyatgtgcacagcctggcatccagagtcccccccccgcaaagtcgtcctttattcatgattgctccagcctggtgggtcttttcctcacaaatgacctgcct

SEQ ID NO: 34169 - DNA, 201 bp, Homo sapiens
aggggcctgagctatcagcttgacaggttccagcatgagaaggcagggcttgatggacaattttgggagcaagtgagggctctgaggaaaggaaataatgwcaatgactagcaggcaaggtggccaccatgtgaatctacatggtaatttggttatggctgccaagagtagtagttctttaaacaggctgaaaaataaccc

SEQ ID NO: 34170 - DNA, 201 bp, Homo sapiens
tccaggaagaggccatcgcagggtaaatgtggaagaggactagtgctgcagggactcttcacaaggccctggtgtcctgatggggggtggcttctgtactrtatagcaggaattgctccgtttagtttaccagtgggaacaaaatgtcagtgggtcaatcccaaggtgagatggagatgctggaggatctcttgggctgga

SEQ ID NO: 34171 - DNA, 201 bp, Homo sapiens
ttggttaaaccagaccaaatgctggaagacgggctagagacaaattttcggggaataattctatcttgacactgaatcttagatagttttcccatgtcttrtgtttctgatgttggggaagacaaccttattcaagcagtagctgtgctcatgtagattaagggaagtcacattttaaaaactgtgctccccatccccaaa

SEQ ID NO: 34172 - DNA, 201 bp, Homo sapiens
gtggcttctgtactgtatagcaggaattgctccgtttagtttaccagtgggaacaaaatgtcagtgggtcaatcccaaggtgagatggagatgctggaggrtctcttgggctggagacagagactggcccaagacagcactacaagcaactggacagcttcattgagcaggagcgctttgtgcaagagggagcctgggggc

SEQ ID NO: 34173 - DNA, 201 bp, Homo sapiens
cagagatcagtcccttaacctcaggcagccagagaagatgggtaaatcctttcggcatccagatgtgttcagtagtgcaggtgtgtattgtggtgtctcaratgcaggatttactctgtggttaatgctcagcctcgtagatcacatgaaaaattcaggattggttaaaccagaccaaatgctggaagacgggctagagac

SEQ ID NO: 34174 - DNA, 201 bp, Homo sapiens
agactggcccaagacagcactacaagcaactggacagcttcattgagcaggagcgctttgtgcaagagggagcctgggggcggggctgcatggctggggcvgggtgaagaaggcatccaaagacagagggggctgtgattgcaggactatgggagatgaggagaggagtcatagtttgttcgctatggagtctgtttcctc

SEQ ID NO: 34175 - DNA, 201 bp, Homo sapiens
actggagggttctgttggctctgtggcagtcaggcaccaaggacgggtcaacccaggacaaagtctatgggtgagacggtcatgtggccatcagagcttarccagctcctgcagctcagacttcctgcctggaggagtccctgctgccctcggctcagcctcaggggctaggactggctctgcggcttcttattcttctaa

SEQ ID NO: 34176 - DNA, 201 bp, Homo sapiens
cctgggttaacgccactctcctgcctcagtctcccgagtagctgggactacagacacgagccaccatacccggctatttctttttttgtatttttagtagrgatggggtttcaccatgttggccaggctggtcttgaactcctgatctcaagtgatcctcctgccttggcctcccaaagtgctgagattacaggcatgagc

SEQ ID NO: 34177 - DNA, 201 bp, Homo sapiens
agcagctgccctctatgggttatgtttccaggaggcctggggagaggtaatgcctgatcagtccctttccaggaaggaggagaacagaagttggaggcccyagtactctacccagtgtcctgaactatccaggaaagtccatcctgtcttcacctgctgcatccccaggaggaagccaacaacccagagaagattaatcag

SEQ ID NO: 34178 - DNA, 201 bp, Homo sapiens
agagggggctgtgattgcaggactatgggagatgaggagaggagtcatagtttgttcgctatggagtctgtttcctcaagtgcagacagtgaaggcccaawgcttgacaattgccacttgggagagagcccttctctcttccagttactcccacagaaaggacttactggtcctttctggcaactctcctagtgccagtga

SEQ ID NO: 34179 - DNA, 201 bp, Homo sapiens
aatttttatttttaatggcaaattttccaatatcaaggagggtctgagttggcagattctttgagcctggggcctgagggaaccccactccctccctttcytacaacatcagatgacactgcgtgggaacgtgctggtccagaggagagaaaggagagaggggaggacaggccaattccccaattctactgagctctctgc

SEQ ID NO: 34180 - DNA, 201 bp, Homo sapiens
gcaactctcctagtgccagtgaccagagactggattgccttcaccttcatattcccagcacatgcctggcacccatttgcactcagcatgagctgatggcstatctctcctccccatggggctttgactccaggctttccctgcggacactgacaggagccggtcctcaggacacccaactggagggtgcctgcagcagtc

SEQ ID NO: 34181 - DNA, 201 bp, Homo sapiens
caaacatggattgctcaggccctccctggctcagtagccctcaatggctccccatcatgtgcacagcctggcatccagagtcccccccccgcaaagtcgtmctttattcatgattgctccagcctggtgggtcttttcctcacaaatgacctgccttctgccacccagggcagttttcctcattcctccatgcctgtccat

SEQ ID NO: 34182 - DNA, 201 bp, Homo sapiens
ctctccatctgcagagcctcgcccccatggcttgtcctgcacttcaaacccagagtactgggcaggggaaacggaagctgatgtttgtggagcaccttccwtgggccaggctctggaggctgggcacagctccttcatcatccctctgaggtgggtgttattattcccaaggcagagacataccaatcccagggctgcaga

SEQ ID NO: 34183 - DNA, 201 bp, Homo sapiens
tggacagcttatcctgagctgagttaactgggagcagaaccatcagaatgaaacctgagaccagcaagaaggctctggagagggagagaggagatggggcyggccgtgcaagtggcctcttccgggcacgggcctttcttcagacattggtgtggtggtccagcaggctggagatggccatcttgtctcccatcctggctt

SEQ ID NO: 34184 - DNA, 201 bp, Homo sapiens
gctttggggtccccagttccaagagcttcagctggcagctggcaggcatggggacgacctcaaaaacaccaagaatgaaatctcggagctcactcggctcwtccagagaatccgctcagagatcgagaacgtgaagaagcaggtgagagcacgttggccttggcctgtggtcaagtgcaggggagcatgagtagaggggag

SEQ ID NO: 34185 - DNA, 201 bp, Homo sapiens
gggcctttcttcagacattggtgtggtggtccagcaggctggagatggccatcttgtctcccatcctggctttagaaaagttctaccttacatctgacctycaccctccagccacacgggcccttgctcccaacagctcactccctccatggccagcaatgaggactgtctcttcccagctggctctacccttggccttcc

SEQ ID NO: 34186 - DNA, 201 bp, Homo sapiens
ctggattctgctgcctcaaacatggattgctcaggccctccctggctcagtagccctcaatggctccccatcatgtgcacagcctggcatccagagtcccycccccgcaaagtcgtcctttattcatgattgctccagcctggtgggtcttttcctcacaaatgacctgccttctgccacccagggcagttttcctcattc

SEQ ID NO: 34187 - DNA, 201 bp, Homo sapiens; identical to SEQ ID NO: 5477

SEQ ID NO: 34188 - DNA, 201 bp, Homo sapiens
atggagacagatcgtgcccagaatagaagcagtgtcccagtaagtgtctgttgtgttctgatcccaagatacatgcactcccacgacacactcatgactctgtgctttggggtccccagttccaagagcttcagctggcagctggcaggcatggggacgacctcaaaaacaccaagaatgaaatctcggagctcactcggc

SEQ ID NO: 34189 - DNA, 201 bp, Homo sapiens; identical to SEQ ID NO: 5481

SEQ ID NO: 34190 - DNA, 201 bp, Homo sapiens; identical to SEQ ID NO: 28151

SEQ ID NO: 34191 - DNA, 201 bp, Homo sapiens; identical to SEQ ID NO: 28121

SEQ ID NO: 34192 - DNA, 201 bp, Homo sapiens; identical to SEQ ID NO: 28104

SEQ ID NO: 34193 - DNA, 201 bp, Homo sapiens; identical to SEQ ID NO: 5484

SEQ ID NO: 34194 - DNA, 201 bp, Homo sapiens; identical to SEQ ID NO: 27820

SEQ ID NO: 34195 - DNA, 201 bp, Homo sapiens; identical to SEQ ID NO: 5479

SEQ ID NO: 34196 - DNA, 201 bp, Homo sapiens; identical to SEQ ID NO: 27840

SEQ ID NO: 34197 - DNA, 201 bp, Homo sapiens; identical to SEQ ID NO: 27843

SEQ ID NO: 34198 - DNA, 201 bp, Homo sapiens; identical to SEQ ID NO: 28062

SEQ ID NO: 34199 - DNA, 201 bp, Homo sapiens; identical to SEQ ID NO: 28169

SEQ ID NO: 34200 - DNA, 201 bp, Homo sapiens; identical to SEQ ID NO: 5483

SEQ ID NO: 34201 - DNA, 201 bp, Homo sapiens; identical to SEQ ID NO: 28026

SEQ ID NO: 34202 - DNA, 201 bp, Homo sapiens; identical to SEQ ID NO: 27970

SEQ ID NO: 34203 - DNA, 201 bp, Homo sapiens; identical to SEQ ID NO: 27990

SEQ ID NO: 34204 - DNA, 201 bp, Homo sapiens; identical to SEQ ID NO: 27972

SEQ ID NO: 34205 - DNA, 201 bp, Homo sapiens; identical to SEQ ID NO: 27991

SEQ ID NO: 34206 - DNA, 201 bp, Homo sapiens; identical to SEQ ID NO: 27973

SEQ ID NO: 34207 - DNA, 201 bp, Homo sapiens; identical to SEQ ID NO: 27690

SEQ ID NO: 34208 - DNA, 201 bp, Homo sapiens; identical to SEQ ID NO: 27974

SEQ ID NO: 34209 - DNA, 201 bp, Homo sapiens; identical to SEQ ID NO: 27701

SEQ ID NO: 34210 - DNA, 201 bp, Homo sapiens; identical to SEQ ID NO: 28008

SEQ ID NO: 34211 - DNA, 201 bp, Homo sapiens; identical to SEQ ID NO: 5482

SEQ ID NO: 34212 - DNA, 201 bp, Homo sapiens; identical to SEQ ID NO: 27979

SEQ ID NO: 34213 - DNA, 201 bp, Homo sapiens; identical to SEQ ID NO: 28011

SEQ ID NO: 34214 - DNA, 201 bp, Homo sapiens; identical to SEQ ID NO: 27691

SEQ ID NO: 34215 - DNA, 201 bp, Homo sapiens; identical to SEQ ID NO: 27981

SEQ ID NO: 34216 - DNA, 201 bp, Homo sapiens; identical to SEQ ID NO: 27692

SEQ ID NO: 34217 - DNA, 201 bp, Homo sapiens; identical to SEQ ID NO: 5480

SEQ ID NO: 34218 - DNA, 201 bp, Homo sapiens; identical to SEQ ID NO: 27693

SEQ ID NO: 34219 - DNA, 201 bp, Homo sapiens; identical to SEQ ID NO: 27793

SEQ ID NO: 34220 - DNA, 201 bp, Homo sapiens; identical to SEQ ID NO: 27694

SEQ ID NO: 34221 - DNA, 201 bp, Homo sapiens; identical to SEQ ID NO: 27695

SEQ ID NO: 34222 - DNA, 201 bp, Homo sapiens; identical to SEQ ID NO: 28041

SEQ ID NO: 34223 - DNA, 201 bp, Homo sapiens
ggagactcaacgaacaggtgttgctataagagcttttgctgaacacccgacacagtgccttcttctgagatttgtcagactgcttccactcccttctcccraggactgagctctgtcatcaactctcagctcaactggctgtcttgattttagtatcactggcaccatcaggcaatggatgctccctttgctagacccaat

SEQ ID NO: 34224 - DNA, 201 bp, Homo sapiens
gatattttattcctcttaattaacaaagaaatcaaggtctctaaaaattttccttttttcacttttagtgaattatcttttgtactacttttaaagttgartcctttgaattatttaacttaggtaatgttttgatagattgtagaattattgagaaccttaagaaaaacatttattagcattttaacatgacttttttac

SEQ ID NO: 34225 - DNA, 201 bp, Homo sapiens
caaaatgttgtctaactttaaaattcatcctctatttcctgcctcctgcaagaattttcctatttaaaaaacaaattgcaaatatgtaagttgcctgtatrtgatgttacatactacatgctggtgaattattaatactcctgtttggttgagtcctctgcctatttgttatttagggcaatgtttgcctccacttctcct

SEQ ID NO: 34226 - DNA, 201 bp, Homo sapiens
ttattctaccttaaaaagaaatgaagttctgatatgtgctacagtatgaatgaaccttgaaaacattattctaggtaaaataagccagacacaacagtatrtatattgtataactctccttatatgaaatatctagaataggcaaattcagagacagaagtagattaaagatttacaggaactgggaggacagaagaatgg

SEQ ID NO: 34227 - DNA, 201 bp, Homo sapiens
tcctttcccttctcagaactcctattgaacatgtagtctgctccacattacttatctttcactatgattatactgtgatatattgtttcatgtctacagcrctaggagagcatgtcaaagtgatgctttccagaaccaagggagagtcactcttagaagacagaaccagcttgcaactctctaagtaacattactcatctt

SEQ ID NO: 34228 - DNA, 201 bp, Homo sapiens
catatgttctgattatagagccaaacatagtttatgtgtatattctttttcaagttgcagttttactcaaggctgttttttgtttgtttgtttgtttgttcgtttgtttgtttgagacggagtcttgctctgtcacccaggctggagtgcagtgtcacgatttcggctcactgcaatctccgcctcctgggctcaaggatt

SEQ ID NO: 34229 - DNA, 201 bp, Homo sapiens
aagaaaagtgaggtttaatctctctagagattaaatcatttacttagaccacactgttgagaggtggtgtcatgatttaactccagaatgtccagtgccaraactcattaagctgcattgcattttccagggtcctccagttcctctttcatttcttcttccatgtatcctgtacataactgctgccagaaaaattcttct

SEQ ID NO: 34230 - DNA, 201 bp, Homo sapiens
ataagagcttttgctgaacacccgacacagtgccttcttctgagatttgtcagactgcttccactcccttctcccgaggactgagctctgtcatcaactcwcagctcaactggctgtcttgattttagtatcactggcaccatcaggcaatggatgctccctttgctagacccaattctagagcccttactatagtaggtc

SEQ ID NO: 34231 - DNA, 201 bp, Homo sapiens
taaaaaataatgaaaagaagaaatataggattgatttccaagagatacattttattaaaaaataaaatacatatatcataaaattcccaaaacttactaaytgttactgattgtaacaattaattacaatcacaattgtcaaatggggaacagaccttgaatattaaagtagattttatactttaaaattcttgctctttg

SEQ ID NO: 34232 - DNA, 201 bp, Homo sapiens
cctatgccaagtctttcactgccctctccagtgaataaaaacctatccatatagttcatgtgtttgcttcttaggggaaaagttcagactgtgattaacaraagtgaccacttcctatattagagtgatgtctttataaagagaataaagatagtatctcattcacctttggattatatacaggaggcactcaagatatac

SEQ ID NO: 34233 - DNA, 201 bp, Homo sapiens
tatggcatgggtggaaatgtattataaccataatcctacaaactgcaattgttgggttactctgaattccctctagacggaaagctccttaaaaattaggwccatggttttcatcctttatcataggctgatagatgataggcactcaataagtctttgtagtgttattgttgaatgaattagaactttaagttcatttat

SEQ ID NO: 34234 - DNA, 201 bp, Homo sapiens
atatcactaaatgtctctatggaggaatttatttaaatttaatttaattttattttttgaggcaaggtctcactttgacacccaggctggagtgcagtggyctgatcttggctcactgcagcctcaacctctggggctcaggtgattctcccacctcagcctcctgagtagctgggactacagtcatgcgccactatgcct

SEQ ID NO: 34235 - DNA, 201 bp, Homo sapiens
cctcatgcttttttggctccctggactggcatgtgcttctcttccacctctctacttttctctcattcttcaagctccagatcttctctcatagcacgttytccaatacctttcaggtataaatgccttttctattccgtgtttccttctcctttgtgcctttatcactcttacacatttatgataactgtttggtgtact

SEQ ID NO: 34236 - DNA, 201 bp, Homo sapiens
cagcctgggcgacaagagcgaaactccatctcaaaaaaaaaaaaaaaaagaaagaaaagaaaaaaagaaaattactcttttgatgaaagtaatggtagtcytctcagtgacccaagacaggaccatatatgttgtaacatttcactgatgctgcttttcttcaatatctcatagtaatttctctccattatttaacttaaa

SEQ ID NO: 34237 - DNA, 201 bp, Homo sapiens
atataaaacttttctaaaatattacatcaattttgcatatttagtttgtcatgttattgaaatatgaatcttaatgtttttacaaaaaatatgtcagtatrtgtatatatgtatatacatgtataagtaaaacaaaccagtactttaataagttacctctgtgataagattacaaattttttaattattattttctatttt

SEQ ID NO: 34238 - DNA, 201 bp, Homo sapiens
aagttgtaatccccatgtgttgaaggtggggcctagtgggaggtgattggatcatggggatagtttctaatgatttagcactatctccctagtgctgtatyatgatagagttctcacaagacctgattgtttaaaagtgtgtagcacctgccccttgttgtgctctctctctctctcagtctttctctcaccatgtaagat

SEQ ID NO: 34239 - DNA, 201 bp, Homo sapiens
cctaatactgcgcttttccgacgggctaataaacggcgaaccaggagattatatcccacacctggctcggagggtcctatgcccacggagtctcactgatkgctagcacagcagtctgagatcaaattgcaaggcggcagcgaggctgggggaggggggcccgccattgcccaggcttgcttaggtaaacaaagcagccag

SEQ ID NO: 34240 - DNA, 201 bp, Homo sapiens
atagagcaaggaattggcctattttttcattgccgtatcaccagttcttagaaaagagcctggtacatggtcaattcttaataaatgtctgttgaaggaayaaatgaatgaaagaatgaatgtcaataaccttaattggccctctacttctgtagaataaagtccaaaggcttagctggtatttaaggcccttcatgatct

SEQ ID NO: 34241 - DNA, 201 bp, Homo sapiens
tcaatcttgtgtgcttgtccctatgtcccttgccactctgaagctgtgtaccacattccttcatcagtgacctatgaaaatggtttcccaagtaaatattsattgtcataattttgtttttccttcatcagtgattattataatttaaataaaaataaagtaatgctttgtgaattgcagtgaaatgcattttaatgtaat

SEQ ID NO: 34242 - DNA, 201 bp, Homo sapiens
cctggctcggagggtcctatgcccacggagtctcactgattgctagcacagcagtctgagatcaaattgcaaggcggcagcgaggctgggggaggggggcscgccattgcccaggcttgcttaggtaaacaaagcagccaggaagctcgaactgggtggagcccaccacagctcaaggaggcctgcctgcctctgtaggct

SEQ ID NO: 34243 - DNA, 201 bp, Homo sapiens
tcggagggtcctatgcccacggagtctcactgattgctagcacagcagtctgagatcaaattgcaaggcggcagcgaggctgggggaggggggcccgccattgcccaggcttgcttaggtaaacaaagcagccaggaagctcgaactgggtggagcccaccacagctcaaggaggcctgcctgcctctgtaggctccacct

SEQ ID NO: 34244 - DNA, 201 bp, Homo sapiens
agatggccacataggaacagctccggtctacagctccctgcgtgagcgatgcagaagacgggtgatttctgcatttccatctgtggtaccgggttcatctyactagggagtgccagacagtgggcacaggacagtgggtgcagtgcaccgtgcctgagccaaagcagggcgaggcattgcctcactcaggaagtgcaaggt

SEQ ID NO: 34245 - DNA, 201 bp, Homo sapiens
tgggtaacagagtgagaccctctttcaaaatgaaaaacaaacaaacaaacaaacaaacaaatgacgacaacaaaaaactggccttggaaacctttccacasgaaaaaacccaagtatctccattcctaaactacaaaacttccatctcattctcttttgagataatttgtggctacttcaactgtgtgtcaaaaacaaaac

SEQ ID NO: 34246 - DNA, 201 bp, Homo sapiens
ttgagacggagtcttgctctgtcacccaggctggagtgcagtgtcacgatttcggctcactgcaatctccgcctcctgggctcaaggattctcctgtcaargttgttttgctacgtaataatttaatatcttcccttttatgacctataatacttcctttaataaatatgaatagatttggttctgcgacaacacagaaat

SEQ ID NO: 34247 - DNA, 201 bp, Homo sapiens
tgtgaattcccaatatcttaacaacagagagcacaatctaaagaatttctttctttaagttgtcatttcaggagatgatagtattgtctggaagaggttartttaatttttcagctgtgaattgagaacaaactatcctaatacatagtgttttgaagaattaaacatggactaatgttttaaaaaattttcatataatta

SEQ ID NO: 34248 - DNA, 201 bp, Homo sapiens
ctcattcacctttggattatatacaggaggcactcaagatatacgtatttaatttttgacatataatttttataaaggggaagcagccaagatggccacayaggaacagctccggtctacagctccctgcgtgagcgatgcagaagacgggtgatttctgcatttccatctgtggtaccgggttcatcttactagggagtg

SEQ ID NO: 34249 - DNA, 201 bp, Homo sapiens
taccatcagggctacatccatataaactgaggcctccccagccatgcttcatcacttaatcagatggtgaactagctgagcctcactagtgcaacaatagktattaaaaagtcctttcttttaggaaacacacttgggggacattggggttcttaaaatgagtctttccagaaacataccattttgccacagtttcctctt

SEQ ID NO: 34250 - DNA, 201 bp, Homo sapiens
cagtgaccaaaaaggaagaagtaaaaatagtcatggtgaaacactacagaataggtttagatgaaaaatatgaagtaacaaaaaagtggtctttgaacgawctgcagatgattgatggaaaagaagcagatactgtaagtgttacattttataaggagatgtggaatcaatatgctggagatctttatgttcaatatcctg

SEQ ID NO: 34251 - DNA, 201 bp, Homo sapiens
aaaggaggttgctaaaaacaattttaaagacttcatttgggaccactgctgctacatttgtgaattcccaatatcttaacaacagagagcacaatctaaakaatttctttctttaagttgtcatttcaggagatgatagtattgtctggaagaggttagtttaatttttcagctgtgaattgagaacaaactatcctaata

SEQ ID NO: 34252 - DNA, 201 bp, Homo sapiens
aaaaccattgaactgtacaccttacatggtaaatttgtatgatatgtgaattatatcagtatctacataattatataacctagatctataatctataattmtatctaaggctattaaaaggagaaaaagtggtctttaaaaagaagaaaatcttgtcatttgtgacaacatgaataaccctggaagacattatatgaagtg

SEQ ID NO: 34253 - DNA, 201 bp, Homo sapiens
gtgcctttatcactcttacacatttatgataactgtttggtgtactaatctccattagattagaagttccttgaggctaagaaattcaccctcctaatttmtatgctttcccctagtaggtggctaatacatttttgtgagtggaggcataaatactattaaattgagcccattaaaaatttccattttaaaaataattta

SEQ ID NO: 34254 - DNA, 201 bp, Homo sapiens
agatgattgatggaaaagaagcagatactgtaagtgttacattttataaggagatgtggaatcaatatgctggagatctttatgttcaatatcctgcttcrtatattcttggcatgtactaagtgttaagatgacattatattgttcgtaagtggcatagtttaatctactgggatgatgtactggtttttttattctgtt

SEQ ID NO: 34255 - DNA, 201 bp, Homo sapiens
gtggtacctatataaggaaaaacctataaaccaatggaatagaattgagagttcagaaataaactcacacatttatggtcaactgatttttgacaagggtrccaagtccattcaaaaaggaaagaataatctcttcaacaaattgtcctgggatgactgtatatctacatataaaagaattaagctggacccctacctcac

SEQ ID NO: 34256 - DNA, 201 bp, Homo sapiens
accagatatgaggcactaagaaaggcacatcacctctgatattcctcccaaatccataaccctagtctagccatgagacaatatcaggcatacccaaattyagggacattctacaagctaccactcttcgaaagtgtcaaggtcaggaaagacaaggaagaactgagtgtatttgtttgctagggctgccataaccaacta

SEQ ID NO: 34257 - DNA, 201 bp, Homo sapiens
aatatgaatagatttggttctgcgacaacacagaaatcttgtgctcaaaaagagaacacacttgaagaaattctaatttgatggtgtttattattctctaygttaaaaaataatgaaaagaagaaatataggattgatttccaagagatacattttattaaaaaataaaatacatatatcataaaattcccaaaacttact

SEQ ID NO: 34258 - DNA, 201 bp, Homo sapiens
caaaattaaggggctgcagggcttgttccttgtgagaactgtgagggaaggatctgttcctggcctctctcttgagcttgtagatggccatcatctctttstcttcacatcatcttcctttatgtttttgtacaaatttccctttttatgaggataccagtcatattggattagtattagattaccactctattgacctca

SEQ ID NO: 34259 - DNA, 201 bp, Homo sapiens
atcatcaatttgagagcactttctccaaatgtaacacctttttatggcaattaaaaatacattttgctggaacagtaatttaaaataagtcagcgtgttgyttgaatagtcttggctttgaccatgcttgactcagacaatttccattggtaatgaatcaaagagatcacatcgtaattgttgagatgtgaaactccatac

SEQ ID NO: 34260 - DNA, 201 bp, Homo sapiens
gaaattcaagaccagcccgggcaatgtggcaagaccttgactctagaaaaaaattaaaaattagccaggcacagtgacatgctcctgtaatccccattackcaggaggctgaggcaggagcccaggaagtggagggtgcagtgagctatgatggcaccactgcactccagcctgggcaacagagtgagactctgtctctta

SEQ ID NO: 34261 - DNA, 201 bp, Homo sapiens
atagccaggggactccacaagtagatctatgagtatcagtcggtggtcgtaaatatgtttccctaccagcaagccacagaggagctccagagagcagcctscttgaggctggtcgcggaagactgacggtggggctagtgaggctgctgtattttggctgccgccgccgctgctgccactgggcagataccgcagtgaggg

SEQ ID NO: 34262 - DNA, 201 bp, Homo sapiens
tgacgtcactgggtcataggaatttttcagcttcattatgagatgatgggatcaccatcctgtatgcagtctattgttgactgaaatcttgttatgcagcatatgactgtacttgctttcctagggatgccatatgatccatttatggccactgagatgtaaaggaaagtctgcttgatggtttttgaaaaagatttttct

SEQ ID NO: 34263 - DNA, 201 bp, Homo sapiens
gacgtcactgggtcataggaatttttcagcttcattatgagatgatgggatcaccatcctgtatgcagtctattgttgactgaaatcttgttatgcagcatatgactgtacttgctttcctagggatgccatatgatccatttatggccactgagatgtaaaggaaagtctgcttgatggtttttgaaaaagatttttctt

SEQ ID NO: 34264 - DNA, 201 bp, Homo sapiens
ctgagtctacagatatgctcactaaatcatagtttgataatggaaactctgatgttactgaaaacaactctctaacattttgattatataaacacatttcwgttttaagacaatgtgataggtttccactttgccactgcattaatgtggatacggccatttaattttagctggcagcaaagctgaagtgtggaaattagg

SEQ ID NO: 34265 - DNA, 201 bp, Homo sapiens
atgcatatgttctgattatagagccaaacatagtttatgtgtatattctttttcaagttgcagttttactcaaggctgttttttgtttgtttgtttgtttgttcgtttgtttgtttgagacggagtcttgctctgtcacccaggctggagtgcagtgtcacgatttcggctcactgcaatctccgcctcctgggctcaagg

SEQ ID NO: 34266 - DNA, 201 bp, Homo sapiens
tttcactatgattatactgtgatatattgtttcatgtctacagcgctaggagagcatgtcaaagtgatgctttccagaaccaagggagagtcactcttagragacagaaccagcttgcaactctctaagtaacattactcatcttgaagggaaatcttaggcattcgatccccacctgccacctctttataatatgttatt

SEQ ID NO: 34267 - DNA, 201 bp, Homo sapiens
ttaagacctaaaatactcaattgccagaagaaaaaccataatatctaaagagtagttcttgcaaggtttattttctatagatgaagtaaaaataccctgamtgttctgggaatttctacttctcttttttaaaatcaaatccttgggggtcagcatttattacattttttacatttacatgattgcatttaatttacataa

SEQ ID NO: 34268 - DNA, 201 bp, Homo sapiens
tgcatatgttctgattatagagccaaacatagtttatgtgtatattctttttcaagttgcagttttactcaaggctgttttttgtttgtttgtttgtttgttcgtttgtttgtttgagacggagtcttgctctgtcacccaggctggagtgcagtgtcacgatttcggctcactgcaatctccgcctcctgggctcaagga

SEQ ID NO: 34269 - DNA, 201 bp, Homo sapiens
gcatatgttctgattatagagccaaacatagtttatgtgtatattctttttcaagttgcagttttactcaaggctgttttttgtttgtttgtttgtttgttcgtttgtttgtttgagacggagtcttgctctgtcacccaggctggagtgcagtgtcacgatttcggctcactgcaatctccgcctcctgggctcaaggat

SEQ ID NO: 34270 - DNA, 201 bp, Homo sapiens
cactaatctgtagtttcaggaactagccccacaaattaactattcccaccaatctttgacccatttttcttgtcttttttctccagctctcaaatattacygatgttatcattgatttttacaagtttgctcaatgcctaggattatattcaccaggactgtcaatttagattcatttcaaatcaactaactgtgctctat

SEQ ID NO: 34271 - DNA, 201 bp, Homo sapiens
gatgacattatattgttcgtaagtggcatagtttaatctactgggatgatgtactggtttttttattctgtttttatgagtttcaagtgaaattttgtctrttaaatttaaaagcacctttcccaagggccatttaacaggttaaacacaatctaccagtcaatcctgaaaatttaaatgccacttttccaaatatatgat

SEQ ID NO: 34272 - DNA, 201 bp, Homo sapiens
gtagggatattatcattatctctaaaatgaacaacccacatcaccatcatcagtcagtaacttacgagacagattttcccagtggctaatctattaccttrgagatctaaatgtggaaatcaagatgatctgccaattctaaactccaagccatttgcatcatttgtagaatgaataggagcttgatttcagagctttgaa

SEQ ID NO: 34273 - DNA, 201 bp, Homo sapiens
taaagcagaaatcaaaatgactggggatttggagactggtgcaacaggagacaggatgatgtagcaaaaattgagcttgtgctgattgagatcttgggttytgtcctggctctgccaataactaaatgtgtgacctggacttcatatctctggaaactactgtgttatcccagctaaaaacatatcaataaatgattcctg

SEQ ID NO: 34274 - DNA, 201 bp, Homo sapiens
taaacttcaaagacagcaaattggtgatctgtagcatgccaatggctagctatcatgtatttcttccttctaccttgaaatagcacaaggaaccaacctcstactaaaaagggagagaaaccttttctgttttccagaagtctgtgagtttattctctgctttatttatttattccctactcatcctctccaattcattac

SEQ ID NO: 34275 - DNA, 201 bp, Homo sapiens
tctgcagccaccgctgctgttacccaggcaaacagggtctggagtggacctctagcaaactccaacagacctgcagctgagggtcctgtctgttagaaggraaactaacaaacagaaaggacatccacaccaaaaacccatctgtacgtcacaatcatcaaagaccaaaagtagataaaaccacaaagatggggaaaaaac

SEQ ID NO: 34276 - DNA, 201 bp, Homo sapiens
tttattttcctatatagcacgtgtaccttcttctgataagaacttaactatgccaggtttaagaatttgggttctacagaattttttagagtgttaaaaawgaaagaaaaaaacattgtattagaatactttggttaattgtggagaaatgaaactgatgtgtccttctcctgatttgattattttgtctccaatcgtttg

SEQ ID NO: 34277 - DNA, 201 bp, Homo sapiens
cttttctgttttccagaagtctgtgagtttattctctgctttatttatttattccctactcatcctctccaattcattacattgagaagacttaataaccrcacagtctgaggcacattttatttgtctaattgaaaaaacatagatgcttcaaaaataacctttcttattgttgatttttagaagcaattactttgaagt

SEQ ID NO: 34278 - DNA, 201 bp, Homo sapiens
aaccacaaagagataccatagcactgacaataccacttagatgccactaagaatgactatcattttaaaaatggcaggggtgggagggaataagtattggmaagagtgtggagaattggaaccatcatacattgctggtgggaatgtaaaatggtgcagccactatggaaaagagtttggcagtgtctccaaaagctaaat

SEQ ID NO: 34279 - DNA, 201 bp, Homo sapiens
aaattggtgatctgtagcatgccaatggctagctatcatgtatttcttccttctaccttgaaatagcacaaggaaccaacctcgtactaaaaagggagagraaccttttctgttttccagaagtctgtgagtttattctctgctttatttatttattccctactcatcctctccaattcattacattgagaagacttaata

SEQ ID NO: 34280 - DNA, 201 bp, Homo sapiens
atggcttctaggctacaaacctatgcggcatgtactgtactgaatagtgtgggcaattgtagcacatggtaagtatttgtgtaactaaacatatctaaacwtagaaaaggtattgggttgacatcgtgggggctatgacgtcactgggtcataggaatttttcagcttcattatgagatgatgggatcaccatcctgtatg

SEQ ID NO: 34281 - DNA, 201 bp, Homo sapiens
tagcagtcaaaaaagacaaataccattatgcatcacttaatgatggggatatcctctgagaaatgcactattaggcaattttatcactgtgcccacataayagagagtacttacacaaacctagatggcatagtctactacatacctaggtgggctatatggcacagcctatggcttctaggctacaaacctatgcggcat

SEQ ID NO: 34282 - DNA, 201 bp, Homo sapiens
catttctctgatcattagtgatattgagcattttttcatgtttgttggccatttgtatatcttcttttaagaattgcctattcatgtccttagcccacttyttgatcaaattgtttgtttttttcttgatgacttgtttgagttccttgtagattctggatattagtcctttcttggatgtatacattgcaaagattttct

SEQ ID NO: 34283 - DNA, 201 bp, Homo sapiens
atatgatgatcctattacttatgtacagatagcggacttccagatttcttaagcaaataaataattctatggttgcaaaaaatgtgaaaattttgaagacyaggttgggaagtgattaatgcaagattccaaaactgaaaattaaaagaaaaagtattctttctctctgaaaacaaaattaataaggataaaataggtctg

SEQ ID NO: 34284 - DNA, 201 bp, Homo sapiens
tgaaaattacatttttcatacctccccaaccccattctctcccaccccctaagcaccatgtgagacatctagctggagcaagaacatagtcctttggttcyggggtacagcttctttctgggcatacaactgcctcctggtggaggaaaatgtctccaagatcttgtccttagtaagcatgacagattcaagtgtgcctcc

SEQ ID NO: 34285 - DNA, 201 bp, Homo sapiens
ccaacacacagagcctgtcattgatagtgctggtaaatagtatttctcctcctgtcctagaggtcactcaaggacttagtgatgtgaggccatacataacygcctaagccaaaaaggctttggaatgtgggcctaaaagaagacacggaagttggggcccagcccttatttgcatagtgttttctactacgtccttatgca

SEQ ID NO: 34286 - DNA, 201 bp, Homo sapiens
tcctgtggcctgcccggaggggcacacaagcaaagccagtgcctctgtggacaggcagcttaagacattaggagacaaatgaaggaaggaggcaaaacttycaaggccggactatctcctctggaccagagtttcggcctgctgggaatggagtcaccagccccggggggggctgacaggtggctcccgcctacagagctg

SEQ ID NO: 34287 - DNA, 201 bp, Homo sapiens
tgggccaccctgagtgggctgagaaaagttgtcttctgtgccccatgcctgaggggtcatccgtggggggacctcccactcaggttcagggttagccctgyacacagtccctgtaggggctgtggaaggtcaggaggcccctctgggccctgggagcccaggagggaagcagtgcgtctgtgggggatggggtccctacca

SEQ ID NO: 34288 - DNA, 201 bp, Homo sapiens
ttcacaaggaatgcccgggcaccctcaccccagggcctcttttgctgggggtgaggagggaggagccccctggggctctatgtgttctgcctgggacacakgatgatgatgatgatgatggtcaccttcctctgctgggtgctcacatagaccaggagaattgcttcatggaggtcatggccctgcctcatcacacagccc

SEQ ID NO: 34289 - DNA, 201 bp, Homo sapiens
cgtagtcggtacctttcaacagaaacgcagaggccactggcgcgcaggaggaggcgattgcaggtggaggtagtaccggggtaaagacatggagcgggtgsacgggaaccgctaggggcccgctggggcgtgaggggcgcggggaggaaagggccgcagcagcccacgccccgcgccagggccaggcctcatccggcgctc

SEQ ID NO: 34290 - DNA, 201 bp, Homo sapiens
gcccctcctctcccagagcgaggccttgccctgggagtggccatatggatgccttggggactctggggagcccatctcagccatgccctgcctggctggcyacagccctgccagccctcctgaaatcccaccggtagtgcccaatagccaggcaggccttcgagtgttccagtttatcacaggctggtggtgccactgggc

SEQ ID NO: 34291 - DNA, 201 bp, Homo sapiens
agcaggtctcaggcaaaacaaagcggcagcaacagtcctcccagccccccgcccctcctctcccagagcgaggccttgccctgggagtggccatatggatsccttggggactctggggagcccatctcagccatgccctgcctggctggccacagccctgccagccctcctgaaatcccaccggtagtgcccaatagccag

SEQ ID NO: 34292 - DNA, 201 bp, Homo sapiens
gtttggaagagcaataggcaagggtgatttatggagagtatgccaggcagaaaatgccgcaggtgtgaagataccgaggcagcaggagcatgatgggaagktcaaggtggctgagatggaagggagggggtgttgtgggaacaggctggaggtctgggaggctctgccctcatcagcaggtgggcttttccttagacttgt

SEQ ID NO: 34293 - DNA, 201 bp, Homo sapiens
ccagtgaaacaagtgaccccaaccagtttgaacagcccagaagaacataatcagcatgagaatacagttttttcatctccctggccccatgacttcactcygcactcttcaacaaatcaacaatctccacactttggcctgctctaaaactcttaagaaccctaaccccaaacttctcggagaaagatttgaggttttctc

SEQ ID NO: 34294 - DNA, 201 bp, Homo sapiens
tggtaaatctttcccctgagagggcgagatacaggtgtgtgcacttgcagaccatgcaaccccaagggggagagggcagtgtgcctgtgcagcccaggcarggagattgccgtctgtcaccgaagccttaggaagttgggcaggaagcatggctcagggagggcaggaataagcttgggcctctcaggtcacctttcctga

SEQ ID NO: 34295 - DNA, 201 bp, Homo sapiens
aggaagttgggcaggaagcatggctcagggagggcaggaataagcttgggcctctcaggtcacctttcctgagatggggcaggcaaggcgctagagagtaygacttgtggctgttaggaggggacttagggacctgggcctgagtggagaagatcatccttgggtgcagcaaaacagcttgcaagatacattcccctggca

SEQ ID NO: 34296 - DNA, 201 bp, Homo sapiens
tcttgtcgatggtttcctgggtggtcttggccagctggtccatggctggggaagggcgggagagagggcaggtcaggcagggcccgggaaccacagtgccygtaggcttagcctggcctgggtctcccgggggacctgcttggggcattgtggacagagggctctgcagaggagaggatgtgcctgggccccagccgggat

SEQ ID NO: 34297 - DNA, 201 bp, Homo sapiens
tcaccttgcgcaccaccccggaggtgaccgcgatgttctccgcctcctccacggtcttggtggccacagtgttgacgctgctcaccacagcctcgctcacsgcgttggcctgctccttggtcttctcggccactatgggaggacactggctggcctccaccccagccccagccccaaggcaggcctgctggagtcaggctc

SEQ ID NO: 34298 - DNA, 201 bp, Homo sapiens
aacgtgaattttaatgagggggcagaccgaggaggtggtggctgcccggagatcagggccaggctgtgctagatggcgcctggaaggggggtcacccaagyctccctgctgtcatttcaggaggccgacccaagtctccctgctgtcatttcaggaggccgaattttttcccaatcccagagaaggtgtcagaggcctggt

SEQ ID NO: 34299 - DNA, 201 bp, Homo sapiens
ggaacgtgaattttaatgagggggcagaccgaggaggtggtggctgcccggagatcagggccaggctgtgctagatggcgcctggaaggggggtcacccargtctccctgctgtcatttcaggaggccgacccaagtctccctgctgtcatttcaggaggccgaattttttcccaatcccagagaaggtgtcagaggcctg

SEQ ID NO: 34300 - DNA, 201 bp, Homo sapiens
ccccatcacctgaccagccttgctcctccttgctttctctcacagcccaggggactctcgggcacacccaggccccaggtggcctcctcctgggttcatayaggcctgcttaatgtgtacatgtctgggctggggagcaggaacagccctgactggcctgagctgcttccagacccttcatgcctgcccatggcagtgctt

SEQ ID NO: 34301 - DNA, 201 bp, Homo sapiens
agcctccagtcgcagctggcggagagaagttcccgaggcccccccgacttgcaaggtcccttgccccgcccagagctgagccttccgaggatctgaggacsgagtccagcccagctcccaggaggggccgggatcctggggcagggaataaggggcaggggctggctctaaagtcgggcgggagaggggcactaaccgaga

SEQ ID NO: 34302 - DNA, 201 bp, Homo sapiens
tctcaggtcacctttcctgagatggggcaggcaaggcgctagagagtatgacttgtggctgttaggaggggacttagggacctgggcctgagtggagaagrtcatccttgggtgcagcaaaacagcttgcaagatacattcccctggcacacaaggggtgtaggtcaggccccacccagctgggtatactcccactccaga

SEQ ID NO: 34303 - DNA, 201 bp, Homo sapiens
cactagacaaaaccttccagggccggaggttaccggtttgtcccgaaaggaagtggtgtggaagggaggggtctcccgcacgcgagcgcgcacgtgcatgscccccccacaaccgtgcttcgttctcacgtgcacggccccgtgccccgaagcccctccccggggagtggcggggcgggaccccgccgggcggcagcgccc

SEQ ID NO: 34304 - DNA, 201 bp, Homo sapiens
gagtaggccttcaggacctggaggccagtgcacacccaccctgcctttctgggtctctctaccgcttcctgtccggggctgtttcttgcacctctgctggkgtctcccctattctggagcgctgggaagcccctgccacacaggcttggtctgctggcacataccctgcttctagtgctgcggggtcagcccctagaggga

SEQ ID NO: 34305 - DNA, 201 bp, Homo sapiens
gtctgtgggggatggggtccctaccaaggaaccccccatggtgcaccccaggagcccagctcctacctcctctgccacttcctctttctctttggatgccwcaccctcctgttggggggcagatggcctcaagtcctcctgtaggggacaaaagggggcatgagaccatgtggagaatgcagagacccctagctgccctgc

SEQ ID NO: 34306 - DNA, 201 bp, Homo sapiens
gcaacatgtaaccgatagtggaaccagggcagccctgggttaagggtggtagacacgtgccccgcgagggagatctcagactggagaagggaacggcctcytaggcagacctgtactgcagcatctggactggcagccaggttggggacttcgtcccctgctgggaggccggggaaggcagggagcgcgccttgagtccgc

SEQ ID NO: 34307 - DNA, 201 bp, Homo sapiens
ggaagggggagggagcaggtctcaggcaaaacaaagcggcagcaacagtcctcccagccccccgcccctcctctcccagagcgaggccttgccctgggagyggccatatggatgccttggggactctggggagcccatctcagccatgccctgcctggctggccacagccctgccagccctcctgaaatcccaccggtagt

SEQ ID NO: 34308 - DNA, 201 bp, Homo sapiens
gtcaggcagggcccgggaaccacagtgcctgtaggcttagcctggcctgggtctcccgggggacctgcttggggcattgtggacagagggctctgcagagragaggatgtgcctgggccccagccgggatggggcggggagtgggaggtgtgctggggttgcccgcctccctccagccccaccagacctttctgccccgcc

SEQ ID NO: 34309 - DNA, 201 bp, Homo sapiens
attaatggagatgaggtcaaccctgggcaaagggaagaggcaggtgatgagattaggtggaggaagggggagggagcaggtctcaggcaaaacaaagcggyagcaacagtcctcccagccccccgcccctcctctcccagagcgaggccttgccctgggagtggccatatggatgccttggggactctggggagcccatct

SEQ ID NO: 34310 - DNA, 201 bp, Homo sapiens
acacacacacacacacacacacacacacacacacacggtatggattaatggagatgaggtcaaccctgggcaaagggaagaggcaggtgatgagattaggyggaggaagggggagggagcaggtctcaggcaaaacaaagcggcagcaacagtcctcccagccccccgcccctcctctcccagagcgaggccttgccctgg

SEQ ID NO: 34311 - DNA, 201 bp, Homo sapiens
taggaggggacttagggacctgggcctgagtggagaagatcatccttgggtgcagcaaaacagcttgcaagatacattcccctggcacacaaggggtgtargtcaggccccacccagctgggtatactcccactccagagtaggccttcaggacctggaggccagtgcacacccaccctgcctttctgggtctctctaccg

SEQ ID NO: 34312 - DNA, 201 bp, Homo sapiens
cgggagtcggccaggctatccaggggcagggcaggtggccacctgctgagtcctgctgccctaaggctgatgatgaggccaggggtatgagtggtcagatrgtccctgctgaggcctttcacagttcactgggagatgagtcgtgactggttttggggtgtcaccaggaaatgagtctccctcgaggtggctccaagggct

SEQ ID NO: 34313 - DNA, 201 bp, Homo sapiens
gctggcctgtagccctctagtctcccccactctgggcctgggagagagaatgacctgcacacccagctccaggccccagccttaatgggccaccctgagtkggctgagaaaagttgtcttctgtgccccatgcctgaggggtcatccgtggggggacctcccactcaggttcagggttagccctgtacacagtccctgtag

SEQ ID NO: 34314 - DNA, 201 bp, Homo sapiens
gggtggccagggagacgagggcaggagcgtgggcagccgcatgtcactcaaggcgggcactccttgtgctaggaggggatggtgtccaaggcagaggagcrctcttcaggtcatccacgctggcctgtagccctctagtctcccccactctgggcctgggagagagaatgacctgcacacccagctccaggccccagcctt

SEQ ID NO: 34315 - DNA, 201 bp, Homo sapiens
gtccaaaatgttaaatggaaaattccagaaatagctggtcgtgatggctcctgcctgtaatcccagcactttgggaggccgaggtaggtggatagcttgargtcaggagttcgagaccagcctggccaacatggtgaaaccctgtctgtactaaaagtaccaaaattagctgggcgtggtggcgcacgcctgtagtccctg

SEQ ID NO: 34316 - DNA, 201 bp, Homo sapiens
gccccatgacttcactctgcactcttcaacaaatcaacaatctccacactttggcctgctctaaaactcttaagaaccctaaccccaaacttctcggagaragatttgaggttttctcccatcttgtctggcagccctgcgattaaacctctttcttctgctgcaacccggtgtttcgggtgtatggacttgccctgccat

SEQ ID NO: 34317 - DNA, 201 bp, Homo sapiens
gacatggttcaaaaggcaagtcccacctggccctgccctccagggctcctagtgtcgggggagcagaggcacacaggaacaggcaattgcacagcgccacsggagcaccagctccatggggctggggcaatgtggaaggggctgcattgcagagatggttccatggtaaacctgaaaatgagaactcactgtcatccatca

SEQ ID NO: 34318 - DNA, 201 bp, Homo sapiens
ttcaagcagttctgcctcagcttcctgagtagctgagattacaggcatgagccaccacccccagctaatttgtgatttcgctttctgcagtttcagttacycattgttggggctcagaaaccaataccccgaaatatagtggtgtgacattctgaactgaagaagccttaaggtctctccgaccagactcccacaggcccc

SEQ ID NO: 34319 - DNA, 201 bp, Homo sapiens
cagcataagtggggtcagaaggaccagagggtgggtggggccgagggagggcagtgaggttggtgcagcagcacaggtggacaggccaagggtggccaggragacgagggcaggagcgtgggcagccgcatgtcactcaaggcgggcactccttgtgctaggaggggatggtgtccaaggcagaggagcgctcttcaggtc

SEQ ID NO: 34320 - DNA, 201 bp, Homo sapiens
tcacatggagggaagacccaggagcctatcttcacctcctgctgacagtgggttcctcagggactcagagcaggcaggcgggggctaccttgaggctgagmtaagctatccccgtggatgggactgtgagtcctgtcgaatgtcttggggagccgaaggcagtgctgcctcctccatgttaaaggcaatgggtgggttggg

SEQ ID NO: 34321 - DNA, 201 bp, Homo sapiens
atggcgcctggaaggggggtcacccaagtctccctgctgtcatttcaggaggccgacccaagtctccctgctgtcatttcaggaggccgaattttttcccratcccagagaaggtgtcagaggcctggttagcagtcttgtcgatggtttcctgggtggtcttggccagctggtccatggctggggaagggcgggagagag

SEQ ID NO: 34322 - DNA, 201 bp, Homo sapiens
gggcttctcagacaaggagaggcagaaggagggagcgcattaccgcattaccgtttcccccacccccgccccagtttgctgtggtgtcacttttttttttycctttttttgtttttggagacagagttttgctcttgttgcccaggctggagtgcaatggcgggatcttggctcactgcaacctctgccttccaggttcaa

SEQ ID NO: 34323 - DNA, 201 bp, Homo sapiens
ttaatgagggggcagaccgaggaggtggtggctgcccggagatcagggccaggctgtgctagatggcgcctggaaggggggtcacccaagtctccctgctrtcatttcaggaggccgacccaagtctccctgctgtcatttcaggaggccgaattttttcccaatcccagagaaggtgtcagaggcctggttagcagtctt

SEQ ID NO: 34324 - DNA, 201 bp, Homo sapiens
ctggagcgacgttggatcctgcccagagtggcgatgccaagcgccagctccggtttttaaggcgccccagggctggcctgccccgcgtaggggagagggckcggggcggttcccgtcatacaggctccggggagtggccgggccctgctccagagtccgcagggcagggagcacatcctggcctaagacgggccgcggtgg

SEQ ID NO: 34325 - DNA, 201 bp, Homo sapiens
ggtgcccctgcctgagccctaggtcgcgcgctatcctcaccggcttcctgggcggtcccctccacctgttgcttcaggtcctgcaagcccttgcttgccakggcttcggggtatctgtggagtcgtcaagagcagctggagcgacgttggatcctgcccagagtggcgatgccaagcgccagctccggtttttaaggcgcc

SEQ ID NO: 34326 - DNA, 201 bp, Homo sapiens
agtgccacgttgagtcacctactggcaaggcatacaccgtaccggggccacacgcgtggacacgtgccgggggggtgctgggaacaccagtccatccggamcccactagacaaaaccttccagggccggaggttaccggtttgtcccgaaaggaagtggtgtggaagggaggggtctcccgcacgcgagcgcgcacgtgca

SEQ ID NO: 34327 - DNA, 201 bp, Homo sapiens
ctgaaggcctggggcaaggcactgagatgctttgagcccaaaccatctgagtatcaaaggggaagccaggatccccagggaaccctggtctgaacaagccygcccggcatgcaaggctttaaaacaacccaggacacgctggccagtggcctacatgatgggtggtttgcgtcgtgcccggcaggcttgttcagagtgggc

SEQ ID NO: 34328 - DNA, 201 bp, Homo sapiens
aatgatgcacaccagaaggatgctgggctctgccagtccagccccaccagcctcctggagtggccctgaggccggctctccagaccctaggacctgctccyggaggcgggggctcctggaagcgcccctgacactgctccgggtgtctcttcaaggactttcccacattctacaaagaaaccttttggggacagtcagcaa

SEQ ID NO: 34329 - DNA, 201 bp, Homo sapiens
tctgggctcctccagcagaggcagagggccctgaaacctggggcaggttgtcgctgggagccgggcataggtgccctctccctcacccccatcacctgacyagccttgctcctccttgctttctctcacagcccaggggactctcgggcacacccaggccccaggtggcctcctcctgggttcatacaggcctgcttaatg

SEQ ID NO: 34330 - DNA, 201 bp, Homo sapiens
agccttttctagaagactcctggcctcaggcctgatctctctccttggccgcacctgggtcgcacttaaggcgatcactcacaaggagaacaagtgaaaartcccttgggattcatccctgagtcataggggaatgatgcacaccagaaggatgctgggctctgccagtccagccccaccagcctcctggagtggccctga

SEQ ID NO: 34331 - DNA, 201 bp, Homo sapiens
agtccaggaacaagccctgagtgtatgtgagagggggttgtaggggggctgtggtaggggcagcagggacccctctgggctcctccagcagaggcagaggrccctgaaacctggggcaggttgtcgctgggagccgggcataggtgccctctccctcacccccatcacctgaccagccttgctcctccttgctttctctca

SEQ ID NO: 34332 - DNA, 201 bp, Homo sapiens
gaaaattctagaaataaacaattcatgttttaaataactttcattacagtatattgttataattgttccgttttcttactggttattgttagtctattackgtgcctaatgtataaacttcatcatagggaggcacatgtgtacgtgtaggaagatacatatgtaggctttggtactatctggggttgcaggcagctggaa

SEQ ID NO: 34333 - DNA, 201 bp, Homo sapiens
cactaaaaagggactggttacagccccatgaaccaccactatggagaagcacacatgaaggctcattgtgactctaaaaaggaggtacagggggtgtgagratgtgtcaccaggggcctgatgcatttgtgtgtgtgtgtgtgtgtgtgtgtgtgtgtcggcacacccaaggccgctgagacctgacgtttggaagagcaa

SEQ ID NO: 34334 - DNA, 201 bp, Homo sapiens
tccacactttggcctgctctaaaactcttaagaaccctaaccccaaacttctcggagaaagatttgaggttttctcccatcttgtctggcagccctgcgaytaaacctctttcttctgctgcaacccggtgtttcgggtgtatggacttgccctgccatcaggcaagggacctattacagagacactggctctgtgccctc

SEQ ID NO: 34335 - DNA, 201 bp, Homo sapiens
gaggtgccaggacaggggtccagagaggagctggaggcaggagaagggcgcacaccacctcccagctcatcagccccagccctccctttctgatcctgggygtgagcgctgggtcagctccagggcaggagctcagggctggtgttgaccttaatgacagcagtggtcttttactgagcatttgtcttgtgccaggtgctg

SEQ ID NO: 34336 - DNA, 201 bp, Homo sapiens
taagtggggtcagaaggaccagagggtgggtggggccgagggagggcagtgaggttggtgcagcagcacaggtggacaggccaagggtggccagggagacragggcaggagcgtgggcagccgcatgtcactcaaggcgggcactccttgtgctaggaggggatggtgtccaaggcagaggagcgctcttcaggtcatcca

SEQ ID NO: 34337 - DNA, 201 bp, Homo sapiens
attaggagacaaatgaaggaaggaggcaaaactttcaaggccggactatctcctctggaccagagtttcggcctgctgggaatggagtcaccagccccggrgggggctgacaggtggctcccgcctacagagctgtaactcatccctgctgctgaacaggaaagggcctgccttacccagatcccatcctccggaaagggt

SEQ ID NO: 34338 - DNA, 201 bp, Homo sapiens
ccatgaaccaccactatggagaagcacacatgaaggctcattgtgactctaaaaaggaggtacagggggtgtgagaatgtgtcaccaggggcctgatgcawttgtgtgtgtgtgtgtgtgtgtgtgtgtgtgtcggcacacccaaggccgctgagacctgacgtttggaagagcaataggcaagggtgatttatggagagt

SEQ ID NO: 34339 - DNA, 201 bp, Homo sapiens
cacaccagaaggatgctgggctctgccagtccagccccaccagcctcctggagtggccctgaggccggctctccagaccctaggacctgctcctggaggcrggggctcctggaagcgcccctgacactgctccgggtgtctcttcaaggactttcccacattctacaaagaaaccttttggggacagtcagcaacatgtaa

SEQ ID NO: 34340 - DNA, 201 bp, Homo sapiens
cttgagtccgctgactaaatcgcctcagaactgggaagcaccgcgtagtcggtacctttcaacagaaacgcagaggccactggcgcgcaggaggaggcgaytgcaggtggaggtagtaccggggtaaagacatggagcgggtggacgggaaccgctaggggcccgctggggcgtgaggggcgcggggaggaaagggccgca

SEQ ID NO: 34341 - DNA, 201 bp, Homo sapiens
cagtcgcagctggcggagagaagttcccgaggcccccccgacttgcaaggtcccttgccccgcccagagctgagccttccgaggatctgaggaccgagtcmagcccagctcccaggaggggccgggatcctggggcagggaataaggggcaggggctggctctaaagtcgggcgggagaggggcactaaccgagatggggg

SEQ ID NO: 34342 - DNA, 201 bp, Homo sapiens
ttgccccgcccagagctgagccttccgaggatctgaggaccgagtccagcccagctcccaggaggggccgggatcctggggcagggaataaggggcagggrctggctctaaagtcgggcgggagaggggcactaaccgagatgggggctgagcctccggtctgggagcttcgggaggcgcgtggcgggatggaaaacattc

SEQ ID NO: 34343 - DNA, 201 bp, Homo sapiens
cacacgcatgtacacccacacattctcacaaatgcacccacatgctcactcaacacacgtgcacacacacacaaaggcagctgcagagggtagggtcagamgcagcactgctttcttaccactaggggacgctacttccctgaggctcccagcaggaggcagctgccccgcccagcccagggagggaggctaggccctggg

SEQ ID NO: 34344 - DNA, 201 bp, Homo sapiens
ccccatcttgcagatgagaacacggaggcccagagaggttcctttgcttctcaaggtcatacgacgagaaaggggaactaggagagggagcggctgccagytccaaggacatggagaccctgtgctggccctggaagcagacacctgggcatcgccccagagccaagaggagtagggcagcccccacccttccacccaccc

SEQ ID NO: 34345 - DNA, 201 bp, Homo sapiens
cccagcttgcgaggaatcatgaagtggacacagggtgggaacgtgaattttaatgagggggcagaccgaggaggtggtggctgcccggagatcagggccargctgtgctagatggcgcctggaaggggggtcacccaagtctccctgctgtcatttcaggaggccgacccaagtctccctgctgtcatttcaggaggccga

SEQ ID NO: 34346 - DNA, 201 bp, Homo sapiens
cttctgggtgcaggaggggtgcaaggggtacccagctccaggtccagcggggagcatgagactggctggggccaggtgggaggcgccgcagggtccacctyctgtctctcctgtgggatgcccttcatcctcactaggtttagacttctccatctttgaaagtcaccatctgccccagggaggatgttaggtggccctgtt

SEQ ID NO: 34347 - DNA, 201 bp, Homo sapiens
tagatggcgcctggaaggggggtcacccaagtctccctgctgtcatttcaggaggccgacccaagtctccctgctgtcatttcaggaggccgaattttttyccaatcccagagaaggtgtcagaggcctggttagcagtcttgtcgatggtttcctgggtggtcttggccagctggtccatggctggggaagggcgggaga

SEQ ID NO: 34348 - DNA, 201 bp, Homo sapiens
caccatcttggctcagcaacctccacctcccaggttcaagcaattctcctgcctcagcctcccaagtaactgggattacaggcgcacgccaccaaacccgrctaatttttgtatttttagtagagacagggtttcactatgtggccaggctggtctcgaactcctaacgtcagatgatccgcccaccttggccttcagagt

SEQ ID NO: 34349 - DNA, 201 bp, Homo sapiens
gatcagggccaggctgtgctagatggcgcctggaaggggggtcacccaagtctccctgctgtcatttcaggaggccgacccaagtctccctgctgtcattkcaggaggccgaattttttcccaatcccagagaaggtgtcagaggcctggttagcagtcttgtcgatggtttcctgggtggtcttggccagctggtccatg

SEQ ID NO: 34350 - DNA, 201 bp, Homo sapiens
cacttgcgtgagatatcatgacagctgggtgtgtaggaccacactggtgattgccctgcactctggcctcagcacctgcctctggcgggggacgggggggaggcggggatactgtcacctctgtgttgccccagggccatcctgccccttggcggagtggggcataaaagggcagtgctgtgctggcgggagtcggccagg

SEQ ID NO: 34351 - DNA, 201 bp, Homo sapiens
cccccaaccctttgtctcttccaaagcatacagtgaagttgttctctgaagttcctcatgtgccttaagtctggacccaccaaagaagaaaacaatgaccrctggtcccttcccggagttttctctgactgaactgctgtcacaggaagaaagactgaagcctgctcacatacctggacagattttgcaaaccgttgtctg

SEQ ID NO: 34352 - DNA, 201 bp, Homo sapiens
taaggtctctccgaccagactcccacaggccccccaaccctttgtctcttccaaagcatacagtgaagttgttctctgaagttcctcatgtgccttaagtmtggacccaccaaagaagaaaacaatgaccactggtcccttcccggagttttctctgactgaactgctgtcacaggaagaaagactgaagcctgctcacat

SEQ ID NO: 34353 - DNA, 201 bp, Homo sapiens
catgaaccaccactatggagaagcacacatgaaggctcattgtgactctaaaaaggaggtacagggggtgtgagaatgtgtcaccaggggcctgatgcatktgtgtgtgtgtgtgtgtgtgtgtgtgtgtgtcggcacacccaaggccgctgagacctgacgtttggaagagcaataggcaagggtgatttatggagagta

SEQ ID NO: 34354 - DNA, 201 bp, Homo sapiens
tgaagaagccttaaggtctctccgaccagactcccacaggccccccaaccctttgtctcttccaaagcatacagtgaagttgttctctgaagttcctcatstgccttaagtctggacccaccaaagaagaaaacaatgaccactggtcccttcccggagttttctctgactgaactgctgtcacaggaagaaagactgaag

SEQ ID NO: 34355 - DNA, 201 bp, Homo sapiens
cacacaagcaaagccagtgcctctgtggacaggcagcttaagacattaggagacaaatgaaggaaggaggcaaaactttcaaggccggactatctcctctrgaccagagtttcggcctgctgggaatggagtcaccagccccggggggggctgacaggtggctcccgcctacagagctgtaactcatccctgctgctgaac

SEQ ID NO: 34356 - DNA, 201 bp, Homo sapiens
tgtaggggctgtggaaggtcaggaggcccctctgggccctgggagcccaggagggaagcagtgcgtctgtgggggatggggtccctaccaaggaacccccmatggtgcaccccaggagcccagctcctacctcctctgccacttcctctttctctttggatgcctcaccctcctgttggggggcagatggcctcaagtcct

SEQ ID NO: 34357 - DNA, 201 bp, Homo sapiens
tacacagtccctgtaggggctgtggaaggtcaggaggcccctctgggccctgggagcccaggagggaagcagtgcgtctgtgggggatggggtccctaccmaggaaccccccatggtgcaccccaggagcccagctcctacctcctctgccacttcctctttctctttggatgcctcaccctcctgttggggggcagatgg

SEQ ID NO: 34358 - DNA, 201 bp, Homo sapiens
acagcccagggaggccgacactctcacccccatcttgcagatgagaacacggaggcccagagaggttcctttgcttctcaaggtcatacgacgagaaaggrgaactaggagagggagcggctgccagctccaaggacatggagaccctgtgctggccctggaagcagacacctgggcatcgccccagagccaagaggagta

SEQ ID NO: 34359 - DNA, 201 bp, Homo sapiens
tgcctcatcacacagcccagggaggccgacactctcacccccatcttgcagatgagaacacggaggcccagagaggttcctttgcttctcaaggtcatacracgagaaaggggaactaggagagggagcggctgccagctccaaggacatggagaccctgtgctggccctggaagcagacacctgggcatcgccccagagc

SEQ ID NO: 34360 - DNA, 201 bp, Homo sapiens
ccccgcgccagggccaggcctcatccggcgctcaaccagtgccacgttgagtcacctactggcaaggcatacaccgtaccggggccacacgcgtggacacrtgccgggggggtgctgggaacaccagtccatccggaacccactagacaaaaccttccagggccggaggttaccggtttgtcccgaaaggaagtggtgtgg

SEQ ID NO: 34361 - DNA, 201 bp, Homo sapiens
attttaatgagggggcagaccgaggaggtggtggctgcccggagatcagggccaggctgtgctagatggcgcctggaaggggggtcacccaagtctccctkctgtcatttcaggaggccgacccaagtctccctgctgtcatttcaggaggccgaattttttcccaatcccagagaaggtgtcagaggcctggttagcagt

SEQ ID NO: 34362 - DNA, 201 bp, Homo sapiens
gggacccctcctcaagctacacagcacccagaggaagcatggcaggagtgggctcaagttttatttggaatcatttaaaaaaaaaattcacagcagcatawgtggggtcagaaggaccagagggtgggtggggccgagggagggcagtgaggttggtgcagcagcacaggtggacaggccaagggtggccagggagacgag

SEQ ID NO: 34363 - DNA, 201 bp, Homo sapiens
ctgcccggagatcagggccaggctgtgctagatggcgcctggaaggggggtcacccaagtctccctgctgtcatttcaggaggccgacccaagtctccctkctgtcatttcaggaggccgaattttttcccaatcccagagaaggtgtcagaggcctggttagcagtcttgtcgatggtttcctgggtggtcttggccagc

SEQ ID NO: 34364 - DNA, 201 bp, Homo sapiens
tttacaaccacctcctgaagtgggtatttttgttgatagcatcagtgtataggaggaaactgaggcagtgaggtcggtctcacccaaacgcatgtggcagsgacttggatcctcgaatctgcctaggtgcctgtaaaccctagggctctggcatcatcggagcccccagccccaaacagctgcaggggcactgctgactgg

SEQ ID NO: 34365 - DNA, 201 bp, Homo sapiens
gctgaacccgttcctgttcctgggaggacctggggacccctcctcaagctacacagcacccagaggaagcatggcaggagtgggctcaagttttatttggmatcatttaaaaaaaaaattcacagcagcataagtggggtcagaaggaccagagggtgggtggggccgagggagggcagtgaggttggtgcagcagcacag

SEQ ID NO: 34366 - DNA, 201 bp, Homo sapiens
caggtcccatgaatgccctgtgtgtgtccctataggatacctggtcctatcaacaggctgaacccgttcctgttcctgggaggacctggggacccctcctsaagctacacagcacccagaggaagcatggcaggagtgggctcaagttttatttggaatcatttaaaaaaaaaattcacagcagcataagtggggtcagaa

SEQ ID NO: 34367 - DNA, 201 bp, Homo sapiens
aaccctagggctctggcatcatcggagcccccagccccaaacagctgcaggggcactgctgactggctctctgcctgtagccagagacccagtggatgcasccggagagggcctggtaaatctttcccctgagagggcgagatacaggtgtgtgcacttgcagaccatgcaaccccaagggggagagggcagtgtgcctgt

SEQ ID NO: 34368 - DNA, 201 bp, Homo sapiens
gagacaaatgaaggaaggaggcaaaactttcaaggccggactatctcctctggaccagagtttcggcctgctgggaatggagtcaccagccccggggggggctgacaggtggctcccgcctacagagctgtaactcatccctgctgctgaacaggaaagggcctgccttacccagatcccatcctccggaaagggttagtc

SEQ ID NO: 34369 - DNA, 201 bp, Homo sapiens
cattaggagacaaatgaaggaaggaggcaaaactttcaaggccggactatctcctctggaccagagtttcggcctgctgggaatggagtcaccagccccgrggggggctgacaggtggctcccgcctacagagctgtaactcatccctgctgctgaacaggaaagggcctgccttacccagatcccatcctccggaaaggg

SEQ ID NO: 34370 - DNA, 201 bp, Homo sapiens
cactgcctagtacatcatgagaaattaatctatggtaagcactacttttcctatcacggcaaagatattggaaggggatctaagcaatgaaaatgacacaygcaaatgctctaaagtgtgaaactgcactgtgagttctgtacaactaaaattctataaagagtttctatgaagaaactatggaaagatgcagcacagaat

SEQ ID NO: 34371 - DNA, 201 bp, Homo sapiens
ggattttttttttttttttttttttttttttttgagacggagtctcactctgttgcccaggctggagtgcagtggcgcaatctctgctcactgcaagctcygcctcccgggttcacgccattctcctgcctcagcctcccgagtagctgggactacaggcgcccgccaccacgcccggctatttttttttttttgtatttt

SEQ ID NO: 34372 - DNA, 201 bp, Homo sapiens
tgagttcatgtcctttgcaggggcatggatgaagctggaaaccatcattctcagcaaactatcacaaggacagaaaaccaaacacctcatgttctcactcmtaggtgggagttgaacagtgagaacacatggacacagggcgggaaacatcacaccctgaagcgtgttgcgggggtgggagcctgggggagggttagcatt

SEQ ID NO: 34373 - DNA, 201 bp, Homo sapiens
gaagctatatcctcatgattgtgtgactaattaagtgatgatgttgagaaagataaaagatttaaggagcattcaaagatgattcaagaatattatccagrcaactgtataaatggtgctactgttcactaacatcaagaaagcagagaacagcacagtctaggaagtgaaaacatgttgtttggacaagttgactttgag

SEQ ID NO: 34374 - DNA, 201 bp, Homo sapiens
cccaggattgcaaaggtcccttttagaaactgtgtatcctcttggggggtctcactcaccctttctccttgttagagagctcctgctggctccaggccagrcctcagtgggctgttgcttggcttcactctcctctgttctccatgtccctttattcccttgatggatctcaacctggtttcttagataatcttcctgtac

SEQ ID NO: 34375 - DNA, 201 bp, Homo sapiens
aattacgtgttcattcttattaggttgtactacttttaaagtggcttctcatattttgctatatctcacatcattgttcatctgataatatatgaaaactmcaatgtgtttcttattccagaaaggggagtaattcttattcatgaataaacactgaaggagaaagattatggatcatagtgggaaaagccacaataccat

SEQ ID NO: 34376 - DNA, 201 bp, Homo sapiens
aaggtcccttttagaaactgtgtatcctcttggggggtctcactcaccctttctccttgttagagagctcctgctggctccaggccaggcctcagtgggcygttgcttggcttcactctcctctgttctccatgtccctttattcccttgatggatctcaacctggtttcttagataatcttcctgtacagtcagtttact

SEQ ID NO: 34377 - DNA, 201 bp, Homo sapiens
ccaacaataattgagagagcatcttaatgagagctgattagggaaaagccaaatgagcaagtcagtacctcaacaagactttcttgtgctgtggcagaacrtttcttctaaaatgtaagaagctacagcctattttgtgcataggccacataaatcatagtaggtggaggaagagtcaggtatcaatatgcagatatccag

SEQ ID NO: 34378 - DNA, 201 bp, Homo sapiens
gagctgattagggaaaagccaaatgagcaagtcagtacctcaacaagactttcttgtgctgtggcagaacatttcttctaaaatgtaagaagctacagccyattttgtgcataggccacataaatcatagtaggtggaggaagagtcaggtatcaatatgcagatatccagaaaaaggttccagcctcctaaaagatggca

SEQ ID NO: 34379 - DNA, 201 bp, Homo sapiens
agttatgcatttgtacatttagagatacatgttaaaattatgggtttagatgatattatctaaaataattgtataattctacatttatactaatagaaaaytgagcactcactatgtttggggaagtgagacaataatgaagctataataattattcccatatcatagataaagataccgatgctcagaaaatgtaagcaa

SEQ ID NO: 34380 - DNA, 201 bp, Homo sapiens
tctaaacactggaacagttacctatttccagacacacttccaccacatccaccctaacccaactcaactatcataatatagggaaaaaaatttttagatcrtcttgatgcaacaattcataatcaatattccaaatgatgtaactggtgattacagtccatcttcatcacacacacccaagagcaacactttgacatcggc

SEQ ID NO: 34381 - DNA, 201 bp, Homo sapiens
gaaactatgtacacagagaggtcaaagataaagtggaaatatgtataatatgcatcaaaaataagtttaacaaggaagagggtcaacacagctcatgtcasactcaaataaacaaggaagtcttggaataacttcatcttagaccaaaaattgctatactttagtgaaaggcaattgctgattcacagaagaaaacatggc

SEQ ID NO: 34382 - DNA, 201 bp, Homo sapiens
attcacagaagaaaacatggctggctctccataacatcatactaaatatctcattctccaaaagcacactaacgacaagcacaaaggttcacaataggagycttgataacactaaccaaagttaaatttaagtacaaatgattaaaatggaaatagtgacataatcaggcacacagacatatatatgcacgtaaatcgttc

SEQ ID NO: 34383 - DNA, 201 bp, Homo sapiens
ttgagaacagatcttcataactcactccaccaactcgcatgccaacctcctctagaaacaccctcacagacacacccatgataatgctttaccagttttcwtgggtattccttaattcaatcaagttgacacctaaaattaaagataacacctgtgctatgataaattggcaacattgattaaatgtccatgaacaccaag

SEQ ID NO: 34384 - DNA, 201 bp, Homo sapiens
agcatgaggaatttatcttactggattttttttttttttttttttttttttttttgagacggagtctcactctgttgcccaggctggagtgcagtggcgcratctctgctcactgcaagctccgcctcccgggttcacgccattctcctgcctcagcctcccgagtagctgggactacaggcgcccgccaccacgcccggc

SEQ ID NO: 34385 - DNA, 201 bp, Homo sapiens
atacgatttcagacccccagaggttctttcaacgtgtctagtgtccagcacagcgcacctggtcagagtttcgttgtaacttacagcaccatgttttcttyggagtgttgttcaggggtctcttgcatcagaatggcctgaactgcttgttaggaatgcagcttcctgatcttaccgtccagtttctgattcagtaggtct

SEQ ID NO: 34386 - DNA, 201 bp, Homo sapiens
aaaatccctccacgaaattgatcttaaaaagactagctgagtcaaatcctaacagatctgtcctgtatctggctgccacctttcaaaattgctgaccttaygcttacatattcgaatgcttcctggaagtcaaaacatattttcaaaagtttctaatggaaaagaactaagcctgtcacttggttttaaaaggtggaaatt

SEQ ID NO: 34387 - DNA, 201 bp, Homo sapiens
gagcctgggggagggttagcattaggagaaacacttaatgtaaatgacgagttaatgggtgcagcaaaccaacatggcacatgtatacctatgtaacaaamctgcacgttgcacatgtgtaccctagaacttaatgtataattttaaaaaaatctcaaagaattagattccctagcatgaggaatttatcttactggattt

SEQ ID NO: 34388 - DNA, 201 bp, Homo sapiens
taaaaaaatctcaaagaattagattccctagcatgaggaatttatcttactggattttttttttttttttttttttttttttttgagacggagtctcactstgttgcccaggctggagtgcagtggcgcaatctctgctcactgcaagctccgcctcccgggttcacgccattctcctgcctcagcctcccgagtagctgg

SEQ ID NO: 34389 - DNA, 201 bp, Homo sapiens
tcagctctcaccagaacacttattgctaagtatttggggattttatgaactgtttgtaaaatctttggaagtttgaaattagccatagtggaaatatttakgccagcaaaatatgcaaaggctacaaatagatattttctaaaattgggcagctagtttaccaggacaccacgaaaggtttcttcagatttctatttaaga

SEQ ID NO: 34390 - DNA, 201 bp, Homo sapiens
agataaggcgacattctatctttctgaattgccagagttcttatgctgattctttctcatgtgtgagggctggtgttcctttaactgtaatgtaagtttastatagacagttggcttcatttctaggtgctttcttagggccaacactctgcattgataaaagaaaaacttcagccaaattaaatttaaatgagtttaatt

SEQ ID NO: 34391 - DNA, 201 bp, Homo sapiens
cagacacacttccaccacatccaccctaacccaactcaactatcataatatagggaaaaaaatttttagatcgtcttgatgcaacaattcataatcaataytccaaatgatgtaactggtgattacagtccatcttcatcacacacacccaagagcaacactttgacatcggccactcactcacataggcatagccagtct

SEQ ID NO: 34392 - DNA, 201 bp, Homo sapiens
caatgaaagcctacctgtcagagagacaaactacctttttaaaaaaacacagatttaattttttttcaaaaggcaaagttcagaatcaccatatagtcacytcataaacctatatcatatttcatttcactggtttctgtaatttgaatagattatctctggagcatgtccaagaagttagacttgtgaaaatatgacagt

SEQ ID NO: 34393 - DNA, 201 bp, Homo sapiens
tttccaagctggcaaatctgccaggctaggagcagcagggatgggttgagttgcccaatctgccatccaggtgcttttcaggggaacatggagatgtatascctagcagaggtcaggtaggggtagagctggaagctggtactgagcctggtctggtagagaggagtgtagcaatttgacttctccccagcaccatgactg

SEQ ID NO: 34394 - DNA, 201 bp, Homo sapiens
ttttctatttttagtagagatggggtttctccacattggtcaggctggtcttgaactcctgacctgaggtgatctgcccacctcagcctcccagagtgccrggattacaggtgtgagccaccacacccggtcgaatgtgggtgttttaagagtgtgggctcccccaactgcttgaatgctttccaagctggcaaatctgcc

SEQ ID NO: 34395 - DNA, 201 bp, Homo sapiens
tggaaaactgcattttatttagcataatcccctgggggattgggggctccccaaagtttgagaaccaccgctaagggctattatgtttctgcaggcaaacrtatttttctttttttgttttatgtaatacaaagtaggagtttaaaaatttatttttggtaaaactagaacactgtcttcaaattagtaagagccttgtgt

SEQ ID NO: 34396 - DNA, 201 bp, Homo sapiens
ttcaagcaattctgcctcagcctcctgagtagctgattacaggcatgcgccaccatgcccagctaattttctatttttagtagagatggggtttctccacrttggtcaggctggtcttgaactcctgacctgaggtgatctgcccacctcagcctcccagagtgccaggattacaggtgtgagccaccacacccggtcgaa

SEQ ID NO: 34397 - DNA, 201 bp, Homo sapiens
ttatattaatttcttatagaaatataaagagtataaccttcaaaaactgggtattgttaaattatacattggattctgttaaatgataacaaataaatatraatataaatagttaaattaaaaatatatagatattacttaataggtataagacactcaaatttatgaatgtacttaagtttctttgttttacaatgagaa

SEQ ID NO: 34398 - DNA, 201 bp, Homo sapiens
caatggcgtgatctcagctccccgcaacctgtgcctcccgggttcaagcaattctgcctcagcctcctgagtagctgattacaggcatgcgccaccatgcscagctaattttctatttttagtagagatggggtttctccacattggtcaggctggtcttgaactcctgacctgaggtgatctgcccacctcagcctccca

SEQ ID NO: 34399 - DNA, 201 bp, Homo sapiens
ctgtcctattatgttcccccaagtagttttataatttctttcatatgagtcctctatctttcttcagtctacattccactgttactattgttactctcgtrtataactctattgctactgattaacttgttttggtggaagtgtttccctgttgtattagatagggttctccagagagataaaaccaatagaatggatgga

SEQ ID NO: 34400 - DNA, 201 bp, Homo sapiens
ggatttttttttttccagatggagttttcgctcttgttgcccaggctagaatccaatggcgtgatctcagctccccgcaacctgtgcctcccgggttcaakcaattctgcctcagcctcctgagtagctgattacaggcatgcgccaccatgcccagctaattttctatttttagtagagatggggtttctccacattggt

SEQ ID NO: 34401 - DNA, 201 bp, Homo sapiens
agagcatatctctattcagactccagaccacagctgggagcaagcagactcaaaagatggtaatacgtcaaaggagattgctgagagagaagcaatgaccrttgagattggagtaaaagaataatgtagccgaggaggaggagccaagatggccgaataggaacagatcgggtctacagctcccagcatgagcgacgcaga

SEQ ID NO: 34402 - DNA, 201 bp, Homo sapiens
tggcaccatgctctcattttccttactcgggtgttctgggccacagggctccctcaggcaggggacatggctgacaagctgtactctttccagactagccytgcagaaagagcaacattctgctcctccaccagcccagatgtctcatccttctcagtgttctgagagtgtggatttttttttttccagatggagttttcg

SEQ ID NO: 34403 - DNA, 201 bp, Homo sapiens
gctattccctgtcacctgtggtactgccttactgcctttgtttaactcctgctctgtttaaatgtacccataatgggcatgagagcatatctctattcagrctccagaccacagctgggagcaagcagactcaaaagatggtaatacgtcaaaggagattgctgagagagaagcaatgaccattgagattggagtaaaaga

SEQ ID NO: 34404 - DNA, 201 bp, Homo sapiens
cataccattaagttaggttttcaattttgtctcacaaggttagggttcatccacaaggactcaaatatagaagtatggagtatggagttcttctaaggccrtgtttagtttgctttaacagtacagaatctttatttgtggctgaaatttttgccttaggtttcacaggcactgtatactggcaaaatatttttggtgttg

SEQ ID NO: 34405 - DNA, 201 bp, Homo sapiens
taggtggagccatagaaaagttggatatatatttgggggtgactacaagtaaaggatgctacaaatgaggatgaaactatgtacacagagaggtcaaagawaaagtggaaatatgtataatatgcatcaaaaataagtttaacaaggaagagggtcaacacagctcatgtcagactcaaataaacaaggaagtcttggaat

SEQ ID NO: 34406 - DNA, 201 bp, Homo sapiens
tagaagcaatgatgtgcccaagtcagctctcaccagaacacttattgctaagtatttggggattttatgaactgtttgtaaaatctttggaagtttgaaaytagccatagtggaaatatttatgccagcaaaatatgcaaaggctacaaatagatattttctaaaattgggcagctagtttaccaggacaccacgaaaggt

SEQ ID NO: 34407 - DNA, 201 bp, Homo sapiens
ctttcatatgagtcctctatctttcttcagtctacattccactgttactattgttactctcgtatataactctattgctactgattaacttgttttggtgraagtgtttccctgttgtattagatagggttctccagagagataaaaccaatagaatggatggatggatggatggatggatggatggatggatggatggat

SEQ ID NO: 34408 - DNA, 201 bp, Homo sapiens
gtgttcaagagaaagggttttgaataagacaaatctgatttgaatcctgaattcaacactcattagttgattgatattggagaaatagtttcactgatccyctaaaataatggaagtctccacttcatcagcatggttaaaatattaagtgagacaatgcatatttatgcatataagtttacatatatgtaaaatttatat

SEQ ID NO: 34409 - DNA, 201 bp, Homo sapiens
aaccaatagaatggatggatggatggatggatggatggatggatggatggatggatggacagatgaatggacatacagacagacagttcagaaggaatttrttagaggaattggctcactgggttatggaaactgagaaggtccaggacagggcaattgtaagctggagaccctgggattccattggtgttgctcagccca

SEQ ID NO: 34410 - DNA, 201 bp, Homo sapiens
cagggaagtaatttcatatagtgttcaagagaaagggttttgaataagacaaatctgatttgaatcctgaattcaacactcattagttgattgatattggrgaaatagtttcactgatcccctaaaataatggaagtctccacttcatcagcatggttaaaatattaagtgagacaatgcatatttatgcatataagttta

SEQ ID NO: 34411 - DNA, 201 bp, Homo sapiens
agggcaattgtaagctggagaccctgggattccattggtgttgctcagcccaaatctgaaagcttcagaatcagggaatctgatggcataattctcaataygaggccaaaagcctaggaacctggggaccactggtgttaagtcctggagtccaaaggccagagagcctggagttctgatgtccaagggcaggagaagaag

SEQ ID NO: 34412 - DNA, 201 bp, Homo sapiens
catgattgactgctttgtaaccctacatacataccttctaagttagccccttaaatttacctccagattttcctacacactctataagagatctcgcaaakaaatggaattatacagttgatgaataatagcttctgtgtgtaagatactacaatacaggaaccatggatgtagtcaggaatgaaaaatggcacaatatca

SEQ ID NO: 34413 - DNA, 201 bp, Homo sapiens
cacatgattgactgctttgtaaccctacatacataccttctaagttagccccttaaatttacctccagattttcctacacactctataagagatctcgcawagaaatggaattatacagttgatgaataatagcttctgtgtgtaagatactacaatacaggaaccatggatgtagtcaggaatgaaaaatggcacaatat

SEQ ID NO: 34414 - DNA, 201 bp, Homo sapiens
aaaaccacaaagatggggaaaaaacagaacagaaaaactggaaactctaaaaagcagagtgcctctcctcctccaaaggatagcagttcctcaccagcaasggaacaaagctggatggagaatgactttgacgagctgagaaaagaaggcttcagacgatcaaattactctgagctacgggaggacattcaaaccaaaggc

SEQ ID NO: 34415 - DNA, 201 bp, Homo sapiens
tgaggctccctgtggagtaaagtgttgcctccatcaaaacttctgggggctctctgaattcatctagaggcctgggagggccaagggaattctcctcttcycaggattgcaaaggtcccttttagaaactgtgtatcctcttggggggtctcactcaccctttctccttgttagagagctcctgctggctccaggccaggc

SEQ ID NO: 34416 - DNA, 201 bp, Homo sapiens
aggaatttgttagaggaattggctcactgggttatggaaactgagaaggtccaggacagggcaattgtaagctggagaccctgggattccattggtgttgytcagcccaaatctgaaagcttcagaatcagggaatctgatggcataattctcaatacgaggccaaaagcctaggaacctggggaccactggtgttaagtc

SEQ ID NO: 34417 - DNA, 201 bp, Homo sapiens
ttggaaaactgcattttatttagcataatcccctgggggattgggggctccccaaagtttgagaaccaccgctaagggctattatgtttctgcaggcaaayatatttttctttttttgttttatgtaatacaaagtaggagtttaaaaatttatttttggtaaaactagaacactgtcttcaaattagtaagagccttgtg

SEQ ID NO: 34418 - DNA, 201 bp, Homo sapiens
gtgtgacactgtacgccacttttctcttgtaggttctacccatcacctacagataatggtgagtaaatacaagaacaatgttctgctgaaaggattagaarccatcaatgactatcacttcagcataattaattccttactgatcaatgatttaaaacttaattcaacaaggagagacgaatatgacaaaattcagattgc

SEQ ID NO: 34419 - DNA, 201 bp, Homo sapiens
tgctctgtttaaatgtacccataatgggcatgagagcatatctctattcagactccagaccacagctgggagcaagcagactcaaaagatggtaatacgtyaaaggagattgctgagagagaagcaatgaccattgagattggagtaaaagaataatgtagccgaggaggaggagccaagatggccgaataggaacagatc

SEQ ID NO: 34420 - DNA, 201 bp, Homo sapiens
ccaggctgtgtagatttagaatgcagattcttaagcaaggtgaatgagaagatcaaactgccataggtggagccatagaaaagttggatatatatttgggrgtgactacaagtaaaggatgctacaaatgaggatgaaactatgtacacagagaggtcaaagataaagtggaaatatgtataatatgcatcaaaaataagt

SEQ ID NO: 34421 - DNA, 201 bp, Homo sapiens
tttctcctaaatcttgatgagcttccttacctccagagtctgaattctatgtcagtcatttccgtctgcttaattatcattactgtggggttggggtattygtttggagataaggcgacattctatctttctgaattgccagagttcttatgctgattctttctcatgtgtgagggctggtgttcctttaactgtaatgta

SEQ ID NO: 34422 - DNA, 201 bp, Homo sapiens
gatctctttgcataatcccatatttcaaagaagttttgttcatttttaaaattcttttctctttacttctgtctgactgagttaattggaagactctcaasctctgagagtctttcctcaatttggtctattctgttgttaatgcttctgagtgtacgatgaaattcttaaagtaaatttttcaattctagaagttcagtt

SEQ ID NO: 34423 - DNA, 201 bp, Homo sapiens
tggggtttttcaaagattatagacttttgccacctcacattagatatttttctaacaaattttgttaccaaattttcacaaatgcacaagcttttatttcmatttggagggtgtttcaaaagtatatatataagatttagcgtgaacagtataaaattacttcaggtatttttatttgattttgatccctccttcttttct

SEQ ID NO: 34424 - DNA, 201 bp, Homo sapiens
tctgcagcaagacatataaacattcttgctaaaatggggtttttcaaagattatagacttttgccacctcacattagatatttttctaacaaattttgttrccaaattttcacaaatgcacaagcttttatttccatttggagggtgtttcaaaagtatatatataagatttagcgtgaacagtataaaattacttcaggt

SEQ ID NO: 34425 - DNA, 201 bp, Homo sapiens
tcatcttctttctcactactttcagcctaccgtgtttatctaattcctatttcatttcgatcagggctttacacatttttataagttgaaagacttaatcraattacttctttactcttactttttagactgtatttttaaaaaaaatctcatgtgtttatttgattttggaatactctttttccaaaagagggctggtag

SEQ ID NO: 34426 - DNA, 201 bp, Homo sapiens
aaaacctagttttttaattgcaagtcagtacatccccaaacactagtacttagaggaatgatgtgtataactttctagtgtctctttttttttttttttttaatgaagccatctatgccctgtcttacaataggccaggaaatgtgcaccaatcctttgtttccagaaagacaattgacatataacaaacctactacccag

SEQ ID NO: 34427 - DNA, 201 bp, Homo sapiens
tctttaaggatatgtaacttagtgaacactcatcttctttctcactactttcagcctaccgtgtttatctaattcctatttcatttcgatcagggctttayacatttttataagttgaaagacttaatcgaattacttctttactcttactttttagactgtatttttaaaaaaaatctcatgtgtttatttgattttgga

SEQ ID NO: 34428 - DNA, 201 bp, Homo sapiens
ctccagcaggcagtttttcttcattagtttctcatcaagcttcagatttatcaaattgcataataattaatcttgtttgtaaaaagcaatgagctaaacamtttagtaaatatatatcgcacaaatatagtatcttcaccccccaatagagaagagtgttaacttcaggttcagaggggaaaatgctttgtccatatttat

SEQ ID NO: 34429 - DNA, 201 bp, Homo sapiens
gtatgtgttttgtatcccaagtcagacaagtctaagctcttctggtttgaggaggtagctagtgtgggtcaatgtacctatttctatgaagcccatggtcyacgcttgcctgtcacacttcctcacttagcatactgggagccagagccctgatattttgaaatgctgtttattaataacaagtccatgggtctagctaga

SEQ ID NO: 34430 - DNA, 201 bp, Homo sapiens
acaaagaggagacaatacttcaatgaaagcctacctgtcagagagacaaactacctttttaaaaaaacacagatttaattttttttcaaaaggcaaagttyagaatcaccatatagtcacctcataaacctatatcatatttcatttcactggtttctgtaatttgaatagattatctctggagcatgtccaagaagttag

SEQ ID NO: 34431 - DNA, 201 bp, Homo sapiens
ctggtactgagcctggtctggtagagaggagtgtagcaatttgacttctccccagcaccatgactgcaggctctattgggactatggcagctggtactgggctgctctggggttcaagacctgtgaggctccctgtggagtaaagtgttgcctccatcaaaacttctgggggctctctgaattcatctagaggcctgggag

SEQ ID NO: 34432 - DNA, 201 bp, Homo sapiens
gagaacagatcttcataactcactccaccaactcgcatgccaacctcctctagaaacaccctcacagacacacccatgataatgctttaccagttttcatrggtattccttaattcaatcaagttgacacctaaaattaaagataacacctgtgctatgataaattggcaacattgattaaatgtccatgaacaccaagta

SEQ ID NO: 34433 - DNA, 201 bp, Homo sapiens
gatcagaacgaatttatagacaaaaaaggtaaagtgaggtacaagaatcggaagtgcggtacagaaagagtgagattggttacagctcggcgtttgccttrttttaacacaatttgaacattccgcagtctacgagtagttgaagtatggctgctgggactagccaacactcagccattgttacaggtgcataccattaag

SEQ ID NO: 34434 - DNA, 201 bp, Homo sapiens
cccggctatttttttttttttgtatttttagtagagacggggtttcaccgtgttagccaggatggtctcgatctcctaacctcgtgatccgcccgcctcgrccacccaaagtgctgggattacaggcgtgagccaccgcgcccggcctcttactggattttttaatgccactatccggcagtgattaaatagcaagttcaa

SEQ ID NO: 34435 - DNA, 201 bp, Homo sapiens
ctcagaatcacagcagtttcagagatactccaggggtgccttgtgatcagaacgaatttatagacaaaaaaggtaaagtgaggtacaagaatcggaagtgmggtacagaaagagtgagattggttacagctcggcgtttgccttattttaacacaatttgaacattccgcagtctacgagtagttgaagtatggctgctgg

SEQ ID NO: 34436 - DNA, 201 bp, Homo sapiens
cagacagttcagaaggaatttgttagaggaattggctcactgggttatggaaactgagaaggtccaggacagggcaattgtaagctggagaccctgggatkccattggtgttgctcagcccaaatctgaaagcttcagaatcagggaatctgatggcataattctcaatacgaggccaaaagcctaggaacctggggacca

SEQ ID NO: 34437 - DNA, 201 bp, Homo sapiens
caatcactacacttttcctttaaaattgctattaggttttgtaagtaaggaagtggaggcatttttgtaagtgcattaactctcaaaggccacaaaagtaygtttttaaacttatggatcaagttgtgtggatacgatttcagacccccagaggttctttcaacgtgtctagtgtccagcacagcgcacctggtcagagtt

SEQ ID NO: 34438 - DNA, 201 bp, Homo sapiens
ccaacatggcacatgtatacctatgtaacaaacctgcacgttgcacatgtgtaccctagaacttaatgtataattttaaaaaaatctcaaagaattagatyccctagcatgaggaatttatcttactggattttttttttttttttttttttttttttttgagacggagtctcactctgttgcccaggctggagtgcagtg

SEQ ID NO: 34439 - DNA, 201 bp, Homo sapiens
taattaattgaaaccttcccaagcagatattaataaatttttctctgtatttttagatatactctttataagcttgcattttttgcaatatagtatcctayaatgattactattttagtacttgttttattcatttaactatcagatcgatcttttcaagtctatgaattaaaatacaaattattatttagtggcaatgta

SEQ ID NO: 34440 - DNA, 201 bp, Homo sapiens
tgaacagtgagaacacatggacacagggcgggaaacatcacaccctgaagcgtgttgcgggggtgggagcctgggggagggttagcattaggagaaacacytaatgtaaatgacgagttaatgggtgcagcaaaccaacatggcacatgtatacctatgtaacaaacctgcacgttgcacatgtgtaccctagaacttaat

SEQ ID NO: 34441 - DNA, 201 bp, Homo sapiens
taggtaaaacatgattactttagaacttgaggaaatggttaaaacccacaagtcaaacaaaaagtaattaatttttaattaattgaaaccttcccaagcaratattaataaatttttctctgtatttttagatatactctttataagcttgcattttttgcaatatagtatcctataatgattactattttagtacttgtt

SEQ ID NO: 34442 - DNA, 201 bp, Homo sapiens
ccattactgggtatatacccaaaggattataaatcatgctactataaagacacatgcatatgtatgtttattgcagcactattcacagtaacaaagacttsgaaccaacccaaatgtccagcaatgatagaatggattaaaaaaatgtggcacatatacaccatggaatactatacaaccaaaaaaaaggatgagttcatg

SEQ ID NO: 34443 - DNA, 201 bp, Homo sapiens
caaaaccgcaatcagataccatctcacgccagttagaatggcaatcattaaaaagtcaggaaacaacagaagctggagaggatggggagaaacaggaatgyttttacactgttggtgccagtgtaaattagttcaatcattgtggaagacagtatggcaatttctcagggatctagaactagaaataccatttgacccagc

SEQ ID NO: 34444 - DNA, 201 bp, Homo sapiens
cagtaacaaagacttcgaaccaacccaaatgtccagcaatgatagaatggattaaaaaaatgtggcacatatacaccatggaatactatacaaccaaaaawaaggatgagttcatgtcctttgcaggggcatggatgaagctggaaaccatcattctcagcaaactatcacaaggacagaaaaccaaacacctcatgttct

SEQ ID NO: 34445 - DNA, 201 bp, Homo sapiens
aagggctattatgtttctgcaggcaaacatatttttctttttttgttttatgtaatacaaagtaggagtttaaaaatttatttttggtaaaactagaacaytgtcttcaaattagtaagagccttgtgtaggagaaatattctcttcaaaaatccctccacgaaattgatcttaaaaagactagctgagtcaaatcctaac

SEQ ID NO: 34446 - DNA, 201 bp, Homo sapiens
gaaattgatcttaaaaagactagctgagtcaaatcctaacagatctgtcctgtatctggctgccacctttcaaaattgctgaccttatgcttacatattcraatgcttcctggaagtcaaaacatattttcaaaagtttctaatggaaaagaactaagcctgtcacttggttttaaaaggtggaaattgaaataagacaaa

SEQ ID NO: 34447 - DNA, 201 bp, Homo sapiens
cccaaccaacaatgaagatgattgatacagccatcatactgaaggattcctactgtgtcagcaattatattaatttcttatagaaatataaagagtataaycttcaaaaactgggtattgttaaattatacattggattctgttaaatgataacaaataaatatgaatataaatagttaaattaaaaatatatagatatta

SEQ ID NO: 34448 - DNA, 201 bp, Homo sapiens
gcccggctatttttttttttttgtatttttagtagagacggggtttcaccgtgttagccaggatggtctcgatctcctaacctcgtgatccgcccgcctcrgccacccaaagtgctgggattacaggcgtgagccaccgcgcccggcctcttactggattttttaatgccactatccggcagtgattaaatagcaagttca

SEQ ID NO: 34449 - DNA, 201 bp, Homo sapiens
agaaactatcatcagagtgaacaggcaacctacagaatgggagaaaatctttgcaatctacccatcagacaaacaatcccatcaaaaagtgggcaaaggayatgaacagacacttctcaaaggaagacatttatgccaccaacagacatatgaaacaatgctcatcatcactggtcatcagagaaattcaaatcaaaaccg

SEQ ID NO: 34450 - DNA, 201 bp, Homo sapiens
aaaactaataaacagaaaggacatccacaccaaaaacccatctgtacatcaccatcatcaaagaccaaaagtagataaaaccacaaagatggggaaaaaayagaacagaaaaactggaaactctaaaaagcagagtgcctctcctcctccaaaggatagcagttcctcaccagcaacggaacaaagctggatggagaatga

SEQ ID NO: 34451 - DNA, 201 bp, Homo sapiens
cacctggctcggagggtcctacgcccacggagtctcgctgattgtgagcacagcagtctgagatcaaactgcaaggtggcagtgaggctgggggaggggcwcccgccattgcccaggcttgcttaggtaaacaaagcagctgggaagctccaactgggtggagcccaccacagctcaaggaggcctgcctgcctctgtagg

SEQ ID NO: 34452 - DNA, 201 bp, Homo sapiens
aatactgtgcttttccgaccggtttaaaaaatggcgcaccatgagattatatcccgcacctggctcggagggtcctacgcccacggagtctcgctgattgygagcacagcagtctgagatcaaactgcaaggtggcagtgaggctgggggaggggcacccgccattgcccaggcttgcttaggtaaacaaagcagctggga

SEQ ID NO: 34453 - DNA, 201 bp, Homo sapiens
aatgaccattgagattggagtaaaagaataatgtagccgaggaggaggagccaagatggccgaataggaacagatcgggtctacagctcccagcatgagcracgcagaagacgggtgatttctgcatttccatctgagataccgggttcatctcactagggagtgccagacagtgggcgcaggtcagtgggtgtgtgctcc

SEQ ID NO: 34454 - DNA, 201 bp, Homo sapiens
tgtactgtgaaaaaccttacctaatatcctcctgccaacattctgcctaattaaaatcttccctgaatgttttgcactgagtaaataagctattccctgtmacctgtggtactgccttactgcctttgtttaactcctgctctgtttaaatgtacccataatgggcatgagagcatatctctattcagactccagaccaca

SEQ ID NO: 34455 - DNA, 201 bp, Homo sapiens
tcttaaagtaaatttttcaattctagaagttcagtttttttctttcttaaaatggctattttgtctttcagctcctggattattttattgaattcattgtrttgggttttgactttctcctaaatcttgatgagcttccttacctccagagtctgaattctatgtcagtcatttccgtctgcttaattatcattactgtgg

SEQ ID NO: 34456 - DNA, 201 bp, Homo sapiens
acagacacttctcaaaggaagacatttatgccaccaacagacatatgaaacaatgctcatcatcactggtcatcagagaaattcaaatcaaaaccgcaatsagataccatctcacgccagttagaatggcaatcattaaaaagtcaggaaacaacagaagctggagaggatggggagaaacaggaatgtttttacactgtt

SEQ ID NO: 34457 - DNA, 201 bp, Homo sapiens
aaaggattataaatcatgctactataaagacacatgcatatgtatgtttattgcagcactattcacagtaacaaagacttcgaaccaacccaaatgtccarcaatgatagaatggattaaaaaaatgtggcacatatacaccatggaatactatacaaccaaaaaaaaggatgagttcatgtcctttgcaggggcatggat

SEQ ID NO: 34458 - DNA, 201 bp, Homo sapiens
gctatatctcacatcattgttcatctgataatatatgaaaactacaatgtgtttcttattccagaaaggggagtaattcttattcatgaataaacactgamggagaaagattatggatcatagtgggaaaagccacaataccatctacattctctctctctcattttttctacttaggtaaaacatgattactttagaact

SEQ ID NO: 34459 - DNA, 201 bp, Homo sapiens
ggaataggatggagagttgaaattgtggaaatccaggcagaaggaagactatacaccacgtcttggaaaataaaggaagtgggttgcaatttataattacrtgttcattcttattaggttgtactacttttaaagtggcttctcatattttgctatatctcacatcattgttcatctgataatatatgaaaactacaatgt

SEQ ID NO: 34460 - DNA, 201 bp, Homo sapiens
aaatatgaatataaatagttaaattaaaaatatatagatattacttaataggtataagacactcaaatttatgaatgtacttaagtttctttgttttacartgagaacacttggacacaagaagggtaacatcacacaccagggcctgttgtgcagtgggggggagggggaagggatagcgttaggagatatacctaatgt

SEQ ID NO: 34461 - DNA, 201 bp, Homo sapiens
aggcatgggcaaagacttcatgactaaaacactaaaagcaatggcaacaaaagctaaaatagacaaatgggatctaattaaattaaagagcttctgcaccrcaaaagaaactatcatcagagtgaacaggcaacctacagaatgggagaaaatctttgcaatctacccatcagacaaacaatcccatcaaaaagtgggcaa

SEQ ID NO: 34462 - DNA, 201 bp, Homo sapiens
atcaaagaccaaaagtagataaaaccacaaagatggggaaaaaacagaacagaaaaactggaaactctaaaaagcagagtgcctctcctcctccaaaggawagcagttcctcaccagcaacggaacaaagctggatggagaatgactttgacgagctgagaaaagaaggcttcagacgatcaaattactctgagctacggg

SEQ ID NO: 34463 - DNA, 201 bp, Homo sapiens
ttgttaaattatacattggattctgttaaatgataacaaataaatatgaatataaatagttaaattaaaaatatatagatattacttaataggtataagayactcaaatttatgaatgtacttaagtttctttgttttacaatgagaacacttggacacaagaagggtaacatcacacaccagggcctgttgtgcagtggg

SEQ ID NO: 34464 - DNA, 201 bp, Homo sapiens
tcactgtcctattatgttcccccaagtagttttataatttctttcatatgagtcctctatctttcttcagtctacattccactgttactattgttactctygtatataactctattgctactgattaacttgttttggtggaagtgtttccctgttgtattagatagggttctccagagagataaaaccaatagaatggat

SEQ ID NO: 34465 - DNA, 201 bp, Homo sapiens
gacagggcaattgtaagctggagaccctgggattccattggtgttgctcagcccaaatctgaaagcttcagaatcagggaatctgatggcataattctcartacgaggccaaaagcctaggaacctggggaccactggtgttaagtcctggagtccaaaggccagagagcctggagttctgatgtccaagggcaggagaag

SEQ ID NO: 34466 - DNA, 201 bp, Homo sapiens
ctatccacaagcaatctctctgtatgtgttttgtatcccaagtcagacaagtctaagctcttctggtttgaggaggtagctagtgtgggtcaatgtacctwtttctatgaagcccatggtccacgcttgcctgtcacacttcctcacttagcatactgggagccagagccctgatattttgaaatgctgtttattaataac

SEQ ID NO: 34467 - DNA, 201 bp, Homo sapiens
gacataatcaggcacacagacatatatatgcacgtaaatcgttccacatctcagattccctaattcaataatcctttcatttcaattgaaacaaccatagwtgtactgtgaaaaaccttacctaatatcctcctgccaacattctgcctaattaaaatcttccctgaatgttttgcactgagtaaataagctattccctgt

SEQ ID NO: 34468 - DNA, 201 bp, Homo sapiens
gagccttgataacactaaccaaagttaaatttaagtacaaatgattaaaatggaaatagtgacataatcaggcacacagacatatatatgcacgtaaatcrttccacatctcagattccctaattcaataatcctttcatttcaattgaaacaaccatagttgtactgtgaaaaaccttacctaatatcctcctgccaaca

SEQ ID NO: 34469 - DNA, 201 bp, Homo sapiens
gagctacctgttggatatctaagaaatatctctctatcaatctgaagatatatagatctgtataaacagatctggaacaaaaaaagtaattttgtactggygagttatgcatttgtacatttagagatacatgttaaaattatgggtttagatgatattatctaaaataattgtataattctacatttatactaatagaaa

SEQ ID NO: 34470 - DNA, 201 bp, Homo sapiens
agtgaaaacatgttgtttggacaagttgactttgagctacctgttggatatctaagaaatatctctctatcaatctgaagatatatagatctgtataaacmgatctggaacaaaaaaagtaattttgtactggcgagttatgcatttgtacatttagagatacatgttaaaattatgggtttagatgatattatctaaaat

SEQ ID NO: 34471 - DNA, 201 bp, Homo sapiens
attccagcaaaaggaaaaacctcatcaaagaagaggaagcagagaaaagtaggtccaactacacctttagcaaccacagacaagaagttcacagctgaagraggagaggagactcctatagctcaggtaagcttgagtaagaggagcaggcttcaattcccacagaagaaactgccatggctcttccactctgtctctcca

SEQ ID NO: 34472 - DNA, 201 bp, Homo sapiens
gtaaaatattttttgaagctatatcctcatgattgtgtgactaattaagtgatgatgttgagaaagataaaagatttaaggagcattcaaagatgattcawgaatattatccaggcaactgtataaatggtgctactgttcactaacatcaagaaagcagagaacagcacagtctaggaagtgaaaacatgttgtttggac

SEQ ID NO: 34473 - DNA, 201 bp, Homo sapiens
agtaaaatattttttgaagctatatcctcatgattgtgtgactaattaagtgatgatgttgagaaagataaaagatttaaggagcattcaaagatgattcwagaatattatccaggcaactgtataaatggtgctactgttcactaacatcaagaaagcagagaacagcacagtctaggaagtgaaaacatgttgtttgga

SEQ ID NO: 34474 - DNA, 201 bp, Homo sapiens
accacgaaaggtttcttcagatttctatttaagaaggagaaagacaaacagggctgtgatgaatggagtaaaatattttttgaagctatatcctcatgatygtgtgactaattaagtgatgatgttgagaaagataaaagatttaaggagcattcaaagatgattcaagaatattatccaggcaactgtataaatggtgct

SEQ ID NO: 34475 - DNA, 201 bp, Homo sapiens
aggttagagcagagatatcaattagaagcaatgatgtgcccaagtcagctctcaccagaacacttattgctaagtatttggggattttatgaactgtttgyaaaatctttggaagtttgaaattagccatagtggaaatatttatgccagcaaaatatgcaaaggctacaaatagatattttctaaaattgggcagctagt

SEQ ID NO: 34476 - DNA, 201 bp, Homo sapiens
aaggttatatttttgtgaggcctaaaacagtacaaaaacaaacaaagtggtggaataggatggagagttgaaattgtggaaatccaggcagaaggaagacyatacaccacgtcttggaaaataaaggaagtgggttgcaatttataattacgtgttcattcttattaggttgtactacttttaaagtggcttctcatattt

SEQ ID NO: 34477 - DNA, 201 bp, Homo sapiens
tagctagagtttaatcttttgcttccataggatactcgataaatttgatattatctctgacatcaggaggttttctgtcctgtgttgtttgggagaaatayagagaggtatggagttcagaatagtacaggtagatacagcagtgtgttcacagtttactgcttcagtctcttttacgcctcttccctctgctcaataacc

SEQ ID NO: 34478 - DNA, 201 bp, Homo sapiens
ctaggtgctttcttagggccaacactctgcattgataaaagaaaaacttcagccaaattaaatttaaatgagtttaattgagcaatgaatgatcgtgaatyggggagccctcagaatcacagcagtttcagagatactccaggggtgccttgtgatcagaacgaatttatagacaaaaaaggtaaagtgaggtacaagaat

SEQ ID NO: 34479 - DNA, 201 bp, Homo sapiens
tactttggattttgatatatttactttgtataatgaattgtactaccaaggttgaattctagttgtgacgtgcaataagtataataaatggattggctaaytttctcctaagtgcaaatactttcagcagctatgcatatgatctaaacatttgtgctgtctcccttctgtcttatttacttatttatttatgaagatagt

SEQ ID NO: 34480 - DNA, 201 bp, Homo sapiens
aaaatctcaaagaattagattccctagcatgaggaatttatcttactggattttttttttttttttttttttttttttttgagacggagtctcactctgtygcccaggctggagtgcagtggcgcaatctctgctcactgcaagctccgcctcccgggttcacgccattctcctgcctcagcctcccgagtagctgggact

SEQ ID NO: 34481 - DNA, 201 bp, Homo sapiens
agctaaacactttagtaaatatatatcgcacaaatatagtatcttcaccccccaatagagaagagtgttaacttcaggttcagaggggaaaatgctttgtycatatttataaaaacctagttttttaattgcaagtcagtacatccccaaacactagtacttagaggaatgatgtgtataactttctagtgtctctttttt

SEQ ID NO: 34482 - DNA, 201 bp, Homo sapiens
ttttgtgaggcctaaaacagtacaaaaacaaacaaagtggtggaataggatggagagttgaaattgtggaaatccaggcagaaggaagactatacaccacrtcttggaaaataaaggaagtgggttgcaatttataattacgtgttcattcttattaggttgtactacttttaaagtggcttctcatattttgctatatct

SEQ ID NO: 34483 - DNA, 201 bp, Homo sapiens
atttttagatatactctttataagcttgcattttttgcaatatagtatcctataatgattactattttagtacttgttttattcatttaactatcagatckatcttttcaagtctatgaattaaaatacaaattattatttagtggcaatgtaatgttgaattgcacaaatattggaatttattttaaaaataattctcta

SEQ ID NO: 34484 - DNA, 201 bp, Homo sapiens
tcatttgtcactgaaaacaaataacaggaaaatcaaaccactttcagaaaagaaaaaacccaaccaaagaaaaggctggaaccaaaaggagtaagatatcygaggagcagactcagcctccctgtcctgcaggagccggcatgtccacagccatgggcattccccacctccccagacctcatcatcagctccacccaacac

SEQ ID NO: 34485 - DNA, 201 bp, Homo sapiens
ttcagtttcaaaattatcttttcttcaagttagattggcggcacctctctgaaacccttggagtcacataaagtttcagaatctgaatgacttaagaaagsctccttaatacacacaccatatgtagagtgttacatagctagaccaattaggtccaggttatgactctcaaatcaaatacaccaatatatctgcagcaag

SEQ ID NO: 34486 - DNA, 201 bp, Homo sapiens
cccaagtagttttataatttctttcatatgagtcctctatctttcttcagtctacattccactgttactattgttactctcgtatataactctattgctaytgattaacttgttttggtggaagtgtttccctgttgtattagatagggttctccagagagataaaaccaatagaatggatggatggatggatggatggat

SEQ ID NO: 34487 - DNA, 201 bp, Homo sapiens
gtttctgattcagtaggtctggagtgagccttggaaaactgcattttatttagcataatcccctgggggattgggggctccccaaagtttgagaaccaccrctaagggctattatgtttctgcaggcaaacatatttttctttttttgttttatgtaatacaaagtaggagtttaaaaatttatttttggtaaaactagaa

SEQ ID NO: 34488 - DNA, 201 bp, Homo sapiens
gcgtgttgcgggggtgggagcctgggggagggttagcattaggagaaacacttaatgtaaatgacgagttaatgggtgcagcaaaccaacatggcacatgwatacctatgtaacaaacctgcacgttgcacatgtgtaccctagaacttaatgtataattttaaaaaaatctcaaagaattagattccctagcatgaggaa

SEQ ID NO: 34489 - DNA, 201 bp, Homo sapiens
catgtaccctagaacttaaagtataattttaaagaaagtttatttgctttaaaatttcatacattatgaatttactatgtcccctattacaatggtctccrcaatgaagagaccctcactgtcctattatgttcccccaagtagttttataatttctttcatatgagtcctctatctttcttcagtctacattccactgtt

SEQ ID NO: 34490 - DNA, 201 bp, Homo sapiens
agatgttgattgtgttcagtgtgacaggacagatcatttgcctcacttctggtgcacagagacaactagcatatttctatacaatacagggtctaaataaktaggttacgtgccaataatttcatctctttgtactctatcccaactggagctcataattttactttggattttgatatatttactttgtataatgaattg

SEQ ID NO: 34491 - DNA, 201 bp, Homo sapiens
cacttttcctttaaaattgctattaggttttgtaagtaaggaagtggaggcatttttgtaagtgcattaactctcaaaggccacaaaagtacgtttttaamcttatggatcaagttgtgtggatacgatttcagacccccagaggttctttcaacgtgtctagtgtccagcacagcgcacctggtcagagtttcgttgtaa

SEQ ID NO: 34492 - DNA, 201 bp, Homo sapiens
tgtcttatttacttatttatttatgaagatagtattgaataaaaattttgaattccatgatacttagaagataaggtaatcgaatcctctcatttacaaartaataataataataataattaaaaggcacagttttactgatatgtccatgtccaaattcaaggtgacagcatgacacattcaattcctccctaacagtcc

SEQ ID NO: 34493 - DNA, 201 bp, Homo sapiens
ggctggagtgcagtggcgcaatctctgctcactgcaagctccgcctcccgggttcacgccattctcctgcctcagcctcccgagtagctgggactacaggsgcccgccaccacgcccggctatttttttttttttgtatttttagtagagacggggtttcaccgtgttagccaggatggtctcgatctcctaacctcgtga

SEQ ID NO: 34494 - DNA, 201 bp, Homo sapiens
ggagaaaatctttgcaatctacccatcagacaaacaatcccatcaaaaagtgggcaaaggacatgaacagacacttctcaaaggaagacatttatgccacmaacagacatatgaaacaatgctcatcatcactggtcatcagagaaattcaaatcaaaaccgcaatcagataccatctcacgccagttagaatggcaatca

SEQ ID NO: 34495 - DNA, 201 bp, Homo sapiens
tacgtcaaaggagattgctgagagagaagcaatgaccattgagattggagtaaaagaataatgtagccgaggaggaggagccaagatggccgaataggaasagatcgggtctacagctcccagcatgagcgacgcagaagacgggtgatttctgcatttccatctgagataccgggttcatctcactagggagtgccagac

SEQ ID NO: 34496 - DNA, 201 bp, Homo sapiens
aaaacactaaaagcaatggcaacaaaagctaaaatagacaaatgggatctaattaaattaaagagcttctgcaccgcaaaagaaactatcatcagagtgarcaggcaacctacagaatgggagaaaatctttgcaatctacccatcagacaaacaatcccatcaaaaagtgggcaaaggacatgaacagacacttctcaaa

SEQ ID NO: 34497 - DNA, 201 bp, Homo sapiens
ttaggtaaaacatgattactttagaacttgaggaaatggttaaaacccacaagtcaaacaaaaagtaattaatttttaattaattgaaaccttcccaagcmgatattaataaatttttctctgtatttttagatatactctttataagcttgcattttttgcaatatagtatcctataatgattactattttagtacttgt

SEQ ID NO: 34498 - DNA, 201 bp, Homo sapiens
tgatcaatgatttaaaacttaattcaacaaggagagacgaatatgacaaaattcagattgccgacttgatggaagaaaagttcccaggtgatgctggtttkggcaaactgagaactcttcaaagaaataccaacactgggagaggagaccttgctgaaactcttagaaaagtcaaaaggtaattgggaaaagggaattctc

SEQ ID NO: 34499 - DNA, 201 bp, Homo sapiens
ttaactatcagatcgatcttttcaagtctatgaattaaaatacaaattattatttagtggcaatgtaatgttgaattgcacaaatattggaatttattttmaaaataattctctatttacttccaatatcccaacctcaatgcctgtcctaggaacattcatgcacctgtgccctttgaggctcctattatgtcctttaga

SEQ ID NO: 34500 - DNA, 201 bp, Homo sapiens
tatgtgtactgtaactttcttgtcaacttgaaatttgttgttactagtgttttagaaaagtgttccttgtgttatgttatttggcaatattaatataatcmattaaagttaaatcctagtaaagtccaaacacccacagatgttgattgtgttcagtgtgacaggacagatcatttgcctcacttctggtgcacagagaca

SEQ ID NO: 34501 - DNA, 201 bp, Homo sapiens
acattcaattcctccctaacagtcctcaaaaaaattacaaactgctatgaattcaactaacatttcacatgattgactgctttgtaaccctacatacataycttctaagttagccccttaaatttacctccagattttcctacacactctataagagatctcgcaaagaaatggaattatacagttgatgaataatagctt

SEQ ID NO: 34502 - DNA, 201 bp, Homo sapiens
ccaaagaagtaaatgattttgtttaggcttcaggaacactagattcctatcctgttactcagacagtccagcaggtgggaggaaaatccaaacaatgtccytgcactcacttctacgtagaagagtttttaatgatattaaggaaatagtattcttataagcttcaaaggaacattcaaaaggattataatacttgtgcta

SEQ ID NO: 34503 - DNA, 201 bp, Homo sapiens
taaatgattttgtttaggcttcaggaacactagattcctatcctgttactcagacagtccagcaggtgggaggaaaatccaaacaatgtccctgcactcayttctacgtagaagagtttttaatgatattaaggaaatagtattcttataagcttcaaaggaacattcaaaaggattataatacttgtgctaagtaataaa

SEQ ID NO: 34504 - DNA, 201 bp, Homo sapiens
ggaaaatgctttgtccatatttataaaaacctagttttttaattgcaagtcagtacatccccaaacactagtacttagaggaatgatgtgtataactttcyagtgtctctttttttttttttttttaatgaagccatctatgccctgtcttacaataggccaggaaatgtgcaccaatcctttgtttccagaaagacaatt

SEQ ID NO: 34505 - DNA, 201 bp, Homo sapiens
cctagttttttaattgcaagtcagtacatccccaaacactagtacttagaggaatgatgtgtataactttctagtgtctctttttttttttttttttaatkaagccatctatgccctgtcttacaataggccaggaaatgtgcaccaatcctttgtttccagaaagacaattgacatataacaaacctactacccagtaat

SEQ ID NO: 34506 - DNA, 201 bp, Homo sapiens
taataataataataattaaaaggcacagttttactgatatgtccatgtccaaattcaaggtgacagcatgacacattcaattcctccctaacagtcctcaraaaaattacaaactgctatgaattcaactaacatttcacatgattgactgctttgtaaccctacatacataccttctaagttagccccttaaatttacct

SEQ ID NO: 34507 - DNA, 201 bp, Homo sapiens
cattagttgattgatattggagaaatagtttcactgatcccctaaaataatggaagtctccacttcatcagcatggttaaaatattaagtgagacaatgcrtatttatgcatataagtttacatatatgtaaaatttatataacatatctcactgcctagtacatcatgagaaattaatctatggtaagcactacttttcc

SEQ ID NO: 34508 - DNA, 201 bp, Homo sapiens
gtaaccctacatacataccttctaagttagccccttaaatttacctccagattttcctacacactctataagagatctcgcaaagaaatggaattatacarttgatgaataatagcttctgtgtgtaagatactacaatacaggaaccatggatgtagtcaggaatgaaaaatggcacaatatcaagtgtgaggaaggaga

SEQ ID NO: 34509 - DNA, 201 bp, Homo sapiens
acattcaaaaggattataatacttgtgctaagtaataaagtatttaaagaaattaggatgacagggaagtaatttcatatagtgttcaagagaaagggttwtgaataagacaaatctgatttgaatcctgaattcaacactcattagttgattgatattggagaaatagtttcactgatcccctaaaataatggaagtctc

SEQ ID NO: 34510 - DNA, 201 bp, Homo sapiens
tcaaagaccaaaagtagataaaaccacaaagatggggaaaaaacagaacagaaaaactggaaactctaaaaagcagagtgcctctcctcctccaaaggatmgcagttcctcaccagcaacggaacaaagctggatggagaatgactttgacgagctgagaaaagaaggcttcagacgatcaaattactctgagctacggga

SEQ ID NO: 34511 - DNA, 201 bp, Homo sapiens
tggctgacaagctgtactctttccagactagccctgcagaaagagcaacattctgctcctccaccagcccagatgtctcatccttctcagtgttctgagaktgtggatttttttttttccagatggagttttcgctcttgttgcccaggctagaatccaatggcgtgatctcagctccccgcaacctgtgcctcccgggtt

SEQ ID NO: 34512 - DNA, 201 bp, Homo sapiens
gcattagagaggcattaggttagagcagagatatcaattagaagcaatgatgtgcccaagtcagctctcaccagaacacttattgctaagtatttggggaktttatgaactgtttgtaaaatctttggaagtttgaaattagccatagtggaaatatttatgccagcaaaatatgcaaaggctacaaatagatattttcta

SEQ ID NO: 34513 - DNA, 201 bp, Homo sapiens
aggagaaagacaaacagggctgtgatgaatggagtaaaatattttttgaagctatatcctcatgattgtgtgactaattaagtgatgatgttgagaaagakaaaagatttaaggagcattcaaagatgattcaagaatattatccaggcaactgtataaatggtgctactgttcactaacatcaagaaagcagagaacagc

SEQ ID NO: 34514 - DNA, 201 bp, Homo sapiens
gacgagttaatgggtgcagcaaaccaacatggcacatgtatacctatgtaacaaacctgcacgttgcacatgtgtaccctagaacttaatgtataattttwaaaaaatctcaaagaattagattccctagcatgaggaatttatcttactggattttttttttttttttttttttttttttttgagacggagtctcactct

SEQ ID NO: 34515 - DNA, 201 bp, Homo sapiens
aacaaggaagagggtcaacacagctcatgtcagactcaaataaacaaggaagtcttggaataacttcatcttagaccaaaaattgctatactttagtgaarggcaattgctgattcacagaagaaaacatggctggctctccataacatcatactaaatatctcattctccaaaagcacactaacgacaagcacaaaggtt

SEQ ID NO: 34516 - DNA, 201 bp, Homo sapiens
tcctgccaacattctgcctaattaaaatcttccctgaatgttttgcactgagtaaataagctattccctgtcacctgtggtactgccttactgcctttgtktaactcctgctctgtttaaatgtacccataatgggcatgagagcatatctctattcagactccagaccacagctgggagcaagcagactcaaaagatggt

SEQ ID NO: 34517 - DNA, 201 bp, Homo sapiens
tgctgaaactcttagaaaagtcaaaaggtaattgggaaaagggaattctcccctccctgccactgtccctaaacccttcccaaccttgaatagaacctcakcttcattatggttaatatatccatttcccaatttatgcctcagcggtcatgatattgttggtactttgcatgtcaacaagttgacagcatagagcattcc

SEQ ID NO: 34518 - DNA, 201 bp, Homo sapiens
aggtgggaggaaaatccaaacaatgtccctgcactcacttctacgtagaagagtttttaatgatattaaggaaatagtattcttataagcttcaaaggaayattcaaaaggattataatacttgtgctaagtaataaagtatttaaagaaattaggatgacagggaagtaatttcatatagtgttcaagagaaagggtttt

SEQ ID NO: 34519 - DNA, 201 bp, Homo sapiens
cctgccaacattctgcctaattaaaatcttccctgaatgttttgcactgagtaaataagctattccctgtcacctgtggtactgccttactgcctttgttkaactcctgctctgtttaaatgtacccataatgggcatgagagcatatctctattcagactccagaccacagctgggagcaagcagactcaaaagatggta

SEQ ID NO: 34520 - DNA, 201 bp, Homo sapiens
aagatatgctatataattctgggtcttaaatatgcaaaataaaaaaaaaacgaggtaaaacagagaaattattgagggctttccatgccagagtgaggagyaatgcacttttcccaaagaaaatggagaagtattcaatgatttcaagtagggtagaaatatgaattatagagagagctggctcaatgaaaacaactgatt

SEQ ID NO: 34521 - DNA, 201 bp, Homo sapiens
ttgacatcggccactcactcacataggcatagccagtctttccaattgtctgtataaatgtgtgacactgtacgccacttttctcttgtaggttctacccrtcacctacagataatggtgagtaaatacaagaacaatgttctgctgaaaggattagaagccatcaatgactatcacttcagcataattaattccttactg

SEQ ID NO: 34522 - DNA, 201 bp, Homo sapiens
gtaaaatatttacggtgttcactttagtagaatctcattttttcctaccaattatgttaactacaactaataaatgtttgtccattcaatttattctgtgwtgtaagattacaagctgcttgttgatctggtgaatccctgtaacccagagatttctttgagtgacagaaagtactgaaatgtgaatctgcacagctaatg

SEQ ID NO: 34523 - DNA, 201 bp, Homo sapiens
gacctatctgttttagattagtttaagaaacatgaaaatctcgtgtaatttttcttttcacaaagaatttgaacacacacacacacacacacacacacacrattgcatgcaattcaatggtggaaagaatcatcttttcaacacatggtgctatgatatctacatgcagaagaatgaaattggactccttcacatcatata

SEQ ID NO: 34524 - DNA, 201 bp, Homo sapiens
ccaaacctgtgcaaggaaaaggcagatactttaatgaaatgcatatgtggttgatgccgtctcattccttctcaaaacaagaaaatgtctagtatagttamagggttagaaaaaccaagaagtcccaacgaagcaaggaaaacctgtcagttttaataatgtgtcagtttgatatgtctaaatgattgagagtaaatatca

SEQ ID NO: 34525 - DNA, 201 bp, Homo sapiens; identical to SEQ ID NO: 5496

SEQ ID NO: 34526 - DNA, 201 bp, Homo sapiens
tgtcagtttgatatgtctaaatgattgagagtaaatatcacatgaaatctttccttttatgtagaaatggcgtatgcagctctcattaggcagtcctgtcrtaaatgcatatgaaagtttcctttaagggatttcacaaacataggaccatgttatgaatcaattcagtaaaaacatgatcctattatttttagagatata

SEQ ID NO: 34527 - DNA, 201 bp, Homo sapiens
cagtctttaaaatccagtgtgtcttttacatttatagcacatcttcatttggactagtcttattccagggctcaacagccacatgtggctaacaactaccmtatcaggtagtgcagctccagagaatgtaggaaatatttaataatatagtttaagaaaagtttcttaagaggaaaatctaaatcttgttaactctaaaag

SEQ ID NO: 34528 - DNA, 201 bp, Homo sapiens
ataataatgcactttaacccaatacatcaaaaattaccatttcatgtctatacaacatacagaattattaattagatattttacaatcttttacagtcttyaaaatccagtgtgtcttttacatttatagcacatcttcatttggactagtcttattccagggctcaacagccacatgtggctaacaactaccatatcagg

SEQ ID NO: 34529 - DNA, 201 bp, Homo sapiens
tgatgtaagggagttcagagaacattttgcagagaaaataatgcttccgctggccattaaaaggttaaaagaattagccatgtaggcaaagtgggaaaagrggttctcaggagaggacatagactgttcaacagtagagaggtatgagaagacaaaaatatgcactgagaagtattgagcccatatttacactatggagtg

SEQ ID NO: 34530 - DNA, 201 bp, Homo sapiens
gtaacttccagtctagtgcggactgggaatccagatagcctcacttgtcacaattctgtctaaagtaaacttaataggttctgggtaagggactaatgggytcaccaaggagtagggcgcacacacaccttagtgcatagactttgggaaagatatttggactactcaagtctatcttttaaatacattcctcttacttct

SEQ ID NO: 34531 - DNA, 201 bp, Homo sapiens
tagtggggggtcaaactttttttatgaaaattatttttaaccattatacagatttttctacaatgtattgcaaatgtttctcttaagcagtttgttgaacrtcatttagcattttcttgataattcaatgttaattttattaaaagtaattattgtagtaggttgtagcggattcagtaaatatatccagttcctattcta

SEQ ID NO: 34532 - DNA, 201 bp, Homo sapiens
tatcccactgtagaatgcaagcagtacaggcacagggtccatatccctctcattcacatttggggacttccagctacccatccctgtgcccagcagacaayagacattcagtagatattggccaacatactgtcataccccagaggacagaatgtatctttctcttggggtcctggctgtgatgtaagggagttcagagaa

SEQ ID NO: 34533 - DNA, 201 bp, Homo sapiens
ggaatccagatagcctcacttgtcacaattctgtctaaagtaaacttaataggttctgggtaagggactaatgggctcaccaaggagtagggcgcacacasaccttagtgcatagactttgggaaagatatttggactactcaagtctatcttttaaatacattcctcttacttcttaaccaggttttggaccatggagat

SEQ ID NO: 34534 - DNA, 201 bp, Homo sapiens
atgcctatttggtaatttgtactttgaagtcaagtctcatttgaatcatttgtgatgtgaaaacaatgctgttgggtttatatacttaaacacctaattaytgttttacgtccagggttcctgtgggatcacatgcctttagttcagtctcagtatacctctccgccacaaagatgtagtctgggtgtgttctctagcctt

SEQ ID NO: 34535 - DNA, 201 bp, Homo sapiens
tcccccttcactaactgacaatctattgtccttactgttactagcatagctgccactaacattctcctcatcttctgattggtaacttccagtctagtgcrgactgggaatccagatagcctcacttgtcacaattctgtctaaagtaaacttaataggttctgggtaagggactaatgggctcaccaaggagtagggcgc

SEQ ID NO: 34536 - DNA, 201 bp, Homo sapiens
acaactcaataataaaaaggcaaatacccagtttttaaaatgagcaaagtgtctgcatagacatttctccgaagaagatgtacatcaagcacatgaaaagwtactccataggattagccattagggaagtgcaaatcaaaatcacagtgtgatgctacttcacactcaaggcaaatgactataatagaaaaaaaaaagatg

SEQ ID NO: 34537 - DNA, 201 bp, Homo sapiens
ggtgttggcagggcctgtggtcatgcgaggcttgcctaggtctggaggatcgaattgcaagaaggcaccctcacatggttgttgacaggaggcctcagatycctgccacatgggcctctcctcaggctgcttgagtatcctcatgatgtggcagctaacttccactagagcaagccgtccaagaaagggcgagagcgaagc

SEQ ID NO: 34538 - DNA, 201 bp, Homo sapiens
tatatcaggtaagggacccatatctagactatataaaaaactcttacaactcaataataaaaaggcaaatacccagtttttaaaatgagcaaagtgtctgmatagacatttctccgaagaagatgtacatcaagcacatgaaaagttactccataggattagccattagggaagtgcaaatcaaaatcacagtgtgatgct

SEQ ID NO: 34539 - DNA, 201 bp, Homo sapiens
aatttgatagcatttggaaatgaagttgctaatgcgcttaaaaaacaagaactatccaagtcatgaaactgtattctgtgcctgttatgtaatggctgtaytgtgtattgcaaatttcacttaacctttaaacaatatgaatgagagttttagaatactgtcacagtcttgaaagtgaaagcaatttttcaaattaatgct

SEQ ID NO: 34540 - DNA, 201 bp, Homo sapiens
cataccattactggtacctactggccatggttcctggttacagaaacaaaatttactcttgctagtttaggcagaatgtgtgtgtgtgtgtgtgtgtgtgtttttatataacaaaataattaacaacatttcttctaggacccagaaaccaggcttggataatacatgagagaaacttccagttgcacaaagggactgccg

SEQ ID NO: 34541 - DNA, 201 bp, Homo sapiens
gcataccattactggtacctactggccatggttcctggttacagaaacaaaatttactcttgctagtttaggcagaatgtgtgtgtgtgtgtgtgtgtgtktttttatataacaaaataattaacaacatttcttctaggacccagaaaccaggcttggataatacatgagagaaacttccagttgcacaaagggactgcc

SEQ ID NO: 34542 - DNA, 201 bp, Homo sapiens
gccttttgtaatttctctctctcccccttcactaactgacaatctattgtccttactgttactagcatagctgccactaacattctcctcatcttctgatkggtaacttccagtctagtgcggactgggaatccagatagcctcacttgtcacaattctgtctaaagtaaacttaataggttctgggtaagggactaatgg

SEQ ID NO: 34543 - DNA, 201 bp, Homo sapiens
gtgttctctagcctttggttctgtagcctttggtgtgttctctaaatctctcctctatagcattttcaaaaaccgttttgttagtgggtttttgcttgtcmgtatcccactgtagaatgcaagcagtacaggcacagggtccatatccctctcattcacatttggggacttccagctacccatccctgtgcccagcagaca

SEQ ID NO: 34544 - DNA, 201 bp, Homo sapiens
tgtgttctctagcctttggttctgtagcctttggtgtgttctctaaatctctcctctatagcattttcaaaaaccgttttgttagtgggtttttgcttgtccgtatcccactgtagaatgcaagcagtacaggcacagggtccatatccctctcattcacatttggggacttccagctacccatccctgtgcccagcagac

SEQ ID NO: 34545 - DNA, 201 bp, Homo sapiens
cacgcaattcacatttttgcctgtggtctgcctctttggtttcctaaaccaacttgcatgtccttgtttccatacactgaacaggctcactgcctccctcragggaacaagacttaagcgtcttctggttactgcatcaaatctattgcttaagaattctgggtgatatgcagcactcccaggatgccccgatgaggcccc

SEQ ID NO: 34546 - DNA, 201 bp, Homo sapiens
gtgtgttctctagcctttggttctgtagcctttggtgtgttctctaaatctctcctctatagcattttcaaaaaccgttttgttagtgggtttttgcttgtccgtatcccactgtagaatgcaagcagtacaggcacagggtccatatccctctcattcacatttggggacttccagctacccatccctgtgcccagcaga

SEQ ID NO: 34547 - DNA, 201 bp, Homo sapiens
accaaactattactgcttttcccaaacaacagttagaacatgagcttttgagtttcttacattctttacgttttaaaattaaaagccaaattcctttaacytcatatatcctaagccactctgatttaaaattacttctatgtcattgtcttctagcattggtctgcaatagaatctgtgcaattaacaataatcttcttc

SEQ ID NO: 34548 - DNA, 201 bp, Homo sapiens
ggtgtgttctctagcctttggttctgtagcctttggtgtgttctctaaatctctcctctatagcattttcaaaaaccgttttgttagtgggtttttgcttgtccgtatcccactgtagaatgcaagcagtacaggcacagggtccatatccctctcattcacatttggggacttccagctacccatccctgtgcccagcag

SEQ ID NO: 34549 - DNA, 201 bp, Homo sapiens
tactgcttttcccaaacaacagttagaacatgagcttttgagtttcttacattctttacgttttaaaattaaaagccaaattcctttaacctcatatatcytaagccactctgatttaaaattacttctatgtcattgtcttctagcattggtctgcaatagaatctgtgcaattaacaataatcttcttccctctgatct

SEQ ID NO: 34550 - DNA, 201 bp, Homo sapiens
ctgggtgtgttctctagcctttggttctgtagcctttggtgtgttctctaaatctctcctctatagcattttcaaaaaccgttttgttagtgggtttttgcttgtccgtatcccactgtagaatgcaagcagtacaggcacagggtccatatccctctcattcacatttggggacttccagctacccatccctgtgcccag

SEQ ID NO: 34551 - DNA, 201 bp, Homo sapiens
caaccaaccactttatttgccaagcagccctatagattctgccttacaatgttcatatccggcttccatgtcttatgtaggtgcattttgttggtggagaycaggtcacatgtgaaaccttagcttcatctgagtctgagaaatgccacattcagccttccagtaacctggaaaatatactaggaagagattagagtagta

SEQ ID NO: 34552 - DNA, 201 bp, Homo sapiens
gtctgggtgtgttctctagcctttggttctgtagcctttggtgtgttctctaaatctctcctctatagcattttcaaaaaccgttttgttagtgggtttttgcttgtccgtatcccactgtagaatgcaagcagtacaggcacagggtccatatccctctcattcacatttggggacttccagctacccatccctgtgccc

SEQ ID NO: 34553 - DNA, 201 bp, Homo sapiens
gtagtctgggtgtgttctctagcctttggttctgtagcctttggtgtgttctctaaatctctcctctatagcattttcaaaaaccgttttgttagtgggtwtttgcttgtccgtatcccactgtagaatgcaagcagtacaggcacagggtccatatccctctcattcacatttggggacttccagctacccatccctgtg

SEQ ID NO: 34554 - DNA, 201 bp, Homo sapiens
gcccagcacgtagtaggcgcccagcactcgtgtggagcgactctgggaggaaaactaggaaggagacctgaggagcgccccgctcagctccctggacagamgtaggacccaggagcagggttaatcctcggctgctttgtcactgcgaagtctccagcggagtctgtcagccaatctgcatcatccccgggaaggatctga

SEQ ID NO: 34555 - DNA, 201 bp, Homo sapiens
atttacactatggagtgaactatgacacctgagtagggagaaatatgtgtaatataatagatcacagacaaatggaaccccactgcagttaccttattagycacagtcccttagcctctggagcagcactgaccaataaaaacataaagtgaaccacaaatgtgagccacataaggaatgttaaattttctggtagttata

SEQ ID NO: 34556 - DNA, 201 bp, Homo sapiens
ccttcagcagccaattattgacgtgataaaaggtagaaactcctggaatgcttcagagatcaacatgtgtcacagactcccagcctgtccgcctctaagayacagttggttcctttgttccttctgactgaacaccaactcctgatcaaaattgggaaactactttggaagggatgggagggtctgcagaatacatccacg

SEQ ID NO: 34557 - DNA, 201 bp, Homo sapiens
aatgagccgatgaggcactccattcttatatgtaggttttcatatcctgaagaatttgatagcatttggaaatgaagttgctaatgcgcttaaaaaacaaraactatccaagtcatgaaactgtattctgtgcctgttatgtaatggctgtattgtgtattgcaaatttcacttaacctttaaacaatatgaatgagagtt

SEQ ID NO: 34558 - DNA, 201 bp, Homo sapiens
acaatgagattattgcaaaccaagttggggatttctttgggatgttaatttcttcagacacttagcaggcttgatttgtttccattccattccatgtacargttaccatagccaaaagtcttgcccagacatggttttcaaggctgcagattctcagtttttatttactgggctctgtactctgcccatccctctggccct

SEQ ID NO: 34559 - DNA, 201 bp, Homo sapiens
tcttctaggacccagaaaccaggcttggataatacatgagagaaacttccagttgcacaaagggactgccgtgtggaaattccactcacctaccatctgcyacatggaaccaataaggatacagactaaatactagaaccttcattagaactctacagaataaccatacacttcaaccaaccactttatttgccaagcagc

SEQ ID NO: 34560 - DNA, 201 bp, Homo sapiens
tttaatgaaaatatttctccagttggaagacatgggtatacaggactttgctagaacggcaaatgctttttcccagtcttcatccgtgtaacagtaaatcrttattaaacaaacacacagaacaaaacccactctgattgtgtatcaatcacctgaaggggcagaagggaaaagtacaagagtgaagaaacttctccccac

SEQ ID NO: 34561 - DNA, 201 bp, Homo sapiens
ttcacatttttgcctgtggtctgcctctttggtttcctaaaccaacttgcatgtccttgtttccatacactgaacaggctcactgcctccctcaagggaamaagacttaagcgtcttctggttactgcatcaaatctattgcttaagaattctgggtgatatgcagcactcccaggatgccccgatgaggccccttgaagg

SEQ ID NO: 34562 - DNA, 201 bp, Homo sapiens
ttagttgtcctcaatgttctaaaatagtgatgtttgacagaattaatacagtgctctagttctttctgttcaactggtatttaattaaagatcttggaggmcatctttctctcaggctacaccacttaaaggaggaacattacttcctccatggacaatgtgataagccacatggcaacaaagctgcctccctaaggtctc

SEQ ID NO: 34563 - DNA, 201 bp, Homo sapiens
actgcaagagtcagaaaagcctttagtctcttcacacacttctttagtgcaaagttaacaatattttagggtgttaaaattagcaaaatccaagttctgcrgagtttagaaatgcatgtaaaagaggcattaaacctggttttcaactaacttcccacaggcattaaacctggtttttcaactaactcatttgaataaaat

SEQ ID NO: 34564 - DNA, 201 bp, Homo sapiens
gtgcatagactttgggaaagatatttggactactcaagtctatcttttaaatacattcctcttacttcttaaccaggttttggaccatggagattgcccarcaagccgagaatattccagccctccaacattgttgttaaaaagtccactgctgtatgttaggtgacttcccaaagctgctcactacttcttcttattctg

SEQ ID NO: 34565 - DNA, 201 bp, Homo sapiens
aagttactgtaggtgatgaagccagtgctccctgaaccaaataaaccctatcgacgttaccgaactgccgggcaaaaccagagcaactcacttacttggarggtgaaaaacacttcaacatactccaggcggcaaccgacacttaggggccaggcagatgaaacaccatttgtttaaaaagtctattatttcactgtctct

SEQ ID NO: 34566 - DNA, 201 bp, Homo sapiens
atgctaattatgtggagacttgtttgttgttgttctttgtttttttaagtaaatcaatacctaaatttcctggctaacagagtcattgcaaggatactagrgcattatatgtaatataagaatgcctatttggtaatttgtactttgaagtcaagtctcatttgaatcatttgtgatgtgaaaacaatgctgttgggttta

SEQ ID NO: 34567 - DNA, 201 bp, Homo sapiens
catagactttgggaaagatatttggactactcaagtctatcttttaaatacattcctcttacttcttaaccaggttttggaccatggagattgcccagcargccgagaatattccagccctccaacattgttgttaaaaagtccactgctgtatgttaggtgacttcccaaagctgctcactacttcttcttattctgttt

SEQ ID NO: 34568 - DNA, 201 bp, Homo sapiens
ctcaacgctccccagacatctcactagaactattaacaccccctcaacacctccccagatgtcaggtttctttttgacttgagcatctagcatttagtaaytcgccatgaaaaaaattaccaggggaagcgagtgttgttgctgaaattgtttttgcttgacacaaaaaagctaaagtacagcttagtctcacccgaaatt

SEQ ID NO: 34569 - DNA, 201 bp, Homo sapiens
gacactgacctatctgttttagattagtttaagaaacatgaaaatctcgtgtaatttttcttttcacaaagaatttgaacacacacacacacacacacacrcacacaattgcatgcaattcaatggtggaaagaatcatcttttcaacacatggtgctatgatatctacatgcagaagaatgaaattggactccttcacat

SEQ ID NO: 34570 - DNA, 201 bp, Homo sapiens
aagagctgacttgaagatgcttagacaccctctctgcaggttactgtgcagctttccctaatgagattggagcccttttggtttcattgggatttgagtgyggaagactggcaaatccagggcactcattttctacactaaaatgaatcttgaaaactgtatctttttaaaaaaagtctgagaatgattgtgtacaagtag

SEQ ID NO: 34571 - DNA, 201 bp, Homo sapiens
taactatggtggtggactgtaaatgtaaactgtctttatggcagaaataaaacgctatagatttggggttgactaagctttaaaaaaaattctctctacartatgaagctatctcttctatgcagttactgccaagcatcttcctagctgtagaagtccaggattttgctctctaattcttttatgcccagttacttgtag

SEQ ID NO: 34572 - DNA, 201 bp, Homo sapiens
cttagaagaatatattgcagtaaatccttgtgacctctgttaggcaaaaccttcttagctatgacactgaaagcatgaataacaaaaaatagataaattgkactgaagtcaaatttaaaatcttgtgtgtttcaatggataccatcaagaaaatgaaaagataacccatagaataggagaaaatatttgcaaatcatatat

SEQ ID NO: 34573 - DNA, 201 bp, Homo sapiens
catcaaatctattgcttaagaattctgggtgatatgcagcactcccaggatgccccgatgaggccccttgaaggctggtaaacgggcgtgctttcagccayagcacatttacattttcaaccatgaagaaggaacaagatcattgcaataaatctgtccatttggaaaaggaagaatgaggaacacacattggtcaccgtt

SEQ ID NO: 34574 - DNA, 201 bp, Homo sapiens
tattacataagacaaatgagccgatgaggcactccattcttatatgtaggttttcatatcctgaagaatttgatagcatttggaaatgaagttgctaatgmgcttaaaaaacaagaactatccaagtcatgaaactgtattctgtgcctgttatgtaatggctgtattgtgtattgcaaatttcacttaacctttaaacaa

SEQ ID NO: 34575 - DNA, 201 bp, Homo sapiens
tgtgtcttcattaacgatgctgtagttacaactacttctatctctattaactatggtggtggactgtaaatgtaaactgtctttatggcagaaataaaacrctatagatttggggttgactaagctttaaaaaaaattctctctacaatatgaagctatctcttctatgcagttactgccaagcatcttcctagctgtaga

SEQ ID NO: 34576 - DNA, 201 bp, Homo sapiens
gctgttttttagtgcatcatttattcagaattgatacaaagcaaaccgtttcaattcaatgatgaccagcataattggagcttggcccttagtggggggtmaaactttttttatgaaaattatttttaaccattatacagatttttctacaatgtattgcaaatgtttctcttaagcagtttgttgaacgtcatttagcat

SEQ ID NO: 34577 - DNA, 201 bp, Homo sapiens
agtcgcctacctgaagctgcagtaaggatttgctgcagctccctgagtaccaagaaaggtctaaagagctgacttgaagatgcttagacaccctctctgcmggttactgtgcagctttccctaatgagattggagcccttttggtttcattgggatttgagtgtggaagactggcaaatccagggcactcattttctacac

SEQ ID NO: 34578 - DNA, 201 bp, Homo sapiens
tacagtgctctagttctttctgttcaactggtatttaattaaagatcttggaggccatctttctctcaggctacaccacttaaaggaggaacattacttcytccatggacaatgtgataagccacatggcaacaaagctgcctccctaaggtctctcatttaatagactgctttaccacatataaactaccagcaaaacag

SEQ ID NO: 34579 - DNA, 201 bp, Homo sapiens
cttaacctttaaacaatatgaatgagagttttagaatactgtcacagtcttgaaagtgaaagcaatttttcaaattaatgcttaataaattcagcacccakcacagtgccgggcacatagtgccaatgttttccttagtggcaatggcacattttaaaacaattatttttcatcaccctagtgattgaactatgcaatctg

SEQ ID NO: 34580 - DNA, 201 bp, Homo sapiens; identical to SEQ ID NO: 5498

SEQ ID NO: 34581 - DNA, 201 bp, Homo sapiens
gatggggctcacaggaagactatatgtaaggagggggtgtcaaaagcctcttacaagggggctcccagcatatctcaaaatcttccataactcttaccccygtcccctgcagccaaatgaccctgtgactaacatctgtcaggcagctgacaaacagctattcacgcttgttgagtgggcgaagaggatcccacacttttc

SEQ ID NO: 34582 - DNA, 201 bp, Homo sapiens
agttcttcatcttaaaaatgagaataaatgcttccagcatcattatgataattgagtgaatggtaaaatgtgcttagcatgtttcttggcatattttattwaaaaaaattttttttttcaatcagctttctcaggttgaatcttggcatgttttttttaaccatgtagtaggctctccatttaaattcctccctaattctt

SEQ ID NO: 34583 - DNA, 201 bp, Homo sapiens
tcaaaccacccatctatgcttccacccatctatcctcttcaactcctccatccagctattcactcacccacccaccctccccatctacccatgcacacaargatgcatgcatccattcagccaccatctatccattatccttccaccaactcaaccactccctccttcaatatactcactcacccatctcctgacccactt

SEQ ID NO: 34584 - DNA, 201 bp, Homo sapiens
gggggccgggccgggggcgggggcgaggtgggggctctgggcgccagggtggccggggacacacagaagcggcagccaccgaggagggagcagtgccgggmgccccgacggcgccttgctgcatggagctgggccgctgacagctgtcgctgcccgcagcctctgacctccctgggaccccggcgtctgaggctcatagtc

SEQ ID NO: 34585 - DNA, 201 bp, Homo sapiens
cacagtggacaagcgccagcggaaccgctgtcagtactgccgctatcagaagtgcctggccactggcatgaagagggagggtaaggacccgccctgcccasgcgtcttagaccacatgcccttctcccttatcccactcagactgtgtacctctctggaagggtggactgctctctctcctctagagggcgatatttgatt

SEQ ID NO: 34586 - DNA, 201 bp, Homo sapiens
gggcggctggaggcgggggccgggccgggggcgggggcgaggtgggggctctgggcgccagggtggccggggacacacagaagcggcagccaccgaggagrgagcagtgccgggagccccgacggcgccttgctgcatggagctgggccgctgacagctgtcgctgcccgcagcctctgacctccctgggaccccggcgtc

SEQ ID NO: 34587 - DNA, 201 bp, Homo sapiens
ccagcggaaccgctgtcagtactgccgctatcagaagtgcctggccactggcatgaagagggagggtaaggacccgccctgcccaggcgtcttagaccacrtgcccttctcccttatcccactcagactgtgtacctctctggaagggtggactgctctctctcctctagagggcgatatttgatttctctctcccttcgc

SEQ ID NO: 34588 - DNA, 201 bp, Homo sapiens
ccgctatcagaagtgcctggccactggcatgaagagggagggtaaggacccgccctgcccaggcgtcttagaccacatgcccttctcccttatcccactcrgactgtgtacctctctggaagggtggactgctctctctcctctagagggcgatatttgatttctctctcccttcgcagctctcctccctgttaccctgtt

SEQ ID NO: 34589 - DNA, 201 bp, Homo sapiens
aggattctgagagacactttagagcatatcttggtcaaaacacccactttagagaagatgagcctgaggcttggctttcccaaggtcatgcaacaaaggaktggcaggcaggtttgggatcagaacccacatcttcaaagacctaggccagtgctcctttcactgcctatttgttgagtcagaagagcacaagatttgcac

SEQ ID NO: 34590 - DNA, 201 bp, Homo sapiens
gggtcagcccaatcactccagccttggatgctgcatagtttgtctgccccacgttccccacctataggtgagtcagagatgtggaatgagtcaggagtctyaaggaggggttctcctctctataccacttggctggctgacctcgtccaactcaacctgacctttcctacgatgctactgatgttgatgatggaaccacga

SEQ ID NO: 34591 - DNA, 201 bp, Homo sapiens
agcatatcttggtcaaaacacccactttagagaagatgagcctgaggcttggctttcccaaggtcatgcaacaaaggagtggcaggcaggtttgggatcaraacccacatcttcaaagacctaggccagtgctcctttcactgcctatttgttgagtcagaagagcacaagatttgcactcagacacacttagagtcagtt

SEQ ID NO: 34592 - DNA, 201 bp, Homo sapiens
gtggagtttcccaacaatccagaaccagcccttctctctcccatcccctggagactcacataagcccagagagtgacagcatccaggtcctgcttgatgcstggagccccagactccccatagcctccatggctatgctcatggtcatgtccatgtcctctgtggtagaggctctcatgggagtagccatggctatggcca

SEQ ID NO: 34593 - DNA, 201 bp, Homo sapiens
ttccccaattcctataaatatctcccaagggccatgagatcctgatgaggccgtaaggatatttgtggaaccccttcatggctggctgctgactttccatyttttctctcccccttccccctgcagcggtacaggaggagcgtcagcggggaaaggacaaggatggggatggggagggggctgggggagcccccgaggaga

SEQ ID NO: 34594 - DNA, 201 bp, Homo sapiens
catggtgtaaatcctcatgtgaatgtccatggtcgtgatcgtgggtatgtccatgccagatgctctcgtgagtgtggccatggccatgggcatggctgtgdccatggtggaaatcttcatgtgagtgcctgtggctgtggccatggaagtcctcttgcagatcgtcgtgcaggtcgtcatgacccccgagtccagccacca

SEQ ID NO: 34595 - DNA, 201 bp, Homo sapiens
ccacccacagcctcctaccttgtccaccactttctgtggcactttctgtgtcatgggtgttgcaatgaaccctgggaggacagagttacagcggatcccaygtctgtgggaaggagagtggctgccgattctggagagggctgaatgctggtacctccctcagaccccccaggtgctccccagcaccctcaagcatctgac

SEQ ID NO: 34596 - DNA, 201 bp, Homo sapiens
gctcctccttcagtgagaagggcacaggctgtgcctgccagtgcccctactgctgtcagtagttgcagacgcatcgcctgatgggcagaaaagagaaaaargcactcaccaatagctaaagattatcagtggtttagaagtggctggtggggtataggtataggggacatggatttggaaactaaacatcaaaataaaaag

SEQ ID NO: 34597 - DNA, 201 bp, Homo sapiens; identical to SEQ ID NO: 5501

SEQ ID NO: 34598 - DNA, 201 bp, Homo sapiens
ccagaacttcttccccctcatttctagaggacttgtcaatgacagtatgaattgtttggaactaataagaggctgtttgggtttagggtgagtgaggagarataaagggtttgaggcagctgtgtttggcagacatcaccaacctgctttttgctgcagccagactggaccaagatggcaaagtctccgacctcgtggggc

SEQ ID NO: 34599 - DNA, 201 bp, Homo sapiens
acagccataatctcccaccaaagacatccctccccacaaacctctccacagacaccaaccaccagtcccctagaaaatccccaaactttggggatctcttyattcaggcccccttcccagggaccccactacattcagtgctcaccctcagggtcccccaagtgtcccatcgggatcatttcagtaatctgtaaggaaata

SEQ ID NO: 34600 - DNA, 201 bp, Homo sapiens
cctgatggtgtccggagagcgaaaggcatctgtccagctgatgtggcctaccgagtggcacgacctgcccagctcagtgcacccactcgccagcttttccmaggtatgggtgacatggtggggtaggcctggggggaggtaatgggatggggcctaggatcagacaccaggaggaaaggggttgtggcggctccctttgcc

SEQ ID NO: 34601 - DNA, 201 bp, Homo sapiens
cccaagtgtcccatcgggatcatttcagtaatctgtaaggaaatactcatgtgggtgaaagcttcttttatggatttttttgaagactgagtctgtgaccyttttttgtcttcatttctcatacattcattgaatatttaatgtttgccaggaactgtgcccagtattctctctctctctctctctctctctctgtgaagc

SEQ ID NO: 34602 - DNA, 201 bp, Homo sapiens
gacacaacgacagatggtgggcgagaaaagcaggcctatgggagggggaggttacgcatcaaaaaccccccacaaaaagccggggcagtggaggcaatatyagagctttagagggggaaagtggcctagcgttcacctgcacttgttccagcaggcacctggcggccctggcctcagacacgtcagcctggaaggcagcat

SEQ ID NO: 34603 - DNA, 201 bp, Homo sapiens
acaatctcagctcactgcaacctctgcctcctgggttcaagcaattctcctgcctcagcctcctgagtagctgggattacaggtgcctaccaccacgcccrgctaattctgatattcttgatgtccttttcatctatctgattttctgcccttttgatcccatctgctttcccaagacacctgcccttcagggtcactgtg

SEQ ID NO: 34604 - DNA, 201 bp, Homo sapiens
ggggcgggggcgaggtgggggctctgggcgccagggtggccggggacacacagaagcggcagccaccgaggagggagcagtgccgggagccccgacggcgmcttgctgcatggagctgggccgctgacagctgtcgctgcccgcagcctctgacctccctgggaccccggcgtctgaggctcatagtctgctccctgtctt

SEQ ID NO: 34605 - DNA, 201 bp, Homo sapiens
tcggaggtctttatttccggttaccacccctccccctcgattcaaacacagtgatataaaaggaatagaaacaaaaaaaatcaggccatgagaataccaaytaaccctctcccaccccatccccccaatcactcccaaatcaggacacacgattgatgtttgatgtttatccccgactcctcctgttaccctctctgtcca

SEQ ID NO: 34606 - DNA, 201 bp, Homo sapiens
agaagctcaggtatgtggctcagaggatgaacagagagggagagtctgggccatgtatcatcacctgtgggattcccagggcttatggagtttggtcagascaagtgacctgggggaggcctgatgggagtaaagaagctgaagctgagatgtaggacgcgattggggggaaggtcagagggaaaaggaagcagcgtgtag

SEQ ID NO: 34607 - DNA, 201 bp, Homo sapiens
gactccccatagcctccatggctatgctcatggtcatgtccatgtcctctgtggtagaggctctcatgggagtagccatggctatggccatggtgtaaatyctcatgtgaatgtccatggtcgtgatcgtgggtatgtccatgccagatgctctcgtgagtgtggccatggccatgggcatggctgtggccatggtggaaa

SEQ ID NO: 34608 - DNA, 201 bp, Homo sapiens
cttggacgtggcagtcccgcctttagatcccgcgagaacaggaagttccgttccaccttcgccctaatgcctttaccaatatggcggcactccggtagcgrcgaatccatcctgcactgacacgcatgcgcgagtgtggaggtgatttgaggggagggtgggcgaggcgggctaacaggccggaggagaccgcctcctcgg

SEQ ID NO: 34609 - DNA, 201 bp, Homo sapiens
atttcagggggggcctgtttattcactttggggttgtgctccagggatggcctttcacatagactgcagtgtaaatgacagcctctggaatgtgcattgcmgggccttgcttagtggtagggaatgatttccatcacttctgtgacattctgcttcccaataagtcttcctgtgacttccctatttcccccatcccagatt

SEQ ID NO: 34610 - DNA, 201 bp, Homo sapiens
gaggtgactgtatgaggatgggcagcgccgtttcgggcttggggggggtatccggttgggagctccggacgcgatccctggacgccgccgccgaggttccrtggggcccaagaggtgcacgcagggtgggggacacaaggcaagctttgtcggggagggggggagagggtgtgccaggctgggggcggggccggccggagg

SEQ ID NO: 34611 - DNA, 201 bp, Homo sapiens
tgcactgtccaccccctccaggtggccctggggctggcaaacggctatgtgcaatctgcggggacagaagctcaggtatgtggctcagaggatgaacagakagggagagtctgggccatgtatcatcacctgtgggattcccagggcttatggagtttggtcagagcaagtgacctgggggaggcctgatgggagtaaaga

SEQ ID NO: 34612 - DNA, 201 bp, Homo sapiens; identical to SEQ ID NO: 5507

SEQ ID NO: 34613 - DNA, 201 bp, Homo sapiens
ggtgaggaaaaggcctggaaaggatggtagagaaaaaacagagaattctcaccggctccgggatcctctcctttcccggtttgcttggacgtggcagtccsgcctttagatcccgcgagaacaggaagttccgttccaccttcgccctaatgcctttaccaatatggcggcactccggtagcgacgaatccatcctgcact

SEQ ID NO: 34614 - DNA, 201 bp, Homo sapiens
ggccatgtatcatcacctgtgggattcccagggcttatggagtttggtcagagcaagtgacctgggggaggcctgatgggagtaaagaagctgaagctgaratgtaggacgcgattggggggaaggtcagagggaaaaggaagcagcgtgtagggtttctgaacagtgaggagactgggactggatcatcactcagctcct

SEQ ID NO: 34615 - DNA, 201 bp, Homo sapiens
agaacaacaaaccccggagccggagccaggggaggctggacgggacgggatgggcgacagcgggcggggtgagtgccccagcagaagggcaggcgagccaktgaccgctttatctgcgacccctcccccacaccctcccccggtgctcttttccttgcgctcccgcccccttgtttgtaaacacgcgtcccctccctcccg

SEQ ID NO: 34616 - DNA, 201 bp, Homo sapiens
tcatttctcttcctcctctcttccctgccatcccagatgccaagggcctctccaaccctagtgaggtggaggtcctgcgggagaaagtgtatgcatcactkgagacctactgcaaacagaagtaccctgagcagcagggacggtgagatggggctggggggcactgaggctcccttgggggtggggagtgctatgaggatg

SEQ ID NO: 34617 - DNA, 201 bp, Homo sapiens
agtagccatggctatggccatggtgtaaatcctcatgtgaatgtccatggtcgtgatcgtgggtatgtccatgccagatgctctcgtgagtgtggccatgrccatgggcatggctgtggccatggtggaaatcttcatgtgagtgcctgtggctgtggccatggaagtcctcttgcagatcgtcgtgcaggtcgtcatgac

SEQ ID NO: 34618 - DNA, 201 bp, Homo sapiens
gaacaacaaaccccggagccggagccaggggaggctggacgggacgggatgggcgacagcgggcggggtgagtgccccagcagaagggcaggcgagccagkgaccgctttatctgcgacccctcccccacaccctcccccggtgctcttttccttgcgctcccgcccccttgtttgtaaacacgcgtcccctccctcccga

SEQ ID NO: 34619 - DNA, 201 bp, Homo sapiens
tcacaaatttctccacgacaagaaaggcaacaattccactgagaacccacagtcccacagacagaatggggccctggcctgggaatggaggcattgagacwttaagggagatgtgcattccagactcctcctcctcaagtgcgggaggtgaggaatagggagagacggaccttccccagcaccccaactcccatccccatc

SEQ ID NO: 34620 - DNA, 201 bp, Homo sapiens
ctcttttccttgcgctcccgcccccttgtttgtaaacacgcgtcccctccctcccgagggccttagcaccctcccccccggggcggggcggggaaggggarcttccgccctcctagctgtgaccgcttgaggccttgggcaccggaggtcgcgggcctgggaagggcacgattcctcttaaacctcaggactttgggcgtt

SEQ ID NO: 34621 - DNA, 201 bp, Homo sapiens
ggacccgccctgcccaggcgtcttagaccacatgcccttctcccttatcccactcagactgtgtacctctctggaagggtggactgctctctctcctctaragggcgatatttgatttctctctcccttcgcagctctcctccctgttaccctgttctggcccttgagtttccttcttaatggttaggcctctgtggcctg

SEQ ID NO: 34622 - DNA, 201 bp, Homo sapiens
attcagagcagagcccagtaagcccagaaagaaaggaagccttgactacctgtctcattggcctcctggacagggtccccctccccctccctgtgccctcratgctgccacgcagctggctctggggagcactggggctggctgccaacaggacggccctccggacaggccaggatcaggtgtctgaggccagagccaact

SEQ ID NO: 34623 - DNA, 201 bp, Homo sapiens
agggtcctgggggaaccgggggtagcggcagcagcgtgagtgttggggtcaatccactctccttcgtgatgggggttgggggaggcagtctaggtctgttmtacatcccctccccctcctttcccctcataaccttcctaacactacttgggactggaggtgctgccaaacaaggtctttcaaacatctgaggtggatgtg

SEQ ID NO: 34624 - DNA, 201 bp, Homo sapiens
aagcaggcctatgggagggggaggttacgcatcaaaaaccccccacaaaaagccggggcagtggaggcaatatcagagctttagagggggaaagtggcctrgcgttcacctgcacttgttccagcaggcacctggcggccctggcctcagacacgtcagcctggaaggcagcatggttccctcggggcggcccctccttgc

SEQ ID NO: 34625 - DNA, 201 bp, Homo sapiens
gggtgagtgaggagagataaagggtttgaggcagctgtgtttggcagacatcaccaacctgctttttgctgcagccagactggaccaagatggcaaagtcyccgacctcgtggggcacttcatgtagcaggacagtcattgtggtcaggatccctagtccccggccccctcgaaaggaagccccaatggccagaccatcag

SEQ ID NO: 34626 - DNA, 201 bp, Homo sapiens; identical to SEQ ID NO: 5499

SEQ ID NO: 34627 - DNA, 201 bp, Homo sapiens
gggtcctgggggaaccgggggtagcggcagcagcgtgagtgttggggtcaatccactctccttcgtgatgggggttgggggaggcagtctaggtctgttcwacatcccctccccctcctttcccctcataaccttcctaacactacttgggactggaggtgctgccaaacaaggtctttcaaacatctgaggtggatgtga

SEQ ID NO: 34628 - DNA, 201 bp, Homo sapiens; identical to SEQ ID NO: 5500

SEQ ID NO: 34629 - DNA, 201 bp, Homo sapiens
ctcttgcagatcgtcgtgcaggtcgtcatgacccccgagtccagccaccagaagccccaaggtcgcccaggtcagcagtcccacggccacccagtgggggscccccaggcctctggccatcacgctgaccagagggacagaggcagtgactccacttgactcaactctatacctacacagggtccgctttactccaatcgc

SEQ ID NO: 34630 - DNA, 201 bp, Homo sapiens
cagtggccctcggctaggctggcatgtagatagagggggtggggctataggctggtccgtgtccaaggctggctgagctgtgacctttgagtgacctgcasgtccctctccagggtgctgacagagctagtgtccaaaatgcgtgacatgaggatggacaagacagagcttggctgcctgagggcaatcattctgtttaat

SEQ ID NO: 34631 - DNA, 201 bp, Homo sapiens
gcagccagattcaggtaccccgacacacgcaggtcttgtacaggacaagaagagaaaatgatcagaggcttccatcaccacttgttccagtcttggtcagytattctcacacctcccctcagagaccactttacacccagtcctttagtgtttctcagatacctgccattacccacagcacatattccatgtgatttgtga

SEQ ID NO: 34632 - DNA, 201 bp, Homo sapiens
gctcaggtatgtggctcagaggatgaacagagagggagagtctgggccatgtatcatcacctgtgggattcccagggcttatggagtttggtcagagcaaktgacctgggggaggcctgatgggagtaaagaagctgaagctgagatgtaggacgcgattggggggaaggtcagagggaaaaggaagcagcgtgtagggtt

SEQ ID NO: 34633 - DNA, 201 bp, Homo sapiens
tggtcagctattctcacacctcccctcagagaccactttacacccagtcctttagtgtttctcagatacctgccattacccacagcacatattccatgtgrtttgtgatgatgtcccttgcccaaatttatcaccaactctggcccttacctaagcctcttttttcttcttcagcgttctgaggtctcactggcccatctt

SEQ ID NO: 34634 - DNA, 201 bp, Homo sapiens
tgtgaggacagtgaagcccagggccaggaaattgaggcgtatggtgcctgtagactctaggagtctttcttagggggaagagggatcctctggcatggagrcagggggatggctaagatgactgtttcttatttcaggggctgagtgggtagagatgggactttagggaaatgagttactgtagaattcctaaggttagag

SEQ ID NO: 34635 - DNA, 201 bp, Homo sapiens
ctcttgtttccttttcttcttcctctgagctctgcttctccttggtagaacgctctgagggaagaaaagagttggtcagagtggagaacagatcttccaayatgtcctctccctcctgagggccataagatgaggagattctgaggcaggcaagtcagctttcaggaaagttgttcctgggctcaccttgtcttccatgtc

SEQ ID NO: 34636 - DNA, 201 bp, Homo sapiens
aggaatctctttgtccttgaagtgactgggggagggcagatagggctgaaaggtggaggaccactttagagaccctgaatggggatggatgcttgtcttgrgtccttgggaagagctgaagatggccagggccagcccggtccagtcattgctggtgtggggatggtagacgccaatgttgatgggtgaggcgtgtgtgtc

SEQ ID NO: 34637 - DNA, 201 bp, Homo sapiens
aatgggagggagtgtgtgtgactggacgtttgggtcctagaaaaggaaggggctagggaagatattggggttcccgaaaagagaatcttagggtacaggcmgttgagacctacaaggggcaggagagagcgagcgatagagggagggttcccgcctccctccccaggtggagactgagggtggggtttcccttcggtggct

SEQ ID NO: 34638 - DNA, 201 bp, Homo sapiens
ccctggggctggcaaacggctatgtgcaatctgcggggacagaagctcaggtatgtggctcagaggatgaacagagagggagagtctgggccatgtatcaycacctgtgggattcccagggcttatggagtttggtcagagcaagtgacctgggggaggcctgatgggagtaaagaagctgaagctgagatgtaggacgcg

SEQ ID NO: 34639 - DNA, 201 bp, Homo sapiens
ggcggctggaggcgggggccgggccgggggcgggggcgaggtgggggctctgggcgccagggtggccggggacacacagaagcggcagccaccgaggaggragcagtgccgggagccccgacggcgccttgctgcatggagctgggccgctgacagctgtcgctgcccgcagcctctgacctccctgggaccccggcgtct

SEQ ID NO: 34640 - DNA, 201 bp, Homo sapiens
cttctcttccactgatgtgctttgaatcccttggcctgatttctggctcctgacccttgctgccccacccaggctggaatgaactcctcattgcctccttytcacaccgatccattgatgttcgagatggcatcctccttgccacaggtcttcacgtgcaccgcaactcagcccattcagcaggagtaggagccatctttg

SEQ ID NO: 34641 - DNA, 201 bp, Homo sapiens
gactcctcctcctcaagtgcgggaggtgaggaatagggagagacggaccttccccagcaccccaactcccatccccatctgtctcttcctcaccactgtgsgagtgtccatgtccgggttgctccagagtgtggtgagaatgaggttctggaagaaggggggaaaaccagatgagggaatatctgacacaatgagtgtgta

SEQ ID NO: 34642 - DNA, 201 bp, Homo sapiens
gagcgtgtccatgtccatgactgtgaccatgtcctcctttcacatgtctcacaaatttctccacgacaagaaaggcaacaattccactgagaacccacagkcccacagacagaatggggccctggcctgggaatggaggcattgagacattaagggagatgtgcattccagactcctcctcctcaagtgcgggaggtgagg

SEQ ID NO: 34643 - DNA, 201 bp, Homo sapiens
tcacctgtgggattcccagggcttatggagtttggtcagagcaagtgacctgggggaggcctgatgggagtaaagaagctgaagctgagatgtaggacgcsattggggggaaggtcagagggaaaaggaagcagcgtgtagggtttctgaacagtgaggagactgggactggatcatcactcagctcctggttccctatct

SEQ ID NO: 34644 - DNA, 201 bp, Homo sapiens
atcccagcgcagaggggcgtggcaagggcaaagccggggccaatcaaaggcccgccagccttaggccatctgcggccaccagcgcaggccgacctcccacmgagggggcgtggcccgacactgctgcttaggggccccgggtgtggagaagacaaggggccccattccccccaaaaagacaaagactgcatgtggggcgga

SEQ ID NO: 34645 - DNA, 201 bp, Homo sapiens
aagaagctgaagctgagatgtaggacgcgattggggggaaggtcagagggaaaaggaagcagcgtgtagggtttctgaacagtgaggagactgggactggwtcatcactcagctcctggttccctatctctgtatttggcaaacagggaggactttaagttttgctagggggagattggaaacagactaaatggtgaaggt

SEQ ID NO: 34646 - DNA, 201 bp, Homo sapiens
ggctacctggctttacgctgggaatagaggggctcgatggtctaccccacgtgctgccccacccacgagacaggtgtggctttgggatgacctggtattcrttcaaatggattggttggaaaattttcctcacctgaactatcctcctctccttgtcaactccctcctctcaccacaatgaggagttacgctgtttttggg

SEQ ID NO: 34647 - DNA, 201 bp, Homo sapiens
ggagctgatggtgtgaagagtatgtgtataggggagcaagtgagggcaaggtgatcttttgttttccagggagtttgagccctaggaagctgagttctagktagacagggctggtgggctggatcttgaatctttgggtcccaggtggtggggttggtgggggtggtgagacaggattgaggttccaggtgtggggagctt

SEQ ID NO: 34648 - DNA, 201 bp, Homo sapiens; identical to SEQ ID NO: 5503

SEQ ID NO: 34649 - DNA, 201 bp, Homo sapiens; identical to SEQ ID NO: 5504

SEQ ID NO: 34650 - DNA, 201 bp, Homo sapiens; identical to SEQ ID NO: 5505

SEQ ID NO: 34651 - DNA, 201 bp, Homo sapiens
ccacaatgaggagttacgctgtttttgggtttttttagccagtcaaatatagcagtgggaggttgtataccaattttagtgacacaaatgttaataagttytgataacccactaccatcggaccagccggagttacactgttgtttgacagcagggtgtctctgaacttggggatgggtggagtgggctgggtccggcacg

SEQ ID NO: 34652 - DNA, 201 bp, Homo sapiens; identical to SEQ ID NO: 5506

SEQ ID NO: 34653 - DNA, 201 bp, Homo sapiens
ttccaccatttccaggtggcaccgtgtggctgtggctgtgaagggccagtctgtcaccctcattgttgactgcaagaagcgagtcacccggcctctccccygaagtgctcgtccagtattggacacccatggagtgatcatctttggtgcccgtattctggatgaagaagtctttgaggtaaccagagcaatcagaggcag

SEQ ID NO: 34654 - DNA, 201 bp, Homo sapiens
ccaacatgtcctctccctcctgagggccataagatgaggagattctgaggcaggcaagtcagctttcaggaaagttgttcctgggctcaccttgtcttccrtgtccatgacttccacgtgtatgactgtgagcgtgtccatgtccatgactgtgaccatgtcctcctttcacatgtctcacaaatttctccacgacaagaa

SEQ ID NO: 34655 - DNA, 201 bp, Homo sapiens
acagaagcggcagccaccgaggagggagcagtgccgggagccccgacggcgccttgctgcatggagctgggccgctgacagctgtcgctgcccgcagcctmtgacctccctgggaccccggcgtctgaggctcatagtctgctccctgtcttctgtcagcctcagggcatccagcgtctcaggccgacctgggtccctggg

SEQ ID NO: 34656 - DNA, 201 bp, Homo sapiens
ctaagttacccagctatccccctcagtaagaccctcaacctggaaatctcccaactggccgaggaaaaacccacatccacggatccatcccacaaacccartgggccctgcttcccttgccaggcctctggtaaagggcaagcaagtgcagcccaaaaggggcatcctgtggctcacatctgcatggccatcctgatttgg

SEQ ID NO: 34657 - DNA, 201 bp, Homo sapiens
cccctgaagatgtgaagccaccagtcttaggggtccggggcctgcactgtccaccccctccaggtggccctggggctggcaaacggctatgtgcaatctgyggggacagaagctcaggtatgtggctcagaggatgaacagagagggagagtctgggccatgtatcatcacctgtgggattcccagggcttatggagtttg

SEQ ID NO: 34658 - DNA, 201 bp, Homo sapiens
ttatatgaatttaagcaaactaatctctttgaaccccgagttcttcatcttaaaaatgagaataaatgcttccagcatcattatgataattgagtgaatgktaaaatgtgcttagcatgtttcttggcatattttatttaaaaaaattttttttttcaatcagctttctcaggttgaatcttggcatgttttttttaacca

SEQ ID NO: 34659 - DNA, 201 bp, Homo sapiens
gcaccccaactcccatccccatctgtctcttcctcaccactgtgggagtgtccatgtccgggttgctccagagtgtggtgagaatgaggttctggaagaakgggggaaaaccagatgagggaatatctgacacaatgagtgtgtatttgggggaatatcgaaaggtcagggatcataaaggagaaagaacccttttcctcc

SEQ ID NO: 34660 - DNA, 201 bp, Homo sapiens
tgggcgccgagcgctgcgtgcttctcaggcgttgcccgcccggaggcggcccacgtccccgagtgaccccatttccctggacccttccaaccagagtcgamtgctcgctcatcttaccactgctccccctctacctcggctctgggactccctaaccgcgtcccccatttgcatctccttggacctgactatcctgtgttt

SEQ ID NO: 34661 - DNA, 201 bp, Homo sapiens
tgaggagactgggactggatcatcactcagctcctggttccctatctctgtatttggcaaacagggaggactttaagttttgctagggggagattggaaasagactaaatggtgaaggtgtctccatgcaaccttcttattgctcctcccctttccctgtaggcaaacactacggggtttacagctgtgagggttgcaagg

SEQ ID NO: 34662 - DNA, 201 bp, Homo sapiens
gcccagtaagcccagaaagaaaggaagccttgactacctgtctcattggcctcctggacagggtccccctccccctccctgtgccctcgatgctgccacgmagctggctctggggagcactggggctggctgccaacaggacggccctccggacaggccaggatcaggtgtctgaggccagagccaactctttgcattcct

SEQ ID NO: 34663 - DNA, 201 bp, Homo sapiens
ggtcaggatccctagtccccggccccctcgaaaggaagccccaatggccagaccatcagtgaagttgtgtgccaagtcagcagccagattcaggtaccccracacacgcaggtcttgtacaggacaagaagagaaaatgatcagaggcttccatcaccacttgttccagtcttggtcagctattctcacacctcccctcag

SEQ ID NO: 34664 - DNA, 201 bp, Homo sapiens
gcactcttaagcttacagactttactgaagacctcagggcttcccttccttcttctgtgtctccatcttatcttcttaagtcagattcctaggattctgaragacactttagagcatatcttggtcaaaacacccactttagagaagatgagcctgaggcttggctttcccaaggtcatgcaacaaaggagtggcaggcag

SEQ ID NO: 34665 - DNA, 201 bp, Homo sapiens
gcagcgtgtagggtttctgaacagtgaggagactgggactggatcatcactcagctcctggttccctatctctgtatttggcaaacagggaggactttaadttttgctagggggagattggaaacagactaaatggtgaaggtgtctccatgcaaccttcttattgctcctcccctttccctgtaggcaaacactacgggg

SEQ ID NO: 34666 - DNA, 201 bp, Homo sapiens
actcttaagcttacagactttactgaagacctcagggcttcccttccttcttctgtgtctccatcttatcttcttaagtcagattcctaggattctgagaracactttagagcatatcttggtcaaaacacccactttagagaagatgagcctgaggcttggctttcccaaggtcatgcaacaaaggagtggcaggcaggt

SEQ ID NO: 34667 - DNA, 201 bp, Homo sapiens
cttacagactttactgaagacctcagggcttcccttccttcttctgtgtctccatcttatcttcttaagtcagattcctaggattctgagagacactttaragcatatcttggtcaaaacacccactttagagaagatgagcctgaggcttggctttcccaaggtcatgcaacaaaggagtggcaggcaggtttgggatca

SEQ ID NO: 34668 - DNA, 201 bp, Homo sapiens
caggattgaggttccaggtgtggggagcttgcctgggttctgggcaagcactctgatgggatccacagatgtgtggctcagggccctggacctgttccggmtcctcgtggcagcttcagcccctgccccccattcctccacccctccccaactcatctcctaaaccaggaggcacagactcctgggagagctttcttgtat

SEQ ID NO: 34669 - DNA, 201 bp, Homo sapiens
taagcctcttttttcttcttcagcgttctgaggtctcactggcccatctttgggtactgtgctccctcctcgcctcttctgaacccctcttgtttcctttycttcttcctctgagctctgcttctccttggtagaacgctctgagggaagaaaagagttggtcagagtggagaacagatcttccaacatgtcctctccctc

SEQ ID NO: 34670 - DNA, 201 bp, Homo sapiens
cagcagctcgggcaacacagacactgttgctacgtagataaagccacctgcagtaaatggcaggacccagccaggacctgcaccacctgcaatttcactgyccactgctcctccttcagtgagaagggcacaggctgtgcctgccagtgcccctactgctgtcagtagttgcagacgcatcgcctgatgggcagaaaagag

SEQ ID NO: 34671 - DNA, 201 bp, Homo sapiens
gagtgtgtgtgactggacgtttgggtcctagaaaaggaaggggctagggaagatattggggttcccgaaaagagaatcttagggtacaggccgttgagacytacaaggggcaggagagagcgagcgatagagggagggttcccgcctccctccccaggtggagactgagggtggggtttcccttcggtggctgtgggcggg

SEQ ID NO: 34672 - DNA, 201 bp, Homo sapiens
gcccccaagagggagggaatgggagggagtgtgtgtgactggacgtttgggtcctagaaaaggaaggggctagggaagatattggggttcccgaaaagagwatcttagggtacaggccgttgagacctacaaggggcaggagagagcgagcgatagagggagggttcccgcctccctccccaggtggagactgagggtggg

SEQ ID NO: 34673 - DNA, 201 bp, Homo sapiens
gtctccaagctcccctcctgactctctacagtgcccagggtgtccgacagctgggcctggagctgggccgacctgtccgcttcctgtatgaagaccagacwgggcggcctcaacctccctctcagccagtcttccgaggcctcagcctagcagatggcaagtaagtttgtttgctcctctggtctgcctggcccacacttt

SEQ ID NO: 34674 - DNA, 201 bp, Homo sapiens
gctctgggcccccaagagggagggaatgggagggagtgtgtgtgactggacgtttgggtcctagaaaaggaaggggctagggaagatattggggttcccgmaaagagaatcttagggtacaggccgttgagacctacaaggggcaggagagagcgagcgatagagggagggttcccgcctccctccccaggtggagactga

SEQ ID NO: 34675 - DNA, 201 bp, Homo sapiens; identical to SEQ ID NO: 5502

SEQ ID NO: 34676 - DNA, 201 bp, Homo sapiens
tcctttcccctctcatacataaaatcgctttcaaattaaaatcgctgttttctggactgaggtgactgtatgaggatgggcagcgccgtttcgggcttggrgggggtatccggttgggagctccggacgcgatccctggacgccgccgccgaggttccgtggggcccaagaggtgcacgcagggtgggggacacaaggcaa

SEQ ID NO: 34677 - DNA, 201 bp, Homo sapiens
tttgccctgcgtcccttctctttggggctcctttcccctctcatacataaaatcgctttcaaattaaaatcgctgttttctggactgaggtgactgtatgrggatgggcagcgccgtttcgggcttggggggggtatccggttgggagctccggacgcgatccctggacgccgccgccgaggttccgtggggcccaagagg

SEQ ID NO: 34678 - DNA, 201 bp, Homo sapiens
cttggcctggggtctctgtgagtctctgtgtctctgtctcactcacccttcgtctctcaaagcggcccttgtgtgttggtgtttgcggagctgccacacgmgcaggggccaggcttaggtgggggttgggggggaaggccgtggtttcccggctcctggactcaaagggccttttctctgcctgcccgccccacctcaccc

SEQ ID NO: 34679 - DNA, 201 bp, Homo sapiens
gaggttgtataccaattttagtgacacaaatgttaataagttctgataacccactaccatcggaccagccggagttacactgttgtttgacagcagggtgyctctgaacttggggatgggtggagtgggctgggtccggcacggtggggtattagagaattaaagtctctagttggatgtttgaagactcattttcttttt

SEQ ID NO: 34680 - DNA, 201 bp, Homo sapiens
ccctccagctcccccaggattctccgggcctgtcagcagcccccaggtgagaggttgtgaccaacttactgcctggccactttcattttcttgttttcctkgtaaccccagatccttgtgtgaacttccccatggcccattgaccttccaatcctctaaccttgtcaggcctgtggtctttatgagaccccttgcctttcc

SEQ ID NO: 34681 - DNA, 201 bp, Homo sapiens
aatttcagggggggcctgtttattcactttggggttgtgctccagggatggcctttcacatagactgcagtgtaaatgacagcctctggaatgtgcattgmagggccttgcttagtggtagggaatgatttccatcacttctgtgacattctgcttcccaataagtcttcctgtgacttccctatttcccccatcccagat

SEQ ID NO: 34682 - DNA, 201 bp, Homo sapiens; identical to SEQ ID NO: 19560

SEQ ID NO: 34683 - DNA, 201 bp, Homo sapiens
gaaaagtgtgggatcctcttcgcccactcaacaagcgtgaatagctgtttgtcagctgcctgacagatgttagtcacagggtcatttggctgcaggggacrggggtaagagttatggaagattttgagatatgctgggagcccccttgtaagaggcttttgacaccccctccttacatatagtcttcctgtgagccccatc

SEQ ID NO: 34684 - DNA, 201 bp, Homo sapiens
aagaattagggaggaatttaaatggagagcctactacatggttaaaaaaaacatgccaagattcaacctgagaaagctgattgaaaaaaaaaatttttttwaataaaatatgccaagaaacatgctaagcacattttaccattcactcaattatcataatgatgctggaagcatttattctcatttttaagatgaagaact

SEQ ID NO: 34685 - DNA, 201 bp, Homo sapiens
aatcaaatatcgccctctagaggagagagagcagtccacccttccagagaggtacacagtctgagtgggataagggagaagggcatgtggtctaagacgcstgggcagggcgggtccttaccctccctcttcatgccagtggccaggcacttctgatagcggcagtactgacagcggttccgctggcgcttgtccactgtg

SEQ ID NO: 34686 - DNA, 201 bp, Homo sapiens
gcgaagggagagagaaatcaaatatcgccctctagaggagagagagcagtccacccttccagagaggtacacagtctgagtgggataagggagaagggcaygtggtctaagacgcctgggcagggcgggtccttaccctccctcttcatgccagtggccaggcacttctgatagcggcagtactgacagcggttccgctgg

SEQ ID NO: 34687 - DNA, 201 bp, Homo sapiens; identical to SEQ ID NO: 19567

SEQ ID NO: 34688 - DNA, 201 bp, Homo sapiens
aacagggtaacagggaggagagctgcgaagggagagagaaatcaaatatcgccctctagaggagagagagcagtccacccttccagagaggtacacagtcygagtgggataagggagaagggcatgtggtctaagacgcctgggcagggcgggtccttaccctccctcttcatgccagtggccaggcacttctgatagcgg

SEQ ID NO: 34689 - DNA, 201 bp, Homo sapiens
gtgcaaatcttgtgctcttctgactcaacaaataggcagtgaaaggagcactggcctaggtctttgaagatgtgggttctgatcccaaacctgcctgccamtcctttgttgcatgaccttgggaaagccaagcctcaggctcatcttctctaaagtgggtgttttgaccaagatatgctctaaagtgtctctcagaatcct

SEQ ID NO: 34690 - DNA, 201 bp, Homo sapiens; identical to SEQ ID NO: 19568

SEQ ID NO: 34691 - DNA, 201 bp, Homo sapiens
aactgactctaagtgtgtctgagtgcaaatcttgtgctcttctgactcaacaaataggcagtgaaaggagcactggcctaggtctttgaagatgtgggttytgatcccaaacctgcctgccactcctttgttgcatgaccttgggaaagccaagcctcaggctcatcttctctaaagtgggtgttttgaccaagatatgct

SEQ ID NO: 34692 - DNA, 201 bp, Homo sapiens; identical to SEQ ID NO: 33580

SEQ ID NO: 34693 - DNA, 201 bp, Homo sapiens
tctcctcgggggctcccccagccccctccccatccccatccttgtcctttccccgctgacgctcctcctgtaccgctgcagggggaagggggagagaaaaratggaaagtcagcagccagccatgaaggggttccacaaatatccttacggcctcatcaggatctcatggcccttgggagatatttataggaattggggaa

SEQ ID NO: 34694 - DNA, 201 bp, Homo sapiens; identical to SEQ ID NO: 5515

SEQ ID NO: 34695 - DNA, 201 bp, Homo sapiens; identical to SEQ ID NO: 19573

SEQ ID NO: 34696 - DNA, 201 bp, Homo sapiens; identical to SEQ ID NO: 19571

SEQ ID NO: 34697 - DNA, 201 bp, Homo sapiens; identical to SEQ ID NO: 19574

SEQ ID NO: 34698 - DNA, 201 bp, Homo sapiens; identical to SEQ ID NO: 19575

SEQ ID NO: 34699 - DNA, 201 bp, Homo sapiens; identical to SEQ ID NO: 19576

SEQ ID NO: 34700 - DNA, 201 bp, Homo sapiens; identical to SEQ ID NO: 19578

SEQ ID NO: 34701 - DNA, 201 bp, Homo sapiens; identical to SEQ ID NO: 19579

SEQ ID NO: 34702 - DNA, 201 bp, Homo sapiens; identical to SEQ ID NO: 19582

SEQ ID NO: 34703 - DNA, 201 bp, Homo sapiens; identical to SEQ ID NO: 19583

SEQ ID NO: 34704 - DNA, 201 bp, Homo sapiens; identical to SEQ ID NO: 19584

SEQ ID NO: 34705 - DNA, 201 bp, Homo sapiens; identical to SEQ ID NO: 19585

SEQ ID NO: 34706 - DNA, 201 bp, Homo sapiens; identical to SEQ ID NO: 33599

SEQ ID NO: 34707 - DNA, 201 bp, Homo sapiens; identical to SEQ ID NO: 5514

SEQ ID NO: 34708 - DNA, 201 bp, Homo sapiens
ctacacgctgcttccttttccctctgaccttccccccaatcgcgtcctacatctcagcttcagcttctttactcccatcaggcctcccccaggtcacttgstctgaccaaactccataagccctgggaatcccacaggtgatgatacatggcccagactctccctctctgttcatcctctgagccacatacctgagcttct

SEQ ID NO: 34709 - DNA, 201 bp, Homo sapiens; identical to SEQ ID NO: 5520

SEQ ID NO: 34710 - DNA, 201 bp, Homo sapiens; identical to SEQ ID NO: 33609

SEQ ID NO: 34711 - DNA, 201 bp, Homo sapiens
aatctgggatgggggaaatagggaagtcacaggaagacttattgggaagcagaatgtcacagaagtgatggaaatcattccctaccactaagcaaggccckgcaatgcacattccagaggctgtcatttacactgcagtctatgtgaaaggccatccctggagcacaaccccaaagtgaataaacaggccccccctgaaat

SEQ ID NO: 34712 - DNA, 201 bp, Homo sapiens
tctttactcccatcaggcctcccccaggtcacttgctctgaccaaactccataagccctgggaatcccacaggtgatgatacatggcccagactctccctmtctgttcatcctctgagccacatacctgagcttctgtccccgcagattgcacatagccgtttgccagccccagggccacctggagggggtggacagtgca

SEQ ID NO: 34713 - DNA, 201 bp, Homo sapiens; identical to SEQ ID NO: 33610

SEQ ID NO: 34714 - DNA, 201 bp, Homo sapiens
aggagctgagtgatgatccagtcccagtctcctcactgttcagaaaccctacacgctgcttccttttccctctgaccttccccccaatcgcgtcctacatytcagcttcagcttctttactcccatcaggcctcccccaggtcacttgctctgaccaaactccataagccctgggaatcccacaggtgatgatacatggcc

SEQ ID NO: 34715 - DNA, 201 bp, Homo sapiens; identical to SEQ ID NO: 33611

SEQ ID NO: 34716 - DNA, 201 bp, Homo sapiens
catcctcatagcactccccacccccaagggagcctcagtgccccccagccccatctcaccgtccctgctgctcagggtacttctgtttgcagtaggtctcmagtgatgcatacactttctcccgcaggacctccacctcactagggttggagaggcccttggcatctgggatggcagggaagagaggaggaagagaaatga

SEQ ID NO: 34717 - DNA, 201 bp, Homo sapiens; identical to SEQ ID NO: 19600

SEQ ID NO: 34718 - DNA, 201 bp, Homo sapiens; identical to SEQ ID NO: 5522

SEQ ID NO: 34719 - DNA, 201 bp, Homo sapiens; identical to SEQ ID NO: 33614

SEQ ID NO: 34720 - DNA, 201 bp, Homo sapiens; identical to SEQ ID NO: 33615

SEQ ID NO: 34721 - DNA, 201 bp, Homo sapiens; identical to SEQ ID NO: 33617

SEQ ID NO: 34722 - DNA, 201 bp, Homo sapiens
caggccacagaggcctaaccattaagaaggaaactcaagggccagaacagggtaacagggaggagagctgcgaagggagagagaaatcaaatatcgccctytagaggagagagagcagtccacccttccagagaggtacacagtctgagtgggataagggagaagggcatgtggtctaagacgcctgggcagggcgggtcc

SEQ ID NO: 34723 - DNA, 201 bp, Homo sapiens
cacatccacctcagatgtttgaaagaccttgtttggcagcacctccagtcccaagtagtgttaggaaggttatgaggggaaaggagggggaggggatgtakaacagacctagactgcctcccccaacccccatcacgaaggagagtggattgaccccaacactcacgctgctgccgctacccccggttcccccaggaccct

SEQ ID NO: 34724 - DNA, 201 bp, Homo sapiens; identical to SEQ ID NO: 19601

SEQ ID NO: 34725 - DNA, 201 bp, Homo sapiens; identical to SEQ ID NO: 19602

SEQ ID NO: 34726 - DNA, 201 bp, Homo sapiens
tcacatccacctcagatgtttgaaagaccttgtttggcagcacctccagtcccaagtagtgttaggaaggttatgaggggaaaggagggggaggggatgtwgaacagacctagactgcctcccccaacccccatcacgaaggagagtggattgaccccaacactcacgctgctgccgctacccccggttcccccaggaccc

SEQ ID NO: 34727 - DNA, 201 bp, Homo sapiens; identical to SEQ ID NO: 5518

SEQ ID NO: 34728 - DNA, 201 bp, Homo sapiens
attaaacagaatgattgccctcaggcagccaagctctgtcttgtccatcctcatgtcacgcattttggacactagctctgtcagcaccctggagagggacstgcaggtcactcaaaggtcacagctcagccagccttggacacggaccagcctatagccccaccccctctatctacatgccagcctagccgagggccactg

SEQ ID NO: 34729 - DNA, 201 bp, Homo sapiens; identical to SEQ ID NO: 19605

SEQ ID NO: 34730 - DNA, 201 bp, Homo sapiens
aaccctacacgctgcttccttttccctctgaccttccccccaatcgcgtcctacatctcagcttcagcttctttactcccatcaggcctcccccaggtcamttgctctgaccaaactccataagccctgggaatcccacaggtgatgatacatggcccagactctccctctctgttcatcctctgagccacatacctgagc

SEQ ID NO: 34731 - DNA, 201 bp, Homo sapiens; identical to SEQ ID NO: 19606

SEQ ID NO: 34732 - DNA, 201 bp, Homo sapiens; identical to SEQ ID NO: 33625

SEQ ID NO: 34733 - DNA, 201 bp, Homo sapiens
cgcgtcctacatctcagcttcagcttctttactcccatcaggcctcccccaggtcacttgctctgaccaaactccataagccctgggaatcccacaggtgrtgatacatggcccagactctccctctctgttcatcctctgagccacatacctgagcttctgtccccgcagattgcacatagccgtttgccagccccaggg

SEQ ID NO: 34734 - DNA, 201 bp, Homo sapiens; identical to SEQ ID NO: 19565

SEQ ID NO: 34735 - DNA, 201 bp, Homo sapiens; identical to SEQ ID NO: 19566

SEQ ID NO: 34736 - DNA, 201 bp, Homo sapiens
caaagatggctcctactcctgctgaatgggctgagttgcggtgcacgtgaagacctgtggcaaggaggatgccatctcgaacatcaatggatcggtgtgaraaggaggcaatgaggagttcattccagcctgggtggggcagcaagggtcaggagccagaaatcaggccaagggattcaaagcacatcagtggaagagaag

SEQ ID NO: 34737 - DNA, 201 bp, Homo sapiens; identical to SEQ ID NO: 33579

SEQ ID NO: 34738 - DNA, 201 bp, Homo sapiens
agatagggaaccaggagctgagtgatgatccagtcccagtctcctcactgttcagaaaccctacacgctgcttccttttccctctgaccttccccccaatsgcgtcctacatctcagcttcagcttctttactcccatcaggcctcccccaggtcacttgctctgaccaaactccataagccctgggaatcccacaggtga

SEQ ID NO: 34739 - DNA, 201 bp, Homo sapiens; identical to SEQ ID NO: 33581

SEQ ID NO: 34740 - DNA, 201 bp, Homo sapiens; identical to SEQ ID NO: 19572

SEQ ID NO: 34741 - DNA, 201 bp, Homo sapiens
accttcaccatttagtctgtttccaatctccccctagcaaaacttaaagtcctccctgtttgccaaatacagagatagggaaccaggagctgagtgatgawccagtcccagtctcctcactgttcagaaaccctacacgctgcttccttttccctctgaccttccccccaatcgcgtcctacatctcagcttcagcttctt

SEQ ID NO: 34742 - DNA, 201 bp, Homo sapiens; identical to SEQ ID NO: 33586

SEQ ID NO: 34743 - DNA, 201 bp, Homo sapiens; identical to SEQ ID NO: 19577

SEQ ID NO: 34744 - DNA, 201 bp, Homo sapiens; identical to SEQ ID NO: 33597

SEQ ID NO: 34745 - DNA, 201 bp, Homo sapiens; identical to SEQ ID NO: 19587

SEQ ID NO: 34746 - DNA, 201 bp, Homo sapiens; identical to SEQ ID NO: 33602

SEQ ID NO: 34747 - DNA, 201 bp, Homo sapiens
ccaaatcaggatggccatgcagatgtgagccacaggatgccccttttgggctgcacttgcttgccctttaccagaggcctggcaagggaagcagggcccaytgggtttgtgggatggatccgtggatgtgggtttttcctcggccagttgggagatttccaggttgagggtcttactgagggggatagctgggtaacttag

SEQ ID NO: 34748 - DNA, 201 bp, Homo sapiens
caaactccataagccctgggaatcccacaggtgatgatacatggcccagactctccctctctgttcatcctctgagccacatacctgagcttctgtccccrcagattgcacatagccgtttgccagccccagggccacctggagggggtggacagtgcaggccccggacccctaagactggtggcttcacatcttcagggg

SEQ ID NO: 34749 - DNA, 201 bp, Homo sapiens
tggttaaaaaaaacatgccaagattcaacctgagaaagctgattgaaaaaaaaaatttttttaaataaaatatgccaagaaacatgctaagcacattttamcattcactcaattatcataatgatgctggaagcatttattctcatttttaagatgaagaactcggggttcaaagagattagtttgcttaaattcatataa

SEQ ID NO: 34750 - DNA, 201 bp, Homo sapiens; identical to SEQ ID NO: 33603

SEQ ID NO: 34751 - DNA, 201 bp, Homo sapiens
ccttgcaaccctcacagctgtaaaccccgtagtgtttgcctacagggaaaggggaggagcaataagaaggttgcatggagacaccttcaccatttagtctstttccaatctccccctagcaaaacttaaagtcctccctgtttgccaaatacagagatagggaaccaggagctgagtgatgatccagtcccagtctcctca

SEQ ID NO: 34752 - DNA, 201 bp, Homo sapiens; identical to SEQ ID NO: 19592

SEQ ID NO: 34753 - DNA, 201 bp, Homo sapiens; identical to SEQ ID NO: 19595

SEQ ID NO: 34754 - DNA, 201 bp, Homo sapiens
ctgcctgccactcctttgttgcatgaccttgggaaagccaagcctcaggctcatcttctctaaagtgggtgttttgaccaagatatgctctaaagtgtctytcagaatcctaggaatctgacttaagaagataagatggagacacagaagaaggaagggaagccctgaggtcttcagtaaagtctgtaagcttaagagtgc

SEQ ID NO: 34755 - DNA, 201 bp, Homo sapiens
ccccgtagtgtttgcctacagggaaaggggaggagcaataagaaggttgcatggagacaccttcaccatttagtctgtttccaatctccccctagcaaaahttaaagtcctccctgtttgccaaatacagagatagggaaccaggagctgagtgatgatccagtcccagtctcctcactgttcagaaaccctacacgctgc

SEQ ID NO: 34756 - DNA, 201 bp, Homo sapiens
acctgcctgccactcctttgttgcatgaccttgggaaagccaagcctcaggctcatcttctctaaagtgggtgttttgaccaagatatgctctaaagtgtytctcagaatcctaggaatctgacttaagaagataagatggagacacagaagaaggaagggaagccctgaggtcttcagtaaagtctgtaagcttaagagt

SEQ ID NO: 34757 - DNA, 201 bp, Homo sapiens
tgatcccaaacctgcctgccactcctttgttgcatgaccttgggaaagccaagcctcaggctcatcttctctaaagtgggtgttttgaccaagatatgctytaaagtgtctctcagaatcctaggaatctgacttaagaagataagatggagacacagaagaaggaagggaagccctgaggtcttcagtaaagtctgtaag

SEQ ID NO: 34758 - DNA, 201 bp, Homo sapiens; identical to SEQ ID NO: 33616

SEQ ID NO: 34759 - DNA, 201 bp, Homo sapiens; identical to SEQ ID NO: 19603

SEQ ID NO: 34760 - DNA, 201 bp, Homo sapiens; identical to SEQ ID NO: 33624

SEQ ID NO: 34761 - DNA, 201 bp, Homo sapiens; identical to SEQ ID NO: 33626

SEQ ID NO: 34762 - DNA, 201 bp, Homo sapiens
atctgggatgggggaaatagggaagtcacaggaagacttattgggaagcagaatgtcacagaagtgatggaaatcattccctaccactaagcaaggccctkcaatgcacattccagaggctgtcatttacactgcagtctatgtgaaaggccatccctggagcacaaccccaaagtgaataaacaggccccccctgaaatt

SEQ ID NO: 34763 - DNA, 201 bp, Homo sapiens; identical to SEQ ID NO: 19609

SEQ ID NO: 34764 - DNA, 201 bp, Homo sapiens; identical to SEQ ID NO: 4206

SEQ ID NO: 34765 - DNA, 201 bp, Homo sapiens; identical to SEQ ID NO: 27779

SEQ ID NO: 34766 - DNA, 201 bp, Homo sapiens; identical to SEQ ID NO: 4211

SEQ ID NO: 34767 - DNA, 201 bp, Homo sapiens; identical to SEQ ID NO: 4212

SEQ ID NO: 34768 - DNA, 201 bp, Homo sapiens; identical to SEQ ID NO: 4191

SEQ ID NO: 34769 - DNA, 201 bp, Homo sapiens; identical to SEQ ID NO: 28064

SEQ ID NO: 34770 - DNA, 201 bp, Homo sapiens; identical to SEQ ID NO: 4186

SEQ ID NO: 34771 - DNA, 201 bp, Homo sapiens; identical to SEQ ID NO: 27995

SEQ ID NO: 34772 - DNA, 201 bp, Homo sapiens; identical to SEQ ID NO: 27997

SEQ ID NO: 34773 - DNA, 201 bp, Homo sapiens; identical to SEQ ID NO: 4193

SEQ ID NO: 34774 - DNA, 201 bp, Homo sapiens; identical to SEQ ID NO: 4194

SEQ ID NO: 34775 - DNA, 201 bp, Homo sapiens; identical to SEQ ID NO: 4213

SEQ ID NO: 34776 - DNA, 201 bp, Homo sapiens; identical to SEQ ID NO: 4195

SEQ ID NO: 34777 - DNA, 201 bp, Homo sapiens; identical to SEQ ID NO: 4198

SEQ ID NO: 34778 - DNA, 201 bp, Homo sapiens; identical to SEQ ID NO: 4196

SEQ ID NO: 34779 - DNA, 201 bp, Homo sapiens; identical to SEQ ID NO: 4199

SEQ ID NO: 34780 - DNA, 201 bp, Homo sapiens; identical to SEQ ID NO: 5539

SEQ ID NO: 34781 - DNA, 201 bp, Homo sapiens; identical to SEQ ID NO: 5540

SEQ ID NO: 34782 - DNA, 201 bp, Homo sapiens; identical to SEQ ID NO: 4190

SEQ ID NO: 34783 - DNA, 201 bp, Homo sapiens; identical to SEQ ID NO: 28106

SEQ ID NO: 34784 - DNA, 201 bp, Homo sapiens; identical to SEQ ID NO: 4192

SEQ ID NO: 34785 - DNA, 201 bp, Homo sapiens; identical to SEQ ID NO: 5541

SEQ ID NO: 34786 - DNA, 201 bp, Homo sapiens; identical to SEQ ID NO: 5538

SEQ ID NO: 34787 - DNA, 201 bp, Homo sapiens; identical to SEQ ID NO: 27916

SEQ ID NO: 34788 - DNA, 201 bp, Homo sapiens; identical to SEQ ID NO: 4214

SEQ ID NO: 34789 - DNA, 201 bp, Homo sapiens; identical to SEQ ID NO: 4216

SEQ ID NO: 34790 - DNA, 201 bp, Homo sapiens; identical to SEQ ID NO: 4187

SEQ ID NO: 34791 - DNA, 201 bp, Homo sapiens; identical to SEQ ID NO: 4208

SEQ ID NO: 34792 - DNA, 201 bp, Homo sapiens; identical to SEQ ID NO: 4188

SEQ ID NO: 34793 - DNA, 201 bp, Homo sapiens; identical to SEQ ID NO: 4189

SEQ ID NO: 34794 - DNA, 201 bp, Homo sapiens; identical to SEQ ID NO: 27702

SEQ ID NO: 34795 - DNA, 201 bp, Homo sapiens; identical to SEQ ID NO: 27703

SEQ ID NO: 34796 - DNA, 201 bp, Homo sapiens; identical to SEQ ID NO: 4197

SEQ ID NO: 34797 - DNA, 201 bp, Homo sapiens; identical to SEQ ID NO: 4217

SEQ ID NO: 34798 - DNA, 201 bp, Homo sapiens
cttgagaccagcaatctgagatcagcctgagcaacacaggaagaccctgtcttcacagaaaaatgaaaaaaattaggccaggtgctatggctcacacctgyaatcacagcactttgggaggctgaggtgggtggatcacctgaggtcaggggtttgagaccagcctgggcaacatgatgaaacctgtgtctactaaaaata

SEQ ID NO: 34799 - DNA, 201 bp, Homo sapiens
aggaatgacagctgcttcaactgaaaattcaaaaggtaattttgcaaaagaggccagctgacgttgtccaggaaaacatagccctggcatcgggcaaccaytcattctttgatctatgctcctaagaaggtaatgtccgaaagaataacccgaaaagcacctctgagaagagagtcccaggccctcccaaggtgcatgtcc

SEQ ID NO: 34800 - DNA, 201 bp, Homo sapiens
atgatgctcattcctgggcttgagtgcaaggggccagacccatggggtaagagggacacatccactgggtgctgagagcaggtctggccactcccctcccygcaggccacatttaaaacataaacctgggcctcttcctgaatgccccaccttgtaattctagctaaggtcctccccacctccaaggctcagtaaatgcaa

SEQ ID NO: 34801 - DNA, 201 bp, Homo sapiens
taaaccatgtggcttctcaggtttattcaacgatcagtccatccagccctcactgagcatcttctgcacgtagcatgggatgaggaaggcatctggcccayggcatcagtgctgctttctggttgtgccaccttgggtgtgttttggcttcttcacctgttcatggagaataatagcacctactaaaaaggatcattggga

SEQ ID NO: 34802 - DNA, 201 bp, Homo sapiens
ccaccacacctgcctgtcttttaagttcaccattcagttattcactgtatctaaaaagattcttagaaataaaccatgtggcttctcaggtttattcaacratcagtccatccagccctcactgagcatcttctgcacgtagcatgggatgaggaaggcatctggcccacggcatcagtgctgctttctggttgtgccacc

SEQ ID NO: 34803 - DNA, 201 bp, Homo sapiens
gtatatccttctcctatttttttctaggcacatagactcaaaggaaagaaaccacatgccacaagcacatgccatttttttttcttatttatgttattttrttttttgagacagggtctaacactgtcaccccgggctggagtgtagtggcgcaatcacaggtcactgaagcctcaacctactcaggctcaggtaatcctc

SEQ ID NO: 34804 - DNA, 201 bp, Homo sapiens
accaccacacctgcctgtcttttaagttcaccattcagttattcactgtatctaaaaagattcttagaaataaaccatgtggcttctcaggtttattcaaygatcagtccatccagccctcactgagcatcttctgcacgtagcatgggatgaggaaggcatctggcccacggcatcagtgctgctttctggttgtgccac

SEQ ID NO: 34805 - DNA, 201 bp, Homo sapiens
ttgtgttaatattttggtgtatatccttctcctatttttttctaggcacatagactcaaaggaaagaaaccacatgccacaagcacatgccatttttttttcttatttatgttattttattttttgagacagggtctaacactgtcaccccgggctggagtgtagtggcgcaatcacaggtcactgaagcctcaacctact

SEQ ID NO: 34806 - DNA, 201 bp, Homo sapiens
cacttaacagacactcagttaagacagtctctctctctttttttttctttgaagagacaaggtcttgctctgtccccgcaagctggagtgcagtggtacartcatacctcgctgcagcctcaaacttcggggctcaagtgattcccttgcctcggcctctggagtagctgggattataagcatgcaccaccacacctgcct

SEQ ID NO: 34807 - DNA, 201 bp, Homo sapiens
tgacagactgtgtatctttaggatataattacttttttttttttttttttttttttgagacagactcttactctgtcgcccaggccggagtacagtggcayaatctgggatcactgcaacctctacctcccgggttcaagcgattcttgtgcctcagcttcccgagtagctgggattacaggcacacgccaccatacccgg

SEQ ID NO: 34808 - DNA, 201 bp, Homo sapiens
ggttttcagattttgctaaactacacttaacagacactcagttaagacagtctctctctctttttttttctttgaagagacaaggtcttgctctgtccccscaagctggagtgcagtggtacagtcatacctcgctgcagcctcaaacttcggggctcaagtgattcccttgcctcggcctctggagtagctgggattata

SEQ ID NO: 34809 - DNA, 201 bp, Homo sapiens
tgagcagaaatgcctcagcatttgatccagttttctagtggatgggaatattctttgaatgtgtgtgagcacgtgcacgcttgtaaatgtgtctgacacatgttatgcgccgatagttctccgtcatgtaatcctgagaaatgcgaattttttctctctgattgctttgctttccttccctatagatactgtgttgtactc

SEQ ID NO: 34810 - DNA, 201 bp, Homo sapiens
tgttgggcaggatgagctcagctcttgggttttcagattttgctaaactacacttaacagacactcagttaagacagtctctctctctttttttttctttkaagagacaaggtcttgctctgtccccgcaagctggagtgcagtggtacagtcatacctcgctgcagcctcaaacttcggggctcaagtgattcccttgcc

SEQ ID NO: 34811 - DNA, 201 bp, Homo sapiens
gtgagcagaaatgcctcagcatttgatccagttttctagtggatgggaatattctttgaatgtgtgtgagcacgtgcacgcttgtaaatgtgtctgacacatgttatgcgccgatagttctccgtcatgtaatcctgagaaatgcgaattttttctctctgattgctttgctttccttccctatagatactgtgttgtact

SEQ ID NO: 34812 - DNA, 201 bp, Homo sapiens
ttggaggggtgtgaatctgatgctgtaacaatttctgccttctgttggtggtacggcttggccgtgtccccacccaaatctcattttgaattgtagctcccacagttcccatgtgttgtgggaagaacccggtgtgagataattgaatcatgggggcagcttctcccatacagttctcctagtagtgaataggtctcacga

SEQ ID NO: 34813 - DNA, 201 bp, Homo sapiens
ttggcctcccaaagtgctaggattacaggtgtgagtcacggcacgtgatatcagtagtcaggttgtctgttttcttttccatgcaaagcaaaacttctttrtttcaagagtctggtaatatttactggaagttgggagagtaagagaaatgaggagaagagctgacaaaaggccgttatagcagactttagattaaaatct

SEQ ID NO: 34814 - DNA, 201 bp, Homo sapiens
tgtcacccaggctggagtgcggtggcccgatctcggctcactgcaatctccacctcccaggttcacgcgattctcccacctcagcctcctgagtagctggsatcacaggtgcatgctatcacacctgactaattattattattatcatttggcagagatggtgttttaccatgttggccaggctggtcttgaattcctgac

SEQ ID NO: 34815 - DNA, 201 bp, Homo sapiens
acatgaaaatacttagtgccactgaaccggacgctcaaaaatggctaggttggtacattttgtggtgtattttactgacattttattttattttattttaktttttgagacagggtctcgctctgtcacccaggctggagtgcggtggcccgatctcggctcactgcaatctccacctcccaggttcacgcgattctccca

SEQ ID NO: 34816 - DNA, 201 bp, Homo sapiens
gcccactttttctaaataatgaacatctttttcccaaaatgccacagtacttggattttaccaaagtcatcccatatctacagaagtgactgcacttcttyccctccttgtgggtggctgaggagagagagagaagcttctggaagagatggtacaggttctgtggaggccagataggcttggcataaagagaggatggcg

SEQ ID NO: 34817 - DNA, 201 bp, Homo sapiens
atgattatgtttgcctgttacctttcctgatatcattttgaaaaaaagcccactttttctaaataatgaacatctttttcccaaaatgccacagtacttgsattttaccaaagtcatcccatatctacagaagtgactgcacttcttcccctccttgtgggtggctgaggagagagagagaagcttctggaagagatggta

SEQ ID NO: 34818 - DNA, 201 bp, Homo sapiens
gctatatggaacctttatagtgtgatattcccattcccaaataacggttgggtctgtaattagctagcaacaatgggaaagggttttgtcaaggttttgtrcctaacagatgttctcctccaatgatgattatgtttgcctgttacctttcctgatatcattttgaaaaaaagcccactttttctaaataatgaacatctt

SEQ ID NO: 34819 - DNA, 201 bp, Homo sapiens
gatagagaccatcctggctaatacggtgaaactccgtgtctactaaaaatacaaaaaattagccgggcgaggtggcgggcaactgtaatcccagcttttcrggaggctgaagcaggagaatggcgtgaacccaggaggcggagcttgcagtgagcccagatcacacaactgcactccagcctgggtgacagcgagactccg

SEQ ID NO: 34820 - DNA, 201 bp, Homo sapiens
ctgggcgttgagttctggcttcaccacttagtggctgtataactagaggaaagtaaattcatgtccttaggcctcagtcatcatgtccataaaatgggatkccagtagctagctgtgttgtgaggattaaataacaaaacagacgtagcacagttctaagcattcatgttccaaatgttaatgattgtttttattgactgc

SEQ ID NO: 34821 - DNA, 201 bp, Homo sapiens
tagatttcaatgggacaaggggaacctaagcagaagatcaaggaaaccactaaaagcttgttcatgttatcttctgctctccaatttcacaggagttatcrgtctaagagtggttctcaatcctggctactcattagaattatttgaaacccttagcaaaaataccagtgctcaggcacgatggccagagtctgacttcac

SEQ ID NO: 34822 - DNA, 201 bp, Homo sapiens
ccgcacagtggctctaagtccaataatggagctatcattagagatatacgaaacactagactagtctcaaaagaacaaaaattgaattagaaattcaaatrttctttgaactgtgttataaaatagtgaaactgaataaaaccatttgtgcttggcagccagctccagtaattagataattaaatcattggaaaatcctag

SEQ ID NO: 34823 - DNA, 201 bp, Homo sapiens
gaactgtgcagctttgtgaaaaagagcagttttcttaaacaaagaaggtctttggtcaaggtctaggaatgctgtgttaaccacacaagtttctttattgytccagaactactcaacttttctggctttctgggaataaagaacagtgagcaaatgtgcttttgagcctgggaagttgggcagttctaaagcgcagactcg

SEQ ID NO: 34824 - DNA, 201 bp, Homo sapiens
tgccgcacttcccctgggaatttcacaggcgttagaggtgaatttgataccaaggctctcttgatgtctgtagctacagcgtcaccccatcagtggctggsgtagtttggtcctctggccggctgggagggatctctcacacttgtctcgccttgcaacccttgaactgtgcagctttgtgaaaaagagcagttttcttaa

SEQ ID NO: 34825 - DNA, 201 bp, Homo sapiens
aggtggatgacgaggtcaggacttcaagaccagcctggccaatgtggtgaaaccccatttatactgaaaaaaaattagccaggcatggtggggtgtgcctstagtcccagctactagggaggctgagacttgagaatcacttgaatgtggaaggcagaggttgcatgagccaggatagcaccattgcactccagcctgggc

SEQ ID NO: 34826 - DNA, 201 bp, Homo sapiens
tccagaagctcataatccaaatagtgctagaagatagggccaggtgtcatggctcatgcctgtaatcccagcactttgggaggacgaggcaggtggatgaygaggtcaggacttcaagaccagcctggccaatgtggtgaaaccccatttatactgaaaaaaaattagccaggcatggtggggtgtgcctctagtcccagc

SEQ ID NO: 34827 - DNA, 201 bp, Homo sapiens
actgcaccccaccccatcagggcttccctaaagaggggctatctcggcttatggccactctcgacagggaaacctcaagaccaagttagaaactgtaacartaaaaactcacgatagcacctcggttctttgaatatctacagtgaatgatgttgggcaggatgagctcagctcttgggttttcagattttgctaaactac

SEQ ID NO: 34828 - DNA, 201 bp, Homo sapiens
cacccggccaacctagttgtttgaaaccttgtaccctgccctctatggcctcattaaaacttcgcctcccagtgtggtggtttgaaaaatacagcccaggmtccttcctcatcccaccaaccaaaaacccaacatgccccacacctgcgggcccgtggtaaaacctgatgattaataccagagtcgtgtcaataaatttcc

SEQ ID NO: 34829 - DNA, 201 bp, Homo sapiens; identical to SEQ ID NO: 5569

SEQ ID NO: 34830 - DNA, 201 bp, Homo sapiens
tgaggaatgtgatgaggaattagagagaatgatgatggaggaaaagatagaggaggaggaagaggaggaaaatggggattctgtagtccagaataataacrcttcccagatgtctcataagaaggtggccccaggcaatcttagaaccggacaacaggtggaaacaaagtcacagccacactccctggccacagagaccag

SEQ ID NO: 34831 - DNA, 201 bp, Homo sapiens
tacaggcatgagccactacacatagcctatttttattttttatttttgcgtatatgtgatggagtctttgccatgttgcccaggctgttctcgaactcctrgactcaagcaatcctcctgcctcagcctcccgagtagctgggattacaggaagctcaattatttttcttctttaaaaccttttacttgacgtattcattg

SEQ ID NO: 34832 - DNA, 201 bp, Homo sapiens
aaatccatccacgattcagggggcaaattctcatttgggtcctagcatgatatgctgactccatatttggagttgtaaccttaggctgaaacctttttttwaaattcatttacatatatatatacatatattttgagacagaaccttgctctgtcgcccgggaggctggagggcagtggcacgatctcagctcattgcaac

SEQ ID NO: 34833 - DNA, 201 bp, Homo sapiens
tgaacccaggaggtggagcttgcagtgagctgagatcacaccactgcactccagcctgggcaacagagcgagactccatctcaaaaaaaaaacaaaaaaaatgctacagagaaaggggacagctgccatggaaaacagtggggcggttcctcagaaaaaaataaaaatagaattatcatataaccctgcaatttcacttct

SEQ ID NO: 34834 - DNA, 201 bp, Homo sapiens
cgccatctcagctcactgcaacctccccctccccggttcaagtgattctcgtgcctcagcctcccgagtagctgggactacaggcgtgcaccaccacaccyggctaatttttttgtatttttattagagatagggtttcaccttgttggccaggctggtcttcaactactgacctcaggtgatccacccgcctcagactcc

SEQ ID NO: 34835 - DNA, 201 bp, Homo sapiens
caggagaatggcgtgaacccaggaggcagagcttgcagtgaactgagatagcgccgctgcactccagcctgggcgacagagcgagactgtctcgaaaaaawaataataataataaaataataaaataaacccattgttcatctaagaacctacccatgtctttcgggaggctttccatcttatcttgtcttggttcagaca

SEQ ID NO: 34836 - DNA, 201 bp, Homo sapiens
gtacgacagctcaaggaggtagatgtagtatcacaaaactgaaaggctattctaacacaaccattcaagagacacagttttgggctcccagctcccagccragaggccttgccaaggaggccagcttgcttccccctggctcataaccaccacggcacccttgtgtaaactctctgccacataaattgacatgtgacactg

SEQ ID NO: 34837 - DNA, 201 bp, Homo sapiens
agtggctcacgcctataatcccagcactttgggaggccaaggcgggcgaatcacctgaggtcaggagttcgagatcagcctgggcaagatggtaaaacctygtctctacgaaaagaaatacaaaaattagctgggcgtggtggcgcatgcctgtaatcccagctgctcgggaggctgaggcaggagaattccttgaacctg

SEQ ID NO: 34838 - DNA, 201 bp, Homo sapiens
aaaaaaagaatccaggctctgaaacaaagtctgctgtcattgtataagtaagcactctagggaaacgaccatagcctgaatgtttgaaatgcaactttaarttgcacctagagcatctctgattttcagatataaagacatcttacttgaattaagcttccatctaaacttcaggataaaaagcttgcaaggcctaacatt

SEQ ID NO: 34839 - DNA, 201 bp, Homo sapiens
ggaacttcatgtcatagatttaaaaaaaaaaaaaaaaaaggctggggccaggcacagtggctcacgcctataatcccagcactttgggaggccaaggcggscgaatcacctgaggtcaggagttcgagatcagcctgggcaagatggtaaaacctcgtctctacgaaaagaaatacaaaaattagctgggcgtggtggcgc

SEQ ID NO: 34840 - DNA, 201 bp, Homo sapiens
aaaacctttgatttgggaaagaaaatgcatggtagaaagtatctaccaccacacactggtgtaacctcatggaaacatacaaatgtgtatttgcacaaacrtccaaggatgccaaacagaatttttgctaagtattatccatttataaagtgtaccttccaagatagtaagttcagtatagttttagtgttaacatacatg

SEQ ID NO: 34841 - DNA, 201 bp, Homo sapiens
aggatggggtctttcaaactgtattgtgtagaccagtagaccatgacaaataggcgcgcgcacgcgcgcgcgcacacacacacacacacacacacacacacgggcttccatgttcttacaaatgttgcacactatatctgactgtgggatcacagtgtacgtttgtataccaaagtctctgtaaagacctgcaatgaagtg

SEQ ID NO: 34842 - DNA, 201 bp, Homo sapiens
gaggatggggtctttcaaactgtattgtgtagaccagtagaccatgacaaataggcgcgcgcacgcgcgcgcgcacacacacacacacacacacacacacacgggcttccatgttcttacaaatgttgcacactatatctgactgtgggatcacagtgtacgtttgtataccaaagtctctgtaaagacctgcaatgaagt

SEQ ID NO: 34843 - DNA, 201 bp, Homo sapiens
atatgatgggggatgtgatatggtatgaggatggggtctttcaaactgtattgtgtagaccagtagaccatgacaaataggcgcgcgcacgcgcgcgcgcrcacacacacacacacacacacacacacgggcttccatgttcttacaaatgttgcacactatatctgactgtgggatcacagtgtacgtttgtataccaaa

SEQ ID NO: 34844 - DNA, 201 bp, Homo sapiens
tcaatatgatgggggatgtgatatggtatgaggatggggtctttcaaactgtattgtgtagaccagtagaccatgacaaataggcgcgcgcacgcgcgcgcgcacacacacacacacacacacacacacacgggcttccatgttcttacaaatgttgcacactatatctgactgtgggatcacagtgtacgtttgtatacc

SEQ ID NO: 34845 - DNA, 201 bp, Homo sapiens
atcaatatgatgggggatgtgatatggtatgaggatggggtctttcaaactgtattgtgtagaccagtagaccatgacaaataggcgcgcgcacgcgcgcrcgcacacacacacacacacacacacacacacgggcttccatgttcttacaaatgttgcacactatatctgactgtgggatcacagtgtacgtttgtatac

SEQ ID NO: 34846 - DNA, 201 bp, Homo sapiens
ttgttacgaaaaacatctgcatttcattcagatactgtgatccatccgttccttgctcttttccattgttaaggagtatataaactctacgggaatcaggrtaagtgacccttcaggtcacgaatcttggtcaacaaatcccataaatctgccaaagcagaataagctgtctcctgggtaataaggaggtagagatgtgca

SEQ ID NO: 34847 - DNA, 201 bp, Homo sapiens
gaagggattcaggacagtacccagttcttactaatctccccttggcgattggctgaatctctgcccagaaataagttgcatgtccttaggttacatttgcygtgcagaaaataggcacataagcactctatattaggtctcagaattttaaaattagttttctctattataaaattgcagatattcagtatgcagatttta

SEQ ID NO: 34848 - DNA, 201 bp, Homo sapiens
tcaggaccttggaaggctgaagtgggaggactgcttgaggctaggagtttgagaccagcctgggcaatattgcaagaccctgtctccacaaaaaatgagcrtggtggtacatgtttgtagtcccacatacttgggaggctgaggtgggaagactgcttgagcccgagaggtcaaggctgcagtaagccgagatcaagccac

SEQ ID NO: 34849 - DNA, 201 bp, Homo sapiens
agtttactgtggaaagagaacagatggaacctcccatctcaaaggtttttatactgagcattagatcatttaacacacaaaaccctataaggaagatgtcrttacccatattttacatgaaaagaaacagaagctcagggaggttaggttagttttccaaagcgacacagctattaagagtgacagccaggctgggcatgg

SEQ ID NO: 34850 - DNA, 201 bp, Homo sapiens
gctaggtttggactttctcactctaacgtatcagggcgagatatcgtccacaggggcttcgttgccatagcagccttgtatagtgcacaaaatataataaytcttccagaatgctaggaagtcagctacaagacaagtattatccctgttctgtagacaagtaaacggaattatatagaagtcaaggaactcatctggcca

SEQ ID NO: 34851 - DNA, 201 bp, Homo sapiens
tagagaagaagaagaagaataaatatgtagtgagtgcttcctatgcacttttcatgcattcactcatgaactccttaccgcagcatctagggagaggtacmgtttttattctcatgttccagagaagaaaactgaatgcacatccacacacgtgacacacatcatcatagtccaaatgcctcccatttgaactccttttat

SEQ ID NO: 34852 - DNA, 201 bp, Homo sapiens
tgttcctgagccaggttgggtgaacttccacggccttctaggtggtaccttttataaccctcaggtggtgcattcacccggacaaactggtctgaaagtcmataaagctttaacaaacaattctcttgttttacagagagaggatgcaagccatggagaaacagattgccagtttaactggccttgttcagtctgcgcttt

SEQ ID NO: 34853 - DNA, 201 bp, Homo sapiens
gagggaaactcaagcaggctgcagcagttcaatgctctgcaggcgtcagttcctggcattatggagaaactcagaattattagggggaattatggaagcargatgaaatgagaaagaagggtgtgtatggcccctgagcgggcacctaagagtaagagtgagaaggtcatcttggttccagcctgtcaacccacagatgag

SEQ ID NO: 34854 - DNA, 201 bp, Homo sapiens
ggctcttcatgttcctgagccaggttgggtgaacttccacggccttctaggtggtaccttttataaccctcaggtggtgcattcacccggacaaactggtytgaaagtcaataaagctttaacaaacaattctcttgttttacagagagaggatgcaagccatggagaaacagattgccagtttaactggccttgttcagt

SEQ ID NO: 34855 - DNA, 201 bp, Homo sapiens
cctctggttccctccttcctcatctatatgatgaggataatgtgcatctcctaaaaggagagaatgaaggcagttaatgcaggtaatccatcttgcgtgcrcccagcacagggtggctcttccctggttaatttccaccctgatgtgtagaatttccctgcaacactctgctaccacaaagaggggcttcttaggatataa

SEQ ID NO: 34856 - DNA, 201 bp, Homo sapiens
tgggagataacagcacaggcaatgcccatgccatatacattgttctcctctctctccttttcctgttttgaactaacaaatatgcataactgaattcacaygaggtgacatgtgaagcctctattcacttactcgtattgttgtttttaacaatgtgttgaaaacatggcaatagttctgcgaaacgtccattgtctgagg

SEQ ID NO: 34857 - DNA, 201 bp, Homo sapiens
catggggtctctgcctgagccatagaaagcttttgatttctggagccacattgaatgaactgattatgtttaaaattataaaagaaaaatatagcctaagwtaattgagtgcaataaaccaatttaacttatttgttcttacgtgtaacaattgttgagtaggtaccatggtacccactctattgctaagctgtggaagga

SEQ ID NO: 34858 - DNA, 201 bp, Homo sapiens
aggcctgtgggactgagatccgcagtgaggagtgaggtcccctctcttatctcaggctcatgcaaggacactcactcatgggagataacagcacaggcaaygcccatgccatatacattgttctcctctctctccttttcctgttttgaactaacaaatatgcataactgaattcacatgaggtgacatgtgaagcctcta

SEQ ID NO: 34859 - DNA, 201 bp, Homo sapiens
actggtctgactgggaaggactgtaaagaaaagcagggagtcaagaatgattagaaacaaggtttgtgccctcggcaactggaggaggattcctgatgtcrtttacagagaatggggaggggatctgaggtgggattaagcttgaggaacaaactcaagttgggttttggacagactacattcgaagttcctgttggacgt

SEQ ID NO: 34860 - DNA, 201 bp, Homo sapiens
aacaggtcttccctcctctccattccccaaaccccaaccatctccacctgctgacactgtagcttcatccccagatcacttcagctgaaagtggttttccyttttctggattccaagaaggactttgcttgcaaaaaatgtttatttacttatttttttttaaaggcaacagaagttccacaattaatcttttcttgtaag

SEQ ID NO: 34861 - DNA, 201 bp, Homo sapiens
aaacgcatatcacaagggtacagaaatgtgattgacagagtgtgattctattcccagtacctagtagggcaggggagggaaagacatttcctcctaagaaytggcagatccgtcacttaagacgtcttgccactttaaacatctcaacatttaaaggatgtcagtatgatggcactcttatttaacaaatctctgttgaga

SEQ ID NO: 34862 - DNA, 201 bp, Homo sapiens
ttctctggaaatactagaaatgtctctcttctgggctgacctaaaaccaacatagtattgggcattgaagtaaggagaaatatggtcagtgaggctaagamctcctcttctgagaatgaaaaatgactgagtattttgtgttaggtgggacactatttgttaatagagaacttatatcttaagtctcttaaaataattata

SEQ ID NO: 34863 - DNA, 201 bp, Homo sapiens
tgacaaacagcattcacccatttcattttgctttactactccgatgtggagaaaaaaaaaatctaaggattacatttctcttgcagattttttagatcaayagctattatttaaatacagggaatcctgaaagtctaagactaaaaaatttgggttccttttgtatatgttaaattctcccatatacacatgggtctgtaa

SEQ ID NO: 34864 - DNA, 201 bp, Homo sapiens
gaatcaggcggaggagttagagaggctgctgttagactcatgattcattttcttctacccaccccccaaacaatgatggagttgcaagggtctgagcacawctgcaccagcagaaagggatatgtctatacatgtccctaagcggctactctgagctttgggatgtgtgactctcacctggctttgggatgacatagcctg

SEQ ID NO: 34865 - DNA, 201 bp, Homo sapiens
attcaggaatttcactgcaaagaaaattccaggactccacactcactgaaaacacatatgcatgcaaaatttgtgttgccagaagtaccttcactggccargcacagtggctcacacctgtcatccccgcactttgggagctgaggtgggtggatcacttgaggtcaggagttggagactagcctggccaacatagtgaat

SEQ ID NO: 34866 - DNA, 201 bp, Homo sapiens
tgggcatggtggctcacgcctgtagtcccagcactttgagaggctgaggcgggcggatcacctgaggtcaggaattccagaccagcctggccaacatggtraaaccctgtctccactaaaaatacaaaaaagtagccaggcatggtggcaggtgcctgaaatcccagctattagggtggctgaagcaagagaatcacttga

SEQ ID NO: 34867 - DNA, 201 bp, Homo sapiens
gaggtcaaggctatggtgagccaccattgcaccactgcactccagcctggcagcctgggtggcagagtgagaccctgtctccaaaaaataaaaataaaaamcaaaaaataaaaaattaaattaaattaaaaacctgtaaccaggcacggtggctcacgcctgcaatcctagcactttgggaggccaaggcaggaaaatcgc

SEQ ID NO: 34868 - DNA, 201 bp, Homo sapiens
caaagaaccaggaggtcaaagaatctggaggtgccaagccttgtcctaagggccctgaaaccctcagggtgatggcaaaaattggagggaagagagagtgraagtagaactcccaaatcttcaatgaacagtgggctcattatctgcataagagtgaggattcatgggaaatgtgctccccagaagaaagcttcttacttg

SEQ ID NO: 34869 - DNA, 201 bp, Homo sapiens
ttaggaggctgaggtggtaggatctcttgagcctgtgaggtcaaggctatggtgagccaccattgcaccactgcactccagcctggcagcctgggtggcaragtgagaccctgtctccaaaaaataaaaataaaaaacaaaaaataaaaaattaaattaaattaaaaacctgtaaccaggcacggtggctcacgcctgcaa

SEQ ID NO: 34870 - DNA, 201 bp, Homo sapiens
atatatatatatatatatatatatacacacacacacaaaaaaaaattagccaggtgtggtggtgcatgcctgtggtaccagctacttaggaggctgaggtrgtaggatctcttgagcctgtgaggtcaaggctatggtgagccaccattgcaccactgcactccagcctggcagcctgggtggcagagtgagaccctgtct

SEQ ID NO: 34871 - DNA, 201 bp, Homo sapiens
tcttggctcactgcaacctctgccttccgggttcaagcaattctcatgcctctgccttctgaatagctgggattacaggcaccagccaccacgcccggctratttttgtatttttagtaggcacagggtttcaccatgttggccaagcctgtcttgaactcctgacctcaagtgatccacccgcctcagcctcccaaagtg

SEQ ID NO: 34872 - DNA, 201 bp, Homo sapiens
acacaaggtgggaggatcacttgatcccaggagttcaagaccagcctgggcaatatagagagactcacatctctaccaaaaaaaaaaaaaaaaaaaaatawatatatatatatatatatatatatacacacacacacaaaaaaaaattagccaggtgtggtggtgcatgcctgtggtaccagctacttaggaggctgaggt

SEQ ID NO: 34873 - DNA, 201 bp, Homo sapiens
gagtctcactctgttgcccaggctggagtgcagtggtgttatcttggctcactgcaacctctgccttccgggttcaagcaattctcatgcctctgccttcygaatagctgggattacaggcaccagccaccacgcccggctaatttttgtatttttagtaggcacagggtttcaccatgttggccaagcctgtcttgaact

SEQ ID NO: 34874 - DNA, 201 bp, Homo sapiens
tgctaaacatcgtaccgtgcagtttccccacaccacagcgaagaattacacagcccaaaatgtcaaatgctgaagttgaaaagcctgatattaaccactgkgggcttcttgttttactgcaccgcaggtcggtctccctctctctctctttctctctttctccctctctctcctaccccaccctcccacctatccctcctt

SEQ ID NO: 34875 - DNA, 201 bp, Homo sapiens
ggcatgcaccaccacacctggctaattttgtatttttagtagagatggggtttcaccatgttggccaggctggtctcaaacccctcacctgaagtgaattygcctgtttgtttgtttattgagacaagagtctcactctgttgcccaggctggagtgcagtggtgttatcttggctcactgcaacctctgccttccgggtt

SEQ ID NO: 34876 - DNA, 201 bp, Homo sapiens
ggttctcatttaggggcaattttgctcccccttccccagggacattggacaatgtctgggtctggagacattctggtttgtcacaagctggggtaggcaargtttctactggcatccagtagatgaaggccaggggcgctgctaaacatcgtaccgtgcagtttccccacaccacagcgaagaattacacagcccaaaatg

SEQ ID NO: 34877 - DNA, 201 bp, Homo sapiens
ccagctactcagcaggctgaggcaagagaatcacttgaacccgggagacggaggttgcagtaagctaagatcaggccactgcactccagcctgggtgacaragagagactgtctaaaaataaaaaaataaaactatgaaaagaaattgggtctagataatttctacatgaaaataataattggtcttctaataacagtcaa

SEQ ID NO: 34878 - DNA, 201 bp, Homo sapiens
ggaaagcacctggcatttagcatctttacacacaggaaacaacagatatgctcagggacttttcctctagcttgtaaccagggatggctgttgggcttggcagccgtcaggctgagagtgactcagcttaaaaggtttcattgttgatatctgccctgagcattcccctttggacttggagttccaggatgtcttgtgtct

SEQ ID NO: 34879 - DNA, 201 bp, Homo sapiens
aacctgtcacccagatagtgaacacagcactcaataggaagtttttcagtctttgttcctctccctcccactcttcccccttttggagtccccagtgtctsttgttcccatatttatgtccgtgtgtttattagctcctacttacaagtaagaacatatgatatctgattttatttctgtgctaattcacttaggataatg

SEQ ID NO: 34880 - DNA, 201 bp, Homo sapiens
gtctggtagtccagtggaggagatgacaaaaagggacaatgtggctaacatctgcatgactgttcataagaaccataaacacgaggctgttcccactaccrcgtgaaaggatagaggggcttggtgtgtgtagggcacagcttttctgaaaggcagaaggattctttttatgattttaccacgtatcatttcctttttttt

SEQ ID NO: 34881 - DNA, 201 bp, Homo sapiens
cccaggctggagtgcattggtgcgatctcagctcactgcagcctccacctcctgggttcaagcaattctcctgcctcagcctcccgagtagcaggaactayaggcacaggtgaccacacctggctaatttttgtattttcaatagagacagggtttcagcatgttggccaggctggtctccatctcctgacttcgagatcc

SEQ ID NO: 34882 - DNA, 201 bp, Homo sapiens
ttagtcattatagtagtgtgtagtagtatcacattgttgttttaatttgcaattccttaataacaaatgatattgagcatctcttcttttcttttcctttwttttttttttatgtttttgagacggagtctcactctgtcacccaggctggagtgcattggtgcgatctcagctcactgcagcctccacctcctgggttca

SEQ ID NO: 34883 - DNA, 201 bp, Homo sapiens
gagtgtgtgggatcagatttagaaatgcctcaaaggttagaaagccgagtgctgccgattaactcaagctcagatgaccaaaaaaaaaaaaaaaaaaaaaagctgcttttcccctcacttctccctctggttctgcctcagtactttgcttaggagtttcttaaagcaggcacagttgcctgcggggctggtgtgtgtcac

SEQ ID NO: 34884 - DNA, 201 bp, Homo sapiens
tcctctgggtggttcctaagcatttggatgttacagccctgcctttctttattctgttgttctagaagctccaacctggtatgcttttaaggcagatatgrccacaaatgaagcacattcacatgactgcactgcctttctggatgaaacaatttgaccaaacactggtgttgagacagttggtgatttgggctttgccac

SEQ ID NO: 34885 - DNA, 201 bp, Homo sapiens
ttcccactaccatcatctgcagcaggcccacaccacccaaatcaacacaggtatggaagaatcgccccctgccacaggagtgggcagtaagcgttagaacrcagattgccgagttctggttctcagtccacccaagtctggtctgtttccctaactgtagaaggaaggtgttagaaatggaaaatccttaatatattcttt

SEQ ID NO: 34886 - DNA, 201 bp, Homo sapiens
gggcatctatacctagagttctatatacagatctttctaggcaaagacaagggaaagagtggtggtcacattgctttcaggaaactggtttatgcctagaytcttaacacctgttgctttgcaaaactagtgtgaaggattggttctctgtttatctgggattcaactgagcagaactcccaaatattaaatctgtatttt

SEQ ID NO: 34887 - DNA, 201 bp, Homo sapiens
gttcaaacactgcagatatttatcaaggggcatttttaggagtagcagagtgtcaagaactcaaattgacatctagtggcaacacttctaaagattggggmcccgtactatatacaatgctaaatttccaatgctgtgattggaaaagactatgagaaggcctctagtctcttcccactaccatcatctgcagcaggccca

SEQ ID NO: 34888 - DNA, 201 bp, Homo sapiens
tccacttaaaaggctaatgttctcatctagtattattgttggaaaggcggtgaatctggattggaacctgggataggtactcctcttcccctaagccccargtggtcaactacaactctagggccctgagctgggactgcagggaaggcttcacctgccagaaagaccacaccccagacaagccaagccaagcccagccta

SEQ ID NO: 34889 - DNA, 201 bp, Homo sapiens
gttactcatgaggctgaggcgggaggattgcttgagtccaggagttcgagaccagcctgggtaacacagggagatcctgtctcttaaaaaaaaaaaaaaaacagagagagttgcagcttcatactctcctccagggctcagcaacacacaaaattaaaaggagtaaatggcaaaacccaatggcaaataggaagcctatat

SEQ ID NO: 34890 - DNA, 201 bp, Homo sapiens
tcaccttaatgacattatattcatttatatataaatatatctcatagctaattcatgccaatttatttgcttctgtttatggacaagctgaaaattctttrtaagcagcaaaacagcagatggtgggctcactttttcagtttagcttcaggcttcccagagagctctgacaaggtcacagaggtgatggtagtttcagcc

SEQ ID NO: 34891 - DNA, 201 bp, Homo sapiens
gtgttgtcattgctttaaccaagcagccttcatgggaattgtgctccatcctgctataatcaatcacctcagcatgaagaaagggcagcagtgccttggawccgacaaggcatcactagtgttagtgttatgtcagggcctgaggctactgatacaccttgggaaaggccaggcctccaggtgaagcgccttgaatacctg

SEQ ID NO: 34892 - DNA, 201 bp, Homo sapiens
aatgaccatgtatatcagacttctcttatccccaattctgggtccttattaacctcttccagggctaagtatttacccttccataaatcggatgttttctkaagcattttttctcctgtcatcactgaaactccagcctagttcttcacttgtatgcaattttcttgtaaccctgtctctcgttttggtttattgtccata

SEQ ID NO: 34893 - DNA, 201 bp, Homo sapiens
taaaaagagcttattttttaaaagccagaaatttcaactctggaatatcagaacagtgatatccctctttccttcccctctccctcctcgttctccttttygttcttctccttcttcttcttccaagtactagaatataagtctccttgtggagcatgttaggttgaattactggtgagccattcagaaggcagagagaag

SEQ ID NO: 34894 - DNA, 201 bp, Homo sapiens
gagctgtattggagagaggtccctctggtgatcatgtgcaggactgattgagaggaaaatagatcagtgactaggagaccatatgggaagctactgtatcygtcaggcaaaaggcagtgaggcctgaaccacatagtagaagtaagaaagaagtcaaatgcaaaatgtcctatggtattcaccgtctaagactagctctca

SEQ ID NO: 34895 - DNA, 201 bp, Homo sapiens
cctcaaaggatgaggaggaagaagaagaagaaggagacaaaataatggcagaactccaggtatgtggatgaggtgactgacattggctccttgcctcccgmctgggtctctccagccatggcactcacagatttgttagcgagaaggccagggaagcgcatggaccgggaccatagaagctgtgtcttctggccttagcct

SEQ ID NO: 34896 - DNA, 201 bp, Homo sapiens
gtgtttgggtttgtttggtttttgtttttgatcaaggaagtagcaaagctagagctgtattggagagaggtccctctggtgatcatgtgcaggactgattragaggaaaatagatcagtgactaggagaccatatgggaagctactgtatctgtcaggcaaaaggcagtgaggcctgaaccacatagtagaagtaagaaag

SEQ ID NO: 34897 - DNA, 201 bp, Homo sapiens
atatccagcagaggagcctgcttcagcctggaccccatccccaccgcctgtcaccacctcctcctcaaaggatgaggaggaagaagaagaagaaggagacraaataatggcagaactccaggtatgtggatgaggtgactgacattggctccttgcctcccgcctgggtctctccagccatggcactcacagatttgttag

SEQ ID NO: 34898 - DNA, 201 bp, Homo sapiens
aagacactgagtgtttgggtttgtttggtttttgtttttgatcaaggaagtagcaaagctagagctgtattggagagaggtccctctggtgatcatgtgcvggactgattgagaggaaaatagatcagtgactaggagaccatatgggaagctactgtatctgtcaggcaaaaggcagtgaggcctgaaccacatagtaga

SEQ ID NO: 34899 - DNA, 201 bp, Homo sapiens
aaaaattagccaggaagggtggtatacacctgtagtcccagctacttaggaggctgaggcaggaagatctcttgaacgtaagagtttgaggctgcagtggsctaggattgagccactgcactccagcctgggcaacagagcgaggccctgtttcttaaaagaaaagaaaatggaagagatggttgaggcagaatgataggg

SEQ ID NO: 34900 - DNA, 201 bp, Homo sapiens
tgatgcctgtctgggctgtgcctacagagattggaagattctgtaagagaaacctggatttctggcttttcttgaaagttccggggttcaaccccagattmacaatttctgtggatggggcttaggaatctgcagtttacaaacaaagccggtgattctgaagcactttcacatttgagagttactgcctagaatgatgag

SEQ ID NO: 34901 - DNA, 201 bp, Homo sapiens
gtccaattacattatccattgttggcaagactgatagtcttagattttacctaagaaatcaaaattgagtatgtgagatataggtccattttcaggttggkggaattaggtttaggcatttgctagtttctccatgaagtgatttggataacttatttggtccaattaaaattttaatggacaagagcattatttctgtct

SEQ ID NO: 34902 - DNA, 201 bp, Homo sapiens
agtatcttgcacatagtagtttcagaaatggtttgttaggctgggcacaatggttcatgcctatagtcccagcagtttgggaggctgaggtgggagaatcrcttgggaccaggaattcaagaacaggctgggcaatatagcaggaccctgtctctactaaaaataaaaaattagccagctgtggtggcatgcctctgtagt

SEQ ID NO: 34903 - DNA, 201 bp, Homo sapiens
taagagggctttatctggttggatttgtgggaaggccacagatgagtaaaagaggcaaagagcccttgaggatcttcagtctagcaaaggcaacctgatawataggagtatagccccgaacaggggatttacaggtaccagttgtacccacacaaaagagagactaacccagggatcaggaagacttaacctgaatgaagt

SEQ ID NO: 34904 - DNA, 201 bp, Homo sapiens
tgtgtgcctgtagtcccagctactcaggaggctgaggcaagagaattgcttgaacccgggaggggaaggttgtggtgagccgagattgcaccactgcactmcagcctgggcaacagagcacaactccgtctcaaaaaataatagtaaaaataaaaataaaaatatatatccttttaaaaacatttatataaattttccaat

SEQ ID NO: 34905 - DNA, 201 bp, Homo sapiens
cagtctagagggaaaaaaacatcaatttgagttattcttttcctaataaattaaattaggctgctgttcatccatatctcaaaatagcttccaaaattctrcttagttcacacatttatagacagagttaatcacccaccatgagttggtaaggctgttatttgtctgaaatgtctttgtgacagcccaattatctaaaac

SEQ ID NO: 34906 - DNA, 201 bp, Homo sapiens
actagttcaccctccctgttagcaatggctggtacgtgttcaggtttagattggtgccagacactttattttattgtctcaccgagtctccatgaccaacytacgagctatgagatattactaccccttttttggatagacacagaggtgaatagcttgcccatggacacacatctactaagtggtaaaactggaaatcga

SEQ ID NO: 34907 - DNA, 201 bp, Homo sapiens
gcttttccttcccttccccatcagtgtctgatggagatgctataattagcaatgtaatgagaattgaagggtaaacaagaagaattattcccagaacacayatcaagggttagaagactggaacaggaaaaccagcctgagatgaaaatattttctctgcccaaccaacgggcatctatacctagagttctatatacagat

SEQ ID NO: 34908 - DNA, 201 bp, Homo sapiens
tcagtccaattacattatccattgttggcaagactgatagtcttagattttacctaagaaatcaaaattgagtatgtgagatataggtccattttcaggtkgggggaattaggtttaggcatttgctagtttctccatgaagtgatttggataacttatttggtccaattaaaattttaatggacaagagcattatttctg

SEQ ID NO: 34909 - DNA, 201 bp, Homo sapiens
ctttcctcctgaatctttctgatttgtggtataaccactgttccatgtcactgctagacagcaaaatcagtccaattacattatccattgttggcaagacygatagtcttagattttacctaagaaatcaaaattgagtatgtgagatataggtccattttcaggttgggggaattaggtttaggcatttgctagtttctc

SEQ ID NO: 34910 - DNA, 201 bp, Homo sapiens
atgcacctcattcccagtggctaatctagtatgttctctgctagctacatttggtatgagagctatatggaacctttatagtgtgatattcccattcccarataacggttgggtctgtaattagctagcaacaatgggaaagggttttgtcaaggttttgtgcctaacagatgttctcctccaatgatgattatgtttgcc

SEQ ID NO: 34911 - DNA, 201 bp, Homo sapiens
ggttatatagctgtgaccaggcatcccttgtcttgttccctgaagcctgcaggaacagatccaggtgggatcaggagtcgttctgaggtctggctttcctyctgaatctttctgatttgtggtataaccactgttccatgtcactgctagacagcaaaatcagtccaattacattatccattgttggcaagactgatagtc

SEQ ID NO: 34912 - DNA, 201 bp, Homo sapiens
acaagaagctttctaagatggggagacagcaccccaataacatgggttatatagctgtgaccaggcatcccttgtcttgttccctgaagcctgcaggaacrgatccaggtgggatcaggagtcgttctgaggtctggctttcctcctgaatctttctgatttgtggtataaccactgttccatgtcactgctagacagcaa

SEQ ID NO: 34913 - DNA, 201 bp, Homo sapiens
gagtttcccatgtgcaacagacccgtgtcccctgccaagcagaaataataaacggaactagtacagggcttgacgattaggctgcttacaatgtgccaagstctagtcagatcttcagacaacaagaagctttctaagatggggagacagcaccccaataacatgggttatatagctgtgaccaggcatcccttgtcttgt

SEQ ID NO: 34914 - DNA, 201 bp, Homo sapiens
atattggagtttcccatgtgcaacagacccgtgtcccctgccaagcagaaataataaacggaactagtacagggcttgacgattaggctgcttacaatgtrccaaggtctagtcagatcttcagacaacaagaagctttctaagatggggagacagcaccccaataacatgggttatatagctgtgaccaggcatcccttg

SEQ ID NO: 34915 - DNA, 201 bp, Homo sapiens
cggatccctgagaacagcatattggagtttcccatgtgcaacagacccgtgtcccctgccaagcagaaataataaacggaactagtacagggcttgacgaytaggctgcttacaatgtgccaaggtctagtcagatcttcagacaacaagaagctttctaagatggggagacagcaccccaataacatgggttatatagct

SEQ ID NO: 34916 - DNA, 201 bp, Homo sapiens
aaatgaactgcagccgcacagtggctctaagtccaataatggagctatcattagagatatacgaaacactagactagtctcaaaagaacaaaaattgaatyagaaattcaaatattctttgaactgtgttataaaatagtgaaactgaataaaaccatttgtgcttggcagccagctccagtaattagataattaaatcat

SEQ ID NO: 34917 - DNA, 201 bp, Homo sapiens
gcaaatgtgcttttgagcctgggaagttgggcagttctaaagcgcagactcgcagggaaaaataagcatggtgtttcctaacctggctgttactgtttctrcctctgcatttgtattccctgggtcccattcagctttcctccccatcaaacttctgtcttttcaatcgagggagtctacttaagacaaaaacagcttaga

SEQ ID NO: 34918 - DNA, 201 bp, Homo sapiens
gctaagaaaacaatttccccttgccctctgcctaccagaaaacacacagaaaggcagctggtttgagagacctgccccaaggccccagcatggatcatgasggttgctagaagagtgagggctctgatctccaaaggctactctgtctcttaggcaacatcccagataccttgaacatctgatgcaaattcatttaaatct

SEQ ID NO: 34919 - DNA, 201 bp, Homo sapiens
tccaagtgataaaaataactcagctttagtcagtagcccagaagccaagtgtcccctttcactgcttgttctctgttggtattcttcaaagggacatcgtrtctttcacagtttggaatgtgatgtttctgttctcactgacataactgtcttagtatctgctcctcctcttgtcatatatttggaaggtcttcacctctt

SEQ ID NO: 34920 - DNA, 201 bp, Homo sapiens
ccacctatccctccttctgtccctctgttggcatcagcaccactgaataaaaagactcggtcctctgttagccaggcacaatcgtccctttggccaatgtrgaacattccctggaaaaccctccttgtacctgcctcacaccactgcaaaatgttcccagccactgttaaaagatgagcgacccccctccaccaccaccac

SEQ ID NO: 34921 - DNA, 201 bp, Homo sapiens
ttcttgtaggcttgaaaagagaaggacttggcaggtggcacctgggctttgttcagcagaactgagagggcaagagtatagctggcttttttgtaagactsatgaactctgtggcccattgatgagatgctctctgctctacaaagtggactttcctcgaggtggaattttattttcctccctgtgctggtgttagattct

SEQ ID NO: 34922 - DNA, 201 bp, Homo sapiens
tatcatcttgattgtcacaaaattcaggatgcagatgcaccagcttaatcagttggctttttctagtggaagaacaggccatcattactttttttttttttgagacagtcttgcactgtcacccaggatggagtgcagtggcgcgatctcagctcactgtagcctccacctcccaggttcccgtgattctcctgcctcagc

SEQ ID NO: 34923 - DNA, 201 bp, Homo sapiens
gcttgatactgaacactgatcacgaatcttgacctgagctaaggatgtgcggctcttcatgttcctgagccaggttgggtgaacttccacggccttctagrtggtaccttttataaccctcaggtggtgcattcacccggacaaactggtctgaaagtcaataaagctttaacaaacaattctcttgttttacagagagag

SEQ ID NO: 34924 - DNA, 201 bp, Homo sapiens
accaaagctgtctagactctaaaaatgccacgttacctttttttttttcttaaaggaatatcctttgcatttgcctaggattgaagaaaagcagtaaagtsgtacatctcaaggtagccctgaatgcacctctgctcttactgtcattcattttactccagcaccactgcggatagagtccctgtgggacgaatgaggaca

SEQ ID NO: 34925 - DNA, 201 bp, Homo sapiens
tcaaataattttactgggacaacagttgtaacccagagctgttttggcaaactggggtatatgatcaccctaagaatagctctaatcaatgaagcttccayggctgaatagcccggctaccaggtaaataacaatggggaagtgtagcgcatagtgtgctttgcggagtaggcactcaacaattattggtggaacatgaat

SEQ ID NO: 34926 - DNA, 201 bp, Homo sapiens
aaagggaacactcaaataattttactgggacaacagttgtaacccagagctgttttggcaaactggggtatatgatcaccctaagaatagctctaatcaaygaagcttccatggctgaatagcccggctaccaggtaaataacaatggggaagtgtagcgcatagtgtgctttgcggagtaggcactcaacaattattggt

SEQ ID NO: 34927 - DNA, 201 bp, Homo sapiens
aataatcatttgttgaatgaaaggctaattttaccactttgggactttgagtttattatcctgctatagataaggatccctagggtgatcatgtaacttaytgtccaaatgagatccttttgaaagtgaaagggaacactcaaataattttactgggacaacagttgtaacccagagctgttttggcaaactggggtatat

SEQ ID NO: 34928 - DNA, 201 bp, Homo sapiens
agaggattgattgagcccaagaagttgaagcagtgagctgtgatcataccactgcaatctagcctgggtggtggagtaaaaacttgtcaaaaaaaaaaaaagaaagaagaagaagagagatacctccccttttattcttcatttccatctagcaaaataataaaaataatattgatgattgaggggtcgccttggacaatt

SEQ ID NO: 34929 - DNA, 201 bp, Homo sapiens
atgaagaaagattagaaatagctttttcctctagatccttgtaaatggagcttcatttttgcctgtttttttacaggtatccttaaatgtgtctgtcttcmtgcactgtaagtgaaatgcagaacattttagatgagcccctttgttaggttacagactctttcctgacttgggaaaagtgcctaatgagaaggtttcccc

SEQ ID NO: 34930 - DNA, 201 bp, Homo sapiens
ggaaagaagtggctcagcttgtgctgtgtgtcccctgagtcttgacctgtgactaataactgtttcctttgtgtgcaggggttctctatctccagtatggmgatgaaaccaagcagctcaggatgccgaatgaaatcacaagtgcagacacaatccgtgctctcttcgtaagtgcctttccacagcagctcaccatgaaaa

SEQ ID NO: 34931 - DNA, 201 bp, Homo sapiens
tgggtgacaaggcaagactccctctcaaaaaaacaaaaaacaaaacaaaaaaaaaaaaaaggcaaaggagtttgaatagctaaaactattttgacaaagaraaatgaagtgggaggaattattccaccagatttttaggctgcttatagagctacaacaatcaggactttgtagtattggcagacacataggtcaatgaaa

SEQ ID NO: 34932 - DNA, 201 bp, Homo sapiens
ttcctgagatccagcctagtactttttccagggaattcagtggacaaggaaacattattctgcctatatcagcaatactttatgataagaactgttcttcrtgaagagcctgacttcatgaagagagcctgtctaactcctgaagtgcttctgaatgttttactttttctccctaatctatttgttttttttaaaaaagta

SEQ ID NO: 34933 - DNA, 201 bp, Homo sapiens
  misc_feature (101)..(101): n is a, c, g, or t
gtggggcttgacgcttccaagagctgagccttgtcgaggaaaaggctcaagtgacagatgtgctgaagtgcctttgtgtggaaagtggcgttaggtggctntgagtgctggtgacaggagagcaggtgcctcgaggtaggaggggaggcagacaggatgatagagcattgggcattgggtggaaggcacaaggcaggaaat

SEQ ID NO: 34934 - DNA, 201 bp, Homo sapiens
ttcattttcttctacccaccccccaaacaatgatggagttgcaagggtctgagcacaactgcaccagcagaaagggatatgtctatacatgtccctaagcrgctactctgagctttgggatgtgtgactctcacctggctttgggatgacatagcctgcaagtataccaccatgagaaagtgacatgagggttaatgccgc

SEQ ID NO: 34935 - DNA, 201 bp, Homo sapiens
gtgagccactgcacccgaccttaatggcttaatctttctctgtttcagtttcctcgtttgtcaaaggaaaatagtatctacatcatggagcactgagaaayacaacgatggaatcttttactgtttcactggcagcttttagcgtgataatattctggtttttagtgtcccaaagaagagtctcagaggctcttattttta

SEQ ID NO: 34936 - DNA, 201 bp, Homo sapiens
gcattgttctcttggcaggaagaagtgaatcaataagcccagctttcccatagcaatgttcgtgctaaagggctgtttttaagggctttttttttttttttattgaatgaactgagatttttgaatagagctgaaaacaagcgatgcattgtgcgttctgctgattgtgcccggtgaatactgctataaaagtgccacaga

SEQ ID NO: 34937 - DNA, 201 bp, Homo sapiens
tgctctagtttgtttcatcagctctcccaatgtaattgattattttatcaattttgttatacctagcactttatctgtacaatgacgtcattggcattttyacagaatataaacatattaacagatattcctatctgtaagtaatggcatctatgtctttgtgacttatttttgatgaatttaattgtatcaaatcaaatt

SEQ ID NO: 34938 - DNA, 201 bp, Homo sapiens
ttatgaaggtacctgccagtgaaggctgaaaagtaaggctaattgaaattaagacacatgtatactatacactgttcagtaagtcgcagcctttggccacrgtgaaggtctggatacaaggctaatgttgtagaaagtgtatgttttgaaaaactaggcatgttttgtaaataaataaataagtaaaaagtttagaaatgg

SEQ ID NO: 34939 - DNA, 201 bp, Homo sapiens
caagttggattgctagttttggaaggtattgcccaaactttttctcaaaaacactcagtttattctgtcgatatgaatgttgcaggggatattatggtacrttcagagaatacagttcactacagtgatgccaatgtgtgaaatacacttgacatgtgggtaggaacacataaccaagttatatttagtaaacaatctacc

SEQ ID NO: 34940 - DNA, 201 bp, Homo sapiens
tctcagaaactttcacacacattatttcaaatatagttctcccaaaaaaaccctgcggagagatacctgtaaaccaaggctgagactagcctagacagttsgttctttagacaacaggagtggagatttgaacccagctattgtgactcaagcaagcctagggcatgtttctgagatctctaaggtgtgcgctgtgaaacc

SEQ ID NO: 34941 - DNA, 201 bp, Homo sapiens
aggaaacaggcctagaggagctttacccttgcccaaggtgagtttctccaatgctcctctgtgctcttaacccactgccacctgaagatgtgtgagccacyctgtggcttgtgaactctgcacttctctgtccagtatcggagtgcgggatgagggttgtcgttctggctttttctcctccaattcacctgctggtttggg

SEQ ID NO: 34942 - DNA, 201 bp, Homo sapiens
agatcttacagatacagacttgtggtaactccttttccttaaaaagctgacattagggttttgtttctgctcttcttttttttttttttttttttttttttgagatggagtcttgctctgtcgcccaggctagagtgcagtggtgcgatcttggttcactgcaagctctgcctcccgggttcacaccattctcctgcctca

SEQ ID NO: 34943 - DNA, 201 bp, Homo sapiens
gcacctaacagagcactgggcaacctaacagagcactcactgggcactgtagaaggcactcaataatcatttgttgaatgaaaggctaattttaccacttygggactttgagtttattatcctgctatagataaggatccctagggtgatcatgtaacttactgtccaaatgagatccttttgaaagtgaaagggaacact

SEQ ID NO: 34944 - DNA, 201 bp, Homo sapiens
caccctctaatcttggtggctttgcatgattaaggttaattgttcactcagacacagcacagtgtgatttctgtggccaggtggatttcctgggtggccgmtgaggctcctcctgccttgtcactatggcatcccccacggcgttggagggttctgctggatcctttgtattcaactggccaaagagtaaagagagagaga

SEQ ID NO: 34945 - DNA, 201 bp, Homo sapiens
tgggacaacagttgtaacccagagctgttttggcaaactggggtatatgatcaccctaagaatagctctaatcaatgaagcttccatggctgaatagcccrgctaccaggtaaataacaatggggaagtgtagcgcatagtgtgctttgcggagtaggcactcaacaattattggtggaacatgaatctaactgtatcata

SEQ ID NO: 34946 - DNA, 201 bp, Homo sapiens
  misc_feature (101)..(101): n is a, c, g, or t
agcatggcttcatttttagttctcccggtgagcacgagtgccgcaagggagagcaacatctctgatgctaacatcacccataacgttcatttctatcattncattctctcttgtgtctgcctgtgtatctgttttacccaatgacaatgtgatattccacagcaaggaccatgttttatttattcacgtttgcatttccag

SEQ ID NO: 34947 - DNA, 201 bp, Homo sapiens
ctagcctgggtaacagtgtaagattctgaaagaaagagagagagaaagacagagagaaagagaaggaaggaaaaagaaaaaagaaaaaaaaagaagagagrggaggggaggagaggagaggaaaaaagaaaagacaaacaagacaagacaaaagcaattgctaaaggattcaacttgggatgtaagagaaaaagaggagtc

SEQ ID NO: 34948 - DNA, 201 bp, Homo sapiens
tgttccttttcacgcacccttgatagagtaggaagagttaccaaagaaaaacacaaacaacaataaggaatcataccaatgccaatgatggggcaattcaraaatagcaggggcctgatctgtagggtgcttaaacttccatgcatgattttcatgaaatgcagcacctctaaagcataggactggtggtcagggtctgat

SEQ ID NO: 34949 - DNA, 201 bp, Homo sapiens
tatagcatgttagatggcacggctgctggatttagcaaataaaaatacaggaggcccagctaaatttgaatttcaggtaaacggtgaatttttttttttttagtataagtatatcccatgccatatttgggatatacttatgctaaaaatacttctccgttatttatgtaaagtgcacatttaactgagcagtcctgtatc

SEQ ID NO: 34950 - DNA, 201 bp, Homo sapiens
acagcaattttgtgtttttgaagtgcgaggactcagtcctgtgtccacgaagcctccttcaggaggttacttcttgacatagcccatcaaccggacctccygttgctaggttctgagccttagggtgctttcaaatgcaatatctaggccaggagtggtggcccacacctgtaatcccagcactttgggaggctgaggcaa

SEQ ID NO: 34951 - DNA, 201 bp, Homo sapiens
ttctgctggcatcagctggggtagctcacctggggctggggagaccactcccaagacggctcatccacataacctcagtggttccagctgtaaaatgggcrcttagatggggtggttcttcagcatgtgacctcccgtgtggctgggttggactcctcagaagctgagttctgaaaggaaacatccccaaaccaagctcac

SEQ ID NO: 34952 - DNA, 201 bp, Homo sapiens
aacaggttgctgttttttaatatgtggatcacccgatttgggaggctcactctgcctctgagattaaagagatgagggcactggctcccagcgaaggctcycggccttaatcatgtgtgaaatgttttccttcctcggctgcagagcctcggtggtttgcagcagtggaaccaggcaggcccagttgtgggtaggagaggc

SEQ ID NO: 34953 - DNA, 201 bp, Homo sapiens
accactgtccaggttctttccagtggggaggtgcatgatattgttagccaaaagggagaagacatacagacggttaatatcgatgccagaaaagagatgaycccccgacaagaagggactgacaatgaggatccagtcgtgtgcctggacaagaaaccagtgatcatcattttcgatgagcccatggacatccggtctgcc

SEQ ID NO: 34954 - DNA, 201 bp, Homo sapiens
ccgaggcactgctttaattttttgaaagattcaccgcgtcttcttggatttcaagaaaaatcccgttaagaattgaggggctctcttcttcccctcctgaygtgagtgtaactcacttcctggtatgtctcctttccttttggcctacatcctttgtctgttaggtgcttccacatccttatgtcttaaatggccaaaata

SEQ ID NO: 34955 - DNA, 201 bp, Homo sapiens
gctaatcagctctgtttttgcctctgttgctgactggtgttgggtaaacacgaggctgctgggtcagccatgtgctgttgaaatggttgctctgatactcrcattaaaatccgtttgatcagtagtgagcagttgattctgtttgattcttctgattaaccccagttggtgtctcctagatctgtcctgcatgtagggctg

SEQ ID NO: 34956 - DNA, 201 bp, Homo sapiens
gggcagtcaggctgtacagcctcattgcctggcagctaagggcttggtttggatgcaggtgggactcatcaggatccagccttcacaatatgctaattctrtgatttgggctaatagcttaatctttctttcttttttctttcttttttttttgagacagagtctcactctttcagtcacccaggctggagtgcagtggtg

SEQ ID NO: 34957 - DNA, 201 bp, Homo sapiens
tgtttgtacccttctcctctcacataggatcccagaagctacgggacttcccaagaacagtaggaagctgagccatctagaatcaccctactgagagtaayaccagcttactacctaaggaaagctaaatggttggcatcttttataatttaccaattgctgtcccatgcaacatttttccaattacttctcactttatca

SEQ ID NO: 34958 - DNA, 201 bp, Homo sapiens
caaaggctgcgggacatctgatttgggctgctgcatctcctgctacagtgtttctctctctctctctcacacacacacacacacacacacacacacacacmtacttttctcccaccctcctccccactcttcctagcattaatactttaaagacaaatacacaacagtatacaagaatcaggatgatctggacctgaaagg

SEQ ID NO: 34959 - DNA, 201 bp, Homo sapiens
tactgcgtgtgaggagactgctaatatgtagtgatcgttttcagtgagaacgtgaataacaacaaaaagaggagtttacatttggagctaaatagctatgwttaggaagtgaggggagaaaaaatatatagccctgcatctctgatttttctacttacctaccactacgatgaccctgaacaagaaacagagatttgattt

SEQ ID NO: 34960 - DNA, 201 bp, Homo sapiens
tcctggtcaaatacttgtaatgtgtgtcaaagccagatccccataacagaagcagactttgtaaaaaataaatctaggaatgcaccactttggggacttgyacagaaaaattaaccaaaggagacaatttcactgttaatgcatgtcctttctggtcatgatattggcatatctttgctgagtttcctgtagaacacccag

SEQ ID NO: 34961 - DNA, 201 bp, Homo sapiens
catttacgttgcgttatcaacaccaataatggtccagttctgtaacgggttagctatgactgcaaaatcaccatttgtctttacagcactcttttatctcrtcacttgtctttccttttaaatgacatttgttttatgtggtagctcattttgagtcatgaattgcaacatatggaaccactaaccaagaaatagtcttgc

SEQ ID NO: 34962 - DNA, 201 bp, Homo sapiens
ttctgctcatggagcctggggcttggggtttatatgggtacaggatagggaggcatggcagaccaaaaggcaacatttgggcacaaaaacaggaatgcccrttcccatttagggccatgggtttccagacttgagggtggggcttttgccaaggaaccaccctcttctacccagtatttccctgcctcctgtccatgtcat

SEQ ID NO: 34963 - DNA, 201 bp, Homo sapiens
tggcgctttaacaaaatggacaagtcgtgaggatttagacctctctgtcaagggggcagatgtttcttatgcttcattgccatgttaaggttctgatttgsgtacttgtgtttgcaaacagatgggcttggggataagaggggacaggaaaagagtcaacatgcaaaagccttcagagtctagcacgtgcaaaagacagct

SEQ ID NO: 34964 - DNA, 201 bp, Homo sapiens
gattgatgtgagagaaggtaccctgattttagttcctttgctgcagataatgacccaagcagactgaattcagacattgtcctagctgtcctaaaaaaaamccctacaactttgttattatttgtattatcaatattaatatttaacattaaattttgtgtcaaattaaattttgatcaaattaagatcaaattaaaattt

SEQ ID NO: 34965 - DNA, 201 bp, Homo sapiens
ccttggtgtatatagaaaagccacggagcgctgcaggattatccagccttgtagacctcggccctcctctaatggagaagcaagtttttgcctacagcacrgcgacaatacccaaagacagagagaccaggtaaggtgcagtgagggtgaccgagggtggtacctgggcccatgtgtcactgtgggcagctctacaggggt

SEQ ID NO: 34966 - DNA, 201 bp, Homo sapiens
gataatgacccaagcagactgaattcagacattgtcctagctgtcctaaaaaaaaaccctacaactttgttattatttgtattatcaatattaatatttarcattaaattttgtgtcaaattaaattttgatcaaattaagatcaaattaaaatttgatcttaggttagtaatctaggatcctcattgtataaatgagaga

SEQ ID NO: 34967 - DNA, 201 bp, Homo sapiens
aagtttcccgtgggtgtgttcacagaacactgggcccctttccatagttcacagacgtggacaatgagcagatgaggctttctccctctggtcctgaagtrgcatcatttcatctgaaatggccacaagcaattttggtttatttttcataacagaatcaaagacatcaccaaaaactccatcccacttcttgcaggggag

SEQ ID NO: 34968 - DNA, 201 bp, Homo sapiens
atcaaattaagatcaaattaaaatttgatcttaggttagtaatctaggatcctcattgtataaatgagagaagaccacagaaaatgtgctttttgtttatrtgtgtgtttgcttgtttgagctcacacacttaattaagtggcagcagtgggaagtccagggctccagttcccattaacatgatcttacaaatgaagggac

SEQ ID NO: 34969 - DNA, 201 bp, Homo sapiens
gtaatctaggatcctcattgtataaatgagagaagaccacagaaaatgtgctttttgtttatgtgtgtgtttgcttgtttgagctcacacacttaattaartggcagcagtgggaagtccagggctccagttcccattaacatgatcttacaaatgaagggacaaggacacacaggggagggacacacccaaggagcatca

SEQ ID NO: 34970 - DNA, 201 bp, Homo sapiens
ttctcctgatgctaaaatgttgaattctaaatatgcaaaggtacattcacacacaaacacacacacacacacacacacacacacaccatacaggatgaacrcacacattgctaatgggtcctagaaaaaggtgctagggcttagttgcacatgtttgttgacaggttaaaataaaagaaacctgaacacgcccctctgggt

SEQ ID NO: 34971 - DNA, 201 bp, Homo sapiens
tctttggtttggcaacaatgcaattaagttttaggggtacgattccgtggcttgggatcccacatcctctccataaagcactgaagcctaggttgcagagrtgagcttaaaaatggcttttgttaagaaggccttctaagatgtgtacttagcaccatgttttgctggttgtattttacttgagacttcaaaggctacaag

SEQ ID NO: 34972 - DNA, 201 bp, Homo sapiens
agaccctgtctgactgaatgaatgaatgaatgaatgaccaaccaaccaatcttaccactggtgtcaactctggagtgcgccacacgtgatctttgctcctytcatttggtagagtttcagggcaagctgctttttctattttctcagtggtaatcagtagtgtgaggttacagggaaggttaaattaggttaccacatgac

SEQ ID NO: 34973 - DNA, 201 bp, Homo sapiens
tgaatatgatgctgtagagaagcatggcttcatttttagttctcccggtgagcacgagtgccgcaagggagagcaacatctctgatgctaacatcacccakaacgttcatttctatcattgcattctctcttgtgtctgcctgtgtatctgttttacccaatgacaatgtgatattccacagcaaggaccatgttttattt

SEQ ID NO: 34974 - DNA, 201 bp, Homo sapiens
caagtatgctggcacatcccagctccttgggaagctgaggcgggaggatcacttgagcccaggagttcgaggctgcagtgagctatgattgagccactgcmctccagcctgggcaacagaatgagatcatctcttaaaaaaaaaaggagaaagataattttgagattcaacatagcccactaacagcttcatttagacatc

SEQ ID NO: 34975 - DNA, 201 bp, Homo sapiens
atgtgcacatgtaccctaaaagttaaagtataattaaaaaaaaaaaaaaaaaaaaaaaggattgtggcctggcgcagtggttcacacttgtaatctcaacrgtttgggagaccgaggtgagaagatcactggaggccaggagtttgagaccaccctgggcaacagagcaagatcctttctctacaaaaaagtaaaacatat

SEQ ID NO: 34976 - DNA, 201 bp, Homo sapiens
cgcagtggttcacacttgtaatctcaacagtttgggagaccgaggtgagaagatcactggaggccaggagtttgagaccaccctgggcaacagagcaagakcctttctctacaaaaaagtaaaacatatgaggcggcctgttggcacacatttgtagtcctagctactcgggaggctgaggtggaaggatggcttgagccc

SEQ ID NO: 34977 - DNA, 201 bp, Homo sapiens
aacaattacaagggaagcctaattataattaaggttgaaaggagtaatgaatatattttggtgttctcaagctctgatctgctgttacatacattgctagytctgccatggctggccagctgtcccttctctgataatgagggatgaacaagtcacattctatctttctgcctcttttgtactcgaagctgaccatccaaa

SEQ ID NO: 34978 - DNA, 201 bp, Homo sapiens
tgctcatggaagcatttcagattttggatttttggattagggatgctcaactggtagctatgtactgcaaatattctaaaatccaaaaaaaaaaaaaaatytgaaacctgaaacacctctggtcccaagcattttggataacagttactcaacctgtaatgagcgtgtttattagaaactacatacatatatatcggccgg

SEQ ID NO: 34979 - DNA, 201 bp, Homo sapiens
ttttctattttctcagtggtaatcagtagtgtgaggttacagggaaggttaaattaggttaccacatgacagttacttgatacagagcagcaggcacctgwtatgttgggtcctttatttcttccctcatcctttcattaggaagagaatatttctatagggtcaatcacagatgcagaagaggagagagctgcattgagc

SEQ ID NO: 34980 - DNA, 201 bp, Homo sapiens
ctgcctcttagtttctccacttgaataagtcctcatttctattgcttcagtgtatttgggggctgggagaaatgcaggaaggctgagcatggtgcatttcrcaaatggtgttaaaagacatgcaagagaaagtgtggggaacagtagctgtgttttggacccgtcttagacatcactggtgtctgtgtaatggtctccctc

SEQ ID NO: 34981 - DNA, 201 bp, Homo sapiens
catggcatttgtaaactgtcatggcagtggtgggagtgtagcagtgaggaccaccagaggtcactcttgtggccatgttggtttggtaggttttggctggygtctttactgtgacctgttttatcagtagggtctttatgatctgtatcttgtgatgacctcctatctcaccctgtgacttagaatgtcttaaccgtctgg

SEQ ID NO: 34982 - DNA, 201 bp, Homo sapiens
ggtgctgtcctgggatgcaaggtgtctacttctcatttgggagaagcattttgacattcagacagagccaagtgacagcaacacacaagtcctttctgagkcttagagcctagaaatttacaaagaagaaaggtaaagaaagaaattgatgggttcagcagcactgacttatcccaacgccaggttccaacaacctatcgt

SEQ ID NO: 34983 - DNA, 201 bp, Homo sapiens
accaaaaaaaatatatcttctaggattactttgcagatgggacataggtaaaaaagcatggcctgaagtgaggagaagatgtgatgaatgacaaaggtgtsaaccctcaggcaccattattttagagggactttcagtgatcagggactatgaggaggaaacagtcttagcagtgagagaggtcttagagaagatttaggt

SEQ ID NO: 34984 - DNA, 201 bp, Homo sapiens
ctctgactgctgaatcaacttgcacttgctcttctctctaatggaactttgaagaataactgtaattgaatagtgcctccaccccatcttcagatttgacygaatcaagcctagatctggttatatctggtttttgtttgtttcatgttgtgtttgtgccccactgagtataaagcccaagtgtgggcttcatctggatgt

SEQ ID NO: 34985 - DNA, 201 bp, Homo sapiens
caccaagcccggctaattttttgtattttttagtagagacggggtttcaccgtgttagccaggatggtctcgatctcctgacctcgtgatccgcccgcctrggcctcccaaagtgctgggattacaggcgtgagccaccgcgcccggccggcttacatcttaatgagcccacagctgcctgttgacctggtgtcatcacga

SEQ ID NO: 34986 - DNA, 201 bp, Homo sapiens
gggtttcaccgtgttagccaggatggtctcgatctcctgacctcgtgatccgcccgcctgggcctcccaaagtgctgggattacaggcgtgagccaccgcrcccggccggcttacatcttaatgagcccacagctgcctgttgacctggtgtcatcacgagggtgatcactatttccagcaagctctttgtccctcaaagc

SEQ ID NO: 34987 - DNA, 201 bp, Homo sapiens
ctctgtctcccaaagtactagaattacaggcatgaaccactgtgcctggcatttttttcttttgaatcacagatgtgctccttctgcatgcgttgctttgkgctagctttctgtcttcacctacctgtttcctctggttattttgacagtcatatagacattacccaactgtggctagggatgtttttgtttcttggctgt

SEQ ID NO: 34988 - DNA, 201 bp, Homo sapiens
tttcaccgtgttagccaggatggtctcgatctcctgacctcgtgatccgcccgcctgggcctcccaaagtgctgggattacaggcgtgagccaccgcgccyggccggcttacatcttaatgagcccacagctgcctgttgacctggtgtcatcacgagggtgatcactatttccagcaagctctttgtccctcaaagccca

SEQ ID NO: 34989 - DNA, 201 bp, Homo sapiens
gatcaggggcagcccgtggaagacgagccactggttccagcgaggcacaaggagagaggttaagctgcttctaccctgttcaactgtgatgagattccagygaaaatcagcattgagggcctcaggtgtttgcagggggctctggtatgttagaaaaactagagggaggggtctgcctttgtgtctgtttgtgagcgtgtc

SEQ ID NO: 34990 - DNA, 201 bp, Homo sapiens
gaactgaactccgtgattcccctgtgccttccccctgggagcctgagcccccttgaaggtgacagacacgggggaacctgtgtcctgtgggatcactcctytcagtccttctctaccacatagagaaagggatggatggcaaagtaaagccaacaaacctccacttccttcctcctccccactgccagagtggagattctt

SEQ ID NO: 34991 - DNA, 201 bp, Homo sapiens
tctctgcatgagaccacatatttgctctgtgcaccttctcccacctccctgccctggctggtaggttggtcgttgaggatacagtgctggcctaggctctrtacagatatcctccctgacttccagaagctcataatccaaatagtgctagaagatagggccaggtgtcatggctcatgcctgtaatcccagcactttggg

SEQ ID NO: 34992 - DNA, 201 bp, Homo sapiens
ttgaataaagctgaagaagaggaggaggggttggtcttgctgtctgaggggtagcagaagcaaaaggaaatccacatactgttaagaatggcaaatatccracttattggtggcaaatatgtacaggtctgcagcaatctcaattcttgcctcctcagaagaaacaatttgactgaggggcctaaggcagaaaaagaaacc

SEQ ID NO: 34993 - DNA, 201 bp, Homo sapiens
tgtctgaggggtagcagaagcaaaaggaaatccacatactgttaagaatggcaaatatccgacttattggtggcaaatatgtacaggtctgcagcaatctyaattcttgcctcctcagaagaaacaatttgactgaggggcctaaggcagaaaaagaaaccaaggcaagtttcagggcaggagtggaagtttgttagaaag

SEQ ID NO: 34994 - DNA, 201 bp, Homo sapiens
gcttgaacccaggaggtggaggttgcagtgagccgagattgcgccactgcactccagcctgggcaacaagagcaaaactctgtctcaaaaaaaaaaaaaaagtaaaaacctttgatttgggaaagaaaatgcatggtagaaagtatctaccaccacacactggtgtaacctcatggaaacatacaaatgtgtatttgcaca

SEQ ID NO: 34995 - DNA, 201 bp, Homo sapiens
gaagtgatgctttggttaaaagaagccacagatccatgcttacctccaaaggggacaaggaagtgcaatccaacaatggacctggaatatttgtgaacaayactagagacaatcacaccaagcctatacattaacctaaaagtaatcaggatcattgaaatccctagtccagagtattcagctgaagagagaaatagtcaa

SEQ ID NO: 34996 - DNA, 201 bp, Homo sapiens
agccacagatccatgcttacctccaaaggggacaaggaagtgcaatccaacaatggacctggaatatttgtgaacaatactagagacaatcacaccaagcytatacattaacctaaaagtaatcaggatcattgaaatccctagtccagagtattcagctgaagagagaaatagtcaaccagaatataaatatgaggaaat

SEQ ID NO: 34997 - DNA, 201 bp, Homo sapiens
attttagattggtcagctgaattctgatagtctttattctcattggtaacatgtcactgagttatattttaggttatcttagatcccatctctaaattctratggccactctgtgttgcactgttcttttcaattctgtctttcagttcctgggtccatcagatctaagaatgtgactgaggtattccagcatggagagag

SEQ ID NO: 34998 - DNA, 201 bp, Homo sapiens
cttatagtgaattgctttctgtgcagcctgtttgcatccaggtttatggggacctttgccaagtatcctaagtgtgagcacctggttccacccactctaarcatgtcacacatccatcttcccagttgtgggtcacttcttgcaaatggaatacaggtcttcccaatttgaagagcaccatcgccaccactgacaccaaaa

SEQ ID NO: 34999 - DNA, 201 bp, Homo sapiens
tgctcttcttttttttttttttttttttttttttgagatggagtcttgctctgtcgcccaggctagagtgcagtggtgcgatcttggttcactgcaagctytgcctcccgggttcacaccattctcctgcctcagcctcctgagtagctgggactacaggcactggccaccatgcccggctaattttttgtatttttagta

SEQ ID NO: 35000 - DNA, 201 bp, Homo sapiens
ggtacctgtatcaatagaattgcattgtcctttttagagtcccctcctgaagaatttttgcatcttgccttattttcttactaaaggagttgtgtgcagaygccctctttcttttcattttggaaatctgaagggattcaggacagtacccagttcttactaatctccccttggcgattggctgaatctctgcccagaaat

SEQ ID NO: 35001 - DNA, 201 bp, Homo sapiens
atgcttacctccaaaggggacaaggaagtgcaatccaacaatggacctggaatatttgtgaacaatactagagacaatcacaccaagcctatacattaacytaaaagtaatcaggatcattgaaatccctagtccagagtattcagctgaagagagaaatagtcaaccagaatataaatatgaggaaatctcacaatctga

SEQ ID NO: 35002 - DNA, 201 bp, Homo sapiens
gtctgagaggaattctggaagataaggctagaaaaaaattggggaaagacaatagtggatgagagaatagatgagaatttttctagaattgaagacaaacytgagacttaagattgaaaaataacacaaaattccaagcaagaaacatacacacacacacacacacacacacacacacacacacaggcccactttggagaa

SEQ ID NO: 35003 - DNA, 201 bp, Homo sapiens
aactaggaatagaggtgaactttctcacttcataaagagcatctaccagaaacctacagccaacatcatactttccctctaagatagggaacagccaggastgtctgatcttaccactcttaacataattctggacatggtagccactgcaataggcaggaaaaagaaataaaaggcatgtagtttgggaagtaagaaata

SEQ ID NO: 35004 - DNA, 201 bp, Homo sapiens
aagatgaaggaagagcaaaggcacttctcacatggtggcaggcaagaaagagattgtgcaggggaactcccatttataaaacggtccgatctcgtgagacwtattcaccacctcgagaacagcacgggaaagacctgcccccatgagtcaattacctcccacctgatccctccaatgacacgtgggaattacgggagctac

SEQ ID NO: 35005 - DNA, 201 bp, Homo sapiens
aggtgaactttctcacttcataaagagcatctaccagaaacctacagccaacatcatactttccctctaagatagggaacagccaggagtgtctgatcttrccactcttaacataattctggacatggtagccactgcaataggcaggaaaaagaaataaaaggcatgtagtttgggaagtaagaaataaaactgtctctg

SEQ ID NO: 35006 - DNA, 201 bp, Homo sapiens
aggtcaatgaaacagaataaagaacccaaaatagaaccacccaaatacgcccacttggtcttttacaaaatttaagagttctttatatattctagatactsgtccttcatcaaatgtggtttacaaatatttcctttcagtctgtagcttgtcttttcatcctctgaaggagatccagtctgggcacgatggctcatgcct

SEQ ID NO: 35007 - DNA, 201 bp, Homo sapiens
actatgttggtaacttttaggggtgagatggatccttggttaaacagttgatcaaatgaaagtctaaattcagatttatgtcattgaaaaatgttcactgygactggaagacctttgaagatttcctaaaccatgatttatcctcctagaggacagtcagtttgaatgatgggaaaagaaggattacttgctttcctttct

SEQ ID NO: 35008 - DNA, 201 bp, Homo sapiens
cacagtctctattataattctgaaaggaagtagctttttcctctttttattgaagagaaacaaatgccaaacagggggtgaataaagtacaagttagagcrgtaagtggtaaagtcaatatttgaacccagggctctctatctcctaagcatatgtgcttttaacctccctgtcccctcttgagcataatgaatatggaaa

SEQ ID NO: 35009 - DNA, 201 bp, Homo sapiens
  misc_feature (101)..(101): n is a, c, g, or t
ggtcacagaggtaacatccaactcgtacacaaaacatgccttataaaactagagcatcgccgagggtgggttagtaacatctgcagaggaacagccctacntgtgctgccagaatcatcagtgtaaccaaaagttgttgtgtttgcagaattctaaaagaaagatcccgtgtgatttttatgtttgttataattttccatt

SEQ ID NO: 35010 - DNA, 201 bp, Homo sapiens
tcaactacacgggcaggttccctccatgtgccctgcaaacagcattctttggtcacccctcagtgtgaggggtgcatacaccaatgtcaggcaaggattasgggacaaggactcccttcccagactcctcctccattccacagtttgacccttattccttcaggacttatacccctaatccctgtacttccatcaagtcag

SEQ ID NO: 35011 - DNA, 201 bp, Homo sapiens
agctggcaatggatggattaggttcctttatgttttcaggtcacgtaagagatacagcgagtcttttgttttttttaagagctccaagatgaaggccagcrtgatatgaatttcctcaaactgcccacacagtctttctccccaccctctggggaaaaaaatctgagcctccccctcagatacctaagaagaagctgagaa

SEQ ID NO: 35012 - DNA, 201 bp, Homo sapiens
attttcagccttattttgccagttatactttatgtgtaaaccagagccacatggagacagattgagtcatgccaatcgtgaagcatggactaaatattacrgcaccatttgccttttattactctgttattctctttcttggagacattcatcaatgtcttcgctccttgaatatctttattttttgctatgtctagcctt

SEQ ID NO: 35013 - DNA, 201 bp, Homo sapiens
aatgtacagccaagtttatgggaagcatgaggatggtgagtccaaagtcaaggtaggtgatagcattggtggccccttgcagcgccgggagtctatatggyggtctaacttcgcaccccctatttgtcacttcatagcactcttcactttcactccgtttcacttgctcatgattaagcaacaaacgtggtaatggtgttt

SEQ ID NO: 35014 - DNA, 201 bp, Homo sapiens
tagtatcttgttaatgtatgaagtataaaaaccaaggctttaagatgaagcccaaattgagggttcaaggaaggaacagggtaaaacttgatttaaaagcrtacaattggcaaaaaaaaagaaaaacgaaaaaaaaccattttgatgtccaaatgaattctaattcctctctaagagttctcaagacgatcagcatcgtac

SEQ ID NO: 35015 - DNA, 201 bp, Homo sapiens
gtggaaaccgtttttgcttgcctttaaaagcaaatctaaaaatatgttttctagcagctgtgtaactgcaaggaaaaaaaaaaaaatctgctccactgcarcacaactcgctcaccagatatctgcagggttcagatcttaatgcttcagaaatttgttgcagattttactgtatatatttagaccaaggagcctattagc

SEQ ID NO: 35016 - DNA, 201 bp, Homo sapiens
gctctaggcacccagcagagagccaacaggaagtgaagtgcctcaccctagatgtgagtcactaagggaggcagctcagtgccacagagagccctggatcygagaaagcctgcaagctaattgatctgtttccctaagaaaagccctgcctggctaagcctcagtgtcttttgtcctaataaggggatgataatctactca

SEQ ID NO: 35017 - DNA, 201 bp, Homo sapiens
gaacacaaatgttccagattagcctcagggaagagaaagaaaatgcaaaacaggtgatttcataaagcagggtgtaggcttgccctggggagtggcggctytaggcacccagcagagagccaacaggaagtgaagtgcctcaccctagatgtgagtcactaagggaggcagctcagtgccacagagagccctggatccgag

SEQ ID NO: 35018 - DNA, 201 bp, Homo sapiens
cccactgggccactccacctccatctctcacctgacttgctacagtggtctcccaaaaggtctccccactcagtccctgcccaccttccgcctgttctcaytggggaggccagagtgaccccgttaaaacgtgagacctttcatgtcgagcctcagctcaggactcgccgtggcccccctcacattttgtctttgcaagca

SEQ ID NO: 35019 - DNA, 201 bp, Homo sapiens
tctgttgacacacaggacacatagtttagcctctcttgtgatttacttgtccttctgtctggcggaaaccatggagattacacttgtccttatttgaattytggacttcatttttcatgaatgaagtgattcaaaaaatacagctgggtctaagcatgaattctaactttcaaaaatcacagatcttaaaaagtctgtatt

SEQ ID NO: 35020 - DNA, 201 bp, Homo sapiens
tttatgcagctagctctattcttacaccagggatactctgtcagaaatgccaatggaatagcagccacaaggtctgtgtgctactttaaacaaatcaatakctcaaaaggaaaaggcgtcgtctgtcactaattagatcaaattaaaatgtgctgctgtatctcctttgaatattcatgaggtgctctcaatcagaagccc

SEQ ID NO: 35021 - DNA, 201 bp, Homo sapiens
atttatgcagctagctctattcttacaccagggatactctgtcagaaatgccaatggaatagcagccacaaggtctgtgtgctactttaaacaaatcaatwtctcaaaaggaaaaggcgtcgtctgtcactaattagatcaaattaaaatgtgctgctgtatctcctttgaatattcatgaggtgctctcaatcagaagcc

SEQ ID NO: 35022 - DNA, 201 bp, Homo sapiens
aagctaattttgataaagggaatttctctagcctgaattggttgaaacaagtcaacataataatcataaaaatctagccaaagaaattgagtccaaagaargtttaagcatgctgctacctattgttatatatgaatcaaggggtatgaaaaataagatgtccaggccaagtgcagtggcttacgcctgtaatcccagcac

SEQ ID NO: 35023 - DNA, 201 bp, Homo sapiens
tcaacttcaccccatctgcaaagtctcttttgccatgtaaggaaacatattcacagattccaggatgagggtgtatacatcttgcaggggaagtcacacgkttacacactgagacttctcttgaaacacgaatatcaaagtcaactttctgatcccttgttttcttttcagatgcagagagaacttgtttatgcaagagga

SEQ ID NO: 35024 - DNA, 201 bp, Homo sapiens
gtcaccttcgcaaagtgcagatgaggtctggcatgtcccatcttgttcctgcctgactacaactctgcacacagacagtgttgatctggcttggagcccayagtggcaatccttggagtggaggcagcagagatctcagttcttcctagtgcttgagaagttaactaactgtctttcccatgaggaaaatgttttgagact

SEQ ID NO: 35025 - DNA, 201 bp, Homo sapiens
actcaagctcagatgaccaaaaaaaaaaaaaaaaaaaaaagctgcttttcccctcacttctccctctggttctgcctcagtactttgcttaggagtttctwaaagcaggcacagttgcctgcggggctggtgtgtgtcaccttcgcaaagtgcagatgaggtctggcatgtcccatcttgttcctgcctgactacaactct

SEQ ID NO: 35026 - DNA, 201 bp, Homo sapiens
ctagagaaaagcaaatgttcttaagtaaaccataaggaagaaaaaaatgtgtttcctttctattaagtggaagtggatcatcataaaggtcttcatcctcrtcaacttcatgttgaataggtgagaaggaggaagagaagggcttggccttgctctctcaggagtggcaggggagggaggatatctgtgtatcagtcaacc

SEQ ID NO: 35027 - DNA, 201 bp, Homo sapiens
caaacttaactactcacagcctactgttgaccagaacacttacagatgacttgaatggtcgattaacgcatagcttgaatgttatatatattatatactgkattcacataatcaagtaagctagagaaaagcaaatgttcttaagtaaaccataaggaagaaaaaaatgtgtttcctttctattaagtggaagtggatcat

SEQ ID NO: 35028 - DNA, 201 bp, Homo sapiens
tccgtgtcgctctcctgcaaaacctgtgtcacgcggttgcccagcctccctggaatgagcatcagtcaggtgtattatcatgcaatgaccttgggactgtyccttctggtctaaagcactgagcacctgagtcatgagggtgtccaatgagcagggaggtcctcatgggctggagcatcagggcaggggccatgcagagca

SEQ ID NO: 35029 - DNA, 201 bp, Homo sapiens
tgaagacttgaaaacatccctccagtgatgtccccttaccttcccccacatcctaagagcgagttgccttaggttggtccctgtcttttatggtaggattsccaagttgtctgatcgtaagggttcattctagttgtggttttaaaacaaatgtttcccactctatattgggatcattgtgtcatttttcttcttgggctc

SEQ ID NO: 35030 - DNA, 201 bp, Homo sapiens
aaatggcatcaattcctagccttacacgtgagaatttccccagctcacacactccgtatacttaggatacccatggaacttcttttatttttgaataaaasttcacagtgaagatcattcacagtggagcaggcggctcttctgaacccaggaagaatgggcatgagggcttttttaatctaggtccccatcattgttttt

SEQ ID NO: 35031 - DNA, 201 bp, Homo sapiens
agccactggcctggccccaaaactagcaggtgttctcatgttctctgccacagacttcaactaaacccaaggaaagcagatgggttttcaaagctatactmatttaatttataaacctggaacctcttacattttttcataactaatgaaaactgggaaagtacaaaattttcattcataagcctataaaattgtataaca

SEQ ID NO: 35032 - DNA, 201 bp, Homo sapiens
ttctagcacttcatagatcctggccctgttatctgacttcaggtaagatatttgaagtctctgagccccagtttgttcatctgtgaaatgggaattataaygtatctaatgggaatgagatgagaattaaatgaggtaattttggaaagcattggtaaataggaagtcacccaaaatattcattttcttccctatttccat

SEQ ID NO: 35033 - DNA, 201 bp, Homo sapiens
ccgcctcccaggttcaagtgattctcctgcctcagcctcccgagtagctgggattacaggcacctgccaccaaacccggctaatttttgtgtttttagtaragtcaggtttcaccacgttggccaggctgctctcgaattcctaacctcaaatgatccacctgcctgggcctcccgaagtgctgggattacaggtgtgagc

SEQ ID NO: 35034 - DNA, 201 bp, Homo sapiens
caggctggagtgcaatggtgtgatctcagctcactgcaacctccgcctcccaggttcaagtgattctcctgcctcagcctcccgagtagctgggattacargcacctgccaccaaacccggctaatttttgtgtttttagtagagtcaggtttcaccacgttggccaggctgctctcgaattcctaacctcaaatgatcca

SEQ ID NO: 35035 - DNA, 201 bp, Homo sapiens
caatctttgctctgccaaaaattaattttgcgcattattacaagataaatgtttttctatcaagaaccatgctaaagcacccagttccctgtttttgatayaaatgtaggacaggactagaatggataatgtagttgaaattctgagagcctctaaacacatatcttgagctaattagttcggcttcctcttcagcagcca

SEQ ID NO: 35036 - DNA, 201 bp, Homo sapiens
ataaagcaggaaaaggaataaggagtgaaactgtaaataggattattagaaagagcttcgctgaagtgatatttgaacaaagacaggagaggtaacagcarggatgtaatgttttcaaagaacagcaagaacatgggagaaggatgggaggaaaagagattgagaggtaatcccaggccagatcacctagggcccatgaaa

SEQ ID NO: 35037 - DNA, 201 bp, Homo sapiens
tgacccccgcaaccccccacccccattttctaggacaggatcctacttcaggaattcaacctctgggcctgtcctgaaagagatgactcagattctagagrggccattagaaagggatccatttaagaaatgactttccaacaatcagggcaattcagaggcttcagaggctaggatggtcagcctgagacagtgtgctcc

SEQ ID NO: 35038 - DNA, 201 bp, Homo sapiens
ctgacccccgcaaccccccacccccattttctaggacaggatcctacttcaggaattcaacctctgggcctgtcctgaaagagatgactcagattctagargggccattagaaagggatccatttaagaaatgactttccaacaatcagggcaattcagaggcttcagaggctaggatggtcagcctgagacagtgtgctc

SEQ ID NO: 35039 - DNA, 201 bp, Homo sapiens
aagcacagcactctccttcaggctaccggggtcagtggcatccagtggaagataaggctacctcgtccccctgacccccgcaaccccccacccccattttmtaggacaggatcctacttcaggaattcaacctctgggcctgtcctgaaagagatgactcagattctagaggggccattagaaagggatccatttaagaaa

SEQ ID NO: 35040 - DNA, 201 bp, Homo sapiens
tgtaatggctggagaatccctgagtctgaacagtcatctgtcgaagtgtctgccttcgtgctgccaaagcacagcactctccttcaggctaccggggtcartggcatccagtggaagataaggctacctcgtccccctgacccccgcaaccccccacccccattttctaggacaggatcctacttcaggaattcaacctct

SEQ ID NO: 35041 - DNA, 201 bp, Homo sapiens
tttaatttttacagtattattatttttgccattccttgaggtagttgagtcttcctgttttctcagtaacattcctttagttttttgtgggtttttttttktttttttttttttttgaaacagggtcttactctgttgaccgagctggagtgcagcgtgcagtggcacaatctcagttcactgcaccctccacctcctggg

SEQ ID NO: 35042 - DNA, 201 bp, Homo sapiens
agaaatcccccagtgaaatgcagaaaacttgaagttttgtaatggctggagaatccctgagtctgaacagtcatctgtcgaagtgtctgccttcgtgctgmcaaagcacagcactctccttcaggctaccggggtcagtggcatccagtggaagataaggctacctcgtccccctgacccccgcaaccccccacccccatt

SEQ ID NO: 35043 - DNA, 201 bp, Homo sapiens
tgtgaacaaaagtggaactttgggtgagtgcttaaattttagcagcctccagagtttcctgatgttactccctagagatcaacaattcactttttccctcytttactgatacttttctttgtgccttgttatagaattatatttattatagaaaaccctgaaatagacatagcaaaagaaataaaataaatatcgcttgtc

SEQ ID NO: 35044 - DNA, 201 bp, Homo sapiens
agagatagaaatcccccagtgaaatgcagaaaacttgaagttttgtaatggctggagaatccctgagtctgaacagtcatctgtcgaagtgtctgccttcrtgctgccaaagcacagcactctccttcaggctaccggggtcagtggcatccagtggaagataaggctacctcgtccccctgacccccgcaaccccccacc

SEQ ID NO: 35045 - DNA, 201 bp, Homo sapiens
ctttgcatttcttgaatcttgagctaaatggaaattaatactaaacattctccactggtaaaatagagaataaggatattaacagtaaaagaaaagaagamgaaaaggaaatgtgcttccacagatttagaaacataagtaacaatctaagttaaggctttggcgattagatcttcatgttggaagatatgctggatggct

SEQ ID NO: 35046 - DNA, 201 bp, Homo sapiens
gggtttcaccgtgttagtcaggatggtctcgagctcctggcctcatgatccacccacctcggcctcccaaagtgctgggattacaggcgtgagccactgcrcccggccaatatgagcatttgaaacagggtcagtgaggccaagaggtcattcttctggtttctcccatcagaccagggctttgctgctgtctgagtgccc

SEQ ID NO: 35047 - DNA, 201 bp, Homo sapiens
tcgggattacaggcatgagccaccatgcctgacttagctttcatttgatgagaatattaattatttcaaattgctcataaatctgcattactgtatgtcaratattggctttagcatttttctcaagttatttcatacaacaaagtataatataaacatcattattactatgtcatgaatgaagaaagtgtacatgaaaca

SEQ ID NO: 35048 - DNA, 201 bp, Homo sapiens
gtcgtcctatagttagccaatgtgtttgttcattctaatactttctttctttcttttttcttttcttttctttctttctttcttttttttttttttttggkttttttgagatagagtctcactctgtcacccaggctggagtgcagtggtgctatcttggctcactgcaacctccacctcctaagctcaagtgattctcgt

SEQ ID NO: 35049 - DNA, 201 bp, Homo sapiens
cagtcgtcctatagttagccaatgtgtttgttcattctaatactttctttctttcttttttcttttcttttctttctttctttcttttttttttttttttkgtttttttgagatagagtctcactctgtcacccaggctggagtgcagtggtgctatcttggctcactgcaacctccacctcctaagctcaagtgattctc

SEQ ID NO: 35050 - DNA, 201 bp, Homo sapiens
tcagtatcactttgagactagagcacaaaaaatgagtcagatgtggaattttgatatttttaattttggcacagaatttttatcgacagatatgtactcayatacatagagtatcttaatataaaaactacccaaatataattttatattttaaatatagatacagtgagtatatgtgcaaagctgtcttggcagatatgt

SEQ ID NO: 35051 - DNA, 201 bp, Homo sapiens
cacacaaagtgtacttgttttgtttttttaaaaatcagtctccttactttgacccatgagaacaggagcacacaggagttcagacatatccattggccacrtagtacctgagatctgtgaatgagatcacagtcgtcctatagttagccaatgtgtttgttcattctaatactttctttctttcttttttcttttcttttc

SEQ ID NO: 35052 - DNA, 201 bp, Homo sapiens
gtcctttctggtcatgatattggcatatctttgctgagtttcctgtagaacacccagtcatctccttgaagccacatcccttaagaaacacagggcggaargtactgaccttatccctgctttcctctatgggaaggtcctgagaggcatgtaggaaggtgtgattgtctggataatgcaattggttctgttgagaggggt

SEQ ID NO: 35053 - DNA, 201 bp, Homo sapiens
gtagcacaaagaacttgagagttacttttcattaactccttaagtcacaactataattcttagtcacgactaaggagagaaaaagtcaatttaaaactgayttaaagaaaattattaaatgagtactaggacagctgatacaaagatatagccaaagtggtgatagtatcttgttaatgtatgaagtataaaaaccaaggc

SEQ ID NO: 35054 - DNA, 201 bp, Homo sapiens
ccatacacagtggttggccatagtgaaaactggctgaatagtcaccctgtatatgacaggtttgctttgcaatttgttttttgtttgtttattttttgcaytgcaatggcaaggtcatagaaataatcttgtcacccttcaaactcactactttgaaagccagcactccattgtatgcatatatatacacatacacacaca

SEQ ID NO: 35055 - DNA, 201 bp, Homo sapiens
attaactatttcaaagctctcataaatctattgcatcattttagtcttatatcaaagtaggaagggtggatattgagacacaaaattgaagatcaatgackgtgctgtggcatgggttgtccagtcaggacagtggccatacacagtggttggccatagtgaaaactggctgaatagtcaccctgtatatgacaggtttgc

SEQ ID NO: 35056 - DNA, 201 bp, Homo sapiens
ctcacttctttccaaacctcaccactcactgtcccttctcgaaacttccatagaacttcacctccctgccccgctctctttgtgcactccccttttcctgmctgcactgagttattgatgcacgcttctttttcttttcctttcaccattttattctttttttaatgaatgatttatatatttatttatttatttatctat

SEQ ID NO: 35057 - DNA, 201 bp, Homo sapiens
aggctggagtacagtggcccgatctcggctcactgcaacctccacctcccgggttcaagccattctcctgcttcagcctccccactagctgggactacagrtgtctgccaccacgcccggctaatttttgtatttttagtagagacgggatttcactatattggtcaggctggtctcaaactcctgactttgtgatccacc

SEQ ID NO: 35058 - DNA, 201 bp, Homo sapiens
cagaaaaatctccctatttcaaggtcagctgactggcaatcttgactcccccttttccatgtaacctgatgtagtcacaggttgaggggactaggatgcaracatctttcagggaccagcattctgctttccatattgggtaagtttagaaccataaaagaagccagcagatctagctgaaagtgctgggagaaggtctgt

SEQ ID NO: 35059 - DNA, 201 bp, Homo sapiens
gatagcttccctttgaccctgcttccatgctcacatccctaaccctcccatgtccacttttaaggacactttaaggacattgagcctccctgatcctccaraaaaatctccctatttcaaggtcagctgactggcaatcttgactcccccttttccatgtaacctgatgtagtcacaggttgaggggactaggatgcagac

SEQ ID NO: 35060 - DNA, 201 bp, Homo sapiens
ccttggctctaagagccgggttcagagaaaaaagaagaatttatctgctgctatttcttcacatccagcaattcgatttgtatatagaaaaactaattttytaacccactatggaaggaaaaaaggcatggtaaagatattagatctttttggtactgtttttttttttttttctggactccagataccttttctttcagt

SEQ ID NO: 35061 - DNA, 201 bp, Homo sapiens
gaacatggagggagagagacttcatagatattcatgtgctcttcgataattttaaggtaggctctgatcctgtcttttgctacgttatgacaccttggctytaagagccgggttcagagaaaaaagaagaatttatctgctgctatttcttcacatccagcaattcgatttgtatatagaaaaactaattttctaacccac

SEQ ID NO: 35062 - DNA, 201 bp, Homo sapiens
acagtgagccgagacggtgccactgcactccagcctgggcgacagagtgagactccgtctcaaaaaaaaaaaaaaaaaaaaaaaaaaagacaaaagaaaartatcatgtagatttcaactggagacagtgactttaatcttctaagttcagagacaaatttcactgcacttccttcagtgtttctgaagcgtgagcatatt

SEQ ID NO: 35063 - DNA, 201 bp, Homo sapiens
ggaagcggaactcacagtgagccgagacggtgccactgcactccagcctgggcgacagagtgagactccgtctcaaaaaaaaaaaaaaaaaaaaaaaaaargacaaaagaaaagtatcatgtagatttcaactggagacagtgactttaatcttctaagttcagagacaaatttcactgcacttccttcagtgtttctgaa

SEQ ID NO: 35064 - DNA, 201 bp, Homo sapiens
cacgcctgtaatcccagcactttgggaggccaaggtgggcggatcacgaggtcaggagatcgagaccatcctggttaacacagtgaaaacccgtctctackgaaaatacaaaaaattagccgggcgtggtggcgggcacctgtagtcccagctgctggggaggctaaggcaggagaatgctgtgaacccgggaagcggaac

SEQ ID NO: 35065 - DNA, 201 bp, Homo sapiens
acaatgacaagagatagaaatcccccagtgaaatgcagaaaacttgaagttttgtaatggctggagaatccctgagtctgaacagtcatctgtcgaagtgkctgccttcgtgctgccaaagcacagcactctccttcaggctaccggggtcagtggcatccagtggaagataaggctacctcgtccccctgacccccgcaa

SEQ ID NO: 35066 - DNA, 201 bp, Homo sapiens
gagaacttacaatgacaagagatagaaatcccccagtgaaatgcagaaaacttgaagttttgtaatggctggagaatccctgagtctgaacagtcatctgycgaagtgtctgccttcgtgctgccaaagcacagcactctccttcaggctaccggggtcagtggcatccagtggaagataaggctacctcgtccccctgac

SEQ ID NO: 35067 - DNA, 201 bp, Homo sapiens
ctaagccagtcaggagaacttacaatgacaagagatagaaatcccccagtgaaatgcagaaaacttgaagttttgtaatggctggagaatccctgagtctkaacagtcatctgtcgaagtgtctgccttcgtgctgccaaagcacagcactctccttcaggctaccggggtcagtggcatccagtggaagataaggctacc

SEQ ID NO: 35068 - DNA, 201 bp, Homo sapiens
aagtaacacatgactcatccacgctgaaaatgcaaagctaagccagtcaggagaacttacaatgacaagagatagaaatcccccagtgaaatgcagaaaayttgaagttttgtaatggctggagaatccctgagtctgaacagtcatctgtcgaagtgtctgccttcgtgctgccaaagcacagcactctccttcaggcta

SEQ ID NO: 35069 - DNA, 201 bp, Homo sapiens
accgggttgggtggccagaggaggtccctgctctctggcatctgatgcctgtgatgccaagagctgattctgtgggatcctataggcagcatgttcataawccacacagccctggaccacccgccccaccctccctcaggttcatgcaggggccagtacacaacaaaaagacgtgcgggagtgcagtgctgtgcgtgggag

SEQ ID NO: 35070 - DNA, 201 bp, Homo sapiens
ttgtgaactgaagccaagtgttgtaggtcttctgtcgccacagctgagcaggctgagatgagcatagcaagtcctcactcttttttttttttttttttttwtttttttttttttttttgagacagagtctcactctgtctcccaggctggagtacagtggcccgatctcggctcactgcaacctccacctcccgggttcaa

SEQ ID NO: 35071 - DNA, 201 bp, Homo sapiens
taagtccagacgtcttttccagatacctttaccttctaaccccaatttagggagagagtcttcagagtggcctctgtagcatggggataccattaacaacmcttccctgtgggaagaccttggaacttaaaggcttggaagtttcccaggaggtgatggctagcaatagaagttccataaattttttgttgtttctgacaa

SEQ ID NO: 35072 - DNA, 201 bp, Homo sapiens
gcctcacttccaaatactatcacattggagattagggcttcaacatgtaaatttggggttggggggcactcacattcagttcatggcacttgtgaactgamgccaagtgttgtaggtcttctgtcgccacagctgagcaggctgagatgagcatagcaagtcctcactctttttttttttttttttttttttttttttttt

SEQ ID NO: 35073 - DNA, 201 bp, Homo sapiens
ccactgacaccaaaactgccaccctcttcttggctctgggaagtcatccactcccctcttcctgcgcaattaggaacttcctcctttccccttctggaggyaagtccagacgtcttttccagatacctttaccttctaaccccaatttagggagagagtcttcagagtggcctctgtagcatggggataccattaacaacc

SEQ ID NO: 35074 - DNA, 201 bp, Homo sapiens
ctggaggctagaagtccaagagcagggtgccagcatggtcaggttctggtgacaaccctctttctagttggtagacctctgtcttcttgctgtgtcctcayatggcagaaagaaagcatctgtctcatgtctctttttagaaggacactaatcccatcacaagggctctactcttgtgaccaaatcacaccccaaaggcct

SEQ ID NO: 35075 - DNA, 201 bp, Homo sapiens
tcatctttgaatttaagaaatggtagcattctcttatttgattgctattagccctgaaatggaactgtccagaatagtatttgtgaaatggcagagttccyggacccccctcacaggacgtgagacaggggtgtggctagtctatctggccacctagtgagcactcaaaccccttacaggagggggagcatgcagatgggc

SEQ ID NO: 35076 - DNA, 201 bp, Homo sapiens
atgctataattagcaatgtaatgagaattgaagggtaaacaagaagaattattcccagaacacacatcaagggttagaagactggaacaggaaaaccagcmtgagatgaaaatattttctctgcccaaccaacgggcatctatacctagagttctatatacagatctttctaggcaaagacaagggaaagagtggtggtca

SEQ ID NO: 35077 - DNA, 201 bp, Homo sapiens
ctatcctgaatatgttcagacaagccaggggcactcatataggtggtgcggtttcctgttttgcaaaggacaggagatagagccacccaagcagatgtccmagatgaaaatggctgtgaaacgacagtgtcaccttaatatccatttggacctcatttatgggaaaagccacctttcccacaccactatattttgtttgtt

SEQ ID NO: 35078 - DNA, 201 bp, Homo sapiens
tgaaaatgaaaacgtgtttcccttcccatgttttccccatgcatttgtgttgtcatttcaggggccatctctaatgacaagttcttaaacctagaatccartcatacagaatacacaagagaagacaggaattgggcatgaatacattcaggtcaccatagacaggaatccttctggattctaaatgttttatgggaaagt

SEQ ID NO: 35079 - DNA, 201 bp, Homo sapiens
ctcactgagtaatcctttaaagagtccattggaagccagtcttctttcaaatgtttcacatggaataatcgtgaatatttttgcatggatgtgcaattaaytgcaaagtatgtatgtatactttaggtggaaacttaaaaaccttcctttgccattctcataaatgggcttgctgatctgcctattatagattatggtggc

SEQ ID NO: 35080 - DNA, 201 bp, Homo sapiens
ttcttgccaaatattgcatggcatgaaaatgaaaacgtgtttcccttcccatgttttccccatgcatttgtgttgtcatttcaggggccatctctaatgayaagttcttaaacctagaatccaatcatacagaatacacaagagaagacaggaattgggcatgaatacattcaggtcaccatagacaggaatccttctgga

SEQ ID NO: 35081 - DNA, 201 bp, Homo sapiens
actctccaccctccacagtctatccacaagccaccaccctgctgctcacaggtctgaccctcccctgtggttgatgggcaggacaggactctacatatgcyggtgtctgttaacacaatggggaacccaccagagatccctcacacaggatcacttttctggctgggctgtttttcctcatctttcatcagtgagtgttgg

SEQ ID NO: 35082 - DNA, 201 bp, Homo sapiens
atatcctccaaaattaagctaaatggactcctgctattgatgggattgagagtcagttagaaacaaaagcatctctctctccctctctctctctctctctytttttttttttttttttttttttttttatgagacagtcttgctctttcgcccaggctggagtacaatggtgcgatctccgtttactgtaacctccgcctc

SEQ ID NO: 35083 - DNA, 201 bp, Homo sapiens
tcacaagaccaagatgaaggcatggtggatccattaaaggtttgtttgtacccttctcctctcacataggatcccagaagctacgggacttcccaagaacmgtaggaagctgagccatctagaatcaccctactgagagtaacaccagcttactacctaaggaaagctaaatggttggcatcttttataatttaccaattg

SEQ ID NO: 35084 - DNA, 201 bp, Homo sapiens
ggtgcggccagcaggttgctggagcgagatgggctcccagttcccctaacatcactctccaccctccacagtctatccacaagccaccaccctgctgctcrcaggtctgaccctcccctgtggttgatgggcaggacaggactctacatatgccggtgtctgttaacacaatggggaacccaccagagatccctcacacag

SEQ ID NO: 35085 - DNA, 201 bp, Homo sapiens
gaatatcctccaaaattaagctaaatggactcctgctattgatgggattgagagtcagttagaaacaaaagcatctctctctccctctctctctctctctytttttttttttttttttttttttttttttatgagacagtcttgctctttcgcccaggctggagtacaatggtgcgatctccgtttactgtaacctccgcc

SEQ ID NO: 35086 - DNA, 201 bp, Homo sapiens
ggtttcaccatgttggccagactggtctgaaactcttgaccttaagtgattcgcctgcctcagcctcccaaagtgctgggattacaggcgtgagttaccgmgcctggccaagtattgtcttttgctttaggctaccagaggtttgcttcttgcatgtttgtttttgagtcagggtctcactctattacttaggctggagtg

SEQ ID NO: 35087 - DNA, 201 bp, Homo sapiens
tttattcttttctagagatcctggcagtcattatgaccatgccctttatggcacatccaaggtcagtgttcatgcgtgtcctccctcgttcattccctagyatgggtggatatagctgtgttacatgctgaatcctgctacccactgtgcaatggaggggtcagagtcttgtggaaggagagctggagagccagggagaat

SEQ ID NO: 35088 - DNA, 201 bp, Homo sapiens
gggtttcaccatgttggccagactggtctgaaactcttgaccttaagtgattcgcctgcctcagcctcccaaagtgctgggattacaggcgtgagttaccragcctggccaagtattgtcttttgctttaggctaccagaggtttgcttcttgcatgtttgtttttgagtcagggtctcactctattacttaggctggagt

SEQ ID NO: 35089 - DNA, 201 bp, Homo sapiens
caaactccagggtgcaaacacatatcaagctttccttttgcatcacacttgctaatatcccattggccaaagcaagtcacacagccaagcccagaatcaaygtggaacagagctgctctccacagatgggtgagtgctaggaggcagggtgcactggggcccacataccccctgggaactctgggatcctgtgctttttcc

SEQ ID NO: 35090 - DNA, 201 bp, Homo sapiens
cattcttgtgtatcgtgtaattccaggagcagatgtggggtagcctttacgaaattaggaggaggggaggcagtctggtttagatcgtgaactacccaaargaaagttacttggcatgacttcgattgtgtgttaagataatttttattgtgttctagttctcagacaatatcatagataacctcttttgcctgggtgcat

SEQ ID NO: 35091 - DNA, 201 bp, Homo sapiens
gcatagtgacttcacatgacagtcatttatttgcttatcattctgcaatttggacagtgcttggaggggccatctcatttctgctggcatcagctggggtrgctcacctggggctggggagaccactcccaagacggctcatccacataacctcagtggttccagctgtaaaatgggcgcttagatggggtggttcttcag

SEQ ID NO: 35092 - DNA, 201 bp, Homo sapiens
agcatagtgacttcacatgacagtcatttatttgcttatcattctgcaatttggacagtgcttggaggggccatctcatttctgctggcatcagctggggwagctcacctggggctggggagaccactcccaagacggctcatccacataacctcagtggttccagctgtaaaatgggcgcttagatggggtggttcttca

SEQ ID NO: 35093 - DNA, 201 bp, Homo sapiens
catcccagaactttgggagtccgaggtggtcagatcacttgagctcaggagtttaaaaccagcctaggcaacatggcaaaaccccatcactaaaaaaaatmtacaaaaaattagctgggtgtagtggttctctcctatggtcccaggtactcagggggctgaggtgggaggatagcttgaattcatgaggttggggctgca

SEQ ID NO: 35094 - DNA, 201 bp, Homo sapiens
ccctcaaaaatctgtttgtcaggccagacatggtagctcatggctgtcatcccagaactttgggagtccgaggtggtcagatcacttgagctcaggagttyaaaaccagcctaggcaacatggcaaaaccccatcactaaaaaaaatatacaaaaaattagctgggtgtagtggttctctcctatggtcccaggtactcag

SEQ ID NO: 35095 - DNA, 201 bp, Homo sapiens
catcttctggaatgtctcagtgacaaacctgtgtgttgagtatttcataaacttttacaatctgcgatctcatgtccttcagtttacaaggaaaaaagaayattcttataatattgttttggaaaactctgttttttctgatctcttttacccaaatctccattactggggatctgggtactctgacatgattctatgttt

SEQ ID NO: 35096 - DNA, 201 bp, Homo sapiens
aaatcttgtttctgtttctcctgatgctaaaatgttgaattctaaatatgcaaaggtacattcacacacaaacacacacacacacacacacacacacacaccatacaggatgaacacacacattgctaatgggtcctagaaaaaggtgctagggcttagttgcacatgtttgttgacaggttaaaataaaagaaacctgaa

SEQ ID NO: 35097 - DNA, 201 bp, Homo sapiens
aagaaataaaaggcatgtagtttgggaagtaagaaataaaactgtctctgtttgcagatgacattatctacataggaaatccaatgaatgcaccaaaacaactctcctagaagtaatgagtgagttcaagatcaacatacaaaatctattgcatttctatatactaagaatgagcaaatggaagccaaaataaaaaacaca

SEQ ID NO: 35098 - DNA, 201 bp, Homo sapiens
aagaattgcttgaaaaccggaggtggaggttgtagtgagccgatctcacaccactgcactctggcaataaataaataaataaataaataaataaataaatwcaatggaacacttaagggcaatgttattttccggtaattttcacaactgatactttgacccactgggtctttagttttccctatctaacccttgtgatgg

SEQ ID NO: 35099 - DNA, 201 bp, Homo sapiens
tgagaggcatgtaggaaggtgtgattgtctggataatgcaattggttctgttgagaggggtcgtcttgtacttttagcaagaagctgctcatcccattctmaaagggtactgctagagtatcaggcacaccttgggcatccctgaaacaaatctgtagcccaaaactcaaggcaggactggctaaagaattgtcagggtac

SEQ ID NO: 35100 - DNA, 201 bp, Homo sapiens
gatgaccaaaaggcagaggttataaatgtagccatgttgcttaaagtaatattatttcttggctatcttgctaaactgaatctaccttctttaaaaaaaaatgtcaggaatgaggacatcataccttgatattctgctgagcacagtaaggaggaagctacttcactgaggaccacgtgaatttgtctaaatcttggtgaa

SEQ ID NO: 35101 - DNA, 201 bp, Homo sapiens
gctaaatttgaatttcaggtaaacggtgaatttttttttttttagtataagtatatcccatgccatatttgggatatacttatgctaaaaatacttctccrttatttatgtaaagtgcacatttaactgagcagtcctgtatcttatctggcaaccctatttgatggaaataaggttacagagaaaaataaagcaggaaaa

SEQ ID NO: 35102 - DNA, 201 bp, Homo sapiens
aagcaatgacaaataaatcactaagcagcttttaatcatttccccccggggctccagccacgggagaaaggagctgtttttgtgaaactgtctctaggacsgcagcttccattcattggttgggggattccatgtggcagatgcatgctggctgcaaagtttgtgcagaattttagagttaaatcacagaaaccaggcatg

SEQ ID NO: 35103 - DNA, 201 bp, Homo sapiens
ataacctgaggctatggtgtgctggtgggattgtaaacattagaaagtacatgccaagaaccgaaagccattaaggaaaatgagtcactttctggatgcaytgaacatctttagattatgagagcttcgtgaagaaataaagtacagaaatgatttttcttcttaaaaagaaaggaatatctctctggagtagagattgtt

SEQ ID NO: 35104 - DNA, 201 bp, Homo sapiens
gcttgatggaggctcttataacctgaggctatggtgtgctggtgggattgtaaacattagaaagtacatgccaagaaccgaaagccattaaggaaaatgartcactttctggatgcattgaacatctttagattatgagagcttcgtgaagaaataaagtacagaaatgatttttcttcttaaaaagaaaggaatatctct

SEQ ID NO: 35105 - DNA, 201 bp, Homo sapiens
gcagagcctcggtggtttgcagcagtggaaccaggcaggcccagttgtgggtaggagaggccgtcacctgttgaggcctcccccccacacccccgcatcgscctgccctggcagagcccagcccccagtccccggagagcgcgcctgaggacggacggacggacggacggacagacctagggacggagggccaggggcagg

SEQ ID NO: 35106 - DNA, 201 bp, Homo sapiens
gttacactgagtgttaatggatgcatgatgttaacttactgattttgtttgtgaagaacatataacctggttatttgaaagaaaaaaccatgactaccagwatgaaccaatgtgtaatatagaaacaatccctctggctttgatcccctaacatctgtgtgtcctctggcaagatttttgagtacaggttggagaatgagc

SEQ ID NO: 35107 - DNA, 201 bp, Homo sapiens
acatgcacagcactcaaaagataaagctaaacctcttcagattgcacaggtatttatcaacctgagagacagcatttttggcatctagctttgttcagtaratcctgttatttctctgttattaaggaagagatcattttaaaggtagccatgatgtgagtctaagtgttggaagcgcaacctaaataaatgaaatgacag

SEQ ID NO: 35108 - DNA, 201 bp, Homo sapiens
aacctgggaggcagaagttgcagtgagccaagatcacaccactgcactctagcctgggtgacagagtgagaccctgtcacaaaaataaaataaaatgaaayaattatcctacaagaattaccagtaagtatacttctaaaatagatcttactctagttcattccaatactcacataatacaactatatattaaatggtgaa

SEQ ID NO: 35109 - DNA, 201 bp, Homo sapiens
tatgaaacacatgcacagcactcaaaagataaagctaaacctcttcagattgcacaggtatttatcaacctgagagacagcatttttggcatctagctttrttcagtagatcctgttatttctctgttattaaggaagagatcattttaaaggtagccatgatgtgagtctaagtgttggaagcgcaacctaaataaatga

SEQ ID NO: 35110 - DNA, 201 bp, Homo sapiens
aggtgcagtggctcacgcctgtaatcccagcactttgggaggcagaggcaggtagatcacttgaggtcagaagtttgagaccagcctggccaacttggtgmaaccccattactgaaaatacaaaattagctgggcatggtggcacatgcttacttgggaggctgaggcagaatcgcttgaacctgggaggcagaagttgca

SEQ ID NO: 35111 - DNA, 201 bp, Homo sapiens
aatgcaaacatacattaaaagatacaacaaattccatgccagtttcgtgaagaaatgctttgaggtttttttccccccagctttattgagtataattgacmaataaaaaatgcatatatttaaggtgtatgacctgacaatttcatatacaaatacattgtgaaatggttaccacaatcaaattcatgaatatatccatca

SEQ ID NO: 35112 - DNA, 201 bp, Homo sapiens
ccaggaggtaaggctgcaatgagccatgatcatgtcatgcctctgcaccccagccagggcaacagaataagaccctgtctcaaaaaaaaaaaaaaaaaaaragagagattgagatctgagatctcatatttttgtagcaggttacactgagtgttaatggatgcatgatgttaacttactgattttgtttgtgaagaacat

SEQ ID NO: 35113 - DNA, 201 bp, Homo sapiens
tggggatgaaaatcagaccatcttctgggagcgaggctgtgatacttaactgtagggacgccattggtggcctttctgcagtggcctcgcccaggcatggmtggggcatggacctcaagagcggttttggccttttgatgtaccatagcaatcacatgggacaatcaccacacatcccacgtggggccaagacattgcgtg

SEQ ID NO: 35114 - DNA, 201 bp, Homo sapiens
tttttgtattacaaacgtgccagctttgactacccttgacactaggtaagtgggagattaattgttgggattatacccatggaaaaagccataaggcttayatcacaagttttattttttttaatattttgttttcatagctggggattactctattggcattcagggagagagaatgaaaaaatatactaggataaaaaa

SEQ ID NO: 35115 - DNA, 201 bp, Homo sapiens
agacttaacttgaacctaacgaaaccaagtttcaggcccctctaaatataaatgttcacttttatacctaagtttctgtttcaaatgttgttattcttgtwcttaaagaggccactcaaaattgtgtaagcttcagggctcacaaaatgtggggtccatcactgtcatcaaggtgattaattgatttgtataaatctagtt

SEQ ID NO: 35116 - DNA, 201 bp, Homo sapiens
gggttagaacacagaggatgaccagaaaacacctccaagaagaaagagattgagtgagacttttttgattgcttttgtactcccgagttcctggcacaggmctggcacaagatgggaacttgtctagtgaattaatgaagccatttctaccgttgcctctagggtacctctaagtacgttatattctttgtgggtgttgtt

SEQ ID NO: 35117 - DNA, 201 bp, Homo sapiens
tcctaacctcaagtgatccacccaccttggcctccgaaagttctgggattacaggcatgagccacagcacccggccaagggcacattcaaaattggaattyagcttaaaattattattgcctggaatttctcagtccttcataaagattcgtctagagactctcaaagtcttacattgtcctcaagtatcaggtcactaag

SEQ ID NO: 35118 - DNA, 201 bp, Homo sapiens
gcttgactattctagacaactcgtttaggtaaaatcataaacctactgaaagtgtttgggtttttctatgtgactggtttatttcacttagcacaatgtcmtcaaggttcacgtatgtggcagcatgtgtcagaatttcctttttaaggcttaataatattctggccgggcaccgtggctcacacctgtaatcccagcact

SEQ ID NO: 35119 - DNA, 201 bp, Homo sapiens
aagcgtgcatgattttaaaacagaagatcaagaggttatcacgacagattttggccaagttgttctaagacccaaggaggcaaggcatgctaacgtgaacsctaatgaggatggagaatcaagttcaagttctcccactgaagaaaatgcagccactgacaatattgccttcatgattaccgaaaccactgtccaggttct

SEQ ID NO: 35120 - DNA, 201 bp, Homo sapiens
ggccatgattatttaacttttacatttttgttcttatctttaagaaaatctctgctgggtgcggtggctcacgcctgtaatcccagcaatttgggaggcckaggcaggcggattacctaaggtcaggagtttgagaccatcctggccaacatggtgaaaccctgtctctactaaaaatacaaaaattagctgagtgtggtg

SEQ ID NO: 35121 - DNA, 201 bp, Homo sapiens
atcatagctcactgtactcactgcaccctcgacctcctgaggtcaagcagtcctcccccctcagccccctcggtagctaggactacaggcacttgtcaccrcaccaagctaaattttttctttcatctcttgtggtaatgggagtctccctatgttggccaggctggtcttgaactcctggcctcaagcgatcctcctgtc

SEQ ID NO: 35122 - DNA, 201 bp, Homo sapiens
caggtgatccacccgcctcagcctcccaaagtgctgggattacaggcgtgagccaccgcacccagccacccgctcttattttttaagaacaattttctatsgtatagtcaaagccgtaaatcaagcttgtaaatgctccacgttgatttagcaggtatatgtgagaggcctaataaaatccagttttcttttttattgctc

SEQ ID NO: 35123 - DNA, 201 bp, Homo sapiens
cttttaatcttgatctaacctctttatatgtgataaactactgattatcattagcatagataatccagaagttcactgaaaacactcaactctggtctcayccacttttttttttttttttgagacagtgttttgctcttgtcgcccaggctagggtgcaatggcgcagtcttggctcgctgcaacctccgcctcccaggt

SEQ ID NO: 35124 - DNA, 201 bp, Homo sapiens
gaccttacatgcttgacgagctcaagaacttttatctctggtccacttttacccatggtgcctagcactgttccaaaatgctattttgactttttttttttccagcatatcagatcacagggtatctggcacaagtgtcagcaatttccattgtcttttctctgaactaaatgatgtctcagcagcaagctggcatcagag

SEQ ID NO: 35125 - DNA, 201 bp, Homo sapiens
ggagtctcattgtgttgcccaagctggttttgcacacctgacctcaagcactcagcccaacttagcctcccaaaatgctaggattacaggcatgggccacygcaccaggcccattcttttaatcttgatctaacctctttatatgtgataaactactgattatcattagcatagataatccagaagttcactgaaaacact

SEQ ID NO: 35126 - DNA, 201 bp, Homo sapiens
aaatacaggaggcccagctaaatttgaatttcaggtaaacggtgaatttttttttttttagtataagtatatcccatgccatatttgggatatacttatgytaaaaatacttctccgttatttatgtaaagtgcacatttaactgagcagtcctgtatcttatctggcaaccctatttgatggaaataaggttacagagaa

SEQ ID NO: 35127 - DNA, 201 bp, Homo sapiens
cgtcactgttttagctgccagacatccagtggtgaacaaagcagactaaaaatacttgccttcatttaacttccagtgtaaggaccaagtttcaggggatrgggagctggtagagacagacaatgaacaaataaataaaatatatagcatgttagatggcacggctgctggatttagcaaataaaaatacaggaggcccag

SEQ ID NO: 35128 - DNA, 201 bp, Homo sapiens
ttagccaggcagaggttacagtgagctgagatcatgccactgcactccagcctgggtgacagagtgaaactgtctcaaatttaattaaaaaaaaaaaagaagaagaaaagaaaatctttaatttgtgaacaaaagtggaactttgggtgagtgcttaaattttagcagcctccagagtttcctgatgttactccctagaga

SEQ ID NO: 35129 - DNA, 201 bp, Homo sapiens
aaaaaaaaaaaaaggcaagagtgttagatcaagtatacaacaattttggctgatatgaaacacatgcacagcactcaaaagataaagctaaacctcttcarattgcacaggtatttatcaacctgagagacagcatttttggcatctagctttgttcagtagatcctgttatttctctgttattaaggaagagatcatttt

SEQ ID NO: 35130 - DNA, 201 bp, Homo sapiens
ctctgcctgtccaaagaaatgcattttcactgtctttcagatttttggagtcgttaactgggagagcttcagaagattgactttactagtttacctttcaratttgtgattaagggctgggtgtgtgtgtgtgtgtgtgtgtgtaagtgtgttgggggagggaggagtctgagaaagtgagcaagtacgtagaaacttttt

SEQ ID NO: 35131 - DNA, 201 bp, Homo sapiens
cctctgcaacacaaataagaagcttagaataatttgccatttgaactttccttatatagttagatactttgtagagaaacctaggctaggagttggtgatwttttttgggtgggggggtcgcttttttccccctttctcattttattcatttgactatcggcaactttacgattttttaaattgtagtaaaatacacataa

SEQ ID NO: 35132 - DNA, 201 bp, Homo sapiens
tgggtaaagaacaaaataaatatttgtaggtggtttaaaaggagaagtatgttggttgtaactctgcctgtccaaagaaatgcattttcactgtctttcaratttttggagtcgttaactgggagagcttcagaagattgactttactagtttacctttcagatttgtgattaagggctgggtgtgtgtgtgtgtgtgtgt

SEQ ID NO: 35133 - DNA, 201 bp, Homo sapiens
gaatgtggcacatcgaatagagttaccagttgccctgatctgactgatttcgtataaatgtctttgctttggcaacagttgagacctattccttctctgargtaaatcttcttgcagagcaggaagttgaggttttggggtagagtccaagagtcagttctgaccttattattggggaatgtggaaacctaaagccttcca

SEQ ID NO: 35134 - DNA, 201 bp, Homo sapiens
cgaaggcaaagctgcactggatggtctgttcatatatctgggtatttttttccacaggataactttctaaaggtagaattgattgttcaaaatgtttacamatcttaccagaaatgttagacctatttggatatatataatattctgcaacatataagaatgctagttgatagttgctatcctgtatattaactttttaaa

SEQ ID NO: 35135 - DNA, 201 bp, Homo sapiens
ggactcagtgcccagcttgcaaatgaactcttcttattttctttctttctagaggcattccacagtggtatatgataggattcccttttccatgtcttctrtgtacaggcaaagtcgtgattaaatccttcattgggatggaaatcaggaggtcagttggaagattgtcaagccaagatgattctttctcttccggtccta

SEQ ID NO: 35136 - DNA, 201 bp, Homo sapiens
gctcttaaagtccctgcatggttggaggcccggcagtctggagcagcatggtagcctgatctctctctttttttttttttttttttttgagatagagtctytctgttgtcacccaggttggagcacagtggagtgatctcggctcactacaacctccacctcccaggttcaagcgattctcctgcctcagcctcctgaata

SEQ ID NO: 35137 - DNA, 201 bp, Homo sapiens
ctttttttctttagaaattacccagtcttggtatgtctttatcagcagcgtgaaaacaaactaatacagccggttaatatccctgcagttccctccacccrcatctcttccctccacccacatctcttccctccctcctctgtagcatccatcacaggactaaagccagacaaggctccgctggcacaagcagagcaattc

SEQ ID NO: 35138 - DNA, 201 bp, Homo sapiens
caaaggaacattttagggtgatgcagatagtcattatcttcattttggtgatcgtttcataagtatatccatatatcaaaacttaccaaattgtacacttyagatgtgtgcagttttttaaaattttttatttccataggtttctggggaacaggtagtatttggttacatgagtaagttctttaatggtgacttgtgaga

SEQ ID NO: 35139 - DNA, 201 bp, Homo sapiens
gtaggagaatggctagactgacagccctgtgatttggcccttttcctttggaggggtgtgaatctgatgctgtaacaatttctgccttctgttggtggtayggcttggccgtgtccccacccaaatctcattttgaattgtagctcccacagttcccatgtgttgtgggaagaacccggtgtgagataattgaatcatggg

SEQ ID NO: 35140 - DNA, 201 bp, Homo sapiens
tgccactatgcccagctaatttttgtattttttgtagagatggagtctcattgtgttgcccaagctggttttgcacacctgacctcaagcactcagcccamcttagcctcccaaaatgctaggattacaggcatgggccactgcaccaggcccattcttttaatcttgatctaacctctttatatgtgataaactactgat

SEQ ID NO: 35141 - DNA, 201 bp, Homo sapiens
atcatgtcccagctccatcatctgccattgtgtgatgctggtcaaatcatccaactactctttgctccagtttcctcatcagtaaatggatataaaaatargacctacttcatagtattgctgtgaggattacattagttaattgtgcagtatagtgcctgaaccataacaaacacttcataagttgggggtatttttgtt

SEQ ID NO: 35142 - DNA, 201 bp, Homo sapiens
aggcaacatttgggcacaaaaacaggaatgcccgttcccatttagggccatgggtttccagacttgagggtggggcttttgccaaggaaccaccctcttckacccagtatttccctgcctcctgtccatgtcatttgtacaagaaaacatttttctcccagtaaagcttatcagttttcacagaataattgtcagccccta

SEQ ID NO: 35143 - DNA, 201 bp, Homo sapiens
atgaagatacgtgtgtgtgtgtgtgtgtgtgtgtgtgtgcgtgcgtgtgcgtgcgcgtgcgcatgtgatgaagtctcactctgttgccccggctggagtayaatagtaccatcatagctcactgaagcttcaaaatcctgggttcaagcaatcctcctgcctcagcctcccaagtagctgggaccagagattcacaccatc

SEQ ID NO: 35144 - DNA, 201 bp, Homo sapiens
ggggattttattgcctcatcaaggtggctctcagcaggatggagtgggaagatgatcttcccctggagttcagccatcctgaagccaatctcctctctcascattcctagccaaactcctctcagcattcagatgttccttctcttctctcctctgctcctctgctcttctgctcctctgctcttctgctcatggagcctg

SEQ ID NO: 35145 - DNA, 201 bp, Homo sapiens
acatcacagtctctattataattctgaaaggaagtagctttttcctctttttattgaagagaaacaaatgccaaacagggggtgaataaagtacaagttakagcggtaagtggtaaagtcaatatttgaacccagggctctctatctcctaagcatatgtgcttttaacctccctgtcccctcttgagcataatgaatatg

SEQ ID NO: 35146 - DNA, 201 bp, Homo sapiens
gtcagttccttatgggcttccctaagtcagtgctggagagcaaaaagagtgttgaggcctcccgagaacgctagaatgaccccacatccctctacatcagytttagacccacagcagcctcctaggtcttctaggtggaggctgagatagagatgttctatcctgaatatgttcagacaagccaggggcactcatataggt

SEQ ID NO: 35147 - DNA, 201 bp, Homo sapiens
cagaatgagactctgtctcaaaaaaaaaaaaaaaaaaaaaaaaaactgaaaatggacttgccatgggacccagcaactgcagtcttttgcatttatctcaracaaatgaaaactgttttcacccagaaacttgtacatgaatattactagcagctttgtttgtaagagccaaaagctagaaactacccacatgtctgtcct

SEQ ID NO: 35148 - DNA, 201 bp, Homo sapiens
attggaagccagtcttctttcaaatgtttcacatggaataatcgtgaatatttttgcatggatgtgcaattaattgcaaagtatgtatgtatactttaggyggaaacttaaaaaccttcctttgccattctcataaatgggcttgctgatctgcctattatagattatggtggccaaagcaccacccttctattaaaaagt

SEQ ID NO: 35149 - DNA, 201 bp, Homo sapiens
tgggcaacagaatgagactctgtctcaaaaaaaaaaaaaaaaaaaaaaaaaactgaaaatggacttgccatgggacccagcaactgcagtcttttgcattwatctcagacaaatgaaaactgttttcacccagaaacttgtacatgaatattactagcagctttgtttgtaagagccaaaagctagaaactacccacatgt

SEQ ID NO: 35150 - DNA, 201 bp, Homo sapiens
aagggagagaccttcctatttatatggcgagaaaataaatgagatttctttctatctgtcttccatatgtttaatggtaggaatgtgtcttggatcttgarttaaaacagactgtggattcagttagttgatacaattaagaactgttcttatctcagaatcaactctgcagactatctcagagaatccaatatcaaccat

SEQ ID NO: 35151 - DNA, 201 bp, Homo sapiens
gggccgggtgcggtggcttatgcctgtaatctcagcactctgggaggccaaggtgggcacatcacaaggtcgggagatggagaccctcctggccaacatgktgaaaccctgtctctactaaaaatacaaaaatcagccaggcatggtggtgtgtgcctataatcccagctactcgggaggctgagacaggagaatctcttg

SEQ ID NO: 35152 - DNA, 201 bp, Homo sapiens
aattagccaggcagaggttacagtgagctgagatcatgccactgcactccagcctgggtgacagagtgaaactgtctcaaatttaattaaaaaaaaaaaaraagaagaaaagaaaatctttaatttgtgaacaaaagtggaactttgggtgagtgcttaaattttagcagcctccagagtttcctgatgttactccctaga

SEQ ID NO: 35153 - DNA, 201 bp, Homo sapiens
tgaatctgtaatctagaaagcaaccaacaaatggccaatgcagcatgagtctcaatgtcccaccagcctcactcaattccccttgaatctttttgtcaccrgaagttctgagtagtttatgtcccaatgtggatgattttctaggttctgccaatgcagaggattattctaggttatacaggttattctaaagaggcccga

SEQ ID NO: 35154 - DNA, 201 bp, Homo sapiens
aaaaattagccaggcagaggttacagtgagctgagatcatgccactgcactccagcctgggtgacagagtgaaactgtctcaaatttaattaaaaaaaaaraagaagaagaaaagaaaatctttaatttgtgaacaaaagtggaactttgggtgagtgcttaaattttagcagcctccagagtttcctgatgttactccct

SEQ ID NO: 35155 - DNA, 201 bp, Homo sapiens
aaaagcacatggatgtcagctgttctatatttcttttgctgaccaactaagagggcaaattcttaactgaatgaagcatttgccctacatcaacttggaayagatttaaaagaagagagtatgactattactaaacatggagataagttagtgggggagggtatgtgtctccttctaagagatctttaaaattatgagcaa

SEQ ID NO: 35156 - DNA, 201 bp, Homo sapiens
gttaaggcagctctgccaccagcaccttttcaaatgccttttgcaccaccttctgaatagattgtcttaaacttctcagacatgactaattacaagtggcyggttgatcctataataaccgatttgtctggtctggctataagattagagaaaattatgctcttaatgcagagtgtggaaaaacagaatggtatgtaatgg

SEQ ID NO: 35157 - DNA, 201 bp, Homo sapiens
gacgtcactgttttagctgccagacatccagtggtgaacaaagcagactaaaaatacttgccttcatttaacttccagtgtaaggaccaagtttcaggggrtagggagctggtagagacagacaatgaacaaataaataaaatatatagcatgttagatggcacggctgctggatttagcaaataaaaatacaggaggccc

SEQ ID NO: 35158 - DNA, 201 bp, Homo sapiens
tcgacctcctgaggtcaagcagtcctcccccctcagccccctcggtagctaggactacaggcacttgtcaccacaccaagctaaattttttctttcatctyttgtggtaatgggagtctccctatgttggccaggctggtcttgaactcctggcctcaagcgatcctcctgtctcagcctcccaaagtgctggggttacag

SEQ ID NO: 35159 - DNA, 201 bp, Homo sapiens
aaaaaaaaagaagaagaaaagaaaatctttaatttgtgaacaaaagtggaactttgggtgagtgcttaaattttagcagcctccagagtttcctgatgttrctccctagagatcaacaattcactttttccctcctttactgatacttttctttgtgccttgttatagaattatatttattatagaaaaccctgaaataga

SEQ ID NO: 35160 - DNA, 201 bp, Homo sapiens
gagcttgaaaactgagggatgctgtaggattctgcggcctgctaaccgattatgtgtattaatcagataggctaattgttgtaaccaccctctaatcttgrtggctttgcatgattaaggttaattgttcactcagacacagcacagtgtgatttctgtggccaggtggatttcctgggtggccgatgaggctcctcctgc

SEQ ID NO: 35161 - DNA, 201 bp, Homo sapiens
tgtgaatatgctaaaaaccactagattgtgtactttattttatttaattttatcttattttatttatttatttatttatttatttatttatttatttattkgagatggagtctcgttctgtcgcccaggctggagtgcagtggcaagatcatagctcactgcaacctctgactcctgggctcaagcaatcctcctgcttca

SEQ ID NO: 35162 - DNA, 201 bp, Homo sapiens
caagcagttctcctgccttagcctccctagtagccgagattacaggcaggtaccaccacacccggctaatgggtatggagttttattatgggatgaaaaaratgatctaaaattatctgccatgatggcacgagcctgtgaatatgctaaaaaccactagattgtgtactttattttatttaattttatcttattttattt

SEQ ID NO: 35163 - DNA, 201 bp, Homo sapiens
ttcccccaaatactctattgaaagggttgataatgaggcactgtgggtaaagcaaggtagcaacccaggtgcttgtatctgtagaagctctcatattctcrtggattccaccctggcccttcaggaactctgggaaatatgccatggttttgctccctctgggataaaaggggtgagcagatacatgttacacttttcact

SEQ ID NO: 35164 - DNA, 201 bp, Homo sapiens
ccaaatgtccatcaactgatgagctaatacacacaatgagatctatctaaacaatgatactaatacatgctacaacatggagtaatcctaaaaacattacrctatgggaaaaaagccagccagaggaccacctgttacatgattccatgtatatgaaatgtcccaaataggcaaacccataaagatagagaaactacacta

SEQ ID NO: 35165 - DNA, 201 bp, Homo sapiens
acacaaaaactcatacatgaatgtttacagcatcactattaatagttgccaaaaagtagaaacaacccaaatgtccatcaactgatgagctaatacacacmatgagatctatctaaacaatgatactaatacatgctacaacatggagtaatcctaaaaacattacgctatgggaaaaaagccagccagaggaccacctgt

SEQ ID NO: 35166 - DNA, 201 bp, Homo sapiens
aagaaaaaaagatgaaggaaggaaggaaagatggaggggtggaggagggagggaaggatggaaggaaggaaggaaggaaggaaggaaggaaggaaggaagraaggaacttacttgaattggcattttccttttcctatcacaactatgccttcagctttcttctaattaccatctaagtccttataataaggacttataaa

SEQ ID NO: 35167 - DNA, 201 bp, Homo sapiens
caggcatgagccaccacagggtacttactgttttatgggtaaggattatgatgatgaatggttgcctagaaggcctacatgctgagtttatctgggagtgrcatttattcctcaaagcgtatctttttcataatttcaatttttatttgggattcagggggtatgtgtgcaggtttgttgcctgggcatatttcatgatgc

SEQ ID NO: 35168 - DNA, 201 bp, Homo sapiens
ttatagaatcaaataaattcatagagaaacagtaggggcattttttatttttgagacagggtctagctctgtcacccaggctacagcacagtggtgtgatyatggctcactgtaacctcctcctaccaagctcaagcaatcctcccacctcagcccccaagtagctgggactacaggtgcatgccaccacaccaggctaat

SEQ ID NO: 35169 - DNA, 201 bp, Homo sapiens
ccatagaccttggaggtatcaggggtcttgctgccctcttctgccttatagaatcaaataaattcatagagaaacagtaggggcattttttatttttgagrcagggtctagctctgtcacccaggctacagcacagtggtgtgatcatggctcactgtaacctcctcctaccaagctcaagcaatcctcccacctcagccc

SEQ ID NO: 35170 - DNA, 201 bp, Homo sapiens
tgtatgaagtacttagggtagtcgaattcagagacagaaagtagaatggtgattgccaggggctgggagaggggagatggggatttactgttcaatgggtrtgcagtttcagttttgcaaggtgaaaagtgttctggagatgggtggtggtgatgatcacataacaacatgaaaatacttagtgccactgaaccggacgct

SEQ ID NO: 35171 - DNA, 201 bp, Homo sapiens
taagcatcttgacaacatgcgggagacttaggggcagagaaggaccatttctcagaagaataacccctcagctcagcacagttgtgtcatctgtccaaggyagcactttagcagtttcctaaatgagggagggtattcatgtgtgtatgcatgtatggtgtctgtgtgtgcacacgtgtacatgtgctcacgcatgttata

SEQ ID NO: 35172 - DNA, 201 bp, Homo sapiens
tatttaagaatacactactattaagaacctcagatatggaagttcatgaaagatacttttatttaataagacatgaagggaaatttagcgtcactgatggyatccttctctctcctcaccgcgatctcttccagttaactgctgaatgcaaatcaacagtagagcgggacgtattttgcagttcagttattgatttttagg

SEQ ID NO: 35173 - DNA, 201 bp, Homo sapiens
aatgagactccatttcaaaaccaaacaaaaaaaaggtgggcatggcggctcatgtctgtaatcccaacattttgggaggatgagagggaggattgcttgartccaggagttcgagaccagcctgggcaatatagtgggaccccatctctacaaaaaaataaaaattagctgggtgtgatggtgcagacctgtggtcccagc

SEQ ID NO: 35174 - DNA, 201 bp, Homo sapiens
ctgtttgcagcatgggaatccccaccactcacaaacccagaggcctgtgggactgagatccgcagtgaggagtgaggtcccctctcttatctcaggctcaygcaaggacactcactcatgggagataacagcacaggcaatgcccatgccatatacattgttctcctctctctccttttcctgttttgaactaacaaatat

SEQ ID NO: 35175 - DNA, 201 bp, Homo sapiens
aatatgatgggggatgtgatatggtatgaggatggggtctttcaaactgtattgtgtagaccagtagaccatgacaaataggcgcgcgcacgcgcgcgcgvacacacacacacacacacacacacacacgggcttccatgttcttacaaatgttgcacactatatctgactgtgggatcacagtgtacgtttgtataccaa

SEQ ID NO: 35176 - DNA, 201 bp, Homo sapiens
cattactttttccactgacaatcagataaattagccagcatgtatttaatagtgtaagaatatactgtttgcagcatgggaatccccaccactcacaaacscagaggcctgtgggactgagatccgcagtgaggagtgaggtcccctctcttatctcaggctcatgcaaggacactcactcatgggagataacagcacagg

SEQ ID NO: 35177 - DNA, 201 bp, Homo sapiens; identical to SEQ ID NO: 5577

SEQ ID NO: 35178 - DNA, 201 bp, Homo sapiens
gtgttacattgaatattgcattgttacttgtgtctatgccctttttatttcctcagtggttagttttgggaagggactattatcatccttgctttaaactktaaactaaatcccccccatggttatcttggcttatgtgtgggaatgagcaaagatagtcagcttgagcggttagaagcaagatggagttagttagctacg

SEQ ID NO: 35179 - DNA, 201 bp, Homo sapiens
caccagacctgaccttggggttttattatttgccttcgagccccttcagacagttcttcttggaggtttggggaaggcttctgtaaagaaaacttccttayacctgtttgatgatggtaaaaggtccaggtggagaaagacttcctaggcagaaggaaaaggaagtgcaaagctatgtagcctctacaagagcacatgtgt

SEQ ID NO: 35180 - DNA, 201 bp, Homo sapiens
agtgatttgctgtgcaattacaaacccgagacaatttgtaatacaaagagcttttcatgagatcttacatttttttatgaatatattttcgtttaccatgrttagtctcctaactggttaaattgcttccagagagtcaaaatttgactctatgtaaagtgacatcagaaagtctctaatttctgggccgggcgcggtggc

SEQ ID NO: 35181 - DNA, 201 bp, Homo sapiens
ctatccagactgcatgacttatatgcaagaaactcagtattgtgacagaccttcaattttaaactaaagaaaatgcatggagttctgatatcagaagcttscaattacaaaattaagatcagtgttacatatggcactgagagttacattccaaaggcaaaactcaaggccgcaatgcttgagttggacaaaattaccctt

SEQ ID NO: 35182 - DNA, 201 bp, Homo sapiens
atgtaatgaaacctgttgaccagactggaagcagaaagaaggctggtctagccctaaccagcattgttcttgtggccagcgatggaatcccaggactcccytctgccatttccctcttagcagagtctcatttagtctctacataaatgagacctacctatttcttgcatttcttaatattactgtcttctgcatgtacta

SEQ ID NO: 35183 - DNA, 201 bp, Homo sapiens
catgccacaagcacatgccatttttttttcttatttatgttattttattttttgagacagggtctaacactgtcaccccgggctggagtgtagtggcgcartcacaggtcactgaagcctcaacctactcaggctcaggtaatcctcccacctcagcctcccaagtagttggtactgcaggcagacgccaccatgcctggc

SEQ ID NO: 35184 - DNA, 201 bp, Homo sapiens
atccacctgccttggcctcccaaagcactgggattacagatgtgagccactgcgcccagcctgttttgaattttaatgctgatgctctcctttgttggacratgtaatgaaacctgttgaccagactggaagcagaaagaaggctggtctagccctaaccagcattgttcttgtggccagcgatggaatcccaggactccc

SEQ ID NO: 35185 - DNA, 201 bp, Homo sapiens
taatttttgtatttttagtagagacgggatttcaccatgttggccaggctggtctcgaactcttgacctcaagtgatccacctgccttggcctcccaaagyactgggattacagatgtgagccactgcgcccagcctgttttgaattttaatgctgatgctctcctttgttggacgatgtaatgaaacctgttgaccagac

SEQ ID NO: 35186 - DNA, 201 bp, Homo sapiens
tgtcagatgagaagccacctgactcagtatctctgatgcagcgtgtctctttcctggtggccttgcaggtgacatgccctgaacgaggccatccagggagmcttcactcccttcctcacagatacaaaaaggcaagccaagcatgtgggtacctggagtgcatatagcccttttgttctaaaagcacccagactcttatcc

SEQ ID NO: 35187 - DNA, 201 bp, Homo sapiens
ttcttcccatttttaaaactctcaaatcaaatctcctgtttttctcctgttgtttcaaatttatcagtagttatttcaatgctaagtggttttttttttttggaggtagaaacaaatcagaaaagcaagcacaaataatttaatgctacatctcgggagtttttaaaaaaattttattacaaaagtaaccatggatattct

SEQ ID NO: 35188 - DNA, 201 bp, Homo sapiens
ttctttagttttgtgtcatgaggctactaattttttattcctcagtggtaactttatgaaatctcttagacttgcagcaatcaagcctctcccttctatcrtgggctttaactatgcaagcagtcagcccattacagttttttcacagactggttacattcagcccgagtttgaaccagggccatttgggggcatttggag

SEQ ID NO: 35189 - DNA, 201 bp, Homo sapiens
aaacccaattaattttttgtgtgttttttgtaaatacggagtctcagcatgttggccaggctggtctccaactcctggcctcaagtgatctgcccgcctcrgcctcccaaagtgtcgggattacaggcatgagccaccatgcctgacttagctttcatttgatgagaatattaattatttcaaattgctcataaatctgca

SEQ ID NO: 35190 - DNA, 201 bp, Homo sapiens
cctgcaaatcccactgcctctattcaggctgccgaggcactgctttaattttttgaaagattcaccgcgtcttcttggatttcaagaaaaatcccgttaaraattgaggggctctcttcttcccctcctgatgtgagtgtaactcacttcctggtatgtctcctttccttttggcctacatcctttgtctgttaggtgctt

SEQ ID NO: 35191 - DNA, 201 bp, Homo sapiens
ggacaccagagcaaggggattggggtcacaaccaaaggctgcgggacatctgatttgggctgctgcatctcctgctacagtgtttctctctctctctctcwcacacacacacacacacacacacacacacacatacttttctcccaccctcctccccactcttcctagcattaatactttaaagacaaatacacaacagta

SEQ ID NO: 35192 - DNA, 201 bp, Homo sapiens
tcccctttcttcagagccaaaggagaaaaataaattgtcttcaaatataagtgcatcactcattgcatgatccaccctttacagacctaaaggggcaatgyacgctctcctggagtatgtcaatgggaagttgagcatgaatagccctgcatttagtaaatcagaagttatttaactactcggaacctagatgttcctatg

SEQ ID NO: 35193 - DNA, 201 bp, Homo sapiens
tcttctttgtggtttgtgggttctttgttttttgttgttgttttgtggctcttctttatggcactgaaagatactccaggctcatcttctacatttcctgycacaatcctaaaatcaaccatctctctaaggagttctaaaccaagatgtgttctttgctactgaggtgttgcttcttttttttttttttttttttttttt

SEQ ID NO: 35194 - DNA, 201 bp, Homo sapiens
agcccaattatgttatctaagtgaaatgtttaagaatgtctcctaaaacatggctacctatttgactttaatgtgtttttgctgttttattaattgatgtraagtcccctataagtataaatttaagggaatttctcattgagtgctatgtgcctgacatgtattaatgtctcttcaatactctttgacatatgtagtttt

SEQ ID NO: 35195 - DNA, 201 bp, Homo sapiens
actcctgaccttgtgatccgtccgcctcagcctctcaaagtgctgggattacaggcatgagccaccacacccagccaagtccagctaattaaaaaaaaaawaaaaatcgtagagatggggtctccccgtgttgcccaagctggtgtcaaattcctgacctcaagcaatcctcccacctcggcctcccaaagctctatgatt

SEQ ID NO: 35196 - DNA, 201 bp, Homo sapiens
actgctgttgtgctgatttcttggataggagcccgaggttatcatgtttccctaacaatgctcaatcttgcccctattcagcgactgactgtttagaaaascctggccttcttgggttgcccatgaacttgaccccttagatactggcagtgaagagcttgagttaaaaaaggagttgaaaaaaagtgtaagcaggtgact

SEQ ID NO: 35197 - DNA, 201 bp, Homo sapiens
accttgaagtcctggactcaagtgatgctcccacctcagcctccctagtagctggaactactggcacatgccatcaagtccagctttttttttttttttttctgagatggaatctcactttgtcaccgaggccgtagtgcagtggcgcgatctcggctcacagcaacctctgtctctcaagttcaagtgattgtcctgcct

SEQ ID NO: 35198 - DNA, 201 bp, Homo sapiens
agcctgtccaacatggtgaaaccctgactccactaaaaatacaaaaattagccaggcatggtggcatgctcctgtaatcctagctactgaggaggctaagrcaggagaattgcttgaacccaggaggcagaggttgcagtgagccaagatcctgtcactgcgctccatcctgggcaacagagcaagacttcatatcaaaac

SEQ ID NO: 35199 - DNA, 201 bp, Homo sapiens
aaccttgaagtcctggactcaagtgatgctcccacctcagcctccctagtagctggaactactggcacatgccatcaagtccagctttttttttttttttttctgagatggaatctcactttgtcaccgaggccgtagtgcagtggcgcgatctcggctcacagcaacctctgtctctcaagttcaagtgattgtcctgcc

SEQ ID NO: 35200 - DNA, 201 bp, Homo sapiens
acaactcactggagcctcaaactcctgggctcaagtgatcttcccacctcagcctcccaaatatctgggactacaggcacacgccaccatgcccagctaaytttttaattttatttttttgtagaggcagggtctggctatgtttttgaggtcttaattccccaatgaacatgactagtatattccaggctggtcttgaac

SEQ ID NO: 35201 - DNA, 201 bp, Homo sapiens
gaaagggatccattctccttttccagagaattttctaggatcagtagcaaggcctggtgtccctactcatgctctttattgaatacaattcattttgagtracctttacttctcagtaatagttctttatttgtgaagcgcagtttgcaaacagcctaatcggcttctggcttctggttactagtattccacctgctttgt

SEQ ID NO: 35202 - DNA, 201 bp, Homo sapiens
tccggatttacctaaaccccacccaggtggcatttgcatagtaatgaaaaaccggtattttctagctgtgaatcacacttcaaatcctgagcggctgactgtcaggggtgcgtcaggcctgcttgctgggagaatggacgagctggttgtggagcgggcgggtcccgccacccgtgggctcagcactggactgctcccaga

SEQ ID NO: 35203 - DNA, 201 bp, Homo sapiens
ctaattttctgaaggctttgaatggaatgaaaactgcctgttcaaatggttctgaggatactgagagacgctcagtgtgtggtctttttatttttagtaayagtgttggaaaaaatcaggttatgtttacgctgagtgtgtggggggcgctggtgagattgtgtagtctagaaaaggctagaattataaattattataaac

SEQ ID NO: 35204 - DNA, 201 bp, Homo sapiens
tctcaccttgcagggctgctcatctgaatcctgaagatggtggacacccatctgctaggactgaaatgaataggacagagggaggtgcagagtgaatggaycatactacctgtcatcttggcaacgtgtgattgaataaaacaacttctttagaagtttgatagagtgatttgataatgtaatttacaagtgatcatttct

SEQ ID NO: 35205 - DNA, 201 bp, Homo sapiens
atccggatttacctaaaccccacccaggtggcatttgcatagtaatgaaaaaccggtattttctagctgtgaatcacacttcaaatcctgagcggctgactgtcaggggtgcgtcaggcctgcttgctgggagaatggacgagctggttgtggagcgggcgggtcccgccacccgtgggctcagcactggactgctcccag

SEQ ID NO: 35206 - DNA, 201 bp, Homo sapiens
catccggatttacctaaaccccacccaggtggcatttgcatagtaatgaaaaaccggtattttctagctgtgaatcacacttcaaatcctgagcggctgactgtcaggggtgcgtcaggcctgcttgctgggagaatggacgagctggttgtggagcgggcgggtcccgccacccgtgggctcagcactggactgctccca

SEQ ID NO: 35207 - DNA, 201 bp, Homo sapiens
tagcagcattattcacaattgccaagggataggctcggcacagtggcttatgcctgtaatcccagcactatgagaggctaaggtgggcataatggatcacktgaggtcaagagttcgagaccagcctgaccaacataccaaaaccccatctctactaaaaatacaaaacttaactgggcgtagtggtgcatgcctgtaatc

SEQ ID NO: 35208 - DNA, 201 bp, Homo sapiens
acatccggatttacctaaaccccacccaggtggcatttgcatagtaatgaaaaaccggtattttctagctgtgaatcacacttcaaatcctgagcggctgactgtcaggggtgcgtcaggcctgcttgctgggagaatggacgagctggttgtggagcgggcgggtcccgccacccgtgggctcagcactggactgctccc

SEQ ID NO: 35209 - DNA, 201 bp, Homo sapiens
gaatggcgtgaacccaggaggtggagcttgcagtgagctgagatcacaccactgcactccagcctgggcaacagagcgagactccatctcaaaaaaaaaamaaaaaaaatgctacagagaaaggggacagctgccatggaaaacagtggggcggttcctcagaaaaaaataaaaatagaattatcatataaccctgcaatt

SEQ ID NO: 35210 - DNA, 201 bp, Homo sapiens
tacccaagttggttgactcaacagctgctaagactacagctgtgtgaatcctccacattttttttttttttgcctggaaaagtgtttcagtttgtcattgsttcatcatttcgaattccatattaggttacctttttttttttttttttgcctgaccatagtacttaagaaaaatcttgcaactgtccttcattctgttga

SEQ ID NO: 35211 - DNA, 201 bp, Homo sapiens
cctacttacccaagttggttgactcaacagctgctaagactacagctgtgtgaatcctccacattttttttttttttgcctggaaaagtgtttcagtttgkcattgcttcatcatttcgaattccatattaggttacctttttttttttttttttgcctgaccatagtacttaagaaaaatcttgcaactgtccttcattc

SEQ ID NO: 35212 - DNA, 201 bp, Homo sapiens
aagtaaattagcataaatcagcattctctgatttccacgcctacttacccaagttggttgactcaacagctgctaagactacagctgtgtgaatcctccayattttttttttttttgcctggaaaagtgtttcagtttgtcattgcttcatcatttcgaattccatattaggttacctttttttttttttttttgcctgac

SEQ ID NO: 35213 - DNA, 201 bp, Homo sapiens
tccaaatccctgagtccttgaattcaaggtcgtgtgttggccgtctttgtattaggacatctaactcttgtgtttgacttaatgggattcaaatttgcacrtgtgtggttttctgaatgtggcctacagtttcacttggatcttcatattctttttcatcataatctgtaaaagcagaaaaaaagaccattggaaagaaat

SEQ ID NO: 35214 - DNA, 201 bp, Homo sapiens
ccagcaataacttttctcctagattctttactgcttgttcgattccagatgcaagagatatagcttcacccgtgcttcctatcttcctgtgatttctctgytaccgcagagggtagtcaccaacctttagctcaaacactgatgccgaggctacgtacagagagatgctttaccagttactcaccttcctcactgggcatc

SEQ ID NO: 35215 - DNA, 201 bp, Homo sapiens
aactctccaggggggatgtcagatgagaagccacctgactcagtatctctgatgcagcgtgtctctttcctggtggccttgcaggtgacatgccctgaacraggccatccagggagccttcactcccttcctcacagatacaaaaaggcaagccaagcatgtgggtacctggagtgcatatagcccttttgttctaaaagc

SEQ ID NO: 35216 - DNA, 201 bp, Homo sapiens
gcctgccctgtgaactaatgaaatttaaccagtgtggtgcctccctcccatttagacttctctctctgaccaaactgcctctgttttccttccctttagasccccagaagctgtgcatgctccatgtccagcaataacttttctcctagattctttactgcttgttcgattccagatgcaagagatatagcttcacccgtg

SEQ ID NO: 35217 - DNA, 201 bp, Homo sapiens
tcaagcatctgaactctccaggggggatgtcagatgagaagccacctgactcagtatctctgatgcagcgtgtctctttcctggtggccttgcaggtgacrtgccctgaacgaggccatccagggagccttcactcccttcctcacagatacaaaaaggcaagccaagcatgtgggtacctggagtgcatatagccctttt

SEQ ID NO: 35218 - DNA, 201 bp, Homo sapiens
caggctctaaaatccaggttctttagattattttgagcctaacaaccaacttaggtttgacctgacttgaatcactctcttcctctaaaattccctgtacycttggctttgtccatacagaacctgtacatcaaattacaccaaatatcacaatcctgtagctttctcatggcaacgtaagtgcctttgatatgtgagttt

SEQ ID NO: 35219 - DNA, 201 bp, Homo sapiens
ccacccaggagagaatggcttcccctctactgtcaagcatctgaactctccaggggggatgtcagatgagaagccacctgactcagtatctctgatgcagygtgtctctttcctggtggccttgcaggtgacatgccctgaacgaggccatccagggagccttcactcccttcctcacagatacaaaaaggcaagccaagc

SEQ ID NO: 35220 - DNA, 201 bp, Homo sapiens
tgaaataggacaaaggccagggatactagataccttgcaaggcataggatagtctcatactgtgaagaattgtcacttgaggccgtgactttagaacatcyggcctgacattttggtggtgaaaaagtgtttttattaatagactctaaaaatatttttatataaacaaaaattaaatatatgctaaatttttcaggaatg

SEQ ID NO: 35221 - DNA, 201 bp, Homo sapiens
gccacaaaacccaattaattttttgtgtgttttttgtaaatacggagtctcagcatgttggccaggctggtctccaactcctggcctcaagtgatctgccygcctcggcctcccaaagtgtcgggattacaggcatgagccaccatgcctgacttagctttcatttgatgagaatattaattatttcaaattgctcataaa

SEQ ID NO: 35222 - DNA, 201 bp, Homo sapiens
tttctcttcttccatggcactttgctttcttccctttcaactttaaaacacacttcctaacatttcatcatgggagaaggctgcataagtttccagttgcygtaatttacttaaaccataaaattgtttccagattaccaaccataaaatggaaagacaatcttatttattaatgtataaatcagataatgtccccaatat

SEQ ID NO: 35223 - DNA, 201 bp, Homo sapiens
gaatattaactatttcaaagctctcataaatctattgcatcattttagtcttatatcaaagtaggaagggtggatattgagacacaaaattgaagatcaaygactgtgctgtggcatgggttgtccagtcaggacagtggccatacacagtggttggccatagtgaaaactggctgaatagtcaccctgtatatgacaggt

SEQ ID NO: 35224 - DNA, 201 bp, Homo sapiens
aagactcattcagacaggctgacttaagacattaaatgactagttaaccatatacactaatcacataaatatggtttgtggaatgatataaaatggtttaygaaatcatttttaagccatcttttcaacagtaattgtatcagtcctgtcatattttaaaccaagcgatattggcaagaatgagcctaaatgtctttaata

SEQ ID NO: 35225 - DNA, 201 bp, Homo sapiens
ctcccaagaaccaatgccttcttccagcctttcattcattcattctgtaagtgaaaactcagcgtggatgtggatgaagatattcatgcctttgtgatcaytacatttcagtgtgtgggtgcaaggggaaggagacagataagaagtgagcaaataagtaaagtatctagtgtgtctaggggttttaaatgttatggaggc

SEQ ID NO: 35226 - DNA, 201 bp, Homo sapiens
ataaccttgtgggggagacctctagtgtggccaaggatgttaggaggttgccgtggtttcagtgtgtcccccaaagttcatgtgttagaaacttaatcccsaatgcaacagtgttgagagttgggacctataagaggtgactaggtcatgaggcacaacccacaggaatgaattaattctgttatcttggaagcacgttcc

SEQ ID NO: 35227 - DNA, 201 bp, Homo sapiens
ggttaacttctggcagaaatagaaaggtcattgcttagagtcacatttgaagctttaccacaaattcagacaatttaaattcctttgttttgttgaactcrtctgaaaacagtctttaattactttgggtttttttttcctcataccagagtcagggcatgaacaaacaagggcatagcctcgctttaaacctgttcacta

SEQ ID NO: 35228 - DNA, 201 bp, Homo sapiens
ggccttccttgataataaccttgtgggggagacctctagtgtggccaaggatgttaggaggttgccgtggtttcagtgtgtcccccaaagttcatgtgttrgaaacttaatcccgaatgcaacagtgttgagagttgggacctataagaggtgactaggtcatgaggcacaacccacaggaatgaattaattctgttatct

SEQ ID NO: 35229 - DNA, 201 bp, Homo sapiens
aaatagaaggggcacaaggggccttttcttctcatttattaccctcctctgtcattcagaaagcaacgtcagtatagcatgggaacagcaaggctgaaaartagcccagatgcaatggggttcagttgggataatgttgaaagtattcagggtccaacctgggtaagaggcaggagaaatgaccagagactgttcagacag

SEQ ID NO: 35230 - DNA, 201 bp, Homo sapiens
ttattgccattctgcagatgcagaaattgagggtcatggtttagttgccccagtacaaagcctgatgctgggttaagtaatttattcaaagtaaaacagcrtcgaatgctgaatctacatcttgaacccaggtccttctgaccgcaggtccttcccatgggtatttagagatttgcaaaaagcacttagagctcctgccca

SEQ ID NO: 35231 - DNA, 201 bp, Homo sapiens
ctccccactagctgggactacaggtgtctgccaccacgcccggctaatttttgtatttttagtagagacgggatttcactatattggtcaggctggtctcraactcctgactttgtgatccacccgcctcggcctcccaaagtgctgggattacaggcttaagccaccacacctggacagcaagtcctcattctttagcag

SEQ ID NO: 35232 - DNA, 201 bp, Homo sapiens
tcttccgcagcctattgctccgtctccaccatccaggagtaccttattgatagcactgagcacagaggaaccccacagaattctggctgggctgtagccaycatgcccacccaagccaagtcatccgaagcctaggatcaggaagaaaggcatcagcatcactgactctcagcgcccgtcatggtgctcacgcacaaagtg

SEQ ID NO: 35233 - DNA, 201 bp, Homo sapiens
ccagaggttagtaggtaagaagcttgaagatgaggccagagttcagcattgagctgtcccaggtgacacagactggtgagggcaggcaggttggctgaacycagtccctggagcttggggccagaggaggttgcagctgtgtaagcaggtgggcttcagcccctcaggatagcaagtctcacagccagggatgcagatgct

SEQ ID NO: 35234 - DNA, 201 bp, Homo sapiens
ccaccctgggcgacagagtgagactctgtctcaaaaaaaaaaaaaaaaaaaagaggagcctggcccctatgaagaactgaaatgatgtatggcttgagcaragtgccaggtgcatggagggagggagattagccacaagggaagcgaccagattgcccagcgcctggagaatgggctgcagccagagagagcataggagga

SEQ ID NO: 35235 - DNA, 201 bp, Homo sapiens
cccggacccccctcacaggacgtgagacaggggtgtggctagtctatctggccacctagtgagcactcaaaccccttacaggagggggagcatgcagatgrgcaggtgcaggagccggggcaagtgcttttggactctggccccacagtagcatctaggggtgggtgcctgcaactctcaaagctgcagtgggcatgttac

SEQ ID NO: 35236 - DNA, 201 bp, Homo sapiens
ataggagtctggcggaggttgcagtgagctgcgatcacaccactgcactccaccctgggcgacagagtgagactctgtctcaaaaaaaaaaaaaaaaaaargaggagcctggcccctatgaagaactgaaatgatgtatggcttgagcagagtgccaggtgcatggagggagggagattagccacaagggaagcgaccaga

SEQ ID NO: 35237 - DNA, 201 bp, Homo sapiens
gccttctcaaattgttttcagttcctcttcttaaggaggaacaaaaggccagtaagtaatccaatagaagcttttccctatagaatggtcagaaagtttgrtcattcaaaagaacattattttaccataaatacatgtctaggtttcatgatccttaatgattcatgttaattctcttcccccaatgcctttttctgttgt

SEQ ID NO: 35238 - DNA, 201 bp, Homo sapiens
attaccgtgccatgcacgcacccatcagcagaattcactttcagagacgagtcgtaccggggactcgaacgctgtgaatggctggtaatgtgacttttccsaaatagcgaatgacttggttgaaagctttgaacaaagcagaatacgactctccctcactttacacgttcctgaaaaattttattgcacattttgaggctg

SEQ ID NO: 35239 - DNA, 201 bp, Homo sapiens
attctgggagatgggaatagcaggtgcaaaggcctggcaaataggagtctggcggaggttgcagtgagctgcgatcacaccactgcactccaccctgggcracagagtgagactctgtctcaaaaaaaaaaaaaaaaaaaagaggagcctggcccctatgaagaactgaaatgatgtatggcttgagcagagtgccaggtg

SEQ ID NO: 35240 - DNA, 201 bp, Homo sapiens
gtggttaatcaaccgatatgaacagtgctgacctgtagccctgccacatccccgcagtgagagcaagacaaggcacaggagagctgatcccaacacatatytaagcccatgggtcacagcaggtttcaaccatttagagaagaattttggattcttcattgttgcctgttcttatcaatgttactgattcattcagttcat

SEQ ID NO: 35241 - DNA, 201 bp, Homo sapiens
tggggaaattgatgaattgaattcagaagacctggttctaatcctaactgtgctctctaattgccgagcacaccctgagcatgtcctttgacttctcaggkcctcacttttcccacctttcaattttatgaattttaaatattccaccaataatttctagcatgatatccattgttaatatccactatctaaccagacccc

SEQ ID NO: 35242 - DNA, 201 bp, Homo sapiens
ccccaatgcaggccacttacagaagcttgaagatctgtgatttgctcacccaggctcccatgccgagtgttcttgtcattaactcaaaagccaaatgctgktatttctgttcttacttgcttgattgtttgtttaccagttctcaacatcttcagtgtccacttggttactaaaatgtttactccttagcccggtgtgtag

SEQ ID NO: 35243 - DNA, 201 bp, Homo sapiens
ccacgtgccagccggtgagctatgacagcttccctctttagtaccctcagcaggatcctgtaaggccccgctttctagacaggaggataataaagcctagrattgaaacagagcctctccctctcctcctcttctagtggagtaagtctagttgtgtttaaacattatgccccgttgtattttccaatatttcttatcctt

SEQ ID NO: 35244 - DNA, 201 bp, Homo sapiens
agaatggcgtgaacccaggaggtggagcttgcagtgagctgagatcacaccactgcactccagcctgggcaacagagcgagactccatctcaaaaaaaaamcaaaaaaaatgctacagagaaaggggacagctgccatggaaaacagtggggcggttcctcagaaaaaaataaaaatagaattatcatataaccctgcaat

SEQ ID NO: 35245 - DNA, 201 bp, Homo sapiens
ggaaactgttcaaactgaagtatagagagacaagagactaaagaaaatgaattaaaatgtagtgaccagtgagacaatattaataaaagatgaagtggaargagaaaaatattcaaaaaggtaatgactgaattttttccaaatttgatgaaagctgtaaatccacagaccaaaaaagctcagtgaacccctagaatggta

SEQ ID NO: 35246 - DNA, 201 bp, Homo sapiens
aaatgctgttatttctgttcttacttgcttgattgtttgtttaccagttctcaacatcttcagtgtccacttggttactaaaatgtttactccttagcccrgtgtgtaggcatgtgcctgtaatcccagctactcaggaggctgaggcagaagaatctcttgaacctgggaggtagagattgaagtgagccaagattgtgc

SEQ ID NO: 35247 - DNA, 201 bp, Homo sapiens
agaggtagaagaggcccgggggctagagcgcaccctggtggatagtgtgagaatttcacactggctcaagccttgaagaccaccccaggggtgcgccttarcaacgcacttatgcaagaccccaacaactggcccttgaaaggagcttttcactggtggggtgtggccctgcttgtattcagaaccatagttttaacaagc

SEQ ID NO: 35248 - DNA, 201 bp, Homo sapiens
agaggaaagactacccttgatttaacctaactgcttaaaaataagcctttaaaggacaaagctgatccacaagtaactggactgtctgccagagaaagtcsaaaatctgtaaaggaaaacaacaaaattcagagctccatgcccaatatccactcaaaaattactagacatgtgatgatgctgacaaatgtgacctataac

SEQ ID NO: 35249 - DNA, 201 bp, Homo sapiens
tgaaggaagtagaggaaggccaggtgcagtggctcatgcttgtaatcccagcactttcccagcactttgggaggctgaggcagaaagatcgattgagcccrggagtttgagaccagcctgggtaatatagcgagaccccgcctctacaaataattaaaaaaaaaaaaagaaataggattacgtgaaaaggagccagtcttg

SEQ ID NO: 35250 - DNA, 201 bp, Homo sapiens
gaactccgccttctacaattaccagtgggatgtgtgcacctgttgggcaccgcacaactcccctgaccttggaatcagattggacaacatttcctattcckctttgatttttctgcagtactggcattttaatcccagcaacctctgaaaacctcatgttgcaaaaatgacatcaacaagaagaatgcttatgatctaatg

SEQ ID NO: 35251 - DNA, 201 bp, Homo sapiens
taacaatttagtggccaattgaaaatacaatcacatcaattcaaaagaaaagatgtattttttcatttttaggtgatggctggttttatgcatcaacgtgsgtagggcatggggcctagatatttggtcaaacccctgactgggtattgctgtgaaggtttgttttttagatgagattaacatttaaataggtaagttttc

SEQ ID NO: 35252 - DNA, 201 bp, Homo sapiens
atcttctgacatgcataacaatggtcacgggaatgcggatccctgagaacagcatattggagtttcccatgtgcaacagacccgtgtcccctgccaagcaraaataataaacggaactagtacagggcttgacgattaggctgcttacaatgtgccaaggtctagtcagatcttcagacaacaagaagctttctaagatgg

SEQ ID NO: 35253 - DNA, 201 bp, Homo sapiens
tcctgggttcaagcaattctcctgcctcagcctcctgagtagctgggattacaggcgcccgctaccacacccggctaattttttgtatttttagtagagayggggtttcactgtgtcagccaggatggtctcaatctcctgacctcgtgatccgcctgccgcggcctcccaaagtgctaggattacaggcatgagccaccg

SEQ ID NO: 35254 - DNA, 201 bp, Homo sapiens
attcccaaataacggttgggtctgtaattagctagcaacaatgggaaagggttttgtcaaggttttgtgcctaacagatgttctcctccaatgatgattaygtttgcctgttacctttcctgatatcattttgaaaaaaagcccactttttctaaataatgaacatctttttcccaaaatgccacagtacttggattttac

SEQ ID NO: 35255 - DNA, 201 bp, Homo sapiens
ccaggaggtgcctgtctaaattagtgcaatatagctcctgccttggtacccatttttaggcctgacctaagtatttattgagacggagtcttgctctgtcrcccaggctggagtgcagtggcacgatcaaggctcactgcaacctctgcctcctgggttcaagcaattctcctgcctcagcctcctgagtagctgggatta

SEQ ID NO: 35256 - DNA, 201 bp, Homo sapiens
acctaacaatttagtggccaattgaaaatacaatcacatcaattcaaaagaaaagatgtattttttcatttttaggtgatggctggttttatgcatcaacrtgggtagggcatggggcctagatatttggtcaaacccctgactgggtattgctgtgaaggtttgttttttagatgagattaacatttaaataggtaagtt

SEQ ID NO: 35257 - DNA, 201 bp, Homo sapiens
agcacagacccaggaggtgcctgtctaaattagtgcaatatagctcctgccttggtacccatttttaggcctgacctaagtatttattgagacggagtctygctctgtcgcccaggctggagtgcagtggcacgatcaaggctcactgcaacctctgcctcctgggttcaagcaattctcctgcctcagcctcctgagtag

SEQ ID NO: 35258 - DNA, 201 bp, Homo sapiens
gatggtgttatctaactgtcctgtcccagtttgcaggcatggaaggagttcctaggatgtgtgactttcaattttaaaactgagaaaggcctggacaaacyaggatgagttgtcaacctgcatgggggcaatggatttggccatgaacttcatcatttcaaagtattaagttgttggcattctgaatgcccctgaacctat

SEQ ID NO: 35259 - DNA, 201 bp, Homo sapiens
gcctgggaggtggaggctgcagtgagctatgatcacaccactgcactccatcccagatgacagagcaagaccctgtctcaaaaaaaaaaaaaaaaaaaaaaggtgtgggggaagaaaattagtgaaaacaataccaggattatgaattaaccacaggaacaatctcaggaaactacttagatttttcacctcagaatgttt

SEQ ID NO: 35260 - DNA, 201 bp, Homo sapiens
ttgattataaagggtagttccctgctaagctgaaaatgctgtcttcgaacactttaggcatctgtttctacctaagagatgcattgtggagcccagtctayagcacctgccactggtcttcaatgtgttcagtatgtatcctgataatatatgaaacatcagggtccgctcacctgcttcaggtgctgtgtgtactccaac

SEQ ID NO: 35261 - DNA, 201 bp, Homo sapiens
agcctgggaggtggaggctgcagtgagctatgatcacaccactgcactccatcccagatgacagagcaagaccctgtctcaaaaaaaaaaaaaaaaaaaaaaggtgtgggggaagaaaattagtgaaaacaataccaggattatgaattaaccacaggaacaatctcaggaaactacttagatttttcacctcagaatgtt

SEQ ID NO: 35262 - DNA, 201 bp, Homo sapiens
agccagtataattgattataaagggtagttccctgctaagctgaaaatgctgtcttcgaacactttaggcatctgtttctacctaagagatgcattgtggwgcccagtctatagcacctgccactggtcttcaatgtgttcagtatgtatcctgataatatatgaaacatcagggtccgctcacctgcttcaggtgctgtg

SEQ ID NO: 35263 - DNA, 201 bp, Homo sapiens
gagcctgggaggtggaggctgcagtgagctatgatcacaccactgcactccatcccagatgacagagcaagaccctgtctcaaaaaaaaaaaaaaaaaaaaaaggtgtgggggaagaaaattagtgaaaacaataccaggattatgaattaaccacaggaacaatctcaggaaactacttagatttttcacctcagaatgt

SEQ ID NO: 35264 - DNA, 201 bp, Homo sapiens
aacgctgctacacccaaaagaaaaggaagatggaactgggggcctagagtgaattttttcaaaggtaaaaaggagcccaaatttcacagaatgatctcccrcttcagaaagggaaaccctctaagtacactatacacttccctgcctgttttctggagagtgataccgagtgttggcactgtctgcaaggaaggaagtagg

SEQ ID NO: 35265 - DNA, 201 bp, Homo sapiens
ggtggcttatgctttgtaatctcagcattttgggaggctgaggcaggaggatcacttgaggccaggagttccagaccagcctgcgcaatataatgagaccycatctctaccaaaaataaataaataaatttaagttaggtgggcatggtggtgtgtgcctgtagtcccagctactcaggaggctgaggtaggaggatggct

SEQ ID NO: 35266 - DNA, 201 bp, Homo sapiens
tctacttaaaatacaaaaaattagctgggtgtggaggtggacacctctattctcagctactcgggaggctgaggcaggaggatcgcttgaacccaggaggyggaggttgcagtgagccgagattgcgccactgcactccagcctgggcaacaagagcaaaactctgtctcaaaaaaaaaaaaaaagtaaaaacctttgatt

SEQ ID NO: 35267 - DNA, 201 bp, Homo sapiens
gaaaagatggatcattattcaagtaagatccaatatgggaaactcagatataaatagttcagcattttcgtttcttatcaaagatttatgactgtgtctaytttaggatttatttcttctggactatttcaggagccccttcactggtctttcagcctcaatttcctttcctccgcccctttgtttgtttctcccactgct

SEQ ID NO: 35268 - DNA, 201 bp, Homo sapiens
acgtggaaactttaagatctccatttagtcttctgcatacttcagagacttctgatgtctcctacagggacaggaaaggagtcaggggtctgaaactctargacctgaaaggcaagtgcaattcggtcactgtccacattgccagggtgtcaaatcacacataccctgcctgaaagtctgggaattggagaatttaaaatg

SEQ ID NO: 35269 - DNA, 201 bp, Homo sapiens
gcttggcagccgtcaggctgagagtgactcagcttaaaaggtttcattgttgatatctgccctgagcattcccctttggacttggagttccaggatgtctygtgtctgtgcttcagcatctgaagccccttgttgcctgttcttaaggtagactgcattatcaacggtgtcttaaattaatagcttctctctactgactat

SEQ ID NO: 35270 - DNA, 201 bp, Homo sapiens
ggaatcctgagcgcatcctggattagaaaaaaaaaagaagaaaggtggcctgaaatatgatctgagtatatctggaaatacgcagacatctagtacttcasttgcagcactctgtgaaccagaaggccaatttctacatgctacaagctgcacttcaagatgcacccaaaatgcatgctcgggaagttgttttttgttttt

SEQ ID NO: 35271 - DNA, 201 bp, Homo sapiens
taactctaaaaatggagaaacccattgctctgctgttttcatggtaaggaaaaactgctgagtcatgattgacatgggctgtttcaagagtttccacggartgaaggtaaacgcttaggatatcgcagcctgagtgagaggcactgcaaagtgtggccgctacttgaagttcttcatggtgagtggagagggaatcctgag

SEQ ID NO: 35272 - DNA, 201 bp, Homo sapiens
gaatcctattcttgttcaccatgccttcagcaagcacattttacagagcgtccacacgccggccaatagaactgcaggtgtgagcagttccattaacctgycctcaagccttagtgggagagatggcacagaattgctatataggatgtgaatgctcactcaagggacagagcatacaaggagaccagagaaacagaccat

SEQ ID NO: 35273 - DNA, 201 bp, Homo sapiens
ctcagtactgccaggcatgctcctgccttgggcagagtgtatatgtgtgagtgcacctgcccttcccacagcctagaacgttcctcctccagacagcacayatggcctgctctctcacttccttaaggtctttattcaaaagtgactttctcagtgaagccctgtctgctcaccctgcgtaaaatttcagctcttctttct

SEQ ID NO: 35274 - DNA, 201 bp, Homo sapiens
gaaaaaaagtatatgccaggtggtaataaatgctaggaagaaaaaataaaggagggttagaatggtgaaggtggtggctattatttatatgtaatgaaacwtgggcaaattctccatctcgctggacctcaaagttcccatatgttgattcaatgatctttgccaattcttaggttataaggttccactaatcttggtgtg

SEQ ID NO: 35275 - DNA, 201 bp, Homo sapiens
acgtccaacctcagctcagacttccccatggttcctatcacactcagggtcaaagtgagagtccctaagatgacacacaagtagggagaatgcccttctcrgctggactgggacagctccagggtatccctattgtccttgtacaatacttgcaatgaccaatggctcccctgtccactttctgaagtatgctggtgtgga

SEQ ID NO: 35276 - DNA, 201 bp, Homo sapiens
ggtctctccactcagtccctgccaccttcagcctgttctcagtggagggggccagagtgaccctgttaaaacatgagacctttcacgtccaacctcagctsagacttccccatggttcctatcacactcagggtcaaagtgagagtccctaagatgacacacaagtagggagaatgcccttctcggctggactgggacagc

SEQ ID NO: 35277 - DNA, 201 bp, Homo sapiens
tcccggacccccctcacaggacgtgagacaggggtgtggctagtctatctggccacctagtgagcactcaaaccccttacaggagggggagcatgcagatsggcaggtgcaggagccggggcaagtgcttttggactctggccccacagtagcatctaggggtgggtgcctgcaactctcaaagctgcagtgggcatgtta

SEQ ID NO: 35278 - DNA, 201 bp, Homo sapiens
tggctcctctccaaactcaaggctttgccaaatgccaccagctcagggaggcctttcctggccatgacacttgaagttgcaacactcccccgcagtctccygtgccccagatgtaagttccatgagggcaagccctgtgcttttaccaccatatccccagcatcttgagctgtgcctggcccaagaaatatttgttgaatg

SEQ ID NO: 35279 - DNA, 201 bp, Homo sapiens
aatggaactgtccagaatagtatttgtgaaatggcagagttcccggacccccctcacaggacgtgagacaggggtgtggctagtctatctggccacctagygagcactcaaaccccttacaggagggggagcatgcagatgggcaggtgcaggagccggggcaagtgcttttggactctggccccacagtagcatctaggg

SEQ ID NO: 35280 - DNA, 201 bp, Homo sapiens
ctaactgactggctcctctccaaactcaaggctttgccaaatgccaccagctcagggaggcctttcctggccatgacacttgaagttgcaacactcccccrcagtctcccgtgccccagatgtaagttccatgagggcaagccctgtgcttttaccaccatatccccagcatcttgagctgtgcctggcccaagaaatatt

SEQ ID NO: 35281 - DNA, 201 bp, Homo sapiens
gggttttctgatggtttctccacggattatcttcctcaaatacaatgttaaaaataataacttgtcactgtggccctcagtttggttgtgtttattataawgaagattgaacatatgaactgccaattgatgatggcccatgttcctggtctgtttaagtaacatcaagtcatctttgaatttaagaaatggtagcattct

SEQ ID NO: 35282 - DNA, 201 bp, Homo sapiens
taggggccttctgagactgtttcctctacagagtaagggttcgttcagccttttccgtggcctgccaagaactcaactccatgttccctcacttcctgtawttgaccttgtccaggactttctgaccttggagaattcacctttgctctttctgctgcttcgtgcattcttccaccaaatgtctaactgactggctcctct

SEQ ID NO: 35283 - DNA, 201 bp, Homo sapiens
tagatcactttgtgtactggacagttttctatgaataaatttttcattgacataaaaccatgaagccatagagttgtgccagcccttcggatctgaggggrgttgtgtccttattcctgacttggggctgtttcctggtcccatccagaacagcctacacagaaagtgaattgtgaaatagattaaaggctgcctggagcc

SEQ ID NO: 35284 - DNA, 201 bp, Homo sapiens
cagctggcagagtgtatgaactccacttgtgatttcaaaatcatgctgcagagctgtagctgggttttctgatggtttctccacggattatcttcctcaaatacaatgttaaaaataataacttgtcactgtggccctcagtttggttgtgtttattataaagaagattgaacatatgaactgccaattgatgatggccca

SEQ ID NO: 35285 - DNA, 201 bp, Homo sapiens
tcaatgttctgatttccaaagatcaaaatcttattttatgagcaaaaaatgtgactagatatgaaaaatgacaatcagtaatattcctccagctggcagaktgtatgaactccacttgtgatttcaaaatcatgctgcagagctgtagctgggttttctgatggtttctccacggattatcttcctcaaatacaatgttaa

SEQ ID NO: 35286 - DNA, 201 bp, Homo sapiens
acaggtgtgagccaccgtgtatggcctatttttatttttcaatgtattattattttagagatgtggtcttgctctgtcacccaggctggaacgcagtggtrcaatcatagctcactgcagcctcgaactcctgggcttaagcaagcctcccccacctcagcctcccaaaatttggggattacaagtgtgagccactgtgcc

SEQ ID NO: 35287 - DNA, 201 bp, Homo sapiens
tgtgaaacgacagtgtcaccttaatatccatttggacctcatttatgggaaaagccacctttcccacaccactatattttgtttgttacaatctctgtttktccttctctttcaaacatatttctcattagatttattccatcgcatattttcagcttgtttctgtgaagttccgacaggaggggtgttccaggaagctcc

SEQ ID NO: 35288 - DNA, 201 bp, Homo sapiens
aaggtaaattagctggccgtgttcagctggcccataacatgaagcaactgctattcctacctgtttgtacctgtgcaaaaaatgagatgtcaattccagarcacaaatgttccagattagcctcagggaagagaaagaaaatgcaaaacaggtgatttcataaagcagggtgtaggcttgccctggggagtggcggctcta

SEQ ID NO: 35289 - DNA, 201 bp, Homo sapiens
tgggtggatatagctgtgttacatgctgaatcctgctacccactgtgcaatggaggggtcagagtcttgtggaaggagagctggagagccagggagaatasaggacttttcttcaccttgggttgaggcagaactcatgaaaaacaatgaagcaaggaataatttcgttttgcacccgtttttttcgtttatggaccccat

SEQ ID NO: 35290 - DNA, 201 bp, Homo sapiens
tcaacatgagttttagtggggacaaaccatatccaaaccgtagcagatgtttagcagcatctctggcctctacccactggaagccagtagcaaataccaaytaccaatcctgacctagccaggataatcaaagacatctctagatattgtaatgccctgcccaggggggcaaaatgccccagcttagaaacgttgctctaa

SEQ ID NO: 35291 - DNA, 201 bp, Homo sapiens
tttttttttattattttctgaggcagagtctcattccgtcaccaaggttggagtgcaagtagtgtgatctcggcttactgcaacctccgcctcctgggttsaagcaattctcatgcctcagcctcccaagtagctggaattacaggcatgcgaccatacgcagagctaatttttgtatttttagtagagttggggtttccc

SEQ ID NO: 35292 - DNA, 201 bp, Homo sapiens
gaggtcaagcccttcccttcactgctcctgccttttggcaccatctgctggccatttcgaaattgttacctcctcattgcgccctttaagaaaaacatacrtatcatttgtatggaagtacctaactgctctcaaaagtgagcatttgttggtttggggacagggatggaattgctttagcataaatgccgcacttcccct

SEQ ID NO: 35293 - DNA, 201 bp, Homo sapiens
gtaattgaaaactaattactgagtactctgcaggccaaaggacacaattgcagttcagagggggcctatcggctcccaagttcgttcttacctggggctcstggaggtcaagcccttcccttcactgctcctgccttttggcaccatctgctggccatttcgaaattgttacctcctcattgcgccctttaagaaaaacat

SEQ ID NO: 35294 - DNA, 201 bp, Homo sapiens
gttgcgttatcaacaccaataatggtccagttctgtaacgggttagctatgactgcaaaatcaccatttgtctttacagcactcttttatctcgtcacttrtctttccttttaaatgacatttgttttatgtggtagctcattttgagtcatgaattgcaacatatggaaccactaaccaagaaatagtcttgcacctttc

SEQ ID NO: 35295 - DNA, 201 bp, Homo sapiens
gggaggctgagacttgagaatcacttgaatgtggaaggcagaggttgcatgagccaggatagcaccattgcactccagcctgggcaatagaccaagactaygtctcaaaaaaaacaagataaatgtatccaggatcctggagcagccatggggatgcaacctcctgagccctttcctctaataggaaaaaggcttccaatc

SEQ ID NO: 35296 - DNA, 201 bp, Homo sapiens
tttccattgttaaggagtatataaactctacgggaatcagggtaagtgacccttcaggtcacgaatcttggtcaacaaatcccataaatctgccaaagcaraataagctgtctcctgggtaataaggaggtagagatgtgcatctctgcatgagaccacatatttgctctgtgcaccttctcccacctccctgccctggct

SEQ ID NO: 35297 - DNA, 201 bp, Homo sapiens
gtgatgtatttagaactatgagtttagaatagaagatgaattcataaggaaaaaaagccatcatggtgatttgttacgaaaaacatctgcatttcattcaratactgtgatccatccgttccttgctcttttccattgttaaggagtatataaactctacgggaatcagggtaagtgacccttcaggtcacgaatcttggt

SEQ ID NO: 35298 - DNA, 201 bp, Homo sapiens
tttcaccgtgttagccaggatggtctcgatctcctgacctcgtgatccacctgcctcggcctcccaaagtgctgggattacagtcttgagccaccgcgtcyggcctacaaccacttctttaagctgtgcgtacttttacgcaggaagagactctagggcatttgtttttggagaagagccgaaaggagaggggccacgggg

SEQ ID NO: 35299 - DNA, 201 bp, Homo sapiens
ccacgcccggctaattttttctatgttttagtagagacggggtttcaccgtgttagccaggatggtctcgatctcctgacctcgtgatccacctgcctcgrcctcccaaagtgctgggattacagtcttgagccaccgcgtctggcctacaaccacttctttaagctgtgcgtacttttacgcaggaagagactctagggc

SEQ ID NO: 35300 - DNA, 201 bp, Homo sapiens
ccctgtagtcccagctactcaggaggctgaggcaggagaatggcgtgaacccaggaggcagagcttgcagtgaactgagatagcgccgctgcactccagcytgggcgacagagcgagactgtctcgaaaaaaaaataataataataaaataataaaataaacccattgttcatctaagaacctacccatgtctttcgggag

SEQ ID NO: 35301 - DNA, 201 bp, Homo sapiens
agttcgagaccagcctggccaacatggtgaaaccccatctctacttaaaatacaaaaaattagctgggtgtggaggtggacacctctattctcagctactygggaggctgaggcaggaggatcgcttgaacccaggaggtggaggttgcagtgagccgagattgcgccactgcactccagcctgggcaacaagagcaaaac

SEQ ID NO: 35302 - DNA, 201 bp, Homo sapiens
tgaacatccatctggttgttttttttttttttttttttgagtctcactctgtcacccaggctggagtgcagtggtgcaatctcggctcactgcaacttccrcctcccgggctcaagtgattctcctgcctcagcctcccgagtagctgggattaccagtgcccaccaccgcgcccagctaatttttgtatttttagtagag

SEQ ID NO: 35303 - DNA, 201 bp, Homo sapiens
agttcttacaaatcttacaaaatgtaaaacctggaagagcaaatcctctggtgttccttagatctttactactatctctctctttttgttttttttttttktttttttttttgtttttgaaatggggtcttgctctgccacccaggctggagtgtagtggtatgatcttagctcactataacttccaactactgggctcaa

SEQ ID NO: 35304 - DNA, 201 bp, Homo sapiens
tttttttttttttttttttttttttttttttgagacgtagtctcgctttgtcccccaggctggagtgcagtggcgcgatctcggctcactgcaagctccgyctcccgggttcacgccattctcctgcctcagcctcccgagtagctggaactacaggcgcccgccaccacgcccggctaattttttctatgttttagtaga

SEQ ID NO: 35305 - DNA, 201 bp, Homo sapiens
agtataaaccagaggttctcatttaggggcaattttgctcccccttccccagggacattggacaatgtctgggtctggagacattctggtttgtcacaagmtggggtaggcaaggtttctactggcatccagtagatgaaggccaggggcgctgctaaacatcgtaccgtgcagtttccccacaccacagcgaagaattac

SEQ ID NO: 35306 - DNA, 201 bp, Homo sapiens
gctcttcctaccttccttttcctaggggctccgtgaagacctagagaatgtagaaccatagaaacagcatggcttcctctctcacacacacaatccaagtytagagccttccactgcaactatagtcaatctataaccacttctttttttttttttttttttttttttttttttttttttgagacgtagtctcgctttgtc

SEQ ID NO: 35307 - DNA, 201 bp, Homo sapiens
tgtattttcacgcgggatgtccttctgcagagggggatggttttagataatgactgttgtgctttttggggataccacctgcagagatgtgtttattttgrgtgtttatagattgcagaaagctggtgaaaccaccttgagagaggtgatcctttgattgaatgtttttttcatccaacaccaaaaaattacaggccatga

SEQ ID NO: 35308 - DNA, 201 bp, Homo sapiens
acataagcactctatattaggtctcagaattttaaaattagttttctctattataaaattgcagatattcagtatgcagattttagaaatacaaaaaattkgccaagtgcggtggttcacgcctgtaatcctagctcttagggaggcagaggcaggaggatagcttgagcccaggtgttcgagacctgcctgggcaatacg

SEQ ID NO: 35309 - DNA, 201 bp, Homo sapiens
taggagcatggcttgagcctggcgggtcaaggctgcacgatcacaccactgcaccccagcctgggtaacagagcaaaaccctgttaaaaaaaaaaaaaaaactaaaaatatctatatacatatatatccttttaataatggtagtgtaaattttccttccataaggtataaagtaggttaactgattggatggctagatct

SEQ ID NO: 35310 - DNA, 201 bp, Homo sapiens
gtaggagcatggcttgagcctggcgggtcaaggctgcacgatcacaccactgcaccccagcctgggtaacagagcaaaaccctgttaaaaaaaaaaaaaaaactaaaaatatctatatacatatatatccttttaataatggtagtgtaaattttccttccataaggtataaagtaggttaactgattggatggctagatc

SEQ ID NO: 35311 - DNA, 201 bp, Homo sapiens
ggtaggagcatggcttgagcctggcgggtcaaggctgcacgatcacaccactgcaccccagcctgggtaacagagcaaaaccctgttaaaaaaaaaaaaaaaactaaaaatatctatatacatatatatccttttaataatggtagtgtaaattttccttccataaggtataaagtaggttaactgattggatggctagat

SEQ ID NO: 35312 - DNA, 201 bp, Homo sapiens
ggtcaggggcctgtgggaactttttgtcatctggggggacaaaggctttcttgggaaaaaaaagtctcctttttatcctctgcgggtgaaaaagaagtgcygttagaataggaaggggcttcttgtaggcttgaaaagagaaggacttggcaggtggcacctgggctttgttcagcagaactgagagggcaagagtatagc

SEQ ID NO: 35313 - DNA, 201 bp, Homo sapiens
cactccagcctgggcaacaagagtgaaactccatctcaaaaaaaacaaacaagcaaaaaaatgatgccttttagcaaaatagtgactgactggcttttaakaccacaataaaaagacattagcaaaagtggtgtgagagcatgatcatgagtcctgtagagaaagtaaccaaaagtgatacatttctatgtggttccctcc

SEQ ID NO: 35314 - DNA, 201 bp, Homo sapiens
ggtcaggagttcgagacctgcctgatgatcatggagaaaccccatctctactaaaaattcaaaattagccgggtgtggtggtgtggtgggcacctgtaatsccagctacttgggaggctgaggcagaagaatcgtttgaacccgggaggcagaggttgcagtgaactgagatcgtgccattgcactccagcctgggcaaca

SEQ ID NO: 35315 - DNA, 201 bp, Homo sapiens
taatgaccgagcagctatgtaagtgaatcaatgatgtgaccacattgctttttcttagccgatagttacagctctatgcaactttttctacttattgctgkaggtaatcacattccaaccctgaggactgctcccatgctgggcggtactgcagtgacctctgcatttgagctggggtttcttgtatctcacgagggtcag

SEQ ID NO: 35316 - DNA, 201 bp, Homo sapiens
cttagacccatttaattatctactcattttcccctcacaaccctgtcatcactcattcccgcccccttcaaaggcaggagctctgtgggattggacacagrgactgaagttgagcaaatcatcttgatagcacgtggctttgctgtgtgtggttaatcaaccgatatgaacagtgctgacctgtagccctgccacatcccc

SEQ ID NO: 35317 - DNA, 201 bp, Homo sapiens
ttatttgtctattcagtgaatatttggataccaactctgctgttctgggcatgatgttagccactggggagacagaaggaatgaaagagatgagtaacctratgtgtgctgtctagtggggactgcaaataaagtgggtgttaccactagcgtgctctacagtgttatgctagagagaaatttacttcctttggccactca

SEQ ID NO: 35318 - DNA, 201 bp, Homo sapiens
ctgaggcaggtgcatcacctgaagtcaggagtttgagaccaccctagccaacgtggcaaaaccccatctctactaaaaatacaaaaattagctgggcatgrtggtacatgcctgtaatcccagctacttgggaggttgaggcaggagaattgcttgaacccaggaggcagaggttgaagtgagccaagatggcaccactgc

SEQ ID NO: 35319 - DNA, 201 bp, Homo sapiens
ataactacagaaaagcaaacaacttgagtttctattatgatttttgaggcatggtagacttagcagaaccttctgtgtacaggaggaagcccacatggcarctggcagcttgtgtctgctgttaatcatttcacatcactttctcattttatgaggattcaatgttactatgttggtaacttttaggggtgagatggatcc

SEQ ID NO: 35320 - DNA, 201 bp, Homo sapiens
gtaactgctcctaaaggatatttacaatcataaacacagtagaatttgcataattatgctgctaaatatacacatgccattttaaatataactgccctagmtagtatattagcacaattatgcagaaataggggaagaaagaggacagcattcttggtagacttcatttttttaaatgcatctgagtactatgtcaaagaa

SEQ ID NO: 35321 - DNA, 201 bp, Homo sapiens
gtatatgccaggtggtaataaatgctaggaagaaaaaataaaggagggttagaatggtgaaggtggtggctattatttatatgtaatgaaacttgggcaamttctccatctcgctggacctcaaagttcccatatgttgattcaatgatctttgccaattcttaggttataaggttccactaatcttggtgtgaatttcca

SEQ ID NO: 35322 - DNA, 201 bp, Homo sapiens; identical to SEQ ID NO: 5554

SEQ ID NO: 35323 - DNA, 201 bp, Homo sapiens
gcgaatgtgcttactcacggcgttagttacacaggtgatttccttaagaaaaagtaagtggctttaattctttgagggtgaaagagtgtcttaagattccwtttcagttttctctgcttacttcattgtgtggtctgattgagtggtatgtttacaaattctagacttggaagggtggggtttgaaatacaacaaactgta

SEQ ID NO: 35324 - DNA, 201 bp, Homo sapiens
actcctgacctcaagtgatccgcccacctcggcctcccaaagtgctgggattacaggtgcaagccaccatgcctggccagtgattatgcgtcttgtaaacraatttttggggtctaacttttccaaaatttctatctggttttctttcttcccttctaagagtctgtatcttcttccctgccctgggctttattcttttct

SEQ ID NO: 35325 - DNA, 201 bp, Homo sapiens
tttaatattttgttttcatagctggggattactctattggcattcagggagagagaatgaaaaaatatactaggataaaaaagggagtactaattaaaacyacaaaagcaatgcaaacatacattaaaagatacaacaaattccatgccagtttcgtgaagaaatgctttgaggtttttttccccccagctttattgagta

SEQ ID NO: 35326 - DNA, 201 bp, Homo sapiens
aatggacatggtttcttgtggttttaccctttgttgcttttttttggagccagggtctcactctgtcacccaggctggagcgcaatggtgtgatcttggckcactgtagcctctcaacctctcaggctcaagtgatcctcccacctcagcctcccaagtagctgggaacacaggcatgcaccagcatgcccagctaagttt

SEQ ID NO: 35327 - DNA, 201 bp, Homo sapiens
caggaggtaaggctgcaatgagccatgatcatgtcatgcctctgcaccccagccagggcaacagaataagaccctgtctcaaaaaaaaaaaaaaaaaaaaagagagattgagatctgagatctcatatttttgtagcaggttacactgagtgttaatggatgcatgatgttaacttactgattttgtttgtgaagaacata

SEQ ID NO: 35328 - DNA, 201 bp, Homo sapiens
agattaattgttgggattatacccatggaaaaagccataaggcttacatcacaagttttattttttttaatattttgttttcatagctggggattactctrttggcattcagggagagagaatgaaaaaatatactaggataaaaaagggagtactaattaaaactacaaaagcaatgcaaacatacattaaaagatacaa

SEQ ID NO: 35329 - DNA, 201 bp, Homo sapiens
gcttgtctggttcattagcaggtactctggggcctttggagattgaactccacctctcttgggtgagcttggcgcttgctaaagagcatttaactcatccygattcaccgcaggattgggctggctttcaaactcctgacagtgaattactgctcttgtaatgacgaatccatgcatgcatgctacagacagtgccctgga

SEQ ID NO: 35330 - DNA, 201 bp, Homo sapiens
cttttgtccatctgatgatgtctcaacaaagccattttagaatctgaagatacttcctcattaaattgttactattgttaataaccgagtgttggcttagygagtgttaaggtatataagagtagtccaaataaatggcatagaaataaatgacagtgattaatcactcactagtctgatacctcatagcttccttacttc

SEQ ID NO: 35331 - DNA, 201 bp, Homo sapiens
taaaaaaagtgaaaagaaagaaaacaatgttaacacctggaccaaaatgctagttccgggactccccatttggtgttcttcccccatcaccctgctgtgcygactgcggagaaacatacctgggggctttcagagccactggcctggccccaaaactagcaggtgttctcatgttctctgccacagacttcaactaaaccc

SEQ ID NO: 35332 - DNA, 201 bp, Homo sapiens
tttcctttttaaggcttaataatattctggccgggcaccgtggctcacacctgtaatcccagcactttgggaggccgaggtgtgggcggatcaccaggtcyggagatcgagaccatcctggctaacacagtgaaacactgtctctactaaaaaacaaaatacaaaaatatttgctgggcatggtggcgggcacctgcagtc

SEQ ID NO: 35333 - DNA, 201 bp, Homo sapiens
aaaccccttacaggagggggagcatgcagatgggcaggtgcaggagccggggcaagtgcttttggactctggccccacagtagcatctaggggtgggtgcytgcaactctcaaagctgcagtgggcatgttaccatgctcttttagctctgccatctgcacacagcttaagtgttaaccagctcagtgccctcttggtatc

SEQ ID NO: 35334 - DNA, 201 bp, Homo sapiens
atgttacccaggctggtctgaaactcctgaggcaagcaatcctctagtctcggactcccaaatggttgggattataggcgtgggccaccacacctggctcmaaagcatctttattgtcattttggtgtcatgtatacagtagaaagaactcatttgatctgttccaaccaaacaacctggaaaacaggacttagatcaaca

SEQ ID NO: 35335 - DNA, 201 bp, Homo sapiens
aaaactgaaactctatccattcaacaacagctctccatccccgccatcctcccagcccctggcaaccaccattctactttctgtctctgtgagcttgactrttctagacaactcgtttaggtaaaatcataaacctactgaaagtgtttgggtttttctatgtgactggtttatttcacttagcacaatgtcctcaaggtt

SEQ ID NO: 35336 - DNA, 201 bp, Homo sapiens
actatcggcaactttacgattttttaaattgtagtaaaatacacataacgtaaaattaccatcttaaccattttaaagcgtacagttccgtggtgttaagyatattcacattgttatgcaaccaatcttcagaactttttcatcttgtaaaactgaaactctatccattcaacaacagctctccatccccgccatcctccc

SEQ ID NO: 35337 - DNA, 201 bp, Homo sapiens
ttaacaccagaattagtgttcacgatgacattgtatcatccaaaaagaattaattttgcccttataataagcttaacaagattgaatataaacaaaatttwaaataaataagataatgttaaaaatagcatctagaaggatatttttaaatgtcttatctggaaatctcacttctgggacagcgttcaataaatctactgt

SEQ ID NO: 35338 - DNA, 201 bp, Homo sapiens
tgtgcgtgtgtgtgtgtgtctttattagtaacatggatccagcctttactccagaacagtgtgtgcatgcgtgtgtgtgtgtgcgtgtctttattagtaayatggatccagcctctactccagaagagtgtgtgcgtgtgtgtgtgtgtgtgtgtgtgtctttattagtaacatggatccagcctctactccaggtacctg

SEQ ID NO: 35339 - DNA, 201 bp, Homo sapiens
aactttcacactttatgcaaatatttctccagttgttaaagtttgcatgtatttttcccatagaaatttaaaattttcatgcaatcaacctcagaaatctytcctctcatatttctgcctctggaattgtatttttagaaagaacttccctgtcctaatattacatattaagcattgtttgtgttctatactagtgctctt

SEQ ID NO: 35340 - DNA, 201 bp, Homo sapiens
gtggcccacgcctgtaatcccagcactttgggaggccgaggcaggtggatcacctgaggtcaggagtccgagactagcctggataacatggtgaaacctcrtctctactaaaaatacaaaattaactgggtgttgtggtgtgcacctgtagtcccagctactcgggaggctgagacaggaaaatcgcttgcacccaggagg

SEQ ID NO: 35341 - DNA, 201 bp, Homo sapiens
tgtgctgctgacgagggtgcgggagaccttggtgggtggtggtagcagaagtggcctccctagaaagtatgtccagcaagaagagaagtggacccagggamacaacatatcaggatttaaaaggttggcagaggaaggagttagaaaagagattgaccaagacggagcagcagaaagggaagaagatcatggaaagtttca

SEQ ID NO: 35342 - DNA, 201 bp, Homo sapiens
agatcatttaacacacaaaaccctataaggaagatgtcgttacccatattttacatgaaaagaaacagaagctcagggaggttaggttagttttccaaagsgacacagctattaagagtgacagccaggctgggcatggtggctcatgcctgtaatctcaggaccttggaaggctgaagtgggaggactgcttgaggctag

SEQ ID NO: 35343 - DNA, 201 bp, Homo sapiens
aggtacagtttttattctcatgttccagagaagaaaactgaatgcacatccacacacgtgacacacatcatcatagtccaaatgcctcccatttgaactcmttttatgttaagatgcctcagtccctttaaagatatataggttgtttcatttctttgttctaaaaactcttgtcaatttcttttcaaatgtggggaaagg

SEQ ID NO: 35344 - DNA, 201 bp, Homo sapiens
cgaatcttgacctgagctaaggatgtgcggctcttcatgttcctgagccaggttgggtgaacttccacggccttctaggtggtaccttttataaccctcargtggtgcattcacccggacaaactggtctgaaagtcaataaagctttaacaaacaattctcttgttttacagagagaggatgcaagccatggagaaacag

SEQ ID NO: 35345 - DNA, 201 bp, Homo sapiens
aaccctcgaggcagaggttgcagtgagccgagatcgcgccattgcactccagcctgggcgacaagagcaaaactccgtctcaaaaaaaaggaaaaaatgcmgggcgcggtggctcatgcttgtagtcccagcactttgggagcccgaggcaggcagatcacaaagtcaggagatcgagaccattctgactaacacggtgaa

SEQ ID NO: 35346 - DNA, 201 bp, Homo sapiens
cctatgacattagatctaacatcatctaccttcaaataaatgggttgttttgttttgttttgagacagagtctcactcttttgcccagtctgtagttcackggtgcaatcttggtagcagagacagggtttcaccatgttggccaagctggtctcaaactcctgacctcaggtgatctgcccacctcggcttcccaaagtg

SEQ ID NO: 35347 - DNA, 201 bp, Homo sapiens
ggtacctaccatgtgccacacgctgcttgtagctgtgaacaaaatggcatgctccctgccttgatagaagaacaacttggggtggtggggaaattgatgarttgaattcagaagacctggttctaatcctaactgtgctctctaattgccgagcacaccctgagcatgtcctttgacttctcagggcctcacttttcccac

SEQ ID NO: 35348 - DNA, 201 bp, Homo sapiens
ctgcggatagagtccctgtgggacgaatgaggacactgggcaactttcacctggggctgagcattcttccgaggaagtcattcatttcccaagagtgtgtrcaagtctgtgccccccatgtggcaggaagagtgaccaaccaccactcccattttttctgagatgctactgtgacttgggtcaataagcttgacattgctg

SEQ ID NO: 35349 - DNA, 201 bp, Homo sapiens
tttgttttatacacttctaagcttttctctatgcaaacctgtgtgtttaaaaaagctctacttccaggggttaagaaaagaaaaaaaaattaaaaaaaaamataaacaaaattgatcaattgatagaacaatcagtggatagatagataggagcataggcagctctgtggcctgtcttcctatggcactttcttactaaac

SEQ ID NO: 35350 - DNA, 201 bp, Homo sapiens
caacaactccatgaaacaggaagaacggccactagcattcattttgcttttaccaggcaccaggtagcgctgtaaactctttatgtgtgtaattcatttcwtcttcacaacaactcgatgaggtaagtgctattatctgcagtttgcagagaaggaaaccgaagctggtggagtaacatgcctaaggccaccctgccagga

SEQ ID NO: 35351 - DNA, 201 bp, Homo sapiens
catgtgccaccacacccagctaatttttgtatttttagtagagacgggatttcaccatgttggccaggctggtctcgaactcttgacctcaagtgatccayctgccttggcctcccaaagcactgggattacagatgtgagccactgcgcccagcctgttttgaattttaatgctgatgctctcctttgttggacgatgta

SEQ ID NO: 35352 - DNA, 201 bp, Homo sapiens
cgcgcacgcgcgcgcgcacacacacacacacacacacacacacacgggcttccatgttcttacaaatgttgcacactatatctgactgtgggatcacagtrtacgtttgtataccaaagtctctgtaaagacctgcaatgaagtgaacccctttaacctttcttttactcagtgttcccctattgtatttgactgtggaac

SEQ ID NO: 35353 - DNA, 201 bp, Homo sapiens
tagctgggattacagtcatgtgccaccacacccagctaatttttgtatttttagtagagacgggatttcaccatgttggccaggctggtctcgaactcttkacctcaagtgatccacctgccttggcctcccaaagcactgggattacagatgtgagccactgcgcccagcctgttttgaattttaatgctgatgctctcc

SEQ ID NO: 35354 - DNA, 201 bp, Homo sapiens
atgatgggggatgtgatatggtatgaggatggggtctttcaaactgtattgtgtagaccagtagaccatgacaaataggcgcgcgcacgcgcgcgcgcacrcacacacacacacacacacacacacgggcttccatgttcttacaaatgttgcacactatatctgactgtgggatcacagtgtacgtttgtataccaaagt

SEQ ID NO: 35355 - DNA, 201 bp, Homo sapiens
gagctcggtgagttgaggctgcagtgagctatgatcatgccactgtattccagcctgggaacagagtgagaacctgtcaaaaaaaaaaaaaaaaaaaaaaaggttctataaatggagtcattggctaaaaatcatcccctaaacacagattcttttttttccttttctgtgttccaaaggcagaacagaccaccagcggta

SEQ ID NO: 35356 - DNA, 201 bp, Homo sapiens
caatatgatgggggatgtgatatggtatgaggatggggtctttcaaactgtattgtgtagaccagtagaccatgacaaataggcgcgcgcacgcgcgcgcrcacacacacacacacacacacacacacacgggcttccatgttcttacaaatgttgcacactatatctgactgtgggatcacagtgtacgtttgtatacca

SEQ ID NO: 35357 - DNA, 201 bp, Homo sapiens
gcctgtaatcccagctacttgggaggctgaggtcggaggatcacttgaacccaggaggcggaggttgcagtgagctgagatcacaccactgcactgcagcytgggtgacagagcaagactctgtcaaaaaaaaaaaaaaaaaggaaggaaggaagggagggagggagggagggaaggagggagagagagaggaagggtgag

SEQ ID NO: 35358 - DNA, 201 bp, Homo sapiens
tatagcctaagataattgagtgcaataaaccaatttaacttatttgttcttacgtgtaacaattgttgagtaggtaccatggtacccactctattgctaakctgtggaaggagccttgctttggaattctctcagctcctctttcccatcatttccttagctgtgtcccttttcagcctcctgtgctaactgatagcacat

SEQ ID NO: 35359 - DNA, 201 bp, Homo sapiens
gtggcatgatcatgtctcagtgcagcctcgaccttctgggctcaaatgatcctcccacctctgccttccgagtagctggcactaccggcacatgccaccayatctggctaatttttaatcttttgtagagacagaatctccctatgttacccaggctggtctgaaactcctgaggcaagcaatcctctagtctcggactcc

SEQ ID NO: 35360 - DNA, 201 bp, Homo sapiens
attggttgggcttatttcacccagtcagatgatttcactatctggttttctacaattcatttacagggtatagcttataaaaacgaggacaaatttctccsccacagatttttgaatgctacatctgaaaagaacattagaaatgattcagtccaccattttatctaagggttagggaaactaaggcccaaaaaggtagcg

SEQ ID NO: 35361 - DNA, 201 bp, Homo sapiens
ttttgggaagccaaggtaggaagatcatttgagaccaggagttcaagattagcctgggcaatatagtgagaatcccatttttctacaaagaaatttaaaawtttgcctatagtttcagctagttgggaggctgaagtgggatcacttgagcccaggaggtaaggctgcaatgagccatgatcatgtcatgcctctgcaccc

SEQ ID NO: 35362 - DNA, 201 bp, Homo sapiens
tattatgaattaaatgatgtaaggtaagttgtgacatcattttttgcctgccattttgccttagagttttttttgttttttgtttttttgtttttgagggktttttttttacccactatattgcatttagagtgtttttttgttttttgttttttgttttttgttttttgtttggtccatcatatccctttcatagagttt

SEQ ID NO: 35363 - DNA, 201 bp, Homo sapiens
ggtgagtgctaggaggcagggtgcactggggcccacataccccctgggaactctgggatcctgtgctttttccattttatttctgaaacattgaggtgccrgattctagcacgatatgaacattcaataaatatgtattagaaccacagaaatcttgttgcatttccactgaaaatgtttctgaatggactagacagattt

SEQ ID NO: 35364 - DNA, 201 bp, Homo sapiens
ttatcattctgcaatttggacagtgcttggaggggccatctcatttctgctggcatcagctggggtagctcacctggggctggggagaccactcccaagayggctcatccacataacctcagtggttccagctgtaaaatgggcgcttagatggggtggttcttcagcatgtgacctcccgtgtggctgggttggactcct

SEQ ID NO: 35365 - DNA, 201 bp, Homo sapiens
ctagaggcattccacagtggtatatgataggattcccttttccatgtcttctatgtacaggcaaagtcgtgattaaatccttcattgggatggaaatcagkaggtcagttggaagattgtcaagccaagatgattctttctcttccggtcctaaaaaaaaaaagacctcatgaattgtttttatttaaattggatgttttg

SEQ ID NO: 35366 - DNA, 201 bp, Homo sapiens
tccaaatgctccccctttttctggactgtttgttctcttccgagtttctttttcctgtttctttgggtgttttcatttgtgttagaagcttctataaaaaygtttgtgacatcttgggagtcagttaatgtaagagggaggcacggttgtaattttgggaagttttatatgtgggtctggctgcttcgctatggggtgacc

SEQ ID NO: 35367 - DNA, 201 bp, Homo sapiens
gggcgaggttactaggctggttacatcatctagcaaaagctcttatagctcagatagacccacaaatgagacattccttttcaatgactaataaatcattygtttattcattcaacaaatatttattgagaaactactatgtaacaggtagtctcataggtactaaggatacagtagaaaacaacaacaaacttaaaaaaa

SEQ ID NO: 35368 - DNA, 201 bp, Homo sapiens
gactgctctagtcaaggaaacagccacttcagaatgtgtctctactgtggatacaaaccaagggcgaggttactaggctggttacatcatctagcaaaagytcttatagctcagatagacccacaaatgagacattccttttcaatgactaataaatcattcgtttattcattcaacaaatatttattgagaaactactat

SEQ ID NO: 35369 - DNA, 201 bp, Homo sapiens
ggttgaggtaaagacgggaatcttttttctgagctgcacccagcacgcttcaacatcttcaagcagatggtcagcctaaaagtgtgaggatagctcaggtygccctgagaggatgcttgcaggagatggacagagctaaatgcaggatttcaggagaagtatgcttcaagaaagagagcatggcatctatgaatttggcag

SEQ ID NO: 35370 - DNA, 201 bp, Homo sapiens
caggagttcgagaccagcctggccaatgtggtgaaaccccgtctctactaaaaatacaaaaaaaaaaaaaaaaaaaaaaaaaagccaggcgtggtggcacrtgcctgtaatcccagctactcaggatgctgaagcgggacaattgcttgaaccctcgaggcagaggttgcagtgagccgagatcgcgccattgcactccag

SEQ ID NO: 35371 - DNA, 201 bp, Homo sapiens
atactcaagaaatgtctgtgtctgacctaaaacttgtttgaaataggttttcttttcacataatgtaaacgtatttgctttttcctcattctagaagcaawacatgttccttttcaaatattgtcaatttgaggcattttaagattatttcctttatttgttttttttgtgggctaggaaatctagacagaattgattatt

SEQ ID NO: 35372 - DNA, 201 bp, Homo sapiens
tgggttcaagtgattttcctgcctcagcctcctgagtagctgggattacaggtgcctgccaccatgcccggctaattttttgtatttttagtagagacaargtttcactatgttggccaggcaggtcttgaactcctgactgcgtgatctacccgccttggcctcccaaaatgctgggattccaggcatgagccaccgcgc

SEQ ID NO: 35373 - DNA, 201 bp, Homo sapiens
gtggtgcaatctctgctcactgcaacttctgcctcctgggttcaagtgattctcctgcctcagcctcccaagtagctgggattacagtcatgtgccaccayacccagctaatttttgtatttttagtagagacgggatttcaccatgttggccaggctggtctcgaactcttgacctcaagtgatccacctgccttggcct

SEQ ID NO: 35374 - DNA, 201 bp, Homo sapiens
cttttcttttcttttcttttcttttcttttcttttcttttcttttcttttttttttttgagacgagtctcatactgtcgcccaggctggagtacagtggcrcaatctccactcactgcaaactctgcctcctgggttcaagtgattttcctgcctcagcctcctgagtagctgggattacaggtgcctgccaccatgcccg

SEQ ID NO: 35375 - DNA, 201 bp, Homo sapiens
agtctcgctctgtctcccaggctggagtgcagtggtgcaatctctgctcactgcaacttctgcctcctgggttcaagtgattctcctgcctcagcctcccragtagctgggattacagtcatgtgccaccacacccagctaatttttgtatttttagtagagacgggatttcaccatgttggccaggctggtctcgaactc

SEQ ID NO: 35376 - DNA, 201 bp, Homo sapiens
agcgtgattactttgggaagccaaggtgggcgaattacctgcggtcaggagttcgagaccagcctggccaatgtggtgaaaccccgtctctactaaaaatmcaaaaaaaaaaaaaaaaaaaaaaaaaagccaggcgtggtggcacatgcctgtaatcccagctactcaggatgctgaagcgggacaattgcttgaaccctc

SEQ ID NO: 35377 - DNA, 201 bp, Homo sapiens
tgacattctatagttctaacctcgaggatgaatcagtagaggagcagcaatgttgtttatccagaatgattcaggtgctttgtttcttttttttttttccyttttttttttttttttttttgagacagagtctcgctctgtctcccaggctggagtgcagtggtgcaatctctgctcactgcaacttctgcctcctgggtt

SEQ ID NO: 35378 - DNA, 201 bp, Homo sapiens
cacgcctgtaatcccagcgtgattactttgggaagccaaggtgggcgaattacctgcggtcaggagttcgagaccagcctggccaatgtggtgaaaccccrtctctactaaaaatacaaaaaaaaaaaaaaaaaaaaaaaaaagccaggcgtggtggcacatgcctgtaatcccagctactcaggatgctgaagcgggaca

SEQ ID NO: 35379 - DNA, 201 bp, Homo sapiens
tgtgacattctatagttctaacctcgaggatgaatcagtagaggagcagcaatgttgtttatccagaatgattcaggtgctttgtttcttttttttttttyctttttttttttttttttttttgagacagagtctcgctctgtctcccaggctggagtgcagtggtgcaatctctgctcactgcaacttctgcctcctggg

SEQ ID NO: 35380 - DNA, 201 bp, Homo sapiens
cgatctcgcttgagtccaggagatcaagaccagcctgggcaacatggtgaaaccccatctctactaaaaatacaaaagaattagccaggcgtggtggtgcrtgcctgtggtgccagctacttggggggctgaggtgaaaggatctcttgagctcggtgagttgaggctgcagtgagctatgatcatgccactgtattccag

SEQ ID NO: 35381 - DNA, 201 bp, Homo sapiens
aacagagtgagaccttgtctcaaaaaaaaaaaaagttctataaatggagtcactggctaaaaatcatcccctaactggttaggaaggttaatgcttcagaytagggactaatcacatcagctcggctagctggtttcagccatcttctgtaatatgtcttctggaaacttaagaacaaatcctttgggattcttaataggg

SEQ ID NO: 35382 - DNA, 201 bp, Homo sapiens
caggcatgccattcattgtggaggcaaaactcccgcatagctgccaaaataactgctgagtgctttgcgatggagagaaacaaaggaatgttgggtcactrcccgagtcatggggtctctgcctgagccatagaaagcttttgatttctggagccacattgaatgaactgattatgtttaaaattataaaagaaaaatata

SEQ ID NO: 35383 - DNA, 201 bp, Homo sapiens
agcttcatttttgcctgtttttttacaggtatccttaaatgtgtctgtcttcctgcactgtaagtgaaatgcagaacattttagatgagcccctttgttargttacagactctttcctgacttgggaaaagtgcctaatgagaaggtttcccccaactctgtctccttgaagattaccagaaggagaggacataggaagaa
